United States Patent Application Publication US 2018/0305689 A1 - sequence listing, part 75

SEQ ID NO: 1065472 - RNA, 19 nt, Artificial Sequence
  Description of Artificial Sequence: Synthetic oligonucleotide
  Sense strand starting at position 3543 of SEQ ID NO: 915247
uuaggcuuugugcaaagau

SEQ ID NO: 1065473 - RNA, 19 nt, Artificial Sequence
  Description of Artificial Sequence: Synthetic oligonucleotide
  Antisense strand to SEQ ID NO: 1065472
aucuuugcacaaagccuaa

SEQ ID NO: 1065474 - RNA, 19 nt, Artificial Sequence
  Description of Artificial Sequence: Synthetic oligonucleotide
  Sense strand starting at position 3671 of SEQ ID NO: 915247
aauaguuacucugugacug

SEQ ID NO: 1065475 - RNA, 19 nt, Artificial Sequence
  Description of Artificial Sequence: Synthetic oligonucleotide
  Antisense strand to SEQ ID NO: 1065474
cagucacagaguaacuauu

SEQ ID NO: 1065476 - RNA, 19 nt, Artificial Sequence
  Description of Artificial Sequence: Synthetic oligonucleotide
  Sense strand starting at position 3672 of SEQ ID NO: 915247
auaguuacucugugacuga

SEQ ID NO: 1065477 - RNA, 19 nt, Artificial Sequence
  Description of Artificial Sequence: Synthetic oligonucleotide
  Antisense strand to SEQ ID NO: 1065476
ucagucacagaguaacuau

SEQ ID NO: 1065478 - RNA, 19 nt, Artificial Sequence
  Description of Artificial Sequence: Synthetic oligonucleotide
  Sense strand starting at position 3675 of SEQ ID NO: 915247
guuacucugugacugacau

SEQ ID NO: 1065479 - RNA, 19 nt, Artificial Sequence
  Description of Artificial Sequence: Synthetic oligonucleotide
  Antisense strand to SEQ ID NO: 1065478
augucagucacagaguaac

SEQ ID NO: 1065480 - RNA, 19 nt, Artificial Sequence
  Description of Artificial Sequence: Synthetic oligonucleotide
  Sense strand starting at position 3751 of SEQ ID NO: 915247
gauacuaucguauauguaa

SEQ ID NO: 1065481 - RNA, 19 nt, Artificial Sequence
  Description of Artificial Sequence: Synthetic oligonucleotide
  Antisense strand to SEQ ID NO: 1065480
uuacauauacgauaguauc

SEQ ID NO: 1065482 - RNA, 19 nt, Artificial Sequence
  Description of Artificial Sequence: Synthetic oligonucleotide
  Sense strand starting at position 3898 of SEQ ID NO: 915247
uuguacauguacuuauaga

SEQ ID NO: 1065483 - RNA, 19 nt, Artificial Sequence
  Description of Artificial Sequence: Synthetic oligonucleotide
  Antisense strand to SEQ ID NO: 1065482
ucuauaaguacauguacaa

SEQ ID NO: 1065484 - RNA, 19 nt, Artificial Sequence
  Description of Artificial Sequence: Synthetic oligonucleotide
  Sense strand starting at position 3906 of SEQ ID NO: 915247
guacuuauagauggcauaa

SEQ ID NO: 1065485 - RNA, 19 nt, Artificial Sequence
  Description of Artificial Sequence: Synthetic oligonucleotide
  Antisense strand to SEQ ID NO: 1065484
uuaugccaucuauaaguac

SEQ ID NO: 1065486 - RNA, 19 nt, Artificial Sequence
  Description of Artificial Sequence: Synthetic oligonucleotide
  Sense strand starting at position 3908 of SEQ ID NO: 915247
acuuauagauggcauaaca

SEQ ID NO: 1065487 - RNA, 19 nt, Artificial Sequence
  Description of Artificial Sequence: Synthetic oligonucleotide
  Antisense strand to SEQ ID NO: 1065486
uguuaugccaucuauaagu

SEQ ID NO: 1065488 - RNA, 19 nt, Artificial Sequence
  Description of Artificial Sequence: Synthetic oligonucleotide
  Sense strand starting at position 22 of SEQ ID NO: 915248
gggauuaugccucagcuag

SEQ ID NO: 1065489 - RNA, 19 nt, Artificial Sequence
  Description of Artificial Sequence: Synthetic oligonucleotide
  Antisense strand to SEQ ID NO: 1065488
cuagcugaggcauaauccc

SEQ ID NO: 1065490 - RNA, 19 nt, Artificial Sequence
  Description of Artificial Sequence: Synthetic oligonucleotide
  Sense strand starting at position 30 of SEQ ID NO: 915248
gccucagcuagugagacau

SEQ ID NO: 1065491 - RNA, 19 nt, Artificial Sequence
  Description of Artificial Sequence: Synthetic oligonucleotide
  Antisense strand to SEQ ID NO: 1065490
augucucacuagcugaggc

SEQ ID NO: 1065492 - RNA, 19 nt, Artificial Sequence
  Description of Artificial Sequence: Synthetic oligonucleotide
  Sense strand starting at position 260 of SEQ ID NO: 915248
uuucccuguggcuaauauu

SEQ ID NO: 1065493 - RNA, 19 nt, Artificial Sequence
  Description of Artificial Sequence: Synthetic oligonucleotide
  Antisense strand to SEQ ID NO: 1065492
aauauuagccacagggaaa

SEQ ID NO: 1065494 - RNA, 19 nt, Artificial Sequence
  Description of Artificial Sequence: Synthetic oligonucleotide
  Sense strand starting at position 300 of SEQ ID NO: 915248
ucuuuaguuccagacucuu

SEQ ID NO: 1065495 - RNA, 19 nt, Artificial Sequence
  Description of Artificial Sequence: Synthetic oligonucleotide
  Antisense strand to SEQ ID NO: 1065494
aagagucuggaacuaaaga

SEQ ID NO: 1065496 - RNA, 19 nt, Artificial Sequence
  Description of Artificial Sequence: Synthetic oligonucleotide
  Sense strand starting at position 516 of SEQ ID NO: 915248
uauugaguacgugagauau

SEQ ID NO: 1065497 - RNA, 19 nt, Artificial Sequence
  Description of Artificial Sequence: Synthetic oligonucleotide
  Antisense strand to SEQ ID NO: 1065496
auaucucacguacucaaua

SEQ ID NO: 1065498 - RNA, 19 nt, Artificial Sequence
  Description of Artificial Sequence: Synthetic oligonucleotide
  Sense strand starting at position 573 of SEQ ID NO: 915248
gagaauggguuauccuugu

SEQ ID NO: 1065499 - RNA, 19 nt, Artificial Sequence
  Description of Artificial Sequence: Synthetic oligonucleotide
  Antisense strand to SEQ ID NO: 1065498
acaaggauaacccauucuc

SEQ ID NO: 1065500 - RNA, 19 nt, Artificial Sequence
  Description of Artificial Sequence: Synthetic oligonucleotide
  Sense strand starting at position 579 of SEQ ID NO: 915248
ggguuauccuuguuaucaa

SEQ ID NO: 1065501 - RNA, 19 nt, Artificial Sequence
  Description of Artificial Sequence: Synthetic oligonucleotide
  Antisense strand to SEQ ID NO: 1065500
uugauaacaaggauaaccc

SEQ ID NO: 1065502 - RNA, 19 nt, Artificial Sequence
  Description of Artificial Sequence: Synthetic oligonucleotide
  Sense strand starting at position 598 of SEQ ID NO: 915248
gcauuuauccaucgaguua

SEQ ID NO: 1065503 - RNA, 19 nt, Artificial Sequence
  Description of Artificial Sequence: Synthetic oligonucleotide
  Antisense strand to SEQ ID NO: 1065502
uaacucgauggauaaaugc

SEQ ID NO: 1065504 - RNA, 19 nt, Artificial Sequence
  Description of Artificial Sequence: Synthetic oligonucleotide
  Sense strand starting at position 621 of SEQ ID NO: 915248
guuggugcaaaguaauuga

SEQ ID NO: 1065505 - RNA, 19 nt, Artificial Sequence
  Description of Artificial Sequence: Synthetic oligonucleotide
  Antisense strand to SEQ ID NO: 1065504
ucaauuacuuugcaccaac

SEQ ID NO: 1065506 - RNA, 19 nt, Artificial Sequence
  Description of Artificial Sequence: Synthetic oligonucleotide
  Sense strand starting at position 838 of SEQ ID NO: 915248
acaugucuaugucugaaua

SEQ ID NO: 1065507 - RNA, 19 nt, Artificial Sequence
  Description of Artificial Sequence: Synthetic oligonucleotide
  Antisense strand to SEQ ID NO: 1065506
uauucagacauagacaugu

SEQ ID NO: 1065508 - RNA, 19 nt, Artificial Sequence
  Description of Artificial Sequence: Synthetic oligonucleotide
  Sense strand starting at position 876 of SEQ ID NO: 915248
cuccaaauacagugaguua

SEQ ID NO: 1065509 - RNA, 19 nt, Artificial Sequence
  Description of Artificial Sequence: Synthetic oligonucleotide
  Antisense strand to SEQ ID NO: 1065508
uaacucacuguauuuggag

SEQ ID NO: 1065510 - RNA, 19 nt, Artificial Sequence
  Description of Artificial Sequence: Synthetic oligonucleotide
  Sense strand starting at position 889 of SEQ ID NO: 915248
gaguuagugguccauauaa

SEQ ID NO: 1065511 - RNA, 19 nt, Artificial Sequence
  Description of Artificial Sequence: Synthetic oligonucleotide
  Antisense strand to SEQ ID NO: 1065510
uuauauggaccacuaacuc

SEQ ID NO: 1065512 - RNA, 19 nt, Artificial Sequence
  Description of Artificial Sequence: Synthetic oligonucleotide
  Sense strand starting at position 891 of SEQ ID NO: 915248
guuagugguccauauaaac

SEQ ID NO: 1065513 - RNA, 19 nt, Artificial Sequence
  Description of Artificial Sequence: Synthetic oligonucleotide
  Antisense strand to SEQ ID NO: 1065512
guuuauauggaccacuaac

SEQ ID NO: 1065514 - RNA, 19 nt, Artificial Sequence
  Description of Artificial Sequence: Synthetic oligonucleotide
  Sense strand starting at position 953 of SEQ ID NO: 915248
ucucauuuaguuuguguua

SEQ ID NO: 1065515 - RNA, 19 nt, Artificial Sequence
  Description of Artificial Sequence: Synthetic oligonucleotide
  Antisense strand to SEQ ID NO: 1065514
uaacacaaacuaaaugaga

SEQ ID NO: 1065516 - RNA, 19 nt, Artificial Sequence
  Description of Artificial Sequence: Synthetic oligonucleotide
  Sense strand starting at position 954 of SEQ ID NO: 915248
cucauuuaguuuguguuau

SEQ ID NO: 1065517 - RNA, 19 nt, Artificial Sequence
  Description of Artificial Sequence: Synthetic oligonucleotide
  Antisense strand to SEQ ID NO: 1065516
auaacacaaacuaaaugag

SEQ ID NO: 1065518 - RNA, 19 nt, Artificial Sequence
  Description of Artificial Sequence: Synthetic oligonucleotide
  Sense strand starting at position 1058 of SEQ ID NO: 915248
acauaaauuugucauggaa

SEQ ID NO: 1065519 - RNA, 19 nt, Artificial Sequence
  Description of Artificial Sequence: Synthetic oligonucleotide
  Antisense strand to SEQ ID NO: 1065518
uuccaugacaaauuuaugu

SEQ ID NO: 1065520 - RNA, 19 nt, Artificial Sequence
  Description of Artificial Sequence: Synthetic oligonucleotide
  Sense strand starting at position 2144 of SEQ ID NO: 915248
accugaaguuagcuagaga

SEQ ID NO: 1065521 - RNA, 19 nt, Artificial Sequence
  Description of Artificial Sequence: Synthetic oligonucleotide
  Antisense strand to SEQ ID NO: 1065520
ucucuagcuaacuucaggu

SEQ ID NO: 1065522 - RNA, 19 nt, Artificial Sequence
  Description of Artificial Sequence: Synthetic oligonucleotide
  Sense strand starting at position 2145 of SEQ ID NO: 915248
ccugaaguuagcuagagau

SEQ ID NO: 1065523 - RNA, 19 nt, Artificial Sequence
  Description of Artificial Sequence: Synthetic oligonucleotide
  Antisense strand to SEQ ID NO: 1065522
aucucuagcuaacuucagg

SEQ ID NO: 1065524 - RNA, 19 nt, Artificial Sequence
  Description of Artificial Sequence: Synthetic oligonucleotide
  Sense strand starting at position 2233 of SEQ ID NO: 915248
cacgauuguguagacuaaa

SEQ ID NO: 1065525 - RNA, 19 nt, Artificial Sequence
  Description of Artificial Sequence: Synthetic oligonucleotide
  Antisense strand to SEQ ID NO: 1065524
uuuagucuacacaaucgug

SEQ ID NO: 1065526 - RNA, 19 nt, Artificial Sequence
  Description of Artificial Sequence: Synthetic oligonucleotide
  Sense strand starting at position 2261 of SEQ ID NO: 915248
ucuggaaagauguguagaa

SEQ ID NO: 1065527 - RNA, 19 nt, Artificial Sequence
  Description of Artificial Sequence: Synthetic oligonucleotide
  Antisense strand to SEQ ID NO: 1065526
uucuacacaucuuuccaga

SEQ ID NO: 1065528 - RNA, 19 nt, Artificial Sequence
  Description of Artificial Sequence: Synthetic oligonucleotide
  Sense strand starting at position 2273 of SEQ ID NO: 915248
uguagaaauuccuccuaag

SEQ ID NO: 1065529 - RNA, 19 nt, Artificial Sequence
  Description of Artificial Sequence: Synthetic oligonucleotide
  Antisense strand to SEQ ID NO: 1065528
cuuaggaggaauuucuaca

SEQ ID NO: 1065530 - RNA, 19 nt, Artificial Sequence
  Description of Artificial Sequence: Synthetic oligonucleotide
  Sense strand starting at position 2393 of SEQ ID NO: 915248
guaucuaaugaauauagca

SEQ ID NO: 1065531 - RNA, 19 nt, Artificial Sequence
  Description of Artificial Sequence: Synthetic oligonucleotide
  Antisense strand to SEQ ID NO: 1065530
ugcuauauucauuagauac

SEQ ID NO: 1065532 - RNA, 19 nt, Artificial Sequence
  Description of Artificial Sequence: Synthetic oligonucleotide
  Sense strand starting at position 2487 of SEQ ID NO: 915248
agagcaguuuaucuaauaa

SEQ ID NO: 1065533 - RNA, 19 nt, Artificial Sequence
  Description of Artificial Sequence: Synthetic oligonucleotide
  Antisense strand to SEQ ID NO: 1065532
uuauuagauaaacugcucu

SEQ ID NO: 1065534 - RNA, 19 nt, Artificial Sequence
  Description of Artificial Sequence: Synthetic oligonucleotide
  Sense strand starting at position 2586 of SEQ ID NO: 915248
acaugauuguuucuagaua

SEQ ID NO: 1065535 - RNA, 19 nt, Artificial Sequence
  Description of Artificial Sequence: Synthetic oligonucleotide
  Antisense strand to SEQ ID NO: 1065534
uaucuagaaacaaucaugu

SEQ ID NO: 1065536 - RNA, 19 nt, Artificial Sequence
  Description of Artificial Sequence: Synthetic oligonucleotide
  Sense strand starting at position 2748 of SEQ ID NO: 915248
gugggcaugcuagaaacua

SEQ ID NO: 1065537 - RNA, 19 nt, Artificial Sequence
  Description of Artificial Sequence: Synthetic oligonucleotide
  Antisense strand to SEQ ID NO: 1065536
uaguuucuagcaugcccac

SEQ ID NO: 1065538 - RNA, 19 nt, Artificial Sequence
  Description of Artificial Sequence: Synthetic oligonucleotide
  Sense strand starting at position 2843 of SEQ ID NO: 915248
guuaaauaaucaccuuugu

SEQ ID NO: 1065539 - RNA, 19 nt, Artificial Sequence
  Description of Artificial Sequence: Synthetic oligonucleotide
  Antisense strand to SEQ ID NO: 1065538
acaaaggugauuauuuaac

SEQ ID NO: 1065540 - RNA, 19 nt, Artificial Sequence
  Description of Artificial Sequence: Synthetic oligonucleotide
  Sense strand starting at position 2851 of SEQ ID NO: 915248
aucaccuuuguuuagacau

SEQ ID NO: 1065541 - RNA, 19 nt, Artificial Sequence
  Description of Artificial Sequence: Synthetic oligonucleotide
  Antisense strand to SEQ ID NO: 1065540
augucuaaacaaaggugau

SEQ ID NO: 1065542 - RNA, 19 nt, Artificial Sequence
  Description of Artificial Sequence: Synthetic oligonucleotide
  Sense strand starting at position 2872 of SEQ ID NO: 915248
agcacucuccuugaguaac

SEQ ID NO: 1065543 - RNA, 19 nt, Artificial Sequence
  Description of Artificial Sequence: Synthetic oligonucleotide
  Antisense strand to SEQ ID NO: 1065542
guuacucaaggagagugcu

SEQ ID NO: 1065544 - RNA, 19 nt, Artificial Sequence
  Description of Artificial Sequence: Synthetic oligonucleotide
  Sense strand starting at position 2988 of SEQ ID NO: 915248
gucacaguguuccuauuua

SEQ ID NO: 1065545 - RNA, 19 nt, Artificial Sequence
  Description of Artificial Sequence: Synthetic oligonucleotide
  Antisense strand to SEQ ID NO: 1065544
uaaauaggaacacugugac

SEQ ID NO: 1065546 - RNA, 19 nt, Artificial Sequence
  Description of Artificial Sequence: Synthetic oligonucleotide
  Sense strand starting at position 3117 of SEQ ID NO: 915248
caaguuucccaaugugaga

SEQ ID NO: 1065547 - RNA, 19 nt, Artificial Sequence
  Description of Artificial Sequence: Synthetic oligonucleotide
  Antisense strand to SEQ ID NO: 1065546
ucucacauugggaaacuug

SEQ ID NO: 1065548 - RNA, 19 nt, Artificial Sequence
  Description of Artificial Sequence: Synthetic oligonucleotide
  Sense strand starting at position 3199 of SEQ ID NO: 915248
auuagauguaccugggauu

SEQ ID NO: 1065549 - RNA, 19 nt, Artificial Sequence
  Description of Artificial Sequence: Synthetic oligonucleotide
  Antisense strand to SEQ ID NO: 1065548
aaucccagguacaucuaau

SEQ ID NO: 1065550 - RNA, 19 nt, Artificial Sequence
  Description of Artificial Sequence: Synthetic oligonucleotide
  Sense strand starting at position 3486 of SEQ ID NO: 915248
uugugcacauucuugagaa

SEQ ID NO: 1065551 - RNA, 19 nt, Artificial Sequence
  Description of Artificial Sequence: Synthetic oligonucleotide
  Antisense strand to SEQ ID NO: 1065550
uucucaagaaugugcacaa

SEQ ID NO: 1065552 - RNA, 19 nt, Artificial Sequence
  Description of Artificial Sequence: Synthetic oligonucleotide
  Sense strand starting at position 3488 of SEQ ID NO: 915248
gugcacauucuugagaauu

SEQ ID NO: 1065553 - RNA, 19 nt, Artificial Sequence
  Description of Artificial Sequence: Synthetic oligonucleotide
  Antisense strand to SEQ ID NO: 1065552
aauucucaagaaugugcac

SEQ ID NO: 1065554 - RNA, 19 nt, Artificial Sequence
  Description of Artificial Sequence: Synthetic oligonucleotide
  Sense strand starting at position 3558 of SEQ ID NO: 915248
gucuuaguguauuucuaaa

SEQ ID NO: 1065555 - RNA, 19 nt, Artificial Sequence
  Description of Artificial Sequence: Synthetic oligonucleotide
  Antisense strand to SEQ ID NO: 1065554
uuuagaaauacacuaagac

SEQ ID NO: 1065556 - RNA, 19 nt, Artificial Sequence
  Description of Artificial Sequence: Synthetic oligonucleotide
  Sense strand starting at position 3687 of SEQ ID NO: 915248
cuuugaucucuugagauuc

SEQ ID NO: 1065557 - RNA, 19 nt, Artificial Sequence
  Description of Artificial Sequence: Synthetic oligonucleotide
  Antisense strand to SEQ ID NO: 1065556
gaaucucaagagaucaaag

SEQ ID NO: 1065558 - RNA, 19 nt, Artificial Sequence
  Description of Artificial Sequence: Synthetic oligonucleotide
  Sense strand starting at position 3877 of SEQ ID NO: 915248
gguagauauauagacguga

SEQ ID NO: 1065559 - RNA, 19 nt, Artificial Sequence
  Description of Artificial Sequence: Synthetic oligonucleotide
  Antisense strand to SEQ ID NO: 1065558
ucacgucuauauaucuacc

SEQ ID NO: 1065560 - RNA, 19 nt, Artificial Sequence
  Description of Artificial Sequence: Synthetic oligonucleotide
  Sense strand starting at position 3888 of SEQ ID NO: 915248
agacgugaaacauguauga

SEQ ID NO: 1065561 - RNA, 19 nt, Artificial Sequence
  Description of Artificial Sequence: Synthetic oligonucleotide
  Antisense strand to SEQ ID NO: 1065560
ucauacauguuucacgucu

SEQ ID NO: 1065562 - RNA, 19 nt, Artificial Sequence
  Description of Artificial Sequence: Synthetic oligonucleotide
  Sense strand starting at position 3892 of SEQ ID NO: 915248
gugaaacauguaugaaaca

SEQ ID NO: 1065563 - RNA, 19 nt, Artificial Sequence
  Description of Artificial Sequence: Synthetic oligonucleotide
  Antisense strand to SEQ ID NO: 1065562
uguuucauacauguuucac

SEQ ID NO: 1065564 - RNA, 19 nt, Artificial Sequence
  Description of Artificial Sequence: Synthetic oligonucleotide
  Sense strand starting at position 3965 of SEQ ID NO: 915248
auuugucuguuucccagau

SEQ ID NO: 1065565 - RNA, 19 nt, Artificial Sequence
  Description of Artificial Sequence: Synthetic oligonucleotide
  Antisense strand to SEQ ID NO: 1065564
aucugggaaacagacaaau

SEQ ID NO: 1065566 - RNA, 19 nt, Artificial Sequence
  Description of Artificial Sequence: Synthetic oligonucleotide
  Sense strand starting at position 3969 of SEQ ID NO: 915248
gucuguuucccagauaacc

SEQ ID NO: 1065567 - RNA, 19 nt, Artificial Sequence
  Description of Artificial Sequence: Synthetic oligonucleotide
  Antisense strand to SEQ ID NO: 1065566
gguuaucugggaaacagac

SEQ ID NO: 1065568 - RNA, 19 nt, Artificial Sequence
  Description of Artificial Sequence: Synthetic oligonucleotide
  Sense strand starting at position 58 of SEQ ID NO: 915249
ucuuaugauucugauuuga

SEQ ID NO: 1065569 - RNA, 19 nt, Artificial Sequence
  Description of Artificial Sequence: Synthetic oligonucleotide
  Antisense strand to SEQ ID NO: 1065568
ucaaaucagaaucauaaga

SEQ ID NO: 1065570 - RNA, 19 nt, Artificial Sequence
  Description of Artificial Sequence: Synthetic oligonucleotide
  Sense strand starting at position 80 of SEQ ID NO: 915249
uucugaaauuuagcugugu

SEQ ID NO: 1065571 - RNA, 19 nt, Artificial Sequence
  Description of Artificial Sequence: Synthetic oligonucleotide
  Antisense strand to SEQ ID NO: 1065570
acacagcuaaauuucagaa

SEQ ID NO: 1065572 - RNA, 19 nt, Artificial Sequence
  Description of Artificial Sequence: Synthetic oligonucleotide
  Sense strand starting at position 108 of SEQ ID NO: 915249
ugcaaagcugugcaagaaa

SEQ ID NO: 1065573 - RNA, 19 nt, Artificial Sequence
  Description of Artificial Sequence: Synthetic oligonucleotide
  Antisense strand to SEQ ID NO: 1065572
uuucuugcacagcuuugca

SEQ ID NO: 1065574 - RNA, 19 nt, Artificial Sequence
  Description of Artificial Sequence: Synthetic oligonucleotide
  Sense strand starting at position 311 of SEQ ID NO: 915249
aagggacauuuguacagaa

SEQ ID NO: 1065575 - RNA, 19 nt, Artificial Sequence
  Description of Artificial Sequence: Synthetic oligonucleotide
  Antisense strand to SEQ ID NO: 1065574
uucuguacaaaugucccuu

SEQ ID NO: 1065576 - RNA, 19 nt, Artificial Sequence
  Description of Artificial Sequence: Synthetic oligonucleotide
  Sense strand starting at position 324 of SEQ ID NO: 915249
acagaauccguggaguuua

SEQ ID NO: 1065577 - RNA, 19 nt, Artificial Sequence
  Description of Artificial Sequence: Synthetic oligonucleotide
  Antisense strand to SEQ ID NO: 1065576
uaaacuccacggauucugu

SEQ ID NO: 1065578 - RNA, 19 nt, Artificial Sequence
  Description of Artificial Sequence: Synthetic oligonucleotide
  Sense strand starting at position 329 of SEQ ID NO: 915249
auccguggaguuuauaaau

SEQ ID NO: 1065579 - RNA, 19 nt, Artificial Sequence
  Description of Artificial Sequence: Synthetic oligonucleotide
  Antisense strand to SEQ ID NO: 1065578
auuuauaaacuccacggau

SEQ ID NO: 1065580 - RNA, 19 nt, Artificial Sequence
  Description of Artificial Sequence: Synthetic oligonucleotide
  Sense strand starting at position 375 of SEQ ID NO: 915249
augauacucugucucucau

SEQ ID NO: 1065581 - RNA, 19 nt, Artificial Sequence
  Description of Artificial Sequence: Synthetic oligonucleotide
  Antisense strand to SEQ ID NO: 1065580
augagagacagaguaucau

SEQ ID NO: 1065582 - RNA, 19 nt, Artificial Sequence
  Description of Artificial Sequence: Synthetic oligonucleotide
  Sense strand starting at position 782 of SEQ ID NO: 915249
ugcuuaaucccaggcagaa

SEQ ID NO: 1065583 - RNA, 19 nt, Artificial Sequence
  Description of Artificial Sequence: Synthetic oligonucleotide
  Antisense strand to SEQ ID NO: 1065582
uucugccugggauuaagca

SEQ ID NO: 1065584 - RNA, 19 nt, Artificial Sequence
  Description of Artificial Sequence: Synthetic oligonucleotide
  Sense strand starting at position 791 of SEQ ID NO: 915249
ccaggcagaauugguaaau

SEQ ID NO: 1065585 - RNA, 19 nt, Artificial Sequence
  Description of Artificial Sequence: Synthetic oligonucleotide
  Antisense strand to SEQ ID NO: 1065584
auuuaccaauucugccugg

SEQ ID NO: 1065586 - RNA, 19 nt, Artificial Sequence
  Description of Artificial Sequence: Synthetic oligonucleotide
  Sense strand starting at position 792 of SEQ ID NO: 915249
caggcagaauugguaaaua

SEQ ID NO: 1065587 - RNA, 19 nt, Artificial Sequence
  Description of Artificial Sequence: Synthetic oligonucleotide
  Antisense strand to SEQ ID NO: 1065586
uauuuaccaauucugccug

SEQ ID NO: 1065588 - RNA, 19 nt, Artificial Sequence
  Description of Artificial Sequence: Synthetic oligonucleotide
  Sense strand starting at position 2043 of SEQ ID NO: 915249
cccuuauauggcuaggaca

SEQ ID NO: 1065589 - RNA, 19 nt, Artificial Sequence
  Description of Artificial Sequence: Synthetic oligonucleotide
  Antisense strand to SEQ ID NO: 1065588
uguccuagccauauaaggg

SEQ ID NO: 1065590 - RNA, 19 nt, Artificial Sequence
  Description of Artificial Sequence: Synthetic oligonucleotide
  Sense strand starting at position 2045 of SEQ ID NO: 915249
cuuauauggcuaggacaau

SEQ ID NO: 1065591 - RNA, 19 nt, Artificial Sequence
  Description of Artificial Sequence: Synthetic oligonucleotide
  Antisense strand to SEQ ID NO: 1065590
auuguccuagccauauaag

SEQ ID NO: 1065592 - RNA, 19 nt, Artificial Sequence
  Description of Artificial Sequence: Synthetic oligonucleotide
  Sense strand starting at position 2119 of SEQ ID NO: 915249
agcuucuaggucuaauaag

SEQ ID NO: 1065593 - RNA, 19 nt, Artificial Sequence
  Description of Artificial Sequence: Synthetic oligonucleotide
  Antisense strand to SEQ ID NO: 1065592
cuuauuagaccuagaagcu

SEQ ID NO: 1065594 - RNA, 19 nt, Artificial Sequence
  Description of Artificial Sequence: Synthetic oligonucleotide
  Sense strand starting at position 2259 of SEQ ID NO: 915249
augaguacauucuuaguuu

SEQ ID NO: 1065595 - RNA, 19 nt, Artificial Sequence
  Description of Artificial Sequence: Synthetic oligonucleotide
  Antisense strand to SEQ ID NO: 1065594
aaacuaagaauguacucau

SEQ ID NO: 1065596 - RNA, 19 nt, Artificial Sequence
  Description of Artificial Sequence: Synthetic oligonucleotide
  Sense strand starting at position 2315 of SEQ ID NO: 915249
uugcauuaggcaugagaaa

SEQ ID NO: 1065597 - RNA, 19 nt, Artificial Sequence
  Description of Artificial Sequence: Synthetic oligonucleotide
  Antisense strand to SEQ ID NO: 1065596
uuucucaugccuaaugcaa

SEQ ID NO: 1065598 - RNA, 19 nt, Artificial Sequence
  Description of Artificial Sequence: Synthetic oligonucleotide
  Sense strand starting at position 2395 of SEQ ID NO: 915249
uucuuaggaaugggugauu

SEQ ID NO: 1065599 - RNA, 19 nt, Artificial Sequence
  Description of Artificial Sequence: Synthetic oligonucleotide
  Antisense strand to SEQ ID NO: 1065598
aaucacccauuccuaagaa

SEQ ID NO: 1065600 - RNA, 19 nt, Artificial Sequence
  Description of Artificial Sequence: Synthetic oligonucleotide
  Sense strand starting at position 2406 of SEQ ID NO: 915249
gggugauucuagguacuau

SEQ ID NO: 1065601 - RNA, 19 nt, Artificial Sequence
  Description of Artificial Sequence: Synthetic oligonucleotide
  Antisense strand to SEQ ID NO: 1065600
auaguaccuagaaucaccc

SEQ ID NO: 1065602 - RNA, 19 nt, Artificial Sequence
  Description of Artificial Sequence: Synthetic oligonucleotide
  Sense strand starting at position 2407 of SEQ ID NO: 915249
ggugauucuagguacuauc

SEQ ID NO: 1065603 - RNA, 19 nt, Artificial Sequence
  Description of Artificial Sequence: Synthetic oligonucleotide
  Antisense strand to SEQ ID NO: 1065602
gauaguaccuagaaucacc

SEQ ID NO: 1065604 - RNA, 19 nt, Artificial Sequence
  Description of Artificial Sequence: Synthetic oligonucleotide
  Sense strand starting at position 2637 of SEQ ID NO: 915249
uuguaauuucuuggcauua

SEQ ID NO: 1065605 - RNA, 19 nt, Artificial Sequence
  Description of Artificial Sequence: Synthetic oligonucleotide
  Antisense strand to SEQ ID NO: 1065604
uaaugccaagaaauuacaa

SEQ ID NO: 1065606 - RNA, 19 nt, Artificial Sequence
  Description of Artificial Sequence: Synthetic oligonucleotide
  Sense strand starting at position 2638 of SEQ ID NO: 915249
uguaauuucuuggcauuau

SEQ ID NO: 1065607 - RNA, 19 nt, Artificial Sequence
  Description of Artificial Sequence: Synthetic oligonucleotide
  Antisense strand to SEQ ID NO: 1065606
auaaugccaagaaauuaca

SEQ ID NO: 1065608 - RNA, 19 nt, Artificial Sequence
  Description of Artificial Sequence: Synthetic oligonucleotide
  Sense strand starting at position 2649 of SEQ ID NO: 915249
ggcauuaugcuuuacugga

SEQ ID NO: 1065609 - RNA, 19 nt, Artificial Sequence
  Description of Artificial Sequence: Synthetic oligonucleotide
  Antisense strand to SEQ ID NO: 1065608
uccaguaaagcauaaugcc

SEQ ID NO: 1065610 - RNA, 19 nt, Artificial Sequence
  Description of Artificial Sequence: Synthetic oligonucleotide
  Sense strand starting at position 2724 of SEQ ID NO: 915249
uuuacagcuccucauaguu

SEQ ID NO: 1065611 - RNA, 19 nt, Artificial Sequence
  Description of Artificial Sequence: Synthetic oligonucleotide
  Antisense strand to SEQ ID NO: 1065610
aacuaugaggagcuguaaa

SEQ ID NO: 1065612 - RNA, 19 nt, Artificial Sequence
  Description of Artificial Sequence: Synthetic oligonucleotide
  Sense strand starting at position 2897 of SEQ ID NO: 915249
uuuauagacuuucugugau

SEQ ID NO: 1065613 - RNA, 19 nt, Artificial Sequence
  Description of Artificial Sequence: Synthetic oligonucleotide
  Antisense strand to SEQ ID NO: 1065612
aucacagaaagucuauaaa

SEQ ID NO: 1065614 - RNA, 19 nt, Artificial Sequence
  Description of Artificial Sequence: Synthetic oligonucleotide
  Sense strand starting at position 2900 of SEQ ID NO: 915249
auagacuuucugugauaac

SEQ ID NO: 1065615 - RNA, 19 nt, Artificial Sequence
  Description of Artificial Sequence: Synthetic oligonucleotide
  Antisense strand to SEQ ID NO: 1065614
guuaucacagaaagucuau

SEQ ID NO: 1065616 - RNA, 19 nt, Artificial Sequence
  Description of Artificial Sequence: Synthetic oligonucleotide
  Sense strand starting at position 2909 of SEQ ID NO: 915249
cugugauaacuacaaugcu

SEQ ID NO: 1065617 - RNA, 19 nt, Artificial Sequence
  Description of Artificial Sequence: Synthetic oligonucleotide
  Antisense strand to SEQ ID NO: 1065616
agcauuguaguuaucacag

SEQ ID NO: 1065618 - RNA, 19 nt, Artificial Sequence
  Description of Artificial Sequence: Synthetic oligonucleotide
  Sense strand starting at position 2925 of SEQ ID NO: 915249
gcucauauuugacauagaa

SEQ ID NO: 1065619 - RNA, 19 nt, Artificial Sequence
  Description of Artificial Sequence: Synthetic oligonucleotide
  Antisense strand to SEQ ID NO: 1065618
uucuaugucaaauaugagc

SEQ ID NO: 1065620 - RNA, 19 nt, Artificial Sequence
  Description of Artificial Sequence: Synthetic oligonucleotide
  Sense strand starting at position 3025 of SEQ ID NO: 915249
acuggagucucugcuacaa

SEQ ID NO: 1065621 - RNA, 19 nt, Artificial Sequence
  Description of Artificial Sequence: Synthetic oligonucleotide
  Antisense strand to SEQ ID NO: 1065620
uuguagcagagacuccagu

SEQ ID NO: 1065622 - RNA, 19 nt, Artificial Sequence
  Description of Artificial Sequence: Synthetic oligonucleotide
  Sense strand starting at position 3114 of SEQ ID NO: 915249
aguuaaguuacagagaguu

SEQ ID NO: 1065623 - RNA, 19 nt, Artificial Sequence
  Description of Artificial Sequence: Synthetic oligonucleotide
  Antisense strand to SEQ ID NO: 1065622
aacucucuguaacuuaacu

SEQ ID NO: 1065624 - RNA, 19 nt, Artificial Sequence
  Description of Artificial Sequence: Synthetic oligonucleotide
  Sense strand starting at position 3169 of SEQ ID NO: 915249
cccagcguuguuuaaauuu

SEQ ID NO: 1065625 - RNA, 19 nt, Artificial Sequence
  Description of Artificial Sequence: Synthetic oligonucleotide
  Antisense strand to SEQ ID NO: 1065624
aaauuuaaacaacgcuggg

SEQ ID NO: 1065626 - RNA, 19 nt, Artificial Sequence
  Description of Artificial Sequence: Synthetic oligonucleotide
  Sense strand starting at position 3384 of SEQ ID NO: 915249
uugaauucuuacucuggua

SEQ ID NO: 1065627 - RNA, 19 nt, Artificial Sequence
  Description of Artificial Sequence: Synthetic oligonucleotide
  Antisense strand to SEQ ID NO: 1065626
uaccagaguaagaauucaa

SEQ ID NO: 1065628 - RNA, 19 nt, Artificial Sequence
  Description of Artificial Sequence: Synthetic oligonucleotide
  Sense strand starting at position 3582 of SEQ ID NO: 915249
ugguauguuaugggaaggu

SEQ ID NO: 1065629 - RNA, 19 nt, Artificial Sequence
  Description of Artificial Sequence: Synthetic oligonucleotide
  Antisense strand to SEQ ID NO: 1065628
accuucccauaacauacca

SEQ ID NO: 1065630 - RNA, 19 nt, Artificial Sequence
  Description of Artificial Sequence: Synthetic oligonucleotide
  Sense strand starting at position 3586 of SEQ ID NO: 915249
auguuaugggaaggucuuu

SEQ ID NO: 1065631 - RNA, 19 nt, Artificial Sequence
  Description of Artificial Sequence: Synthetic oligonucleotide
  Antisense strand to SEQ ID NO: 1065630
aaagaccuucccauaacau

SEQ ID NO: 1065632 - RNA, 19 nt, Artificial Sequence
  Description of Artificial Sequence: Synthetic oligonucleotide
  Sense strand starting at position 3673 of SEQ ID NO: 915249
ccuucuugagaaggugaca

SEQ ID NO: 1065633 - RNA, 19 nt, Artificial Sequence
  Description of Artificial Sequence: Synthetic oligonucleotide
  Antisense strand to SEQ ID NO: 1065632
ugucaccuucucaagaagg

SEQ ID NO: 1065634 - RNA, 19 nt, Artificial Sequence
  Description of Artificial Sequence: Synthetic oligonucleotide
  Sense strand starting at position 3682 of SEQ ID NO: 915249
gaaggugacaucuguauug

SEQ ID NO: 1065635 - RNA, 19 nt, Artificial Sequence
  Description of Artificial Sequence: Synthetic oligonucleotide
  Antisense strand to SEQ ID NO: 1065634
caauacagaugucaccuuc

SEQ ID NO: 1065636 - RNA, 19 nt, Artificial Sequence
  Description of Artificial Sequence: Synthetic oligonucleotide
  Sense strand starting at position 3684 of SEQ ID NO: 915249
aggugacaucuguauugag

SEQ ID NO: 1065637 - RNA, 19 nt, Artificial Sequence
  Description of Artificial Sequence: Synthetic oligonucleotide
  Antisense strand to SEQ ID NO: 1065636
cucaauacagaugucaccu

SEQ ID NO: 1065638 - RNA, 19 nt, Artificial Sequence
  Description of Artificial Sequence: Synthetic oligonucleotide
  Sense strand starting at position 3762 of SEQ ID NO: 915249
ucuaguggagaauguauau

SEQ ID NO: 1065639 - RNA, 19 nt, Artificial Sequence
  Description of Artificial Sequence: Synthetic oligonucleotide
  Antisense strand to SEQ ID NO: 1065638
auauacauucuccacuaga

SEQ ID NO: 1065640 - RNA, 19 nt, Artificial Sequence
  Description of Artificial Sequence: Synthetic oligonucleotide
  Sense strand starting at position 3768 of SEQ ID NO: 915249
ggagaauguauaugcugaa

SEQ ID NO: 1065641 - RNA, 19 nt, Artificial Sequence
  Description of Artificial Sequence: Synthetic oligonucleotide
  Antisense strand to SEQ ID NO: 1065640
uucagcauauacauucucc

SEQ ID NO: 1065642 - RNA, 19 nt, Artificial Sequence
  Description of Artificial Sequence: Synthetic oligonucleotide
  Sense strand starting at position 3769 of SEQ ID NO: 915249
gagaauguauaugcugaaa

SEQ ID NO: 1065643 - RNA, 19 nt, Artificial Sequence
  Description of Artificial Sequence: Synthetic oligonucleotide
  Antisense strand to SEQ ID NO: 1065642
uuucagcauauacauucuc

SEQ ID NO: 1065644 - RNA, 19 nt, Artificial Sequence
  Description of Artificial Sequence: Synthetic oligonucleotide
  Sense strand starting at position 3843 of SEQ ID NO: 915249
ggucuuaauggaggacagu

SEQ ID NO: 1065645 - RNA, 19 nt, Artificial Sequence
  Description of Artificial Sequence: Synthetic oligonucleotide
  Antisense strand to SEQ ID NO: 1065644
acuguccuccauuaagacc

SEQ ID NO: 1065646 - RNA, 19 nt, Artificial Sequence
  Description of Artificial Sequence: Synthetic oligonucleotide
  Sense strand starting at position 3849 of SEQ ID NO: 915249
aauggaggacagugugaau

SEQ ID NO: 1065647 - RNA, 19 nt, Artificial Sequence
  Description of Artificial Sequence: Synthetic oligonucleotide
  Antisense strand to SEQ ID NO: 1065646
auucacacuguccuccauu

SEQ ID NO: 1065648 - RNA, 19 nt, Artificial Sequence
  Description of Artificial Sequence: Synthetic oligonucleotide
  Sense strand starting at position 32 of SEQ ID NO: 915250
ucagucuaguucuuuauuu

SEQ ID NO: 1065649 - RNA, 19 nt, Artificial Sequence
  Description of Artificial Sequence: Synthetic oligonucleotide
  Antisense strand to SEQ ID NO: 1065648
aaauaaagaacuagacuga

SEQ ID NO: 1065650 - RNA, 19 nt, Artificial Sequence
  Description of Artificial Sequence: Synthetic oligonucleotide
  Sense strand starting at position 137 of SEQ ID NO: 915250
uugauaagucugggauaua

SEQ ID NO: 1065651 - RNA, 19 nt, Artificial Sequence
  Description of Artificial Sequence: Synthetic oligonucleotide
  Antisense strand to SEQ ID NO: 1065650
uauaucccagacuuaucaa

SEQ ID NO: 1065652 - RNA, 19 nt, Artificial Sequence
  Description of Artificial Sequence: Synthetic oligonucleotide
  Sense strand starting at position 192 of SEQ ID NO: 915250
guacaauagguguaagugu

SEQ ID NO: 1065653 - RNA, 19 nt, Artificial Sequence
  Description of Artificial Sequence: Synthetic oligonucleotide
  Antisense strand to SEQ ID NO: 1065652
acacuuacaccuauuguac

SEQ ID NO: 1065654 - RNA, 19 nt, Artificial Sequence
  Description of Artificial Sequence: Synthetic oligonucleotide
  Sense strand starting at position 829 of SEQ ID NO: 915250
ucaaacugguuaccugauu

SEQ ID NO: 1065655 - RNA, 19 nt, Artificial Sequence
  Description of Artificial Sequence: Synthetic oligonucleotide
  Antisense strand to SEQ ID NO: 1065654
aaucagguaaccaguuuga

SEQ ID NO: 1065656 - RNA, 19 nt, Artificial Sequence
  Description of Artificial Sequence: Synthetic oligonucleotide
  Sense strand starting at position 1152 of SEQ ID NO: 915250
aggaaucaccaauguguaa

SEQ ID NO: 1065657 - RNA, 19 nt, Artificial Sequence
  Description of Artificial Sequence: Synthetic oligonucleotide
  Antisense strand to SEQ ID NO: 1065656
uuacacauuggugauuccu

SEQ ID NO: 1065658 - RNA, 19 nt, Artificial Sequence
  Description of Artificial Sequence: Synthetic oligonucleotide
  Sense strand starting at position 1189 of SEQ ID NO: 915250
ucaguauccagugaguggu

SEQ ID NO: 1065659 - RNA, 19 nt, Artificial Sequence
  Description of Artificial Sequence: Synthetic oligonucleotide
  Antisense strand to SEQ ID NO: 1065658
accacucacuggauacuga

SEQ ID NO: 1065660 - RNA, 19 nt, Artificial Sequence
  Description of Artificial Sequence: Synthetic oligonucleotide
  Sense strand starting at position 1310 of SEQ ID NO: 915250
gugaacguauccuuagaau

SEQ ID NO: 1065661 - RNA, 19 nt, Artificial Sequence
  Description of Artificial Sequence: Synthetic oligonucleotide
  Antisense strand to SEQ ID NO: 1065660
auucuaaggauacguucac

SEQ ID NO: 1065662 - RNA, 19 nt, Artificial Sequence
  Description of Artificial Sequence: Synthetic oligonucleotide
  Sense strand starting at position 1316 of SEQ ID NO: 915250
guauccuuagaauggacaa

SEQ ID NO: 1065663 - RNA, 19 nt, Artificial Sequence
  Description of Artificial Sequence: Synthetic oligonucleotide
  Antisense strand to SEQ ID NO: 1065662
uuguccauucuaaggauac

SEQ ID NO: 1065664 - RNA, 19 nt, Artificial Sequence
  Description of Artificial Sequence: Synthetic oligonucleotide
  Sense strand starting at position 1355 of SEQ ID NO: 915250
cuagaacuguaaucaugga

SEQ ID NO: 1065665 - RNA, 19 nt, Artificial Sequence
  Description of Artificial Sequence: Synthetic oligonucleotide
  Antisense strand to SEQ ID NO: 1065664
uccaugauuacaguucuag

SEQ ID NO: 1065666 - RNA, 19 nt, Artificial Sequence
  Description of Artificial Sequence: Synthetic oligonucleotide
  Sense strand starting at position 1379 of SEQ ID NO: 915250
ccaaauuuguugcugcaga

SEQ ID NO: 1065667 - RNA, 19 nt, Artificial Sequence
  Description of Artificial Sequence: Synthetic oligonucleotide
  Antisense strand to SEQ ID NO: 1065666
ucugcagcaacaaauuugg

SEQ ID NO: 1065668 - RNA, 19 nt, Artificial Sequence
  Description of Artificial Sequence: Synthetic oligonucleotide
  Sense strand starting at position 1384 of SEQ ID NO: 915250
uuuguugcugcagauauaa

SEQ ID NO: 1065669 - RNA, 19 nt, Artificial Sequence
  Description of Artificial Sequence: Synthetic oligonucleotide
  Antisense strand to SEQ ID NO: 1065668
uuauaucugcagcaacaaa

SEQ ID NO: 1065670 - RNA, 19 nt, Artificial Sequence
  Description of Artificial Sequence: Synthetic oligonucleotide
  Sense strand starting at position 1386 of SEQ ID NO: 915250
uguugcugcagauauaaag

SEQ ID NO: 1065671 - RNA, 19 nt, Artificial Sequence
  Description of Artificial Sequence: Synthetic oligonucleotide
  Antisense strand to SEQ ID NO: 1065670
cuuuauaucugcagcaaca

SEQ ID NO: 1065672 - RNA, 19 nt, Artificial Sequence
  Description of Artificial Sequence: Synthetic oligonucleotide
  Sense strand starting at position 1403 of SEQ ID NO: 915250
agacuauuguuucugguau

SEQ ID NO: 1065673 - RNA, 19 nt, Artificial Sequence
  Description of Artificial Sequence: Synthetic oligonucleotide
  Antisense strand to SEQ ID NO: 1065672
auaccagaaacaauagucu

SEQ ID NO: 1065674 - RNA, 19 nt, Artificial Sequence
  Description of Artificial Sequence: Synthetic oligonucleotide
  Sense strand starting at position 1415 of SEQ ID NO: 915250
cugguauguaaguaucaga

SEQ ID NO: 1065675 - RNA, 19 nt, Artificial Sequence
  Description of Artificial Sequence: Synthetic oligonucleotide
  Antisense strand to SEQ ID NO: 1065674
ucugauacuuacauaccag

SEQ ID NO: 1065676 - RNA, 19 nt, Artificial Sequence
  Description of Artificial Sequence: Synthetic oligonucleotide
  Sense strand starting at position 1543 of SEQ ID NO: 915250
aagccauagagguauguga

SEQ ID NO: 1065677 - RNA, 19 nt, Artificial Sequence
  Description of Artificial Sequence: Synthetic oligonucleotide
  Antisense strand to SEQ ID NO: 1065676
ucacauaccucuauggcuu

SEQ ID NO: 1065678 - RNA, 19 nt, Artificial Sequence
  Description of Artificial Sequence: Synthetic oligonucleotide
  Sense strand starting at position 1766 of SEQ ID NO: 915250
gggcaaugacaguagaguu

SEQ ID NO: 1065679 - RNA, 19 nt, Artificial Sequence
  Description of Artificial Sequence: Synthetic oligonucleotide
  Antisense strand to SEQ ID NO: 1065678
aacucuacugucauugccc

SEQ ID NO: 1065680 - RNA, 19 nt, Artificial Sequence
  Description of Artificial Sequence: Synthetic oligonucleotide
  Sense strand starting at position 1774 of SEQ ID NO: 915250
acaguagaguugccaagau

SEQ ID NO: 1065681 - RNA, 19 nt, Artificial Sequence
  Description of Artificial Sequence: Synthetic oligonucleotide
  Antisense strand to SEQ ID NO: 1065680
aucuuggcaacucuacugu

SEQ ID NO: 1065682 - RNA, 19 nt, Artificial Sequence
  Description of Artificial Sequence: Synthetic oligonucleotide
  Sense strand starting at position 1778 of SEQ ID NO: 915250
uagaguugccaagauugau

SEQ ID NO: 1065683 - RNA, 19 nt, Artificial Sequence
  Description of Artificial Sequence: Synthetic oligonucleotide
  Antisense strand to SEQ ID NO: 1065682
aucaaucuuggcaacucua

SEQ ID NO: 1065684 - RNA, 19 nt, Artificial Sequence
  Description of Artificial Sequence: Synthetic oligonucleotide
  Sense strand starting at position 1782 of SEQ ID NO: 915250
guugccaagauugaugaua

SEQ ID NO: 1065685 - RNA, 19 nt, Artificial Sequence
  Description of Artificial Sequence: Synthetic oligonucleotide
  Antisense strand to SEQ ID NO: 1065684
uaucaucaaucuuggcaac

SEQ ID NO: 1065686 - RNA, 19 nt, Artificial Sequence
  Description of Artificial Sequence: Synthetic oligonucleotide
  Sense strand starting at position 1790 of SEQ ID NO: 915250
gauugaugauagcuagaug

SEQ ID NO: 1065687 - RNA, 19 nt, Artificial Sequence
  Description of Artificial Sequence: Synthetic oligonucleotide
  Antisense strand to SEQ ID NO: 1065686
caucuagcuaucaucaauc

SEQ ID NO: 1065688 - RNA, 19 nt, Artificial Sequence
  Description of Artificial Sequence: Synthetic oligonucleotide
  Sense strand starting at position 1791 of SEQ ID NO: 915250
auugaugauagcuagaugu

SEQ ID NO: 1065689 - RNA, 19 nt, Artificial Sequence
  Description of Artificial Sequence: Synthetic oligonucleotide
  Antisense strand to SEQ ID NO: 1065688
acaucuagcuaucaucaau

SEQ ID NO: 1065690 - RNA, 19 nt, Artificial Sequence
  Description of Artificial Sequence: Synthetic oligonucleotide
  Sense strand starting at position 1793 of SEQ ID NO: 915250
ugaugauagcuagaugucu

SEQ ID NO: 1065691 - RNA, 19 nt, Artificial Sequence
  Description of Artificial Sequence: Synthetic oligonucleotide
  Antisense strand to SEQ ID NO: 1065690
agacaucuagcuaucauca

SEQ ID NO: 1065692 - RNA, 19 nt, Artificial Sequence
  Description of Artificial Sequence: Synthetic oligonucleotide
  Sense strand starting at position 1944 of SEQ ID NO: 915250
gcuagagacaccugugaga

SEQ ID NO: 1065693 - RNA, 19 nt, Artificial Sequence
  Description of Artificial Sequence: Synthetic oligonucleotide
  Antisense strand to SEQ ID NO: 1065692
ucucacaggugucucuagc

SEQ ID NO: 1065694 - RNA, 19 nt, Artificial Sequence
  Description of Artificial Sequence: Synthetic oligonucleotide
  Sense strand starting at position 1968 of SEQ ID NO: 915250
cucagugacccuggugaaa

SEQ ID NO: 1065695 - RNA, 19 nt, Artificial Sequence
  Description of Artificial Sequence: Synthetic oligonucleotide
  Antisense strand to SEQ ID NO: 1065694
uuucaccagggucacugag

SEQ ID NO: 1065696 - RNA, 19 nt, Artificial Sequence
  Description of Artificial Sequence: Synthetic oligonucleotide
  Sense strand starting at position 2043 of SEQ ID NO: 915250
gguuauagacguuaaggaa

SEQ ID NO: 1065697 - RNA, 19 nt, Artificial Sequence
  Description of Artificial Sequence: Synthetic oligonucleotide
  Antisense strand to SEQ ID NO: 1065696
uuccuuaacgucuauaacc

SEQ ID NO: 1065698 - RNA, 19 nt, Artificial Sequence
  Description of Artificial Sequence: Synthetic oligonucleotide
  Sense strand starting at position 2092 of SEQ ID NO: 915250
ggacaauuccuggguguga

SEQ ID NO: 1065699 - RNA, 19 nt, Artificial Sequence
  Description of Artificial Sequence: Synthetic oligonucleotide
  Antisense strand to SEQ ID NO: 1065698
ucacacccaggaauugucc

SEQ ID NO: 1065700 - RNA, 19 nt, Artificial Sequence
  Description of Artificial Sequence: Synthetic oligonucleotide
  Sense strand starting at position 2093 of SEQ ID NO: 915250
gacaauuccugggugugau

SEQ ID NO: 1065701 - RNA, 19 nt, Artificial Sequence
  Description of Artificial Sequence: Synthetic oligonucleotide
  Antisense strand to SEQ ID NO: 1065700
aucacacccaggaauuguc

SEQ ID NO: 1065702 - RNA, 19 nt, Artificial Sequence
  Description of Artificial Sequence: Synthetic oligonucleotide
  Sense strand starting at position 2094 of SEQ ID NO: 915250
acaauuccugggugugauc

SEQ ID NO: 1065703 - RNA, 19 nt, Artificial Sequence
  Description of Artificial Sequence: Synthetic oligonucleotide
  Antisense strand to SEQ ID NO: 1065702
gaucacacccaggaauugu

SEQ ID NO: 1065704 - RNA, 19 nt, Artificial Sequence
  Description of Artificial Sequence: Synthetic oligonucleotide
  Sense strand starting at position 2152 of SEQ ID NO: 915250
guauucucagucuaauaaa

SEQ ID NO: 1065705 - RNA, 19 nt, Artificial Sequence
  Description of Artificial Sequence: Synthetic oligonucleotide
  Antisense strand to SEQ ID NO: 1065704
uuuauuagacugagaauac

SEQ ID NO: 1065706 - RNA, 19 nt, Artificial Sequence
  Description of Artificial Sequence: Synthetic oligonucleotide
  Sense strand starting at position 2176 of SEQ ID NO: 915250
uuugcaaucacuugggaga

SEQ ID NO: 1065707 - RNA, 19 nt, Artificial Sequence
  Description of Artificial Sequence: Synthetic oligonucleotide
  Antisense strand to SEQ ID NO: 1065706
ucucccaagugauugcaaa

SEQ ID NO: 1065708 - RNA, 19 nt, Artificial Sequence
  Description of Artificial Sequence: Synthetic oligonucleotide
  Sense strand starting at position 2195 of SEQ ID NO: 915250
gaguaaagcaaguauggua

SEQ ID NO: 1065709 - RNA, 19 nt, Artificial Sequence
  Description of Artificial Sequence: Synthetic oligonucleotide
  Antisense strand to SEQ ID NO: 1065708
uaccauacuugcuuuacuc

SEQ ID NO: 1065710 - RNA, 19 nt, Artificial Sequence
  Description of Artificial Sequence: Synthetic oligonucleotide
  Sense strand starting at position 2324 of SEQ ID NO: 915250
gaagcugggauguaucuga

SEQ ID NO: 1065711 - RNA, 19 nt, Artificial Sequence
  Description of Artificial Sequence: Synthetic oligonucleotide
  Antisense strand to SEQ ID NO: 1065710
ucagauacaucccagcuuc

SEQ ID NO: 1065712 - RNA, 19 nt, Artificial Sequence
  Description of Artificial Sequence: Synthetic oligonucleotide
  Sense strand starting at position 2328 of SEQ ID NO: 915250
cugggauguaucugaugau

SEQ ID NO: 1065713 - RNA, 19 nt, Artificial Sequence
  Description of Artificial Sequence: Synthetic oligonucleotide
  Antisense strand to SEQ ID NO: 1065712
aucaucagauacaucccag

SEQ ID NO: 1065714 - RNA, 19 nt, Artificial Sequence
  Description of Artificial Sequence: Synthetic oligonucleotide
  Sense strand starting at position 2378 of SEQ ID NO: 915250
auuguauaucgccaaauaa

SEQ ID NO: 1065715 - RNA, 19 nt, Artificial Sequence
  Description of Artificial Sequence: Synthetic oligonucleotide
  Antisense strand to SEQ ID NO: 1065714
uuauuuggcgauauacaau

SEQ ID NO: 1065716 - RNA, 19 nt, Artificial Sequence
  Description of Artificial Sequence: Synthetic oligonucleotide
  Sense strand starting at position 3336 of SEQ ID NO: 915250
augaacacuuuccuagagu

SEQ ID NO: 1065717 - RNA, 19 nt, Artificial Sequence
  Description of Artificial Sequence: Synthetic oligonucleotide
  Antisense strand to SEQ ID NO: 1065716
acucuaggaaaguguucau

SEQ ID NO: 1065718 - RNA, 19 nt, Artificial Sequence
  Description of Artificial Sequence: Synthetic oligonucleotide
  Sense strand starting at position 3408 of SEQ ID NO: 915250
uggagucacaauugauagu

SEQ ID NO: 1065719 - RNA, 19 nt, Artificial Sequence
  Description of Artificial Sequence: Synthetic oligonucleotide
  Antisense strand to SEQ ID NO: 1065718
acuaucaauugugacucca

SEQ ID NO: 1065720 - RNA, 19 nt, Artificial Sequence
  Description of Artificial Sequence: Synthetic oligonucleotide
  Sense strand starting at position 3829 of SEQ ID NO: 915250
ugacccucagaucgugaau

SEQ ID NO: 1065721 - RNA, 19 nt, Artificial Sequence
  Description of Artificial Sequence: Synthetic oligonucleotide
  Antisense strand to SEQ ID NO: 1065720
auucacgaucugaggguca

SEQ ID NO: 1065722 - RNA, 19 nt, Artificial Sequence
  Description of Artificial Sequence: Synthetic oligonucleotide
  Sense strand starting at position 3832 of SEQ ID NO: 915250
cccucagaucgugaauaug

SEQ ID NO: 1065723 - RNA, 19 nt, Artificial Sequence
  Description of Artificial Sequence: Synthetic oligonucleotide
  Antisense strand to SEQ ID NO: 1065722
cauauucacgaucugaggg

SEQ ID NO: 1065724 - RNA, 19 nt, Artificial Sequence
  Description of Artificial Sequence: Synthetic oligonucleotide
  Sense strand starting at position 3835 of SEQ ID NO: 915250
ucagaucgugaauauguua

SEQ ID NO: 1065725 - RNA, 19 nt, Artificial Sequence
  Description of Artificial Sequence: Synthetic oligonucleotide
  Antisense strand to SEQ ID NO: 1065724
uaacauauucacgaucuga

SEQ ID NO: 1065726 - RNA, 19 nt, Artificial Sequence
  Description of Artificial Sequence: Synthetic oligonucleotide
  Sense strand starting at position 3877 of SEQ ID NO: 915250
aucuguuaagaaggcauau

SEQ ID NO: 1065727 - RNA, 19 nt, Artificial Sequence
  Description of Artificial Sequence: Synthetic oligonucleotide
  Antisense strand to SEQ ID NO: 1065726
auaugccuucuuaacagau

SEQ ID NO: 1065728 - RNA, 19 nt, Artificial Sequence
  Description of Artificial Sequence: Synthetic oligonucleotide
  Sense strand starting at position 163 of SEQ ID NO: 915251
gcaauagugcuagaaucug

SEQ ID NO: 1065729 - RNA, 19 nt, Artificial Sequence
  Description of Artificial Sequence: Synthetic oligonucleotide
  Antisense strand to SEQ ID NO: 1065728
cagauucuagcacuauugc

SEQ ID NO: 1065730 - RNA, 19 nt, Artificial Sequence
  Description of Artificial Sequence: Synthetic oligonucleotide
  Sense strand starting at position 293 of SEQ ID NO: 915251
gagauagcauacuuuauug

SEQ ID NO: 1065731 - RNA, 19 nt, Artificial Sequence
  Description of Artificial Sequence: Synthetic oligonucleotide
  Antisense strand to SEQ ID NO: 1065730
caauaaaguaugcuaucuc

SEQ ID NO: 1065732 - RNA, 19 nt, Artificial Sequence
  Description of Artificial Sequence: Synthetic oligonucleotide
  Sense strand starting at position 640 of SEQ ID NO: 915251
cuacauguucucuaugguu

SEQ ID NO: 1065733 - RNA, 19 nt, Artificial Sequence
  Description of Artificial Sequence: Synthetic oligonucleotide
  Antisense strand to SEQ ID NO: 1065732
aaccauagagaacauguag

SEQ ID NO: 1065734 - RNA, 19 nt, Artificial Sequence
  Description of Artificial Sequence: Synthetic oligonucleotide
  Sense strand starting at position 872 of SEQ ID NO: 915251
auuccauugagguggcaaa

SEQ ID NO: 1065735 - RNA, 19 nt, Artificial Sequence
  Description of Artificial Sequence: Synthetic oligonucleotide
  Antisense strand to SEQ ID NO: 1065734
uuugccaccucaauggaau

SEQ ID NO: 1065736 - RNA, 19 nt, Artificial Sequence
  Description of Artificial Sequence: Synthetic oligonucleotide
  Sense strand starting at position 902 of SEQ ID NO: 915251
gcucuaagaggacauguuu

SEQ ID NO: 1065737 - RNA, 19 nt, Artificial Sequence
  Description of Artificial Sequence: Synthetic oligonucleotide
  Antisense strand to SEQ ID NO: 1065736
aaacauguccucuuagagc

SEQ ID NO: 1065738 - RNA, 19 nt, Artificial Sequence
  Description of Artificial Sequence: Synthetic oligonucleotide
  Sense strand starting at position 973 of SEQ ID NO: 915251
uguuauaauugguuugaca

SEQ ID NO: 1065739 - RNA, 19 nt, Artificial Sequence
  Description of Artificial Sequence: Synthetic oligonucleotide
  Antisense strand to SEQ ID NO: 1065738
ugucaaaccaauuauaaca

SEQ ID NO: 1065740 - RNA, 19 nt, Artificial Sequence
  Description of Artificial Sequence: Synthetic oligonucleotide
  Sense strand starting at position 975 of SEQ ID NO: 915251
uuauaauugguuugacaga

SEQ ID NO: 1065741 - RNA, 19 nt, Artificial Sequence
  Description of Artificial Sequence: Synthetic oligonucleotide
  Antisense strand to SEQ ID NO: 1065740
ucugucaaaccaauuauaa

SEQ ID NO: 1065742 - RNA, 19 nt, Artificial Sequence
  Description of Artificial Sequence: Synthetic oligonucleotide
  Sense strand starting at position 980 of SEQ ID NO: 915251
auugguuugacagaguacu

SEQ ID NO: 1065743 - RNA, 19 nt, Artificial Sequence
  Description of Artificial Sequence: Synthetic oligonucleotide
  Antisense strand to SEQ ID NO: 1065742
aguacucugucaaaccaau

SEQ ID NO: 1065744 - RNA, 19 nt, Artificial Sequence
  Description of Artificial Sequence: Synthetic oligonucleotide
  Sense strand starting at position 1019 of SEQ ID NO: 915251
cuaugcaacugaguauuaa

SEQ ID NO: 1065745 - RNA, 19 nt, Artificial Sequence
  Description of Artificial Sequence: Synthetic oligonucleotide
  Antisense strand to SEQ ID NO: 1065744
uuaauacucaguugcauag

SEQ ID NO: 1065746 - RNA, 19 nt, Artificial Sequence
  Description of Artificial Sequence: Synthetic oligonucleotide
  Sense strand starting at position 1020 of SEQ ID NO: 915251
uaugcaacugaguauuaag

SEQ ID NO: 1065747 - RNA, 19 nt, Artificial Sequence
  Description of Artificial Sequence: Synthetic oligonucleotide
  Antisense strand to SEQ ID NO: 1065746
cuuaauacucaguugcaua

SEQ ID NO: 1065748 - RNA, 19 nt, Artificial Sequence
  Description of Artificial Sequence: Synthetic oligonucleotide
  Sense strand starting at position 2003 of SEQ ID NO: 915251
uugguaacugugcaaacua

SEQ ID NO: 1065749 - RNA, 19 nt, Artificial Sequence
  Description of Artificial Sequence: Synthetic oligonucleotide
  Antisense strand to SEQ ID NO: 1065748
uaguuugcacaguuaccaa

SEQ ID NO: 1065750 - RNA, 19 nt, Artificial Sequence
  Description of Artificial Sequence: Synthetic oligonucleotide
  Sense strand starting at position 2078 of SEQ ID NO: 915251
auguaugagcaauagaggu

SEQ ID NO: 1065751 - RNA, 19 nt, Artificial Sequence
  Description of Artificial Sequence: Synthetic oligonucleotide
  Antisense strand to SEQ ID NO: 1065750
accucuauugcucauacau

SEQ ID NO: 1065752 - RNA, 19 nt, Artificial Sequence
  Description of Artificial Sequence: Synthetic oligonucleotide
  Sense strand starting at position 2080 of SEQ ID NO: 915251
guaugagcaauagagguau

SEQ ID NO: 1065753 - RNA, 19 nt, Artificial Sequence
  Description of Artificial Sequence: Synthetic oligonucleotide
  Antisense strand to SEQ ID NO: 1065752
auaccucuauugcucauac

SEQ ID NO: 1065754 - RNA, 19 nt, Artificial Sequence
  Description of Artificial Sequence: Synthetic oligonucleotide
  Sense strand starting at position 2416 of SEQ ID NO: 915251
gaguaaugaauagggcagu

SEQ ID NO: 1065755 - RNA, 19 nt, Artificial Sequence
  Description of Artificial Sequence: Synthetic oligonucleotide
  Antisense strand to SEQ ID NO: 1065754
acugcccuauucauuacuc

SEQ ID NO: 1065756 - RNA, 19 nt, Artificial Sequence
  Description of Artificial Sequence: Synthetic oligonucleotide
  Sense strand starting at position 2433 of SEQ ID NO: 915251
guaggaaaucucugaucau

SEQ ID NO: 1065757 - RNA, 19 nt, Artificial Sequence
  Description of Artificial Sequence: Synthetic oligonucleotide
  Antisense strand to SEQ ID NO: 1065756
augaucagagauuuccuac

SEQ ID NO: 1065758 - RNA, 19 nt, Artificial Sequence
  Description of Artificial Sequence: Synthetic oligonucleotide
  Sense strand starting at position 2511 of SEQ ID NO: 915251
augccauaauuugagaauu

SEQ ID NO: 1065759 - RNA, 19 nt, Artificial Sequence
  Description of Artificial Sequence: Synthetic oligonucleotide
  Antisense strand to SEQ ID NO: 1065758
aauucucaaauuauggcau

SEQ ID NO: 1065760 - RNA, 19 nt, Artificial Sequence
  Description of Artificial Sequence: Synthetic oligonucleotide
  Sense strand starting at position 2815 of SEQ ID NO: 915251
uuaggaaguaggcaguaau

SEQ ID NO: 1065761 - RNA, 19 nt, Artificial Sequence
  Description of Artificial Sequence: Synthetic oligonucleotide
  Antisense strand to SEQ ID NO: 1065760
auuacugccuacuuccuaa

SEQ ID NO: 1065762 - RNA, 19 nt, Artificial Sequence
  Description of Artificial Sequence: Synthetic oligonucleotide
  Sense strand starting at position 2818 of SEQ ID NO: 915251
ggaaguaggcaguaauauc

SEQ ID NO: 1065763 - RNA, 19 nt, Artificial Sequence
  Description of Artificial Sequence: Synthetic oligonucleotide
  Antisense strand to SEQ ID NO: 1065762
gauauuacugccuacuucc

SEQ ID NO: 1065764 - RNA, 19 nt, Artificial Sequence
  Description of Artificial Sequence: Synthetic oligonucleotide
  Sense strand starting at position 2865 of SEQ ID NO: 915251
ggcacaaagaguuggauaa

SEQ ID NO: 1065765 - RNA, 19 nt, Artificial Sequence
  Description of Artificial Sequence: Synthetic oligonucleotide
  Antisense strand to SEQ ID NO: 1065764
uuauccaacucuuugugcc

SEQ ID NO: 1065766 - RNA, 19 nt, Artificial Sequence
  Description of Artificial Sequence: Synthetic oligonucleotide
  Sense strand starting at position 2866 of SEQ ID NO: 915251
gcacaaagaguuggauaau

SEQ ID NO: 1065767 - RNA, 19 nt, Artificial Sequence
  Description of Artificial Sequence: Synthetic oligonucleotide
  Antisense strand to SEQ ID NO: 1065766
auuauccaacucuuugugc

SEQ ID NO: 1065768 - RNA, 19 nt, Artificial Sequence
  Description of Artificial Sequence: Synthetic oligonucleotide
  Sense strand starting at position 2907 of SEQ ID NO: 915251
uaaguuguaguguaaggau

SEQ ID NO: 1065769 - RNA, 19 nt, Artificial Sequence
  Description of Artificial Sequence: Synthetic oligonucleotide
  Antisense strand to SEQ ID NO: 1065768
auccuuacacuacaacuua

SEQ ID NO: 1065770 - RNA, 19 nt, Artificial Sequence
  Description of Artificial Sequence: Synthetic oligonucleotide
  Sense strand starting at position 3005 of SEQ ID NO: 915251
auuguuaggaagugagaau

SEQ ID NO: 1065771 - RNA, 19 nt, Artificial Sequence
  Description of Artificial Sequence: Synthetic oligonucleotide
  Antisense strand to SEQ ID NO: 1065770
auucucacuuccuaacaau

SEQ ID NO: 1065772 - RNA, 19 nt, Artificial Sequence
  Description of Artificial Sequence: Synthetic oligonucleotide
  Sense strand starting at position 3075 of SEQ ID NO: 915251
augacugaagcaugaagua

SEQ ID NO: 1065773 - RNA, 19 nt, Artificial Sequence
  Description of Artificial Sequence: Synthetic oligonucleotide
  Antisense strand to SEQ ID NO: 1065772
uacuucaugcuucagucau

SEQ ID NO: 1065774 - RNA, 19 nt, Artificial Sequence
  Description of Artificial Sequence: Synthetic oligonucleotide
  Sense strand starting at position 3130 of SEQ ID NO: 915251
ucgaguauuggagacugua

SEQ ID NO: 1065775 - RNA, 19 nt, Artificial Sequence
  Description of Artificial Sequence: Synthetic oligonucleotide
  Antisense strand to SEQ ID NO: 1065774
uacagucuccaauacucga

SEQ ID NO: 1065776 - RNA, 19 nt, Artificial Sequence
  Description of Artificial Sequence: Synthetic oligonucleotide
  Sense strand starting at position 3133 of SEQ ID NO: 915251
aguauuggagacuguauaa

SEQ ID NO: 1065777 - RNA, 19 nt, Artificial Sequence
  Description of Artificial Sequence: Synthetic oligonucleotide
  Antisense strand to SEQ ID NO: 1065776
uuauacagucuccaauacu

SEQ ID NO: 1065778 - RNA, 19 nt, Artificial Sequence
  Description of Artificial Sequence: Synthetic oligonucleotide
  Sense strand starting at position 3191 of SEQ ID NO: 915251
guauauugcaagggaggca

SEQ ID NO: 1065779 - RNA, 19 nt, Artificial Sequence
  Description of Artificial Sequence: Synthetic oligonucleotide
  Antisense strand to SEQ ID NO: 1065778
ugccucccuugcaauauac

SEQ ID NO: 1065780 - RNA, 19 nt, Artificial Sequence
  Description of Artificial Sequence: Synthetic oligonucleotide
  Sense strand starting at position 3225 of SEQ ID NO: 915251
augggacccuuccagauuu

SEQ ID NO: 1065781 - RNA, 19 nt, Artificial Sequence
  Description of Artificial Sequence: Synthetic oligonucleotide
  Antisense strand to SEQ ID NO: 1065780
aaaucuggaagggucccau

SEQ ID NO: 1065782 - RNA, 19 nt, Artificial Sequence
  Description of Artificial Sequence: Synthetic oligonucleotide
  Sense strand starting at position 3301 of SEQ ID NO: 915251
cgcuuaccucaauggagaa

SEQ ID NO: 1065783 - RNA, 19 nt, Artificial Sequence
  Description of Artificial Sequence: Synthetic oligonucleotide
  Antisense strand to SEQ ID NO: 1065782
uucuccauugagguaagcg

SEQ ID NO: 1065784 - RNA, 19 nt, Artificial Sequence
  Description of Artificial Sequence: Synthetic oligonucleotide
  Sense strand starting at position 3313 of SEQ ID NO: 915251
uggagaauuugcuuugcuu

SEQ ID NO: 1065785 - RNA, 19 nt, Artificial Sequence
  Description of Artificial Sequence: Synthetic oligonucleotide
  Antisense strand to SEQ ID NO: 1065784
aagcaaagcaaauucucca

SEQ ID NO: 1065786 - RNA, 19 nt, Artificial Sequence
  Description of Artificial Sequence: Synthetic oligonucleotide
  Sense strand starting at position 3354 of SEQ ID NO: 915251
guggcuaccgaauggauuu

SEQ ID NO: 1065787 - RNA, 19 nt, Artificial Sequence
  Description of Artificial Sequence: Synthetic oligonucleotide
  Antisense strand to SEQ ID NO: 1065786
aaauccauucgguagccac

SEQ ID NO: 1065788 - RNA, 19 nt, Artificial Sequence
  Description of Artificial Sequence: Synthetic oligonucleotide
  Sense strand starting at position 3392 of SEQ ID NO: 915251
gagacucauuguguugaaa

SEQ ID NO: 1065789 - RNA, 19 nt, Artificial Sequence
  Description of Artificial Sequence: Synthetic oligonucleotide
  Antisense strand to SEQ ID NO: 1065788
uuucaacacaaugagucuc

SEQ ID NO: 1065790 - RNA, 19 nt, Artificial Sequence
  Description of Artificial Sequence: Synthetic oligonucleotide
  Sense strand starting at position 3395 of SEQ ID NO: 915251
acucauuguguugaaaugu

SEQ ID NO: 1065791 - RNA, 19 nt, Artificial Sequence
  Description of Artificial Sequence: Synthetic oligonucleotide
  Antisense strand to SEQ ID NO: 1065790
acauuucaacacaaugagu

SEQ ID NO: 1065792 - RNA, 19 nt, Artificial Sequence
  Description of Artificial Sequence: Synthetic oligonucleotide
  Sense strand starting at position 3454 of SEQ ID NO: 915251
gagggaaagugccuugaau

SEQ ID NO: 1065793 - RNA, 19 nt, Artificial Sequence
  Description of Artificial Sequence: Synthetic oligonucleotide
  Antisense strand to SEQ ID NO: 1065792
auucaaggcacuuucccuc

SEQ ID NO: 1065794 - RNA, 19 nt, Artificial Sequence
  Description of Artificial Sequence: Synthetic oligonucleotide
  Sense strand starting at position 3456 of SEQ ID NO: 915251
gggaaagugccuugaauau

SEQ ID NO: 1065795 - RNA, 19 nt, Artificial Sequence
  Description of Artificial Sequence: Synthetic oligonucleotide
  Antisense strand to SEQ ID NO: 1065794
auauucaaggcacuuuccc

SEQ ID NO: 1065796 - RNA, 19 nt, Artificial Sequence
  Description of Artificial Sequence: Synthetic oligonucleotide
  Sense strand starting at position 3465 of SEQ ID NO: 915251
ccuugaauaucuguugauu

SEQ ID NO: 1065797 - RNA, 19 nt, Artificial Sequence
  Description of Artificial Sequence: Synthetic oligonucleotide
  Antisense strand to SEQ ID NO: 1065796
aaucaacagauauucaagg

SEQ ID NO: 1065798 - RNA, 19 nt, Artificial Sequence
  Description of Artificial Sequence: Synthetic oligonucleotide
  Sense strand starting at position 3633 of SEQ ID NO: 915251
agucacaaguaagugaaau

SEQ ID NO: 1065799 - RNA, 19 nt, Artificial Sequence
  Description of Artificial Sequence: Synthetic oligonucleotide
  Antisense strand to SEQ ID NO: 1065798
auuucacuuacuugugacu

SEQ ID NO: 1065800 - RNA, 19 nt, Artificial Sequence
  Description of Artificial Sequence: Synthetic oligonucleotide
  Sense strand starting at position 3645 of SEQ ID NO: 915251
gugaaauaaugacuuucuu

SEQ ID NO: 1065801 - RNA, 19 nt, Artificial Sequence
  Description of Artificial Sequence: Synthetic oligonucleotide
  Antisense strand to SEQ ID NO: 1065800
aagaaagucauuauuucac

SEQ ID NO: 1065802 - RNA, 19 nt, Artificial Sequence
  Description of Artificial Sequence: Synthetic oligonucleotide
  Sense strand starting at position 3801 of SEQ ID NO: 915251
uguuuaugucaagaaauca

SEQ ID NO: 1065803 - RNA, 19 nt, Artificial Sequence
  Description of Artificial Sequence: Synthetic oligonucleotide
  Antisense strand to SEQ ID NO: 1065802
ugauuucuugacauaaaca

SEQ ID NO: 1065804 - RNA, 19 nt, Artificial Sequence
  Description of Artificial Sequence: Synthetic oligonucleotide
  Sense strand starting at position 3809 of SEQ ID NO: 915251
ucaagaaaucaguggcaaa

SEQ ID NO: 1065805 - RNA, 19 nt, Artificial Sequence
  Description of Artificial Sequence: Synthetic oligonucleotide
  Antisense strand to SEQ ID NO: 1065804
uuugccacugauuucuuga

SEQ ID NO: 1065806 - RNA, 19 nt, Artificial Sequence
  Description of Artificial Sequence: Synthetic oligonucleotide
  Sense strand starting at position 3853 of SEQ ID NO: 915251
aucauuuaucucuggcugu

SEQ ID NO: 1065807 - RNA, 19 nt, Artificial Sequence
  Description of Artificial Sequence: Synthetic oligonucleotide
  Antisense strand to SEQ ID NO: 1065806
acagccagagauaaaugau

SEQ ID NO: 1065808 - RNA, 19 nt, Artificial Sequence
  Description of Artificial Sequence: Synthetic oligonucleotide
  Sense strand starting at position 62 of SEQ ID NO: 915252
gcaaucaaacagugaagua

SEQ ID NO: 1065809 - RNA, 19 nt, Artificial Sequence
  Description of Artificial Sequence: Synthetic oligonucleotide
  Antisense strand to SEQ ID NO: 1065808
uacuucacuguuugauugc

SEQ ID NO: 1065810 - RNA, 19 nt, Artificial Sequence
  Description of Artificial Sequence: Synthetic oligonucleotide
  Sense strand starting at position 100 of SEQ ID NO: 915252
cgauauagugcauauugau

SEQ ID NO: 1065811 - RNA, 19 nt, Artificial Sequence
  Description of Artificial Sequence: Synthetic oligonucleotide
  Antisense strand to SEQ ID NO: 1065810
aucaauaugcacuauaucg

SEQ ID NO: 1065812 - RNA, 19 nt, Artificial Sequence
  Description of Artificial Sequence: Synthetic oligonucleotide
  Sense strand starting at position 131 of SEQ ID NO: 915252
uugucaacucagugagaga

SEQ ID NO: 1065813 - RNA, 19 nt, Artificial Sequence
  Description of Artificial Sequence: Synthetic oligonucleotide
  Antisense strand to SEQ ID NO: 1065812
ucucucacugaguugacaa

SEQ ID NO: 1065814 - RNA, 19 nt, Artificial Sequence
  Description of Artificial Sequence: Synthetic oligonucleotide
  Sense strand starting at position 354 of SEQ ID NO: 915252
ugauauaucuacucaugua

SEQ ID NO: 1065815 - RNA, 19 nt, Artificial Sequence
  Description of Artificial Sequence: Synthetic oligonucleotide
  Antisense strand to SEQ ID NO: 1065814
uacaugaguagauauauca

SEQ ID NO: 1065816 - RNA, 19 nt, Artificial Sequence
  Description of Artificial Sequence: Synthetic oligonucleotide
  Sense strand starting at position 419 of SEQ ID NO: 915252
accgauuauugagcuacaa

SEQ ID NO: 1065817 - RNA, 19 nt, Artificial Sequence
  Description of Artificial Sequence: Synthetic oligonucleotide
  Antisense strand to SEQ ID NO: 1065816
uuguagcucaauaaucggu

SEQ ID NO: 1065818 - RNA, 19 nt, Artificial Sequence
  Description of Artificial Sequence: Synthetic oligonucleotide
  Sense strand starting at position 421 of SEQ ID NO: 915252
cgauuauugagcuacaaag

SEQ ID NO: 1065819 - RNA, 19 nt, Artificial Sequence
  Description of Artificial Sequence: Synthetic oligonucleotide
  Antisense strand to SEQ ID NO: 1065818
cuuuguagcucaauaaucg

SEQ ID NO: 1065820 - RNA, 19 nt, Artificial Sequence
  Description of Artificial Sequence: Synthetic oligonucleotide
  Sense strand starting at position 423 of SEQ ID NO: 915252
auuauugagcuacaaagua

SEQ ID NO: 1065821 - RNA, 19 nt, Artificial Sequence
  Description of Artificial Sequence: Synthetic oligonucleotide
  Antisense strand to SEQ ID NO: 1065820
uacuuuguagcucaauaau

SEQ ID NO: 1065822 - RNA, 19 nt, Artificial Sequence
  Description of Artificial Sequence: Synthetic oligonucleotide
  Sense strand starting at position 451 of SEQ ID NO: 915252
aacagacuucuauguggaa

SEQ ID NO: 1065823 - RNA, 19 nt, Artificial Sequence
  Description of Artificial Sequence: Synthetic oligonucleotide
  Antisense strand to SEQ ID NO: 1065822
uuccacauagaagucuguu

SEQ ID NO: 1065824 - RNA, 19 nt, Artificial Sequence
  Description of Artificial Sequence: Synthetic oligonucleotide
  Sense strand starting at position 452 of SEQ ID NO: 915252
acagacuucuauguggaaa

SEQ ID NO: 1065825 - RNA, 19 nt, Artificial Sequence
  Description of Artificial Sequence: Synthetic oligonucleotide
  Antisense strand to SEQ ID NO: 1065824
uuuccacauagaagucugu

SEQ ID NO: 1065826 - RNA, 19 nt, Artificial Sequence
  Description of Artificial Sequence: Synthetic oligonucleotide
  Sense strand starting at position 496 of SEQ ID NO: 915252
ggauccuaauauucggaau

SEQ ID NO: 1065827 - RNA, 19 nt, Artificial Sequence
  Description of Artificial Sequence: Synthetic oligonucleotide
  Antisense strand to SEQ ID NO: 1065826
auuccgaauauuaggaucc

SEQ ID NO: 1065828 - RNA, 19 nt, Artificial Sequence
  Description of Artificial Sequence: Synthetic oligonucleotide
  Sense strand starting at position 509 of SEQ ID NO: 915252
cggaauaguaauuauucga

SEQ ID NO: 1065829 - RNA, 19 nt, Artificial Sequence
  Description of Artificial Sequence: Synthetic oligonucleotide
  Antisense strand to SEQ ID NO: 1065828
ucgaauaauuacuauuccg

SEQ ID NO: 1065830 - RNA, 19 nt, Artificial Sequence
  Description of Artificial Sequence: Synthetic oligonucleotide
  Sense strand starting at position 512 of SEQ ID NO: 915252
aauaguaauuauucgagca

SEQ ID NO: 1065831 - RNA, 19 nt, Artificial Sequence
  Description of Artificial Sequence: Synthetic oligonucleotide
  Antisense strand to SEQ ID NO: 1065830
ugcucgaauaauuacuauu

SEQ ID NO: 1065832 - RNA, 19 nt, Artificial Sequence
  Description of Artificial Sequence: Synthetic oligonucleotide
  Sense strand starting at position 525 of SEQ ID NO: 915252
cgagcacaucuguaagacu

SEQ ID NO: 1065833 - RNA, 19 nt, Artificial Sequence
  Description of Artificial Sequence: Synthetic oligonucleotide
  Antisense strand to SEQ ID NO: 1065832
agucuuacagaugugcucg

SEQ ID NO: 1065834 - RNA, 19 nt, Artificial Sequence
  Description of Artificial Sequence: Synthetic oligonucleotide
  Sense strand starting at position 937 of SEQ ID NO: 915252
gccuaucauguaugagaca

SEQ ID NO: 1065835 - RNA, 19 nt, Artificial Sequence
  Description of Artificial Sequence: Synthetic oligonucleotide
  Antisense strand to SEQ ID NO: 1065834
ugucucauacaugauaggc

SEQ ID NO: 1065836 - RNA, 19 nt, Artificial Sequence
  Description of Artificial Sequence: Synthetic oligonucleotide
  Sense strand starting at position 988 of SEQ ID NO: 915252
uuaugucuucuggaaguau

SEQ ID NO: 1065837 - RNA, 19 nt, Artificial Sequence
  Description of Artificial Sequence: Synthetic oligonucleotide
  Antisense strand to SEQ ID NO: 1065836
auacuuccagaagacauaa

SEQ ID NO: 1065838 - RNA, 19 nt, Artificial Sequence
  Description of Artificial Sequence: Synthetic oligonucleotide
  Sense strand starting at position 2436 of SEQ ID NO: 915252
uagauaguuaauggguaga

SEQ ID NO: 1065839 - RNA, 19 nt, Artificial Sequence
  Description of Artificial Sequence: Synthetic oligonucleotide
  Antisense strand to SEQ ID NO: 1065838
ucuacccauuaacuaucua

SEQ ID NO: 1065840 - RNA, 19 nt, Artificial Sequence
  Description of Artificial Sequence: Synthetic oligonucleotide
  Sense strand starting at position 2438 of SEQ ID NO: 915252
gauaguuaauggguagaua

SEQ ID NO: 1065841 - RNA, 19 nt, Artificial Sequence
  Description of Artificial Sequence: Synthetic oligonucleotide
  Antisense strand to SEQ ID NO: 1065840
uaucuacccauuaacuauc

SEQ ID NO: 1065842 - RNA, 19 nt, Artificial Sequence
  Description of Artificial Sequence: Synthetic oligonucleotide
  Sense strand starting at position 2564 of SEQ ID NO: 915252
guuaauaccguggauaucu

SEQ ID NO: 1065843 - RNA, 19 nt, Artificial Sequence
  Description of Artificial Sequence: Synthetic oligonucleotide
  Antisense strand to SEQ ID NO: 1065842
agauauccacgguauuaac

SEQ ID NO: 1065844 - RNA, 19 nt, Artificial Sequence
  Description of Artificial Sequence: Synthetic oligonucleotide
  Sense strand starting at position 2569 of SEQ ID NO: 915252
uaccguggauaucugauau

SEQ ID NO: 1065845 - RNA, 19 nt, Artificial Sequence
  Description of Artificial Sequence: Synthetic oligonucleotide
  Antisense strand to SEQ ID NO: 1065844
auaucagauauccacggua

SEQ ID NO: 1065846 - RNA, 19 nt, Artificial Sequence
  Description of Artificial Sequence: Synthetic oligonucleotide
  Sense strand starting at position 2781 of SEQ ID NO: 915252
gacagauauuaggcauaug

SEQ ID NO: 1065847 - RNA, 19 nt, Artificial Sequence
  Description of Artificial Sequence: Synthetic oligonucleotide
  Antisense strand to SEQ ID NO: 1065846
cauaugccuaauaucuguc

SEQ ID NO: 1065848 - RNA, 19 nt, Artificial Sequence
  Description of Artificial Sequence: Synthetic oligonucleotide
  Sense strand starting at position 2814 of SEQ ID NO: 915252
aacagaugacaguggcaau

SEQ ID NO: 1065849 - RNA, 19 nt, Artificial Sequence
  Description of Artificial Sequence: Synthetic oligonucleotide
  Antisense strand to SEQ ID NO: 1065848
auugccacugucaucuguu

SEQ ID NO: 1065850 - RNA, 19 nt, Artificial Sequence
  Description of Artificial Sequence: Synthetic oligonucleotide
  Sense strand starting at position 2815 of SEQ ID NO: 915252
acagaugacaguggcaauu

SEQ ID NO: 1065851 - RNA, 19 nt, Artificial Sequence
  Description of Artificial Sequence: Synthetic oligonucleotide
  Antisense strand to SEQ ID NO: 1065850
aauugccacugucaucugu

SEQ ID NO: 1065852 - RNA, 19 nt, Artificial Sequence
  Description of Artificial Sequence: Synthetic oligonucleotide
  Sense strand starting at position 2930 of SEQ ID NO: 915252
aggcaaauaguguaaguua

SEQ ID NO: 1065853 - RNA, 19 nt, Artificial Sequence
  Description of Artificial Sequence: Synthetic oligonucleotide
  Antisense strand to SEQ ID NO: 1065852
uaacuuacacuauuugccu

SEQ ID NO: 1065854 - RNA, 19 nt, Artificial Sequence
  Description of Artificial Sequence: Synthetic oligonucleotide
  Sense strand starting at position 2977 of SEQ ID NO: 915252
accaacaugucauugcaga

SEQ ID NO: 1065855 - RNA, 19 nt, Artificial Sequence
  Description of Artificial Sequence: Synthetic oligonucleotide
  Antisense strand to SEQ ID NO: 1065854
ucugcaaugacauguuggu

SEQ ID NO: 1065856 - RNA, 19 nt, Artificial Sequence
  Description of Artificial Sequence: Synthetic oligonucleotide
  Sense strand starting at position 2978 of SEQ ID NO: 915252
ccaacaugucauugcagaa

SEQ ID NO: 1065857 - RNA, 19 nt, Artificial Sequence
  Description of Artificial Sequence: Synthetic oligonucleotide
  Antisense strand to SEQ ID NO: 1065856
uucugcaaugacauguugg

SEQ ID NO: 1065858 - RNA, 19 nt, Artificial Sequence
  Description of Artificial Sequence: Synthetic oligonucleotide
  Sense strand starting at position 2982 of SEQ ID NO: 915252
caugucauugcagaauugu

SEQ ID NO: 1065859 - RNA, 19 nt, Artificial Sequence
  Description of Artificial Sequence: Synthetic oligonucleotide
  Antisense strand to SEQ ID NO: 1065858
acaauucugcaaugacaug

SEQ ID NO: 1065860 - RNA, 19 nt, Artificial Sequence
  Description of Artificial Sequence: Synthetic oligonucleotide
  Sense strand starting at position 2988 of SEQ ID NO: 915252
auugcagaauuguugggaa

SEQ ID NO: 1065861 - RNA, 19 nt, Artificial Sequence
  Description of Artificial Sequence: Synthetic oligonucleotide
  Antisense strand to SEQ ID NO: 1065860
uucccaacaauucugcaau

SEQ ID NO: 1065862 - RNA, 19 nt, Artificial Sequence
  Description of Artificial Sequence: Synthetic oligonucleotide
  Sense strand starting at position 3033 of SEQ ID NO: 915252
ugugucuuugcugccuaga

SEQ ID NO: 1065863 - RNA, 19 nt, Artificial Sequence
  Description of Artificial Sequence: Synthetic oligonucleotide
  Antisense strand to SEQ ID NO: 1065862
ucuaggcagcaaagacaca

SEQ ID NO: 1065864 - RNA, 19 nt, Artificial Sequence
  Description of Artificial Sequence: Synthetic oligonucleotide
  Sense strand starting at position 3112 of SEQ ID NO: 915252
gugacaaugccuuacuuga

SEQ ID NO: 1065865 - RNA, 19 nt, Artificial Sequence
  Description of Artificial Sequence: Synthetic oligonucleotide
  Antisense strand to SEQ ID NO: 1065864
ucaaguaaggcauugucac

SEQ ID NO: 1065866 - RNA, 19 nt, Artificial Sequence
  Description of Artificial Sequence: Synthetic oligonucleotide
  Sense strand starting at position 3222 of SEQ ID NO: 915252
ggucaaguaggauguaaua

SEQ ID NO: 1065867 - RNA, 19 nt, Artificial Sequence
  Description of Artificial Sequence: Synthetic oligonucleotide
  Antisense strand to SEQ ID NO: 1065866
uauuacauccuacuugacc

SEQ ID NO: 1065868 - RNA, 19 nt, Artificial Sequence
  Description of Artificial Sequence: Synthetic oligonucleotide
  Sense strand starting at position 3280 of SEQ ID NO: 915252
augacuaaacuuggguaau

SEQ ID NO: 1065869 - RNA, 19 nt, Artificial Sequence
  Description of Artificial Sequence: Synthetic oligonucleotide
  Antisense strand to SEQ ID NO: 1065868
auuacccaaguuuagucau

SEQ ID NO: 1065870 - RNA, 19 nt, Artificial Sequence
  Description of Artificial Sequence: Synthetic oligonucleotide
  Sense strand starting at position 3282 of SEQ ID NO: 915252
gacuaaacuuggguaauug

SEQ ID NO: 1065871 - RNA, 19 nt, Artificial Sequence
  Description of Artificial Sequence: Synthetic oligonucleotide
  Antisense strand to SEQ ID NO: 1065870
caauuacccaaguuuaguc

SEQ ID NO: 1065872 - RNA, 19 nt, Artificial Sequence
  Description of Artificial Sequence: Synthetic oligonucleotide
  Sense strand starting at position 3286 of SEQ ID NO: 915252
aaacuuggguaauugguau

SEQ ID NO: 1065873 - RNA, 19 nt, Artificial Sequence
  Description of Artificial Sequence: Synthetic oligonucleotide
  Antisense strand to SEQ ID NO: 1065872
auaccaauuacccaaguuu

SEQ ID NO: 1065874 - RNA, 19 nt, Artificial Sequence
  Description of Artificial Sequence: Synthetic oligonucleotide
  Sense strand starting at position 3433 of SEQ ID NO: 915252
ugcuaacuugaaugugaac

SEQ ID NO: 1065875 - RNA, 19 nt, Artificial Sequence
  Description of Artificial Sequence: Synthetic oligonucleotide
  Antisense strand to SEQ ID NO: 1065874
guucacauucaaguuagca

SEQ ID NO: 1065876 - RNA, 19 nt, Artificial Sequence
  Description of Artificial Sequence: Synthetic oligonucleotide
  Sense strand starting at position 3439 of SEQ ID NO: 915252
cuugaaugugaacguuaag

SEQ ID NO: 1065877 - RNA, 19 nt, Artificial Sequence
  Description of Artificial Sequence: Synthetic oligonucleotide
  Antisense strand to SEQ ID NO: 1065876
cuuaacguucacauucaag

SEQ ID NO: 1065878 - RNA, 19 nt, Artificial Sequence
  Description of Artificial Sequence: Synthetic oligonucleotide
  Sense strand starting at position 3442 of SEQ ID NO: 915252
gaaugugaacguuaaguuu

SEQ ID NO: 1065879 - RNA, 19 nt, Artificial Sequence
  Description of Artificial Sequence: Synthetic oligonucleotide
  Antisense strand to SEQ ID NO: 1065878
aaacuuaacguucacauuc

SEQ ID NO: 1065880 - RNA, 19 nt, Artificial Sequence
  Description of Artificial Sequence: Synthetic oligonucleotide
  Sense strand starting at position 3655 of SEQ ID NO: 915252
acaugagauauacguggau

SEQ ID NO: 1065881 - RNA, 19 nt, Artificial Sequence
  Description of Artificial Sequence: Synthetic oligonucleotide
  Antisense strand to SEQ ID NO: 1065880
auccacguauaucucaugu

SEQ ID NO: 1065882 - RNA, 19 nt, Artificial Sequence
  Description of Artificial Sequence: Synthetic oligonucleotide
  Sense strand starting at position 3668 of SEQ ID NO: 915252
guggauuucuggcugugau

SEQ ID NO: 1065883 - RNA, 19 nt, Artificial Sequence
  Description of Artificial Sequence: Synthetic oligonucleotide
  Antisense strand to SEQ ID NO: 1065882
aucacagccagaaauccac

SEQ ID NO: 1065884 - RNA, 19 nt, Artificial Sequence
  Description of Artificial Sequence: Synthetic oligonucleotide
  Sense strand starting at position 3669 of SEQ ID NO: 915252
uggauuucuggcugugauu

SEQ ID NO: 1065885 - RNA, 19 nt, Artificial Sequence
  Description of Artificial Sequence: Synthetic oligonucleotide
  Antisense strand to SEQ ID NO: 1065884
aaucacagccagaaaucca

SEQ ID NO: 1065886 - RNA, 19 nt, Artificial Sequence
  Description of Artificial Sequence: Synthetic oligonucleotide
  Sense strand starting at position 3672 of SEQ ID NO: 915252
auuucuggcugugauuuaa

SEQ ID NO: 1065887 - RNA, 19 nt, Artificial Sequence
  Description of Artificial Sequence: Synthetic oligonucleotide
  Antisense strand to SEQ ID NO: 1065886
uuaaaucacagccagaaau

SEQ ID NO: 1065888 - RNA, 19 nt, Artificial Sequence
  Description of Artificial Sequence: Synthetic oligonucleotide
  Sense strand starting at position 234 of SEQ ID NO: 915253
auguuuagagcagggaaau

SEQ ID NO: 1065889 - RNA, 19 nt, Artificial Sequence
  Description of Artificial Sequence: Synthetic oligonucleotide
  Antisense strand to SEQ ID NO: 1065888
auuucccugcucuaaacau

SEQ ID NO: 1065890 - RNA, 19 nt, Artificial Sequence
  Description of Artificial Sequence: Synthetic oligonucleotide
  Sense strand starting at position 235 of SEQ ID NO: 915253
uguuuagagcagggaaauu

SEQ ID NO: 1065891 - RNA, 19 nt, Artificial Sequence
  Description of Artificial Sequence: Synthetic oligonucleotide
  Antisense strand to SEQ ID NO: 1065890
aauuucccugcucuaaaca

SEQ ID NO: 1065892 - RNA, 19 nt, Artificial Sequence
  Description of Artificial Sequence: Synthetic oligonucleotide
  Sense strand starting at position 264 of SEQ ID NO: 915253
guaguauguaaccagccua

SEQ ID NO: 1065893 - RNA, 19 nt, Artificial Sequence
  Description of Artificial Sequence: Synthetic oligonucleotide
  Antisense strand to SEQ ID NO: 1065892
uaggcugguuacauacuac

SEQ ID NO: 1065894 - RNA, 19 nt, Artificial Sequence
  Description of Artificial Sequence: Synthetic oligonucleotide
  Sense strand starting at position 660 of SEQ ID NO: 915253
gcuggagaccuuuauucua

SEQ ID NO: 1065895 - RNA, 19 nt, Artificial Sequence
  Description of Artificial Sequence: Synthetic oligonucleotide
  Antisense strand to SEQ ID NO: 1065894
uagaauaaaggucuccagc

SEQ ID NO: 1065896 - RNA, 19 nt, Artificial Sequence
  Description of Artificial Sequence: Synthetic oligonucleotide
  Sense strand starting at position 1130 of SEQ ID NO: 915253
uguaaaucaaaggguuaag

SEQ ID NO: 1065897 - RNA, 19 nt, Artificial Sequence
  Description of Artificial Sequence: Synthetic oligonucleotide
  Antisense strand to SEQ ID NO: 1065896
cuuaacccuuugauuuaca

SEQ ID NO: 1065898 - RNA, 19 nt, Artificial Sequence
  Description of Artificial Sequence: Synthetic oligonucleotide
  Sense strand starting at position 1218 of SEQ ID NO: 915253
cugcauguacaugaagagu

SEQ ID NO: 1065899 - RNA, 19 nt, Artificial Sequence
  Description of Artificial Sequence: Synthetic oligonucleotide
  Antisense strand to SEQ ID NO: 1065898
acucuucauguacaugcag

SEQ ID NO: 1065900 - RNA, 19 nt, Artificial Sequence
  Description of Artificial Sequence: Synthetic oligonucleotide
  Sense strand starting at position 1355 of SEQ ID NO: 915253
cuaagacuaucagaaagga

SEQ ID NO: 1065901 - RNA, 19 nt, Artificial Sequence
  Description of Artificial Sequence: Synthetic oligonucleotide
  Antisense strand to SEQ ID NO: 1065900
uccuuucugauagucuuag

SEQ ID NO: 1065902 - RNA, 19 nt, Artificial Sequence
  Description of Artificial Sequence: Synthetic oligonucleotide
  Sense strand starting at position 1526 of SEQ ID NO: 915253
acaucagagccugaaaugu

SEQ ID NO: 1065903 - RNA, 19 nt, Artificial Sequence
  Description of Artificial Sequence: Synthetic oligonucleotide
  Antisense strand to SEQ ID NO: 1065902
acauuucaggcucugaugu

SEQ ID NO: 1065904 - RNA, 19 nt, Artificial Sequence
  Description of Artificial Sequence: Synthetic oligonucleotide
  Sense strand starting at position 1537 of SEQ ID NO: 915253
ugaaaugugcuguagagau

SEQ ID NO: 1065905 - RNA, 19 nt, Artificial Sequence
  Description of Artificial Sequence: Synthetic oligonucleotide
  Antisense strand to SEQ ID NO: 1065904
aucucuacagcacauuuca

SEQ ID NO: 1065906 - RNA, 19 nt, Artificial Sequence
  Description of Artificial Sequence: Synthetic oligonucleotide
  Sense strand starting at position 1539 of SEQ ID NO: 915253
aaaugugcuguagagauau

SEQ ID NO: 1065907 - RNA, 19 nt, Artificial Sequence
  Description of Artificial Sequence: Synthetic oligonucleotide
  Antisense strand to SEQ ID NO: 1065906
auaucucuacagcacauuu

SEQ ID NO: 1065908 - RNA, 19 nt, Artificial Sequence
  Description of Artificial Sequence: Synthetic oligonucleotide
  Sense strand starting at position 1577 of SEQ ID NO: 915253
gacacagucgcugagacau

SEQ ID NO: 1065909 - RNA, 19 nt, Artificial Sequence
  Description of Artificial Sequence: Synthetic oligonucleotide
  Antisense strand to SEQ ID NO: 1065908
augucucagcgacuguguc

SEQ ID NO: 1065910 - RNA, 19 nt, Artificial Sequence
  Description of Artificial Sequence: Synthetic oligonucleotide
  Sense strand starting at position 1583 of SEQ ID NO: 915253
gucgcugagacauaauaac

SEQ ID NO: 1065911 - RNA, 19 nt, Artificial Sequence
  Description of Artificial Sequence: Synthetic oligonucleotide
  Antisense strand to SEQ ID NO: 1065910
guuauuaugucucagcgac

SEQ ID NO: 1065912 - RNA, 19 nt, Artificial Sequence
  Description of Artificial Sequence: Synthetic oligonucleotide
  Sense strand starting at position 1799 of SEQ ID NO: 915253
aagccaaaugucugauaga

SEQ ID NO: 1065913 - RNA, 19 nt, Artificial Sequence
  Description of Artificial Sequence: Synthetic oligonucleotide
  Antisense strand to SEQ ID NO: 1065912
ucuaucagacauuuggcuu

SEQ ID NO: 1065914 - RNA, 19 nt, Artificial Sequence
  Description of Artificial Sequence: Synthetic oligonucleotide
  Sense strand starting at position 1820 of SEQ ID NO: 915253
aguacauagguguauguaa

SEQ ID NO: 1065915 - RNA, 19 nt, Artificial Sequence
  Description of Artificial Sequence: Synthetic oligonucleotide
  Antisense strand to SEQ ID NO: 1065914
uuacauacaccuauguacu

SEQ ID NO: 1065916 - RNA, 19 nt, Artificial Sequence
  Description of Artificial Sequence: Synthetic oligonucleotide
  Sense strand starting at position 1841 of SEQ ID NO: 915253
gggaguccaguuuggucaa

SEQ ID NO: 1065917 - RNA, 19 nt, Artificial Sequence
  Description of Artificial Sequence: Synthetic oligonucleotide
  Antisense strand to SEQ ID NO: 1065916
uugaccaaacuggacuccc

SEQ ID NO: 1065918 - RNA, 19 nt, Artificial Sequence
  Description of Artificial Sequence: Synthetic oligonucleotide
  Sense strand starting at position 1859 of SEQ ID NO: 915253
aaaugaucauaguuagguu

SEQ ID NO: 1065919 - RNA, 19 nt, Artificial Sequence
  Description of Artificial Sequence: Synthetic oligonucleotide
  Antisense strand to SEQ ID NO: 1065918
aaccuaacuaugaucauuu

SEQ ID NO: 1065920 - RNA, 19 nt, Artificial Sequence
  Description of Artificial Sequence: Synthetic oligonucleotide
  Sense strand starting at position 1880 of SEQ ID NO: 915253
ccaccacugugauuaggua

SEQ ID NO: 1065921 - RNA, 19 nt, Artificial Sequence
  Description of Artificial Sequence: Synthetic oligonucleotide
  Antisense strand to SEQ ID NO: 1065920
uaccuaaucacaguggugg

SEQ ID NO: 1065922 - RNA, 19 nt, Artificial Sequence
  Description of Artificial Sequence: Synthetic oligonucleotide
  Sense strand starting at position 1952 of SEQ ID NO: 915253
guuccaucagaaugaauuc

SEQ ID NO: 1065923 - RNA, 19 nt, Artificial Sequence
  Description of Artificial Sequence: Synthetic oligonucleotide
  Antisense strand to SEQ ID NO: 1065922
gaauucauucugauggaac

SEQ ID NO: 1065924 - RNA, 19 nt, Artificial Sequence
  Description of Artificial Sequence: Synthetic oligonucleotide
  Sense strand starting at position 2006 of SEQ ID NO: 915253
ccaguuaucucuucuagga

SEQ ID NO: 1065925 - RNA, 19 nt, Artificial Sequence
  Description of Artificial Sequence: Synthetic oligonucleotide
  Antisense strand to SEQ ID NO: 1065924
uccuagaagagauaacugg

SEQ ID NO: 1065926 - RNA, 19 nt, Artificial Sequence
  Description of Artificial Sequence: Synthetic oligonucleotide
  Sense strand starting at position 2010 of SEQ ID NO: 915253
uuaucucuucuaggaagaa

SEQ ID NO: 1065927 - RNA, 19 nt, Artificial Sequence
  Description of Artificial Sequence: Synthetic oligonucleotide
  Antisense strand to SEQ ID NO: 1065926
uucuuccuagaagagauaa

SEQ ID NO: 1065928 - RNA, 19 nt, Artificial Sequence
  Description of Artificial Sequence: Synthetic oligonucleotide
  Sense strand starting at position 2022 of SEQ ID NO: 915253
ggaagaaacaguuggguua

SEQ ID NO: 1065929 - RNA, 19 nt, Artificial Sequence
  Description of Artificial Sequence: Synthetic oligonucleotide
  Antisense strand to SEQ ID NO: 1065928
uaacccaacuguuucuucc

SEQ ID NO: 1065930 - RNA, 19 nt, Artificial Sequence
  Description of Artificial Sequence: Synthetic oligonucleotide
  Sense strand starting at position 2023 of SEQ ID NO: 915253
gaagaaacaguuggguuau

SEQ ID NO: 1065931 - RNA, 19 nt, Artificial Sequence
  Description of Artificial Sequence: Synthetic oligonucleotide
  Antisense strand to SEQ ID NO: 1065930
auaacccaacuguuucuuc

SEQ ID NO: 1065932 - RNA, 19 nt, Artificial Sequence
  Description of Artificial Sequence: Synthetic oligonucleotide
  Sense strand starting at position 2025 of SEQ ID NO: 915253
agaaacaguuggguuauua

SEQ ID NO: 1065933 - RNA, 19 nt, Artificial Sequence
  Description of Artificial Sequence: Synthetic oligonucleotide
  Antisense strand to SEQ ID NO: 1065932
uaauaacccaacuguuucu

SEQ ID NO: 1065934 - RNA, 19 nt, Artificial Sequence
  Description of Artificial Sequence: Synthetic oligonucleotide
  Sense strand starting at position 2087 of SEQ ID NO: 915253
gacagaauagauuguuauu

SEQ ID NO: 1065935 - RNA, 19 nt, Artificial Sequence
  Description of Artificial Sequence: Synthetic oligonucleotide
  Antisense strand to SEQ ID NO: 1065934
aauaacaaucuauucuguc

SEQ ID NO: 1065936 - RNA, 19 nt, Artificial Sequence
  Description of Artificial Sequence: Synthetic oligonucleotide
  Sense strand starting at position 2246 of SEQ ID NO: 915253
ugaaguauaucgguuaaua

SEQ ID NO: 1065937 - RNA, 19 nt, Artificial Sequence
  Description of Artificial Sequence: Synthetic oligonucleotide
  Antisense strand to SEQ ID NO: 1065936
uauuaaccgauauacuuca

SEQ ID NO: 1065938 - RNA, 19 nt, Artificial Sequence
  Description of Artificial Sequence: Synthetic oligonucleotide
  Sense strand starting at position 2248 of SEQ ID NO: 915253
aaguauaucgguuaauaac

SEQ ID NO: 1065939 - RNA, 19 nt, Artificial Sequence
  Description of Artificial Sequence: Synthetic oligonucleotide
  Antisense strand to SEQ ID NO: 1065938
guuauuaaccgauauacuu

SEQ ID NO: 1065940 - RNA, 19 nt, Artificial Sequence
  Description of Artificial Sequence: Synthetic oligonucleotide
  Sense strand starting at position 2596 of SEQ ID NO: 915253
auaucauagugacuugaca

SEQ ID NO: 1065941 - RNA, 19 nt, Artificial Sequence
  Description of Artificial Sequence: Synthetic oligonucleotide
  Antisense strand to SEQ ID NO: 1065940
ugucaagucacuaugauau

SEQ ID NO: 1065942 - RNA, 19 nt, Artificial Sequence
  Description of Artificial Sequence: Synthetic oligonucleotide
  Sense strand starting at position 2746 of SEQ ID NO: 915253
uuaagaaugucuucuaagg

SEQ ID NO: 1065943 - RNA, 19 nt, Artificial Sequence
  Description of Artificial Sequence: Synthetic oligonucleotide
  Antisense strand to SEQ ID NO: 1065942
ccuuagaagacauucuuaa

SEQ ID NO: 1065944 - RNA, 19 nt, Artificial Sequence
  Description of Artificial Sequence: Synthetic oligonucleotide
  Sense strand starting at position 2788 of SEQ ID NO: 915253
agaugcauuuggcauuuga

SEQ ID NO: 1065945 - RNA, 19 nt, Artificial Sequence
  Description of Artificial Sequence: Synthetic oligonucleotide
  Antisense strand to SEQ ID NO: 1065944
ucaaaugccaaaugcaucu

SEQ ID NO: 1065946 - RNA, 19 nt, Artificial Sequence
  Description of Artificial Sequence: Synthetic oligonucleotide
  Sense strand starting at position 2852 of SEQ ID NO: 915253
uggguuuguuuacuaauua

SEQ ID NO: 1065947 - RNA, 19 nt, Artificial Sequence
  Description of Artificial Sequence: Synthetic oligonucleotide
  Antisense strand to SEQ ID NO: 1065946
uaauuaguaaacaaaccca

SEQ ID NO: 1065948 - RNA, 19 nt, Artificial Sequence
  Description of Artificial Sequence: Synthetic oligonucleotide
  Sense strand starting at position 3072 of SEQ ID NO: 915253
ugaagaugguagguucuau

SEQ ID NO: 1065949 - RNA, 19 nt, Artificial Sequence
  Description of Artificial Sequence: Synthetic oligonucleotide
  Antisense strand to SEQ ID NO: 1065948
auagaaccuaccaucuuca

SEQ ID NO: 1065950 - RNA, 19 nt, Artificial Sequence
  Description of Artificial Sequence: Synthetic oligonucleotide
  Sense strand starting at position 3107 of SEQ ID NO: 915253
uugagaauuuaggacauca

SEQ ID NO: 1065951 - RNA, 19 nt, Artificial Sequence
  Description of Artificial Sequence: Synthetic oligonucleotide
  Antisense strand to SEQ ID NO: 1065950
ugauguccuaaauucucaa

SEQ ID NO: 1065952 - RNA, 19 nt, Artificial Sequence
  Description of Artificial Sequence: Synthetic oligonucleotide
  Sense strand starting at position 3151 of SEQ ID NO: 915253
ggaauuguacaguggagua

SEQ ID NO: 1065953 - RNA, 19 nt, Artificial Sequence
  Description of Artificial Sequence: Synthetic oligonucleotide
  Antisense strand to SEQ ID NO: 1065952
uacuccacuguacaauucc

SEQ ID NO: 1065954 - RNA, 19 nt, Artificial Sequence
  Description of Artificial Sequence: Synthetic oligonucleotide
  Sense strand starting at position 3287 of SEQ ID NO: 915253
gaagaugucuuagccuauu

SEQ ID NO: 1065955 - RNA, 19 nt, Artificial Sequence
  Description of Artificial Sequence: Synthetic oligonucleotide
  Antisense strand to SEQ ID NO: 1065954
aauaggcuaagacaucuuc

SEQ ID NO: 1065956 - RNA, 19 nt, Artificial Sequence
  Description of Artificial Sequence: Synthetic oligonucleotide
  Sense strand starting at position 3348 of SEQ ID NO: 915253
ucuggaacucugugagagu

SEQ ID NO: 1065957 - RNA, 19 nt, Artificial Sequence
  Description of Artificial Sequence: Synthetic oligonucleotide
  Antisense strand to SEQ ID NO: 1065956
acucucacagaguuccaga

SEQ ID NO: 1065958 - RNA, 19 nt, Artificial Sequence
  Description of Artificial Sequence: Synthetic oligonucleotide
  Sense strand starting at position 3433 of SEQ ID NO: 915253
aauggaaugucagcuuuag

SEQ ID NO: 1065959 - RNA, 19 nt, Artificial Sequence
  Description of Artificial Sequence: Synthetic oligonucleotide
  Antisense strand to SEQ ID NO: 1065958
cuaaagcugacauuccauu

SEQ ID NO: 1065960 - RNA, 19 nt, Artificial Sequence
  Description of Artificial Sequence: Synthetic oligonucleotide
  Sense strand starting at position 3560 of SEQ ID NO: 915253
uagguaucugcucauuagu

SEQ ID NO: 1065961 - RNA, 19 nt, Artificial Sequence
  Description of Artificial Sequence: Synthetic oligonucleotide
  Antisense strand to SEQ ID NO: 1065960
acuaaugagcagauaccua

SEQ ID NO: 1065962 - RNA, 19 nt, Artificial Sequence
  Description of Artificial Sequence: Synthetic oligonucleotide
  Sense strand starting at position 3568 of SEQ ID NO: 915253
ugcucauuagugggagaca

SEQ ID NO: 1065963 - RNA, 19 nt, Artificial Sequence
  Description of Artificial Sequence: Synthetic oligonucleotide
  Antisense strand to SEQ ID NO: 1065962
ugucucccacuaaugagca

SEQ ID NO: 1065964 - RNA, 19 nt, Artificial Sequence
  Description of Artificial Sequence: Synthetic oligonucleotide
  Sense strand starting at position 3789 of SEQ ID NO: 915253
gcaggaauugcucacauag

SEQ ID NO: 1065965 - RNA, 19 nt, Artificial Sequence
  Description of Artificial Sequence: Synthetic oligonucleotide
  Antisense strand to SEQ ID NO: 1065964
cuaugugagcaauuccugc

SEQ ID NO: 1065966 - RNA, 19 nt, Artificial Sequence
  Description of Artificial Sequence: Synthetic oligonucleotide
  Sense strand starting at position 3923 of SEQ ID NO: 915253
gucuauuuccauugucacu

SEQ ID NO: 1065967 - RNA, 19 nt, Artificial Sequence
  Description of Artificial Sequence: Synthetic oligonucleotide
  Antisense strand to SEQ ID NO: 1065966
agugacaauggaaauagac

SEQ ID NO: 1065968 - RNA, 19 nt, Artificial Sequence
  Description of Artificial Sequence: Synthetic oligonucleotide
  Sense strand starting at position 68 of SEQ ID NO: 915254
ucucauuuaucugaugagu

SEQ ID NO: 1065969 - RNA, 19 nt, Artificial Sequence
  Description of Artificial Sequence: Synthetic oligonucleotide
  Antisense strand to SEQ ID NO: 1065968
acucaucagauaaaugaga

SEQ ID NO: 1065970 - RNA, 19 nt, Artificial Sequence
  Description of Artificial Sequence: Synthetic oligonucleotide
  Sense strand starting at position 70 of SEQ ID NO: 915254
ucauuuaucugaugaguaa

SEQ ID NO: 1065971 - RNA, 19 nt, Artificial Sequence
  Description of Artificial Sequence: Synthetic oligonucleotide
  Antisense strand to SEQ ID NO: 1065970
uuacucaucagauaaauga

SEQ ID NO: 1065972 - RNA, 19 nt, Artificial Sequence
  Description of Artificial Sequence: Synthetic oligonucleotide
  Sense strand starting at position 73 of SEQ ID NO: 915254
uuuaucugaugaguaaacu

SEQ ID NO: 1065973 - RNA, 19 nt, Artificial Sequence
  Description of Artificial Sequence: Synthetic oligonucleotide
  Antisense strand to SEQ ID NO: 1065972
aguuuacucaucagauaaa

SEQ ID NO: 1065974 - RNA, 19 nt, Artificial Sequence
  Description of Artificial Sequence: Synthetic oligonucleotide
  Sense strand starting at position 113 of SEQ ID NO: 915254
caaugacauguuugggauc

SEQ ID NO: 1065975 - RNA, 19 nt, Artificial Sequence
  Description of Artificial Sequence: Synthetic oligonucleotide
  Antisense strand to SEQ ID NO: 1065974
gaucccaaacaugucauug

SEQ ID NO: 1065976 - RNA, 19 nt, Artificial Sequence
  Description of Artificial Sequence: Synthetic oligonucleotide
  Sense strand starting at position 249 of SEQ ID NO: 915254
ugugcacaacuguauauaa

SEQ ID NO: 1065977 - RNA, 19 nt, Artificial Sequence
  Description of Artificial Sequence: Synthetic oligonucleotide
  Antisense strand to SEQ ID NO: 1065976
uuauauacaguugugcaca

SEQ ID NO: 1065978 - RNA, 19 nt, Artificial Sequence
  Description of Artificial Sequence: Synthetic oligonucleotide
  Sense strand starting at position 259 of SEQ ID NO: 915254
uguauauaauccuuguuac

SEQ ID NO: 1065979 - RNA, 19 nt, Artificial Sequence
  Description of Artificial Sequence: Synthetic oligonucleotide
  Antisense strand to SEQ ID NO: 1065978
guaacaaggauuauauaca

SEQ ID NO: 1065980 - RNA, 19 nt, Artificial Sequence
  Description of Artificial Sequence: Synthetic oligonucleotide
  Sense strand starting at position 260 of SEQ ID NO: 915254
guauauaauccuuguuacu

SEQ ID NO: 1065981 - RNA, 19 nt, Artificial Sequence
  Description of Artificial Sequence: Synthetic oligonucleotide
  Antisense strand to SEQ ID NO: 1065980
aguaacaaggauuauauac

SEQ ID NO: 1065982 - RNA, 19 nt, Artificial Sequence
  Description of Artificial Sequence: Synthetic oligonucleotide
  Sense strand starting at position 352 of SEQ ID NO: 915254
ccagaauucuaucccugag

SEQ ID NO: 1065983 - RNA, 19 nt, Artificial Sequence
  Description of Artificial Sequence: Synthetic oligonucleotide
  Antisense strand to SEQ ID NO: 1065982
cucagggauagaauucugg

SEQ ID NO: 1065984 - RNA, 19 nt, Artificial Sequence
  Description of Artificial Sequence: Synthetic oligonucleotide
  Sense strand starting at position 354 of SEQ ID NO: 915254
agaauucuaucccugaguu

SEQ ID NO: 1065985 - RNA, 19 nt, Artificial Sequence
  Description of Artificial Sequence: Synthetic oligonucleotide
  Antisense strand to SEQ ID NO: 1065984
aacucagggauagaauucu

SEQ ID NO: 1065986 - RNA, 19 nt, Artificial Sequence
  Description of Artificial Sequence: Synthetic oligonucleotide
  Sense strand starting at position 358 of SEQ ID NO: 915254
uucuaucccugaguuacau

SEQ ID NO: 1065987 - RNA, 19 nt, Artificial Sequence
  Description of Artificial Sequence: Synthetic oligonucleotide
  Antisense strand to SEQ ID NO: 1065986
auguaacucagggauagaa

SEQ ID NO: 1065988 - RNA, 19 nt, Artificial Sequence
  Description of Artificial Sequence: Synthetic oligonucleotide
  Sense strand starting at position 403 of SEQ ID NO: 915254
ugagaucuuguaggcauaa

SEQ ID NO: 1065989 - RNA, 19 nt, Artificial Sequence
  Description of Artificial Sequence: Synthetic oligonucleotide
  Antisense strand to SEQ ID NO: 1065988
uuaugccuacaagaucuca

SEQ ID NO: 1065990 - RNA, 19 nt, Artificial Sequence
  Description of Artificial Sequence: Synthetic oligonucleotide
  Sense strand starting at position 404 of SEQ ID NO: 915254
gagaucuuguaggcauaag

SEQ ID NO: 1065991 - RNA, 19 nt, Artificial Sequence
  Description of Artificial Sequence: Synthetic oligonucleotide
  Antisense strand to SEQ ID NO: 1065990
cuuaugccuacaagaucuc

SEQ ID NO: 1065992 - RNA, 19 nt, Artificial Sequence
  Description of Artificial Sequence: Synthetic oligonucleotide
  Sense strand starting at position 429 of SEQ ID NO: 915254
aguucucuuagagaguuag

SEQ ID NO: 1065993 - RNA, 19 nt, Artificial Sequence
  Description of Artificial Sequence: Synthetic oligonucleotide
  Antisense strand to SEQ ID NO: 1065992
cuaacucucuaagagaacu

SEQ ID NO: 1065994 - RNA, 19 nt, Artificial Sequence
  Description of Artificial Sequence: Synthetic oligonucleotide
  Sense strand starting at position 460 of SEQ ID NO: 915254
gaacaagacuuccaggaag

SEQ ID NO: 1065995 - RNA, 19 nt, Artificial Sequence
  Description of Artificial Sequence: Synthetic oligonucleotide
  Antisense strand to SEQ ID NO: 1065994
cuuccuggaagucuuguuc

SEQ ID NO: 1065996 - RNA, 19 nt, Artificial Sequence
  Description of Artificial Sequence: Synthetic oligonucleotide
  Sense strand starting at position 496 of SEQ ID NO: 915254
caguaacauaggugagguu

SEQ ID NO: 1065997 - RNA, 19 nt, Artificial Sequence
  Description of Artificial Sequence: Synthetic oligonucleotide
  Antisense strand to SEQ ID NO: 1065996
aaccucaccuauguuacug

SEQ ID NO: 1065998 - RNA, 19 nt, Artificial Sequence
  Description of Artificial Sequence: Synthetic oligonucleotide
  Sense strand starting at position 512 of SEQ ID NO: 915254
guuagaaagcaguacucuu

SEQ ID NO: 1065999 - RNA, 19 nt, Artificial Sequence
  Description of Artificial Sequence: Synthetic oligonucleotide
  Antisense strand to SEQ ID NO: 1065998
aagaguacugcuuucuaac

SEQ ID NO: 1066000 - RNA, 19 nt, Artificial Sequence
  Description of Artificial Sequence: Synthetic oligonucleotide
  Sense strand starting at position 558 of SEQ ID NO: 915254
gcauaaauauaggacauuu

SEQ ID NO: 1066001 - RNA, 19 nt, Artificial Sequence
  Description of Artificial Sequence: Synthetic oligonucleotide
  Antisense strand to SEQ ID NO: 1066000
aaauguccuauauuuaugc

SEQ ID NO: 1066002 - RNA, 19 nt, Artificial Sequence
  Description of Artificial Sequence: Synthetic oligonucleotide
  Sense strand starting at position 627 of SEQ ID NO: 915254
uuuagacuaugugucuuua

SEQ ID NO: 1066003 - RNA, 19 nt, Artificial Sequence
  Description of Artificial Sequence: Synthetic oligonucleotide
  Antisense strand to SEQ ID NO: 1066002
uaaagacacauagucuaaa

SEQ ID NO: 1066004 - RNA, 19 nt, Artificial Sequence
  Description of Artificial Sequence: Synthetic oligonucleotide
  Sense strand starting at position 648 of SEQ ID NO: 915254
uuucacgugggauauugua

SEQ ID NO: 1066005 - RNA, 19 nt, Artificial Sequence
  Description of Artificial Sequence: Synthetic oligonucleotide
  Antisense strand to SEQ ID NO: 1066004
uacaauaucccacgugaaa

SEQ ID NO: 1066006 - RNA, 19 nt, Artificial Sequence
  Description of Artificial Sequence: Synthetic oligonucleotide
  Sense strand starting at position 723 of SEQ ID NO: 915254
cugugcucugcacauaacu

SEQ ID NO: 1066007 - RNA, 19 nt, Artificial Sequence
  Description of Artificial Sequence: Synthetic oligonucleotide
  Antisense strand to SEQ ID NO: 1066006
aguuaugugcagagcacag

SEQ ID NO: 1066008 - RNA, 19 nt, Artificial Sequence
  Description of Artificial Sequence: Synthetic oligonucleotide
  Sense strand starting at position 1989 of SEQ ID NO: 915254
ugaugugagccauaucuuu

SEQ ID NO: 1066009 - RNA, 19 nt, Artificial Sequence
  Description of Artificial Sequence: Synthetic oligonucleotide
  Antisense strand to SEQ ID NO: 1066008
aaagauauggcucacauca

SEQ ID NO: 1066010 - RNA, 19 nt, Artificial Sequence
  Description of Artificial Sequence: Synthetic oligonucleotide
  Sense strand starting at position 2010 of SEQ ID NO: 915254
uggccaucuaaauguggaa

SEQ ID NO: 1066011 - RNA, 19 nt, Artificial Sequence
  Description of Artificial Sequence: Synthetic oligonucleotide
  Antisense strand to SEQ ID NO: 1066010
uuccacauuuagauggcca

SEQ ID NO: 1066012 - RNA, 19 nt, Artificial Sequence
  Description of Artificial Sequence: Synthetic oligonucleotide
  Sense strand starting at position 2012 of SEQ ID NO: 915254
gccaucuaaauguggaagu

SEQ ID NO: 1066013 - RNA, 19 nt, Artificial Sequence
  Description of Artificial Sequence: Synthetic oligonucleotide
  Antisense strand to SEQ ID NO: 1066012
acuuccacauuuagauggc

SEQ ID NO: 1066014 - RNA, 19 nt, Artificial Sequence
  Description of Artificial Sequence: Synthetic oligonucleotide
  Sense strand starting at position 2037 of SEQ ID NO: 915254
aagaguuaagucuaaguca

SEQ ID NO: 1066015 - RNA, 19 nt, Artificial Sequence
  Description of Artificial Sequence: Synthetic oligonucleotide
  Antisense strand to SEQ ID NO: 1066014
ugacuuagacuuaacucuu

SEQ ID NO: 1066016 - RNA, 19 nt, Artificial Sequence
  Description of Artificial Sequence: Synthetic oligonucleotide
  Sense strand starting at position 2040 of SEQ ID NO: 915254
aguuaagucuaagucauau

SEQ ID NO: 1066017 - RNA, 19 nt, Artificial Sequence
  Description of Artificial Sequence: Synthetic oligonucleotide
  Antisense strand to SEQ ID NO: 1066016
auaugacuuagacuuaacu

SEQ ID NO: 1066018 - RNA, 19 nt, Artificial Sequence
  Description of Artificial Sequence: Synthetic oligonucleotide
  Sense strand starting at position 2204 of SEQ ID NO: 915254
agaauauaacaccguauaa

SEQ ID NO: 1066019 - RNA, 19 nt, Artificial Sequence
  Description of Artificial Sequence: Synthetic oligonucleotide
  Antisense strand to SEQ ID NO: 1066018
uuauacgguguuauauucu

SEQ ID NO: 1066020 - RNA, 19 nt, Artificial Sequence
  Description of Artificial Sequence: Synthetic oligonucleotide
  Sense strand starting at position 2320 of SEQ ID NO: 915254
cuaagagauuuggaaguuu

SEQ ID NO: 1066021 - RNA, 19 nt, Artificial Sequence
  Description of Artificial Sequence: Synthetic oligonucleotide
  Antisense strand to SEQ ID NO: 1066020
aaacuuccaaaucucuuag

SEQ ID NO: 1066022 - RNA, 19 nt, Artificial Sequence
  Description of Artificial Sequence: Synthetic oligonucleotide
  Sense strand starting at position 2331 of SEQ ID NO: 915254
ggaaguuuauguuucuuua

SEQ ID NO: 1066023 - RNA, 19 nt, Artificial Sequence
  Description of Artificial Sequence: Synthetic oligonucleotide
  Antisense strand to SEQ ID NO: 1066022
uaaagaaacauaaacuucc

SEQ ID NO: 1066024 - RNA, 19 nt, Artificial Sequence
  Description of Artificial Sequence: Synthetic oligonucleotide
  Sense strand starting at position 2436 of SEQ ID NO: 915254
uuuaauguuguguaucauc

SEQ ID NO: 1066025 - RNA, 19 nt, Artificial Sequence
  Description of Artificial Sequence: Synthetic oligonucleotide
  Antisense strand to SEQ ID NO: 1066024
gaugauacacaacauuaaa

SEQ ID NO: 1066026 - RNA, 19 nt, Artificial Sequence
  Description of Artificial Sequence: Synthetic oligonucleotide
  Sense strand starting at position 2685 of SEQ ID NO: 915254
cuaauagcucuugaguauu

SEQ ID NO: 1066027 - RNA, 19 nt, Artificial Sequence
  Description of Artificial Sequence: Synthetic oligonucleotide
  Antisense strand to SEQ ID NO: 1066026
aauacucaagagcuauuag

SEQ ID NO: 1066028 - RNA, 19 nt, Artificial Sequence
  Description of Artificial Sequence: Synthetic oligonucleotide
  Sense strand starting at position 3520 of SEQ ID NO: 915254
gcuacucuuguagaagguu

SEQ ID NO: 1066029 - RNA, 19 nt, Artificial Sequence
  Description of Artificial Sequence: Synthetic oligonucleotide
  Antisense strand to SEQ ID NO: 1066028
aaccuucuacaagaguagc

SEQ ID NO: 1066030 - RNA, 19 nt, Artificial Sequence
  Description of Artificial Sequence: Synthetic oligonucleotide
  Sense strand starting at position 3523 of SEQ ID NO: 915254
acucuuguagaagguuauu

SEQ ID NO: 1066031 - RNA, 19 nt, Artificial Sequence
  Description of Artificial Sequence: Synthetic oligonucleotide
  Antisense strand to SEQ ID NO: 1066030
aauaaccuucuacaagagu

SEQ ID NO: 1066032 - RNA, 19 nt, Artificial Sequence
  Description of Artificial Sequence: Synthetic oligonucleotide
  Sense strand starting at position 3600 of SEQ ID NO: 915254
gugcauagagucugaagau

SEQ ID NO: 1066033 - RNA, 19 nt, Artificial Sequence
  Description of Artificial Sequence: Synthetic oligonucleotide
  Antisense strand to SEQ ID NO: 1066032
aucuucagacucuaugcac

SEQ ID NO: 1066034 - RNA, 19 nt, Artificial Sequence
  Description of Artificial Sequence: Synthetic oligonucleotide
  Sense strand starting at position 3636 of SEQ ID NO: 915254
gauaguaguccaggcugga

SEQ ID NO: 1066035 - RNA, 19 nt, Artificial Sequence
  Description of Artificial Sequence: Synthetic oligonucleotide
  Antisense strand to SEQ ID NO: 1066034
uccagccuggacuacuauc

SEQ ID NO: 1066036 - RNA, 19 nt, Artificial Sequence
  Description of Artificial Sequence: Synthetic oligonucleotide
  Sense strand starting at position 3657 of SEQ ID NO: 915254
gaaagcaagcguuauccaa

SEQ ID NO: 1066037 - RNA, 19 nt, Artificial Sequence
  Description of Artificial Sequence: Synthetic oligonucleotide
  Antisense strand to SEQ ID NO: 1066036
uuggauaacgcuugcuuuc

SEQ ID NO: 1066038 - RNA, 19 nt, Artificial Sequence
  Description of Artificial Sequence: Synthetic oligonucleotide
  Sense strand starting at position 3786 of SEQ ID NO: 915254
gagcaugcauuauauuuga

SEQ ID NO: 1066039 - RNA, 19 nt, Artificial Sequence
  Description of Artificial Sequence: Synthetic oligonucleotide
  Antisense strand to SEQ ID NO: 1066038
ucaaauauaaugcaugcuc

SEQ ID NO: 1066040 - RNA, 19 nt, Artificial Sequence
  Description of Artificial Sequence: Synthetic oligonucleotide
  Sense strand starting at position 3791 of SEQ ID NO: 915254
ugcauuauauuugaaagga

SEQ ID NO: 1066041 - RNA, 19 nt, Artificial Sequence
  Description of Artificial Sequence: Synthetic oligonucleotide
  Antisense strand to SEQ ID NO: 1066040
uccuuucaaauauaaugca

SEQ ID NO: 1066042 - RNA, 19 nt, Artificial Sequence
  Description of Artificial Sequence: Synthetic oligonucleotide
  Sense strand starting at position 3800 of SEQ ID NO: 915254
uuugaaaggacaugugacu

SEQ ID NO: 1066043 - RNA, 19 nt, Artificial Sequence
  Description of Artificial Sequence: Synthetic oligonucleotide
  Antisense strand to SEQ ID NO: 1066042
agucacauguccuuucaaa

SEQ ID NO: 1066044 - RNA, 19 nt, Artificial Sequence
  Description of Artificial Sequence: Synthetic oligonucleotide
  Sense strand starting at position 3820 of SEQ ID NO: 915254
uuuauaguaucaucucuga

SEQ ID NO: 1066045 - RNA, 19 nt, Artificial Sequence
  Description of Artificial Sequence: Synthetic oligonucleotide
  Antisense strand to SEQ ID NO: 1066044
ucagagaugauacuauaaa

SEQ ID NO: 1066046 - RNA, 19 nt, Artificial Sequence
  Description of Artificial Sequence: Synthetic oligonucleotide
  Sense strand starting at position 3899 of SEQ ID NO: 915254
auuaaugauuggucucaau

SEQ ID NO: 1066047 - RNA, 19 nt, Artificial Sequence
  Description of Artificial Sequence: Synthetic oligonucleotide
  Antisense strand to SEQ ID NO: 1066046
auugagaccaaucauuaau

SEQ ID NO: 1066048 - RNA, 19 nt, Artificial Sequence
  Description of Artificial Sequence: Synthetic oligonucleotide
  Sense strand starting at position 68 of SEQ ID NO: 915255
ucucauuuaucugaugagu

SEQ ID NO: 1066049 - RNA, 19 nt, Artificial Sequence
  Description of Artificial Sequence: Synthetic oligonucleotide
  Antisense strand to SEQ ID NO: 1066048
acucaucagauaaaugaga

SEQ ID NO: 1066050 - RNA, 19 nt, Artificial Sequence
  Description of Artificial Sequence: Synthetic oligonucleotide
  Sense strand starting at position 70 of SEQ ID NO: 915255
ucauuuaucugaugaguaa

SEQ ID NO: 1066051 - RNA, 19 nt, Artificial Sequence
  Description of Artificial Sequence: Synthetic oligonucleotide
  Antisense strand to SEQ ID NO: 1066050
uuacucaucagauaaauga

SEQ ID NO: 1066052 - RNA, 19 nt, Artificial Sequence
  Description of Artificial Sequence: Synthetic oligonucleotide
  Sense strand starting at position 73 of SEQ ID NO: 915255
uuuaucugaugaguaaacu

SEQ ID NO: 1066053 - RNA, 19 nt, Artificial Sequence
  Description of Artificial Sequence: Synthetic oligonucleotide
  Antisense strand to SEQ ID NO: 1066052
aguuuacucaucagauaaa

SEQ ID NO: 1066054 - RNA, 19 nt, Artificial Sequence
  Description of Artificial Sequence: Synthetic oligonucleotide
  Sense strand starting at position 113 of SEQ ID NO: 915255
caaugacauguuugggauc

SEQ ID NO: 1066055 - RNA, 19 nt, Artificial Sequence
  Description of Artificial Sequence: Synthetic oligonucleotide
  Antisense strand to SEQ ID NO: 1066054
gaucccaaacaugucauug

SEQ ID NO: 1066056 - RNA, 19 nt, Artificial Sequence
  Description of Artificial Sequence: Synthetic oligonucleotide
  Sense strand starting at position 249 of SEQ ID NO: 915255
ugugcacaacuguauauaa

SEQ ID NO: 1066057 - RNA, 19 nt, Artificial Sequence
  Description of Artificial Sequence: Synthetic oligonucleotide
  Antisense strand to SEQ ID NO: 1066056
uuauauacaguugugcaca

SEQ ID NO: 1066058 - RNA, 19 nt, Artificial Sequence
  Description of Artificial Sequence: Synthetic oligonucleotide
  Sense strand starting at position 259 of SEQ ID NO: 915255
uguauauaauccuuguuac

SEQ ID NO: 1066059 - RNA, 19 nt, Artificial Sequence
  Description of Artificial Sequence: Synthetic oligonucleotide
  Antisense strand to SEQ ID NO: 1066058
guaacaaggauuauauaca

SEQ ID NO: 1066060 - RNA, 19 nt, Artificial Sequence
  Description of Artificial Sequence: Synthetic oligonucleotide
  Sense strand starting at position 260 of SEQ ID NO: 915255
guauauaauccuuguuacu

SEQ ID NO: 1066061 - RNA, 19 nt, Artificial Sequence
  Description of Artificial Sequence: Synthetic oligonucleotide
  Antisense strand to SEQ ID NO: 1066060
aguaacaaggauuauauac

SEQ ID NO: 1066062 - RNA, 19 nt, Artificial Sequence
  Description of Artificial Sequence: Synthetic oligonucleotide
  Sense strand starting at position 352 of SEQ ID NO: 915255
ccagaauucuaucccugag

SEQ ID NO: 1066063 - RNA, 19 nt, Artificial Sequence
  Description of Artificial Sequence: Synthetic oligonucleotide
  Antisense strand to SEQ ID NO: 1066062
cucagggauagaauucugg

SEQ ID NO: 1066064 - RNA, 19 nt, Artificial Sequence
  Description of Artificial Sequence: Synthetic oligonucleotide
  Sense strand starting at position 354 of SEQ ID NO: 915255
agaauucuaucccugaguu

SEQ ID NO: 1066065 - RNA, 19 nt, Artificial Sequence
  Description of Artificial Sequence: Synthetic oligonucleotide
  Antisense strand to SEQ ID NO: 1066064
aacucagggauagaauucu

SEQ ID NO: 1066066 - RNA, 19 nt, Artificial Sequence
  Description of Artificial Sequence: Synthetic oligonucleotide
  Sense strand starting at position 358 of SEQ ID NO: 915255
uucuaucccugaguuacau

SEQ ID NO: 1066067 - RNA, 19 nt, Artificial Sequence
  Description of Artificial Sequence: Synthetic oligonucleotide
  Antisense strand to SEQ ID NO: 1066066
auguaacucagggauagaa

SEQ ID NO: 1066068 - RNA, 19 nt, Artificial Sequence
  Description of Artificial Sequence: Synthetic oligonucleotide
  Sense strand starting at position 403 of SEQ ID NO: 915255
ugagaucuuguaggcauaa

SEQ ID NO: 1066069 - RNA, 19 nt, Artificial Sequence
  Description of Artificial Sequence: Synthetic oligonucleotide
  Antisense strand to SEQ ID NO: 1066068
uuaugccuacaagaucuca

SEQ ID NO: 1066070 - RNA, 19 nt, Artificial Sequence
  Description of Artificial Sequence: Synthetic oligonucleotide
  Sense strand starting at position 404 of SEQ ID NO: 915255
gagaucuuguaggcauaag

SEQ ID NO: 1066071 - RNA, 19 nt, Artificial Sequence
  Description of Artificial Sequence: Synthetic oligonucleotide
  Antisense strand to SEQ ID NO: 1066070
cuuaugccuacaagaucuc

SEQ ID NO: 1066072 - RNA, 19 nt, Artificial Sequence
  Description of Artificial Sequence: Synthetic oligonucleotide
  Sense strand starting at position 429 of SEQ ID NO: 915255
aguucucuuagagaguuag

SEQ ID NO: 1066073 - RNA, 19 nt, Artificial Sequence
  Description of Artificial Sequence: Synthetic oligonucleotide
  Antisense strand to SEQ ID NO: 1066072
cuaacucucuaagagaacu

SEQ ID NO: 1066074 - RNA, 19 nt, Artificial Sequence
  Description of Artificial Sequence: Synthetic oligonucleotide
  Sense strand starting at position 460 of SEQ ID NO: 915255
gaacaagacuuccaggaag

SEQ ID NO: 1066075 - RNA, 19 nt, Artificial Sequence
  Description of Artificial Sequence: Synthetic oligonucleotide
  Antisense strand to SEQ ID NO: 1066074
cuuccuggaagucuuguuc

SEQ ID NO: 1066076 - RNA, 19 nt, Artificial Sequence
  Description of Artificial Sequence: Synthetic oligonucleotide
  Sense strand starting at position 496 of SEQ ID NO: 915255
caguaacauaggugagguu

SEQ ID NO: 1066077 - RNA, 19 nt, Artificial Sequence
  Description of Artificial Sequence: Synthetic oligonucleotide
  Antisense strand to SEQ ID NO: 1066076
aaccucaccuauguuacug

SEQ ID NO: 1066078 - RNA, 19 nt, Artificial Sequence
  Description of Artificial Sequence: Synthetic oligonucleotide
  Sense strand starting at position 512 of SEQ ID NO: 915255
guuagaaagcaguacucuu

SEQ ID NO: 1066079 - RNA, 19 nt, Artificial Sequence
  Description of Artificial Sequence: Synthetic oligonucleotide
  Antisense strand to SEQ ID NO: 1066078
aagaguacugcuuucuaac

SEQ ID NO: 1066080 - RNA, 19 nt, Artificial Sequence
  Description of Artificial Sequence: Synthetic oligonucleotide
  Sense strand starting at position 558 of SEQ ID NO: 915255
gcauaaauauaggacauuu

SEQ ID NO: 1066081 - RNA, 19 nt, Artificial Sequence
  Description of Artificial Sequence: Synthetic oligonucleotide
  Antisense strand to SEQ ID NO: 1066080
aaauguccuauauuuaugc

SEQ ID NO: 1066082 - RNA, 19 nt, Artificial Sequence
  Description of Artificial Sequence: Synthetic oligonucleotide
  Sense strand starting at position 627 of SEQ ID NO: 915255
uuuagacuaugugucuuua

SEQ ID NO: 1066083 - RNA, 19 nt, Artificial Sequence
  Description of Artificial Sequence: Synthetic oligonucleotide
  Antisense strand to SEQ ID NO: 1066082
uaaagacacauagucuaaa

SEQ ID NO: 1066084 - RNA, 19 nt, Artificial Sequence
  Description of Artificial Sequence: Synthetic oligonucleotide
  Sense strand starting at position 648 of SEQ ID NO: 915255
uuucacgugggauauugua

SEQ ID NO: 1066085 - RNA, 19 nt, Artificial Sequence
  Description of Artificial Sequence: Synthetic oligonucleotide
  Antisense strand to SEQ ID NO: 1066084
uacaauaucccacgugaaa

SEQ ID NO: 1066086 - RNA, 19 nt, Artificial Sequence
  Description of Artificial Sequence: Synthetic oligonucleotide
  Sense strand starting at position 723 of SEQ ID NO: 915255
cugugcucugcacauaacu

SEQ ID NO: 1066087 - RNA, 19 nt, Artificial Sequence
  Description of Artificial Sequence: Synthetic oligonucleotide
  Antisense strand to SEQ ID NO: 1066086
aguuaugugcagagcacag

SEQ ID NO: 1066088 - RNA, 19 nt, Artificial Sequence
  Description of Artificial Sequence: Synthetic oligonucleotide
  Sense strand starting at position 1989 of SEQ ID NO: 915255
ugaugugagccauaucuuu

SEQ ID NO: 1066089 - RNA, 19 nt, Artificial Sequence
  Description of Artificial Sequence: Synthetic oligonucleotide
  Antisense strand to SEQ ID NO: 1066088
aaagauauggcucacauca

SEQ ID NO: 1066090 - RNA, 19 nt, Artificial Sequence
  Description of Artificial Sequence: Synthetic oligonucleotide
  Sense strand starting at position 2010 of SEQ ID NO: 915255
uggccaucuaaauguggaa

SEQ ID NO: 1066091 - RNA, 19 nt, Artificial Sequence
  Description of Artificial Sequence: Synthetic oligonucleotide
  Antisense strand to SEQ ID NO: 1066090
uuccacauuuagauggcca

SEQ ID NO: 1066092 - RNA, 19 nt, Artificial Sequence
  Description of Artificial Sequence: Synthetic oligonucleotide
  Sense strand starting at position 2012 of SEQ ID NO: 915255
gccaucuaaauguggaagu

SEQ ID NO: 1066093 - RNA, 19 nt, Artificial Sequence
  Description of Artificial Sequence: Synthetic oligonucleotide
  Antisense strand to SEQ ID NO: 1066092
acuuccacauuuagauggc

SEQ ID NO: 1066094 - RNA, 19 nt, Artificial Sequence
  Description of Artificial Sequence: Synthetic oligonucleotide
  Sense strand starting at position 2037 of SEQ ID NO: 915255
aagaguuaagucuaaguca

SEQ ID NO: 1066095 - RNA, 19 nt, Artificial Sequence
  Description of Artificial Sequence: Synthetic oligonucleotide
  Antisense strand to SEQ ID NO: 1066094
ugacuuagacuuaacucuu

SEQ ID NO: 1066096 - RNA, 19 nt, Artificial Sequence
  Description of Artificial Sequence: Synthetic oligonucleotide
  Sense strand starting at position 2040 of SEQ ID NO: 915255
aguuaagucuaagucauau

SEQ ID NO: 1066097 - RNA, 19 nt, Artificial Sequence
  Description of Artificial Sequence: Synthetic oligonucleotide
  Antisense strand to SEQ ID NO: 1066096
auaugacuuagacuuaacu

SEQ ID NO: 1066098 - RNA, 19 nt, Artificial Sequence
  Description of Artificial Sequence: Synthetic oligonucleotide
  Sense strand starting at position 2204 of SEQ ID NO: 915255
agaauauaacaccguauaa

SEQ ID NO: 1066099 - RNA, 19 nt, Artificial Sequence
  Description of Artificial Sequence: Synthetic oligonucleotide
  Antisense strand to SEQ ID NO: 1066098
uuauacgguguuauauucu

SEQ ID NO: 1066100 - RNA, 19 nt, Artificial Sequence
  Description of Artificial Sequence: Synthetic oligonucleotide
  Sense strand starting at position 2320 of SEQ ID NO: 915255
cuaagagauuuggaaguuu

SEQ ID NO: 1066101 - RNA, 19 nt, Artificial Sequence
  Description of Artificial Sequence: Synthetic oligonucleotide
  Antisense strand to SEQ ID NO: 1066100
aaacuuccaaaucucuuag

SEQ ID NO: 1066102 - RNA, 19 nt, Artificial Sequence
  Description of Artificial Sequence: Synthetic oligonucleotide
  Sense strand starting at position 2331 of SEQ ID NO: 915255
ggaaguuuauguuucuuua

SEQ ID NO: 1066103 - RNA, 19 nt, Artificial Sequence
  Description of Artificial Sequence: Synthetic oligonucleotide
  Antisense strand to SEQ ID NO: 1066102
uaaagaaacauaaacuucc

SEQ ID NO: 1066104 - RNA, 19 nt, Artificial Sequence
  Description of Artificial Sequence: Synthetic oligonucleotide
  Sense strand starting at position 2436 of SEQ ID NO: 915255
uuuaauguuguguaucauc

SEQ ID NO: 1066105 - RNA, 19 nt, Artificial Sequence
  Description of Artificial Sequence: Synthetic oligonucleotide
  Antisense strand to SEQ ID NO: 1066104
gaugauacacaacauuaaa

SEQ ID NO: 1066106 - RNA, 19 nt, Artificial Sequence
  Description of Artificial Sequence: Synthetic oligonucleotide
  Sense strand starting at position 2685 of SEQ ID NO: 915255
cuaauagcucuugaguauu

SEQ ID NO: 1066107 - RNA, 19 nt, Artificial Sequence
  Description of Artificial Sequence: Synthetic oligonucleotide
  Antisense strand to SEQ ID NO: 1066106
aauacucaagagcuauuag

SEQ ID NO: 1066108 - RNA, 19 nt, Artificial Sequence
  Description of Artificial Sequence: Synthetic oligonucleotide
  Sense strand starting at position 3520 of SEQ ID NO: 915255
gcuacucuuguagaagguu

SEQ ID NO: 1066109 - RNA, 19 nt, Artificial Sequence
  Description of Artificial Sequence: Synthetic oligonucleotide
  Antisense strand to SEQ ID NO: 1066108
aaccuucuacaagaguagc

SEQ ID NO: 1066110 - RNA, 19 nt, Artificial Sequence
  Description of Artificial Sequence: Synthetic oligonucleotide
  Sense strand starting at position 3523 of SEQ ID NO: 915255
acucuuguagaagguuauu

SEQ ID NO: 1066111 - RNA, 19 nt, Artificial Sequence
  Description of Artificial Sequence: Synthetic oligonucleotide
  Antisense strand to SEQ ID NO: 1066110
aauaaccuucuacaagagu

SEQ ID NO: 1066112 - RNA, 19 nt, Artificial Sequence
  Description of Artificial Sequence: Synthetic oligonucleotide
  Sense strand starting at position 3600 of SEQ ID NO: 915255
gugcauagagucugaagau

SEQ ID NO: 1066113 - RNA, 19 nt, Artificial Sequence
  Description of Artificial Sequence: Synthetic oligonucleotide
  Antisense strand to SEQ ID NO: 1066112
aucuucagacucuaugcac

SEQ ID NO: 1066114 - RNA, 19 nt, Artificial Sequence
  Description of Artificial Sequence: Synthetic oligonucleotide
  Sense strand starting at position 3636 of SEQ ID NO: 915255
gauaguaguccaggcugga

SEQ ID NO: 1066115 - RNA, 19 nt, Artificial Sequence
  Description of Artificial Sequence: Synthetic oligonucleotide
  Antisense strand to SEQ ID NO: 1066114
uccagccuggacuacuauc

SEQ ID NO: 1066116 - RNA, 19 nt, Artificial Sequence
  Description of Artificial Sequence: Synthetic oligonucleotide
  Sense strand starting at position 3657 of SEQ ID NO: 915255
gaaagcaagcguuauccaa

SEQ ID NO: 1066117 - RNA, 19 nt, Artificial Sequence
  Description of Artificial Sequence: Synthetic oligonucleotide
  Antisense strand to SEQ ID NO: 1066116
uuggauaacgcuugcuuuc

SEQ ID NO: 1066118 - RNA, 19 nt, Artificial Sequence
  Description of Artificial Sequence: Synthetic oligonucleotide
  Sense strand starting at position 3786 of SEQ ID NO: 915255
gagcaugcauuauauuuga

SEQ ID NO: 1066119 - RNA, 19 nt, Artificial Sequence
  Description of Artificial Sequence: Synthetic oligonucleotide
  Antisense strand to SEQ ID NO: 1066118
ucaaauauaaugcaugcuc

SEQ ID NO: 1066120 - RNA, 19 nt, Artificial Sequence
  Description of Artificial Sequence: Synthetic oligonucleotide
  Sense strand starting at position 3791 of SEQ ID NO: 915255
ugcauuauauuugaaagga

SEQ ID NO: 1066121 - RNA, 19 nt, Artificial Sequence
  Description of Artificial Sequence: Synthetic oligonucleotide
  Antisense strand to SEQ ID NO: 1066120
uccuuucaaauauaaugca

SEQ ID NO: 1066122 - RNA, 19 nt, Artificial Sequence
  Description of Artificial Sequence: Synthetic oligonucleotide
  Sense strand starting at position 3800 of SEQ ID NO: 915255
uuugaaaggacaugugacu

SEQ ID NO: 1066123 - RNA, 19 nt, Artificial Sequence
  Description of Artificial Sequence: Synthetic oligonucleotide
  Antisense strand to SEQ ID NO: 1066122
agucacauguccuuucaaa

SEQ ID NO: 1066124 - RNA, 19 nt, Artificial Sequence
  Description of Artificial Sequence: Synthetic oligonucleotide
  Sense strand starting at position 3820 of SEQ ID NO: 915255
uuuauaguaucaucucuga

SEQ ID NO: 1066125 - RNA, 19 nt, Artificial Sequence
  Description of Artificial Sequence: Synthetic oligonucleotide
  Antisense strand to SEQ ID NO: 1066124
ucagagaugauacuauaaa

SEQ ID NO: 1066126 - RNA, 19 nt, Artificial Sequence
  Description of Artificial Sequence: Synthetic oligonucleotide
  Sense strand starting at position 3899 of SEQ ID NO: 915255
auuaaugauuggucucaau

SEQ ID NO: 1066127 - RNA, 19 nt, Artificial Sequence
  Description of Artificial Sequence: Synthetic oligonucleotide
  Antisense strand to SEQ ID NO: 1066126
auugagaccaaucauuaau

SEQ ID NO: 1066128 - RNA, 19 nt, Artificial Sequence
  Description of Artificial Sequence: Synthetic oligonucleotide
  Sense strand starting at position 12 of SEQ ID NO: 915256
ugaggagauaucugugcuu

SEQ ID NO: 1066129 - RNA, 19 nt, Artificial Sequence
  Description of Artificial Sequence: Synthetic oligonucleotide
  Antisense strand to SEQ ID NO: 1066128
aagcacagauaucuccuca

SEQ ID NO: 1066130 - RNA, 19 nt, Artificial Sequence
  Description of Artificial Sequence: Synthetic oligonucleotide
  Sense strand starting at position 163 of SEQ ID NO: 915256
guaauucugucaccuacaa

SEQ ID NO: 1066131 - RNA, 19 nt, Artificial Sequence
  Description of Artificial Sequence: Synthetic oligonucleotide
  Antisense strand to SEQ ID NO: 1066130
uuguaggugacagaauuac

SEQ ID NO: 1066132 - RNA, 19 nt, Artificial Sequence
  Description of Artificial Sequence: Synthetic oligonucleotide
  Sense strand starting at position 302 of SEQ ID NO: 915256
aucaauguguacucauaga

SEQ ID NO: 1066133 - RNA, 19 nt, Artificial Sequence
  Description of Artificial Sequence: Synthetic oligonucleotide
  Antisense strand to SEQ ID NO: 1066132
ucuaugaguacacauugau

SEQ ID NO: 1066134 - RNA, 19 nt, Artificial Sequence
  Description of Artificial Sequence: Synthetic oligonucleotide
  Sense strand starting at position 393 of SEQ ID NO: 915256
ugcucagaaggucacaauu

SEQ ID NO: 1066135 - RNA, 19 nt, Artificial Sequence
  Description of Artificial Sequence: Synthetic oligonucleotide
  Antisense strand to SEQ ID NO: 1066134
aauugugaccuucugagca

SEQ ID NO: 1066136 - RNA, 19 nt, Artificial Sequence
  Description of Artificial Sequence: Synthetic oligonucleotide
  Sense strand starting at position 452 of SEQ ID NO: 915256
agaggagcucugggaguua

SEQ ID NO: 1066137 - RNA, 19 nt, Artificial Sequence
  Description of Artificial Sequence: Synthetic oligonucleotide
  Antisense strand to SEQ ID NO: 1066136
uaacucccagagcuccucu

SEQ ID NO: 1066138 - RNA, 19 nt, Artificial Sequence
  Description of Artificial Sequence: Synthetic oligonucleotide
  Sense strand starting at position 464 of SEQ ID NO: 915256
ggaguuauacagugaauua

SEQ ID NO: 1066139 - RNA, 19 nt, Artificial Sequence
  Description of Artificial Sequence: Synthetic oligonucleotide
  Antisense strand to SEQ ID NO: 1066138
uaauucacuguauaacucc

SEQ ID NO: 1066140 - RNA, 19 nt, Artificial Sequence
  Description of Artificial Sequence: Synthetic oligonucleotide
  Sense strand starting at position 533 of SEQ ID NO: 915256
uuauguaagaggcauagca

SEQ ID NO: 1066141 - RNA, 19 nt, Artificial Sequence
  Description of Artificial Sequence: Synthetic oligonucleotide
  Antisense strand to SEQ ID NO: 1066140
ugcuaugccucuuacauaa

SEQ ID NO: 1066142 - RNA, 19 nt, Artificial Sequence
  Description of Artificial Sequence: Synthetic oligonucleotide
  Sense strand starting at position 643 of SEQ ID NO: 915256
guagaacaauguuuaagau

SEQ ID NO: 1066143 - RNA, 19 nt, Artificial Sequence
  Description of Artificial Sequence: Synthetic oligonucleotide
  Antisense strand to SEQ ID NO: 1066142
aucuuaaacauuguucuac

SEQ ID NO: 1066144 - RNA, 19 nt, Artificial Sequence
  Description of Artificial Sequence: Synthetic oligonucleotide
  Sense strand starting at position 675 of SEQ ID NO: 915256
aauggaaagugaugaauuu

SEQ ID NO: 1066145 - RNA, 19 nt, Artificial Sequence
  Description of Artificial Sequence: Synthetic oligonucleotide
  Antisense strand to SEQ ID NO: 1066144
aaauucaucacuuuccauu

SEQ ID NO: 1066146 - RNA, 19 nt, Artificial Sequence
  Description of Artificial Sequence: Synthetic oligonucleotide
  Sense strand starting at position 738 of SEQ ID NO: 915256
uuccuaguucuaggaacua

SEQ ID NO: 1066147 - RNA, 19 nt, Artificial Sequence
  Description of Artificial Sequence: Synthetic oligonucleotide
  Antisense strand to SEQ ID NO: 1066146
uaguuccuagaacuaggaa

SEQ ID NO: 1066148 - RNA, 19 nt, Artificial Sequence
  Description of Artificial Sequence: Synthetic oligonucleotide
  Sense strand starting at position 786 of SEQ ID NO: 915256
gccaaaucuuaggcuaaug

SEQ ID NO: 1066149 - RNA, 19 nt, Artificial Sequence
  Description of Artificial Sequence: Synthetic oligonucleotide
  Antisense strand to SEQ ID NO: 1066148
cauuagccuaagauuuggc

SEQ ID NO: 1066150 - RNA, 19 nt, Artificial Sequence
  Description of Artificial Sequence: Synthetic oligonucleotide
  Sense strand starting at position 1006 of SEQ ID NO: 915256
aaugguaacucuguuugaa

SEQ ID NO: 1066151 - RNA, 19 nt, Artificial Sequence
  Description of Artificial Sequence: Synthetic oligonucleotide
  Antisense strand to SEQ ID NO: 1066150
uucaaacagaguuaccauu

SEQ ID NO: 1066152 - RNA, 19 nt, Artificial Sequence
  Description of Artificial Sequence: Synthetic oligonucleotide
  Sense strand starting at position 1008 of SEQ ID NO: 915256
ugguaacucuguuugaaau

SEQ ID NO: 1066153 - RNA, 19 nt, Artificial Sequence
  Description of Artificial Sequence: Synthetic oligonucleotide
  Antisense strand to SEQ ID NO: 1066152
auuucaaacagaguuacca

SEQ ID NO: 1066154 - RNA, 19 nt, Artificial Sequence
  Description of Artificial Sequence: Synthetic oligonucleotide
  Sense strand starting at position 1009 of SEQ ID NO: 915256
gguaacucuguuugaaaua

SEQ ID NO: 1066155 - RNA, 19 nt, Artificial Sequence
  Description of Artificial Sequence: Synthetic oligonucleotide
  Antisense strand to SEQ ID NO: 1066154
uauuucaaacagaguuacc

SEQ ID NO: 1066156 - RNA, 19 nt, Artificial Sequence
  Description of Artificial Sequence: Synthetic oligonucleotide
  Sense strand starting at position 1057 of SEQ ID NO: 915256
uucuccucugguggagaua

SEQ ID NO: 1066157 - RNA, 19 nt, Artificial Sequence
  Description of Artificial Sequence: Synthetic oligonucleotide
  Antisense strand to SEQ ID NO: 1066156
uaucuccaccagaggagaa

SEQ ID NO: 1066158 - RNA, 19 nt, Artificial Sequence
  Description of Artificial Sequence: Synthetic oligonucleotide
  Sense strand starting at position 1068 of SEQ ID NO: 915256
uggagauaaucuugauuua

SEQ ID NO: 1066159 - RNA, 19 nt, Artificial Sequence
  Description of Artificial Sequence: Synthetic oligonucleotide
  Antisense strand to SEQ ID NO: 1066158
uaaaucaagauuaucucca

SEQ ID NO: 1066160 - RNA, 19 nt, Artificial Sequence
  Description of Artificial Sequence: Synthetic oligonucleotide
  Sense strand starting at position 1075 of SEQ ID NO: 915256
aaucuugauuuaugggaga

SEQ ID NO: 1066161 - RNA, 19 nt, Artificial Sequence
  Description of Artificial Sequence: Synthetic oligonucleotide
  Antisense strand to SEQ ID NO: 1066160
ucucccauaaaucaagauu

SEQ ID NO: 1066162 - RNA, 19 nt, Artificial Sequence
  Description of Artificial Sequence: Synthetic oligonucleotide
  Sense strand starting at position 1078 of SEQ ID NO: 915256
cuugauuuaugggagaagu

SEQ ID NO: 1066163 - RNA, 19 nt, Artificial Sequence
  Description of Artificial Sequence: Synthetic oligonucleotide
  Antisense strand to SEQ ID NO: 1066162
acuucucccauaaaucaag

SEQ ID NO: 1066164 - RNA, 19 nt, Artificial Sequence
  Description of Artificial Sequence: Synthetic oligonucleotide
  Sense strand starting at position 1995 of SEQ ID NO: 915256
ucugcauggcuguaaggaa

SEQ ID NO: 1066165 - RNA, 19 nt, Artificial Sequence
  Description of Artificial Sequence: Synthetic oligonucleotide
  Antisense strand to SEQ ID NO: 1066164
uuccuuacagccaugcaga

SEQ ID NO: 1066166 - RNA, 19 nt, Artificial Sequence
  Description of Artificial Sequence: Synthetic oligonucleotide
  Sense strand starting at position 2055 of SEQ ID NO: 915256
ugucaugaauauguagaau

SEQ ID NO: 1066167 - RNA, 19 nt, Artificial Sequence
  Description of Artificial Sequence: Synthetic oligonucleotide
  Antisense strand to SEQ ID NO: 1066166
auucuacauauucaugaca

SEQ ID NO: 1066168 - RNA, 19 nt, Artificial Sequence
  Description of Artificial Sequence: Synthetic oligonucleotide
  Sense strand starting at position 2104 of SEQ ID NO: 915256
ucgugaagucuagaaccaa

SEQ ID NO: 1066169 - RNA, 19 nt, Artificial Sequence
  Description of Artificial Sequence: Synthetic oligonucleotide
  Antisense strand to SEQ ID NO: 1066168
uugguucuagacuucacga

SEQ ID NO: 1066170 - RNA, 19 nt, Artificial Sequence
  Description of Artificial Sequence: Synthetic oligonucleotide
  Sense strand starting at position 2229 of SEQ ID NO: 915256
aggaaugacuguucaagug

SEQ ID NO: 1066171 - RNA, 19 nt, Artificial Sequence
  Description of Artificial Sequence: Synthetic oligonucleotide
  Antisense strand to SEQ ID NO: 1066170
cacuugaacagucauuccu

SEQ ID NO: 1066172 - RNA, 19 nt, Artificial Sequence
  Description of Artificial Sequence: Synthetic oligonucleotide
  Sense strand starting at position 2558 of SEQ ID NO: 915256
acagaagaaugauauacaa

SEQ ID NO: 1066173 - RNA, 19 nt, Artificial Sequence
  Description of Artificial Sequence: Synthetic oligonucleotide
  Antisense strand to SEQ ID NO: 1066172
uuguauaucauucuucugu

SEQ ID NO: 1066174 - RNA, 19 nt, Artificial Sequence
  Description of Artificial Sequence: Synthetic oligonucleotide
  Sense strand starting at position 2758 of SEQ ID NO: 915256
guucuauugaaauggguag

SEQ ID NO: 1066175 - RNA, 19 nt, Artificial Sequence
  Description of Artificial Sequence: Synthetic oligonucleotide
  Antisense strand to SEQ ID NO: 1066174
cuacccauuucaauagaac

SEQ ID NO: 1066176 - RNA, 19 nt, Artificial Sequence
  Description of Artificial Sequence: Synthetic oligonucleotide
  Sense strand starting at position 2759 of SEQ ID NO: 915256
uucuauugaaauggguaga

SEQ ID NO: 1066177 - RNA, 19 nt, Artificial Sequence
  Description of Artificial Sequence: Synthetic oligonucleotide
  Antisense strand to SEQ ID NO: 1066176
ucuacccauuucaauagaa

SEQ ID NO: 1066178 - RNA, 19 nt, Artificial Sequence
  Description of Artificial Sequence: Synthetic oligonucleotide
  Sense strand starting at position 2801 of SEQ ID NO: 915256
ugucuuacacuguaaagac

SEQ ID NO: 1066179 - RNA, 19 nt, Artificial Sequence
  Description of Artificial Sequence: Synthetic oligonucleotide
  Antisense strand to SEQ ID NO: 1066178
gucuuuacaguguaagaca

SEQ ID NO: 1066180 - RNA, 19 nt, Artificial Sequence
  Description of Artificial Sequence: Synthetic oligonucleotide
  Sense strand starting at position 2887 of SEQ ID NO: 915256
guacaugauuuguauuugu

SEQ ID NO: 1066181 - RNA, 19 nt, Artificial Sequence
  Description of Artificial Sequence: Synthetic oligonucleotide
  Antisense strand to SEQ ID NO: 1066180
acaaauacaaaucauguac

SEQ ID NO: 1066182 - RNA, 19 nt, Artificial Sequence
  Description of Artificial Sequence: Synthetic oligonucleotide
  Sense strand starting at position 2898 of SEQ ID NO: 915256
guauuuguaugaucuuccu

SEQ ID NO: 1066183 - RNA, 19 nt, Artificial Sequence
  Description of Artificial Sequence: Synthetic oligonucleotide
  Antisense strand to SEQ ID NO: 1066182
aggaagaucauacaaauac

SEQ ID NO: 1066184 - RNA, 19 nt, Artificial Sequence
  Description of Artificial Sequence: Synthetic oligonucleotide
  Sense strand starting at position 2975 of SEQ ID NO: 915256
acaucaauguuaguaaaca

SEQ ID NO: 1066185 - RNA, 19 nt, Artificial Sequence
  Description of Artificial Sequence: Synthetic oligonucleotide
  Antisense strand to SEQ ID NO: 1066184
uguuuacuaacauugaugu

SEQ ID NO: 1066186 - RNA, 19 nt, Artificial Sequence
  Description of Artificial Sequence: Synthetic oligonucleotide
  Sense strand starting at position 3098 of SEQ ID NO: 915256
ugaugaaguucucuucuga

SEQ ID NO: 1066187 - RNA, 19 nt, Artificial Sequence
  Description of Artificial Sequence: Synthetic oligonucleotide
  Antisense strand to SEQ ID NO: 1066186
ucagaagagaacuucauca

SEQ ID NO: 1066188 - RNA, 19 nt, Artificial Sequence
  Description of Artificial Sequence: Synthetic oligonucleotide
  Sense strand starting at position 3105 of SEQ ID NO: 915256
guucucuucugauuagauc

SEQ ID NO: 1066189 - RNA, 19 nt, Artificial Sequence
  Description of Artificial Sequence: Synthetic oligonucleotide
  Antisense strand to SEQ ID NO: 1066188
gaucuaaucagaagagaac

SEQ ID NO: 1066190 - RNA, 19 nt, Artificial Sequence
  Description of Artificial Sequence: Synthetic oligonucleotide
  Sense strand starting at position 3234 of SEQ ID NO: 915256
gucucagugcuacagaaca

SEQ ID NO: 1066191 - RNA, 19 nt, Artificial Sequence
  Description of Artificial Sequence: Synthetic oligonucleotide
  Antisense strand to SEQ ID NO: 1066190
uguucuguagcacugagac

SEQ ID NO: 1066192 - RNA, 19 nt, Artificial Sequence
  Description of Artificial Sequence: Synthetic oligonucleotide
  Sense strand starting at position 3366 of SEQ ID NO: 915256
ugcacaugacuccaauguu

SEQ ID NO: 1066193 - RNA, 19 nt, Artificial Sequence
  Description of Artificial Sequence: Synthetic oligonucleotide
  Antisense strand to SEQ ID NO: 1066192
aacauuggagucaugugca

SEQ ID NO: 1066194 - RNA, 19 nt, Artificial Sequence
  Description of Artificial Sequence: Synthetic oligonucleotide
  Sense strand starting at position 3425 of SEQ ID NO: 915256
ggauuccaaugcccaauua

SEQ ID NO: 1066195 - RNA, 19 nt, Artificial Sequence
  Description of Artificial Sequence: Synthetic oligonucleotide
  Antisense strand to SEQ ID NO: 1066194
uaauugggcauuggaaucc

SEQ ID NO: 1066196 - RNA, 19 nt, Artificial Sequence
  Description of Artificial Sequence: Synthetic oligonucleotide
  Sense strand starting at position 3615 of SEQ ID NO: 915256
aguaaauggcauuauucca

SEQ ID NO: 1066197 - RNA, 19 nt, Artificial Sequence
  Description of Artificial Sequence: Synthetic oligonucleotide
  Antisense strand to SEQ ID NO: 1066196
uggaauaaugccauuuacu

SEQ ID NO: 1066198 - RNA, 19 nt, Artificial Sequence
  Description of Artificial Sequence: Synthetic oligonucleotide
  Sense strand starting at position 3735 of SEQ ID NO: 915256
ucuagaacaugacuaguuu

SEQ ID NO: 1066199 - RNA, 19 nt, Artificial Sequence
  Description of Artificial Sequence: Synthetic oligonucleotide
  Antisense strand to SEQ ID NO: 1066198
aaacuagucauguucuaga

SEQ ID NO: 1066200 - RNA, 19 nt, Artificial Sequence
  Description of Artificial Sequence: Synthetic oligonucleotide
  Sense strand starting at position 3830 of SEQ ID NO: 915256
ccacuugagucuuuccaca

SEQ ID NO: 1066201 - RNA, 19 nt, Artificial Sequence
  Description of Artificial Sequence: Synthetic oligonucleotide
  Antisense strand to SEQ ID NO: 1066200
uguggaaagacucaagugg

SEQ ID NO: 1066202 - RNA, 19 nt, Artificial Sequence
  Description of Artificial Sequence: Synthetic oligonucleotide
  Sense strand starting at position 3832 of SEQ ID NO: 915256
acuugagucuuuccacaug

SEQ ID NO: 1066203 - RNA, 19 nt, Artificial Sequence
  Description of Artificial Sequence: Synthetic oligonucleotide
  Antisense strand to SEQ ID NO: 1066202
cauguggaaagacucaagu

SEQ ID NO: 1066204 - RNA, 19 nt, Artificial Sequence
  Description of Artificial Sequence: Synthetic oligonucleotide
  Sense strand starting at position 3835 of SEQ ID NO: 915256
ugagucuuuccacauggca

SEQ ID NO: 1066205 - RNA, 19 nt, Artificial Sequence
  Description of Artificial Sequence: Synthetic oligonucleotide
  Antisense strand to SEQ ID NO: 1066204
ugccauguggaaagacuca

SEQ ID NO: 1066206 - RNA, 19 nt, Artificial Sequence
  Description of Artificial Sequence: Synthetic oligonucleotide
  Sense strand starting at position 3957 of SEQ ID NO: 915256
uuacaaagaugugcaagau

SEQ ID NO: 1066207 - RNA, 19 nt, Artificial Sequence
  Description of Artificial Sequence: Synthetic oligonucleotide
  Antisense strand to SEQ ID NO: 1066206
aucuugcacaucuuuguaa

SEQ ID NO: 1066208 - RNA, 19 nt, Artificial Sequence
  Description of Artificial Sequence: Synthetic oligonucleotide
  Sense strand starting at position 53 of SEQ ID NO: 915257
aguuauggaguuuauauca

SEQ ID NO: 1066209 - RNA, 19 nt, Artificial Sequence
  Description of Artificial Sequence: Synthetic oligonucleotide
  Antisense strand to SEQ ID NO: 1066208
ugauauaaacuccauaacu

SEQ ID NO: 1066210 - RNA, 19 nt, Artificial Sequence
  Description of Artificial Sequence: Synthetic oligonucleotide
  Sense strand starting at position 61 of SEQ ID NO: 915257
aguuuauaucaggguuuag

SEQ ID NO: 1066211 - RNA, 19 nt, Artificial Sequence
  Description of Artificial Sequence: Synthetic oligonucleotide
  Antisense strand to SEQ ID NO: 1066210
cuaaacccugauauaaacu

SEQ ID NO: 1066212 - RNA, 19 nt, Artificial Sequence
  Description of Artificial Sequence: Synthetic oligonucleotide
  Sense strand starting at position 165 of SEQ ID NO: 915257
guuuaccaguucuuaggaa

SEQ ID NO: 1066213 - RNA, 19 nt, Artificial Sequence
  Description of Artificial Sequence: Synthetic oligonucleotide
  Antisense strand to SEQ ID NO: 1066212
uuccuaagaacugguaaac

SEQ ID NO: 1066214 - RNA, 19 nt, Artificial Sequence
  Description of Artificial Sequence: Synthetic oligonucleotide
  Sense strand starting at position 270 of SEQ ID NO: 915257
agggaacagugguuacuau

SEQ ID NO: 1066215 - RNA, 19 nt, Artificial Sequence
  Description of Artificial Sequence: Synthetic oligonucleotide
  Antisense strand to SEQ ID NO: 1066214
auaguaaccacuguucccu

SEQ ID NO: 1066216 - RNA, 19 nt, Artificial Sequence
  Description of Artificial Sequence: Synthetic oligonucleotide
  Sense strand starting at position 271 of SEQ ID NO: 915257
gggaacagugguuacuauu

SEQ ID NO: 1066217 - RNA, 19 nt, Artificial Sequence
  Description of Artificial Sequence: Synthetic oligonucleotide
  Antisense strand to SEQ ID NO: 1066216
aauaguaaccacuguuccc

SEQ ID NO: 1066218 - RNA, 19 nt, Artificial Sequence
  Description of Artificial Sequence: Synthetic oligonucleotide
  Sense strand starting at position 345 of SEQ ID NO: 915257
gagaguacugcggaguacu

SEQ ID NO: 1066219 - RNA, 19 nt, Artificial Sequence
  Description of Artificial Sequence: Synthetic oligonucleotide
  Antisense strand to SEQ ID NO: 1066218
aguacuccgcaguacucuc

SEQ ID NO: 1066220 - RNA, 19 nt, Artificial Sequence
  Description of Artificial Sequence: Synthetic oligonucleotide
  Sense strand starting at position 448 of SEQ ID NO: 915257
guugucauuguuguuugua

SEQ ID NO: 1066221 - RNA, 19 nt, Artificial Sequence
  Description of Artificial Sequence: Synthetic oligonucleotide
  Antisense strand to SEQ ID NO: 1066220
uacaaacaacaaugacaac

SEQ ID NO: 1066222 - RNA, 19 nt, Artificial Sequence
  Description of Artificial Sequence: Synthetic oligonucleotide
  Sense strand starting at position 499 of SEQ ID NO: 915257
ucucuuuauguagaaggca

SEQ ID NO: 1066223 - RNA, 19 nt, Artificial Sequence
  Description of Artificial Sequence: Synthetic oligonucleotide
  Antisense strand to SEQ ID NO: 1066222
ugccuucuacauaaagaga

SEQ ID NO: 1066224 - RNA, 19 nt, Artificial Sequence
  Description of Artificial Sequence: Synthetic oligonucleotide
  Sense strand starting at position 660 of SEQ ID NO: 915257
aguaaagauugcuuaccaa

SEQ ID NO: 1066225 - RNA, 19 nt, Artificial Sequence
  Description of Artificial Sequence: Synthetic oligonucleotide
  Antisense strand to SEQ ID NO: 1066224
uugguaagcaaucuuuacu

SEQ ID NO: 1066226 - RNA, 19 nt, Artificial Sequence
  Description of Artificial Sequence: Synthetic oligonucleotide
  Sense strand starting at position 878 of SEQ ID NO: 915257
caaggagucauguggucaa

SEQ ID NO: 1066227 - RNA, 19 nt, Artificial Sequence
  Description of Artificial Sequence: Synthetic oligonucleotide
  Antisense strand to SEQ ID NO: 1066226
uugaccacaugacuccuug

SEQ ID NO: 1066228 - RNA, 19 nt, Artificial Sequence
  Description of Artificial Sequence: Synthetic oligonucleotide
  Sense strand starting at position 882 of SEQ ID NO: 915257
gagucauguggucaauauu

SEQ ID NO: 1066229 - RNA, 19 nt, Artificial Sequence
  Description of Artificial Sequence: Synthetic oligonucleotide
  Antisense strand to SEQ ID NO: 1066228
aauauugaccacaugacuc

SEQ ID NO: 1066230 - RNA, 19 nt, Artificial Sequence
  Description of Artificial Sequence: Synthetic oligonucleotide
  Sense strand starting at position 1036 of SEQ ID NO: 915257
gucuguguugcuuuccuga

SEQ ID NO: 1066231 - RNA, 19 nt, Artificial Sequence
  Description of Artificial Sequence: Synthetic oligonucleotide
  Antisense strand to SEQ ID NO: 1066230
ucaggaaagcaacacagac

SEQ ID NO: 1066232 - RNA, 19 nt, Artificial Sequence
  Description of Artificial Sequence: Synthetic oligonucleotide
  Sense strand starting at position 1164 of SEQ ID NO: 915257
ggaacuaggccuugaauac

SEQ ID NO: 1066233 - RNA, 19 nt, Artificial Sequence
  Description of Artificial Sequence: Synthetic oligonucleotide
  Antisense strand to SEQ ID NO: 1066232
guauucaaggccuaguucc

SEQ ID NO: 1066234 - RNA, 19 nt, Artificial Sequence
  Description of Artificial Sequence: Synthetic oligonucleotide
  Sense strand starting at position 1257 of SEQ ID NO: 915257
uccugaagcugaguggauu

SEQ ID NO: 1066235 - RNA, 19 nt, Artificial Sequence
  Description of Artificial Sequence: Synthetic oligonucleotide
  Antisense strand to SEQ ID NO: 1066234
aauccacucagcuucagga

SEQ ID NO: 1066236 - RNA, 19 nt, Artificial Sequence
  Description of Artificial Sequence: Synthetic oligonucleotide
  Sense strand starting at position 1265 of SEQ ID NO: 915257
cugaguggauucucaggau

SEQ ID NO: 1066237 - RNA, 19 nt, Artificial Sequence
  Description of Artificial Sequence: Synthetic oligonucleotide
  Antisense strand to SEQ ID NO: 1066236
auccugagaauccacucag

SEQ ID NO: 1066238 - RNA, 19 nt, Artificial Sequence
  Description of Artificial Sequence: Synthetic oligonucleotide
  Sense strand starting at position 1318 of SEQ ID NO: 915257
gcaagaaugcuggagagua

SEQ ID NO: 1066239 - RNA, 19 nt, Artificial Sequence
  Description of Artificial Sequence: Synthetic oligonucleotide
  Antisense strand to SEQ ID NO: 1066238
uacucuccagcauucuugc

SEQ ID NO: 1066240 - RNA, 19 nt, Artificial Sequence
  Description of Artificial Sequence: Synthetic oligonucleotide
  Sense strand starting at position 1544 of SEQ ID NO: 915257
uggacaugguaccugaaua

SEQ ID NO: 1066241 - RNA, 19 nt, Artificial Sequence
  Description of Artificial Sequence: Synthetic oligonucleotide
  Antisense strand to SEQ ID NO: 1066240
uauucagguaccaugucca

SEQ ID NO: 1066242 - RNA, 19 nt, Artificial Sequence
  Description of Artificial Sequence: Synthetic oligonucleotide
  Sense strand starting at position 1557 of SEQ ID NO: 915257
ugaauaaagcaauggguua

SEQ ID NO: 1066243 - RNA, 19 nt, Artificial Sequence
  Description of Artificial Sequence: Synthetic oligonucleotide
  Antisense strand to SEQ ID NO: 1066242
uaacccauugcuuuauuca

SEQ ID NO: 1066244 - RNA, 19 nt, Artificial Sequence
  Description of Artificial Sequence: Synthetic oligonucleotide
  Sense strand starting at position 1582 of SEQ ID NO: 915257
gcugcauggcggucauaug

SEQ ID NO: 1066245 - RNA, 19 nt, Artificial Sequence
  Description of Artificial Sequence: Synthetic oligonucleotide
  Antisense strand to SEQ ID NO: 1066244
cauaugaccgccaugcagc

SEQ ID NO: 1066246 - RNA, 19 nt, Artificial Sequence
  Description of Artificial Sequence: Synthetic oligonucleotide
  Sense strand starting at position 1775 of SEQ ID NO: 915257
aguacauagguguaugcaa

SEQ ID NO: 1066247 - RNA, 19 nt, Artificial Sequence
  Description of Artificial Sequence: Synthetic oligonucleotide
  Antisense strand to SEQ ID NO: 1066246
uugcauacaccuauguacu

SEQ ID NO: 1066248 - RNA, 19 nt, Artificial Sequence
  Description of Artificial Sequence: Synthetic oligonucleotide
  Sense strand starting at position 1795 of SEQ ID NO: 915257
ugggaaucaguucggauua

SEQ ID NO: 1066249 - RNA, 19 nt, Artificial Sequence
  Description of Artificial Sequence: Synthetic oligonucleotide
  Antisense strand to SEQ ID NO: 1066248
uaauccgaacugauuccca

SEQ ID NO: 1066250 - RNA, 19 nt, Artificial Sequence
  Description of Artificial Sequence: Synthetic oligonucleotide
  Sense strand starting at position 1822 of SEQ ID NO: 915257
aaggucauguuuccugaca

SEQ ID NO: 1066251 - RNA, 19 nt, Artificial Sequence
  Description of Artificial Sequence: Synthetic oligonucleotide
  Antisense strand to SEQ ID NO: 1066250
ugucaggaaacaugaccuu

SEQ ID NO: 1066252 - RNA, 19 nt, Artificial Sequence
  Description of Artificial Sequence: Synthetic oligonucleotide
  Sense strand starting at position 1823 of SEQ ID NO: 915257
aggucauguuuccugacaa

SEQ ID NO: 1066253 - RNA, 19 nt, Artificial Sequence
  Description of Artificial Sequence: Synthetic oligonucleotide
  Antisense strand to SEQ ID NO: 1066252
uugucaggaaacaugaccu

SEQ ID NO: 1066254 - RNA, 19 nt, Artificial Sequence
  Description of Artificial Sequence: Synthetic oligonucleotide
  Sense strand starting at position 1964 of SEQ ID NO: 915257
aggugaaagccugacuauc

SEQ ID NO: 1066255 - RNA, 19 nt, Artificial Sequence
  Description of Artificial Sequence: Synthetic oligonucleotide
  Antisense strand to SEQ ID NO: 1066254
gauagucaggcuuucaccu

SEQ ID NO: 1066256 - RNA, 19 nt, Artificial Sequence
  Description of Artificial Sequence: Synthetic oligonucleotide
  Sense strand starting at position 1966 of SEQ ID NO: 915257
gugaaagccugacuaucau

SEQ ID NO: 1066257 - RNA, 19 nt, Artificial Sequence
  Description of Artificial Sequence: Synthetic oligonucleotide
  Antisense strand to SEQ ID NO: 1066256
augauagucaggcuuucac

SEQ ID NO: 1066258 - RNA, 19 nt, Artificial Sequence
  Description of Artificial Sequence: Synthetic oligonucleotide
  Sense strand starting at position 2058 of SEQ ID NO: 915257
uacuaagaagcuuguagau

SEQ ID NO: 1066259 - RNA, 19 nt, Artificial Sequence
  Description of Artificial Sequence: Synthetic oligonucleotide
  Antisense strand to SEQ ID NO: 1066258
aucuacaagcuucuuagua

SEQ ID NO: 1066260 - RNA, 19 nt, Artificial Sequence
  Description of Artificial Sequence: Synthetic oligonucleotide
  Sense strand starting at position 2544 of SEQ ID NO: 915257
acuaguaacuucuugacag

SEQ ID NO: 1066261 - RNA, 19 nt, Artificial Sequence
  Description of Artificial Sequence: Synthetic oligonucleotide
  Antisense strand to SEQ ID NO: 1066260
cugucaagaaguuacuagu

SEQ ID NO: 1066262 - RNA, 19 nt, Artificial Sequence
  Description of Artificial Sequence: Synthetic oligonucleotide
  Sense strand starting at position 2560 of SEQ ID NO: 915257
cagacugucugauugaaua

SEQ ID NO: 1066263 - RNA, 19 nt, Artificial Sequence
  Description of Artificial Sequence: Synthetic oligonucleotide
  Antisense strand to SEQ ID NO: 1066262
uauucaaucagacagucug

SEQ ID NO: 1066264 - RNA, 19 nt, Artificial Sequence
  Description of Artificial Sequence: Synthetic oligonucleotide
  Sense strand starting at position 2618 of SEQ ID NO: 915257
uacauuagugggcacucaa

SEQ ID NO: 1066265 - RNA, 19 nt, Artificial Sequence
  Description of Artificial Sequence: Synthetic oligonucleotide
  Antisense strand to SEQ ID NO: 1066264
uugagugcccacuaaugua

SEQ ID NO: 1066266 - RNA, 19 nt, Artificial Sequence
  Description of Artificial Sequence: Synthetic oligonucleotide
  Sense strand starting at position 2675 of SEQ ID NO: 915257
uuacgugucaaguauuugu

SEQ ID NO: 1066267 - RNA, 19 nt, Artificial Sequence
  Description of Artificial Sequence: Synthetic oligonucleotide
  Antisense strand to SEQ ID NO: 1066266
acaaauacuugacacguaa

SEQ ID NO: 1066268 - RNA, 19 nt, Artificial Sequence
  Description of Artificial Sequence: Synthetic oligonucleotide
  Sense strand starting at position 2678 of SEQ ID NO: 915257
cgugucaaguauuuguauu

SEQ ID NO: 1066269 - RNA, 19 nt, Artificial Sequence
  Description of Artificial Sequence: Synthetic oligonucleotide
  Antisense strand to SEQ ID NO: 1066268
aauacaaauacuugacacg

SEQ ID NO: 1066270 - RNA, 19 nt, Artificial Sequence
  Description of Artificial Sequence: Synthetic oligonucleotide
  Sense strand starting at position 2679 of SEQ ID NO: 915257
gugucaaguauuuguauug

SEQ ID NO: 1066271 - RNA, 19 nt, Artificial Sequence
  Description of Artificial Sequence: Synthetic oligonucleotide
  Antisense strand to SEQ ID NO: 1066270
caauacaaauacuugacac

SEQ ID NO: 1066272 - RNA, 19 nt, Artificial Sequence
  Description of Artificial Sequence: Synthetic oligonucleotide
  Sense strand starting at position 2745 of SEQ ID NO: 915257
acauuaugaccauguacca

SEQ ID NO: 1066273 - RNA, 19 nt, Artificial Sequence
  Description of Artificial Sequence: Synthetic oligonucleotide
  Antisense strand to SEQ ID NO: 1066272
ugguacauggucauaaugu

SEQ ID NO: 1066274 - RNA, 19 nt, Artificial Sequence
  Description of Artificial Sequence: Synthetic oligonucleotide
  Sense strand starting at position 2943 of SEQ ID NO: 915257
guuaguuugcuggauaaga

SEQ ID NO: 1066275 - RNA, 19 nt, Artificial Sequence
  Description of Artificial Sequence: Synthetic oligonucleotide
  Antisense strand to SEQ ID NO: 1066274
ucuuauccagcaaacuaac

SEQ ID NO: 1066276 - RNA, 19 nt, Artificial Sequence
  Description of Artificial Sequence: Synthetic oligonucleotide
  Sense strand starting at position 2945 of SEQ ID NO: 915257
uaguuugcuggauaagaca

SEQ ID NO: 1066277 - RNA, 19 nt, Artificial Sequence
  Description of Artificial Sequence: Synthetic oligonucleotide
  Antisense strand to SEQ ID NO: 1066276
ugucuuauccagcaaacua

SEQ ID NO: 1066278 - RNA, 19 nt, Artificial Sequence
  Description of Artificial Sequence: Synthetic oligonucleotide
  Sense strand starting at position 3115 of SEQ ID NO: 915257
ggcagaauugcccaaguga

SEQ ID NO: 1066279 - RNA, 19 nt, Artificial Sequence
  Description of Artificial Sequence: Synthetic oligonucleotide
  Antisense strand to SEQ ID NO: 1066278
ucacuugggcaauucugcc

SEQ ID NO: 1066280 - RNA, 19 nt, Artificial Sequence
  Description of Artificial Sequence: Synthetic oligonucleotide
  Sense strand starting at position 3168 of SEQ ID NO: 915257
uugguaguuccauaaucuu

SEQ ID NO: 1066281 - RNA, 19 nt, Artificial Sequence
  Description of Artificial Sequence: Synthetic oligonucleotide
  Antisense strand to SEQ ID NO: 1066280
aagauuauggaacuaccaa

SEQ ID NO: 1066282 - RNA, 19 nt, Artificial Sequence
  Description of Artificial Sequence: Synthetic oligonucleotide
  Sense strand starting at position 3490 of SEQ ID NO: 915257
aaaggaguuauaggguuua

SEQ ID NO: 1066283 - RNA, 19 nt, Artificial Sequence
  Description of Artificial Sequence: Synthetic oligonucleotide
  Antisense strand to SEQ ID NO: 1066282
uaaacccuauaacuccuuu

SEQ ID NO: 1066284 - RNA, 19 nt, Artificial Sequence
  Description of Artificial Sequence: Synthetic oligonucleotide
  Sense strand starting at position 3495 of SEQ ID NO: 915257
aguuauaggguuuaggauu

SEQ ID NO: 1066285 - RNA, 19 nt, Artificial Sequence
  Description of Artificial Sequence: Synthetic oligonucleotide
  Antisense strand to SEQ ID NO: 1066284
aauccuaaacccuauaacu

SEQ ID NO: 1066286 - RNA, 19 nt, Artificial Sequence
  Description of Artificial Sequence: Synthetic oligonucleotide
  Sense strand starting at position 3530 of SEQ ID NO: 915257
gguacauaucccugacacu

SEQ ID NO: 1066287 - RNA, 19 nt, Artificial Sequence
  Description of Artificial Sequence: Synthetic oligonucleotide
  Antisense strand to SEQ ID NO: 1066286
agugucagggauauguacc

SEQ ID NO: 1066288 - RNA, 19 nt, Artificial Sequence
  Description of Artificial Sequence: Synthetic oligonucleotide
  Sense strand starting at position 12 of SEQ ID NO: 915258
ugaggagauaucugugcuu

SEQ ID NO: 1066289 - RNA, 19 nt, Artificial Sequence
  Description of Artificial Sequence: Synthetic oligonucleotide
  Antisense strand to SEQ ID NO: 1066288
aagcacagauaucuccuca

SEQ ID NO: 1066290 - RNA, 19 nt, Artificial Sequence
  Description of Artificial Sequence: Synthetic oligonucleotide
  Sense strand starting at position 163 of SEQ ID NO: 915258
guaauucugucaccuacaa

SEQ ID NO: 1066291 - RNA, 19 nt, Artificial Sequence
  Description of Artificial Sequence: Synthetic oligonucleotide
  Antisense strand to SEQ ID NO: 1066290
uuguaggugacagaauuac

SEQ ID NO: 1066292 - RNA, 19 nt, Artificial Sequence
  Description of Artificial Sequence: Synthetic oligonucleotide
  Sense strand starting at position 302 of SEQ ID NO: 915258
aucaauguguacucauaga

SEQ ID NO: 1066293 - RNA, 19 nt, Artificial Sequence
  Description of Artificial Sequence: Synthetic oligonucleotide
  Antisense strand to SEQ ID NO: 1066292
ucuaugaguacacauugau

SEQ ID NO: 1066294 - RNA, 19 nt, Artificial Sequence
  Description of Artificial Sequence: Synthetic oligonucleotide
  Sense strand starting at position 393 of SEQ ID NO: 915258
ugcucagaaggucacaauu

SEQ ID NO: 1066295 - RNA, 19 nt, Artificial Sequence
  Description of Artificial Sequence: Synthetic oligonucleotide
  Antisense strand to SEQ ID NO: 1066294
aauugugaccuucugagca

SEQ ID NO: 1066296 - RNA, 19 nt, Artificial Sequence
  Description of Artificial Sequence: Synthetic oligonucleotide
  Sense strand starting at position 452 of SEQ ID NO: 915258
agaggagcucugggaguua

SEQ ID NO: 1066297 - RNA, 19 nt, Artificial Sequence
  Description of Artificial Sequence: Synthetic oligonucleotide
  Antisense strand to SEQ ID NO: 1066296
uaacucccagagcuccucu

SEQ ID NO: 1066298 - RNA, 19 nt, Artificial Sequence
  Description of Artificial Sequence: Synthetic oligonucleotide
  Sense strand starting at position 464 of SEQ ID NO: 915258
ggaguuauacagugaauua

SEQ ID NO: 1066299 - RNA, 19 nt, Artificial Sequence
  Description of Artificial Sequence: Synthetic oligonucleotide
  Antisense strand to SEQ ID NO: 1066298
uaauucacuguauaacucc

SEQ ID NO: 1066300 - RNA, 19 nt, Artificial Sequence
  Description of Artificial Sequence: Synthetic oligonucleotide
  Sense strand starting at position 533 of SEQ ID NO: 915258
uuauguaagaggcauagca

SEQ ID NO: 1066301 - RNA, 19 nt, Artificial Sequence
  Description of Artificial Sequence: Synthetic oligonucleotide
  Antisense strand to SEQ ID NO: 1066300
ugcuaugccucuuacauaa

SEQ ID NO: 1066302 - RNA, 19 nt, Artificial Sequence
  Description of Artificial Sequence: Synthetic oligonucleotide
  Sense strand starting at position 643 of SEQ ID NO: 915258
guagaacaauguuuaagau

SEQ ID NO: 1066303 - RNA, 19 nt, Artificial Sequence
  Description of Artificial Sequence: Synthetic oligonucleotide
  Antisense strand to SEQ ID NO: 1066302
aucuuaaacauuguucuac

SEQ ID NO: 1066304 - RNA, 19 nt, Artificial Sequence
  Description of Artificial Sequence: Synthetic oligonucleotide
  Sense strand starting at position 675 of SEQ ID NO: 915258
aauggaaagugaugaauuu

SEQ ID NO: 1066305 - RNA, 19 nt, Artificial Sequence
  Description of Artificial Sequence: Synthetic oligonucleotide
  Antisense strand to SEQ ID NO: 1066304
aaauucaucacuuuccauu

SEQ ID NO: 1066306 - RNA, 19 nt, Artificial Sequence
  Description of Artificial Sequence: Synthetic oligonucleotide
  Sense strand starting at position 738 of SEQ ID NO: 915258
uuccuaguucuaggaacua

SEQ ID NO: 1066307 - RNA, 19 nt, Artificial Sequence
  Description of Artificial Sequence: Synthetic oligonucleotide
  Antisense strand to SEQ ID NO: 1066306
uaguuccuagaacuaggaa

SEQ ID NO: 1066308 - RNA, 19 nt, Artificial Sequence
  Description of Artificial Sequence: Synthetic oligonucleotide
  Sense strand starting at position 786 of SEQ ID NO: 915258
gccaaaucuuaggcuaaug

SEQ ID NO: 1066309 - RNA, 19 nt, Artificial Sequence
  Description of Artificial Sequence: Synthetic oligonucleotide
  Antisense strand to SEQ ID NO: 1066308
cauuagccuaagauuuggc

SEQ ID NO: 1066310 - RNA, 19 nt, Artificial Sequence
  Description of Artificial Sequence: Synthetic oligonucleotide
  Sense strand starting at position 1006 of SEQ ID NO: 915258
aaugguaacucuguuugaa

SEQ ID NO: 1066311 - RNA, 19 nt, Artificial Sequence
  Description of Artificial Sequence: Synthetic oligonucleotide
  Antisense strand to SEQ ID NO: 1066310
uucaaacagaguuaccauu

SEQ ID NO: 1066312 - RNA, 19 nt, Artificial Sequence
  Description of Artificial Sequence: Synthetic oligonucleotide
  Sense strand starting at position 1008 of SEQ ID NO: 915258
ugguaacucuguuugaaau

SEQ ID NO: 1066313 - RNA, 19 nt, Artificial Sequence
  Description of Artificial Sequence: Synthetic oligonucleotide
  Antisense strand to SEQ ID NO: 1066312
auuucaaacagaguuacca

SEQ ID NO: 1066314 - RNA, 19 nt, Artificial Sequence
  Description of Artificial Sequence: Synthetic oligonucleotide
  Sense strand starting at position 1009 of SEQ ID NO: 915258
gguaacucuguuugaaaua

SEQ ID NO: 1066315 - RNA, 19 nt, Artificial Sequence
  Description of Artificial Sequence: Synthetic oligonucleotide
  Antisense strand to SEQ ID NO: 1066314
uauuucaaacagaguuacc

SEQ ID NO: 1066316 - RNA, 19 nt, Artificial Sequence
  Description of Artificial Sequence: Synthetic oligonucleotide
  Sense strand starting at position 1057 of SEQ ID NO: 915258
uucuccucugguggagaua

SEQ ID NO: 1066317 - RNA, 19 nt, Artificial Sequence
  Description of Artificial Sequence: Synthetic oligonucleotide
  Antisense strand to SEQ ID NO: 1066316
uaucuccaccagaggagaa

SEQ ID NO: 1066318 - RNA, 19 nt, Artificial Sequence
  Description of Artificial Sequence: Synthetic oligonucleotide
  Sense strand starting at position 1068 of SEQ ID NO: 915258
uggagauaaucuugauuua

SEQ ID NO: 1066319 - RNA, 19 nt, Artificial Sequence
  Description of Artificial Sequence: Synthetic oligonucleotide
  Antisense strand to SEQ ID NO: 1066318
uaaaucaagauuaucucca

SEQ ID NO: 1066320 - RNA, 19 nt, Artificial Sequence
  Description of Artificial Sequence: Synthetic oligonucleotide
  Sense strand starting at position 1075 of SEQ ID NO: 915258
aaucuugauuuaugggaga

SEQ ID NO: 1066321 - RNA, 19 nt, Artificial Sequence
  Description of Artificial Sequence: Synthetic oligonucleotide
  Antisense strand to SEQ ID NO: 1066320
ucucccauaaaucaagauu

SEQ ID NO: 1066322 - RNA, 19 nt, Artificial Sequence
  Description of Artificial Sequence: Synthetic oligonucleotide
  Sense strand starting at position 1078 of SEQ ID NO: 915258
cuugauuuaugggagaagu

SEQ ID NO: 1066323 - RNA, 19 nt, Artificial Sequence
  Description of Artificial Sequence: Synthetic oligonucleotide
  Antisense strand to SEQ ID NO: 1066322
acuucucccauaaaucaag

SEQ ID NO: 1066324 - RNA, 19 nt, Artificial Sequence
  Description of Artificial Sequence: Synthetic oligonucleotide
  Sense strand starting at position 1995 of SEQ ID NO: 915258
ucugcauggcuguaaggaa

SEQ ID NO: 1066325 - RNA, 19 nt, Artificial Sequence
  Description of Artificial Sequence: Synthetic oligonucleotide
  Antisense strand to SEQ ID NO: 1066324
uuccuuacagccaugcaga

SEQ ID NO: 1066326 - RNA, 19 nt, Artificial Sequence
  Description of Artificial Sequence: Synthetic oligonucleotide
  Sense strand starting at position 2055 of SEQ ID NO: 915258
ugucaugaauauguagaau

SEQ ID NO: 1066327 - RNA, 19 nt, Artificial Sequence
  Description of Artificial Sequence: Synthetic oligonucleotide
  Antisense strand to SEQ ID NO: 1066326
auucuacauauucaugaca

SEQ ID NO: 1066328 - RNA, 19 nt, Artificial Sequence
  Description of Artificial Sequence: Synthetic oligonucleotide
  Sense strand starting at position 2104 of SEQ ID NO: 915258
ucgugaagucuagaaccaa

SEQ ID NO: 1066329 - RNA, 19 nt, Artificial Sequence
  Description of Artificial Sequence: Synthetic oligonucleotide
  Antisense strand to SEQ ID NO: 1066328
uugguucuagacuucacga

SEQ ID NO: 1066330 - RNA, 19 nt, Artificial Sequence
  Description of Artificial Sequence: Synthetic oligonucleotide
  Sense strand starting at position 2229 of SEQ ID NO: 915258
aggaaugacuguucaagug

SEQ ID NO: 1066331 - RNA, 19 nt, Artificial Sequence
  Description of Artificial Sequence: Synthetic oligonucleotide
  Antisense strand to SEQ ID NO: 1066330
cacuugaacagucauuccu

SEQ ID NO: 1066332 - RNA, 19 nt, Artificial Sequence
  Description of Artificial Sequence: Synthetic oligonucleotide
  Sense strand starting at position 2558 of SEQ ID NO: 915258
acagaagaaugauauacaa

SEQ ID NO: 1066333 - RNA, 19 nt, Artificial Sequence
  Description of Artificial Sequence: Synthetic oligonucleotide
  Antisense strand to SEQ ID NO: 1066332
uuguauaucauucuucugu

SEQ ID NO: 1066334 - RNA, 19 nt, Artificial Sequence
  Description of Artificial Sequence: Synthetic oligonucleotide
  Sense strand starting at position 2758 of SEQ ID NO: 915258
guucuauugaaauggguag

SEQ ID NO: 1066335 - RNA, 19 nt, Artificial Sequence
  Description of Artificial Sequence: Synthetic oligonucleotide
  Antisense strand to SEQ ID NO: 1066334
cuacccauuucaauagaac

SEQ ID NO: 1066336 - RNA, 19 nt, Artificial Sequence
  Description of Artificial Sequence: Synthetic oligonucleotide
  Sense strand starting at position 2759 of SEQ ID NO: 915258
uucuauugaaauggguaga

SEQ ID NO: 1066337 - RNA, 19 nt, Artificial Sequence
  Description of Artificial Sequence: Synthetic oligonucleotide
  Antisense strand to SEQ ID NO: 1066336
ucuacccauuucaauagaa

SEQ ID NO: 1066338 - RNA, 19 nt, Artificial Sequence
  Description of Artificial Sequence: Synthetic oligonucleotide
  Sense strand starting at position 2801 of SEQ ID NO: 915258
ugucuuacacuguaaagac

SEQ ID NO: 1066339 - RNA, 19 nt, Artificial Sequence
  Description of Artificial Sequence: Synthetic oligonucleotide
  Antisense strand to SEQ ID NO: 1066338
gucuuuacaguguaagaca

SEQ ID NO: 1066340 - RNA, 19 nt, Artificial Sequence
  Description of Artificial Sequence: Synthetic oligonucleotide
  Sense strand starting at position 2887 of SEQ ID NO: 915258
guacaugauuuguauuugu

SEQ ID NO: 1066341 - RNA, 19 nt, Artificial Sequence
  Description of Artificial Sequence: Synthetic oligonucleotide
  Antisense strand to SEQ ID NO: 1066340
acaaauacaaaucauguac

SEQ ID NO: 1066342 - RNA, 19 nt, Artificial Sequence
  Description of Artificial Sequence: Synthetic oligonucleotide
  Sense strand starting at position 2898 of SEQ ID NO: 915258
guauuuguaugaucuuccu

SEQ ID NO: 1066343 - RNA, 19 nt, Artificial Sequence
  Description of Artificial Sequence: Synthetic oligonucleotide
  Antisense strand to SEQ ID NO: 1066342
aggaagaucauacaaauac

SEQ ID NO: 1066344 - RNA, 19 nt, Artificial Sequence
  Description of Artificial Sequence: Synthetic oligonucleotide
  Sense strand starting at position 2975 of SEQ ID NO: 915258
acaucaauguuaguaaaca

SEQ ID NO: 1066345 - RNA, 19 nt, Artificial Sequence
  Description of Artificial Sequence: Synthetic oligonucleotide
  Antisense strand to SEQ ID NO: 1066344
uguuuacuaacauugaugu

SEQ ID NO: 1066346 - RNA, 19 nt, Artificial Sequence
  Description of Artificial Sequence: Synthetic oligonucleotide
  Sense strand starting at position 3098 of SEQ ID NO: 915258
ugaugaaguucucuucuga

SEQ ID NO: 1066347 - RNA, 19 nt, Artificial Sequence
  Description of Artificial Sequence: Synthetic oligonucleotide
  Antisense strand to SEQ ID NO: 1066346
ucagaagagaacuucauca

SEQ ID NO: 1066348 - RNA, 19 nt, Artificial Sequence
  Description of Artificial Sequence: Synthetic oligonucleotide
  Sense strand starting at position 3105 of SEQ ID NO: 915258
guucucuucugauuagauc

SEQ ID NO: 1066349 - RNA, 19 nt, Artificial Sequence
  Description of Artificial Sequence: Synthetic oligonucleotide
  Antisense strand to SEQ ID NO: 1066348
gaucuaaucagaagagaac

SEQ ID NO: 1066350 - RNA, 19 nt, Artificial Sequence
  Description of Artificial Sequence: Synthetic oligonucleotide
  Sense strand starting at position 3234 of SEQ ID NO: 915258
gucucagugcuacagaaca

SEQ ID NO: 1066351 - RNA, 19 nt, Artificial Sequence
  Description of Artificial Sequence: Synthetic oligonucleotide
  Antisense strand to SEQ ID NO: 1066350
uguucuguagcacugagac

SEQ ID NO: 1066352 - RNA, 19 nt, Artificial Sequence
  Description of Artificial Sequence: Synthetic oligonucleotide
  Sense strand starting at position 3366 of SEQ ID NO: 915258
ugcacaugacuccaauguu

SEQ ID NO: 1066353 - RNA, 19 nt, Artificial Sequence
  Description of Artificial Sequence: Synthetic oligonucleotide
  Antisense strand to SEQ ID NO: 1066352
aacauuggagucaugugca

SEQ ID NO: 1066354 - RNA, 19 nt, Artificial Sequence
  Description of Artificial Sequence: Synthetic oligonucleotide
  Sense strand starting at position 3425 of SEQ ID NO: 915258
ggauuccaaugcccaauua

SEQ ID NO: 1066355 - RNA, 19 nt, Artificial Sequence
  Description of Artificial Sequence: Synthetic oligonucleotide
  Antisense strand to SEQ ID NO: 1066354
uaauugggcauuggaaucc

SEQ ID NO: 1066356 - RNA, 19 nt, Artificial Sequence
  Description of Artificial Sequence: Synthetic oligonucleotide
  Sense strand starting at position 3615 of SEQ ID NO: 915258
aguaaauggcauuauucca

SEQ ID NO: 1066357 - RNA, 19 nt, Artificial Sequence
  Description of Artificial Sequence: Synthetic oligonucleotide
  Antisense strand to SEQ ID NO: 1066356
uggaauaaugccauuuacu

SEQ ID NO: 1066358 - RNA, 19 nt, Artificial Sequence
  Description of Artificial Sequence: Synthetic oligonucleotide
  Sense strand starting at position 3735 of SEQ ID NO: 915258
ucuagaacaugacuaguuu

SEQ ID NO: 1066359 - RNA, 19 nt, Artificial Sequence
  Description of Artificial Sequence: Synthetic oligonucleotide
  Antisense strand to SEQ ID NO: 1066358
aaacuagucauguucuaga

SEQ ID NO: 1066360 - RNA, 19 nt, Artificial Sequence
  Description of Artificial Sequence: Synthetic oligonucleotide
  Sense strand starting at position 3830 of SEQ ID NO: 915258
ccacuugagucuuuccaca

SEQ ID NO: 1066361 - RNA, 19 nt, Artificial Sequence
  Description of Artificial Sequence: Synthetic oligonucleotide
  Antisense strand to SEQ ID NO: 1066360
uguggaaagacucaagugg

SEQ ID NO: 1066362 - RNA, 19 nt, Artificial Sequence
  Description of Artificial Sequence: Synthetic oligonucleotide
  Sense strand starting at position 3832 of SEQ ID NO: 915258
acuugagucuuuccacaug

SEQ ID NO: 1066363 - RNA, 19 nt, Artificial Sequence
  Description of Artificial Sequence: Synthetic oligonucleotide
  Antisense strand to SEQ ID NO: 1066362
cauguggaaagacucaagu

SEQ ID NO: 1066364 - RNA, 19 nt, Artificial Sequence
  Description of Artificial Sequence: Synthetic oligonucleotide
  Sense strand starting at position 3835 of SEQ ID NO: 915258
ugagucuuuccacauggca

SEQ ID NO: 1066365 - RNA, 19 nt, Artificial Sequence
  Description of Artificial Sequence: Synthetic oligonucleotide
  Antisense strand to SEQ ID NO: 1066364
ugccauguggaaagacuca

SEQ ID NO: 1066366 - RNA, 19 nt, Artificial Sequence
  Description of Artificial Sequence: Synthetic oligonucleotide
  Sense strand starting at position 3957 of SEQ ID NO: 915258
uuacaaagaugugcaagau

SEQ ID NO: 1066367 - RNA, 19 nt, Artificial Sequence
  Description of Artificial Sequence: Synthetic oligonucleotide
  Antisense strand to SEQ ID NO: 1066366
aucuugcacaucuuuguaa

SEQ ID NO: 1066368 - RNA, 19 nt, Artificial Sequence
  Description of Artificial Sequence: Synthetic oligonucleotide
  Sense strand starting at position 64 of SEQ ID NO: 915259
aggcuuuggacucaauagu

SEQ ID NO: 1066369 - RNA, 19 nt, Artificial Sequence
  Description of Artificial Sequence: Synthetic oligonucleotide
  Antisense strand to SEQ ID NO: 1066368
acuauugaguccaaagccu

SEQ ID NO: 1066370 - RNA, 19 nt, Artificial Sequence
  Description of Artificial Sequence: Synthetic oligonucleotide
  Sense strand starting at position 118 of SEQ ID NO: 915259
ugguacaggagucaugauu

SEQ ID NO: 1066371 - RNA, 19 nt, Artificial Sequence
  Description of Artificial Sequence: Synthetic oligonucleotide
  Antisense strand to SEQ ID NO: 1066370
aaucaugacuccuguacca

SEQ ID NO: 1066372 - RNA, 19 nt, Artificial Sequence
  Description of Artificial Sequence: Synthetic oligonucleotide
  Sense strand starting at position 252 of SEQ ID NO: 915259
agagaacuguuccugagac

SEQ ID NO: 1066373 - RNA, 19 nt, Artificial Sequence
  Description of Artificial Sequence: Synthetic oligonucleotide
  Antisense strand to SEQ ID NO: 1066372
gucucaggaacaguucucu

SEQ ID NO: 1066374 - RNA, 19 nt, Artificial Sequence
  Description of Artificial Sequence: Synthetic oligonucleotide
  Sense strand starting at position 490 of SEQ ID NO: 915259
acacaagucucuucugaag

SEQ ID NO: 1066375 - RNA, 19 nt, Artificial Sequence
  Description of Artificial Sequence: Synthetic oligonucleotide
  Antisense strand to SEQ ID NO: 1066374
cuucagaagagacuugugu

SEQ ID NO: 1066376 - RNA, 19 nt, Artificial Sequence
  Description of Artificial Sequence: Synthetic oligonucleotide
  Sense strand starting at position 681 of SEQ ID NO: 915259
gugggauugaugggagcaa

SEQ ID NO: 1066377 - RNA, 19 nt, Artificial Sequence
  Description of Artificial Sequence: Synthetic oligonucleotide
  Antisense strand to SEQ ID NO: 1066376
uugcucccaucaaucccac

SEQ ID NO: 1066378 - RNA, 19 nt, Artificial Sequence
  Description of Artificial Sequence: Synthetic oligonucleotide
  Sense strand starting at position 725 of SEQ ID NO: 915259
ccaggcaugaguugagaga

SEQ ID NO: 1066379 - RNA, 19 nt, Artificial Sequence
  Description of Artificial Sequence: Synthetic oligonucleotide
  Antisense strand to SEQ ID NO: 1066378
ucucucaacucaugccugg

SEQ ID NO: 1066380 - RNA, 19 nt, Artificial Sequence
  Description of Artificial Sequence: Synthetic oligonucleotide
  Sense strand starting at position 741 of SEQ ID NO: 915259
agaguauuggguuggaaug

SEQ ID NO: 1066381 - RNA, 19 nt, Artificial Sequence
  Description of Artificial Sequence: Synthetic oligonucleotide
  Antisense strand to SEQ ID NO: 1066380
cauuccaacccaauacucu

SEQ ID NO: 1066382 - RNA, 19 nt, Artificial Sequence
  Description of Artificial Sequence: Synthetic oligonucleotide
  Sense strand starting at position 742 of SEQ ID NO: 915259
gaguauuggguuggaauga

SEQ ID NO: 1066383 - RNA, 19 nt, Artificial Sequence
  Description of Artificial Sequence: Synthetic oligonucleotide
  Antisense strand to SEQ ID NO: 1066382
ucauuccaacccaauacuc

SEQ ID NO: 1066384 - RNA, 19 nt, Artificial Sequence
  Description of Artificial Sequence: Synthetic oligonucleotide
  Sense strand starting at position 773 of SEQ ID NO: 915259
acuccugggaucugagauu

SEQ ID NO: 1066385 - RNA, 19 nt, Artificial Sequence
  Description of Artificial Sequence: Synthetic oligonucleotide
  Antisense strand to SEQ ID NO: 1066384
aaucucagaucccaggagu

SEQ ID NO: 1066386 - RNA, 19 nt, Artificial Sequence
  Description of Artificial Sequence: Synthetic oligonucleotide
  Sense strand starting at position 786 of SEQ ID NO: 915259
gagauucuauaaguuguga

SEQ ID NO: 1066387 - RNA, 19 nt, Artificial Sequence
  Description of Artificial Sequence: Synthetic oligonucleotide
  Antisense strand to SEQ ID NO: 1066386
ucacaacuuauagaaucuc

SEQ ID NO: 1066388 - RNA, 19 nt, Artificial Sequence
  Description of Artificial Sequence: Synthetic oligonucleotide
  Sense strand starting at position 832 of SEQ ID NO: 915259
gugcuaaggaauggauuga

SEQ ID NO: 1066389 - RNA, 19 nt, Artificial Sequence
  Description of Artificial Sequence: Synthetic oligonucleotide
  Antisense strand to SEQ ID NO: 1066388
ucaauccauuccuuagcac

SEQ ID NO: 1066390 - RNA, 19 nt, Artificial Sequence
  Description of Artificial Sequence: Synthetic oligonucleotide
  Sense strand starting at position 991 of SEQ ID NO: 915259
ugccuauuaggauauauuc

SEQ ID NO: 1066391 - RNA, 19 nt, Artificial Sequence
  Description of Artificial Sequence: Synthetic oligonucleotide
  Antisense strand to SEQ ID NO: 1066390
gaauauauccuaauaggca

SEQ ID NO: 1066392 - RNA, 19 nt, Artificial Sequence
  Description of Artificial Sequence: Synthetic oligonucleotide
  Sense strand starting at position 1122 of SEQ ID NO: 915259
ucuuaagcuguagaucaga

SEQ ID NO: 1066393 - RNA, 19 nt, Artificial Sequence
  Description of Artificial Sequence: Synthetic oligonucleotide
  Antisense strand to SEQ ID NO: 1066392
ucugaucuacagcuuaaga

SEQ ID NO: 1066394 - RNA, 19 nt, Artificial Sequence
  Description of Artificial Sequence: Synthetic oligonucleotide
  Sense strand starting at position 1185 of SEQ ID NO: 915259
uuugucuuccuccagagau

SEQ ID NO: 1066395 - RNA, 19 nt, Artificial Sequence
  Description of Artificial Sequence: Synthetic oligonucleotide
  Antisense strand to SEQ ID NO: 1066394
aucucuggaggaagacaaa

SEQ ID NO: 1066396 - RNA, 19 nt, Artificial Sequence
  Description of Artificial Sequence: Synthetic oligonucleotide
  Sense strand starting at position 1200 of SEQ ID NO: 915259
agauuugccugagccacuu

SEQ ID NO: 1066397 - RNA, 19 nt, Artificial Sequence
  Description of Artificial Sequence: Synthetic oligonucleotide
  Antisense strand to SEQ ID NO: 1066396
aaguggcucaggcaaaucu

SEQ ID NO: 1066398 - RNA, 19 nt, Artificial Sequence
  Description of Artificial Sequence: Synthetic oligonucleotide
  Sense strand starting at position 1329 of SEQ ID NO: 915259
ggucuugaugaugagcaga

SEQ ID NO: 1066399 - RNA, 19 nt, Artificial Sequence
  Description of Artificial Sequence: Synthetic oligonucleotide
  Antisense strand to SEQ ID NO: 1066398
ucugcucaucaucaagacc

SEQ ID NO: 1066400 - RNA, 19 nt, Artificial Sequence
  Description of Artificial Sequence: Synthetic oligonucleotide
  Sense strand starting at position 1331 of SEQ ID NO: 915259
ucuugaugaugagcagaua

SEQ ID NO: 1066401 - RNA, 19 nt, Artificial Sequence
  Description of Artificial Sequence: Synthetic oligonucleotide
  Antisense strand to SEQ ID NO: 1066400
uaucugcucaucaucaaga

SEQ ID NO: 1066402 - RNA, 19 nt, Artificial Sequence
  Description of Artificial Sequence: Synthetic oligonucleotide
  Sense strand starting at position 1404 of SEQ ID NO: 915259
gaugacaaucucgauguuu

SEQ ID NO: 1066403 - RNA, 19 nt, Artificial Sequence
  Description of Artificial Sequence: Synthetic oligonucleotide
  Antisense strand to SEQ ID NO: 1066402
aaacaucgagauugucauc

SEQ ID NO: 1066404 - RNA, 19 nt, Artificial Sequence
  Description of Artificial Sequence: Synthetic oligonucleotide
  Sense strand starting at position 1475 of SEQ ID NO: 915259
aguuuauuugauuguccuu

SEQ ID NO: 1066405 - RNA, 19 nt, Artificial Sequence
  Description of Artificial Sequence: Synthetic oligonucleotide
  Antisense strand to SEQ ID NO: 1066404
aaggacaaucaaauaaacu

SEQ ID NO: 1066406 - RNA, 19 nt, Artificial Sequence
  Description of Artificial Sequence: Synthetic oligonucleotide
  Sense strand starting at position 1481 of SEQ ID NO: 915259
uuugauuguccuuacagaa

SEQ ID NO: 1066407 - RNA, 19 nt, Artificial Sequence
  Description of Artificial Sequence: Synthetic oligonucleotide
  Antisense strand to SEQ ID NO: 1066406
uucuguaaggacaaucaaa

SEQ ID NO: 1066408 - RNA, 19 nt, Artificial Sequence
  Description of Artificial Sequence: Synthetic oligonucleotide
  Sense strand starting at position 1769 of SEQ ID NO: 915259
ugaugacugagguguaaca

SEQ ID NO: 1066409 - RNA, 19 nt, Artificial Sequence
  Description of Artificial Sequence: Synthetic oligonucleotide
  Antisense strand to SEQ ID NO: 1066408
uguuacaccucagucauca

SEQ ID NO: 1066410 - RNA, 19 nt, Artificial Sequence
  Description of Artificial Sequence: Synthetic oligonucleotide
  Sense strand starting at position 1839 of SEQ ID NO: 915259
uuugacaucuacuuggauu

SEQ ID NO: 1066411 - RNA, 19 nt, Artificial Sequence
  Description of Artificial Sequence: Synthetic oligonucleotide
  Antisense strand to SEQ ID NO: 1066410
aauccaaguagaugucaaa

SEQ ID NO: 1066412 - RNA, 19 nt, Artificial Sequence
  Description of Artificial Sequence: Synthetic oligonucleotide
  Sense strand starting at position 1841 of SEQ ID NO: 915259
ugacaucuacuuggauuaa

SEQ ID NO: 1066413 - RNA, 19 nt, Artificial Sequence
  Description of Artificial Sequence: Synthetic oligonucleotide
  Antisense strand to SEQ ID NO: 1066412
uuaauccaaguagauguca

SEQ ID NO: 1066414 - RNA, 19 nt, Artificial Sequence
  Description of Artificial Sequence: Synthetic oligonucleotide
  Sense strand starting at position 1944 of SEQ ID NO: 915259
guccauaaagcccaugaga

SEQ ID NO: 1066415 - RNA, 19 nt, Artificial Sequence
  Description of Artificial Sequence: Synthetic oligonucleotide
  Antisense strand to SEQ ID NO: 1066414
ucucaugggcuuuauggac

SEQ ID NO: 1066416 - RNA, 19 nt, Artificial Sequence
  Description of Artificial Sequence: Synthetic oligonucleotide
  Sense strand starting at position 1946 of SEQ ID NO: 915259
ccauaaagcccaugagaau

SEQ ID NO: 1066417 - RNA, 19 nt, Artificial Sequence
  Description of Artificial Sequence: Synthetic oligonucleotide
  Antisense strand to SEQ ID NO: 1066416
auucucaugggcuuuaugg

SEQ ID NO: 1066418 - RNA, 19 nt, Artificial Sequence
  Description of Artificial Sequence: Synthetic oligonucleotide
  Sense strand starting at position 1971 of SEQ ID NO: 915259
gguuacucuggugagauua

SEQ ID NO: 1066419 - RNA, 19 nt, Artificial Sequence
  Description of Artificial Sequence: Synthetic oligonucleotide
  Antisense strand to SEQ ID NO: 1066418
uaaucucaccagaguaacc

SEQ ID NO: 1066420 - RNA, 19 nt, Artificial Sequence
  Description of Artificial Sequence: Synthetic oligonucleotide
  Sense strand starting at position 2018 of SEQ ID NO: 915259
uuggucugaggaugauaau

SEQ ID NO: 1066421 - RNA, 19 nt, Artificial Sequence
  Description of Artificial Sequence: Synthetic oligonucleotide
  Antisense strand to SEQ ID NO: 1066420
auuaucauccucagaccaa

SEQ ID NO: 1066422 - RNA, 19 nt, Artificial Sequence
  Description of Artificial Sequence: Synthetic oligonucleotide
  Sense strand starting at position 2106 of SEQ ID NO: 915259
cugggucuauuuguagagu

SEQ ID NO: 1066423 - RNA, 19 nt, Artificial Sequence
  Description of Artificial Sequence: Synthetic oligonucleotide
  Antisense strand to SEQ ID NO: 1066422
acucuacaaauagacccag

SEQ ID NO: 1066424 - RNA, 19 nt, Artificial Sequence
  Description of Artificial Sequence: Synthetic oligonucleotide
  Sense strand starting at position 2189 of SEQ ID NO: 915259
gagccuuaagcugguauuu

SEQ ID NO: 1066425 - RNA, 19 nt, Artificial Sequence
  Description of Artificial Sequence: Synthetic oligonucleotide
  Antisense strand to SEQ ID NO: 1066424
aaauaccagcuuaaggcuc

SEQ ID NO: 1066426 - RNA, 19 nt, Artificial Sequence
  Description of Artificial Sequence: Synthetic oligonucleotide
  Sense strand starting at position 2263 of SEQ ID NO: 915259
uacaauucuuagguuugga

SEQ ID NO: 1066427 - RNA, 19 nt, Artificial Sequence
  Description of Artificial Sequence: Synthetic oligonucleotide
  Antisense strand to SEQ ID NO: 1066426
uccaaaccuaagaauugua

SEQ ID NO: 1066428 - RNA, 19 nt, Artificial Sequence
  Description of Artificial Sequence: Synthetic oligonucleotide
  Sense strand starting at position 2266 of SEQ ID NO: 915259
aauucuuagguuuggaaga

SEQ ID NO: 1066429 - RNA, 19 nt, Artificial Sequence
  Description of Artificial Sequence: Synthetic oligonucleotide
  Antisense strand to SEQ ID NO: 1066428
ucuuccaaaccuaagaauu

SEQ ID NO: 1066430 - RNA, 19 nt, Artificial Sequence
  Description of Artificial Sequence: Synthetic oligonucleotide
  Sense strand starting at position 2633 of SEQ ID NO: 915259
auaguauuagcugauaaca

SEQ ID NO: 1066431 - RNA, 19 nt, Artificial Sequence
  Description of Artificial Sequence: Synthetic oligonucleotide
  Antisense strand to SEQ ID NO: 1066430
uguuaucagcuaauacuau

SEQ ID NO: 1066432 - RNA, 19 nt, Artificial Sequence
  Description of Artificial Sequence: Synthetic oligonucleotide
  Sense strand starting at position 2844 of SEQ ID NO: 915259
aucaaaguuggguagaguu

SEQ ID NO: 1066433 - RNA, 19 nt, Artificial Sequence
  Description of Artificial Sequence: Synthetic oligonucleotide
  Antisense strand to SEQ ID NO: 1066432
aacucuacccaacuuugau

SEQ ID NO: 1066434 - RNA, 19 nt, Artificial Sequence
  Description of Artificial Sequence: Synthetic oligonucleotide
  Sense strand starting at position 2851 of SEQ ID NO: 915259
uuggguagaguuuauacau

SEQ ID NO: 1066435 - RNA, 19 nt, Artificial Sequence
  Description of Artificial Sequence: Synthetic oligonucleotide
  Antisense strand to SEQ ID NO: 1066434
auguauaaacucuacccaa

SEQ ID NO: 1066436 - RNA, 19 nt, Artificial Sequence
  Description of Artificial Sequence: Synthetic oligonucleotide
  Sense strand starting at position 3097 of SEQ ID NO: 915259
ugguauauccaucacccga

SEQ ID NO: 1066437 - RNA, 19 nt, Artificial Sequence
  Description of Artificial Sequence: Synthetic oligonucleotide
  Antisense strand to SEQ ID NO: 1066436
ucgggugauggauauacca

SEQ ID NO: 1066438 - RNA, 19 nt, Artificial Sequence
  Description of Artificial Sequence: Synthetic oligonucleotide
  Sense strand starting at position 3169 of SEQ ID NO: 915259
cuguaagaaguguagauca

SEQ ID NO: 1066439 - RNA, 19 nt, Artificial Sequence
  Description of Artificial Sequence: Synthetic oligonucleotide
  Antisense strand to SEQ ID NO: 1066438
ugaucuacacuucuuacag

SEQ ID NO: 1066440 - RNA, 19 nt, Artificial Sequence
  Description of Artificial Sequence: Synthetic oligonucleotide
  Sense strand starting at position 3171 of SEQ ID NO: 915259
guaagaaguguagaucagu

SEQ ID NO: 1066441 - RNA, 19 nt, Artificial Sequence
  Description of Artificial Sequence: Synthetic oligonucleotide
  Antisense strand to SEQ ID NO: 1066440
acugaucuacacuucuuac

SEQ ID NO: 1066442 - RNA, 19 nt, Artificial Sequence
  Description of Artificial Sequence: Synthetic oligonucleotide
  Sense strand starting at position 3577 of SEQ ID NO: 915259
aguaauuuguguuucucua

SEQ ID NO: 1066443 - RNA, 19 nt, Artificial Sequence
  Description of Artificial Sequence: Synthetic oligonucleotide
  Antisense strand to SEQ ID NO: 1066442
uagagaaacacaaauuacu

SEQ ID NO: 1066444 - RNA, 19 nt, Artificial Sequence
  Description of Artificial Sequence: Synthetic oligonucleotide
  Sense strand starting at position 3630 of SEQ ID NO: 915259
aaauauugugauuggauac

SEQ ID NO: 1066445 - RNA, 19 nt, Artificial Sequence
  Description of Artificial Sequence: Synthetic oligonucleotide
  Antisense strand to SEQ ID NO: 1066444
guauccaaucacaauauuu

SEQ ID NO: 1066446 - RNA, 19 nt, Artificial Sequence
  Description of Artificial Sequence: Synthetic oligonucleotide
  Sense strand starting at position 3675 of SEQ ID NO: 915259
cugcuucugggagaaucuu

SEQ ID NO: 1066447 - RNA, 19 nt, Artificial Sequence
  Description of Artificial Sequence: Synthetic oligonucleotide
  Antisense strand to SEQ ID NO: 1066446
aagauucucccagaagcag

SEQ ID NO: 1066448 - RNA, 19 nt, Artificial Sequence
  Description of Artificial Sequence: Synthetic oligonucleotide
  Sense strand starting at position 39 of SEQ ID NO: 915260
gaggaauuguuagaagagg

SEQ ID NO: 1066449 - RNA, 19 nt, Artificial Sequence
  Description of Artificial Sequence: Synthetic oligonucleotide
  Antisense strand to SEQ ID NO: 1066448
ccucuucuaacaauuccuc

SEQ ID NO: 1066450 - RNA, 19 nt, Artificial Sequence
  Description of Artificial Sequence: Synthetic oligonucleotide
  Sense strand starting at position 210 of SEQ ID NO: 915260
gaaugaauaucugauggaa

SEQ ID NO: 1066451 - RNA, 19 nt, Artificial Sequence
  Description of Artificial Sequence: Synthetic oligonucleotide
  Antisense strand to SEQ ID NO: 1066450
uuccaucagauauucauuc

SEQ ID NO: 1066452 - RNA, 19 nt, Artificial Sequence
  Description of Artificial Sequence: Synthetic oligonucleotide
  Sense strand starting at position 262 of SEQ ID NO: 915260
aacucuuucugagcgagag

SEQ ID NO: 1066453 - RNA, 19 nt, Artificial Sequence
  Description of Artificial Sequence: Synthetic oligonucleotide
  Antisense strand to SEQ ID NO: 1066452
cucucgcucagaaagaguu

SEQ ID NO: 1066454 - RNA, 19 nt, Artificial Sequence
  Description of Artificial Sequence: Synthetic oligonucleotide
  Sense strand starting at position 264 of SEQ ID NO: 915260
cucuuucugagcgagaguu

SEQ ID NO: 1066455 - RNA, 19 nt, Artificial Sequence
  Description of Artificial Sequence: Synthetic oligonucleotide
  Antisense strand to SEQ ID NO: 1066454
aacucucgcucagaaagag

SEQ ID NO: 1066456 - RNA, 19 nt, Artificial Sequence
  Description of Artificial Sequence: Synthetic oligonucleotide
  Sense strand starting at position 274 of SEQ ID NO: 915260
gcgagaguuccagagcauc

SEQ ID NO: 1066457 - RNA, 19 nt, Artificial Sequence
  Description of Artificial Sequence: Synthetic oligonucleotide
  Antisense strand to SEQ ID NO: 1066456
gaugcucuggaacucucgc

SEQ ID NO: 1066458 - RNA, 19 nt, Artificial Sequence
  Description of Artificial Sequence: Synthetic oligonucleotide
  Sense strand starting at position 334 of SEQ ID NO: 915260
ggucauguguugguaggaa

SEQ ID NO: 1066459 - RNA, 19 nt, Artificial Sequence
  Description of Artificial Sequence: Synthetic oligonucleotide
  Antisense strand to SEQ ID NO: 1066458
uuccuaccaacacaugacc

SEQ ID NO: 1066460 - RNA, 19 nt, Artificial Sequence
  Description of Artificial Sequence: Synthetic oligonucleotide
  Sense strand starting at position 352 of SEQ ID NO: 915260
agaugagcuucucuccaaa

SEQ ID NO: 1066461 - RNA, 19 nt, Artificial Sequence
  Description of Artificial Sequence: Synthetic oligonucleotide
  Antisense strand to SEQ ID NO: 1066460
uuuggagagaagcucaucu

SEQ ID NO: 1066462 - RNA, 19 nt, Artificial Sequence
  Description of Artificial Sequence: Synthetic oligonucleotide
  Sense strand starting at position 729 of SEQ ID NO: 915260
agauucugaugggcugaua

SEQ ID NO: 1066463 - RNA, 19 nt, Artificial Sequence
  Description of Artificial Sequence: Synthetic oligonucleotide
  Antisense strand to SEQ ID NO: 1066462
uaucagcccaucagaaucu

SEQ ID NO: 1066464 - RNA, 19 nt, Artificial Sequence
  Description of Artificial Sequence: Synthetic oligonucleotide
  Sense strand starting at position 796 of SEQ ID NO: 915260
ucuugauauagagguguua

SEQ ID NO: 1066465 - RNA, 19 nt, Artificial Sequence
  Description of Artificial Sequence: Synthetic oligonucleotide
  Antisense strand to SEQ ID NO: 1066464
uaacaccucuauaucaaga

SEQ ID NO: 1066466 - RNA, 19 nt, Artificial Sequence
  Description of Artificial Sequence: Synthetic oligonucleotide
  Sense strand starting at position 798 of SEQ ID NO: 915260
uugauauagagguguuauu

SEQ ID NO: 1066467 - RNA, 19 nt, Artificial Sequence
  Description of Artificial Sequence: Synthetic oligonucleotide
  Antisense strand to SEQ ID NO: 1066466
aauaacaccucuauaucaa

SEQ ID NO: 1066468 - RNA, 19 nt, Artificial Sequence
  Description of Artificial Sequence: Synthetic oligonucleotide
  Sense strand starting at position 807 of SEQ ID NO: 915260
agguguuauuugucuuggu

SEQ ID NO: 1066469 - RNA, 19 nt, Artificial Sequence
  Description of Artificial Sequence: Synthetic oligonucleotide
  Antisense strand to SEQ ID NO: 1066468
accaagacaaauaacaccu

SEQ ID NO: 1066470 - RNA, 19 nt, Artificial Sequence
  Description of Artificial Sequence: Synthetic oligonucleotide
  Sense strand starting at position 808 of SEQ ID NO: 915260
gguguuauuugucuugguu

SEQ ID NO: 1066471 - RNA, 19 nt, Artificial Sequence
  Description of Artificial Sequence: Synthetic oligonucleotide
  Antisense strand to SEQ ID NO: 1066470
aaccaagacaaauaacacc

SEQ ID NO: 1066472 - RNA, 19 nt, Artificial Sequence
  Description of Artificial Sequence: Synthetic oligonucleotide
  Sense strand starting at position 866 of SEQ ID NO: 915260
aaguaaacuugggcaagau

SEQ ID NO: 1066473 - RNA, 19 nt, Artificial Sequence
  Description of Artificial Sequence: Synthetic oligonucleotide
  Antisense strand to SEQ ID NO: 1066472
aucuugcccaaguuuacuu

SEQ ID NO: 1066474 - RNA, 19 nt, Artificial Sequence
  Description of Artificial Sequence: Synthetic oligonucleotide
  Sense strand starting at position 1027 of SEQ ID NO: 915260
gguuaauuucccugcagcu

SEQ ID NO: 1066475 - RNA, 19 nt, Artificial Sequence
  Description of Artificial Sequence: Synthetic oligonucleotide
  Antisense strand to SEQ ID NO: 1066474
agcugcagggaaauuaacc

SEQ ID NO: 1066476 - RNA, 19 nt, Artificial Sequence
  Description of Artificial Sequence: Synthetic oligonucleotide
  Sense strand starting at position 1371 of SEQ ID NO: 915260
cuauuugcuuguguagcua

SEQ ID NO: 1066477 - RNA, 19 nt, Artificial Sequence
  Description of Artificial Sequence: Synthetic oligonucleotide
  Antisense strand to SEQ ID NO: 1066476
uagcuacacaagcaaauag

SEQ ID NO: 1066478 - RNA, 19 nt, Artificial Sequence
  Description of Artificial Sequence: Synthetic oligonucleotide
  Sense strand starting at position 1627 of SEQ ID NO: 915260
cugauuccucuugggucua

SEQ ID NO: 1066479 - RNA, 19 nt, Artificial Sequence
  Description of Artificial Sequence: Synthetic oligonucleotide
  Antisense strand to SEQ ID NO: 1066478
uagacccaagaggaaucag

SEQ ID NO: 1066480 - RNA, 19 nt, Artificial Sequence
  Description of Artificial Sequence: Synthetic oligonucleotide
  Sense strand starting at position 1745 of SEQ ID NO: 915260
cucugaaaucaguggagcu

SEQ ID NO: 1066481 - RNA, 19 nt, Artificial Sequence
  Description of Artificial Sequence: Synthetic oligonucleotide
  Antisense strand to SEQ ID NO: 1066480
agcuccacugauuucagag

SEQ ID NO: 1066482 - RNA, 19 nt, Artificial Sequence
  Description of Artificial Sequence: Synthetic oligonucleotide
  Sense strand starting at position 2166 of SEQ ID NO: 915260
aaggaagcuccuugaagau

SEQ ID NO: 1066483 - RNA, 19 nt, Artificial Sequence
  Description of Artificial Sequence: Synthetic oligonucleotide
  Antisense strand to SEQ ID NO: 1066482
aucuucaaggagcuuccuu

SEQ ID NO: 1066484 - RNA, 19 nt, Artificial Sequence
  Description of Artificial Sequence: Synthetic oligonucleotide
  Sense strand starting at position 2221 of SEQ ID NO: 915260
augccaaagucacugacau

SEQ ID NO: 1066485 - RNA, 19 nt, Artificial Sequence
  Description of Artificial Sequence: Synthetic oligonucleotide
  Antisense strand to SEQ ID NO: 1066484
augucagugacuuuggcau

SEQ ID NO: 1066486 - RNA, 19 nt, Artificial Sequence
  Description of Artificial Sequence: Synthetic oligonucleotide
  Sense strand starting at position 2229 of SEQ ID NO: 915260
gucacugacauguagucua

SEQ ID NO: 1066487 - RNA, 19 nt, Artificial Sequence
  Description of Artificial Sequence: Synthetic oligonucleotide
  Antisense strand to SEQ ID NO: 1066486
uagacuacaugucagugac

SEQ ID NO: 1066488 - RNA, 19 nt, Artificial Sequence
  Description of Artificial Sequence: Synthetic oligonucleotide
  Sense strand starting at position 2232 of SEQ ID NO: 915260
acugacauguagucuacau

SEQ ID NO: 1066489 - RNA, 19 nt, Artificial Sequence
  Description of Artificial Sequence: Synthetic oligonucleotide
  Antisense strand to SEQ ID NO: 1066488
auguagacuacaugucagu

SEQ ID NO: 1066490 - RNA, 19 nt, Artificial Sequence
  Description of Artificial Sequence: Synthetic oligonucleotide
  Sense strand starting at position 2236 of SEQ ID NO: 915260
acauguagucuacaugcaa

SEQ ID NO: 1066491 - RNA, 19 nt, Artificial Sequence
  Description of Artificial Sequence: Synthetic oligonucleotide
  Antisense strand to SEQ ID NO: 1066490
uugcauguagacuacaugu

SEQ ID NO: 1066492 - RNA, 19 nt, Artificial Sequence
  Description of Artificial Sequence: Synthetic oligonucleotide
  Sense strand starting at position 2423 of SEQ ID NO: 915260
aauuacugucaacggacua

SEQ ID NO: 1066493 - RNA, 19 nt, Artificial Sequence
  Description of Artificial Sequence: Synthetic oligonucleotide
  Antisense strand to SEQ ID NO: 1066492
uaguccguugacaguaauu

SEQ ID NO: 1066494 - RNA, 19 nt, Artificial Sequence
  Description of Artificial Sequence: Synthetic oligonucleotide
  Sense strand starting at position 2448 of SEQ ID NO: 915260
ugacaaugccugcaggaau

SEQ ID NO: 1066495 - RNA, 19 nt, Artificial Sequence
  Description of Artificial Sequence: Synthetic oligonucleotide
  Antisense strand to SEQ ID NO: 1066494
auuccugcaggcauuguca

SEQ ID NO: 1066496 - RNA, 19 nt, Artificial Sequence
  Description of Artificial Sequence: Synthetic oligonucleotide
  Sense strand starting at position 2460 of SEQ ID NO: 915260
caggaaugaugucuuguau

SEQ ID NO: 1066497 - RNA, 19 nt, Artificial Sequence
  Description of Artificial Sequence: Synthetic oligonucleotide
  Antisense strand to SEQ ID NO: 1066496
auacaagacaucauuccug

SEQ ID NO: 1066498 - RNA, 19 nt, Artificial Sequence
  Description of Artificial Sequence: Synthetic oligonucleotide
  Sense strand starting at position 2580 of SEQ ID NO: 915260
cccggaaagcuguacucua

SEQ ID NO: 1066499 - RNA, 19 nt, Artificial Sequence
  Description of Artificial Sequence: Synthetic oligonucleotide
  Antisense strand to SEQ ID NO: 1066498
uagaguacagcuuuccggg

SEQ ID NO: 1066500 - RNA, 19 nt, Artificial Sequence
  Description of Artificial Sequence: Synthetic oligonucleotide
  Sense strand starting at position 2900 of SEQ ID NO: 915260
ugacauauagucugccuau

SEQ ID NO: 1066501 - RNA, 19 nt, Artificial Sequence
  Description of Artificial Sequence: Synthetic oligonucleotide
  Antisense strand to SEQ ID NO: 1066500
auaggcagacuauauguca

SEQ ID NO: 1066502 - RNA, 19 nt, Artificial Sequence
  Description of Artificial Sequence: Synthetic oligonucleotide
  Sense strand starting at position 2901 of SEQ ID NO: 915260
gacauauagucugccuaug

SEQ ID NO: 1066503 - RNA, 19 nt, Artificial Sequence
  Description of Artificial Sequence: Synthetic oligonucleotide
  Antisense strand to SEQ ID NO: 1066502
cauaggcagacuauauguc

SEQ ID NO: 1066504 - RNA, 19 nt, Artificial Sequence
  Description of Artificial Sequence: Synthetic oligonucleotide
  Sense strand starting at position 3011 of SEQ ID NO: 915260
cagagaguccacuauagca

SEQ ID NO: 1066505 - RNA, 19 nt, Artificial Sequence
  Description of Artificial Sequence: Synthetic oligonucleotide
  Antisense strand to SEQ ID NO: 1066504
ugcuauaguggacucucug

SEQ ID NO: 1066506 - RNA, 19 nt, Artificial Sequence
  Description of Artificial Sequence: Synthetic oligonucleotide
  Sense strand starting at position 3073 of SEQ ID NO: 915260
cuuaaucucuaggcagcaa

SEQ ID NO: 1066507 - RNA, 19 nt, Artificial Sequence
  Description of Artificial Sequence: Synthetic oligonucleotide
  Antisense strand to SEQ ID NO: 1066506
uugcugccuagagauuaag

SEQ ID NO: 1066508 - RNA, 19 nt, Artificial Sequence
  Description of Artificial Sequence: Synthetic oligonucleotide
  Sense strand starting at position 3077 of SEQ ID NO: 915260
aucucuaggcagcaauaau

SEQ ID NO: 1066509 - RNA, 19 nt, Artificial Sequence
  Description of Artificial Sequence: Synthetic oligonucleotide
  Antisense strand to SEQ ID NO: 1066508
auuauugcugccuagagau

SEQ ID NO: 1066510 - RNA, 19 nt, Artificial Sequence
  Description of Artificial Sequence: Synthetic oligonucleotide
  Sense strand starting at position 3114 of SEQ ID NO: 915260
ucagaacauucugugaauu

SEQ ID NO: 1066511 - RNA, 19 nt, Artificial Sequence
  Description of Artificial Sequence: Synthetic oligonucleotide
  Antisense strand to SEQ ID NO: 1066510
aauucacagaauguucuga

SEQ ID NO: 1066512 - RNA, 19 nt, Artificial Sequence
  Description of Artificial Sequence: Synthetic oligonucleotide
  Sense strand starting at position 3115 of SEQ ID NO: 915260
cagaacauucugugaauug

SEQ ID NO: 1066513 - RNA, 19 nt, Artificial Sequence
  Description of Artificial Sequence: Synthetic oligonucleotide
  Antisense strand to SEQ ID NO: 1066512
caauucacagaauguucug

SEQ ID NO: 1066514 - RNA, 19 nt, Artificial Sequence
  Description of Artificial Sequence: Synthetic oligonucleotide
  Sense strand starting at position 3219 of SEQ ID NO: 915260
ggacuaugcgaugaccaca

SEQ ID NO: 1066515 - RNA, 19 nt, Artificial Sequence
  Description of Artificial Sequence: Synthetic oligonucleotide
  Antisense strand to SEQ ID NO: 1066514
uguggucaucgcauagucc

SEQ ID NO: 1066516 - RNA, 19 nt, Artificial Sequence
  Description of Artificial Sequence: Synthetic oligonucleotide
  Sense strand starting at position 3224 of SEQ ID NO: 915260
augcgaugaccacagaauu

SEQ ID NO: 1066517 - RNA, 19 nt, Artificial Sequence
  Description of Artificial Sequence: Synthetic oligonucleotide
  Antisense strand to SEQ ID NO: 1066516
aauucuguggucaucgcau

SEQ ID NO: 1066518 - RNA, 19 nt, Artificial Sequence
  Description of Artificial Sequence: Synthetic oligonucleotide
  Sense strand starting at position 3279 of SEQ ID NO: 915260
ggacucugggaauggucau

SEQ ID NO: 1066519 - RNA, 19 nt, Artificial Sequence
  Description of Artificial Sequence: Synthetic oligonucleotide
  Antisense strand to SEQ ID NO: 1066518
augaccauucccagagucc

SEQ ID NO: 1066520 - RNA, 19 nt, Artificial Sequence
  Description of Artificial Sequence: Synthetic oligonucleotide
  Sense strand starting at position 3297 of SEQ ID NO: 915260
ugaagcugcccuggaauaa

SEQ ID NO: 1066521 - RNA, 19 nt, Artificial Sequence
  Description of Artificial Sequence: Synthetic oligonucleotide
  Antisense strand to SEQ ID NO: 1066520
uuauuccagggcagcuuca

SEQ ID NO: 1066522 - RNA, 19 nt, Artificial Sequence
  Description of Artificial Sequence: Synthetic oligonucleotide
  Sense strand starting at position 3421 of SEQ ID NO: 915260
ucuauaagagcuuaagcaa

SEQ ID NO: 1066523 - RNA, 19 nt, Artificial Sequence
  Description of Artificial Sequence: Synthetic oligonucleotide
  Antisense strand to SEQ ID NO: 1066522
uugcuuaagcucuuauaga

SEQ ID NO: 1066524 - RNA, 19 nt, Artificial Sequence
  Description of Artificial Sequence: Synthetic oligonucleotide
  Sense strand starting at position 3435 of SEQ ID NO: 915260
agcaaaucaguugaauucu

SEQ ID NO: 1066525 - RNA, 19 nt, Artificial Sequence
  Description of Artificial Sequence: Synthetic oligonucleotide
  Antisense strand to SEQ ID NO: 1066524
agaauucaacugauuugcu

SEQ ID NO: 1066526 - RNA, 19 nt, Artificial Sequence
  Description of Artificial Sequence: Synthetic oligonucleotide
  Sense strand starting at position 3942 of SEQ ID NO: 915260
ugguauccauuugauugau

SEQ ID NO: 1066527 - RNA, 19 nt, Artificial Sequence
  Description of Artificial Sequence: Synthetic oligonucleotide
  Antisense strand to SEQ ID NO: 1066526
aucaaucaaauggauacca

SEQ ID NO: 1066528 - RNA, 19 nt, Artificial Sequence
  Description of Artificial Sequence: Synthetic oligonucleotide
  Sense strand starting at position 107 of SEQ ID NO: 915261
cuugccgaccuugagaaua

SEQ ID NO: 1066529 - RNA, 19 nt, Artificial Sequence
  Description of Artificial Sequence: Synthetic oligonucleotide
  Antisense strand to SEQ ID NO: 1066528
uauucucaaggucggcaag

SEQ ID NO: 1066530 - RNA, 19 nt, Artificial Sequence
  Description of Artificial Sequence: Synthetic oligonucleotide
  Sense strand starting at position 232 of SEQ ID NO: 915261
guagcaaacuuauuguaag

SEQ ID NO: 1066531 - RNA, 19 nt, Artificial Sequence
  Description of Artificial Sequence: Synthetic oligonucleotide
  Antisense strand to SEQ ID NO: 1066530
cuuacaauaaguuugcuac

SEQ ID NO: 1066532 - RNA, 19 nt, Artificial Sequence
  Description of Artificial Sequence: Synthetic oligonucleotide
  Sense strand starting at position 243 of SEQ ID NO: 915261
auuguaaguccuggaagau

SEQ ID NO: 1066533 - RNA, 19 nt, Artificial Sequence
  Description of Artificial Sequence: Synthetic oligonucleotide
  Antisense strand to SEQ ID NO: 1066532
aucuuccaggacuuacaau

SEQ ID NO: 1066534 - RNA, 19 nt, Artificial Sequence
  Description of Artificial Sequence: Synthetic oligonucleotide
  Sense strand starting at position 268 of SEQ ID NO: 915261
gccuaauaaguguaacuug

SEQ ID NO: 1066535 - RNA, 19 nt, Artificial Sequence
  Description of Artificial Sequence: Synthetic oligonucleotide
  Antisense strand to SEQ ID NO: 1066534
caaguuacacuuauuaggc

SEQ ID NO: 1066536 - RNA, 19 nt, Artificial Sequence
  Description of Artificial Sequence: Synthetic oligonucleotide
  Sense strand starting at position 418 of SEQ ID NO: 915261
agcaguuguauuuguagac

SEQ ID NO: 1066537 - RNA, 19 nt, Artificial Sequence
  Description of Artificial Sequence: Synthetic oligonucleotide
  Antisense strand to SEQ ID NO: 1066536
gucuacaaauacaacugcu

SEQ ID NO: 1066538 - RNA, 19 nt, Artificial Sequence
  Description of Artificial Sequence: Synthetic oligonucleotide
  Sense strand starting at position 419 of SEQ ID NO: 915261
gcaguuguauuuguagacu

SEQ ID NO: 1066539 - RNA, 19 nt, Artificial Sequence
  Description of Artificial Sequence: Synthetic oligonucleotide
  Antisense strand to SEQ ID NO: 1066538
agucuacaaauacaacugc

SEQ ID NO: 1066540 - RNA, 19 nt, Artificial Sequence
  Description of Artificial Sequence: Synthetic oligonucleotide
  Sense strand starting at position 425 of SEQ ID NO: 915261
guauuuguagacugcuuua

SEQ ID NO: 1066541 - RNA, 19 nt, Artificial Sequence
  Description of Artificial Sequence: Synthetic oligonucleotide
  Antisense strand to SEQ ID NO: 1066540
uaaagcagucuacaaauac

SEQ ID NO: 1066542 - RNA, 19 nt, Artificial Sequence
  Description of Artificial Sequence: Synthetic oligonucleotide
  Sense strand starting at position 430 of SEQ ID NO: 915261
uguagacugcuuuauaauu

SEQ ID NO: 1066543 - RNA, 19 nt, Artificial Sequence
  Description of Artificial Sequence: Synthetic oligonucleotide
  Antisense strand to SEQ ID NO: 1066542
aauuauaaagcagucuaca

SEQ ID NO: 1066544 - RNA, 19 nt, Artificial Sequence
  Description of Artificial Sequence: Synthetic oligonucleotide
  Sense strand starting at position 479 of SEQ ID NO: 915261
auuuauuguguugggcaau

SEQ ID NO: 1066545 - RNA, 19 nt, Artificial Sequence
  Description of Artificial Sequence: Synthetic oligonucleotide
  Antisense strand to SEQ ID NO: 1066544
auugcccaacacaauaaau

SEQ ID NO: 1066546 - RNA, 19 nt, Artificial Sequence
  Description of Artificial Sequence: Synthetic oligonucleotide
  Sense strand starting at position 533 of SEQ ID NO: 915261
aggcgauccuuguccauuu

SEQ ID NO: 1066547 - RNA, 19 nt, Artificial Sequence
  Description of Artificial Sequence: Synthetic oligonucleotide
  Antisense strand to SEQ ID NO: 1066546
aaauggacaaggaucgccu

SEQ ID NO: 1066548 - RNA, 19 nt, Artificial Sequence
  Description of Artificial Sequence: Synthetic oligonucleotide
  Sense strand starting at position 534 of SEQ ID NO: 915261
ggcgauccuuguccauuua

SEQ ID NO: 1066549 - RNA, 19 nt, Artificial Sequence
  Description of Artificial Sequence: Synthetic oligonucleotide
  Antisense strand to SEQ ID NO: 1066548
uaaauggacaaggaucgcc

SEQ ID NO: 1066550 - RNA, 19 nt, Artificial Sequence
  Description of Artificial Sequence: Synthetic oligonucleotide
  Sense strand starting at position 535 of SEQ ID NO: 915261
gcgauccuuguccauuuau

SEQ ID NO: 1066551 - RNA, 19 nt, Artificial Sequence
  Description of Artificial Sequence: Synthetic oligonucleotide
  Antisense strand to SEQ ID NO: 1066550
auaaauggacaaggaucgc

SEQ ID NO: 1066552 - RNA, 19 nt, Artificial Sequence
  Description of Artificial Sequence: Synthetic oligonucleotide
  Sense strand starting at position 570 of SEQ ID NO: 915261
accauaguccuauaaggua

SEQ ID NO: 1066553 - RNA, 19 nt, Artificial Sequence
  Description of Artificial Sequence: Synthetic oligonucleotide
  Antisense strand to SEQ ID NO: 1066552
uaccuuauaggacuauggu

SEQ ID NO: 1066554 - RNA, 19 nt, Artificial Sequence
  Description of Artificial Sequence: Synthetic oligonucleotide
  Sense strand starting at position 783 of SEQ ID NO: 915261
ucuaguugugagcauuaga

SEQ ID NO: 1066555 - RNA, 19 nt, Artificial Sequence
  Description of Artificial Sequence: Synthetic oligonucleotide
  Antisense strand to SEQ ID NO: 1066554
ucuaaugcucacaacuaga

SEQ ID NO: 1066556 - RNA, 19 nt, Artificial Sequence
  Description of Artificial Sequence: Synthetic oligonucleotide
  Sense strand starting at position 914 of SEQ ID NO: 915261
uuaggaaagucucuccaga

SEQ ID NO: 1066557 - RNA, 19 nt, Artificial Sequence
  Description of Artificial Sequence: Synthetic oligonucleotide
  Antisense strand to SEQ ID NO: 1066556
ucuggagagacuuuccuaa

SEQ ID NO: 1066558 - RNA, 19 nt, Artificial Sequence
  Description of Artificial Sequence: Synthetic oligonucleotide
  Sense strand starting at position 2024 of SEQ ID NO: 915261
guaacaaagcuuuaaauug

SEQ ID NO: 1066559 - RNA, 19 nt, Artificial Sequence
  Description of Artificial Sequence: Synthetic oligonucleotide
  Antisense strand to SEQ ID NO: 1066558
caauuuaaagcuuuguuac

SEQ ID NO: 1066560 - RNA, 19 nt, Artificial Sequence
  Description of Artificial Sequence: Synthetic oligonucleotide
  Sense strand starting at position 2100 of SEQ ID NO: 915261
gacagauauugagcucacu

SEQ ID NO: 1066561 - RNA, 19 nt, Artificial Sequence
  Description of Artificial Sequence: Synthetic oligonucleotide
  Antisense strand to SEQ ID NO: 1066560
agugagcucaauaucuguc

SEQ ID NO: 1066562 - RNA, 19 nt, Artificial Sequence
  Description of Artificial Sequence: Synthetic oligonucleotide
  Sense strand starting at position 2103 of SEQ ID NO: 915261
agauauugagcucacugua

SEQ ID NO: 1066563 - RNA, 19 nt, Artificial Sequence
  Description of Artificial Sequence: Synthetic oligonucleotide
  Antisense strand to SEQ ID NO: 1066562
uacagugagcucaauaucu

SEQ ID NO: 1066564 - RNA, 19 nt, Artificial Sequence
  Description of Artificial Sequence: Synthetic oligonucleotide
  Sense strand starting at position 2108 of SEQ ID NO: 915261
uugagcucacuguaauaua

SEQ ID NO: 1066565 - RNA, 19 nt, Artificial Sequence
  Description of Artificial Sequence: Synthetic oligonucleotide
  Antisense strand to SEQ ID NO: 1066564
uauauuacagugagcucaa

SEQ ID NO: 1066566 - RNA, 19 nt, Artificial Sequence
  Description of Artificial Sequence: Synthetic oligonucleotide
  Sense strand starting at position 2166 of SEQ ID NO: 915261
gagagcaagugauuccuga

SEQ ID NO: 1066567 - RNA, 19 nt, Artificial Sequence
  Description of Artificial Sequence: Synthetic oligonucleotide
  Antisense strand to SEQ ID NO: 1066566
ucaggaaucacuugcucuc

SEQ ID NO: 1066568 - RNA, 19 nt, Artificial Sequence
  Description of Artificial Sequence: Synthetic oligonucleotide
  Sense strand starting at position 2173 of SEQ ID NO: 915261
agugauuccugacuuacaa

SEQ ID NO: 1066569 - RNA, 19 nt, Artificial Sequence
  Description of Artificial Sequence: Synthetic oligonucleotide
  Antisense strand to SEQ ID NO: 1066568
uuguaagucaggaaucacu

SEQ ID NO: 1066570 - RNA, 19 nt, Artificial Sequence
  Description of Artificial Sequence: Synthetic oligonucleotide
  Sense strand starting at position 2186 of SEQ ID NO: 915261
uuacaagucagcgcuugua

SEQ ID NO: 1066571 - RNA, 19 nt, Artificial Sequence
  Description of Artificial Sequence: Synthetic oligonucleotide
  Antisense strand to SEQ ID NO: 1066570
uacaagcgcugacuuguaa

SEQ ID NO: 1066572 - RNA, 19 nt, Artificial Sequence
  Description of Artificial Sequence: Synthetic oligonucleotide
  Sense strand starting at position 2188 of SEQ ID NO: 915261
acaagucagcgcuuguauu

SEQ ID NO: 1066573 - RNA, 19 nt, Artificial Sequence
  Description of Artificial Sequence: Synthetic oligonucleotide
  Antisense strand to SEQ ID NO: 1066572
aauacaagcgcugacuugu

SEQ ID NO: 1066574 - RNA, 19 nt, Artificial Sequence
  Description of Artificial Sequence: Synthetic oligonucleotide
  Sense strand starting at position 2321 of SEQ ID NO: 915261
aagauuaaugcguagguua

SEQ ID NO: 1066575 - RNA, 19 nt, Artificial Sequence
  Description of Artificial Sequence: Synthetic oligonucleotide
  Antisense strand to SEQ ID NO: 1066574
uaaccuacgcauuaaucuu

SEQ ID NO: 1066576 - RNA, 19 nt, Artificial Sequence
  Description of Artificial Sequence: Synthetic oligonucleotide
  Sense strand starting at position 2383 of SEQ ID NO: 915261
uauauaagguggcuauuaa

SEQ ID NO: 1066577 - RNA, 19 nt, Artificial Sequence
  Description of Artificial Sequence: Synthetic oligonucleotide
  Antisense strand to SEQ ID NO: 1066576
uuaauagccaccuuauaua

SEQ ID NO: 1066578 - RNA, 19 nt, Artificial Sequence
  Description of Artificial Sequence: Synthetic oligonucleotide
  Sense strand starting at position 2500 of SEQ ID NO: 915261
guaggaauauuacuauucu

SEQ ID NO: 1066579 - RNA, 19 nt, Artificial Sequence
  Description of Artificial Sequence: Synthetic oligonucleotide
  Antisense strand to SEQ ID NO: 1066578
agaauaguaauauuccuac

SEQ ID NO: 1066580 - RNA, 19 nt, Artificial Sequence
  Description of Artificial Sequence: Synthetic oligonucleotide
  Sense strand starting at position 2550 of SEQ ID NO: 915261
cuguuauccuaauuagagu

SEQ ID NO: 1066581 - RNA, 19 nt, Artificial Sequence
  Description of Artificial Sequence: Synthetic oligonucleotide
  Antisense strand to SEQ ID NO: 1066580
acucuaauuaggauaacag

SEQ ID NO: 1066582 - RNA, 19 nt, Artificial Sequence
  Description of Artificial Sequence: Synthetic oligonucleotide
  Sense strand starting at position 2786 of SEQ ID NO: 915261
agugcuguuggagaaauuc

SEQ ID NO: 1066583 - RNA, 19 nt, Artificial Sequence
  Description of Artificial Sequence: Synthetic oligonucleotide
  Antisense strand to SEQ ID NO: 1066582
gaauuucuccaacagcacu

SEQ ID NO: 1066584 - RNA, 19 nt, Artificial Sequence
  Description of Artificial Sequence: Synthetic oligonucleotide
  Sense strand starting at position 2792 of SEQ ID NO: 915261
guuggagaaauucggauua

SEQ ID NO: 1066585 - RNA, 19 nt, Artificial Sequence
  Description of Artificial Sequence: Synthetic oligonucleotide
  Antisense strand to SEQ ID NO: 1066584
uaauccgaauuucuccaac

SEQ ID NO: 1066586 - RNA, 19 nt, Artificial Sequence
  Description of Artificial Sequence: Synthetic oligonucleotide
  Sense strand starting at position 2853 of SEQ ID NO: 915261
aaaggagggcuuugauagu

SEQ ID NO: 1066587 - RNA, 19 nt, Artificial Sequence
  Description of Artificial Sequence: Synthetic oligonucleotide
  Antisense strand to SEQ ID NO: 1066586
acuaucaaagcccuccuuu

SEQ ID NO: 1066588 - RNA, 19 nt, Artificial Sequence
  Description of Artificial Sequence: Synthetic oligonucleotide
  Sense strand starting at position 2957 of SEQ ID NO: 915261
aagucaugagcuggacaca

SEQ ID NO: 1066589 - RNA, 19 nt, Artificial Sequence
  Description of Artificial Sequence: Synthetic oligonucleotide
  Antisense strand to SEQ ID NO: 1066588
uguguccagcucaugacuu

SEQ ID NO: 1066590 - RNA, 19 nt, Artificial Sequence
  Description of Artificial Sequence: Synthetic oligonucleotide
  Sense strand starting at position 3293 of SEQ ID NO: 915261
acacuaguguuuccuuaga

SEQ ID NO: 1066591 - RNA, 19 nt, Artificial Sequence
  Description of Artificial Sequence: Synthetic oligonucleotide
  Antisense strand to SEQ ID NO: 1066590
ucuaaggaaacacuagugu

SEQ ID NO: 1066592 - RNA, 19 nt, Artificial Sequence
  Description of Artificial Sequence: Synthetic oligonucleotide
  Sense strand starting at position 3317 of SEQ ID NO: 915261
cuagacuuacuuugagaua

SEQ ID NO: 1066593 - RNA, 19 nt, Artificial Sequence
  Description of Artificial Sequence: Synthetic oligonucleotide
  Antisense strand to SEQ ID NO: 1066592
uaucucaaaguaagucuag

SEQ ID NO: 1066594 - RNA, 19 nt, Artificial Sequence
  Description of Artificial Sequence: Synthetic oligonucleotide
  Sense strand starting at position 3488 of SEQ ID NO: 915261
cuaacaaggugucuaauua

SEQ ID NO: 1066595 - RNA, 19 nt, Artificial Sequence
  Description of Artificial Sequence: Synthetic oligonucleotide
  Antisense strand to SEQ ID NO: 1066594
uaauuagacaccuuguuag

SEQ ID NO: 1066596 - RNA, 19 nt, Artificial Sequence
  Description of Artificial Sequence: Synthetic oligonucleotide
  Sense strand starting at position 3590 of SEQ ID NO: 915261
gcguucuuccugccuugua

SEQ ID NO: 1066597 - RNA, 19 nt, Artificial Sequence
  Description of Artificial Sequence: Synthetic oligonucleotide
  Antisense strand to SEQ ID NO: 1066596
uacaaggcaggaagaacgc

SEQ ID NO: 1066598 - RNA, 19 nt, Artificial Sequence
  Description of Artificial Sequence: Synthetic oligonucleotide
  Sense strand starting at position 3617 of SEQ ID NO: 915261
aauguacuucuuugaaggu

SEQ ID NO: 1066599 - RNA, 19 nt, Artificial Sequence
  Description of Artificial Sequence: Synthetic oligonucleotide
  Antisense strand to SEQ ID NO: 1066598
accuucaaagaaguacauu

SEQ ID NO: 1066600 - RNA, 19 nt, Artificial Sequence
  Description of Artificial Sequence: Synthetic oligonucleotide
  Sense strand starting at position 3626 of SEQ ID NO: 915261
cuuugaagguuuccuauau

SEQ ID NO: 1066601 - RNA, 19 nt, Artificial Sequence
  Description of Artificial Sequence: Synthetic oligonucleotide
  Antisense strand to SEQ ID NO: 1066600
auauaggaaaccuucaaag

SEQ ID NO: 1066602 - RNA, 19 nt, Artificial Sequence
  Description of Artificial Sequence: Synthetic oligonucleotide
  Sense strand starting at position 3762 of SEQ ID NO: 915261
uguaauugaugacuucgaa

SEQ ID NO: 1066603 - RNA, 19 nt, Artificial Sequence
  Description of Artificial Sequence: Synthetic oligonucleotide
  Antisense strand to SEQ ID NO: 1066602
uucgaagucaucaauuaca

SEQ ID NO: 1066604 - RNA, 19 nt, Artificial Sequence
  Description of Artificial Sequence: Synthetic oligonucleotide
  Sense strand starting at position 3765 of SEQ ID NO: 915261
aauugaugacuucgaaagu

SEQ ID NO: 1066605 - RNA, 19 nt, Artificial Sequence
  Description of Artificial Sequence: Synthetic oligonucleotide
  Antisense strand to SEQ ID NO: 1066604
acuuucgaagucaucaauu

SEQ ID NO: 1066606 - RNA, 19 nt, Artificial Sequence
  Description of Artificial Sequence: Synthetic oligonucleotide
  Sense strand starting at position 3890 of SEQ ID NO: 915261
gagcaaauucuugauggua

SEQ ID NO: 1066607 - RNA, 19 nt, Artificial Sequence
  Description of Artificial Sequence: Synthetic oligonucleotide
  Antisense strand to SEQ ID NO: 1066606
uaccaucaagaauuugcuc

SEQ ID NO: 1066608 - RNA, 19 nt, Artificial Sequence
  Description of Artificial Sequence: Synthetic oligonucleotide
  Sense strand starting at position 94 of SEQ ID NO: 915262
ccuauuugccucuggaagu

SEQ ID NO: 1066609 - RNA, 19 nt, Artificial Sequence
  Description of Artificial Sequence: Synthetic oligonucleotide
  Antisense strand to SEQ ID NO: 1066608
acuuccagaggcaaauagg

SEQ ID NO: 1066610 - RNA, 19 nt, Artificial Sequence
  Description of Artificial Sequence: Synthetic oligonucleotide
  Sense strand starting at position 170 of SEQ ID NO: 915262
ucccaaaccugauagggua

SEQ ID NO: 1066611 - RNA, 19 nt, Artificial Sequence
  Description of Artificial Sequence: Synthetic oligonucleotide
  Antisense strand to SEQ ID NO: 1066610
uacccuaucagguuuggga

SEQ ID NO: 1066612 - RNA, 19 nt, Artificial Sequence
  Description of Artificial Sequence: Synthetic oligonucleotide
  Sense strand starting at position 412 of SEQ ID NO: 915262
gcuccaaguguugggauua

SEQ ID NO: 1066613 - RNA, 19 nt, Artificial Sequence
  Description of Artificial Sequence: Synthetic oligonucleotide
  Antisense strand to SEQ ID NO: 1066612
uaaucccaacacuuggagc

SEQ ID NO: 1066614 - RNA, 19 nt, Artificial Sequence
  Description of Artificial Sequence: Synthetic oligonucleotide
  Sense strand starting at position 746 of SEQ ID NO: 915262
gcaucuggcccggaaucua

SEQ ID NO: 1066615 - RNA, 19 nt, Artificial Sequence
  Description of Artificial Sequence: Synthetic oligonucleotide
  Antisense strand to SEQ ID NO: 1066614
uagauuccgggccagaugc

SEQ ID NO: 1066616 - RNA, 19 nt, Artificial Sequence
  Description of Artificial Sequence: Synthetic oligonucleotide
  Sense strand starting at position 778 of SEQ ID NO: 915262
ccuagauaagucugguuug

SEQ ID NO: 1066617 - RNA, 19 nt, Artificial Sequence
  Description of Artificial Sequence: Synthetic oligonucleotide
  Antisense strand to SEQ ID NO: 1066616
caaaccagacuuaucuagg

SEQ ID NO: 1066618 - RNA, 19 nt, Artificial Sequence
  Description of Artificial Sequence: Synthetic oligonucleotide
  Sense strand starting at position 781 of SEQ ID NO: 915262
agauaagucugguuugcag

SEQ ID NO: 1066619 - RNA, 19 nt, Artificial Sequence
  Description of Artificial Sequence: Synthetic oligonucleotide
  Antisense strand to SEQ ID NO: 1066618
cugcaaaccagacuuaucu

SEQ ID NO: 1066620 - RNA, 19 nt, Artificial Sequence
  Description of Artificial Sequence: Synthetic oligonucleotide
  Sense strand starting at position 789 of SEQ ID NO: 915262
cugguuugcagccagaguu

SEQ ID NO: 1066621 - RNA, 19 nt, Artificial Sequence
  Description of Artificial Sequence: Synthetic oligonucleotide
  Antisense strand to SEQ ID NO: 1066620
aacucuggcugcaaaccag

SEQ ID NO: 1066622 - RNA, 19 nt, Artificial Sequence
  Description of Artificial Sequence: Synthetic oligonucleotide
  Sense strand starting at position 812 of SEQ ID NO: 915262
ggccaaaguucugugagug

SEQ ID NO: 1066623 - RNA, 19 nt, Artificial Sequence
  Description of Artificial Sequence: Synthetic oligonucleotide
  Antisense strand to SEQ ID NO: 1066622
cacucacagaacuuuggcc

SEQ ID NO: 1066624 - RNA, 19 nt, Artificial Sequence
  Description of Artificial Sequence: Synthetic oligonucleotide
  Sense strand starting at position 813 of SEQ ID NO: 915262
gccaaaguucugugagugu

SEQ ID NO: 1066625 - RNA, 19 nt, Artificial Sequence
  Description of Artificial Sequence: Synthetic oligonucleotide
  Antisense strand to SEQ ID NO: 1066624
acacucacagaacuuuggc

SEQ ID NO: 1066626 - RNA, 19 nt, Artificial Sequence
  Description of Artificial Sequence: Synthetic oligonucleotide
  Sense strand starting at position 820 of SEQ ID NO: 915262
uucugugaguguucaagua

SEQ ID NO: 1066627 - RNA, 19 nt, Artificial Sequence
  Description of Artificial Sequence: Synthetic oligonucleotide
  Antisense strand to SEQ ID NO: 1066626
uacuugaacacucacagaa

SEQ ID NO: 1066628 - RNA, 19 nt, Artificial Sequence
  Description of Artificial Sequence: Synthetic oligonucleotide
  Sense strand starting at position 922 of SEQ ID NO: 915262
ggcaucagaucaccacaaa

SEQ ID NO: 1066629 - RNA, 19 nt, Artificial Sequence
  Description of Artificial Sequence: Synthetic oligonucleotide
  Antisense strand to SEQ ID NO: 1066628
uuuguggugaucugaugcc

SEQ ID NO: 1066630 - RNA, 19 nt, Artificial Sequence
  Description of Artificial Sequence: Synthetic oligonucleotide
  Sense strand starting at position 990 of SEQ ID NO: 915262
uggaacugccacuaucuua

SEQ ID NO: 1066631 - RNA, 19 nt, Artificial Sequence
  Description of Artificial Sequence: Synthetic oligonucleotide
  Antisense strand to SEQ ID NO: 1066630
uaagauaguggcaguucca

SEQ ID NO: 1066632 - RNA, 19 nt, Artificial Sequence
  Description of Artificial Sequence: Synthetic oligonucleotide
  Sense strand starting at position 1085 of SEQ ID NO: 915262
uugugugacccuggaaagu

SEQ ID NO: 1066633 - RNA, 19 nt, Artificial Sequence
  Description of Artificial Sequence: Synthetic oligonucleotide
  Antisense strand to SEQ ID NO: 1066632
acuuuccagggucacacaa

SEQ ID NO: 1066634 - RNA, 19 nt, Artificial Sequence
  Description of Artificial Sequence: Synthetic oligonucleotide
  Sense strand starting at position 1109 of SEQ ID NO: 915262
ugccuccuagucuguaaau

SEQ ID NO: 1066635 - RNA, 19 nt, Artificial Sequence
  Description of Artificial Sequence: Synthetic oligonucleotide
  Antisense strand to SEQ ID NO: 1066634
auuuacagacuaggaggca

SEQ ID NO: 1066636 - RNA, 19 nt, Artificial Sequence
  Description of Artificial Sequence: Synthetic oligonucleotide
  Sense strand starting at position 1110 of SEQ ID NO: 915262
gccuccuagucuguaaauu

SEQ ID NO: 1066637 - RNA, 19 nt, Artificial Sequence
  Description of Artificial Sequence: Synthetic oligonucleotide
  Antisense strand to SEQ ID NO: 1066636
aauuuacagacuaggaggc

SEQ ID NO: 1066638 - RNA, 19 nt, Artificial Sequence
  Description of Artificial Sequence: Synthetic oligonucleotide
  Sense strand starting at position 1111 of SEQ ID NO: 915262
ccuccuagucuguaaauuc

SEQ ID NO: 1066639 - RNA, 19 nt, Artificial Sequence
  Description of Artificial Sequence: Synthetic oligonucleotide
  Antisense strand to SEQ ID NO: 1066638
gaauuuacagacuaggagg

SEQ ID NO: 1066640 - RNA, 19 nt, Artificial Sequence
  Description of Artificial Sequence: Synthetic oligonucleotide
  Sense strand starting at position 1119 of SEQ ID NO: 915262
ucuguaaauuccgaagaau

SEQ ID NO: 1066641 - RNA, 19 nt, Artificial Sequence
  Description of Artificial Sequence: Synthetic oligonucleotide
  Antisense strand to SEQ ID NO: 1066640
auucuucggaauuuacaga

SEQ ID NO: 1066642 - RNA, 19 nt, Artificial Sequence
  Description of Artificial Sequence: Synthetic oligonucleotide
  Sense strand starting at position 1168 of SEQ ID NO: 915262
guagauaaccaggguggaa

SEQ ID NO: 1066643 - RNA, 19 nt, Artificial Sequence
  Description of Artificial Sequence: Synthetic oligonucleotide
  Antisense strand to SEQ ID NO: 1066642
uuccacccugguuaucuac

SEQ ID NO: 1066644 - RNA, 19 nt, Artificial Sequence
  Description of Artificial Sequence: Synthetic oligonucleotide
  Sense strand starting at position 1187 of SEQ ID NO: 915262
cguuuagcucagugucuga

SEQ ID NO: 1066645 - RNA, 19 nt, Artificial Sequence
  Description of Artificial Sequence: Synthetic oligonucleotide
  Antisense strand to SEQ ID NO: 1066644
ucagacacugagcuaaacg

SEQ ID NO: 1066646 - RNA, 19 nt, Artificial Sequence
  Description of Artificial Sequence: Synthetic oligonucleotide
  Sense strand starting at position 1393 of SEQ ID NO: 915262
ggguacaucuaucagcaca

SEQ ID NO: 1066647 - RNA, 19 nt, Artificial Sequence
  Description of Artificial Sequence: Synthetic oligonucleotide
  Antisense strand to SEQ ID NO: 1066646
ugugcugauagauguaccc

SEQ ID NO: 1066648 - RNA, 19 nt, Artificial Sequence
  Description of Artificial Sequence: Synthetic oligonucleotide
  Sense strand starting at position 1425 of SEQ ID NO: 915262
ccguauguccuaugauuaa

SEQ ID NO: 1066649 - RNA, 19 nt, Artificial Sequence
  Description of Artificial Sequence: Synthetic oligonucleotide
  Antisense strand to SEQ ID NO: 1066648
uuaaucauaggacauacgg

SEQ ID NO: 1066650 - RNA, 19 nt, Artificial Sequence
  Description of Artificial Sequence: Synthetic oligonucleotide
  Sense strand starting at position 1476 of SEQ ID NO: 915262
aaaggucuguccucccaga

SEQ ID NO: 1066651 - RNA, 19 nt, Artificial Sequence
  Description of Artificial Sequence: Synthetic oligonucleotide
  Antisense strand to SEQ ID NO: 1066650
ucugggaggacagaccuuu

SEQ ID NO: 1066652 - RNA, 19 nt, Artificial Sequence
  Description of Artificial Sequence: Synthetic oligonucleotide
  Sense strand starting at position 1806 of SEQ ID NO: 915262
ucacgauggcaucgaauau

SEQ ID NO: 1066653 - RNA, 19 nt, Artificial Sequence
  Description of Artificial Sequence: Synthetic oligonucleotide
  Antisense strand to SEQ ID NO: 1066652
auauucgaugccaucguga

SEQ ID NO: 1066654 - RNA, 19 nt, Artificial Sequence
  Description of Artificial Sequence: Synthetic oligonucleotide
  Sense strand starting at position 1815 of SEQ ID NO: 915262
caucgaauauguccugacu

SEQ ID NO: 1066655 - RNA, 19 nt, Artificial Sequence
  Description of Artificial Sequence: Synthetic oligonucleotide
  Antisense strand to SEQ ID NO: 1066654
agucaggacauauucgaug

SEQ ID NO: 1066656 - RNA, 19 nt, Artificial Sequence
  Description of Artificial Sequence: Synthetic oligonucleotide
  Sense strand starting at position 2202 of SEQ ID NO: 915262
caaaguggcuccgaaagaa

SEQ ID NO: 1066657 - RNA, 19 nt, Artificial Sequence
  Description of Artificial Sequence: Synthetic oligonucleotide
  Antisense strand to SEQ ID NO: 1066656
uucuuucggagccacuuug

SEQ ID NO: 1066658 - RNA, 19 nt, Artificial Sequence
  Description of Artificial Sequence: Synthetic oligonucleotide
  Sense strand starting at position 2619 of SEQ ID NO: 915262
ggcagaaauuugucgguuu

SEQ ID NO: 1066659 - RNA, 19 nt, Artificial Sequence
  Description of Artificial Sequence: Synthetic oligonucleotide
  Antisense strand to SEQ ID NO: 1066658
aaaccgacaaauuucugcc

SEQ ID NO: 1066660 - RNA, 19 nt, Artificial Sequence
  Description of Artificial Sequence: Synthetic oligonucleotide
  Sense strand starting at position 2668 of SEQ ID NO: 915262
gugcuuucugaacacgauu

SEQ ID NO: 1066661 - RNA, 19 nt, Artificial Sequence
  Description of Artificial Sequence: Synthetic oligonucleotide
  Antisense strand to SEQ ID NO: 1066660
aaucguguucagaaagcac

SEQ ID NO: 1066662 - RNA, 19 nt, Artificial Sequence
  Description of Artificial Sequence: Synthetic oligonucleotide
  Sense strand starting at position 2774 of SEQ ID NO: 915262
ucacgugaccacugaacau

SEQ ID NO: 1066663 - RNA, 19 nt, Artificial Sequence
  Description of Artificial Sequence: Synthetic oligonucleotide
  Antisense strand to SEQ ID NO: 1066662
auguucaguggucacguga

SEQ ID NO: 1066664 - RNA, 19 nt, Artificial Sequence
  Description of Artificial Sequence: Synthetic oligonucleotide
  Sense strand starting at position 2931 of SEQ ID NO: 915262
cuaagacguucucagaauc

SEQ ID NO: 1066665 - RNA, 19 nt, Artificial Sequence
  Description of Artificial Sequence: Synthetic oligonucleotide
  Antisense strand to SEQ ID NO: 1066664
gauucugagaacgucuuag

SEQ ID NO: 1066666 - RNA, 19 nt, Artificial Sequence
  Description of Artificial Sequence: Synthetic oligonucleotide
  Sense strand starting at position 2965 of SEQ ID NO: 915262
uagcuauguguaugaugaa

SEQ ID NO: 1066667 - RNA, 19 nt, Artificial Sequence
  Description of Artificial Sequence: Synthetic oligonucleotide
  Antisense strand to SEQ ID NO: 1066666
uucaucauacacauagcua

SEQ ID NO: 1066668 - RNA, 19 nt, Artificial Sequence
  Description of Artificial Sequence: Synthetic oligonucleotide
  Sense strand starting at position 2966 of SEQ ID NO: 915262
agcuauguguaugaugaau

SEQ ID NO: 1066669 - RNA, 19 nt, Artificial Sequence
  Description of Artificial Sequence: Synthetic oligonucleotide
  Antisense strand to SEQ ID NO: 1066668
auucaucauacacauagcu

SEQ ID NO: 1066670 - RNA, 19 nt, Artificial Sequence
  Description of Artificial Sequence: Synthetic oligonucleotide
  Sense strand starting at position 2968 of SEQ ID NO: 915262
cuauguguaugaugaauag

SEQ ID NO: 1066671 - RNA, 19 nt, Artificial Sequence
  Description of Artificial Sequence: Synthetic oligonucleotide
  Antisense strand to SEQ ID NO: 1066670
cuauucaucauacacauag

SEQ ID NO: 1066672 - RNA, 19 nt, Artificial Sequence
  Description of Artificial Sequence: Synthetic oligonucleotide
  Sense strand starting at position 3058 of SEQ ID NO: 915262
gccuuaugauagucauaau

SEQ ID NO: 1066673 - RNA, 19 nt, Artificial Sequence
  Description of Artificial Sequence: Synthetic oligonucleotide
  Antisense strand to SEQ ID NO: 1066672
auuaugacuaucauaaggc

SEQ ID NO: 1066674 - RNA, 19 nt, Artificial Sequence
  Description of Artificial Sequence: Synthetic oligonucleotide
  Sense strand starting at position 3135 of SEQ ID NO: 915262
acagcucuaccaugauuga

SEQ ID NO: 1066675 - RNA, 19 nt, Artificial Sequence
  Description of Artificial Sequence: Synthetic oligonucleotide
  Antisense strand to SEQ ID NO: 1066674
ucaaucaugguagagcugu

SEQ ID NO: 1066676 - RNA, 19 nt, Artificial Sequence
  Description of Artificial Sequence: Synthetic oligonucleotide
  Sense strand starting at position 3138 of SEQ ID NO: 915262
gcucuaccaugauugagga

SEQ ID NO: 1066677 - RNA, 19 nt, Artificial Sequence
  Description of Artificial Sequence: Synthetic oligonucleotide
  Antisense strand to SEQ ID NO: 1066676
uccucaaucaugguagagc

SEQ ID NO: 1066678 - RNA, 19 nt, Artificial Sequence
  Description of Artificial Sequence: Synthetic oligonucleotide
  Sense strand starting at position 3330 of SEQ ID NO: 915262
ugugguauguugguucaag

SEQ ID NO: 1066679 - RNA, 19 nt, Artificial Sequence
  Description of Artificial Sequence: Synthetic oligonucleotide
  Antisense strand to SEQ ID NO: 1066678
cuugaaccaacauaccaca

SEQ ID NO: 1066680 - RNA, 19 nt, Artificial Sequence
  Description of Artificial Sequence: Synthetic oligonucleotide
  Sense strand starting at position 3331 of SEQ ID NO: 915262
gugguauguugguucaaga

SEQ ID NO: 1066681 - RNA, 19 nt, Artificial Sequence
  Description of Artificial Sequence: Synthetic oligonucleotide
  Antisense strand to SEQ ID NO: 1066680
ucuugaaccaacauaccac

SEQ ID NO: 1066682 - RNA, 19 nt, Artificial Sequence
  Description of Artificial Sequence: Synthetic oligonucleotide
  Sense strand starting at position 3351 of SEQ ID NO: 915262
guggcagaccagugaaaua

SEQ ID NO: 1066683 - RNA, 19 nt, Artificial Sequence
  Description of Artificial Sequence: Synthetic oligonucleotide
  Antisense strand to SEQ ID NO: 1066682
uauuucacuggucugccac

SEQ ID NO: 1066684 - RNA, 19 nt, Artificial Sequence
  Description of Artificial Sequence: Synthetic oligonucleotide
  Sense strand starting at position 3387 of SEQ ID NO: 915262
aauggacucucauagaugu

SEQ ID NO: 1066685 - RNA, 19 nt, Artificial Sequence
  Description of Artificial Sequence: Synthetic oligonucleotide
  Antisense strand to SEQ ID NO: 1066684
acaucuaugagaguccauu

SEQ ID NO: 1066686 - RNA, 19 nt, Artificial Sequence
  Description of Artificial Sequence: Synthetic oligonucleotide
  Sense strand starting at position 3437 of SEQ ID NO: 915262
acaaauuaauuggagaaag

SEQ ID NO: 1066687 - RNA, 19 nt, Artificial Sequence
  Description of Artificial Sequence: Synthetic oligonucleotide
  Antisense strand to SEQ ID NO: 1066686
cuuucuccaauuaauuugu

SEQ ID NO: 1066688 - RNA, 19 nt, Artificial Sequence
  Description of Artificial Sequence: Synthetic oligonucleotide
  Sense strand starting at position 60 of SEQ ID NO: 915263
uagguuagauuagugugaa

SEQ ID NO: 1066689 - RNA, 19 nt, Artificial Sequence
  Description of Artificial Sequence: Synthetic oligonucleotide
  Antisense strand to SEQ ID NO: 1066688
uucacacuaaucuaaccua

SEQ ID NO: 1066690 - RNA, 19 nt, Artificial Sequence
  Description of Artificial Sequence: Synthetic oligonucleotide
  Sense strand starting at position 63 of SEQ ID NO: 915263
guuagauuagugugaacag

SEQ ID NO: 1066691 - RNA, 19 nt, Artificial Sequence
  Description of Artificial Sequence: Synthetic oligonucleotide
  Antisense strand to SEQ ID NO: 1066690
cuguucacacuaaucuaac

SEQ ID NO: 1066692 - RNA, 19 nt, Artificial Sequence
  Description of Artificial Sequence: Synthetic oligonucleotide
  Sense strand starting at position 116 of SEQ ID NO: 915263
gggaaaguugcccaugcua

SEQ ID NO: 1066693 - RNA, 19 nt, Artificial Sequence
  Description of Artificial Sequence: Synthetic oligonucleotide
  Antisense strand to SEQ ID NO: 1066692
uagcaugggcaacuuuccc

SEQ ID NO: 1066694 - RNA, 19 nt, Artificial Sequence
  Description of Artificial Sequence: Synthetic oligonucleotide
  Sense strand starting at position 183 of SEQ ID NO: 915263
guuguuguugggagucaac

SEQ ID NO: 1066695 - RNA, 19 nt, Artificial Sequence
  Description of Artificial Sequence: Synthetic oligonucleotide
  Antisense strand to SEQ ID NO: 1066694
guugacucccaacaacaac

SEQ ID NO: 1066696 - RNA, 19 nt, Artificial Sequence
  Description of Artificial Sequence: Synthetic oligonucleotide
  Sense strand starting at position 186 of SEQ ID NO: 915263
guuguugggagucaacaaa

SEQ ID NO: 1066697 - RNA, 19 nt, Artificial Sequence
  Description of Artificial Sequence: Synthetic oligonucleotide
  Antisense strand to SEQ ID NO: 1066696
uuuguugacucccaacaac

SEQ ID NO: 1066698 - RNA, 19 nt, Artificial Sequence
  Description of Artificial Sequence: Synthetic oligonucleotide
  Sense strand starting at position 328 of SEQ ID NO: 915263
ccaugugauggccagguua

SEQ ID NO: 1066699 - RNA, 19 nt, Artificial Sequence
  Description of Artificial Sequence: Synthetic oligonucleotide
  Antisense strand to SEQ ID NO: 1066698
uaaccuggccaucacaugg

SEQ ID NO: 1066700 - RNA, 19 nt, Artificial Sequence
  Description of Artificial Sequence: Synthetic oligonucleotide
  Sense strand starting at position 342 of SEQ ID NO: 915263
gguuaugagucaccauaaa

SEQ ID NO: 1066701 - RNA, 19 nt, Artificial Sequence
  Description of Artificial Sequence: Synthetic oligonucleotide
  Antisense strand to SEQ ID NO: 1066700
uuuauggugacucauaacc

SEQ ID NO: 1066702 - RNA, 19 nt, Artificial Sequence
  Description of Artificial Sequence: Synthetic oligonucleotide
  Sense strand starting at position 581 of SEQ ID NO: 915263
augcaaagucuuggagaga

SEQ ID NO: 1066703 - RNA, 19 nt, Artificial Sequence
  Description of Artificial Sequence: Synthetic oligonucleotide
  Antisense strand to SEQ ID NO: 1066702
ucucuccaagacuuugcau

SEQ ID NO: 1066704 - RNA, 19 nt, Artificial Sequence
  Description of Artificial Sequence: Synthetic oligonucleotide
  Sense strand starting at position 638 of SEQ ID NO: 915263
gugugugaugcccuuaugu

SEQ ID NO: 1066705 - RNA, 19 nt, Artificial Sequence
  Description of Artificial Sequence: Synthetic oligonucleotide
  Antisense strand to SEQ ID NO: 1066704
acauaagggcaucacacac

SEQ ID NO: 1066706 - RNA, 19 nt, Artificial Sequence
  Description of Artificial Sequence: Synthetic oligonucleotide
  Sense strand starting at position 695 of SEQ ID NO: 915263
uacgaauaaccuugaguuu

SEQ ID NO: 1066707 - RNA, 19 nt, Artificial Sequence
  Description of Artificial Sequence: Synthetic oligonucleotide
  Antisense strand to SEQ ID NO: 1066706
aaacucaagguuauucgua

SEQ ID NO: 1066708 - RNA, 19 nt, Artificial Sequence
  Description of Artificial Sequence: Synthetic oligonucleotide
  Sense strand starting at position 751 of SEQ ID NO: 915263
cacuguaaguuccuuggga

SEQ ID NO: 1066709 - RNA, 19 nt, Artificial Sequence
  Description of Artificial Sequence: Synthetic oligonucleotide
  Antisense strand to SEQ ID NO: 1066708
ucccaaggaacuuacagug

SEQ ID NO: 1066710 - RNA, 19 nt, Artificial Sequence
  Description of Artificial Sequence: Synthetic oligonucleotide
  Sense strand starting at position 1023 of SEQ ID NO: 915263
ugucaauccgcacagauga

SEQ ID NO: 1066711 - RNA, 19 nt, Artificial Sequence
  Description of Artificial Sequence: Synthetic oligonucleotide
  Antisense strand to SEQ ID NO: 1066710
ucaucugugcggauugaca

SEQ ID NO: 1066712 - RNA, 19 nt, Artificial Sequence
  Description of Artificial Sequence: Synthetic oligonucleotide
  Sense strand starting at position 1098 of SEQ ID NO: 915263
cugggacuguuggcagaua

SEQ ID NO: 1066713 - RNA, 19 nt, Artificial Sequence
  Description of Artificial Sequence: Synthetic oligonucleotide
  Antisense strand to SEQ ID NO: 1066712
uaucugccaacagucccag

SEQ ID NO: 1066714 - RNA, 19 nt, Artificial Sequence
  Description of Artificial Sequence: Synthetic oligonucleotide
  Sense strand starting at position 1213 of SEQ ID NO: 915263
uugauauaauugguccauu

SEQ ID NO: 1066715 - RNA, 19 nt, Artificial Sequence
  Description of Artificial Sequence: Synthetic oligonucleotide
  Antisense strand to SEQ ID NO: 1066714
aauggaccaauuauaucaa

SEQ ID NO: 1066716 - RNA, 19 nt, Artificial Sequence
  Description of Artificial Sequence: Synthetic oligonucleotide
  Sense strand starting at position 1697 of SEQ ID NO: 915263
cugagugucacuugaggaa

SEQ ID NO: 1066717 - RNA, 19 nt, Artificial Sequence
  Description of Artificial Sequence: Synthetic oligonucleotide
  Antisense strand to SEQ ID NO: 1066716
uuccucaagugacacucag

SEQ ID NO: 1066718 - RNA, 19 nt, Artificial Sequence
  Description of Artificial Sequence: Synthetic oligonucleotide
  Sense strand starting at position 1951 of SEQ ID NO: 915263
ucaguuuaugcgccuguca

SEQ ID NO: 1066719 - RNA, 19 nt, Artificial Sequence
  Description of Artificial Sequence: Synthetic oligonucleotide
  Antisense strand to SEQ ID NO: 1066718
ugacaggcgcauaaacuga

SEQ ID NO: 1066720 - RNA, 19 nt, Artificial Sequence
  Description of Artificial Sequence: Synthetic oligonucleotide
  Sense strand starting at position 2065 of SEQ ID NO: 915263
uacugaacgaguugaggaa

SEQ ID NO: 1066721 - RNA, 19 nt, Artificial Sequence
  Description of Artificial Sequence: Synthetic oligonucleotide
  Antisense strand to SEQ ID NO: 1066720
uuccucaacucguucagua

SEQ ID NO: 1066722 - RNA, 19 nt, Artificial Sequence
  Description of Artificial Sequence: Synthetic oligonucleotide
  Sense strand starting at position 2174 of SEQ ID NO: 915263
guuggagaugauugguucu

SEQ ID NO: 1066723 - RNA, 19 nt, Artificial Sequence
  Description of Artificial Sequence: Synthetic oligonucleotide
  Antisense strand to SEQ ID NO: 1066722
agaaccaaucaucuccaac

SEQ ID NO: 1066724 - RNA, 19 nt, Artificial Sequence
  Description of Artificial Sequence: Synthetic oligonucleotide
  Sense strand starting at position 2176 of SEQ ID NO: 915263
uggagaugauugguucuga

SEQ ID NO: 1066725 - RNA, 19 nt, Artificial Sequence
  Description of Artificial Sequence: Synthetic oligonucleotide
  Antisense strand to SEQ ID NO: 1066724
ucagaaccaaucaucucca

SEQ ID NO: 1066726 - RNA, 19 nt, Artificial Sequence
  Description of Artificial Sequence: Synthetic oligonucleotide
  Sense strand starting at position 2177 of SEQ ID NO: 915263
ggagaugauugguucugag

SEQ ID NO: 1066727 - RNA, 19 nt, Artificial Sequence
  Description of Artificial Sequence: Synthetic oligonucleotide
  Antisense strand to SEQ ID NO: 1066726
cucagaaccaaucaucucc

SEQ ID NO: 1066728 - RNA, 19 nt, Artificial Sequence
  Description of Artificial Sequence: Synthetic oligonucleotide
  Sense strand starting at position 2189 of SEQ ID NO: 915263
uucugagaauuggcuguga

SEQ ID NO: 1066729 - RNA, 19 nt, Artificial Sequence
  Description of Artificial Sequence: Synthetic oligonucleotide
  Antisense strand to SEQ ID NO: 1066728
ucacagccaauucucagaa

SEQ ID NO: 1066730 - RNA, 19 nt, Artificial Sequence
  Description of Artificial Sequence: Synthetic oligonucleotide
  Sense strand starting at position 2191 of SEQ ID NO: 915263
cugagaauuggcugugaaa

SEQ ID NO: 1066731 - RNA, 19 nt, Artificial Sequence
  Description of Artificial Sequence: Synthetic oligonucleotide
  Antisense strand to SEQ ID NO: 1066730
uuucacagccaauucucag

SEQ ID NO: 1066732 - RNA, 19 nt, Artificial Sequence
  Description of Artificial Sequence: Synthetic oligonucleotide
  Sense strand starting at position 2215 of SEQ ID NO: 915263
auugcugaccagugagaga

SEQ ID NO: 1066733 - RNA, 19 nt, Artificial Sequence
  Description of Artificial Sequence: Synthetic oligonucleotide
  Antisense strand to SEQ ID NO: 1066732
ucucucacuggucagcaau

SEQ ID NO: 1066734 - RNA, 19 nt, Artificial Sequence
  Description of Artificial Sequence: Synthetic oligonucleotide
  Sense strand starting at position 2369 of SEQ ID NO: 915263
gugggugugaugucguguu

SEQ ID NO: 1066735 - RNA, 19 nt, Artificial Sequence
  Description of Artificial Sequence: Synthetic oligonucleotide
  Antisense strand to SEQ ID NO: 1066734
aacacgacaucacacccac

SEQ ID NO: 1066736 - RNA, 19 nt, Artificial Sequence
  Description of Artificial Sequence: Synthetic oligonucleotide
  Sense strand starting at position 2506 of SEQ ID NO: 915263
gcuggauacccagauucca

SEQ ID NO: 1066737 - RNA, 19 nt, Artificial Sequence
  Description of Artificial Sequence: Synthetic oligonucleotide
  Antisense strand to SEQ ID NO: 1066736
uggaaucuggguauccagc

SEQ ID NO: 1066738 - RNA, 19 nt, Artificial Sequence
  Description of Artificial Sequence: Synthetic oligonucleotide
  Sense strand starting at position 2623 of SEQ ID NO: 915263
uugauucuagacugucaua

SEQ ID NO: 1066739 - RNA, 19 nt, Artificial Sequence
  Description of Artificial Sequence: Synthetic oligonucleotide
  Antisense strand to SEQ ID NO: 1066738
uaugacagucuagaaucaa

SEQ ID NO: 1066740 - RNA, 19 nt, Artificial Sequence
  Description of Artificial Sequence: Synthetic oligonucleotide
  Sense strand starting at position 2697 of SEQ ID NO: 915263
gugucucuuccagaccuaa

SEQ ID NO: 1066741 - RNA, 19 nt, Artificial Sequence
  Description of Artificial Sequence: Synthetic oligonucleotide
  Antisense strand to SEQ ID NO: 1066740
uuaggucuggaagagacac

SEQ ID NO: 1066742 - RNA, 19 nt, Artificial Sequence
  Description of Artificial Sequence: Synthetic oligonucleotide
  Sense strand starting at position 2816 of SEQ ID NO: 915263
auauuuaacuuuggacaga

SEQ ID NO: 1066743 - RNA, 19 nt, Artificial Sequence
  Description of Artificial Sequence: Synthetic oligonucleotide
  Antisense strand to SEQ ID NO: 1066742
ucuguccaaaguuaaauau

SEQ ID NO: 1066744 - RNA, 19 nt, Artificial Sequence
  Description of Artificial Sequence: Synthetic oligonucleotide
  Sense strand starting at position 3040 of SEQ ID NO: 915263
ucacacauuugugaagauu

SEQ ID NO: 1066745 - RNA, 19 nt, Artificial Sequence
  Description of Artificial Sequence: Synthetic oligonucleotide
  Antisense strand to SEQ ID NO: 1066744
aaucuucacaaauguguga

SEQ ID NO: 1066746 - RNA, 19 nt, Artificial Sequence
  Description of Artificial Sequence: Synthetic oligonucleotide
  Sense strand starting at position 3122 of SEQ ID NO: 915263
ccguacuuuagggaaucua

SEQ ID NO: 1066747 - RNA, 19 nt, Artificial Sequence
  Description of Artificial Sequence: Synthetic oligonucleotide
  Antisense strand to SEQ ID NO: 1066746
uagauucccuaaaguacgg

SEQ ID NO: 1066748 - RNA, 19 nt, Artificial Sequence
  Description of Artificial Sequence: Synthetic oligonucleotide
  Sense strand starting at position 3217 of SEQ ID NO: 915263
ugccaaugugcuucccagu

SEQ ID NO: 1066749 - RNA, 19 nt, Artificial Sequence
  Description of Artificial Sequence: Synthetic oligonucleotide
  Antisense strand to SEQ ID NO: 1066748
acugggaagcacauuggca

SEQ ID NO: 1066750 - RNA, 19 nt, Artificial Sequence
  Description of Artificial Sequence: Synthetic oligonucleotide
  Sense strand starting at position 3380 of SEQ ID NO: 915263
ucugaauguguagagcaaa

SEQ ID NO: 1066751 - RNA, 19 nt, Artificial Sequence
  Description of Artificial Sequence: Synthetic oligonucleotide
  Antisense strand to SEQ ID NO: 1066750
uuugcucuacacauucaga

SEQ ID NO: 1066752 - RNA, 19 nt, Artificial Sequence
  Description of Artificial Sequence: Synthetic oligonucleotide
  Sense strand starting at position 3407 of SEQ ID NO: 915263
ugcuauuagauguaggcua

SEQ ID NO: 1066753 - RNA, 19 nt, Artificial Sequence
  Description of Artificial Sequence: Synthetic oligonucleotide
  Antisense strand to SEQ ID NO: 1066752
uagccuacaucuaauagca

SEQ ID NO: 1066754 - RNA, 19 nt, Artificial Sequence
  Description of Artificial Sequence: Synthetic oligonucleotide
  Sense strand starting at position 3445 of SEQ ID NO: 915263
uuaacugagcuagaguuaa

SEQ ID NO: 1066755 - RNA, 19 nt, Artificial Sequence
  Description of Artificial Sequence: Synthetic oligonucleotide
  Antisense strand to SEQ ID NO: 1066754
uuaacucuagcucaguuaa

SEQ ID NO: 1066756 - RNA, 19 nt, Artificial Sequence
  Description of Artificial Sequence: Synthetic oligonucleotide
  Sense strand starting at position 3499 of SEQ ID NO: 915263
ugggucuauuacuuugaga

SEQ ID NO: 1066757 - RNA, 19 nt, Artificial Sequence
  Description of Artificial Sequence: Synthetic oligonucleotide
  Antisense strand to SEQ ID NO: 1066756
ucucaaaguaauagaccca

SEQ ID NO: 1066758 - RNA, 19 nt, Artificial Sequence
  Description of Artificial Sequence: Synthetic oligonucleotide
  Sense strand starting at position 3501 of SEQ ID NO: 915263
ggucuauuacuuugagaaa

SEQ ID NO: 1066759 - RNA, 19 nt, Artificial Sequence
  Description of Artificial Sequence: Synthetic oligonucleotide
  Antisense strand to SEQ ID NO: 1066758
uuucucaaaguaauagacc

SEQ ID NO: 1066760 - RNA, 19 nt, Artificial Sequence
  Description of Artificial Sequence: Synthetic oligonucleotide
  Sense strand starting at position 3624 of SEQ ID NO: 915263
uguagauagcuacaaacau

SEQ ID NO: 1066761 - RNA, 19 nt, Artificial Sequence
  Description of Artificial Sequence: Synthetic oligonucleotide
  Antisense strand to SEQ ID NO: 1066760
auguuuguagcuaucuaca

SEQ ID NO: 1066762 - RNA, 19 nt, Artificial Sequence
  Description of Artificial Sequence: Synthetic oligonucleotide
  Sense strand starting at position 3673 of SEQ ID NO: 915263
guuacuugccaucacaaag

SEQ ID NO: 1066763 - RNA, 19 nt, Artificial Sequence
  Description of Artificial Sequence: Synthetic oligonucleotide
  Antisense strand to SEQ ID NO: 1066762
cuuugugauggcaaguaac

SEQ ID NO: 1066764 - RNA, 19 nt, Artificial Sequence
  Description of Artificial Sequence: Synthetic oligonucleotide
  Sense strand starting at position 3757 of SEQ ID NO: 915263
aucaguaacccuuggacaa

SEQ ID NO: 1066765 - RNA, 19 nt, Artificial Sequence
  Description of Artificial Sequence: Synthetic oligonucleotide
  Antisense strand to SEQ ID NO: 1066764
uuguccaaggguuacugau

SEQ ID NO: 1066766 - RNA, 19 nt, Artificial Sequence
  Description of Artificial Sequence: Synthetic oligonucleotide
  Sense strand starting at position 3934 of SEQ ID NO: 915263
aggagauaaucagauaaau

SEQ ID NO: 1066767 - RNA, 19 nt, Artificial Sequence
  Description of Artificial Sequence: Synthetic oligonucleotide
  Antisense strand to SEQ ID NO: 1066766
auuuaucugauuaucuccu

SEQ ID NO: 1066768 - RNA, 19 nt, Artificial Sequence
  Description of Artificial Sequence: Synthetic oligonucleotide
  Sense strand starting at position 33 of SEQ ID NO: 915264
cggcuugucacagaguguu

SEQ ID NO: 1066769 - RNA, 19 nt, Artificial Sequence
  Description of Artificial Sequence: Synthetic oligonucleotide
  Antisense strand to SEQ ID NO: 1066768
aacacucugugacaagccg

SEQ ID NO: 1066770 - RNA, 19 nt, Artificial Sequence
  Description of Artificial Sequence: Synthetic oligonucleotide
  Sense strand starting at position 62 of SEQ ID NO: 915264
ccaagcguuacaugucaga

SEQ ID NO: 1066771 - RNA, 19 nt, Artificial Sequence
  Description of Artificial Sequence: Synthetic oligonucleotide
  Antisense strand to SEQ ID NO: 1066770
ucugacauguaacgcuugg

SEQ ID NO: 1066772 - RNA, 19 nt, Artificial Sequence
  Description of Artificial Sequence: Synthetic oligonucleotide
  Sense strand starting at position 65 of SEQ ID NO: 915264
agcguuacaugucagauua

SEQ ID NO: 1066773 - RNA, 19 nt, Artificial Sequence
  Description of Artificial Sequence: Synthetic oligonucleotide
  Antisense strand to SEQ ID NO: 1066772
uaaucugacauguaacgcu

SEQ ID NO: 1066774 - RNA, 19 nt, Artificial Sequence
  Description of Artificial Sequence: Synthetic oligonucleotide
  Sense strand starting at position 67 of SEQ ID NO: 915264
cguuacaugucagauuacu

SEQ ID NO: 1066775 - RNA, 19 nt, Artificial Sequence
  Description of Artificial Sequence: Synthetic oligonucleotide
  Antisense strand to SEQ ID NO: 1066774
aguaaucugacauguaacg

SEQ ID NO: 1066776 - RNA, 19 nt, Artificial Sequence
  Description of Artificial Sequence: Synthetic oligonucleotide
  Sense strand starting at position 132 of SEQ ID NO: 915264
caggcauucucagcauagu

SEQ ID NO: 1066777 - RNA, 19 nt, Artificial Sequence
  Description of Artificial Sequence: Synthetic oligonucleotide
  Antisense strand to SEQ ID NO: 1066776
acuaugcugagaaugccug

SEQ ID NO: 1066778 - RNA, 19 nt, Artificial Sequence
  Description of Artificial Sequence: Synthetic oligonucleotide
  Sense strand starting at position 133 of SEQ ID NO: 915264
aggcauucucagcauagua

SEQ ID NO: 1066779 - RNA, 19 nt, Artificial Sequence
  Description of Artificial Sequence: Synthetic oligonucleotide
  Antisense strand to SEQ ID NO: 1066778
uacuaugcugagaaugccu

SEQ ID NO: 1066780 - RNA, 19 nt, Artificial Sequence
  Description of Artificial Sequence: Synthetic oligonucleotide
  Sense strand starting at position 135 of SEQ ID NO: 915264
gcauucucagcauaguaaa

SEQ ID NO: 1066781 - RNA, 19 nt, Artificial Sequence
  Description of Artificial Sequence: Synthetic oligonucleotide
  Antisense strand to SEQ ID NO: 1066780
uuuacuaugcugagaaugc

SEQ ID NO: 1066782 - RNA, 19 nt, Artificial Sequence
  Description of Artificial Sequence: Synthetic oligonucleotide
  Sense strand starting at position 184 of SEQ ID NO: 915264
ggcggucuugcguugguau

SEQ ID NO: 1066783 - RNA, 19 nt, Artificial Sequence
  Description of Artificial Sequence: Synthetic oligonucleotide
  Antisense strand to SEQ ID NO: 1066782
auaccaacgcaagaccgcc

SEQ ID NO: 1066784 - RNA, 19 nt, Artificial Sequence
  Description of Artificial Sequence: Synthetic oligonucleotide
  Sense strand starting at position 185 of SEQ ID NO: 915264
gcggucuugcguugguauu

SEQ ID NO: 1066785 - RNA, 19 nt, Artificial Sequence
  Description of Artificial Sequence: Synthetic oligonucleotide
  Antisense strand to SEQ ID NO: 1066784
aauaccaacgcaagaccgc

SEQ ID NO: 1066786 - RNA, 19 nt, Artificial Sequence
  Description of Artificial Sequence: Synthetic oligonucleotide
  Sense strand starting at position 191 of SEQ ID NO: 915264
uugcguugguauucuguaa

SEQ ID NO: 1066787 - RNA, 19 nt, Artificial Sequence
  Description of Artificial Sequence: Synthetic oligonucleotide
  Antisense strand to SEQ ID NO: 1066786
uuacagaauaccaacgcaa

SEQ ID NO: 1066788 - RNA, 19 nt, Artificial Sequence
  Description of Artificial Sequence: Synthetic oligonucleotide
  Sense strand starting at position 195 of SEQ ID NO: 915264
guugguauucuguaaagag

SEQ ID NO: 1066789 - RNA, 19 nt, Artificial Sequence
  Description of Artificial Sequence: Synthetic oligonucleotide
  Antisense strand to SEQ ID NO: 1066788
cucuuuacagaauaccaac

SEQ ID NO: 1066790 - RNA, 19 nt, Artificial Sequence
  Description of Artificial Sequence: Synthetic oligonucleotide
  Sense strand starting at position 199 of SEQ ID NO: 915264
guauucuguaaagagcuga

SEQ ID NO: 1066791 - RNA, 19 nt, Artificial Sequence
  Description of Artificial Sequence: Synthetic oligonucleotide
  Antisense strand to SEQ ID NO: 1066790
ucagcucuuuacagaauac

SEQ ID NO: 1066792 - RNA, 19 nt, Artificial Sequence
  Description of Artificial Sequence: Synthetic oligonucleotide
  Sense strand starting at position 373 of SEQ ID NO: 915264
cggccuaucugcuguguca

SEQ ID NO: 1066793 - RNA, 19 nt, Artificial Sequence
  Description of Artificial Sequence: Synthetic oligonucleotide
  Antisense strand to SEQ ID NO: 1066792
ugacacagcagauaggccg

SEQ ID NO: 1066794 - RNA, 19 nt, Artificial Sequence
  Description of Artificial Sequence: Synthetic oligonucleotide
  Sense strand starting at position 385 of SEQ ID NO: 915264
ugugucaccuuucuuaaac

SEQ ID NO: 1066795 - RNA, 19 nt, Artificial Sequence
  Description of Artificial Sequence: Synthetic oligonucleotide
  Antisense strand to SEQ ID NO: 1066794
guuuaagaaaggugacaca

SEQ ID NO: 1066796 - RNA, 19 nt, Artificial Sequence
  Description of Artificial Sequence: Synthetic oligonucleotide
  Sense strand starting at position 386 of SEQ ID NO: 915264
gugucaccuuucuuaaaca

SEQ ID NO: 1066797 - RNA, 19 nt, Artificial Sequence
  Description of Artificial Sequence: Synthetic oligonucleotide
  Antisense strand to SEQ ID NO: 1066796
uguuuaagaaaggugacac

SEQ ID NO: 1066798 - RNA, 19 nt, Artificial Sequence
  Description of Artificial Sequence: Synthetic oligonucleotide
  Sense strand starting at position 672 of SEQ ID NO: 915264
ggagcagaguuucuguuca

SEQ ID NO: 1066799 - RNA, 19 nt, Artificial Sequence
  Description of Artificial Sequence: Synthetic oligonucleotide
  Antisense strand to SEQ ID NO: 1066798
ugaacagaaacucugcucc

SEQ ID NO: 1066800 - RNA, 19 nt, Artificial Sequence
  Description of Artificial Sequence: Synthetic oligonucleotide
  Sense strand starting at position 732 of SEQ ID NO: 915264
gcaucuaucuaggauccca

SEQ ID NO: 1066801 - RNA, 19 nt, Artificial Sequence
  Description of Artificial Sequence: Synthetic oligonucleotide
  Antisense strand to SEQ ID NO: 1066800
ugggauccuagauagaugc

SEQ ID NO: 1066802 - RNA, 19 nt, Artificial Sequence
  Description of Artificial Sequence: Synthetic oligonucleotide
  Sense strand starting at position 1476 of SEQ ID NO: 915264
aggguuugugguggucaga

SEQ ID NO: 1066803 - RNA, 19 nt, Artificial Sequence
  Description of Artificial Sequence: Synthetic oligonucleotide
  Antisense strand to SEQ ID NO: 1066802
ucugaccaccacaaacccu

SEQ ID NO: 1066804 - RNA, 19 nt, Artificial Sequence
  Description of Artificial Sequence: Synthetic oligonucleotide
  Sense strand starting at position 2174 of SEQ ID NO: 915264
ucgggacacuccgcugaaa

SEQ ID NO: 1066805 - RNA, 19 nt, Artificial Sequence
  Description of Artificial Sequence: Synthetic oligonucleotide
  Antisense strand to SEQ ID NO: 1066804
uuucagcggagugucccga

SEQ ID NO: 1066806 - RNA, 19 nt, Artificial Sequence
  Description of Artificial Sequence: Synthetic oligonucleotide
  Sense strand starting at position 2490 of SEQ ID NO: 915264
gugcauuucuuccuguguu

SEQ ID NO: 1066807 - RNA, 19 nt, Artificial Sequence
  Description of Artificial Sequence: Synthetic oligonucleotide
  Antisense strand to SEQ ID NO: 1066806
aacacaggaagaaaugcac

SEQ ID NO: 1066808 - RNA, 19 nt, Artificial Sequence
  Description of Artificial Sequence: Synthetic oligonucleotide
  Sense strand starting at position 2553 of SEQ ID NO: 915264
ucaguucucuuguauauaa

SEQ ID NO: 1066809 - RNA, 19 nt, Artificial Sequence
  Description of Artificial Sequence: Synthetic oligonucleotide
  Antisense strand to SEQ ID NO: 1066808
uuauauacaagagaacuga

SEQ ID NO: 1066810 - RNA, 19 nt, Artificial Sequence
  Description of Artificial Sequence: Synthetic oligonucleotide
  Sense strand starting at position 2686 of SEQ ID NO: 915264
gggcguuugcaucccuagu

SEQ ID NO: 1066811 - RNA, 19 nt, Artificial Sequence
  Description of Artificial Sequence: Synthetic oligonucleotide
  Antisense strand to SEQ ID NO: 1066810
acuagggaugcaaacgccc

SEQ ID NO: 1066812 - RNA, 19 nt, Artificial Sequence
  Description of Artificial Sequence: Synthetic oligonucleotide
  Sense strand starting at position 2725 of SEQ ID NO: 915264
gcagguccuuccuauggua

SEQ ID NO: 1066813 - RNA, 19 nt, Artificial Sequence
  Description of Artificial Sequence: Synthetic oligonucleotide
  Antisense strand to SEQ ID NO: 1066812
uaccauaggaaggaccugc

SEQ ID NO: 1066814 - RNA, 19 nt, Artificial Sequence
  Description of Artificial Sequence: Synthetic oligonucleotide
  Sense strand starting at position 2899 of SEQ ID NO: 915264
gccacugacacguguguuu

SEQ ID NO: 1066815 - RNA, 19 nt, Artificial Sequence
  Description of Artificial Sequence: Synthetic oligonucleotide
  Antisense strand to SEQ ID NO: 1066814
aaacacacgugucaguggc

SEQ ID NO: 1066816 - RNA, 19 nt, Artificial Sequence
  Description of Artificial Sequence: Synthetic oligonucleotide
  Sense strand starting at position 2908 of SEQ ID NO: 915264
acguguguuucuacgguuu

SEQ ID NO: 1066817 - RNA, 19 nt, Artificial Sequence
  Description of Artificial Sequence: Synthetic oligonucleotide
  Antisense strand to SEQ ID NO: 1066816
aaaccguagaaacacacgu

SEQ ID NO: 1066818 - RNA, 19 nt, Artificial Sequence
  Description of Artificial Sequence: Synthetic oligonucleotide
  Sense strand starting at position 2910 of SEQ ID NO: 915264
guguguuucuacgguuuca

SEQ ID NO: 1066819 - RNA, 19 nt, Artificial Sequence
  Description of Artificial Sequence: Synthetic oligonucleotide
  Antisense strand to SEQ ID NO: 1066818
ugaaaccguagaaacacac

SEQ ID NO: 1066820 - RNA, 19 nt, Artificial Sequence
  Description of Artificial Sequence: Synthetic oligonucleotide
  Sense strand starting at position 3125 of SEQ ID NO: 915264
uagacaaguugguggguau

SEQ ID NO: 1066821 - RNA, 19 nt, Artificial Sequence
  Description of Artificial Sequence: Synthetic oligonucleotide
  Antisense strand to SEQ ID NO: 1066820
auacccaccaacuugucua

SEQ ID NO: 1066822 - RNA, 19 nt, Artificial Sequence
  Description of Artificial Sequence: Synthetic oligonucleotide
  Sense strand starting at position 3290 of SEQ ID NO: 915264
ugcagaacugcucagucaa

SEQ ID NO: 1066823 - RNA, 19 nt, Artificial Sequence
  Description of Artificial Sequence: Synthetic oligonucleotide
  Antisense strand to SEQ ID NO: 1066822
uugacugagcaguucugca

SEQ ID NO: 1066824 - RNA, 19 nt, Artificial Sequence
  Description of Artificial Sequence: Synthetic oligonucleotide
  Sense strand starting at position 3292 of SEQ ID NO: 915264
cagaacugcucagucaaga

SEQ ID NO: 1066825 - RNA, 19 nt, Artificial Sequence
  Description of Artificial Sequence: Synthetic oligonucleotide
  Antisense strand to SEQ ID NO: 1066824
ucuugacugagcaguucug

SEQ ID NO: 1066826 - RNA, 19 nt, Artificial Sequence
  Description of Artificial Sequence: Synthetic oligonucleotide
  Sense strand starting at position 3412 of SEQ ID NO: 915264
ugggucugcucuuugaaga

SEQ ID NO: 1066827 - RNA, 19 nt, Artificial Sequence
  Description of Artificial Sequence: Synthetic oligonucleotide
  Antisense strand to SEQ ID NO: 1066826
ucuucaaagagcagaccca

SEQ ID NO: 1066828 - RNA, 19 nt, Artificial Sequence
  Description of Artificial Sequence: Synthetic oligonucleotide
  Sense strand starting at position 3413 of SEQ ID NO: 915264
gggucugcucuuugaagac

SEQ ID NO: 1066829 - RNA, 19 nt, Artificial Sequence
  Description of Artificial Sequence: Synthetic oligonucleotide
  Antisense strand to SEQ ID NO: 1066828
gucuucaaagagcagaccc

SEQ ID NO: 1066830 - RNA, 19 nt, Artificial Sequence
  Description of Artificial Sequence: Synthetic oligonucleotide
  Sense strand starting at position 3423 of SEQ ID NO: 915264
uuugaagacuccgcccaaa

SEQ ID NO: 1066831 - RNA, 19 nt, Artificial Sequence
  Description of Artificial Sequence: Synthetic oligonucleotide
  Antisense strand to SEQ ID NO: 1066830
uuugggcggagucuucaaa

SEQ ID NO: 1066832 - RNA, 19 nt, Artificial Sequence
  Description of Artificial Sequence: Synthetic oligonucleotide
  Sense strand starting at position 3588 of SEQ ID NO: 915264
gggccuggguuucaugaaa

SEQ ID NO: 1066833 - RNA, 19 nt, Artificial Sequence
  Description of Artificial Sequence: Synthetic oligonucleotide
  Antisense strand to SEQ ID NO: 1066832
uuucaugaaacccaggccc

SEQ ID NO: 1066834 - RNA, 19 nt, Artificial Sequence
  Description of Artificial Sequence: Synthetic oligonucleotide
  Sense strand starting at position 3740 of SEQ ID NO: 915264
gccagauggccaugcaaga

SEQ ID NO: 1066835 - RNA, 19 nt, Artificial Sequence
  Description of Artificial Sequence: Synthetic oligonucleotide
  Antisense strand to SEQ ID NO: 1066834
ucuugcauggccaucuggc

SEQ ID NO: 1066836 - RNA, 19 nt, Artificial Sequence
  Description of Artificial Sequence: Synthetic oligonucleotide
  Sense strand starting at position 23 of SEQ ID NO: 915265
ggaguugggacucauugcu

SEQ ID NO: 1066837 - RNA, 19 nt, Artificial Sequence
  Description of Artificial Sequence: Synthetic oligonucleotide
  Antisense strand to SEQ ID NO: 1066836
agcaaugagucccaacucc

SEQ ID NO: 1066838 - RNA, 19 nt, Artificial Sequence
  Description of Artificial Sequence: Synthetic oligonucleotide
  Sense strand starting at position 171 of SEQ ID NO: 915265
auagcucaucuguaguuau

SEQ ID NO: 1066839 - RNA, 19 nt, Artificial Sequence
  Description of Artificial Sequence: Synthetic oligonucleotide
  Antisense strand to SEQ ID NO: 1066838
auaacuacagaugagcuau

SEQ ID NO: 1066840 - RNA, 19 nt, Artificial Sequence
  Description of Artificial Sequence: Synthetic oligonucleotide
  Sense strand starting at position 174 of SEQ ID NO: 915265
gcucaucuguaguuauaga

SEQ ID NO: 1066841 - RNA, 19 nt, Artificial Sequence
  Description of Artificial Sequence: Synthetic oligonucleotide
  Antisense strand to SEQ ID NO: 1066840
ucuauaacuacagaugagc

SEQ ID NO: 1066842 - RNA, 19 nt, Artificial Sequence
  Description of Artificial Sequence: Synthetic oligonucleotide
  Sense strand starting at position 210 of SEQ ID NO: 915265
gggccaggauuagaaagua

SEQ ID NO: 1066843 - RNA, 19 nt, Artificial Sequence
  Description of Artificial Sequence: Synthetic oligonucleotide
  Antisense strand to SEQ ID NO: 1066842
uacuuucuaauccuggccc

SEQ ID NO: 1066844 - RNA, 19 nt, Artificial Sequence
  Description of Artificial Sequence: Synthetic oligonucleotide
  Sense strand starting at position 252 of SEQ ID NO: 915265
accaaagaaguuuggcaaa

SEQ ID NO: 1066845 - RNA, 19 nt, Artificial Sequence
  Description of Artificial Sequence: Synthetic oligonucleotide
  Antisense strand to SEQ ID NO: 1066844
uuugccaaacuucuuuggu

SEQ ID NO: 1066846 - RNA, 19 nt, Artificial Sequence
  Description of Artificial Sequence: Synthetic oligonucleotide
  Sense strand starting at position 581 of SEQ ID NO: 915265
gugaacuaugauuaugcga

SEQ ID NO: 1066847 - RNA, 19 nt, Artificial Sequence
  Description of Artificial Sequence: Synthetic oligonucleotide
  Antisense strand to SEQ ID NO: 1066846
ucgcauaaucauaguucac

SEQ ID NO: 1066848 - RNA, 19 nt, Artificial Sequence
  Description of Artificial Sequence: Synthetic oligonucleotide
  Sense strand starting at position 1030 of SEQ ID NO: 915265
caggaaucugcuuguuccu

SEQ ID NO: 1066849 - RNA, 19 nt, Artificial Sequence
  Description of Artificial Sequence: Synthetic oligonucleotide
  Antisense strand to SEQ ID NO: 1066848
aggaacaagcagauuccug

SEQ ID NO: 1066850 - RNA, 19 nt, Artificial Sequence
  Description of Artificial Sequence: Synthetic oligonucleotide
  Sense strand starting at position 1036 of SEQ ID NO: 915265
ucugcuuguuccuuucuga

SEQ ID NO: 1066851 - RNA, 19 nt, Artificial Sequence
  Description of Artificial Sequence: Synthetic oligonucleotide
  Antisense strand to SEQ ID NO: 1066850
ucagaaaggaacaagcaga

SEQ ID NO: 1066852 - RNA, 19 nt, Artificial Sequence
  Description of Artificial Sequence: Synthetic oligonucleotide
  Sense strand starting at position 1039 of SEQ ID NO: 915265
gcuuguuccuuucugaaca

SEQ ID NO: 1066853 - RNA, 19 nt, Artificial Sequence
  Description of Artificial Sequence: Synthetic oligonucleotide
  Antisense strand to SEQ ID NO: 1066852
uguucagaaaggaacaagc

SEQ ID NO: 1066854 - RNA, 19 nt, Artificial Sequence
  Description of Artificial Sequence: Synthetic oligonucleotide
  Sense strand starting at position 1118 of SEQ ID NO: 915265
augagcuccugcucaauga

SEQ ID NO: 1066855 - RNA, 19 nt, Artificial Sequence
  Description of Artificial Sequence: Synthetic oligonucleotide
  Antisense strand to SEQ ID NO: 1066854
ucauugagcaggagcucau

SEQ ID NO: 1066856 - RNA, 19 nt, Artificial Sequence
  Description of Artificial Sequence: Synthetic oligonucleotide
  Sense strand starting at position 1119 of SEQ ID NO: 915265
ugagcuccugcucaaugaa

SEQ ID NO: 1066857 - RNA, 19 nt, Artificial Sequence
  Description of Artificial Sequence: Synthetic oligonucleotide
  Antisense strand to SEQ ID NO: 1066856
uucauugagcaggagcuca

SEQ ID NO: 1066858 - RNA, 19 nt, Artificial Sequence
  Description of Artificial Sequence: Synthetic oligonucleotide
  Sense strand starting at position 1471 of SEQ ID NO: 915265
cucaaauugugcuugucuu

SEQ ID NO: 1066859 - RNA, 19 nt, Artificial Sequence
  Description of Artificial Sequence: Synthetic oligonucleotide
  Antisense strand to SEQ ID NO: 1066858
aagacaagcacaauuugag

SEQ ID NO: 1066860 - RNA, 19 nt, Artificial Sequence
  Description of Artificial Sequence: Synthetic oligonucleotide
  Sense strand starting at position 1619 of SEQ ID NO: 915265
ccaggaucucccuguuuac

SEQ ID NO: 1066861 - RNA, 19 nt, Artificial Sequence
  Description of Artificial Sequence: Synthetic oligonucleotide
  Antisense strand to SEQ ID NO: 1066860
guaaacagggagauccugg

SEQ ID NO: 1066862 - RNA, 19 nt, Artificial Sequence
  Description of Artificial Sequence: Synthetic oligonucleotide
  Sense strand starting at position 2287 of SEQ ID NO: 915265
gcccuaaauugucuaggga

SEQ ID NO: 1066863 - RNA, 19 nt, Artificial Sequence
  Description of Artificial Sequence: Synthetic oligonucleotide
  Antisense strand to SEQ ID NO: 1066862
ucccuagacaauuuagggc

SEQ ID NO: 1066864 - RNA, 19 nt, Artificial Sequence
  Description of Artificial Sequence: Synthetic oligonucleotide
  Sense strand starting at position 2374 of SEQ ID NO: 915265
gcaagaugcagguaugagu

SEQ ID NO: 1066865 - RNA, 19 nt, Artificial Sequence
  Description of Artificial Sequence: Synthetic oligonucleotide
  Antisense strand to SEQ ID NO: 1066864
acucauaccugcaucuugc

SEQ ID NO: 1066866 - RNA, 19 nt, Artificial Sequence
  Description of Artificial Sequence: Synthetic oligonucleotide
  Sense strand starting at position 2385 of SEQ ID NO: 915265
guaugagucuggcccuauc

SEQ ID NO: 1066867 - RNA, 19 nt, Artificial Sequence
  Description of Artificial Sequence: Synthetic oligonucleotide
  Antisense strand to SEQ ID NO: 1066866
gauagggccagacucauac

SEQ ID NO: 1066868 - RNA, 19 nt, Artificial Sequence
  Description of Artificial Sequence: Synthetic oligonucleotide
  Sense strand starting at position 2451 of SEQ ID NO: 915265
agggaucaguggucaauaa

SEQ ID NO: 1066869 - RNA, 19 nt, Artificial Sequence
  Description of Artificial Sequence: Synthetic oligonucleotide
  Antisense strand to SEQ ID NO: 1066868
uuauugaccacugaucccu

SEQ ID NO: 1066870 - RNA, 19 nt, Artificial Sequence
  Description of Artificial Sequence: Synthetic oligonucleotide
  Sense strand starting at position 2530 of SEQ ID NO: 915265
ucuccacauccguauccua

SEQ ID NO: 1066871 - RNA, 19 nt, Artificial Sequence
  Description of Artificial Sequence: Synthetic oligonucleotide
  Antisense strand to SEQ ID NO: 1066870
uaggauacggauguggaga

SEQ ID NO: 1066872 - RNA, 19 nt, Artificial Sequence
  Description of Artificial Sequence: Synthetic oligonucleotide
  Sense strand starting at position 2582 of SEQ ID NO: 915265
augccuuaguccucugaau

SEQ ID NO: 1066873 - RNA, 19 nt, Artificial Sequence
  Description of Artificial Sequence: Synthetic oligonucleotide
  Antisense strand to SEQ ID NO: 1066872
auucagaggacuaaggcau

SEQ ID NO: 1066874 - RNA, 19 nt, Artificial Sequence
  Description of Artificial Sequence: Synthetic oligonucleotide
  Sense strand starting at position 2584 of SEQ ID NO: 915265
gccuuaguccucugaaugc

SEQ ID NO: 1066875 - RNA, 19 nt, Artificial Sequence
  Description of Artificial Sequence: Synthetic oligonucleotide
  Antisense strand to SEQ ID NO: 1066874
gcauucagaggacuaaggc

SEQ ID NO: 1066876 - RNA, 19 nt, Artificial Sequence
  Description of Artificial Sequence: Synthetic oligonucleotide
  Sense strand starting at position 2618 of SEQ ID NO: 915265
gcccgagcucaggaaauga

SEQ ID NO: 1066877 - RNA, 19 nt, Artificial Sequence
  Description of Artificial Sequence: Synthetic oligonucleotide
  Antisense strand to SEQ ID NO: 1066876
ucauuuccugagcucgggc

SEQ ID NO: 1066878 - RNA, 19 nt, Artificial Sequence
  Description of Artificial Sequence: Synthetic oligonucleotide
  Sense strand starting at position 2669 of SEQ ID NO: 915265
uguuauugccaccaucaag

SEQ ID NO: 1066879 - RNA, 19 nt, Artificial Sequence
  Description of Artificial Sequence: Synthetic oligonucleotide
  Antisense strand to SEQ ID NO: 1066878
cuugaugguggcaauaaca

SEQ ID NO: 1066880 - RNA, 19 nt, Artificial Sequence
  Description of Artificial Sequence: Synthetic oligonucleotide
  Sense strand starting at position 2707 of SEQ ID NO: 915265
acuuuauaugugugaacga

SEQ ID NO: 1066881 - RNA, 19 nt, Artificial Sequence
  Description of Artificial Sequence: Synthetic oligonucleotide
  Antisense strand to SEQ ID NO: 1066880
ucguucacacauauaaagu

SEQ ID NO: 1066882 - RNA, 19 nt, Artificial Sequence
  Description of Artificial Sequence: Synthetic oligonucleotide
  Sense strand starting at position 2732 of SEQ ID NO: 915265
cugucugcccaggaggaau

SEQ ID NO: 1066883 - RNA, 19 nt, Artificial Sequence
  Description of Artificial Sequence: Synthetic oligonucleotide
  Antisense strand to SEQ ID NO: 1066882
auuccuccugggcagacag

SEQ ID NO: 1066884 - RNA, 19 nt, Artificial Sequence
  Description of Artificial Sequence: Synthetic oligonucleotide
  Sense strand starting at position 2806 of SEQ ID NO: 915265
uucgucaucacuuagggaa

SEQ ID NO: 1066885 - RNA, 19 nt, Artificial Sequence
  Description of Artificial Sequence: Synthetic oligonucleotide
  Antisense strand to SEQ ID NO: 1066884
uucccuaagugaugacgaa

SEQ ID NO: 1066886 - RNA, 19 nt, Artificial Sequence
  Description of Artificial Sequence: Synthetic oligonucleotide
  Sense strand starting at position 2969 of SEQ ID NO: 915265
aaauuuguuuggcauugau

SEQ ID NO: 1066887 - RNA, 19 nt, Artificial Sequence
  Description of Artificial Sequence: Synthetic oligonucleotide
  Antisense strand to SEQ ID NO: 1066886
aucaaugccaaacaaauuu

SEQ ID NO: 1066888 - RNA, 19 nt, Artificial Sequence
  Description of Artificial Sequence: Synthetic oligonucleotide
  Sense strand starting at position 2997 of SEQ ID NO: 915265
ugcacuguucuaggcauau

SEQ ID NO: 1066889 - RNA, 19 nt, Artificial Sequence
  Description of Artificial Sequence: Synthetic oligonucleotide
  Antisense strand to SEQ ID NO: 1066888
auaugccuagaacagugca

SEQ ID NO: 1066890 - RNA, 19 nt, Artificial Sequence
  Description of Artificial Sequence: Synthetic oligonucleotide
  Sense strand starting at position 3111 of SEQ ID NO: 915265
aaggaaugcugguuaagga

SEQ ID NO: 1066891 - RNA, 19 nt, Artificial Sequence
  Description of Artificial Sequence: Synthetic oligonucleotide
  Antisense strand to SEQ ID NO: 1066890
uccuuaaccagcauuccuu

SEQ ID NO: 1066892 - RNA, 19 nt, Artificial Sequence
  Description of Artificial Sequence: Synthetic oligonucleotide
  Sense strand starting at position 3139 of SEQ ID NO: 915265
gacugauugucuccaagga

SEQ ID NO: 1066893 - RNA, 19 nt, Artificial Sequence
  Description of Artificial Sequence: Synthetic oligonucleotide
  Antisense strand to SEQ ID NO: 1066892
uccuuggagacaaucaguc

SEQ ID NO: 1066894 - RNA, 19 nt, Artificial Sequence
  Description of Artificial Sequence: Synthetic oligonucleotide
  Sense strand starting at position 3143 of SEQ ID NO: 915265
gauugucuccaaggaagcu

SEQ ID NO: 1066895 - RNA, 19 nt, Artificial Sequence
  Description of Artificial Sequence: Synthetic oligonucleotide
  Antisense strand to SEQ ID NO: 1066894
agcuuccuuggagacaauc

SEQ ID NO: 1066896 - RNA, 19 nt, Artificial Sequence
  Description of Artificial Sequence: Synthetic oligonucleotide
  Sense strand starting at position 3330 of SEQ ID NO: 915265
cugccaggauucuaaauac

SEQ ID NO: 1066897 - RNA, 19 nt, Artificial Sequence
  Description of Artificial Sequence: Synthetic oligonucleotide
  Antisense strand to SEQ ID NO: 1066896
guauuuagaauccuggcag

SEQ ID NO: 1066898 - RNA, 19 nt, Artificial Sequence
  Description of Artificial Sequence: Synthetic oligonucleotide
  Sense strand starting at position 3519 of SEQ ID NO: 915265
uaagguucuucuccaagag

SEQ ID NO: 1066899 - RNA, 19 nt, Artificial Sequence
  Description of Artificial Sequence: Synthetic oligonucleotide
  Antisense strand to SEQ ID NO: 1066898
cucuuggagaagaaccuua

SEQ ID NO: 1066900 - RNA, 19 nt, Artificial Sequence
  Description of Artificial Sequence: Synthetic oligonucleotide
  Sense strand starting at position 3634 of SEQ ID NO: 915265
uuacaauuguaagugguua

SEQ ID NO: 1066901 - RNA, 19 nt, Artificial Sequence
  Description of Artificial Sequence: Synthetic oligonucleotide
  Antisense strand to SEQ ID NO: 1066900
uaaccacuuacaauuguaa

SEQ ID NO: 1066902 - RNA, 19 nt, Artificial Sequence
  Description of Artificial Sequence: Synthetic oligonucleotide
  Sense strand starting at position 3639 of SEQ ID NO: 915265
auuguaagugguuaccuga

SEQ ID NO: 1066903 - RNA, 19 nt, Artificial Sequence
  Description of Artificial Sequence: Synthetic oligonucleotide
  Antisense strand to SEQ ID NO: 1066902
ucagguaaccacuuacaau

SEQ ID NO: 1066904 - RNA, 19 nt, Artificial Sequence
  Description of Artificial Sequence: Synthetic oligonucleotide
  Sense strand starting at position 3642 of SEQ ID NO: 915265
guaagugguuaccugaugu

SEQ ID NO: 1066905 - RNA, 19 nt, Artificial Sequence
  Description of Artificial Sequence: Synthetic oligonucleotide
  Antisense strand to SEQ ID NO: 1066904
acaucagguaaccacuuac

SEQ ID NO: 1066906 - RNA, 19 nt, Artificial Sequence
  Description of Artificial Sequence: Synthetic oligonucleotide
  Sense strand starting at position 3826 of SEQ ID NO: 915265
ucaucauugucuuugauga

SEQ ID NO: 1066907 - RNA, 19 nt, Artificial Sequence
  Description of Artificial Sequence: Synthetic oligonucleotide
  Antisense strand to SEQ ID NO: 1066906
ucaucaaagacaaugauga

SEQ ID NO: 1066908 - RNA, 19 nt, Artificial Sequence
  Description of Artificial Sequence: Synthetic oligonucleotide
  Sense strand starting at position 3828 of SEQ ID NO: 915265
aucauugucuuugaugaau

SEQ ID NO: 1066909 - RNA, 19 nt, Artificial Sequence
  Description of Artificial Sequence: Synthetic oligonucleotide
  Antisense strand to SEQ ID NO: 1066908
auucaucaaagacaaugau

SEQ ID NO: 1066910 - RNA, 19 nt, Artificial Sequence
  Description of Artificial Sequence: Synthetic oligonucleotide
  Sense strand starting at position 3831 of SEQ ID NO: 915265
auugucuuugaugaaucuu

SEQ ID NO: 1066911 - RNA, 19 nt, Artificial Sequence
  Description of Artificial Sequence: Synthetic oligonucleotide
  Antisense strand to SEQ ID NO: 1066910
aagauucaucaaagacaau

SEQ ID NO: 1066912 - RNA, 19 nt, Artificial Sequence
  Description of Artificial Sequence: Synthetic oligonucleotide
  Sense strand starting at position 3897 of SEQ ID NO: 915265
gcacuagaccuaggaguua

SEQ ID NO: 1066913 - RNA, 19 nt, Artificial Sequence
  Description of Artificial Sequence: Synthetic oligonucleotide
  Antisense strand to SEQ ID NO: 1066912
uaacuccuaggucuagugc

SEQ ID NO: 1066914 - RNA, 19 nt, Artificial Sequence
  Description of Artificial Sequence: Synthetic oligonucleotide
  Sense strand starting at position 3916 of SEQ ID NO: 915265
agcaaaugcugaccaaauu

SEQ ID NO: 1066915 - RNA, 19 nt, Artificial Sequence
  Description of Artificial Sequence: Synthetic oligonucleotide
  Antisense strand to SEQ ID NO: 1066914
aauuuggucagcauuugcu

SEQ ID NO: 1066916 - RNA, 19 nt, Artificial Sequence
  Description of Artificial Sequence: Synthetic oligonucleotide
  Sense strand starting at position 28 of SEQ ID NO: 915266
cguggucucuugcagaaag

SEQ ID NO: 1066917 - RNA, 19 nt, Artificial Sequence
  Description of Artificial Sequence: Synthetic oligonucleotide
  Antisense strand to SEQ ID NO: 1066916
cuuucugcaagagaccacg

SEQ ID NO: 1066918 - RNA, 19 nt, Artificial Sequence
  Description of Artificial Sequence: Synthetic oligonucleotide
  Sense strand starting at position 30 of SEQ ID NO: 915266
uggucucuugcagaaagua

SEQ ID NO: 1066919 - RNA, 19 nt, Artificial Sequence
  Description of Artificial Sequence: Synthetic oligonucleotide
  Antisense strand to SEQ ID NO: 1066918
uacuuucugcaagagacca

SEQ ID NO: 1066920 - RNA, 19 nt, Artificial Sequence
  Description of Artificial Sequence: Synthetic oligonucleotide
  Sense strand starting at position 76 of SEQ ID NO: 915266
aggagagcuuccuaugagc

SEQ ID NO: 1066921 - RNA, 19 nt, Artificial Sequence
  Description of Artificial Sequence: Synthetic oligonucleotide
  Antisense strand to SEQ ID NO: 1066920
gcucauaggaagcucuccu

SEQ ID NO: 1066922 - RNA, 19 nt, Artificial Sequence
  Description of Artificial Sequence: Synthetic oligonucleotide
  Sense strand starting at position 78 of SEQ ID NO: 915266
gagagcuuccuaugagccu

SEQ ID NO: 1066923 - RNA, 19 nt, Artificial Sequence
  Description of Artificial Sequence: Synthetic oligonucleotide
  Antisense strand to SEQ ID NO: 1066922
aggcucauaggaagcucuc

SEQ ID NO: 1066924 - RNA, 19 nt, Artificial Sequence
  Description of Artificial Sequence: Synthetic oligonucleotide
  Sense strand starting at position 125 of SEQ ID NO: 915266
ucuugcggucguggauauu

SEQ ID NO: 1066925 - RNA, 19 nt, Artificial Sequence
  Description of Artificial Sequence: Synthetic oligonucleotide
  Antisense strand to SEQ ID NO: 1066924
aauauccacgaccgcaaga

SEQ ID NO: 1066926 - RNA, 19 nt, Artificial Sequence
  Description of Artificial Sequence: Synthetic oligonucleotide
  Sense strand starting at position 134 of SEQ ID NO: 915266
cguggauauuguuaauggu

SEQ ID NO: 1066927 - RNA, 19 nt, Artificial Sequence
  Description of Artificial Sequence: Synthetic oligonucleotide
  Antisense strand to SEQ ID NO: 1066926
accauuaacaauauccacg

SEQ ID NO: 1066928 - RNA, 19 nt, Artificial Sequence
  Description of Artificial Sequence: Synthetic oligonucleotide
  Sense strand starting at position 187 of SEQ ID NO: 915266
ggugaagcaaucugcucaa

SEQ ID NO: 1066929 - RNA, 19 nt, Artificial Sequence
  Description of Artificial Sequence: Synthetic oligonucleotide
  Antisense strand to SEQ ID NO: 1066928
uugagcagauugcuucacc

SEQ ID NO: 1066930 - RNA, 19 nt, Artificial Sequence
  Description of Artificial Sequence: Synthetic oligonucleotide
  Sense strand starting at position 190 of SEQ ID NO: 915266
gaagcaaucugcucaaggu

SEQ ID NO: 1066931 - RNA, 19 nt, Artificial Sequence
  Description of Artificial Sequence: Synthetic oligonucleotide
  Antisense strand to SEQ ID NO: 1066930
accuugagcagauugcuuc

SEQ ID NO: 1066932 - RNA, 19 nt, Artificial Sequence
  Description of Artificial Sequence: Synthetic oligonucleotide
  Sense strand starting at position 361 of SEQ ID NO: 915266
caguacgugcucuaggauu

SEQ ID NO: 1066933 - RNA, 19 nt, Artificial Sequence
  Description of Artificial Sequence: Synthetic oligonucleotide
  Antisense strand to SEQ ID NO: 1066932
aauccuagagcacguacug

SEQ ID NO: 1066934 - RNA, 19 nt, Artificial Sequence
  Description of Artificial Sequence: Synthetic oligonucleotide
  Sense strand starting at position 363 of SEQ ID NO: 915266
guacgugcucuaggauuau

SEQ ID NO: 1066935 - RNA, 19 nt, Artificial Sequence
  Description of Artificial Sequence: Synthetic oligonucleotide
  Antisense strand to SEQ ID NO: 1066934
auaauccuagagcacguac

SEQ ID NO: 1066936 - RNA, 19 nt, Artificial Sequence
  Description of Artificial Sequence: Synthetic oligonucleotide
  Sense strand starting at position 528 of SEQ ID NO: 915266
ucaaguguucggugagaau

SEQ ID NO: 1066937 - RNA, 19 nt, Artificial Sequence
  Description of Artificial Sequence: Synthetic oligonucleotide
  Antisense strand to SEQ ID NO: 1066936
auucucaccgaacacuuga

SEQ ID NO: 1066938 - RNA, 19 nt, Artificial Sequence
  Description of Artificial Sequence: Synthetic oligonucleotide
  Sense strand starting at position 555 of SEQ ID NO: 915266
ugggcugaaugacuuuaaa

SEQ ID NO: 1066939 - RNA, 19 nt, Artificial Sequence
  Description of Artificial Sequence: Synthetic oligonucleotide
  Antisense strand to SEQ ID NO: 1066938
uuuaaagucauucagccca

SEQ ID NO: 1066940 - RNA, 19 nt, Artificial Sequence
  Description of Artificial Sequence: Synthetic oligonucleotide
  Sense strand starting at position 558 of SEQ ID NO: 915266
gcugaaugacuuuaaaggu

SEQ ID NO: 1066941 - RNA, 19 nt, Artificial Sequence
  Description of Artificial Sequence: Synthetic oligonucleotide
  Antisense strand to SEQ ID NO: 1066940
accuuuaaagucauucagc

SEQ ID NO: 1066942 - RNA, 19 nt, Artificial Sequence
  Description of Artificial Sequence: Synthetic oligonucleotide
  Sense strand starting at position 697 of SEQ ID NO: 915266
ccaacucauaggcgggaaa

SEQ ID NO: 1066943 - RNA, 19 nt, Artificial Sequence
  Description of Artificial Sequence: Synthetic oligonucleotide
  Antisense strand to SEQ ID NO: 1066942
uuucccgccuaugaguugg

SEQ ID NO: 1066944 - RNA, 19 nt, Artificial Sequence
  Description of Artificial Sequence: Synthetic oligonucleotide
  Sense strand starting at position 2062 of SEQ ID NO: 915266
aagaaagggucucgcuaug

SEQ ID NO: 1066945 - RNA, 19 nt, Artificial Sequence
  Description of Artificial Sequence: Synthetic oligonucleotide
  Antisense strand to SEQ ID NO: 1066944
cauagcgagacccuuucuu

SEQ ID NO: 1066946 - RNA, 19 nt, Artificial Sequence
  Description of Artificial Sequence: Synthetic oligonucleotide
  Sense strand starting at position 2074 of SEQ ID NO: 915266
cgcuauguugcauagggua

SEQ ID NO: 1066947 - RNA, 19 nt, Artificial Sequence
  Description of Artificial Sequence: Synthetic oligonucleotide
  Antisense strand to SEQ ID NO: 1066946
uacccuaugcaacauagcg

SEQ ID NO: 1066948 - RNA, 19 nt, Artificial Sequence
  Description of Artificial Sequence: Synthetic oligonucleotide
  Sense strand starting at position 2170 of SEQ ID NO: 915266
aaagcagggucuuuauaaa

SEQ ID NO: 1066949 - RNA, 19 nt, Artificial Sequence
  Description of Artificial Sequence: Synthetic oligonucleotide
  Antisense strand to SEQ ID NO: 1066948
uuuauaaagacccugcuuu

SEQ ID NO: 1066950 - RNA, 19 nt, Artificial Sequence
  Description of Artificial Sequence: Synthetic oligonucleotide
  Sense strand starting at position 2213 of SEQ ID NO: 915266
aauaaugguugccaagagu

SEQ ID NO: 1066951 - RNA, 19 nt, Artificial Sequence
  Description of Artificial Sequence: Synthetic oligonucleotide
  Antisense strand to SEQ ID NO: 1066950
acucuuggcaaccauuauu

SEQ ID NO: 1066952 - RNA, 19 nt, Artificial Sequence
  Description of Artificial Sequence: Synthetic oligonucleotide
  Sense strand starting at position 2216 of SEQ ID NO: 915266
aaugguugccaagagucaa

SEQ ID NO: 1066953 - RNA, 19 nt, Artificial Sequence
  Description of Artificial Sequence: Synthetic oligonucleotide
  Antisense strand to SEQ ID NO: 1066952
uugacucuuggcaaccauu

SEQ ID NO: 1066954 - RNA, 19 nt, Artificial Sequence
  Description of Artificial Sequence: Synthetic oligonucleotide
  Sense strand starting at position 2253 of SEQ ID NO: 915266
aguggauguggcugugaaa

SEQ ID NO: 1066955 - RNA, 19 nt, Artificial Sequence
  Description of Artificial Sequence: Synthetic oligonucleotide
  Antisense strand to SEQ ID NO: 1066954
uuucacagccacauccacu

SEQ ID NO: 1066956 - RNA, 19 nt, Artificial Sequence
  Description of Artificial Sequence: Synthetic oligonucleotide
  Sense strand starting at position 2276 of SEQ ID NO: 915266
aagucuggauucuugugaa

SEQ ID NO: 1066957 - RNA, 19 nt, Artificial Sequence
  Description of Artificial Sequence: Synthetic oligonucleotide
  Antisense strand to SEQ ID NO: 1066956
uucacaagaauccagacuu

SEQ ID NO: 1066958 - RNA, 19 nt, Artificial Sequence
  Description of Artificial Sequence: Synthetic oligonucleotide
  Sense strand starting at position 2279 of SEQ ID NO: 915266
ucuggauucuugugaaggu

SEQ ID NO: 1066959 - RNA, 19 nt, Artificial Sequence
  Description of Artificial Sequence: Synthetic oligonucleotide
  Antisense strand to SEQ ID NO: 1066958
accuucacaagaauccaga

SEQ ID NO: 1066960 - RNA, 19 nt, Artificial Sequence
  Description of Artificial Sequence: Synthetic oligonucleotide
  Sense strand starting at position 2710 of SEQ ID NO: 915266
gcgcccggccucuuuauaa

SEQ ID NO: 1066961 - RNA, 19 nt, Artificial Sequence
  Description of Artificial Sequence: Synthetic oligonucleotide
  Antisense strand to SEQ ID NO: 1066960
uuauaaagaggccgggcgc

SEQ ID NO: 1066962 - RNA, 19 nt, Artificial Sequence
  Description of Artificial Sequence: Synthetic oligonucleotide
  Sense strand starting at position 2730 of SEQ ID NO: 915266
uucuuuaaguucccuguga

SEQ ID NO: 1066963 - RNA, 19 nt, Artificial Sequence
  Description of Artificial Sequence: Synthetic oligonucleotide
  Antisense strand to SEQ ID NO: 1066962
ucacagggaacuuaaagaa

SEQ ID NO: 1066964 - RNA, 19 nt, Artificial Sequence
  Description of Artificial Sequence: Synthetic oligonucleotide
  Sense strand starting at position 2731 of SEQ ID NO: 915266
ucuuuaaguucccugugaa

SEQ ID NO: 1066965 - RNA, 19 nt, Artificial Sequence
  Description of Artificial Sequence: Synthetic oligonucleotide
  Antisense strand to SEQ ID NO: 1066964
uucacagggaacuuaaaga

SEQ ID NO: 1066966 - RNA, 19 nt, Artificial Sequence
  Description of Artificial Sequence: Synthetic oligonucleotide
  Sense strand starting at position 2732 of SEQ ID NO: 915266
cuuuaaguucccugugaau

SEQ ID NO: 1066967 - RNA, 19 nt, Artificial Sequence
  Description of Artificial Sequence: Synthetic oligonucleotide
  Antisense strand to SEQ ID NO: 1066966
auucacagggaacuuaaag

SEQ ID NO: 1066968 - RNA, 19 nt, Artificial Sequence
  Description of Artificial Sequence: Synthetic oligonucleotide
  Sense strand starting at position 2734 of SEQ ID NO: 915266
uuaaguucccugugaauua

SEQ ID NO: 1066969 - RNA, 19 nt, Artificial Sequence
  Description of Artificial Sequence: Synthetic oligonucleotide
  Antisense strand to SEQ ID NO: 1066968
uaauucacagggaacuuaa

SEQ ID NO: 1066970 - RNA, 19 nt, Artificial Sequence
  Description of Artificial Sequence: Synthetic oligonucleotide
  Sense strand starting at position 2792 of SEQ ID NO: 915266
agaguuucucucugaccau

SEQ ID NO: 1066971 - RNA, 19 nt, Artificial Sequence
  Description of Artificial Sequence: Synthetic oligonucleotide
  Antisense strand to SEQ ID NO: 1066970
auggucagagagaaacucu

SEQ ID NO: 1066972 - RNA, 19 nt, Artificial Sequence
  Description of Artificial Sequence: Synthetic oligonucleotide
  Sense strand starting at position 3060 of SEQ ID NO: 915266
cgcccagccacguuuaauu

SEQ ID NO: 1066973 - RNA, 19 nt, Artificial Sequence
  Description of Artificial Sequence: Synthetic oligonucleotide
  Antisense strand to SEQ ID NO: 1066972
aauuaaacguggcugggcg

SEQ ID NO: 1066974 - RNA, 19 nt, Artificial Sequence
  Description of Artificial Sequence: Synthetic oligonucleotide
  Sense strand starting at position 3354 of SEQ ID NO: 915266
gggauuaaggcauguagca

SEQ ID NO: 1066975 - RNA, 19 nt, Artificial Sequence
  Description of Artificial Sequence: Synthetic oligonucleotide
  Antisense strand to SEQ ID NO: 1066974
ugcuacaugccuuaauccc

SEQ ID NO: 1066976 - RNA, 19 nt, Artificial Sequence
  Description of Artificial Sequence: Synthetic oligonucleotide
  Sense strand starting at position 3538 of SEQ ID NO: 915266
augguuuauuuggugguua

SEQ ID NO: 1066977 - RNA, 19 nt, Artificial Sequence
  Description of Artificial Sequence: Synthetic oligonucleotide
  Antisense strand to SEQ ID NO: 1066976
uaaccaccaaauaaaccau

SEQ ID NO: 1066978 - RNA, 19 nt, Artificial Sequence
  Description of Artificial Sequence: Synthetic oligonucleotide
  Sense strand starting at position 3539 of SEQ ID NO: 915266
ugguuuauuuggugguuaa

SEQ ID NO: 1066979 - RNA, 19 nt, Artificial Sequence
  Description of Artificial Sequence: Synthetic oligonucleotide
  Antisense strand to SEQ ID NO: 1066978
uuaaccaccaaauaaacca

SEQ ID NO: 1066980 - RNA, 19 nt, Artificial Sequence
  Description of Artificial Sequence: Synthetic oligonucleotide
  Sense strand starting at position 3540 of SEQ ID NO: 915266
gguuuauuuggugguuaau

SEQ ID NO: 1066981 - RNA, 19 nt, Artificial Sequence
  Description of Artificial Sequence: Synthetic oligonucleotide
  Antisense strand to SEQ ID NO: 1066980
auuaaccaccaaauaaacc

SEQ ID NO: 1066982 - RNA, 19 nt, Artificial Sequence
  Description of Artificial Sequence: Synthetic oligonucleotide
  Sense strand starting at position 3553 of SEQ ID NO: 915266
guuaauaacuguucucuug

SEQ ID NO: 1066983 - RNA, 19 nt, Artificial Sequence
  Description of Artificial Sequence: Synthetic oligonucleotide
  Antisense strand to SEQ ID NO: 1066982
caagagaacaguuauuaac

SEQ ID NO: 1066984 - RNA, 19 nt, Artificial Sequence
  Description of Artificial Sequence: Synthetic oligonucleotide
  Sense strand starting at position 3816 of SEQ ID NO: 915266
uccucuagucugugcgaca

SEQ ID NO: 1066985 - RNA, 19 nt, Artificial Sequence
  Description of Artificial Sequence: Synthetic oligonucleotide
  Antisense strand to SEQ ID NO: 1066984
ugucgcacagacuagagga

SEQ ID NO: 1066986 - RNA, 19 nt, Artificial Sequence
  Description of Artificial Sequence: Synthetic oligonucleotide
  Sense strand starting at position 3819 of SEQ ID NO: 915266
ucuagucugugcgacagaa

SEQ ID NO: 1066987 - RNA, 19 nt, Artificial Sequence
  Description of Artificial Sequence: Synthetic oligonucleotide
  Antisense strand to SEQ ID NO: 1066986
uucugucgcacagacuaga

SEQ ID NO: 1066988 - RNA, 19 nt, Artificial Sequence
  Description of Artificial Sequence: Synthetic oligonucleotide
  Sense strand starting at position 3875 of SEQ ID NO: 915266
guaaauaacuguucucuua

SEQ ID NO: 1066989 - RNA, 19 nt, Artificial Sequence
  Description of Artificial Sequence: Synthetic oligonucleotide
  Antisense strand to SEQ ID NO: 1066988
uaagagaacaguuauuuac

SEQ ID NO: 1066990 - RNA, 19 nt, Artificial Sequence
  Description of Artificial Sequence: Synthetic oligonucleotide
  Sense strand starting at position 3900 of SEQ ID NO: 915266
uuccaucuguccuguuaau

SEQ ID NO: 1066991 - RNA, 19 nt, Artificial Sequence
  Description of Artificial Sequence: Synthetic oligonucleotide
  Antisense strand to SEQ ID NO: 1066990
auuaacaggacagauggaa

SEQ ID NO: 1066992 - RNA, 19 nt, Artificial Sequence
  Description of Artificial Sequence: Synthetic oligonucleotide
  Sense strand starting at position 3936 of SEQ ID NO: 915266
uugguucucuauccugaau

SEQ ID NO: 1066993 - RNA, 19 nt, Artificial Sequence
  Description of Artificial Sequence: Synthetic oligonucleotide
  Antisense strand to SEQ ID NO: 1066992
auucaggauagagaaccaa

SEQ ID NO: 1066994 - RNA, 19 nt, Artificial Sequence
  Description of Artificial Sequence: Synthetic oligonucleotide
  Sense strand starting at position 3938 of SEQ ID NO: 915266
gguucucuauccugaauca

SEQ ID NO: 1066995 - RNA, 19 nt, Artificial Sequence
  Description of Artificial Sequence: Synthetic oligonucleotide
  Antisense strand to SEQ ID NO: 1066994
ugauucaggauagagaacc

SEQ ID NO: 1066996 - RNA, 19 nt, Artificial Sequence
  Description of Artificial Sequence: Synthetic oligonucleotide
  Sense strand starting at position 139 of SEQ ID NO: 915267
guucuugaugcauagaagu

SEQ ID NO: 1066997 - RNA, 19 nt, Artificial Sequence
  Description of Artificial Sequence: Synthetic oligonucleotide
  Antisense strand to SEQ ID NO: 1066996
acuucuaugcaucaagaac

SEQ ID NO: 1066998 - RNA, 19 nt, Artificial Sequence
  Description of Artificial Sequence: Synthetic oligonucleotide
  Sense strand starting at position 149 of SEQ ID NO: 915267
cauagaaguccuugagacu

SEQ ID NO: 1066999 - RNA, 19 nt, Artificial Sequence
  Description of Artificial Sequence: Synthetic oligonucleotide
  Antisense strand to SEQ ID NO: 1066998
agucucaaggacuucuaug

SEQ ID NO: 1067000 - RNA, 19 nt, Artificial Sequence
  Description of Artificial Sequence: Synthetic oligonucleotide
  Sense strand starting at position 197 of SEQ ID NO: 915267
cuuggcuuccuccaagaau

SEQ ID NO: 1067001 - RNA, 19 nt, Artificial Sequence
  Description of Artificial Sequence: Synthetic oligonucleotide
  Antisense strand to SEQ ID NO: 1067000
auucuuggaggaagccaag

SEQ ID NO: 1067002 - RNA, 19 nt, Artificial Sequence
  Description of Artificial Sequence: Synthetic oligonucleotide
  Sense strand starting at position 316 of SEQ ID NO: 915267
agcuucuaggauugaggua

SEQ ID NO: 1067003 - RNA, 19 nt, Artificial Sequence
  Description of Artificial Sequence: Synthetic oligonucleotide
  Antisense strand to SEQ ID NO: 1067002
uaccucaauccuagaagcu

SEQ ID NO: 1067004 - RNA, 19 nt, Artificial Sequence
  Description of Artificial Sequence: Synthetic oligonucleotide
  Sense strand starting at position 317 of SEQ ID NO: 915267
gcuucuaggauugagguaa

SEQ ID NO: 1067005 - RNA, 19 nt, Artificial Sequence
  Description of Artificial Sequence: Synthetic oligonucleotide
  Antisense strand to SEQ ID NO: 1067004
uuaccucaauccuagaagc

SEQ ID NO: 1067006 - RNA, 19 nt, Artificial Sequence
  Description of Artificial Sequence: Synthetic oligonucleotide
  Sense strand starting at position 513 of SEQ ID NO: 915267
agguuugcuagguaauaga

SEQ ID NO: 1067007 - RNA, 19 nt, Artificial Sequence
  Description of Artificial Sequence: Synthetic oligonucleotide
  Antisense strand to SEQ ID NO: 1067006
ucuauuaccuagcaaaccu

SEQ ID NO: 1067008 - RNA, 19 nt, Artificial Sequence
  Description of Artificial Sequence: Synthetic oligonucleotide
  Sense strand starting at position 611 of SEQ ID NO: 915267
ucugacuccucagcaaaga

SEQ ID NO: 1067009 - RNA, 19 nt, Artificial Sequence
  Description of Artificial Sequence: Synthetic oligonucleotide
  Antisense strand to SEQ ID NO: 1067008
ucuuugcugaggagucaga

SEQ ID NO: 1067010 - RNA, 19 nt, Artificial Sequence
  Description of Artificial Sequence: Synthetic oligonucleotide
  Sense strand starting at position 1082 of SEQ ID NO: 915267
uccuuaagaguauagcuau

SEQ ID NO: 1067011 - RNA, 19 nt, Artificial Sequence
  Description of Artificial Sequence: Synthetic oligonucleotide
  Antisense strand to SEQ ID NO: 1067010
auagcuauacucuuaagga

SEQ ID NO: 1067012 - RNA, 19 nt, Artificial Sequence
  Description of Artificial Sequence: Synthetic oligonucleotide
  Sense strand starting at position 1245 of SEQ ID NO: 915267
agagcaugaauguaacagu

SEQ ID NO: 1067013 - RNA, 19 nt, Artificial Sequence
  Description of Artificial Sequence: Synthetic oligonucleotide
  Antisense strand to SEQ ID NO: 1067012
acuguuacauucaugcucu

SEQ ID NO: 1067014 - RNA, 19 nt, Artificial Sequence
  Description of Artificial Sequence: Synthetic oligonucleotide
  Sense strand starting at position 1329 of SEQ ID NO: 915267
ucaguugaaugagucauaa

SEQ ID NO: 1067015 - RNA, 19 nt, Artificial Sequence
  Description of Artificial Sequence: Synthetic oligonucleotide
  Antisense strand to SEQ ID NO: 1067014
uuaugacucauucaacuga

SEQ ID NO: 1067016 - RNA, 19 nt, Artificial Sequence
  Description of Artificial Sequence: Synthetic oligonucleotide
  Sense strand starting at position 1424 of SEQ ID NO: 915267
gcacaagucugaccaagga

SEQ ID NO: 1067017 - RNA, 19 nt, Artificial Sequence
  Description of Artificial Sequence: Synthetic oligonucleotide
  Antisense strand to SEQ ID NO: 1067016
uccuuggucagacuugugc

SEQ ID NO: 1067018 - RNA, 19 nt, Artificial Sequence
  Description of Artificial Sequence: Synthetic oligonucleotide
  Sense strand starting at position 1682 of SEQ ID NO: 915267
agggauuguuuacuuaauu

SEQ ID NO: 1067019 - RNA, 19 nt, Artificial Sequence
  Description of Artificial Sequence: Synthetic oligonucleotide
  Antisense strand to SEQ ID NO: 1067018
aauuaaguaaacaaucccu

SEQ ID NO: 1067020 - RNA, 19 nt, Artificial Sequence
  Description of Artificial Sequence: Synthetic oligonucleotide
  Sense strand starting at position 1683 of SEQ ID NO: 915267
gggauuguuuacuuaauug

SEQ ID NO: 1067021 - RNA, 19 nt, Artificial Sequence
  Description of Artificial Sequence: Synthetic oligonucleotide
  Antisense strand to SEQ ID NO: 1067020
caauuaaguaaacaauccc

SEQ ID NO: 1067022 - RNA, 19 nt, Artificial Sequence
  Description of Artificial Sequence: Synthetic oligonucleotide
  Sense strand starting at position 1745 of SEQ ID NO: 915267
ugccgauugcaggagauaa

SEQ ID NO: 1067023 - RNA, 19 nt, Artificial Sequence
  Description of Artificial Sequence: Synthetic oligonucleotide
  Antisense strand to SEQ ID NO: 1067022
uuaucuccugcaaucggca

SEQ ID NO: 1067024 - RNA, 19 nt, Artificial Sequence
  Description of Artificial Sequence: Synthetic oligonucleotide
  Sense strand starting at position 1747 of SEQ ID NO: 915267
ccgauugcaggagauaagu

SEQ ID NO: 1067025 - RNA, 19 nt, Artificial Sequence
  Description of Artificial Sequence: Synthetic oligonucleotide
  Antisense strand to SEQ ID NO: 1067024
acuuaucuccugcaaucgg

SEQ ID NO: 1067026 - RNA, 19 nt, Artificial Sequence
  Description of Artificial Sequence: Synthetic oligonucleotide
  Sense strand starting at position 2107 of SEQ ID NO: 915267
uaaccaagacguggugaau

SEQ ID NO: 1067027 - RNA, 19 nt, Artificial Sequence
  Description of Artificial Sequence: Synthetic oligonucleotide
  Antisense strand to SEQ ID NO: 1067026
auucaccacgucuugguua

SEQ ID NO: 1067028 - RNA, 19 nt, Artificial Sequence
  Description of Artificial Sequence: Synthetic oligonucleotide
  Sense strand starting at position 2110 of SEQ ID NO: 915267
ccaagacguggugaaucaa

SEQ ID NO: 1067029 - RNA, 19 nt, Artificial Sequence
  Description of Artificial Sequence: Synthetic oligonucleotide
  Antisense strand to SEQ ID NO: 1067028
uugauucaccacgucuugg

SEQ ID NO: 1067030 - RNA, 19 nt, Artificial Sequence
  Description of Artificial Sequence: Synthetic oligonucleotide
  Sense strand starting at position 2205 of SEQ ID NO: 915267
cagagucuugaucaagcaa

SEQ ID NO: 1067031 - RNA, 19 nt, Artificial Sequence
  Description of Artificial Sequence: Synthetic oligonucleotide
  Antisense strand to SEQ ID NO: 1067030
uugcuugaucaagacucug

SEQ ID NO: 1067032 - RNA, 19 nt, Artificial Sequence
  Description of Artificial Sequence: Synthetic oligonucleotide
  Sense strand starting at position 2252 of SEQ ID NO: 915267
auuaguugauuccuccaga

SEQ ID NO: 1067033 - RNA, 19 nt, Artificial Sequence
  Description of Artificial Sequence: Synthetic oligonucleotide
  Antisense strand to SEQ ID NO: 1067032
ucuggaggaaucaacuaau

SEQ ID NO: 1067034 - RNA, 19 nt, Artificial Sequence
  Description of Artificial Sequence: Synthetic oligonucleotide
  Sense strand starting at position 2253 of SEQ ID NO: 915267
uuaguugauuccuccagag

SEQ ID NO: 1067035 - RNA, 19 nt, Artificial Sequence
  Description of Artificial Sequence: Synthetic oligonucleotide
  Antisense strand to SEQ ID NO: 1067034
cucuggaggaaucaacuaa

SEQ ID NO: 1067036 - RNA, 19 nt, Artificial Sequence
  Description of Artificial Sequence: Synthetic oligonucleotide
  Sense strand starting at position 2255 of SEQ ID NO: 915267
aguugauuccuccagagug

SEQ ID NO: 1067037 - RNA, 19 nt, Artificial Sequence
  Description of Artificial Sequence: Synthetic oligonucleotide
  Antisense strand to SEQ ID NO: 1067036
cacucuggaggaaucaacu

SEQ ID NO: 1067038 - RNA, 19 nt, Artificial Sequence
  Description of Artificial Sequence: Synthetic oligonucleotide
  Sense strand starting at position 2257 of SEQ ID NO: 915267
uugauuccuccagagugua

SEQ ID NO: 1067039 - RNA, 19 nt, Artificial Sequence
  Description of Artificial Sequence: Synthetic oligonucleotide
  Antisense strand to SEQ ID NO: 1067038
uacacucuggaggaaucaa

SEQ ID NO: 1067040 - RNA, 19 nt, Artificial Sequence
  Description of Artificial Sequence: Synthetic oligonucleotide
  Sense strand starting at position 2618 of SEQ ID NO: 915267
guaacuacaugguuauuau

SEQ ID NO: 1067041 - RNA, 19 nt, Artificial Sequence
  Description of Artificial Sequence: Synthetic oligonucleotide
  Antisense strand to SEQ ID NO: 1067040
auaauaaccauguaguuac

SEQ ID NO: 1067042 - RNA, 19 nt, Artificial Sequence
  Description of Artificial Sequence: Synthetic oligonucleotide
  Sense strand starting at position 2636 of SEQ ID NO: 915267
uaaacauauguuggugaau

SEQ ID NO: 1067043 - RNA, 19 nt, Artificial Sequence
  Description of Artificial Sequence: Synthetic oligonucleotide
  Antisense strand to SEQ ID NO: 1067042
auucaccaacauauguuua

SEQ ID NO: 1067044 - RNA, 19 nt, Artificial Sequence
  Description of Artificial Sequence: Synthetic oligonucleotide
  Sense strand starting at position 2637 of SEQ ID NO: 915267
aaacauauguuggugaaug

SEQ ID NO: 1067045 - RNA, 19 nt, Artificial Sequence
  Description of Artificial Sequence: Synthetic oligonucleotide
  Antisense strand to SEQ ID NO: 1067044
cauucaccaacauauguuu

SEQ ID NO: 1067046 - RNA, 19 nt, Artificial Sequence
  Description of Artificial Sequence: Synthetic oligonucleotide
  Sense strand starting at position 2642 of SEQ ID NO: 915267
uauguuggugaaugagaga

SEQ ID NO: 1067047 - RNA, 19 nt, Artificial Sequence
  Description of Artificial Sequence: Synthetic oligonucleotide
  Antisense strand to SEQ ID NO: 1067046
ucucucauucaccaacaua

SEQ ID NO: 1067048 - RNA, 19 nt, Artificial Sequence
  Description of Artificial Sequence: Synthetic oligonucleotide
  Sense strand starting at position 2702 of SEQ ID NO: 915267
guuagaaagucaucuagga

SEQ ID NO: 1067049 - RNA, 19 nt, Artificial Sequence
  Description of Artificial Sequence: Synthetic oligonucleotide
  Antisense strand to SEQ ID NO: 1067048
uccuagaugacuuucuaac

SEQ ID NO: 1067050 - RNA, 19 nt, Artificial Sequence
  Description of Artificial Sequence: Synthetic oligonucleotide
  Sense strand starting at position 2706 of SEQ ID NO: 915267
gaaagucaucuaggauacu

SEQ ID NO: 1067051 - RNA, 19 nt, Artificial Sequence
  Description of Artificial Sequence: Synthetic oligonucleotide
  Antisense strand to SEQ ID NO: 1067050
aguauccuagaugacuuuc

SEQ ID NO: 1067052 - RNA, 19 nt, Artificial Sequence
  Description of Artificial Sequence: Synthetic oligonucleotide
  Sense strand starting at position 2709 of SEQ ID NO: 915267
agucaucuaggauacugua

SEQ ID NO: 1067053 - RNA, 19 nt, Artificial Sequence
  Description of Artificial Sequence: Synthetic oligonucleotide
  Antisense strand to SEQ ID NO: 1067052
uacaguauccuagaugacu

SEQ ID NO: 1067054 - RNA, 19 nt, Artificial Sequence
  Description of Artificial Sequence: Synthetic oligonucleotide
  Sense strand starting at position 2733 of SEQ ID NO: 915267
gggcauuugugacucugca

SEQ ID NO: 1067055 - RNA, 19 nt, Artificial Sequence
  Description of Artificial Sequence: Synthetic oligonucleotide
  Antisense strand to SEQ ID NO: 1067054
ugcagagucacaaaugccc

SEQ ID NO: 1067056 - RNA, 19 nt, Artificial Sequence
  Description of Artificial Sequence: Synthetic oligonucleotide
  Sense strand starting at position 2811 of SEQ ID NO: 915267
cugguagaugcuugggaga

SEQ ID NO: 1067057 - RNA, 19 nt, Artificial Sequence
  Description of Artificial Sequence: Synthetic oligonucleotide
  Antisense strand to SEQ ID NO: 1067056
ucucccaagcaucuaccag

SEQ ID NO: 1067058 - RNA, 19 nt, Artificial Sequence
  Description of Artificial Sequence: Synthetic oligonucleotide
  Sense strand starting at position 2824 of SEQ ID NO: 915267
gggagaguaaaguggcuau

SEQ ID NO: 1067059 - RNA, 19 nt, Artificial Sequence
  Description of Artificial Sequence: Synthetic oligonucleotide
  Antisense strand to SEQ ID NO: 1067058
auagccacuuuacucuccc

SEQ ID NO: 1067060 - RNA, 19 nt, Artificial Sequence
  Description of Artificial Sequence: Synthetic oligonucleotide
  Sense strand starting at position 2827 of SEQ ID NO: 915267
agaguaaaguggcuaugau

SEQ ID NO: 1067061 - RNA, 19 nt, Artificial Sequence
  Description of Artificial Sequence: Synthetic oligonucleotide
  Antisense strand to SEQ ID NO: 1067060
aucauagccacuuuacucu

SEQ ID NO: 1067062 - RNA, 19 nt, Artificial Sequence
  Description of Artificial Sequence: Synthetic oligonucleotide
  Sense strand starting at position 2828 of SEQ ID NO: 915267
gaguaaaguggcuaugauu

SEQ ID NO: 1067063 - RNA, 19 nt, Artificial Sequence
  Description of Artificial Sequence: Synthetic oligonucleotide
  Antisense strand to SEQ ID NO: 1067062
aaucauagccacuuuacuc

SEQ ID NO: 1067064 - RNA, 19 nt, Artificial Sequence
  Description of Artificial Sequence: Synthetic oligonucleotide
  Sense strand starting at position 2924 of SEQ ID NO: 915267
ugccaucuaugaccagaua

SEQ ID NO: 1067065 - RNA, 19 nt, Artificial Sequence
  Description of Artificial Sequence: Synthetic oligonucleotide
  Antisense strand to SEQ ID NO: 1067064
uaucuggucauagauggca

SEQ ID NO: 1067066 - RNA, 19 nt, Artificial Sequence
  Description of Artificial Sequence: Synthetic oligonucleotide
  Sense strand starting at position 3239 of SEQ ID NO: 915267
gcuauugguauggagugau

SEQ ID NO: 1067067 - RNA, 19 nt, Artificial Sequence
  Description of Artificial Sequence: Synthetic oligonucleotide
  Antisense strand to SEQ ID NO: 1067066
aucacuccauaccaauagc

SEQ ID NO: 1067068 - RNA, 19 nt, Artificial Sequence
  Description of Artificial Sequence: Synthetic oligonucleotide
  Sense strand starting at position 3486 of SEQ ID NO: 915267
acuugacaagccuaaagua

SEQ ID NO: 1067069 - RNA, 19 nt, Artificial Sequence
  Description of Artificial Sequence: Synthetic oligonucleotide
  Antisense strand to SEQ ID NO: 1067068
uacuuuaggcuugucaagu

SEQ ID NO: 1067070 - RNA, 19 nt, Artificial Sequence
  Description of Artificial Sequence: Synthetic oligonucleotide
  Sense strand starting at position 3711 of SEQ ID NO: 915267
acaugaagcuggucauuaa

SEQ ID NO: 1067071 - RNA, 19 nt, Artificial Sequence
  Description of Artificial Sequence: Synthetic oligonucleotide
  Antisense strand to SEQ ID NO: 1067070
uuaaugaccagcuucaugu

SEQ ID NO: 1067072 - RNA, 19 nt, Artificial Sequence
  Description of Artificial Sequence: Synthetic oligonucleotide
  Sense strand starting at position 3715 of SEQ ID NO: 915267
gaagcuggucauuaagagu

SEQ ID NO: 1067073 - RNA, 19 nt, Artificial Sequence
  Description of Artificial Sequence: Synthetic oligonucleotide
  Antisense strand to SEQ ID NO: 1067072
acucuuaaugaccagcuuc

SEQ ID NO: 1067074 - RNA, 19 nt, Artificial Sequence
  Description of Artificial Sequence: Synthetic oligonucleotide
  Sense strand starting at position 3897 of SEQ ID NO: 915267
guuacuugcagacaggaau

SEQ ID NO: 1067075 - RNA, 19 nt, Artificial Sequence
  Description of Artificial Sequence: Synthetic oligonucleotide
  Antisense strand to SEQ ID NO: 1067074
auuccugucugcaaguaac

SEQ ID NO: 1067076 - RNA, 19 nt, Artificial Sequence
  Description of Artificial Sequence: Synthetic oligonucleotide
  Sense strand starting at position 168 of SEQ ID NO: 915268
acagaauucugagcccaca

SEQ ID NO: 1067077 - RNA, 19 nt, Artificial Sequence
  Description of Artificial Sequence: Synthetic oligonucleotide
  Antisense strand to SEQ ID NO: 1067076
ugugggcucagaauucugu

SEQ ID NO: 1067078 - RNA, 19 nt, Artificial Sequence
  Description of Artificial Sequence: Synthetic oligonucleotide
  Sense strand starting at position 316 of SEQ ID NO: 915268
cagguuaagcugugaaaca

SEQ ID NO: 1067079 - RNA, 19 nt, Artificial Sequence
  Description of Artificial Sequence: Synthetic oligonucleotide
  Antisense strand to SEQ ID NO: 1067078
uguuucacagcuuaaccug

SEQ ID NO: 1067080 - RNA, 19 nt, Artificial Sequence
  Description of Artificial Sequence: Synthetic oligonucleotide
  Sense strand starting at position 522 of SEQ ID NO: 915268
gggucaaagucaguugguu

SEQ ID NO: 1067081 - RNA, 19 nt, Artificial Sequence
  Description of Artificial Sequence: Synthetic oligonucleotide
  Antisense strand to SEQ ID NO: 1067080
aaccaacugacuuugaccc

SEQ ID NO: 1067082 - RNA, 19 nt, Artificial Sequence
  Description of Artificial Sequence: Synthetic oligonucleotide
  Sense strand starting at position 524 of SEQ ID NO: 915268
gucaaagucaguugguuaa

SEQ ID NO: 1067083 - RNA, 19 nt, Artificial Sequence
  Description of Artificial Sequence: Synthetic oligonucleotide
  Antisense strand to SEQ ID NO: 1067082
uuaaccaacugacuuugac

SEQ ID NO: 1067084 - RNA, 19 nt, Artificial Sequence
  Description of Artificial Sequence: Synthetic oligonucleotide
  Sense strand starting at position 526 of SEQ ID NO: 915268
caaagucaguugguuaauu

SEQ ID NO: 1067085 - RNA, 19 nt, Artificial Sequence
  Description of Artificial Sequence: Synthetic oligonucleotide
  Antisense strand to SEQ ID NO: 1067084
aauuaaccaacugacuuug

SEQ ID NO: 1067086 - RNA, 19 nt, Artificial Sequence
  Description of Artificial Sequence: Synthetic oligonucleotide
  Sense strand starting at position 527 of SEQ ID NO: 915268
aaagucaguugguuaauua

SEQ ID NO: 1067087 - RNA, 19 nt, Artificial Sequence
  Description of Artificial Sequence: Synthetic oligonucleotide
  Antisense strand to SEQ ID NO: 1067086
uaauuaaccaacugacuuu

SEQ ID NO: 1067088 - RNA, 19 nt, Artificial Sequence
  Description of Artificial Sequence: Synthetic oligonucleotide
  Sense strand starting at position 638 of SEQ ID NO: 915268
gcaggcuuucuccagacca

SEQ ID NO: 1067089 - RNA, 19 nt, Artificial Sequence
  Description of Artificial Sequence: Synthetic oligonucleotide
  Antisense strand to SEQ ID NO: 1067088
uggucuggagaaagccugc

SEQ ID NO: 1067090 - RNA, 19 nt, Artificial Sequence
  Description of Artificial Sequence: Synthetic oligonucleotide
  Sense strand starting at position 640 of SEQ ID NO: 915268
aggcuuucuccagaccaaa

SEQ ID NO: 1067091 - RNA, 19 nt, Artificial Sequence
  Description of Artificial Sequence: Synthetic oligonucleotide
  Antisense strand to SEQ ID NO: 1067090
uuuggucuggagaaagccu

SEQ ID NO: 1067092 - RNA, 19 nt, Artificial Sequence
  Description of Artificial Sequence: Synthetic oligonucleotide
  Sense strand starting at position 760 of SEQ ID NO: 915268
ugucuaggcgucugccaaa

SEQ ID NO: 1067093 - RNA, 19 nt, Artificial Sequence
  Description of Artificial Sequence: Synthetic oligonucleotide
  Antisense strand to SEQ ID NO: 1067092
uuuggcagacgccuagaca

SEQ ID NO: 1067094 - RNA, 19 nt, Artificial Sequence
  Description of Artificial Sequence: Synthetic oligonucleotide
  Sense strand starting at position 839 of SEQ ID NO: 915268
agcugcuuuccaugcaauu

SEQ ID NO: 1067095 - RNA, 19 nt, Artificial Sequence
  Description of Artificial Sequence: Synthetic oligonucleotide
  Antisense strand to SEQ ID NO: 1067094
aauugcauggaaagcagcu

SEQ ID NO: 1067096 - RNA, 19 nt, Artificial Sequence
  Description of Artificial Sequence: Synthetic oligonucleotide
  Sense strand starting at position 852 of SEQ ID NO: 915268
gcaauugugcccuccgcaa

SEQ ID NO: 1067097 - RNA, 19 nt, Artificial Sequence
  Description of Artificial Sequence: Synthetic oligonucleotide
  Antisense strand to SEQ ID NO: 1067096
uugcggagggcacaauugc

SEQ ID NO: 1067098 - RNA, 19 nt, Artificial Sequence
  Description of Artificial Sequence: Synthetic oligonucleotide
  Sense strand starting at position 883 of SEQ ID NO: 915268
gcguuucuagcagagguga

SEQ ID NO: 1067099 - RNA, 19 nt, Artificial Sequence
  Description of Artificial Sequence: Synthetic oligonucleotide
  Antisense strand to SEQ ID NO: 1067098
ucaccucugcuagaaacgc

SEQ ID NO: 1067100 - RNA, 19 nt, Artificial Sequence
  Description of Artificial Sequence: Synthetic oligonucleotide
  Sense strand starting at position 885 of SEQ ID NO: 915268
guuucuagcagaggugaga

SEQ ID NO: 1067101 - RNA, 19 nt, Artificial Sequence
  Description of Artificial Sequence: Synthetic oligonucleotide
  Antisense strand to SEQ ID NO: 1067100
ucucaccucugcuagaaac

SEQ ID NO: 1067102 - RNA, 19 nt, Artificial Sequence
  Description of Artificial Sequence: Synthetic oligonucleotide
  Sense strand starting at position 1113 of SEQ ID NO: 915268
acacaaaucucggccgaaa

SEQ ID NO: 1067103 - RNA, 19 nt, Artificial Sequence
  Description of Artificial Sequence: Synthetic oligonucleotide
  Antisense strand to SEQ ID NO: 1067102
uuucggccgagauuugugu

SEQ ID NO: 1067104 - RNA, 19 nt, Artificial Sequence
  Description of Artificial Sequence: Synthetic oligonucleotide
  Sense strand starting at position 1115 of SEQ ID NO: 915268
acaaaucucggccgaaacu

SEQ ID NO: 1067105 - RNA, 19 nt, Artificial Sequence
  Description of Artificial Sequence: Synthetic oligonucleotide
  Antisense strand to SEQ ID NO: 1067104
aguuucggccgagauuugu

SEQ ID NO: 1067106 - RNA, 19 nt, Artificial Sequence
  Description of Artificial Sequence: Synthetic oligonucleotide
  Sense strand starting at position 2099 of SEQ ID NO: 915268
ggcgcaugcguugggaaau

SEQ ID NO: 1067107 - RNA, 19 nt, Artificial Sequence
  Description of Artificial Sequence: Synthetic oligonucleotide
  Antisense strand to SEQ ID NO: 1067106
auuucccaacgcaugcgcc

SEQ ID NO: 1067108 - RNA, 19 nt, Artificial Sequence
  Description of Artificial Sequence: Synthetic oligonucleotide
  Sense strand starting at position 2109 of SEQ ID NO: 915268
uugggaaauaacggugaca

SEQ ID NO: 1067109 - RNA, 19 nt, Artificial Sequence
  Description of Artificial Sequence: Synthetic oligonucleotide
  Antisense strand to SEQ ID NO: 1067108
ugucaccguuauuucccaa

SEQ ID NO: 1067110 - RNA, 19 nt, Artificial Sequence
  Description of Artificial Sequence: Synthetic oligonucleotide
  Sense strand starting at position 2292 of SEQ ID NO: 915268
ggcguacuggcguuugcaa

SEQ ID NO: 1067111 - RNA, 19 nt, Artificial Sequence
  Description of Artificial Sequence: Synthetic oligonucleotide
  Antisense strand to SEQ ID NO: 1067110
uugcaaacgccaguacgcc

SEQ ID NO: 1067112 - RNA, 19 nt, Artificial Sequence
  Description of Artificial Sequence: Synthetic oligonucleotide
  Sense strand starting at position 2293 of SEQ ID NO: 915268
gcguacuggcguuugcaaa

SEQ ID NO: 1067113 - RNA, 19 nt, Artificial Sequence
  Description of Artificial Sequence: Synthetic oligonucleotide
  Antisense strand to SEQ ID NO: 1067112
uuugcaaacgccaguacgc

SEQ ID NO: 1067114 - RNA, 19 nt, Artificial Sequence
  Description of Artificial Sequence: Synthetic oligonucleotide
  Sense strand starting at position 2659 of SEQ ID NO: 915268
ccgaguacccgucggagaa

SEQ ID NO: 1067115 - RNA, 19 nt, Artificial Sequence
  Description of Artificial Sequence: Synthetic oligonucleotide
  Antisense strand to SEQ ID NO: 1067114
uucuccgacggguacucgg

SEQ ID NO: 1067116 - RNA, 19 nt, Artificial Sequence
  Description of Artificial Sequence: Synthetic oligonucleotide
  Sense strand starting at position 2755 of SEQ ID NO: 915268
cgugucuuggccaguggga

SEQ ID NO: 1067117 - RNA, 19 nt, Artificial Sequence
  Description of Artificial Sequence: Synthetic oligonucleotide
  Antisense strand to SEQ ID NO: 1067116
ucccacuggccaagacacg

SEQ ID NO: 1067118 - RNA, 19 nt, Artificial Sequence
  Description of Artificial Sequence: Synthetic oligonucleotide
  Sense strand starting at position 2764 of SEQ ID NO: 915268
gccagugggacuuaugcau

SEQ ID NO: 1067119 - RNA, 19 nt, Artificial Sequence
  Description of Artificial Sequence: Synthetic oligonucleotide
  Antisense strand to SEQ ID NO: 1067118
augcauaagucccacuggc

SEQ ID NO: 1067120 - RNA, 19 nt, Artificial Sequence
  Description of Artificial Sequence: Synthetic oligonucleotide
  Sense strand starting at position 3047 of SEQ ID NO: 915268
ccacacucucaucgugaca

SEQ ID NO: 1067121 - RNA, 19 nt, Artificial Sequence
  Description of Artificial Sequence: Synthetic oligonucleotide
  Antisense strand to SEQ ID NO: 1067120
ugucacgaugagagugugg

SEQ ID NO: 1067122 - RNA, 19 nt, Artificial Sequence
  Description of Artificial Sequence: Synthetic oligonucleotide
  Sense strand starting at position 3209 of SEQ ID NO: 915268
aagugaacaccugguaugu

SEQ ID NO: 1067123 - RNA, 19 nt, Artificial Sequence
  Description of Artificial Sequence: Synthetic oligonucleotide
  Antisense strand to SEQ ID NO: 1067122
acauaccagguguucacuu

SEQ ID NO: 1067124 - RNA, 19 nt, Artificial Sequence
  Description of Artificial Sequence: Synthetic oligonucleotide
  Sense strand starting at position 3218 of SEQ ID NO: 915268
ccugguaugugccuaucuu

SEQ ID NO: 1067125 - RNA, 19 nt, Artificial Sequence
  Description of Artificial Sequence: Synthetic oligonucleotide
  Antisense strand to SEQ ID NO: 1067124
aagauaggcacauaccagg

SEQ ID NO: 1067126 - RNA, 19 nt, Artificial Sequence
  Description of Artificial Sequence: Synthetic oligonucleotide
  Sense strand starting at position 3219 of SEQ ID NO: 915268
cugguaugugccuaucuuu

SEQ ID NO: 1067127 - RNA, 19 nt, Artificial Sequence
  Description of Artificial Sequence: Synthetic oligonucleotide
  Antisense strand to SEQ ID NO: 1067126
aaagauaggcacauaccag

SEQ ID NO: 1067128 - RNA, 19 nt, Artificial Sequence
  Description of Artificial Sequence: Synthetic oligonucleotide
  Sense strand starting at position 3269 of SEQ ID NO: 915268
acaaucugucuaggacaga

SEQ ID NO: 1067129 - RNA, 19 nt, Artificial Sequence
  Description of Artificial Sequence: Synthetic oligonucleotide
  Antisense strand to SEQ ID NO: 1067128
ucuguccuagacagauugu

SEQ ID NO: 1067130 - RNA, 19 nt, Artificial Sequence
  Description of Artificial Sequence: Synthetic oligonucleotide
  Sense strand starting at position 3312 of SEQ ID NO: 915268
caaauauugguugagcagu

SEQ ID NO: 1067131 - RNA, 19 nt, Artificial Sequence
  Description of Artificial Sequence: Synthetic oligonucleotide
  Antisense strand to SEQ ID NO: 1067130
acugcucaaccaauauuug

SEQ ID NO: 1067132 - RNA, 19 nt, Artificial Sequence
  Description of Artificial Sequence: Synthetic oligonucleotide
  Sense strand starting at position 3364 of SEQ ID NO: 915268
agugggugcucgguggaua

SEQ ID NO: 1067133 - RNA, 19 nt, Artificial Sequence
  Description of Artificial Sequence: Synthetic oligonucleotide
  Antisense strand to SEQ ID NO: 1067132
uauccaccgagcacccacu

SEQ ID NO: 1067134 - RNA, 19 nt, Artificial Sequence
  Description of Artificial Sequence: Synthetic oligonucleotide
  Sense strand starting at position 3386 of SEQ ID NO: 915268
cggugaagucuucacagau

SEQ ID NO: 1067135 - RNA, 19 nt, Artificial Sequence
  Description of Artificial Sequence: Synthetic oligonucleotide
  Antisense strand to SEQ ID NO: 1067134
aucugugaagacuucaccg

SEQ ID NO: 1067136 - RNA, 19 nt, Artificial Sequence
  Description of Artificial Sequence: Synthetic oligonucleotide
  Sense strand starting at position 3513 of SEQ ID NO: 915268
gcacaagugaguuacagga

SEQ ID NO: 1067137 - RNA, 19 nt, Artificial Sequence
  Description of Artificial Sequence: Synthetic oligonucleotide
  Antisense strand to SEQ ID NO: 1067136
uccuguaacucacuugugc

SEQ ID NO: 1067138 - RNA, 19 nt, Artificial Sequence
  Description of Artificial Sequence: Synthetic oligonucleotide
  Sense strand starting at position 3520 of SEQ ID NO: 915268
ugaguuacaggauguggaa

SEQ ID NO: 1067139 - RNA, 19 nt, Artificial Sequence
  Description of Artificial Sequence: Synthetic oligonucleotide
  Antisense strand to SEQ ID NO: 1067138
uuccacauccuguaacuca

SEQ ID NO: 1067140 - RNA, 19 nt, Artificial Sequence
  Description of Artificial Sequence: Synthetic oligonucleotide
  Sense strand starting at position 3558 of SEQ ID NO: 915268
cgguguugucuacugcuau

SEQ ID NO: 1067141 - RNA, 19 nt, Artificial Sequence
  Description of Artificial Sequence: Synthetic oligonucleotide
  Antisense strand to SEQ ID NO: 1067140
auagcaguagacaacaccg

SEQ ID NO: 1067142 - RNA, 19 nt, Artificial Sequence
  Description of Artificial Sequence: Synthetic oligonucleotide
  Sense strand starting at position 3606 of SEQ ID NO: 915268
caaaguggguuaucaauaa

SEQ ID NO: 1067143 - RNA, 19 nt, Artificial Sequence
  Description of Artificial Sequence: Synthetic oligonucleotide
  Antisense strand to SEQ ID NO: 1067142
uuauugauaacccacuuug

SEQ ID NO: 1067144 - RNA, 19 nt, Artificial Sequence
  Description of Artificial Sequence: Synthetic oligonucleotide
  Sense strand starting at position 3610 of SEQ ID NO: 915268
guggguuaucaauaaaugu

SEQ ID NO: 1067145 - RNA, 19 nt, Artificial Sequence
  Description of Artificial Sequence: Synthetic oligonucleotide
  Antisense strand to SEQ ID NO: 1067144
acauuuauugauaacccac

SEQ ID NO: 1067146 - RNA, 19 nt, Artificial Sequence
  Description of Artificial Sequence: Synthetic oligonucleotide
  Sense strand starting at position 3655 of SEQ ID NO: 915268
ucuugacuccugugaccca

SEQ ID NO: 1067147 - RNA, 19 nt, Artificial Sequence
  Description of Artificial Sequence: Synthetic oligonucleotide
  Antisense strand to SEQ ID NO: 1067146
ugggucacaggagucaaga

SEQ ID NO: 1067148 - RNA, 19 nt, Artificial Sequence
  Description of Artificial Sequence: Synthetic oligonucleotide
  Sense strand starting at position 3703 of SEQ ID NO: 915268
agacauagauaugggaaga

SEQ ID NO: 1067149 - RNA, 19 nt, Artificial Sequence
  Description of Artificial Sequence: Synthetic oligonucleotide
  Antisense strand to SEQ ID NO: 1067148
ucuucccauaucuaugucu

SEQ ID NO: 1067150 - RNA, 19 nt, Artificial Sequence
  Description of Artificial Sequence: Synthetic oligonucleotide
  Sense strand starting at position 3716 of SEQ ID NO: 915268
ggaagacaauacuacaaau

SEQ ID NO: 1067151 - RNA, 19 nt, Artificial Sequence
  Description of Artificial Sequence: Synthetic oligonucleotide
  Antisense strand to SEQ ID NO: 1067150
auuuguaguauugucuucc

SEQ ID NO: 1067152 - RNA, 19 nt, Artificial Sequence
  Description of Artificial Sequence: Synthetic oligonucleotide
  Sense strand starting at position 3792 of SEQ ID NO: 915268
gagagaaugucccuaucua

SEQ ID NO: 1067153 - RNA, 19 nt, Artificial Sequence
  Description of Artificial Sequence: Synthetic oligonucleotide
  Antisense strand to SEQ ID NO: 1067152
uagauagggacauucucuc

SEQ ID NO: 1067154 - RNA, 19 nt, Artificial Sequence
  Description of Artificial Sequence: Synthetic oligonucleotide
  Sense strand starting at position 3889 of SEQ ID NO: 915268
aguccagauuuguaaguga

SEQ ID NO: 1067155 - RNA, 19 nt, Artificial Sequence
  Description of Artificial Sequence: Synthetic oligonucleotide
  Antisense strand to SEQ ID NO: 1067154
ucacuuacaaaucuggacu

SEQ ID NO: 1067156 - RNA, 19 nt, Artificial Sequence
  Description of Artificial Sequence: Synthetic oligonucleotide
  Sense strand starting at position 33 of SEQ ID NO: 915269
acuggaggauucuaucuga

SEQ ID NO: 1067157 - RNA, 19 nt, Artificial Sequence
  Description of Artificial Sequence: Synthetic oligonucleotide
  Antisense strand to SEQ ID NO: 1067156
ucagauagaauccuccagu

SEQ ID NO: 1067158 - RNA, 19 nt, Artificial Sequence
  Description of Artificial Sequence: Synthetic oligonucleotide
  Sense strand starting at position 202 of SEQ ID NO: 915269
accaucuuguggcuauaaa

SEQ ID NO: 1067159 - RNA, 19 nt, Artificial Sequence
  Description of Artificial Sequence: Synthetic oligonucleotide
  Antisense strand to SEQ ID NO: 1067158
uuuauagccacaagauggu

SEQ ID NO: 1067160 - RNA, 19 nt, Artificial Sequence
  Description of Artificial Sequence: Synthetic oligonucleotide
  Sense strand starting at position 203 of SEQ ID NO: 915269
ccaucuuguggcuauaaac

SEQ ID NO: 1067161 - RNA, 19 nt, Artificial Sequence
  Description of Artificial Sequence: Synthetic oligonucleotide
  Antisense strand to SEQ ID NO: 1067160
guuuauagccacaagaugg

SEQ ID NO: 1067162 - RNA, 19 nt, Artificial Sequence
  Description of Artificial Sequence: Synthetic oligonucleotide
  Sense strand starting at position 273 of SEQ ID NO: 915269
ugagccaagcucuagagau

SEQ ID NO: 1067163 - RNA, 19 nt, Artificial Sequence
  Description of Artificial Sequence: Synthetic oligonucleotide
  Antisense strand to SEQ ID NO: 1067162
aucucuagagcuuggcuca

SEQ ID NO: 1067164 - RNA, 19 nt, Artificial Sequence
  Description of Artificial Sequence: Synthetic oligonucleotide
  Sense strand starting at position 602 of SEQ ID NO: 915269
cuuugaccugcuugaacua

SEQ ID NO: 1067165 - RNA, 19 nt, Artificial Sequence
  Description of Artificial Sequence: Synthetic oligonucleotide
  Antisense strand to SEQ ID NO: 1067164
uaguucaagcaggucaaag

SEQ ID NO: 1067166 - RNA, 19 nt, Artificial Sequence
  Description of Artificial Sequence: Synthetic oligonucleotide
  Sense strand starting at position 623 of SEQ ID NO: 915269
uccugacagucaguggauu

SEQ ID NO: 1067167 - RNA, 19 nt, Artificial Sequence
  Description of Artificial Sequence: Synthetic oligonucleotide
  Antisense strand to SEQ ID NO: 1067166
aauccacugacugucagga

SEQ ID NO: 1067168 - RNA, 19 nt, Artificial Sequence
  Description of Artificial Sequence: Synthetic oligonucleotide
  Sense strand starting at position 635 of SEQ ID NO: 915269
guggauugcugccucaaau

SEQ ID NO: 1067169 - RNA, 19 nt, Artificial Sequence
  Description of Artificial Sequence: Synthetic oligonucleotide
  Antisense strand to SEQ ID NO: 1067168
auuugaggcagcaauccac

SEQ ID NO: 1067170 - RNA, 19 nt, Artificial Sequence
  Description of Artificial Sequence: Synthetic oligonucleotide
  Sense strand starting at position 658 of SEQ ID NO: 915269
agacccauugucugaaaga

SEQ ID NO: 1067171 - RNA, 19 nt, Artificial Sequence
  Description of Artificial Sequence: Synthetic oligonucleotide
  Antisense strand to SEQ ID NO: 1067170
ucuuucagacaaugggucu

SEQ ID NO: 1067172 - RNA, 19 nt, Artificial Sequence
  Description of Artificial Sequence: Synthetic oligonucleotide
  Sense strand starting at position 721 of SEQ ID NO: 915269
gagguuucugccuguauuu

SEQ ID NO: 1067173 - RNA, 19 nt, Artificial Sequence
  Description of Artificial Sequence: Synthetic oligonucleotide
  Antisense strand to SEQ ID NO: 1067172
aaauacaggcagaaaccuc

SEQ ID NO: 1067174 - RNA, 19 nt, Artificial Sequence
  Description of Artificial Sequence: Synthetic oligonucleotide
  Sense strand starting at position 890 of SEQ ID NO: 915269
gcaccuuccuggcucuuaa

SEQ ID NO: 1067175 - RNA, 19 nt, Artificial Sequence
  Description of Artificial Sequence: Synthetic oligonucleotide
  Antisense strand to SEQ ID NO: 1067174
uuaagagccaggaaggugc

SEQ ID NO: 1067176 - RNA, 19 nt, Artificial Sequence
  Description of Artificial Sequence: Synthetic oligonucleotide
  Sense strand starting at position 1007 of SEQ ID NO: 915269
gcggcacuauguucagaaa

SEQ ID NO: 1067177 - RNA, 19 nt, Artificial Sequence
  Description of Artificial Sequence: Synthetic oligonucleotide
  Antisense strand to SEQ ID NO: 1067176
uuucugaacauagugccgc

SEQ ID NO: 1067178 - RNA, 19 nt, Artificial Sequence
  Description of Artificial Sequence: Synthetic oligonucleotide
  Sense strand starting at position 1062 of SEQ ID NO: 915269
ucuguuuguuuccucauca

SEQ ID NO: 1067179 - RNA, 19 nt, Artificial Sequence
  Description of Artificial Sequence: Synthetic oligonucleotide
  Antisense strand to SEQ ID NO: 1067178
ugaugaggaaacaaacaga

SEQ ID NO: 1067180 - RNA, 19 nt, Artificial Sequence
  Description of Artificial Sequence: Synthetic oligonucleotide
  Sense strand starting at position 1063 of SEQ ID NO: 915269
cuguuuguuuccucaucaa

SEQ ID NO: 1067181 - RNA, 19 nt, Artificial Sequence
  Description of Artificial Sequence: Synthetic oligonucleotide
  Antisense strand to SEQ ID NO: 1067180
uugaugaggaaacaaacag

SEQ ID NO: 1067182 - RNA, 19 nt, Artificial Sequence
  Description of Artificial Sequence: Synthetic oligonucleotide
  Sense strand starting at position 1324 of SEQ ID NO: 915269
ggaauucgaagauguggga

SEQ ID NO: 1067183 - RNA, 19 nt, Artificial Sequence
  Description of Artificial Sequence: Synthetic oligonucleotide
  Antisense strand to SEQ ID NO: 1067182
ucccacaucuucgaauucc

SEQ ID NO: 1067184 - RNA, 19 nt, Artificial Sequence
  Description of Artificial Sequence: Synthetic oligonucleotide
  Sense strand starting at position 1545 of SEQ ID NO: 915269
gaggccagucuuuaagacu

SEQ ID NO: 1067185 - RNA, 19 nt, Artificial Sequence
  Description of Artificial Sequence: Synthetic oligonucleotide
  Antisense strand to SEQ ID NO: 1067184
agucuuaaagacuggccuc

SEQ ID NO: 1067186 - RNA, 19 nt, Artificial Sequence
  Description of Artificial Sequence: Synthetic oligonucleotide
  Sense strand starting at position 1992 of SEQ ID NO: 915269
uugauacucuggcuuccaa

SEQ ID NO: 1067187 - RNA, 19 nt, Artificial Sequence
  Description of Artificial Sequence: Synthetic oligonucleotide
  Antisense strand to SEQ ID NO: 1067186
uuggaagccagaguaucaa

SEQ ID NO: 1067188 - RNA, 19 nt, Artificial Sequence
  Description of Artificial Sequence: Synthetic oligonucleotide
  Sense strand starting at position 2105 of SEQ ID NO: 915269
uccugauugccugggaugu

SEQ ID NO: 1067189 - RNA, 19 nt, Artificial Sequence
  Description of Artificial Sequence: Synthetic oligonucleotide
  Antisense strand to SEQ ID NO: 1067188
acaucccaggcaaucagga

SEQ ID NO: 1067190 - RNA, 19 nt, Artificial Sequence
  Description of Artificial Sequence: Synthetic oligonucleotide
  Sense strand starting at position 2106 of SEQ ID NO: 915269
ccugauugccugggaugua

SEQ ID NO: 1067191 - RNA, 19 nt, Artificial Sequence
  Description of Artificial Sequence: Synthetic oligonucleotide
  Antisense strand to SEQ ID NO: 1067190
uacaucccaggcaaucagg

SEQ ID NO: 1067192 - RNA, 19 nt, Artificial Sequence
  Description of Artificial Sequence: Synthetic oligonucleotide
  Sense strand starting at position 2135 of SEQ ID NO: 915269
gcccucugggacuaauguu

SEQ ID NO: 1067193 - RNA, 19 nt, Artificial Sequence
  Description of Artificial Sequence: Synthetic oligonucleotide
  Antisense strand to SEQ ID NO: 1067192
aacauuagucccagagggc

SEQ ID NO: 1067194 - RNA, 19 nt, Artificial Sequence
  Description of Artificial Sequence: Synthetic oligonucleotide
  Sense strand starting at position 2305 of SEQ ID NO: 915269
uccugagugucugccaaau

SEQ ID NO: 1067195 - RNA, 19 nt, Artificial Sequence
  Description of Artificial Sequence: Synthetic oligonucleotide
  Antisense strand to SEQ ID NO: 1067194
auuuggcagacacucagga

SEQ ID NO: 1067196 - RNA, 19 nt, Artificial Sequence
  Description of Artificial Sequence: Synthetic oligonucleotide
  Sense strand starting at position 2431 of SEQ ID NO: 915269
aguaaagagucacauauuu

SEQ ID NO: 1067197 - RNA, 19 nt, Artificial Sequence
  Description of Artificial Sequence: Synthetic oligonucleotide
  Antisense strand to SEQ ID NO: 1067196
aaauaugugacucuuuacu

SEQ ID NO: 1067198 - RNA, 19 nt, Artificial Sequence
  Description of Artificial Sequence: Synthetic oligonucleotide
  Sense strand starting at position 2473 of SEQ ID NO: 915269
ucgcucuaccuguagcaua

SEQ ID NO: 1067199 - RNA, 19 nt, Artificial Sequence
  Description of Artificial Sequence: Synthetic oligonucleotide
  Antisense strand to SEQ ID NO: 1067198
uaugcuacagguagagcga

SEQ ID NO: 1067200 - RNA, 19 nt, Artificial Sequence
  Description of Artificial Sequence: Synthetic oligonucleotide
  Sense strand starting at position 2543 of SEQ ID NO: 915269
cucuaaguucuaugguaaa

SEQ ID NO: 1067201 - RNA, 19 nt, Artificial Sequence
  Description of Artificial Sequence: Synthetic oligonucleotide
  Antisense strand to SEQ ID NO: 1067200
uuuaccauagaacuuagag

SEQ ID NO: 1067202 - RNA, 19 nt, Artificial Sequence
  Description of Artificial Sequence: Synthetic oligonucleotide
  Sense strand starting at position 2619 of SEQ ID NO: 915269
acccguuaacuguaaauau

SEQ ID NO: 1067203 - RNA, 19 nt, Artificial Sequence
  Description of Artificial Sequence: Synthetic oligonucleotide
  Antisense strand to SEQ ID NO: 1067202
auauuuacaguuaacgggu

SEQ ID NO: 1067204 - RNA, 19 nt, Artificial Sequence
  Description of Artificial Sequence: Synthetic oligonucleotide
  Sense strand starting at position 2628 of SEQ ID NO: 915269
cuguaaauauacccgucau

SEQ ID NO: 1067205 - RNA, 19 nt, Artificial Sequence
  Description of Artificial Sequence: Synthetic oligonucleotide
  Antisense strand to SEQ ID NO: 1067204
augacggguauauuuacag

SEQ ID NO: 1067206 - RNA, 19 nt, Artificial Sequence
  Description of Artificial Sequence: Synthetic oligonucleotide
  Sense strand starting at position 2949 of SEQ ID NO: 915269
agucauuuguuagauuaug

SEQ ID NO: 1067207 - RNA, 19 nt, Artificial Sequence
  Description of Artificial Sequence: Synthetic oligonucleotide
  Antisense strand to SEQ ID NO: 1067206
cauaaucuaacaaaugacu

SEQ ID NO: 1067208 - RNA, 19 nt, Artificial Sequence
  Description of Artificial Sequence: Synthetic oligonucleotide
  Sense strand starting at position 3392 of SEQ ID NO: 915269
aucugagaagugugcuaaa

SEQ ID NO: 1067209 - RNA, 19 nt, Artificial Sequence
  Description of Artificial Sequence: Synthetic oligonucleotide
  Antisense strand to SEQ ID NO: 1067208
uuuagcacacuucucagau

SEQ ID NO: 1067210 - RNA, 19 nt, Artificial Sequence
  Description of Artificial Sequence: Synthetic oligonucleotide
  Sense strand starting at position 3414 of SEQ ID NO: 915269
guaauaggcccucaauauc

SEQ ID NO: 1067211 - RNA, 19 nt, Artificial Sequence
  Description of Artificial Sequence: Synthetic oligonucleotide
  Antisense strand to SEQ ID NO: 1067210
gauauugagggccuauuac

SEQ ID NO: 1067212 - RNA, 19 nt, Artificial Sequence
  Description of Artificial Sequence: Synthetic oligonucleotide
  Sense strand starting at position 3463 of SEQ ID NO: 915269
cuagauaaugcuggaauag

SEQ ID NO: 1067213 - RNA, 19 nt, Artificial Sequence
  Description of Artificial Sequence: Synthetic oligonucleotide
  Antisense strand to SEQ ID NO: 1067212
cuauuccagcauuaucuag

SEQ ID NO: 1067214 - RNA, 19 nt, Artificial Sequence
  Description of Artificial Sequence: Synthetic oligonucleotide
  Sense strand starting at position 3491 of SEQ ID NO: 915269
agagguuaaagcuaugagu

SEQ ID NO: 1067215 - RNA, 19 nt, Artificial Sequence
  Description of Artificial Sequence: Synthetic oligonucleotide
  Antisense strand to SEQ ID NO: 1067214
acucauagcuuuaaccucu

SEQ ID NO: 1067216 - RNA, 19 nt, Artificial Sequence
  Description of Artificial Sequence: Synthetic oligonucleotide
  Sense strand starting at position 3493 of SEQ ID NO: 915269
agguuaaagcuaugaguuc

SEQ ID NO: 1067217 - RNA, 19 nt, Artificial Sequence
  Description of Artificial Sequence: Synthetic oligonucleotide
  Antisense strand to SEQ ID NO: 1067216
gaacucauagcuuuaaccu

SEQ ID NO: 1067218 - RNA, 19 nt, Artificial Sequence
  Description of Artificial Sequence: Synthetic oligonucleotide
  Sense strand starting at position 3554 of SEQ ID NO: 915269
gauuuagcaagcuggugua

SEQ ID NO: 1067219 - RNA, 19 nt, Artificial Sequence
  Description of Artificial Sequence: Synthetic oligonucleotide
  Antisense strand to SEQ ID NO: 1067218
uacaccagcuugcuaaauc

SEQ ID NO: 1067220 - RNA, 19 nt, Artificial Sequence
  Description of Artificial Sequence: Synthetic oligonucleotide
  Sense strand starting at position 3568 of SEQ ID NO: 915269
guguauugauugucaggga

SEQ ID NO: 1067221 - RNA, 19 nt, Artificial Sequence
  Description of Artificial Sequence: Synthetic oligonucleotide
  Antisense strand to SEQ ID NO: 1067220
ucccugacaaucaauacac

SEQ ID NO: 1067222 - RNA, 19 nt, Artificial Sequence
  Description of Artificial Sequence: Synthetic oligonucleotide
  Sense strand starting at position 3572 of SEQ ID NO: 915269
auugauugucagggaaauc

SEQ ID NO: 1067223 - RNA, 19 nt, Artificial Sequence
  Description of Artificial Sequence: Synthetic oligonucleotide
  Antisense strand to SEQ ID NO: 1067222
gauuucccugacaaucaau

SEQ ID NO: 1067224 - RNA, 19 nt, Artificial Sequence
  Description of Artificial Sequence: Synthetic oligonucleotide
  Sense strand starting at position 3583 of SEQ ID NO: 915269
gggaaaucuugagcuuaca

SEQ ID NO: 1067225 - RNA, 19 nt, Artificial Sequence
  Description of Artificial Sequence: Synthetic oligonucleotide
  Antisense strand to SEQ ID NO: 1067224
uguaagcucaagauuuccc

SEQ ID NO: 1067226 - RNA, 19 nt, Artificial Sequence
  Description of Artificial Sequence: Synthetic oligonucleotide
  Sense strand starting at position 3652 of SEQ ID NO: 915269
acauacagucacugugauu

SEQ ID NO: 1067227 - RNA, 19 nt, Artificial Sequence
  Description of Artificial Sequence: Synthetic oligonucleotide
  Antisense strand to SEQ ID NO: 1067226
aaucacagugacuguaugu

SEQ ID NO: 1067228 - RNA, 19 nt, Artificial Sequence
  Description of Artificial Sequence: Synthetic oligonucleotide
  Sense strand starting at position 3658 of SEQ ID NO: 915269
agucacugugauuaugaca

SEQ ID NO: 1067229 - RNA, 19 nt, Artificial Sequence
  Description of Artificial Sequence: Synthetic oligonucleotide
  Antisense strand to SEQ ID NO: 1067228
ugucauaaucacagugacu

SEQ ID NO: 1067230 - RNA, 19 nt, Artificial Sequence
  Description of Artificial Sequence: Synthetic oligonucleotide
  Sense strand starting at position 3661 of SEQ ID NO: 915269
cacugugauuaugacagaa

SEQ ID NO: 1067231 - RNA, 19 nt, Artificial Sequence
  Description of Artificial Sequence: Synthetic oligonucleotide
  Antisense strand to SEQ ID NO: 1067230
uucugucauaaucacagug

SEQ ID NO: 1067232 - RNA, 19 nt, Artificial Sequence
  Description of Artificial Sequence: Synthetic oligonucleotide
  Sense strand starting at position 3663 of SEQ ID NO: 915269
cugugauuaugacagaaga

SEQ ID NO: 1067233 - RNA, 19 nt, Artificial Sequence
  Description of Artificial Sequence: Synthetic oligonucleotide
  Antisense strand to SEQ ID NO: 1067232
ucuucugucauaaucacag

SEQ ID NO: 1067234 - RNA, 19 nt, Artificial Sequence
  Description of Artificial Sequence: Synthetic oligonucleotide
  Sense strand starting at position 3830 of SEQ ID NO: 915269
aggucuggucucugauguu

SEQ ID NO: 1067235 - RNA, 19 nt, Artificial Sequence
  Description of Artificial Sequence: Synthetic oligonucleotide
  Antisense strand to SEQ ID NO: 1067234
aacaucagagaccagaccu

SEQ ID NO: 1067236 - RNA, 19 nt, Artificial Sequence
  Description of Artificial Sequence: Synthetic oligonucleotide
  Sense strand starting at position 72 of SEQ ID NO: 915270
aucacacuguucuggcaaa

SEQ ID NO: 1067237 - RNA, 19 nt, Artificial Sequence
  Description of Artificial Sequence: Synthetic oligonucleotide
  Antisense strand to SEQ ID NO: 1067236
uuugccagaacagugugau

SEQ ID NO: 1067238 - RNA, 19 nt, Artificial Sequence
  Description of Artificial Sequence: Synthetic oligonucleotide
  Sense strand starting at position 128 of SEQ ID NO: 915270
ccuucuuuguagugacaug

SEQ ID NO: 1067239 - RNA, 19 nt, Artificial Sequence
  Description of Artificial Sequence: Synthetic oligonucleotide
  Antisense strand to SEQ ID NO: 1067238
caugucacuacaaagaagg

SEQ ID NO: 1067240 - RNA, 19 nt, Artificial Sequence
  Description of Artificial Sequence: Synthetic oligonucleotide
  Sense strand starting at position 326 of SEQ ID NO: 915270
agacauagaucaugacggu

SEQ ID NO: 1067241 - RNA, 19 nt, Artificial Sequence
  Description of Artificial Sequence: Synthetic oligonucleotide
  Antisense strand to SEQ ID NO: 1067240
accgucaugaucuaugucu

SEQ ID NO: 1067242 - RNA, 19 nt, Artificial Sequence
  Description of Artificial Sequence: Synthetic oligonucleotide
  Sense strand starting at position 455 of SEQ ID NO: 915270
gucccaagucuggguaguu

SEQ ID NO: 1067243 - RNA, 19 nt, Artificial Sequence
  Description of Artificial Sequence: Synthetic oligonucleotide
  Antisense strand to SEQ ID NO: 1067242
aacuacccagacuugggac

SEQ ID NO: 1067244 - RNA, 19 nt, Artificial Sequence
  Description of Artificial Sequence: Synthetic oligonucleotide
  Sense strand starting at position 515 of SEQ ID NO: 915270
gggaguguagaauaugcaa

SEQ ID NO: 1067245 - RNA, 19 nt, Artificial Sequence
  Description of Artificial Sequence: Synthetic oligonucleotide
  Antisense strand to SEQ ID NO: 1067244
uugcauauucuacacuccc

SEQ ID NO: 1067246 - RNA, 19 nt, Artificial Sequence
  Description of Artificial Sequence: Synthetic oligonucleotide
  Sense strand starting at position 626 of SEQ ID NO: 915270
guuaucaaauaccuuaagu

SEQ ID NO: 1067247 - RNA, 19 nt, Artificial Sequence
  Description of Artificial Sequence: Synthetic oligonucleotide
  Antisense strand to SEQ ID NO: 1067246
acuuaagguauuugauaac

SEQ ID NO: 1067248 - RNA, 19 nt, Artificial Sequence
  Description of Artificial Sequence: Synthetic oligonucleotide
  Sense strand starting at position 661 of SEQ ID NO: 915270
caggcuugguccuguggaa

SEQ ID NO: 1067249 - RNA, 19 nt, Artificial Sequence
  Description of Artificial Sequence: Synthetic oligonucleotide
  Antisense strand to SEQ ID NO: 1067248
uuccacaggaccaagccug

SEQ ID NO: 1067250 - RNA, 19 nt, Artificial Sequence
  Description of Artificial Sequence: Synthetic oligonucleotide
  Sense strand starting at position 780 of SEQ ID NO: 915270
ggacacuggugcugaacau

SEQ ID NO: 1067251 - RNA, 19 nt, Artificial Sequence
  Description of Artificial Sequence: Synthetic oligonucleotide
  Antisense strand to SEQ ID NO: 1067250
auguucagcaccagugucc

SEQ ID NO: 1067252 - RNA, 19 nt, Artificial Sequence
  Description of Artificial Sequence: Synthetic oligonucleotide
  Sense strand starting at position 841 of SEQ ID NO: 915270
auuagucccuucuuacaga

SEQ ID NO: 1067253 - RNA, 19 nt, Artificial Sequence
  Description of Artificial Sequence: Synthetic oligonucleotide
  Antisense strand to SEQ ID NO: 1067252
ucuguaagaagggacuaau

SEQ ID NO: 1067254 - RNA, 19 nt, Artificial Sequence
  Description of Artificial Sequence: Synthetic oligonucleotide
  Sense strand starting at position 913 of SEQ ID NO: 915270
aagacaggauuggaacaua

SEQ ID NO: 1067255 - RNA, 19 nt, Artificial Sequence
  Description of Artificial Sequence: Synthetic oligonucleotide
  Antisense strand to SEQ ID NO: 1067254
uauguuccaauccugucuu

SEQ ID NO: 1067256 - RNA, 19 nt, Artificial Sequence
  Description of Artificial Sequence: Synthetic oligonucleotide
  Sense strand starting at position 925 of SEQ ID NO: 915270
gaacauagaucucugaguc

SEQ ID NO: 1067257 - RNA, 19 nt, Artificial Sequence
  Description of Artificial Sequence: Synthetic oligonucleotide
  Antisense strand to SEQ ID NO: 1067256
gacucagagaucuauguuc

SEQ ID NO: 1067258 - RNA, 19 nt, Artificial Sequence
  Description of Artificial Sequence: Synthetic oligonucleotide
  Sense strand starting at position 960 of SEQ ID NO: 915270
ggaccugucugcucagaga

SEQ ID NO: 1067259 - RNA, 19 nt, Artificial Sequence
  Description of Artificial Sequence: Synthetic oligonucleotide
  Antisense strand to SEQ ID NO: 1067258
ucucugagcagacaggucc

SEQ ID NO: 1067260 - RNA, 19 nt, Artificial Sequence
  Description of Artificial Sequence: Synthetic oligonucleotide
  Sense strand starting at position 963 of SEQ ID NO: 915270
ccugucugcucagagaauc

SEQ ID NO: 1067261 - RNA, 19 nt, Artificial Sequence
  Description of Artificial Sequence: Synthetic oligonucleotide
  Antisense strand to SEQ ID NO: 1067260
gauucucugagcagacagg

SEQ ID NO: 1067262 - RNA, 19 nt, Artificial Sequence
  Description of Artificial Sequence: Synthetic oligonucleotide
  Sense strand starting at position 1007 of SEQ ID NO: 915270
guaauaaacuugccugggu

SEQ ID NO: 1067263 - RNA, 19 nt, Artificial Sequence
  Description of Artificial Sequence: Synthetic oligonucleotide
  Antisense strand to SEQ ID NO: 1067262
acccaggcaaguuuauuac

SEQ ID NO: 1067264 - RNA, 19 nt, Artificial Sequence
  Description of Artificial Sequence: Synthetic oligonucleotide
  Sense strand starting at position 1260 of SEQ ID NO: 915270
ucgccuuucuccugacuga

SEQ ID NO: 1067265 - RNA, 19 nt, Artificial Sequence
  Description of Artificial Sequence: Synthetic oligonucleotide
  Antisense strand to SEQ ID NO: 1067264
ucagucaggagaaaggcga

SEQ ID NO: 1067266 - RNA, 19 nt, Artificial Sequence
  Description of Artificial Sequence: Synthetic oligonucleotide
  Sense strand starting at position 1289 of SEQ ID NO: 915270
cgcaccauuugccagauua

SEQ ID NO: 1067267 - RNA, 19 nt, Artificial Sequence
  Description of Artificial Sequence: Synthetic oligonucleotide
  Antisense strand to SEQ ID NO: 1067266
uaaucuggcaaauggugcg

SEQ ID NO: 1067268 - RNA, 19 nt, Artificial Sequence
  Description of Artificial Sequence: Synthetic oligonucleotide
  Sense strand starting at position 1520 of SEQ ID NO: 915270
agacaaguuccgcaggcuu

SEQ ID NO: 1067269 - RNA, 19 nt, Artificial Sequence
  Description of Artificial Sequence: Synthetic oligonucleotide
  Antisense strand to SEQ ID NO: 1067268
aagccugcggaacuugucu

SEQ ID NO: 1067270 - RNA, 19 nt, Artificial Sequence
  Description of Artificial Sequence: Synthetic oligonucleotide
  Sense strand starting at position 1835 of SEQ ID NO: 915270
gcgccuuguucccuccaga

SEQ ID NO: 1067271 - RNA, 19 nt, Artificial Sequence
  Description of Artificial Sequence: Synthetic oligonucleotide
  Antisense strand to SEQ ID NO: 1067270
ucuggagggaacaaggcgc

SEQ ID NO: 1067272 - RNA, 19 nt, Artificial Sequence
  Description of Artificial Sequence: Synthetic oligonucleotide
  Sense strand starting at position 2385 of SEQ ID NO: 915270
ggagauaccugcucggaac

SEQ ID NO: 1067273 - RNA, 19 nt, Artificial Sequence
  Description of Artificial Sequence: Synthetic oligonucleotide
  Antisense strand to SEQ ID NO: 1067272
guuccgagcagguaucucc

SEQ ID NO: 1067274 - RNA, 19 nt, Artificial Sequence
  Description of Artificial Sequence: Synthetic oligonucleotide
  Sense strand starting at position 2418 of SEQ ID NO: 915270
guaccucccuugcuugaaa

SEQ ID NO: 1067275 - RNA, 19 nt, Artificial Sequence
  Description of Artificial Sequence: Synthetic oligonucleotide
  Antisense strand to SEQ ID NO: 1067274
uuucaagcaagggagguac

SEQ ID NO: 1067276 - RNA, 19 nt, Artificial Sequence
  Description of Artificial Sequence: Synthetic oligonucleotide
  Sense strand starting at position 2460 of SEQ ID NO: 915270
ccauuaccgugguuaggaa

SEQ ID NO: 1067277 - RNA, 19 nt, Artificial Sequence
  Description of Artificial Sequence: Synthetic oligonucleotide
  Antisense strand to SEQ ID NO: 1067276
uuccuaaccacgguaaugg

SEQ ID NO: 1067278 - RNA, 19 nt, Artificial Sequence
  Description of Artificial Sequence: Synthetic oligonucleotide
  Sense strand starting at position 2526 of SEQ ID NO: 915270
gccuuaaucuuaucagcag

SEQ ID NO: 1067279 - RNA, 19 nt, Artificial Sequence
  Description of Artificial Sequence: Synthetic oligonucleotide
  Antisense strand to SEQ ID NO: 1067278
cugcugauaagauuaaggc

SEQ ID NO: 1067280 - RNA, 19 nt, Artificial Sequence
  Description of Artificial Sequence: Synthetic oligonucleotide
  Sense strand starting at position 2736 of SEQ ID NO: 915270
gugcucaauccuugaaggu

SEQ ID NO: 1067281 - RNA, 19 nt, Artificial Sequence
  Description of Artificial Sequence: Synthetic oligonucleotide
  Antisense strand to SEQ ID NO: 1067280
accuucaaggauugagcac

SEQ ID NO: 1067282 - RNA, 19 nt, Artificial Sequence
  Description of Artificial Sequence: Synthetic oligonucleotide
  Sense strand starting at position 2745 of SEQ ID NO: 915270
ccuugaaggugugaaugga

SEQ ID NO: 1067283 - RNA, 19 nt, Artificial Sequence
  Description of Artificial Sequence: Synthetic oligonucleotide
  Antisense strand to SEQ ID NO: 1067282
uccauucacaccuucaagg

SEQ ID NO: 1067284 - RNA, 19 nt, Artificial Sequence
  Description of Artificial Sequence: Synthetic oligonucleotide
  Sense strand starting at position 2881 of SEQ ID NO: 915270
gggucuucuuuccugugaa

SEQ ID NO: 1067285 - RNA, 19 nt, Artificial Sequence
  Description of Artificial Sequence: Synthetic oligonucleotide
  Antisense strand to SEQ ID NO: 1067284
uucacaggaaagaagaccc

SEQ ID NO: 1067286 - RNA, 19 nt, Artificial Sequence
  Description of Artificial Sequence: Synthetic oligonucleotide
  Sense strand starting at position 2882 of SEQ ID NO: 915270
ggucuucuuuccugugaaa

SEQ ID NO: 1067287 - RNA, 19 nt, Artificial Sequence
  Description of Artificial Sequence: Synthetic oligonucleotide
  Antisense strand to SEQ ID NO: 1067286
uuucacaggaaagaagacc

SEQ ID NO: 1067288 - RNA, 19 nt, Artificial Sequence
  Description of Artificial Sequence: Synthetic oligonucleotide
  Sense strand starting at position 2940 of SEQ ID NO: 915270
ggccucuuccuguagccaa

SEQ ID NO: 1067289 - RNA, 19 nt, Artificial Sequence
  Description of Artificial Sequence: Synthetic oligonucleotide
  Antisense strand to SEQ ID NO: 1067288
uuggcuacaggaagaggcc

SEQ ID NO: 1067290 - RNA, 19 nt, Artificial Sequence
  Description of Artificial Sequence: Synthetic oligonucleotide
  Sense strand starting at position 3120 of SEQ ID NO: 915270
ggccuuugcuugggagaca

SEQ ID NO: 1067291 - RNA, 19 nt, Artificial Sequence
  Description of Artificial Sequence: Synthetic oligonucleotide
  Antisense strand to SEQ ID NO: 1067290
ugucucccaagcaaaggcc

SEQ ID NO: 1067292 - RNA, 19 nt, Artificial Sequence
  Description of Artificial Sequence: Synthetic oligonucleotide
  Sense strand starting at position 3199 of SEQ ID NO: 915270
ggaccuaaguauccucaua

SEQ ID NO: 1067293 - RNA, 19 nt, Artificial Sequence
  Description of Artificial Sequence: Synthetic oligonucleotide
  Antisense strand to SEQ ID NO: 1067292
uaugaggauacuuaggucc

SEQ ID NO: 1067294 - RNA, 19 nt, Artificial Sequence
  Description of Artificial Sequence: Synthetic oligonucleotide
  Sense strand starting at position 3209 of SEQ ID NO: 915270
auccucauagcccgaguua

SEQ ID NO: 1067295 - RNA, 19 nt, Artificial Sequence
  Description of Artificial Sequence: Synthetic oligonucleotide
  Antisense strand to SEQ ID NO: 1067294
uaacucgggcuaugaggau

SEQ ID NO: 1067296 - RNA, 19 nt, Artificial Sequence
  Description of Artificial Sequence: Synthetic oligonucleotide
  Sense strand starting at position 3210 of SEQ ID NO: 915270
uccucauagcccgaguuau

SEQ ID NO: 1067297 - RNA, 19 nt, Artificial Sequence
  Description of Artificial Sequence: Synthetic oligonucleotide
  Antisense strand to SEQ ID NO: 1067296
auaacucgggcuaugagga

SEQ ID NO: 1067298 - RNA, 19 nt, Artificial Sequence
  Description of Artificial Sequence: Synthetic oligonucleotide
  Sense strand starting at position 3218 of SEQ ID NO: 915270
gcccgaguuauagggccua

SEQ ID NO: 1067299 - RNA, 19 nt, Artificial Sequence
  Description of Artificial Sequence: Synthetic oligonucleotide
  Antisense strand to SEQ ID NO: 1067298
uaggcccuauaacucgggc

SEQ ID NO: 1067300 - RNA, 19 nt, Artificial Sequence
  Description of Artificial Sequence: Synthetic oligonucleotide
  Sense strand starting at position 3490 of SEQ ID NO: 915270
cugcauuccugagacauac

SEQ ID NO: 1067301 - RNA, 19 nt, Artificial Sequence
  Description of Artificial Sequence: Synthetic oligonucleotide
  Antisense strand to SEQ ID NO: 1067300
guaugucucaggaaugcag

SEQ ID NO: 1067302 - RNA, 19 nt, Artificial Sequence
  Description of Artificial Sequence: Synthetic oligonucleotide
  Sense strand starting at position 3530 of SEQ ID NO: 915270
gugacuuagugaggcuuga

SEQ ID NO: 1067303 - RNA, 19 nt, Artificial Sequence
  Description of Artificial Sequence: Synthetic oligonucleotide
  Antisense strand to SEQ ID NO: 1067302
ucaagccucacuaagucac

SEQ ID NO: 1067304 - RNA, 19 nt, Artificial Sequence
  Description of Artificial Sequence: Synthetic oligonucleotide
  Sense strand starting at position 3590 of SEQ ID NO: 915270
ggguuuagauuccagucuu

SEQ ID NO: 1067305 - RNA, 19 nt, Artificial Sequence
  Description of Artificial Sequence: Synthetic oligonucleotide
  Antisense strand to SEQ ID NO: 1067304
aagacuggaaucuaaaccc

SEQ ID NO: 1067306 - RNA, 19 nt, Artificial Sequence
  Description of Artificial Sequence: Synthetic oligonucleotide
  Sense strand starting at position 3636 of SEQ ID NO: 915270
gagccugaguuuccucuuu

SEQ ID NO: 1067307 - RNA, 19 nt, Artificial Sequence
  Description of Artificial Sequence: Synthetic oligonucleotide
  Antisense strand to SEQ ID NO: 1067306
aaagaggaaacucaggcuc

SEQ ID NO: 1067308 - RNA, 19 nt, Artificial Sequence
  Description of Artificial Sequence: Synthetic oligonucleotide
  Sense strand starting at position 3686 of SEQ ID NO: 915270
gcuggccugucuuaaauuu

SEQ ID NO: 1067309 - RNA, 19 nt, Artificial Sequence
  Description of Artificial Sequence: Synthetic oligonucleotide
  Antisense strand to SEQ ID NO: 1067308
aaauuuaagacaggccagc

SEQ ID NO: 1067310 - RNA, 19 nt, Artificial Sequence
  Description of Artificial Sequence: Synthetic oligonucleotide
  Sense strand starting at position 3848 of SEQ ID NO: 915270
ccgggcuaauuuguaaauu

SEQ ID NO: 1067311 - RNA, 19 nt, Artificial Sequence
  Description of Artificial Sequence: Synthetic oligonucleotide
  Antisense strand to SEQ ID NO: 1067310
aauuuacaaauuagcccgg

SEQ ID NO: 1067312 - RNA, 19 nt, Artificial Sequence
  Description of Artificial Sequence: Synthetic oligonucleotide
  Sense strand starting at position 3849 of SEQ ID NO: 915270
cgggcuaauuuguaaauuu

SEQ ID NO: 1067313 - RNA, 19 nt, Artificial Sequence
  Description of Artificial Sequence: Synthetic oligonucleotide
  Antisense strand to SEQ ID NO: 1067312
aaauuuacaaauuagcccg

SEQ ID NO: 1067314 - RNA, 19 nt, Artificial Sequence
  Description of Artificial Sequence: Synthetic oligonucleotide
  Sense strand starting at position 4 of SEQ ID NO: 915271
ucaaacaacuccugggaca

SEQ ID NO: 1067315 - RNA, 19 nt, Artificial Sequence
  Description of Artificial Sequence: Synthetic oligonucleotide
  Antisense strand to SEQ ID NO: 1067314
ugucccaggaguuguuuga

SEQ ID NO: 1067316 - RNA, 19 nt, Artificial Sequence
  Description of Artificial Sequence: Synthetic oligonucleotide
  Sense strand starting at position 6 of SEQ ID NO: 915271
aaacaacuccugggacagu

SEQ ID NO: 1067317 - RNA, 19 nt, Artificial Sequence
  Description of Artificial Sequence: Synthetic oligonucleotide
  Antisense strand to SEQ ID NO: 1067316
acugucccaggaguuguuu

SEQ ID NO: 1067318 - RNA, 19 nt, Artificial Sequence
  Description of Artificial Sequence: Synthetic oligonucleotide
  Sense strand starting at position 15 of SEQ ID NO: 915271
cugggacaguucuaguguu

SEQ ID NO: 1067319 - RNA, 19 nt, Artificial Sequence
  Description of Artificial Sequence: Synthetic oligonucleotide
  Antisense strand to SEQ ID NO: 1067318
aacacuagaacugucccag

SEQ ID NO: 1067320 - RNA, 19 nt, Artificial Sequence
  Description of Artificial Sequence: Synthetic oligonucleotide
  Sense strand starting at position 22 of SEQ ID NO: 915271
aguucuaguguugacauca

SEQ ID NO: 1067321 - RNA, 19 nt, Artificial Sequence
  Description of Artificial Sequence: Synthetic oligonucleotide
  Antisense strand to SEQ ID NO: 1067320
ugaugucaacacuagaacu

SEQ ID NO: 1067322 - RNA, 19 nt, Artificial Sequence
  Description of Artificial Sequence: Synthetic oligonucleotide
  Sense strand starting at position 64 of SEQ ID NO: 915271
uuggcaauacuugauccau

SEQ ID NO: 1067323 - RNA, 19 nt, Artificial Sequence
  Description of Artificial Sequence: Synthetic oligonucleotide
  Antisense strand to SEQ ID NO: 1067322
auggaucaaguauugccaa

SEQ ID NO: 1067324 - RNA, 19 nt, Artificial Sequence
  Description of Artificial Sequence: Synthetic oligonucleotide
  Sense strand starting at position 66 of SEQ ID NO: 915271
ggcaauacuugauccauuc

SEQ ID NO: 1067325 - RNA, 19 nt, Artificial Sequence
  Description of Artificial Sequence: Synthetic oligonucleotide
  Antisense strand to SEQ ID NO: 1067324
gaauggaucaaguauugcc

SEQ ID NO: 1067326 - RNA, 19 nt, Artificial Sequence
  Description of Artificial Sequence: Synthetic oligonucleotide
  Sense strand starting at position 117 of SEQ ID NO: 915271
ugccgcucugaccaugaaa

SEQ ID NO: 1067327 - RNA, 19 nt, Artificial Sequence
  Description of Artificial Sequence: Synthetic oligonucleotide
  Antisense strand to SEQ ID NO: 1067326
uuucauggucagagcggca

SEQ ID NO: 1067328 - RNA, 19 nt, Artificial Sequence
  Description of Artificial Sequence: Synthetic oligonucleotide
  Sense strand starting at position 119 of SEQ ID NO: 915271
ccgcucugaccaugaaaca

SEQ ID NO: 1067329 - RNA, 19 nt, Artificial Sequence
  Description of Artificial Sequence: Synthetic oligonucleotide
  Antisense strand to SEQ ID NO: 1067328
uguuucauggucagagcgg

SEQ ID NO: 1067330 - RNA, 19 nt, Artificial Sequence
  Description of Artificial Sequence: Synthetic oligonucleotide
  Sense strand starting at position 231 of SEQ ID NO: 915271
aucacacuguucuggcaaa

SEQ ID NO: 1067331 - RNA, 19 nt, Artificial Sequence
  Description of Artificial Sequence: Synthetic oligonucleotide
  Antisense strand to SEQ ID NO: 1067330
uuugccagaacagugugau

SEQ ID NO: 1067332 - RNA, 19 nt, Artificial Sequence
  Description of Artificial Sequence: Synthetic oligonucleotide
  Sense strand starting at position 485 of SEQ ID NO: 915271
agacauagaucaugacggu

SEQ ID NO: 1067333 - RNA, 19 nt, Artificial Sequence
  Description of Artificial Sequence: Synthetic oligonucleotide
  Antisense strand to SEQ ID NO: 1067332
accgucaugaucuaugucu

SEQ ID NO: 1067334 - RNA, 19 nt, Artificial Sequence
  Description of Artificial Sequence: Synthetic oligonucleotide
  Sense strand starting at position 614 of SEQ ID NO: 915271
gucccaagucuggguaguu

SEQ ID NO: 1067335 - RNA, 19 nt, Artificial Sequence
  Description of Artificial Sequence: Synthetic oligonucleotide
  Antisense strand to SEQ ID NO: 1067334
aacuacccagacuugggac

SEQ ID NO: 1067336 - RNA, 19 nt, Artificial Sequence
  Description of Artificial Sequence: Synthetic oligonucleotide
  Sense strand starting at position 674 of SEQ ID NO: 915271
gggaguguagaauaugcaa

SEQ ID NO: 1067337 - RNA, 19 nt, Artificial Sequence
  Description of Artificial Sequence: Synthetic oligonucleotide
  Antisense strand to SEQ ID NO: 1067336
uugcauauucuacacuccc

SEQ ID NO: 1067338 - RNA, 19 nt, Artificial Sequence
  Description of Artificial Sequence: Synthetic oligonucleotide
  Sense strand starting at position 785 of SEQ ID NO: 915271
guuaucaaauaccuuaagu

SEQ ID NO: 1067339 - RNA, 19 nt, Artificial Sequence
  Description of Artificial Sequence: Synthetic oligonucleotide
  Antisense strand to SEQ ID NO: 1067338
acuuaagguauuugauaac

SEQ ID NO: 1067340 - RNA, 19 nt, Artificial Sequence
  Description of Artificial Sequence: Synthetic oligonucleotide
  Sense strand starting at position 939 of SEQ ID NO: 915271
ggacacuggugcugaacau

SEQ ID NO: 1067341 - RNA, 19 nt, Artificial Sequence
  Description of Artificial Sequence: Synthetic oligonucleotide
  Antisense strand to SEQ ID NO: 1067340
auguucagcaccagugucc

SEQ ID NO: 1067342 - RNA, 19 nt, Artificial Sequence
  Description of Artificial Sequence: Synthetic oligonucleotide
  Sense strand starting at position 1000 of SEQ ID NO: 915271
auuagucccuucuuacaga

SEQ ID NO: 1067343 - RNA, 19 nt, Artificial Sequence
  Description of Artificial Sequence: Synthetic oligonucleotide
  Antisense strand to SEQ ID NO: 1067342
ucuguaagaagggacuaau

SEQ ID NO: 1067344 - RNA, 19 nt, Artificial Sequence
  Description of Artificial Sequence: Synthetic oligonucleotide
  Sense strand starting at position 1072 of SEQ ID NO: 915271
aagacaggauuggaacaua

SEQ ID NO: 1067345 - RNA, 19 nt, Artificial Sequence
  Description of Artificial Sequence: Synthetic oligonucleotide
  Antisense strand to SEQ ID NO: 1067344
uauguuccaauccugucuu

SEQ ID NO: 1067346 - RNA, 19 nt, Artificial Sequence
  Description of Artificial Sequence: Synthetic oligonucleotide
  Sense strand starting at position 1084 of SEQ ID NO: 915271
gaacauagaucucugaguc

SEQ ID NO: 1067347 - RNA, 19 nt, Artificial Sequence
  Description of Artificial Sequence: Synthetic oligonucleotide
  Antisense strand to SEQ ID NO: 1067346
gacucagagaucuauguuc

SEQ ID NO: 1067348 - RNA, 19 nt, Artificial Sequence
  Description of Artificial Sequence: Synthetic oligonucleotide
  Sense strand starting at position 1119 of SEQ ID NO: 915271
ggaccugucugcucagaga

SEQ ID NO: 1067349 - RNA, 19 nt, Artificial Sequence
  Description of Artificial Sequence: Synthetic oligonucleotide
  Antisense strand to SEQ ID NO: 1067348
ucucugagcagacaggucc

SEQ ID NO: 1067350 - RNA, 19 nt, Artificial Sequence
  Description of Artificial Sequence: Synthetic oligonucleotide
  Sense strand starting at position 1122 of SEQ ID NO: 915271
ccugucugcucagagaauc

SEQ ID NO: 1067351 - RNA, 19 nt, Artificial Sequence
  Description of Artificial Sequence: Synthetic oligonucleotide
  Antisense strand to SEQ ID NO: 1067350
gauucucugagcagacagg

SEQ ID NO: 1067352 - RNA, 19 nt, Artificial Sequence
  Description of Artificial Sequence: Synthetic oligonucleotide
  Sense strand starting at position 1166 of SEQ ID NO: 915271
guaauaaacuugccugggu

SEQ ID NO: 1067353 - RNA, 19 nt, Artificial Sequence
  Description of Artificial Sequence: Synthetic oligonucleotide
  Antisense strand to SEQ ID NO: 1067352
acccaggcaaguuuauuac

SEQ ID NO: 1067354 - RNA, 19 nt, Artificial Sequence
  Description of Artificial Sequence: Synthetic oligonucleotide
  Sense strand starting at position 1448 of SEQ ID NO: 915271
cgcaccauuugccagauua

SEQ ID NO: 1067355 - RNA, 19 nt, Artificial Sequence
  Description of Artificial Sequence: Synthetic oligonucleotide
  Antisense strand to SEQ ID NO: 1067354
uaaucuggcaaauggugcg

SEQ ID NO: 1067356 - RNA, 19 nt, Artificial Sequence
  Description of Artificial Sequence: Synthetic oligonucleotide
  Sense strand starting at position 1679 of SEQ ID NO: 915271
agacaaguuccgcaggcuu

SEQ ID NO: 1067357 - RNA, 19 nt, Artificial Sequence
  Description of Artificial Sequence: Synthetic oligonucleotide
  Antisense strand to SEQ ID NO: 1067356
aagccugcggaacuugucu

SEQ ID NO: 1067358 - RNA, 19 nt, Artificial Sequence
  Description of Artificial Sequence: Synthetic oligonucleotide
  Sense strand starting at position 1994 of SEQ ID NO: 915271
gcgccuuguucccuccaga

SEQ ID NO: 1067359 - RNA, 19 nt, Artificial Sequence
  Description of Artificial Sequence: Synthetic oligonucleotide
  Antisense strand to SEQ ID NO: 1067358
ucuggagggaacaaggcgc

SEQ ID NO: 1067360 - RNA, 19 nt, Artificial Sequence
  Description of Artificial Sequence: Synthetic oligonucleotide
  Sense strand starting at position 2544 of SEQ ID NO: 915271
ggagauaccugcucggaac

SEQ ID NO: 1067361 - RNA, 19 nt, Artificial Sequence
  Description of Artificial Sequence: Synthetic oligonucleotide
  Antisense strand to SEQ ID NO: 1067360
guuccgagcagguaucucc

SEQ ID NO: 1067362 - RNA, 19 nt, Artificial Sequence
  Description of Artificial Sequence: Synthetic oligonucleotide
  Sense strand starting at position 2577 of SEQ ID NO: 915271
guaccucccuugcuugaaa

SEQ ID NO: 1067363 - RNA, 19 nt, Artificial Sequence
  Description of Artificial Sequence: Synthetic oligonucleotide
  Antisense strand to SEQ ID NO: 1067362
uuucaagcaagggagguac

SEQ ID NO: 1067364 - RNA, 19 nt, Artificial Sequence
  Description of Artificial Sequence: Synthetic oligonucleotide
  Sense strand starting at position 2619 of SEQ ID NO: 915271
ccauuaccgugguuaggaa

SEQ ID NO: 1067365 - RNA, 19 nt, Artificial Sequence
  Description of Artificial Sequence: Synthetic oligonucleotide
  Antisense strand to SEQ ID NO: 1067364
uuccuaaccacgguaaugg

SEQ ID NO: 1067366 - RNA, 19 nt, Artificial Sequence
  Description of Artificial Sequence: Synthetic oligonucleotide
  Sense strand starting at position 2685 of SEQ ID NO: 915271
gccuuaaucuuaucagcag

SEQ ID NO: 1067367 - RNA, 19 nt, Artificial Sequence
  Description of Artificial Sequence: Synthetic oligonucleotide
  Antisense strand to SEQ ID NO: 1067366
cugcugauaagauuaaggc

SEQ ID NO: 1067368 - RNA, 19 nt, Artificial Sequence
  Description of Artificial Sequence: Synthetic oligonucleotide
  Sense strand starting at position 2895 of SEQ ID NO: 915271
gugcucaauccuugaaggu

SEQ ID NO: 1067369 - RNA, 19 nt, Artificial Sequence
  Description of Artificial Sequence: Synthetic oligonucleotide
  Antisense strand to SEQ ID NO: 1067368
accuucaaggauugagcac

SEQ ID NO: 1067370 - RNA, 19 nt, Artificial Sequence
  Description of Artificial Sequence: Synthetic oligonucleotide
  Sense strand starting at position 2904 of SEQ ID NO: 915271
ccuugaaggugugaaugga

SEQ ID NO: 1067371 - RNA, 19 nt, Artificial Sequence
  Description of Artificial Sequence: Synthetic oligonucleotide
  Antisense strand to SEQ ID NO: 1067370
uccauucacaccuucaagg

SEQ ID NO: 1067372 - RNA, 19 nt, Artificial Sequence
  Description of Artificial Sequence: Synthetic oligonucleotide
  Sense strand starting at position 3040 of SEQ ID NO: 915271
gggucuucuuuccugugaa

SEQ ID NO: 1067373 - RNA, 19 nt, Artificial Sequence
  Description of Artificial Sequence: Synthetic oligonucleotide
  Antisense strand to SEQ ID NO: 1067372
uucacaggaaagaagaccc

SEQ ID NO: 1067374 - RNA, 19 nt, Artificial Sequence
  Description of Artificial Sequence: Synthetic oligonucleotide
  Sense strand starting at position 3099 of SEQ ID NO: 915271
ggccucuuccuguagccaa

SEQ ID NO: 1067375 - RNA, 19 nt, Artificial Sequence
  Description of Artificial Sequence: Synthetic oligonucleotide
  Antisense strand to SEQ ID NO: 1067374
uuggcuacaggaagaggcc

SEQ ID NO: 1067376 - RNA, 19 nt, Artificial Sequence
  Description of Artificial Sequence: Synthetic oligonucleotide
  Sense strand starting at position 3279 of SEQ ID NO: 915271
ggccuuugcuugggagaca

SEQ ID NO: 1067377 - RNA, 19 nt, Artificial Sequence
  Description of Artificial Sequence: Synthetic oligonucleotide
  Antisense strand to SEQ ID NO: 1067376
ugucucccaagcaaaggcc

SEQ ID NO: 1067378 - RNA, 19 nt, Artificial Sequence
  Description of Artificial Sequence: Synthetic oligonucleotide
  Sense strand starting at position 3358 of SEQ ID NO: 915271
ggaccuaaguauccucaua

SEQ ID NO: 1067379 - RNA, 19 nt, Artificial Sequence
  Description of Artificial Sequence: Synthetic oligonucleotide
  Antisense strand to SEQ ID NO: 1067378
uaugaggauacuuaggucc

SEQ ID NO: 1067380 - RNA, 19 nt, Artificial Sequence
  Description of Artificial Sequence: Synthetic oligonucleotide
  Sense strand starting at position 3368 of SEQ ID NO: 915271
auccucauagcccgaguua

SEQ ID NO: 1067381 - RNA, 19 nt, Artificial Sequence
  Description of Artificial Sequence: Synthetic oligonucleotide
  Antisense strand to SEQ ID NO: 1067380
uaacucgggcuaugaggau

SEQ ID NO: 1067382 - RNA, 19 nt, Artificial Sequence
  Description of Artificial Sequence: Synthetic oligonucleotide
  Sense strand starting at position 3369 of SEQ ID NO: 915271
uccucauagcccgaguuau

SEQ ID NO: 1067383 - RNA, 19 nt, Artificial Sequence
  Description of Artificial Sequence: Synthetic oligonucleotide
  Antisense strand to SEQ ID NO: 1067382
auaacucgggcuaugagga

SEQ ID NO: 1067384 - RNA, 19 nt, Artificial Sequence
  Description of Artificial Sequence: Synthetic oligonucleotide
  Sense strand starting at position 3377 of SEQ ID NO: 915271
gcccgaguuauagggccua

SEQ ID NO: 1067385 - RNA, 19 nt, Artificial Sequence
  Description of Artificial Sequence: Synthetic oligonucleotide
  Antisense strand to SEQ ID NO: 1067384
uaggcccuauaacucgggc

SEQ ID NO: 1067386 - RNA, 19 nt, Artificial Sequence
  Description of Artificial Sequence: Synthetic oligonucleotide
  Sense strand starting at position 3649 of SEQ ID NO: 915271
cugcauuccugagacauac

SEQ ID NO: 1067387 - RNA, 19 nt, Artificial Sequence
  Description of Artificial Sequence: Synthetic oligonucleotide
  Antisense strand to SEQ ID NO: 1067386
guaugucucaggaaugcag

SEQ ID NO: 1067388 - RNA, 19 nt, Artificial Sequence
  Description of Artificial Sequence: Synthetic oligonucleotide
  Sense strand starting at position 3749 of SEQ ID NO: 915271
ggguuuagauuccagucuu

SEQ ID NO: 1067389 - RNA, 19 nt, Artificial Sequence
  Description of Artificial Sequence: Synthetic oligonucleotide
  Antisense strand to SEQ ID NO: 1067388
aagacuggaaucuaaaccc

SEQ ID NO: 1067390 - RNA, 19 nt, Artificial Sequence
  Description of Artificial Sequence: Synthetic oligonucleotide
  Sense strand starting at position 3795 of SEQ ID NO: 915271
gagccugaguuuccucuuu

SEQ ID NO: 1067391 - RNA, 19 nt, Artificial Sequence
  Description of Artificial Sequence: Synthetic oligonucleotide
  Antisense strand to SEQ ID NO: 1067390
aaagaggaaacucaggcuc

SEQ ID NO: 1067392 - RNA, 19 nt, Artificial Sequence
  Description of Artificial Sequence: Synthetic oligonucleotide
  Sense strand starting at position 3845 of SEQ ID NO: 915271
gcuggccugucuuaaauuu

SEQ ID NO: 1067393 - RNA, 19 nt, Artificial Sequence
  Description of Artificial Sequence: Synthetic oligonucleotide
  Antisense strand to SEQ ID NO: 1067392
aaauuuaagacaggccagc

SEQ ID NO: 1067394 - RNA, 19 nt, Artificial Sequence
  Description of Artificial Sequence: Synthetic oligonucleotide
  Sense strand starting at position 36 of SEQ ID NO: 915272
agggcauugggauguuaua

SEQ ID NO: 1067395 - RNA, 19 nt, Artificial Sequence
  Description of Artificial Sequence: Synthetic oligonucleotide
  Antisense strand to SEQ ID NO: 1067394
uauaacaucccaaugcccu

SEQ ID NO: 1067396 - RNA, 19 nt, Artificial Sequence
  Description of Artificial Sequence: Synthetic oligonucleotide
  Sense strand starting at position 141 of SEQ ID NO: 915272
uuaguugaacauugugaua

SEQ ID NO: 1067397 - RNA, 19 nt, Artificial Sequence
  Description of Artificial Sequence: Synthetic oligonucleotide
  Antisense strand to SEQ ID NO: 1067396
uaucacaauguucaacuaa

SEQ ID NO: 1067398 - RNA, 19 nt, Artificial Sequence
  Description of Artificial Sequence: Synthetic oligonucleotide
  Sense strand starting at position 143 of SEQ ID NO: 915272
aguugaacauugugauaca

SEQ ID NO: 1067399 - RNA, 19 nt, Artificial Sequence
  Description of Artificial Sequence: Synthetic oligonucleotide
  Antisense strand to SEQ ID NO: 1067398
uguaucacaauguucaacu

SEQ ID NO: 1067400 - RNA, 19 nt, Artificial Sequence
  Description of Artificial Sequence: Synthetic oligonucleotide
  Sense strand starting at position 144 of SEQ ID NO: 915272
guugaacauugugauacau

SEQ ID NO: 1067401 - RNA, 19 nt, Artificial Sequence
  Description of Artificial Sequence: Synthetic oligonucleotide
  Antisense strand to SEQ ID NO: 1067400
auguaucacaauguucaac

SEQ ID NO: 1067402 - RNA, 19 nt, Artificial Sequence
  Description of Artificial Sequence: Synthetic oligonucleotide
  Sense strand starting at position 153 of SEQ ID NO: 915272
ugugauacaugccuguagu

SEQ ID NO: 1067403 - RNA, 19 nt, Artificial Sequence
  Description of Artificial Sequence: Synthetic oligonucleotide
  Antisense strand to SEQ ID NO: 1067402
acuacaggcauguaucaca

SEQ ID NO: 1067404 - RNA, 19 nt, Artificial Sequence
  Description of Artificial Sequence: Synthetic oligonucleotide
  Sense strand starting at position 404 of SEQ ID NO: 915272
gcaagcuucuggcagaaca

SEQ ID NO: 1067405 - RNA, 19 nt, Artificial Sequence
  Description of Artificial Sequence: Synthetic oligonucleotide
  Antisense strand to SEQ ID NO: 1067404
uguucugccagaagcuugc

SEQ ID NO: 1067406 - RNA, 19 nt, Artificial Sequence
  Description of Artificial Sequence: Synthetic oligonucleotide
  Sense strand starting at position 443 of SEQ ID NO: 915272
gcagucaggucuccagaga

SEQ ID NO: 1067407 - RNA, 19 nt, Artificial Sequence
  Description of Artificial Sequence: Synthetic oligonucleotide
  Antisense strand to SEQ ID NO: 1067406
ucucuggagaccugacugc

SEQ ID NO: 1067408 - RNA, 19 nt, Artificial Sequence
  Description of Artificial Sequence: Synthetic oligonucleotide
  Sense strand starting at position 508 of SEQ ID NO: 915272
agaaacgauuuccagguuu

SEQ ID NO: 1067409 - RNA, 19 nt, Artificial Sequence
  Description of Artificial Sequence: Synthetic oligonucleotide
  Antisense strand to SEQ ID NO: 1067408
aaaccuggaaaucguuucu

SEQ ID NO: 1067410 - RNA, 19 nt, Artificial Sequence
  Description of Artificial Sequence: Synthetic oligonucleotide
  Sense strand starting at position 752 of SEQ ID NO: 915272
ggcacaacacuuuauaguu

SEQ ID NO: 1067411 - RNA, 19 nt, Artificial Sequence
  Description of Artificial Sequence: Synthetic oligonucleotide
  Antisense strand to SEQ ID NO: 1067410
aacuauaaaguguugugcc

SEQ ID NO: 1067412 - RNA, 19 nt, Artificial Sequence
  Description of Artificial Sequence: Synthetic oligonucleotide
  Sense strand starting at position 812 of SEQ ID NO: 915272
gguggagaguuucccugaa

SEQ ID NO: 1067413 - RNA, 19 nt, Artificial Sequence
  Description of Artificial Sequence: Synthetic oligonucleotide
  Antisense strand to SEQ ID NO: 1067412
uucagggaaacucuccacc

SEQ ID NO: 1067414 - RNA, 19 nt, Artificial Sequence
  Description of Artificial Sequence: Synthetic oligonucleotide
  Sense strand starting at position 814 of SEQ ID NO: 915272
uggagaguuucccugaaua

SEQ ID NO: 1067415 - RNA, 19 nt, Artificial Sequence
  Description of Artificial Sequence: Synthetic oligonucleotide
  Antisense strand to SEQ ID NO: 1067414
uauucagggaaacucucca

SEQ ID NO: 1067416 - RNA, 19 nt, Artificial Sequence
  Description of Artificial Sequence: Synthetic oligonucleotide
  Sense strand starting at position 838 of SEQ ID NO: 915272
cauucuagagcuggcaaga

SEQ ID NO: 1067417 - RNA, 19 nt, Artificial Sequence
  Description of Artificial Sequence: Synthetic oligonucleotide
  Antisense strand to SEQ ID NO: 1067416
ucuugccagcucuagaaug

SEQ ID NO: 1067418 - RNA, 19 nt, Artificial Sequence
  Description of Artificial Sequence: Synthetic oligonucleotide
  Sense strand starting at position 856 of SEQ ID NO: 915272
agaugagagucccaaauau

SEQ ID NO: 1067419 - RNA, 19 nt, Artificial Sequence
  Description of Artificial Sequence: Synthetic oligonucleotide
  Antisense strand to SEQ ID NO: 1067418
auauuugggacucucaucu

SEQ ID NO: 1067420 - RNA, 19 nt, Artificial Sequence
  Description of Artificial Sequence: Synthetic oligonucleotide
  Sense strand starting at position 1073 of SEQ ID NO: 915272
gcuccaggcugucuuaaga

SEQ ID NO: 1067421 - RNA, 19 nt, Artificial Sequence
  Description of Artificial Sequence: Synthetic oligonucleotide
  Antisense strand to SEQ ID NO: 1067420
ucuuaagacagccuggagc

SEQ ID NO: 1067422 - RNA, 19 nt, Artificial Sequence
  Description of Artificial Sequence: Synthetic oligonucleotide
  Sense strand starting at position 1127 of SEQ ID NO: 915272
gggccuccucuguggacaa

SEQ ID NO: 1067423 - RNA, 19 nt, Artificial Sequence
  Description of Artificial Sequence: Synthetic oligonucleotide
  Antisense strand to SEQ ID NO: 1067422
uuguccacagaggaggccc

SEQ ID NO: 1067424 - RNA, 19 nt, Artificial Sequence
  Description of Artificial Sequence: Synthetic oligonucleotide
  Sense strand starting at position 1129 of SEQ ID NO: 915272
gccuccucuguggacaauu

SEQ ID NO: 1067425 - RNA, 19 nt, Artificial Sequence
  Description of Artificial Sequence: Synthetic oligonucleotide
  Antisense strand to SEQ ID NO: 1067424
aauuguccacagaggaggc

SEQ ID NO: 1067426 - RNA, 19 nt, Artificial Sequence
  Description of Artificial Sequence: Synthetic oligonucleotide
  Sense strand starting at position 1131 of SEQ ID NO: 915272
cuccucuguggacaauuau

SEQ ID NO: 1067427 - RNA, 19 nt, Artificial Sequence
  Description of Artificial Sequence: Synthetic oligonucleotide
  Antisense strand to SEQ ID NO: 1067426
auaauuguccacagaggag

SEQ ID NO: 1067428 - RNA, 19 nt, Artificial Sequence
  Description of Artificial Sequence: Synthetic oligonucleotide
  Sense strand starting at position 1140 of SEQ ID NO: 915272
ggacaauuauuugaucacu

SEQ ID NO: 1067429 - RNA, 19 nt, Artificial Sequence
  Description of Artificial Sequence: Synthetic oligonucleotide
  Antisense strand to SEQ ID NO: 1067428
agugaucaaauaauugucc

SEQ ID NO: 1067430 - RNA, 19 nt, Artificial Sequence
  Description of Artificial Sequence: Synthetic oligonucleotide
  Sense strand starting at position 1366 of SEQ ID NO: 915272
agaccuuuguggcuccgaa

SEQ ID NO: 1067431 - RNA, 19 nt, Artificial Sequence
  Description of Artificial Sequence: Synthetic oligonucleotide
  Antisense strand to SEQ ID NO: 1067430
uucggagccacaaaggucu

SEQ ID NO: 1067432 - RNA, 19 nt, Artificial Sequence
  Description of Artificial Sequence: Synthetic oligonucleotide
  Sense strand starting at position 1380 of SEQ ID NO: 915272
ccgaauccugacugagcua

SEQ ID NO: 1067433 - RNA, 19 nt, Artificial Sequence
  Description of Artificial Sequence: Synthetic oligonucleotide
  Antisense strand to SEQ ID NO: 1067432
uagcucagucaggauucgg

SEQ ID NO: 1067434 - RNA, 19 nt, Artificial Sequence
  Description of Artificial Sequence: Synthetic oligonucleotide
  Sense strand starting at position 1381 of SEQ ID NO: 915272
cgaauccugacugagcuau

SEQ ID NO: 1067435 - RNA, 19 nt, Artificial Sequence
  Description of Artificial Sequence: Synthetic oligonucleotide
  Antisense strand to SEQ ID NO: 1067434
auagcucagucaggauucg

SEQ ID NO: 1067436 - RNA, 19 nt, Artificial Sequence
  Description of Artificial Sequence: Synthetic oligonucleotide
  Sense strand starting at position 1562 of SEQ ID NO: 915272
gccacucuugccugugaug

SEQ ID NO: 1067437 - RNA, 19 nt, Artificial Sequence
  Description of Artificial Sequence: Synthetic oligonucleotide
  Antisense strand to SEQ ID NO: 1067436
caucacaggcaagaguggc

SEQ ID NO: 1067438 - RNA, 19 nt, Artificial Sequence
  Description of Artificial Sequence: Synthetic oligonucleotide
  Sense strand starting at position 1601 of SEQ ID NO: 915272
gacugcaguuacucaggaa

SEQ ID NO: 1067439 - RNA, 19 nt, Artificial Sequence
  Description of Artificial Sequence: Synthetic oligonucleotide
  Antisense strand to SEQ ID NO: 1067438
uuccugaguaacugcaguc

SEQ ID NO: 1067440 - RNA, 19 nt, Artificial Sequence
  Description of Artificial Sequence: Synthetic oligonucleotide
  Sense strand starting at position 2226 of SEQ ID NO: 915272
ccuggaagguccguuaaga

SEQ ID NO: 1067441 - RNA, 19 nt, Artificial Sequence
  Description of Artificial Sequence: Synthetic oligonucleotide
  Antisense strand to SEQ ID NO: 1067440
ucuuaacggaccuuccagg

SEQ ID NO: 1067442 - RNA, 19 nt, Artificial Sequence
  Description of Artificial Sequence: Synthetic oligonucleotide
  Sense strand starting at position 2258 of SEQ ID NO: 915272
cgagauuaauggcucuguu

SEQ ID NO: 1067443 - RNA, 19 nt, Artificial Sequence
  Description of Artificial Sequence: Synthetic oligonucleotide
  Antisense strand to SEQ ID NO: 1067442
aacagagccauuaaucucg

SEQ ID NO: 1067444 - RNA, 19 nt, Artificial Sequence
  Description of Artificial Sequence: Synthetic oligonucleotide
  Sense strand starting at position 2261 of SEQ ID NO: 915272
gauuaauggcucuguuauc

SEQ ID NO: 1067445 - RNA, 19 nt, Artificial Sequence
  Description of Artificial Sequence: Synthetic oligonucleotide
  Antisense strand to SEQ ID NO: 1067444
gauaacagagccauuaauc

SEQ ID NO: 1067446 - RNA, 19 nt, Artificial Sequence
  Description of Artificial Sequence: Synthetic oligonucleotide
  Sense strand starting at position 2262 of SEQ ID NO: 915272
auuaauggcucuguuaucu

SEQ ID NO: 1067447 - RNA, 19 nt, Artificial Sequence
  Description of Artificial Sequence: Synthetic oligonucleotide
  Antisense strand to SEQ ID NO: 1067446
agauaacagagccauuaau

SEQ ID NO: 1067448 - RNA, 19 nt, Artificial Sequence
  Description of Artificial Sequence: Synthetic oligonucleotide
  Sense strand starting at position 2535 of SEQ ID NO: 915272
agcuguuguuaucuauaga

SEQ ID NO: 1067449 - RNA, 19 nt, Artificial Sequence
  Description of Artificial Sequence: Synthetic oligonucleotide
  Antisense strand to SEQ ID NO: 1067448
ucuauagauaacaacagcu

SEQ ID NO: 1067450 - RNA, 19 nt, Artificial Sequence
  Description of Artificial Sequence: Synthetic oligonucleotide
  Sense strand starting at position 2557 of SEQ ID NO: 915272
cagagauuguauggaagga

SEQ ID NO: 1067451 - RNA, 19 nt, Artificial Sequence
  Description of Artificial Sequence: Synthetic oligonucleotide
  Antisense strand to SEQ ID NO: 1067450
uccuuccauacaaucucug

SEQ ID NO: 1067452 - RNA, 19 nt, Artificial Sequence
  Description of Artificial Sequence: Synthetic oligonucleotide
  Sense strand starting at position 3038 of SEQ ID NO: 915272
gguacuuauuggccaccua

SEQ ID NO: 1067453 - RNA, 19 nt, Artificial Sequence
  Description of Artificial Sequence: Synthetic oligonucleotide
  Antisense strand to SEQ ID NO: 1067452
uagguggccaauaaguacc

SEQ ID NO: 1067454 - RNA, 19 nt, Artificial Sequence
  Description of Artificial Sequence: Synthetic oligonucleotide
  Sense strand starting at position 3063 of SEQ ID NO: 915272
ucggguaauguucaacgca

SEQ ID NO: 1067455 - RNA, 19 nt, Artificial Sequence
  Description of Artificial Sequence: Synthetic oligonucleotide
  Antisense strand to SEQ ID NO: 1067454
ugcguugaacauuacccga

SEQ ID NO: 1067456 - RNA, 19 nt, Artificial Sequence
  Description of Artificial Sequence: Synthetic oligonucleotide
  Sense strand starting at position 3099 of SEQ ID NO: 915272
aaguccugcccuugagaca

SEQ ID NO: 1067457 - RNA, 19 nt, Artificial Sequence
  Description of Artificial Sequence: Synthetic oligonucleotide
  Antisense strand to SEQ ID NO: 1067456
ugucucaagggcaggacuu

SEQ ID NO: 1067458 - RNA, 19 nt, Artificial Sequence
  Description of Artificial Sequence: Synthetic oligonucleotide
  Sense strand starting at position 3110 of SEQ ID NO: 915272
uugagacaccuguagucua

SEQ ID NO: 1067459 - RNA, 19 nt, Artificial Sequence
  Description of Artificial Sequence: Synthetic oligonucleotide
  Antisense strand to SEQ ID NO: 1067458
uagacuacaggugucucaa

SEQ ID NO: 1067460 - RNA, 19 nt, Artificial Sequence
  Description of Artificial Sequence: Synthetic oligonucleotide
  Sense strand starting at position 3184 of SEQ ID NO: 915272
ugauaagagcagcgauaua

SEQ ID NO: 1067461 - RNA, 19 nt, Artificial Sequence
  Description of Artificial Sequence: Synthetic oligonucleotide
  Antisense strand to SEQ ID NO: 1067460
uauaucgcugcucuuauca

SEQ ID NO: 1067462 - RNA, 19 nt, Artificial Sequence
  Description of Artificial Sequence: Synthetic oligonucleotide
  Sense strand starting at position 3591 of SEQ ID NO: 915272
gggacuugccugggucaca

SEQ ID NO: 1067463 - RNA, 19 nt, Artificial Sequence
  Description of Artificial Sequence: Synthetic oligonucleotide
  Antisense strand to SEQ ID NO: 1067462
ugugacccaggcaaguccc

SEQ ID NO: 1067464 - RNA, 19 nt, Artificial Sequence
  Description of Artificial Sequence: Synthetic oligonucleotide
  Sense strand starting at position 3642 of SEQ ID NO: 915272
uuggcauguccacaaaggu

SEQ ID NO: 1067465 - RNA, 19 nt, Artificial Sequence
  Description of Artificial Sequence: Synthetic oligonucleotide
  Antisense strand to SEQ ID NO: 1067464
accuuuguggacaugccaa

SEQ ID NO: 1067466 - RNA, 19 nt, Artificial Sequence
  Description of Artificial Sequence: Synthetic oligonucleotide
  Sense strand starting at position 3719 of SEQ ID NO: 915272
ccgucagcuccugguaaag

SEQ ID NO: 1067467 - RNA, 19 nt, Artificial Sequence
  Description of Artificial Sequence: Synthetic oligonucleotide
  Antisense strand to SEQ ID NO: 1067466
cuuuaccaggagcugacgg

SEQ ID NO: 1067468 - RNA, 19 nt, Artificial Sequence
  Description of Artificial Sequence: Synthetic oligonucleotide
  Sense strand starting at position 3721 of SEQ ID NO: 915272
gucagcuccugguaaagga

SEQ ID NO: 1067469 - RNA, 19 nt, Artificial Sequence
  Description of Artificial Sequence: Synthetic oligonucleotide
  Antisense strand to SEQ ID NO: 1067468
uccuuuaccaggagcugac

SEQ ID NO: 1067470 - RNA, 19 nt, Artificial Sequence
  Description of Artificial Sequence: Synthetic oligonucleotide
  Sense strand starting at position 3734 of SEQ ID NO: 915272
aaaggagugugagguguuu

SEQ ID NO: 1067471 - RNA, 19 nt, Artificial Sequence
  Description of Artificial Sequence: Synthetic oligonucleotide
  Antisense strand to SEQ ID NO: 1067470
aaacaccucacacuccuuu

SEQ ID NO: 1067472 - RNA, 19 nt, Artificial Sequence
  Description of Artificial Sequence: Synthetic oligonucleotide
  Sense strand starting at position 3980 of SEQ ID NO: 915272
gcacuuacauaucaggagu

SEQ ID NO: 1067473 - RNA, 19 nt, Artificial Sequence
  Description of Artificial Sequence: Synthetic oligonucleotide
  Antisense strand to SEQ ID NO: 1067472
acuccugauauguaagugc

SEQ ID NO: 1067474 - RNA, 19 nt, Artificial Sequence
  Description of Artificial Sequence: Synthetic oligonucleotide
  Sense strand starting at position 151 of SEQ ID NO: 915273
guuugucaggacugagaag

SEQ ID NO: 1067475 - RNA, 19 nt, Artificial Sequence
  Description of Artificial Sequence: Synthetic oligonucleotide
  Antisense strand to SEQ ID NO: 1067474
cuucucaguccugacaaac

SEQ ID NO: 1067476 - RNA, 19 nt, Artificial Sequence
  Description of Artificial Sequence: Synthetic oligonucleotide
  Sense strand starting at position 287 of SEQ ID NO: 915273
gcagguggucacugagaau

SEQ ID NO: 1067477 - RNA, 19 nt, Artificial Sequence
  Description of Artificial Sequence: Synthetic oligonucleotide
  Antisense strand to SEQ ID NO: 1067476
auucucagugaccaccugc

SEQ ID NO: 1067478 - RNA, 19 nt, Artificial Sequence
  Description of Artificial Sequence: Synthetic oligonucleotide
  Sense strand starting at position 379 of SEQ ID NO: 915273
ccacacagcuuauuggaau

SEQ ID NO: 1067479 - RNA, 19 nt, Artificial Sequence
  Description of Artificial Sequence: Synthetic oligonucleotide
  Antisense strand to SEQ ID NO: 1067478
auuccaauaagcugugugg

SEQ ID NO: 1067480 - RNA, 19 nt, Artificial Sequence
  Description of Artificial Sequence: Synthetic oligonucleotide
  Sense strand starting at position 395 of SEQ ID NO: 915273
aaucacuggcucugugaaa

SEQ ID NO: 1067481 - RNA, 19 nt, Artificial Sequence
  Description of Artificial Sequence: Synthetic oligonucleotide
  Antisense strand to SEQ ID NO: 1067480
uuucacagagccagugauu

SEQ ID NO: 1067482 - RNA, 19 nt, Artificial Sequence
  Description of Artificial Sequence: Synthetic oligonucleotide
  Sense strand starting at position 454 of SEQ ID NO: 915273
gggucaccauuacuaucau

SEQ ID NO: 1067483 - RNA, 19 nt, Artificial Sequence
  Description of Artificial Sequence: Synthetic oligonucleotide
  Antisense strand to SEQ ID NO: 1067482
augauaguaauggugaccc

SEQ ID NO: 1067484 - RNA, 19 nt, Artificial Sequence
  Description of Artificial Sequence: Synthetic oligonucleotide
  Sense strand starting at position 498 of SEQ ID NO: 915273
auuucuauguaucagagau

SEQ ID NO: 1067485 - RNA, 19 nt, Artificial Sequence
  Description of Artificial Sequence: Synthetic oligonucleotide
  Antisense strand to SEQ ID NO: 1067484
aucucugauacauagaaau

SEQ ID NO: 1067486 - RNA, 19 nt, Artificial Sequence
  Description of Artificial Sequence: Synthetic oligonucleotide
  Sense strand starting at position 502 of SEQ ID NO: 915273
cuauguaucagagauugug

SEQ ID NO: 1067487 - RNA, 19 nt, Artificial Sequence
  Description of Artificial Sequence: Synthetic oligonucleotide
  Antisense strand to SEQ ID NO: 1067486
cacaaucucugauacauag

SEQ ID NO: 1067488 - RNA, 19 nt, Artificial Sequence
  Description of Artificial Sequence: Synthetic oligonucleotide
  Sense strand starting at position 539 of SEQ ID NO: 915273
ggcacucagucaguccuaa

SEQ ID NO: 1067489 - RNA, 19 nt, Artificial Sequence
  Description of Artificial Sequence: Synthetic oligonucleotide
  Antisense strand to SEQ ID NO: 1067488
uuaggacugacugagugcc

SEQ ID NO: 1067490 - RNA, 19 nt, Artificial Sequence
  Description of Artificial Sequence: Synthetic oligonucleotide
  Sense strand starting at position 674 of SEQ ID NO: 915273
ucucuaauauuucugcguu

SEQ ID NO: 1067491 - RNA, 19 nt, Artificial Sequence
  Description of Artificial Sequence: Synthetic oligonucleotide
  Antisense strand to SEQ ID NO: 1067490
aacgcagaaauauuagaga

SEQ ID NO: 1067492 - RNA, 19 nt, Artificial Sequence
  Description of Artificial Sequence: Synthetic oligonucleotide
  Sense strand starting at position 678 of SEQ ID NO: 915273
uaauauuucugcguuugcu

SEQ ID NO: 1067493 - RNA, 19 nt, Artificial Sequence
  Description of Artificial Sequence: Synthetic oligonucleotide
  Antisense strand to SEQ ID NO: 1067492
agcaaacgcagaaauauua

SEQ ID NO: 1067494 - RNA, 19 nt, Artificial Sequence
  Description of Artificial Sequence: Synthetic oligonucleotide
  Sense strand starting at position 681 of SEQ ID NO: 915273
uauuucugcguuugcuuaa

SEQ ID NO: 1067495 - RNA, 19 nt, Artificial Sequence
  Description of Artificial Sequence: Synthetic oligonucleotide
  Antisense strand to SEQ ID NO: 1067494
uuaagcaaacgcagaaaua

SEQ ID NO: 1067496 - RNA, 19 nt, Artificial Sequence
  Description of Artificial Sequence: Synthetic oligonucleotide
  Sense strand starting at position 682 of SEQ ID NO: 915273
auuucugcguuugcuuaaa

SEQ ID NO: 1067497 - RNA, 19 nt, Artificial Sequence
  Description of Artificial Sequence: Synthetic oligonucleotide
  Antisense strand to SEQ ID NO: 1067496
uuuaagcaaacgcagaaau

SEQ ID NO: 1067498 - RNA, 19 nt, Artificial Sequence
  Description of Artificial Sequence: Synthetic oligonucleotide
  Sense strand starting at position 983 of SEQ ID NO: 915273
uacaucucaguuugggaga

SEQ ID NO: 1067499 - RNA, 19 nt, Artificial Sequence
  Description of Artificial Sequence: Synthetic oligonucleotide
  Antisense strand to SEQ ID NO: 1067498
ucucccaaacugagaugua

SEQ ID NO: 1067500 - RNA, 19 nt, Artificial Sequence
  Description of Artificial Sequence: Synthetic oligonucleotide
  Sense strand starting at position 1508 of SEQ ID NO: 915273
gucacucagagcuauagag

SEQ ID NO: 1067501 - RNA, 19 nt, Artificial Sequence
  Description of Artificial Sequence: Synthetic oligonucleotide
  Antisense strand to SEQ ID NO: 1067500
cucuauagcucugagugac

SEQ ID NO: 1067502 - RNA, 19 nt, Artificial Sequence
  Description of Artificial Sequence: Synthetic oligonucleotide
  Sense strand starting at position 1512 of SEQ ID NO: 915273
cucagagcuauagagaguu

SEQ ID NO: 1067503 - RNA, 19 nt, Artificial Sequence
  Description of Artificial Sequence: Synthetic oligonucleotide
  Antisense strand to SEQ ID NO: 1067502
aacucucuauagcucugag

SEQ ID NO: 1067504 - RNA, 19 nt, Artificial Sequence
  Description of Artificial Sequence: Synthetic oligonucleotide
  Sense strand starting at position 1518 of SEQ ID NO: 915273
gcuauagagaguugcaaug

SEQ ID NO: 1067505 - RNA, 19 nt, Artificial Sequence
  Description of Artificial Sequence: Synthetic oligonucleotide
  Antisense strand to SEQ ID NO: 1067504
cauugcaacucucuauagc

SEQ ID NO: 1067506 - RNA, 19 nt, Artificial Sequence
  Description of Artificial Sequence: Synthetic oligonucleotide
  Sense strand starting at position 1560 of SEQ ID NO: 915273
cacugugauccauggguca

SEQ ID NO: 1067507 - RNA, 19 nt, Artificial Sequence
  Description of Artificial Sequence: Synthetic oligonucleotide
  Antisense strand to SEQ ID NO: 1067506
ugacccauggaucacagug

SEQ ID NO: 1067508 - RNA, 19 nt, Artificial Sequence
  Description of Artificial Sequence: Synthetic oligonucleotide
  Sense strand starting at position 1562 of SEQ ID NO: 915273
cugugauccaugggucaca

SEQ ID NO: 1067509 - RNA, 19 nt, Artificial Sequence
  Description of Artificial Sequence: Synthetic oligonucleotide
  Antisense strand to SEQ ID NO: 1067508
ugugacccauggaucacag

SEQ ID NO: 1067510 - RNA, 19 nt, Artificial Sequence
  Description of Artificial Sequence: Synthetic oligonucleotide
  Sense strand starting at position 1695 of SEQ ID NO: 915273
cgcucacaguaaucauuua

SEQ ID NO: 1067511 - RNA, 19 nt, Artificial Sequence
  Description of Artificial Sequence: Synthetic oligonucleotide
  Antisense strand to SEQ ID NO: 1067510
uaaaugauuacugugagcg

SEQ ID NO: 1067512 - RNA, 19 nt, Artificial Sequence
  Description of Artificial Sequence: Synthetic oligonucleotide
  Sense strand starting at position 2083 of SEQ ID NO: 915273
ggaggugaugucuggaaga

SEQ ID NO: 1067513 - RNA, 19 nt, Artificial Sequence
  Description of Artificial Sequence: Synthetic oligonucleotide
  Antisense strand to SEQ ID NO: 1067512
ucuuccagacaucaccucc

SEQ ID NO: 1067514 - RNA, 19 nt, Artificial Sequence
  Description of Artificial Sequence: Synthetic oligonucleotide
  Sense strand starting at position 2234 of SEQ ID NO: 915273
cuggguaucaaauggugau

SEQ ID NO: 1067515 - RNA, 19 nt, Artificial Sequence
  Description of Artificial Sequence: Synthetic oligonucleotide
  Antisense strand to SEQ ID NO: 1067514
aucaccauuugauacccag

SEQ ID NO: 1067516 - RNA, 19 nt, Artificial Sequence
  Description of Artificial Sequence: Synthetic oligonucleotide
  Sense strand starting at position 2235 of SEQ ID NO: 915273
uggguaucaaauggugauu

SEQ ID NO: 1067517 - RNA, 19 nt, Artificial Sequence
  Description of Artificial Sequence: Synthetic oligonucleotide
  Antisense strand to SEQ ID NO: 1067516
aaucaccauuugauaccca

SEQ ID NO: 1067518 - RNA, 19 nt, Artificial Sequence
  Description of Artificial Sequence: Synthetic oligonucleotide
  Sense strand starting at position 2399 of SEQ ID NO: 915273
auagcaauucuggagguau

SEQ ID NO: 1067519 - RNA, 19 nt, Artificial Sequence
  Description of Artificial Sequence: Synthetic oligonucleotide
  Antisense strand to SEQ ID NO: 1067518
auaccuccagaauugcuau

SEQ ID NO: 1067520 - RNA, 19 nt, Artificial Sequence
  Description of Artificial Sequence: Synthetic oligonucleotide
  Sense strand starting at position 2401 of SEQ ID NO: 915273
agcaauucuggagguauua

SEQ ID NO: 1067521 - RNA, 19 nt, Artificial Sequence
  Description of Artificial Sequence: Synthetic oligonucleotide
  Antisense strand to SEQ ID NO: 1067520
uaauaccuccagaauugcu

SEQ ID NO: 1067522 - RNA, 19 nt, Artificial Sequence
  Description of Artificial Sequence: Synthetic oligonucleotide
  Sense strand starting at position 2601 of SEQ ID NO: 915273
auaacaaucccaggagcuu

SEQ ID NO: 1067523 - RNA, 19 nt, Artificial Sequence
  Description of Artificial Sequence: Synthetic oligonucleotide
  Antisense strand to SEQ ID NO: 1067522
aagcuccugggauuguuau

SEQ ID NO: 1067524 - RNA, 19 nt, Artificial Sequence
  Description of Artificial Sequence: Synthetic oligonucleotide
  Sense strand starting at position 2662 of SEQ ID NO: 915273
gggagauuagcuugcucug

SEQ ID NO: 1067525 - RNA, 19 nt, Artificial Sequence
  Description of Artificial Sequence: Synthetic oligonucleotide
  Antisense strand to SEQ ID NO: 1067524
cagagcaagcuaaucuccc

SEQ ID NO: 1067526 - RNA, 19 nt, Artificial Sequence
  Description of Artificial Sequence: Synthetic oligonucleotide
  Sense strand starting at position 2767 of SEQ ID NO: 915273
cacaguuggugucucauca

SEQ ID NO: 1067527 - RNA, 19 nt, Artificial Sequence
  Description of Artificial Sequence: Synthetic oligonucleotide
  Antisense strand to SEQ ID NO: 1067526
ugaugagacaccaacugug

SEQ ID NO: 1067528 - RNA, 19 nt, Artificial Sequence
  Description of Artificial Sequence: Synthetic oligonucleotide
  Sense strand starting at position 3032 of SEQ ID NO: 915273
uggaguugguaaucuagug

SEQ ID NO: 1067529 - RNA, 19 nt, Artificial Sequence
  Description of Artificial Sequence: Synthetic oligonucleotide
  Antisense strand to SEQ ID NO: 1067528
cacuagauuaccaacucca

SEQ ID NO: 1067530 - RNA, 19 nt, Artificial Sequence
  Description of Artificial Sequence: Synthetic oligonucleotide
  Sense strand starting at position 3038 of SEQ ID NO: 915273
ugguaaucuagugggaaac

SEQ ID NO: 1067531 - RNA, 19 nt, Artificial Sequence
  Description of Artificial Sequence: Synthetic oligonucleotide
  Antisense strand to SEQ ID NO: 1067530
guuucccacuagauuacca

SEQ ID NO: 1067532 - RNA, 19 nt, Artificial Sequence
  Description of Artificial Sequence: Synthetic oligonucleotide
  Sense strand starting at position 3039 of SEQ ID NO: 915273
gguaaucuagugggaaaca

SEQ ID NO: 1067533 - RNA, 19 nt, Artificial Sequence
  Description of Artificial Sequence: Synthetic oligonucleotide
  Antisense strand to SEQ ID NO: 1067532
uguuucccacuagauuacc

SEQ ID NO: 1067534 - RNA, 19 nt, Artificial Sequence
  Description of Artificial Sequence: Synthetic oligonucleotide
  Sense strand starting at position 3241 of SEQ ID NO: 915273
guuagacuuagccagguga

SEQ ID NO: 1067535 - RNA, 19 nt, Artificial Sequence
  Description of Artificial Sequence: Synthetic oligonucleotide
  Antisense strand to SEQ ID NO: 1067534
ucaccuggcuaagucuaac

SEQ ID NO: 1067536 - RNA, 19 nt, Artificial Sequence
  Description of Artificial Sequence: Synthetic oligonucleotide
  Sense strand starting at position 3243 of SEQ ID NO: 915273
uagacuuagccaggugaag

SEQ ID NO: 1067537 - RNA, 19 nt, Artificial Sequence
  Description of Artificial Sequence: Synthetic oligonucleotide
  Antisense strand to SEQ ID NO: 1067536
cuucaccuggcuaagucua

SEQ ID NO: 1067538 - RNA, 19 nt, Artificial Sequence
  Description of Artificial Sequence: Synthetic oligonucleotide
  Sense strand starting at position 3329 of SEQ ID NO: 915273
cugucaauguucuugagag

SEQ ID NO: 1067539 - RNA, 19 nt, Artificial Sequence
  Description of Artificial Sequence: Synthetic oligonucleotide
  Antisense strand to SEQ ID NO: 1067538
cucucaagaacauugacag

SEQ ID NO: 1067540 - RNA, 19 nt, Artificial Sequence
  Description of Artificial Sequence: Synthetic oligonucleotide
  Sense strand starting at position 3331 of SEQ ID NO: 915273
gucaauguucuugagagag

SEQ ID NO: 1067541 - RNA, 19 nt, Artificial Sequence
  Description of Artificial Sequence: Synthetic oligonucleotide
  Antisense strand to SEQ ID NO: 1067540
cucucucaagaacauugac

SEQ ID NO: 1067542 - RNA, 19 nt, Artificial Sequence
  Description of Artificial Sequence: Synthetic oligonucleotide
  Sense strand starting at position 3337 of SEQ ID NO: 915273
guucuugagagaggugaca

SEQ ID NO: 1067543 - RNA, 19 nt, Artificial Sequence
  Description of Artificial Sequence: Synthetic oligonucleotide
  Antisense strand to SEQ ID NO: 1067542
ugucaccucucucaagaac

SEQ ID NO: 1067544 - RNA, 19 nt, Artificial Sequence
  Description of Artificial Sequence: Synthetic oligonucleotide
  Sense strand starting at position 3348 of SEQ ID NO: 915273
aggugacaauucuuggacu

SEQ ID NO: 1067545 - RNA, 19 nt, Artificial Sequence
  Description of Artificial Sequence: Synthetic oligonucleotide
  Antisense strand to SEQ ID NO: 1067544
aguccaagaauugucaccu

SEQ ID NO: 1067546 - RNA, 19 nt, Artificial Sequence
  Description of Artificial Sequence: Synthetic oligonucleotide
  Sense strand starting at position 3350 of SEQ ID NO: 915273
gugacaauucuuggacucu

SEQ ID NO: 1067547 - RNA, 19 nt, Artificial Sequence
  Description of Artificial Sequence: Synthetic oligonucleotide
  Antisense strand to SEQ ID NO: 1067546
agaguccaagaauugucac

SEQ ID NO: 1067548 - RNA, 19 nt, Artificial Sequence
  Description of Artificial Sequence: Synthetic oligonucleotide
  Sense strand starting at position 3551 of SEQ ID NO: 915273
ucacacucuucccuaggua

SEQ ID NO: 1067549 - RNA, 19 nt, Artificial Sequence
  Description of Artificial Sequence: Synthetic oligonucleotide
  Antisense strand to SEQ ID NO: 1067548
uaccuagggaagaguguga

SEQ ID NO: 1067550 - RNA, 19 nt, Artificial Sequence
  Description of Artificial Sequence: Synthetic oligonucleotide
  Sense strand starting at position 3834 of SEQ ID NO: 915273
agacuaccgacuggagauu

SEQ ID NO: 1067551 - RNA, 19 nt, Artificial Sequence
  Description of Artificial Sequence: Synthetic oligonucleotide
  Antisense strand to SEQ ID NO: 1067550
aaucuccagucgguagucu

SEQ ID NO: 1067552 - RNA, 19 nt, Artificial Sequence
  Description of Artificial Sequence: Synthetic oligonucleotide
  Sense strand starting at position 3848 of SEQ ID NO: 915273
agauuauugcaaugcaugu

SEQ ID NO: 1067553 - RNA, 19 nt, Artificial Sequence
  Description of Artificial Sequence: Synthetic oligonucleotide
  Antisense strand to SEQ ID NO: 1067552
acaugcauugcaauaaucu

SEQ ID NO: 1067554 - RNA, 19 nt, Artificial Sequence
  Description of Artificial Sequence: Synthetic oligonucleotide
  Sense strand starting at position 13 of SEQ ID NO: 915274
uaaccucuuccuugggagu

SEQ ID NO: 1067555 - RNA, 19 nt, Artificial Sequence
  Description of Artificial Sequence: Synthetic oligonucleotide
  Antisense strand to SEQ ID NO: 1067554
acucccaaggaagagguua

SEQ ID NO: 1067556 - RNA, 19 nt, Artificial Sequence
  Description of Artificial Sequence: Synthetic oligonucleotide
  Sense strand starting at position 14 of SEQ ID NO: 915274
aaccucuuccuugggaguu

SEQ ID NO: 1067557 - RNA, 19 nt, Artificial Sequence
  Description of Artificial Sequence: Synthetic oligonucleotide
  Antisense strand to SEQ ID NO: 1067556
aacucccaaggaagagguu

SEQ ID NO: 1067558 - RNA, 19 nt, Artificial Sequence
  Description of Artificial Sequence: Synthetic oligonucleotide
  Sense strand starting at position 26 of SEQ ID NO: 915274
gggaguuuauaaguuuaca

SEQ ID NO: 1067559 - RNA, 19 nt, Artificial Sequence
  Description of Artificial Sequence: Synthetic oligonucleotide
  Antisense strand to SEQ ID NO: 1067558
uguaaacuuauaaacuccc

SEQ ID NO: 1067560 - RNA, 19 nt, Artificial Sequence
  Description of Artificial Sequence: Synthetic oligonucleotide
  Sense strand starting at position 66 of SEQ ID NO: 915274
gggccagaauccuccaaca

SEQ ID NO: 1067561 - RNA, 19 nt, Artificial Sequence
  Description of Artificial Sequence: Synthetic oligonucleotide
  Antisense strand to SEQ ID NO: 1067560
uguuggaggauucuggccc

SEQ ID NO: 1067562 - RNA, 19 nt, Artificial Sequence
  Description of Artificial Sequence: Synthetic oligonucleotide
  Sense strand starting at position 109 of SEQ ID NO: 915274
acagcuuuggaguguagaa

SEQ ID NO: 1067563 - RNA, 19 nt, Artificial Sequence
  Description of Artificial Sequence: Synthetic oligonucleotide
  Antisense strand to SEQ ID NO: 1067562
uucuacacuccaaagcugu

SEQ ID NO: 1067564 - RNA, 19 nt, Artificial Sequence
  Description of Artificial Sequence: Synthetic oligonucleotide
  Sense strand starting at position 119 of SEQ ID NO: 915274
aguguagaaaguuggaguu

SEQ ID NO: 1067565 - RNA, 19 nt, Artificial Sequence
  Description of Artificial Sequence: Synthetic oligonucleotide
  Antisense strand to SEQ ID NO: 1067564
aacuccaacuuucuacacu

SEQ ID NO: 1067566 - RNA, 19 nt, Artificial Sequence
  Description of Artificial Sequence: Synthetic oligonucleotide
  Sense strand starting at position 131 of SEQ ID NO: 915274
uggaguucgaauuguagac

SEQ ID NO: 1067567 - RNA, 19 nt, Artificial Sequence
  Description of Artificial Sequence: Synthetic oligonucleotide
  Antisense strand to SEQ ID NO: 1067566
gucuacaauucgaacucca

SEQ ID NO: 1067568 - RNA, 19 nt, Artificial Sequence
  Description of Artificial Sequence: Synthetic oligonucleotide
  Sense strand starting at position 135 of SEQ ID NO: 915274
guucgaauuguagacuucu

SEQ ID NO: 1067569 - RNA, 19 nt, Artificial Sequence
  Description of Artificial Sequence: Synthetic oligonucleotide
  Antisense strand to SEQ ID NO: 1067568
agaagucuacaauucgaac

SEQ ID NO: 1067570 - RNA, 19 nt, Artificial Sequence
  Description of Artificial Sequence: Synthetic oligonucleotide
  Sense strand starting at position 146 of SEQ ID NO: 915274
agacuucuagaauguuuga

SEQ ID NO: 1067571 - RNA, 19 nt, Artificial Sequence
  Description of Artificial Sequence: Synthetic oligonucleotide
  Antisense strand to SEQ ID NO: 1067570
ucaaacauucuagaagucu

SEQ ID NO: 1067572 - RNA, 19 nt, Artificial Sequence
  Description of Artificial Sequence: Synthetic oligonucleotide
  Sense strand starting at position 149 of SEQ ID NO: 915274
cuucuagaauguuugagua

SEQ ID NO: 1067573 - RNA, 19 nt, Artificial Sequence
  Description of Artificial Sequence: Synthetic oligonucleotide
  Antisense strand to SEQ ID NO: 1067572
uacucaaacauucuagaag

SEQ ID NO: 1067574 - RNA, 19 nt, Artificial Sequence
  Description of Artificial Sequence: Synthetic oligonucleotide
  Sense strand starting at position 294 of SEQ ID NO: 915274
gacagcuggccuuaucacu

SEQ ID NO: 1067575 - RNA, 19 nt, Artificial Sequence
  Description of Artificial Sequence: Synthetic oligonucleotide
  Antisense strand to SEQ ID NO: 1067574
agugauaaggccagcuguc

SEQ ID NO: 1067576 - RNA, 19 nt, Artificial Sequence
  Description of Artificial Sequence: Synthetic oligonucleotide
  Sense strand starting at position 299 of SEQ ID NO: 915274
cuggccuuaucacucagaa

SEQ ID NO: 1067577 - RNA, 19 nt, Artificial Sequence
  Description of Artificial Sequence: Synthetic oligonucleotide
  Antisense strand to SEQ ID NO: 1067576
uucugagugauaaggccag

SEQ ID NO: 1067578 - RNA, 19 nt, Artificial Sequence
  Description of Artificial Sequence: Synthetic oligonucleotide
  Sense strand starting at position 572 of SEQ ID NO: 915274
gggcaacuccucuaaacug

SEQ ID NO: 1067579 - RNA, 19 nt, Artificial Sequence
  Description of Artificial Sequence: Synthetic oligonucleotide
  Antisense strand to SEQ ID NO: 1067578
caguuuagaggaguugccc

SEQ ID NO: 1067580 - RNA, 19 nt, Artificial Sequence
  Description of Artificial Sequence: Synthetic oligonucleotide
  Sense strand starting at position 882 of SEQ ID NO: 915274
guuugucaggacugagaag

SEQ ID NO: 1067581 - RNA, 19 nt, Artificial Sequence
  Description of Artificial Sequence: Synthetic oligonucleotide
  Antisense strand to SEQ ID NO: 1067580
cuucucaguccugacaaac

SEQ ID NO: 1067582 - RNA, 19 nt, Artificial Sequence
  Description of Artificial Sequence: Synthetic oligonucleotide
  Sense strand starting at position 1018 of SEQ ID NO: 915274
gcagguggucacugagaau

SEQ ID NO: 1067583 - RNA, 19 nt, Artificial Sequence
  Description of Artificial Sequence: Synthetic oligonucleotide
  Antisense strand to SEQ ID NO: 1067582
auucucagugaccaccugc

SEQ ID NO: 1067584 - RNA, 19 nt, Artificial Sequence
  Description of Artificial Sequence: Synthetic oligonucleotide
  Sense strand starting at position 1110 of SEQ ID NO: 915274
ccacacagcuuauuggaau

SEQ ID NO: 1067585 - RNA, 19 nt, Artificial Sequence
  Description of Artificial Sequence: Synthetic oligonucleotide
  Antisense strand to SEQ ID NO: 1067584
auuccaauaagcugugugg

SEQ ID NO: 1067586 - RNA, 19 nt, Artificial Sequence
  Description of Artificial Sequence: Synthetic oligonucleotide
  Sense strand starting at position 1126 of SEQ ID NO: 915274
aaucacuggcucugugaaa

SEQ ID NO: 1067587 - RNA, 19 nt, Artificial Sequence
  Description of Artificial Sequence: Synthetic oligonucleotide
  Antisense strand to SEQ ID NO: 1067586
uuucacagagccagugauu

SEQ ID NO: 1067588 - RNA, 19 nt, Artificial Sequence
  Description of Artificial Sequence: Synthetic oligonucleotide
  Sense strand starting at position 1185 of SEQ ID NO: 915274
gggucaccauuacuaucau

SEQ ID NO: 1067589 - RNA, 19 nt, Artificial Sequence
  Description of Artificial Sequence: Synthetic oligonucleotide
  Antisense strand to SEQ ID NO: 1067588
augauaguaauggugaccc

SEQ ID NO: 1067590 - RNA, 19 nt, Artificial Sequence
  Description of Artificial Sequence: Synthetic oligonucleotide
  Sense strand starting at position 1229 of SEQ ID NO: 915274
auuucuauguaucagagau

SEQ ID NO: 1067591 - RNA, 19 nt, Artificial Sequence
  Description of Artificial Sequence: Synthetic oligonucleotide
  Antisense strand to SEQ ID NO: 1067590
aucucugauacauagaaau

SEQ ID NO: 1067592 - RNA, 19 nt, Artificial Sequence
  Description of Artificial Sequence: Synthetic oligonucleotide
  Sense strand starting at position 1233 of SEQ ID NO: 915274
cuauguaucagagauugug

SEQ ID NO: 1067593 - RNA, 19 nt, Artificial Sequence
  Description of Artificial Sequence: Synthetic oligonucleotide
  Antisense strand to SEQ ID NO: 1067592
cacaaucucugauacauag

SEQ ID NO: 1067594 - RNA, 19 nt, Artificial Sequence
  Description of Artificial Sequence: Synthetic oligonucleotide
  Sense strand starting at position 1405 of SEQ ID NO: 915274
ucucuaauauuucugcguu

SEQ ID NO: 1067595 - RNA, 19 nt, Artificial Sequence
  Description of Artificial Sequence: Synthetic oligonucleotide
  Antisense strand to SEQ ID NO: 1067594
aacgcagaaauauuagaga

SEQ ID NO: 1067596 - RNA, 19 nt, Artificial Sequence
  Description of Artificial Sequence: Synthetic oligonucleotide
  Sense strand starting at position 1413 of SEQ ID NO: 915274
auuucugcguuugcuuaaa

SEQ ID NO: 1067597 - RNA, 19 nt, Artificial Sequence
  Description of Artificial Sequence: Synthetic oligonucleotide
  Antisense strand to SEQ ID NO: 1067596
uuuaagcaaacgcagaaau

SEQ ID NO: 1067598 - RNA, 19 nt, Artificial Sequence
  Description of Artificial Sequence: Synthetic oligonucleotide
  Sense strand starting at position 1714 of SEQ ID NO: 915274
uacaucucaguuugggaga

SEQ ID NO: 1067599 - RNA, 19 nt, Artificial Sequence
  Description of Artificial Sequence: Synthetic oligonucleotide
  Antisense strand to SEQ ID NO: 1067598
ucucccaaacugagaugua

SEQ ID NO: 1067600 - RNA, 19 nt, Artificial Sequence
  Description of Artificial Sequence: Synthetic oligonucleotide
  Sense strand starting at position 2239 of SEQ ID NO: 915274
gucacucagagcuauagag

SEQ ID NO: 1067601 - RNA, 19 nt, Artificial Sequence
  Description of Artificial Sequence: Synthetic oligonucleotide
  Antisense strand to SEQ ID NO: 1067600
cucuauagcucugagugac

SEQ ID NO: 1067602 - RNA, 19 nt, Artificial Sequence
  Description of Artificial Sequence: Synthetic oligonucleotide
  Sense strand starting at position 2243 of SEQ ID NO: 915274
cucagagcuauagagaguu

SEQ ID NO: 1067603 - RNA, 19 nt, Artificial Sequence
  Description of Artificial Sequence: Synthetic oligonucleotide
  Antisense strand to SEQ ID NO: 1067602
aacucucuauagcucugag

SEQ ID NO: 1067604 - RNA, 19 nt, Artificial Sequence
  Description of Artificial Sequence: Synthetic oligonucleotide
  Sense strand starting at position 2249 of SEQ ID NO: 915274
gcuauagagaguugcaaug

SEQ ID NO: 1067605 - RNA, 19 nt, Artificial Sequence
  Description of Artificial Sequence: Synthetic oligonucleotide
  Antisense strand to SEQ ID NO: 1067604
cauugcaacucucuauagc

SEQ ID NO: 1067606 - RNA, 19 nt, Artificial Sequence
  Description of Artificial Sequence: Synthetic oligonucleotide
  Sense strand starting at position 2291 of SEQ ID NO: 915274
cacugugauccauggguca

SEQ ID NO: 1067607 - RNA, 19 nt, Artificial Sequence
  Description of Artificial Sequence: Synthetic oligonucleotide
  Antisense strand to SEQ ID NO: 1067606
ugacccauggaucacagug

SEQ ID NO: 1067608 - RNA, 19 nt, Artificial Sequence
  Description of Artificial Sequence: Synthetic oligonucleotide
  Sense strand starting at position 2293 of SEQ ID NO: 915274
cugugauccaugggucaca

SEQ ID NO: 1067609 - RNA, 19 nt, Artificial Sequence
  Description of Artificial Sequence: Synthetic oligonucleotide
  Antisense strand to SEQ ID NO: 1067608
ugugacccauggaucacag

SEQ ID NO: 1067610 - RNA, 19 nt, Artificial Sequence
  Description of Artificial Sequence: Synthetic oligonucleotide
  Sense strand starting at position 2426 of SEQ ID NO: 915274
cgcucacaguaaucauuua

SEQ ID NO: 1067611 - RNA, 19 nt, Artificial Sequence
  Description of Artificial Sequence: Synthetic oligonucleotide
  Antisense strand to SEQ ID NO: 1067610
uaaaugauuacugugagcg

SEQ ID NO: 1067612 - RNA, 19 nt, Artificial Sequence
  Description of Artificial Sequence: Synthetic oligonucleotide
  Sense strand starting at position 2814 of SEQ ID NO: 915274
ggaggugaugucuggaaga

SEQ ID NO: 1067613 - RNA, 19 nt, Artificial Sequence
  Description of Artificial Sequence: Synthetic oligonucleotide
  Antisense strand to SEQ ID NO: 1067612
ucuuccagacaucaccucc

SEQ ID NO: 1067614 - RNA, 19 nt, Artificial Sequence
  Description of Artificial Sequence: Synthetic oligonucleotide
  Sense strand starting at position 2965 of SEQ ID NO: 915274
cuggguaucaaauggugau

SEQ ID NO: 1067615 - RNA, 19 nt, Artificial Sequence
  Description of Artificial Sequence: Synthetic oligonucleotide
  Antisense strand to SEQ ID NO: 1067614
aucaccauuugauacccag

SEQ ID NO: 1067616 - RNA, 19 nt, Artificial Sequence
  Description of Artificial Sequence: Synthetic oligonucleotide
  Sense strand starting at position 2966 of SEQ ID NO: 915274
uggguaucaaauggugauu

SEQ ID NO: 1067617 - RNA, 19 nt, Artificial Sequence
  Description of Artificial Sequence: Synthetic oligonucleotide
  Antisense strand to SEQ ID NO: 1067616
aaucaccauuugauaccca

SEQ ID NO: 1067618 - RNA, 19 nt, Artificial Sequence
  Description of Artificial Sequence: Synthetic oligonucleotide
  Sense strand starting at position 3130 of SEQ ID NO: 915274
auagcaauucuggagguau

SEQ ID NO: 1067619 - RNA, 19 nt, Artificial Sequence
  Description of Artificial Sequence: Synthetic oligonucleotide
  Antisense strand to SEQ ID NO: 1067618
auaccuccagaauugcuau

SEQ ID NO: 1067620 - RNA, 19 nt, Artificial Sequence
  Description of Artificial Sequence: Synthetic oligonucleotide
  Sense strand starting at position 3132 of SEQ ID NO: 915274
agcaauucuggagguauua

SEQ ID NO: 1067621 - RNA, 19 nt, Artificial Sequence
  Description of Artificial Sequence: Synthetic oligonucleotide
  Antisense strand to SEQ ID NO: 1067620
uaauaccuccagaauugcu

SEQ ID NO: 1067622 - RNA, 19 nt, Artificial Sequence
  Description of Artificial Sequence: Synthetic oligonucleotide
  Sense strand starting at position 3332 of SEQ ID NO: 915274
auaacaaucccaggagcuu

SEQ ID NO: 1067623 - RNA, 19 nt, Artificial Sequence
  Description of Artificial Sequence: Synthetic oligonucleotide
  Antisense strand to SEQ ID NO: 1067622
aagcuccugggauuguuau

SEQ ID NO: 1067624 - RNA, 19 nt, Artificial Sequence
  Description of Artificial Sequence: Synthetic oligonucleotide
  Sense strand starting at position 3763 of SEQ ID NO: 915274
uggaguugguaaucuagug

SEQ ID NO: 1067625 - RNA, 19 nt, Artificial Sequence
  Description of Artificial Sequence: Synthetic oligonucleotide
  Antisense strand to SEQ ID NO: 1067624
cacuagauuaccaacucca

SEQ ID NO: 1067626 - RNA, 19 nt, Artificial Sequence
  Description of Artificial Sequence: Synthetic oligonucleotide
  Sense strand starting at position 3769 of SEQ ID NO: 915274
ugguaaucuagugggaaac

SEQ ID NO: 1067627 - RNA, 19 nt, Artificial Sequence
  Description of Artificial Sequence: Synthetic oligonucleotide
  Antisense strand to SEQ ID NO: 1067626
guuucccacuagauuacca

SEQ ID NO: 1067628 - RNA, 19 nt, Artificial Sequence
  Description of Artificial Sequence: Synthetic oligonucleotide
  Sense strand starting at position 3770 of SEQ ID NO: 915274
gguaaucuagugggaaaca

SEQ ID NO: 1067629 - RNA, 19 nt, Artificial Sequence
  Description of Artificial Sequence: Synthetic oligonucleotide
  Antisense strand to SEQ ID NO: 1067628
uguuucccacuagauuacc

SEQ ID NO: 1067630 - RNA, 19 nt, Artificial Sequence
  Description of Artificial Sequence: Synthetic oligonucleotide
  Sense strand starting at position 3972 of SEQ ID NO: 915274
guuagacuuagccagguga

SEQ ID NO: 1067631 - RNA, 19 nt, Artificial Sequence
  Description of Artificial Sequence: Synthetic oligonucleotide
  Antisense strand to SEQ ID NO: 1067630
ucaccuggcuaagucuaac

SEQ ID NO: 1067632 - RNA, 19 nt, Artificial Sequence
  Description of Artificial Sequence: Synthetic oligonucleotide
  Sense strand starting at position 3974 of SEQ ID NO: 915274
uagacuuagccaggugaag

SEQ ID NO: 1067633 - RNA, 19 nt, Artificial Sequence
  Description of Artificial Sequence: Synthetic oligonucleotide
  Antisense strand to SEQ ID NO: 1067632
cuucaccuggcuaagucua

SEQ ID NO: 1067634 - RNA, 19 nt, Artificial Sequence
  Description of Artificial Sequence: Synthetic oligonucleotide
  Sense strand starting at position 17 of SEQ ID NO: 915275
gcucaaugcugaccucaca

SEQ ID NO: 1067635 - RNA, 19 nt, Artificial Sequence
  Description of Artificial Sequence: Synthetic oligonucleotide
  Antisense strand to SEQ ID NO: 1067634
ugugaggucagcauugagc

SEQ ID NO: 1067636 - RNA, 19 nt, Artificial Sequence
  Description of Artificial Sequence: Synthetic oligonucleotide
  Sense strand starting at position 198 of SEQ ID NO: 915275
guuugucaggacugagaag

SEQ ID NO: 1067637 - RNA, 19 nt, Artificial Sequence
  Description of Artificial Sequence: Synthetic oligonucleotide
  Antisense strand to SEQ ID NO: 1067636
cuucucaguccugacaaac

SEQ ID NO: 1067638 - RNA, 19 nt, Artificial Sequence
  Description of Artificial Sequence: Synthetic oligonucleotide
  Sense strand starting at position 334 of SEQ ID NO: 915275
gcagguggucacugagaau

SEQ ID NO: 1067639 - RNA, 19 nt, Artificial Sequence
  Description of Artificial Sequence: Synthetic oligonucleotide
  Antisense strand to SEQ ID NO: 1067638
auucucagugaccaccugc

SEQ ID NO: 1067640 - RNA, 19 nt, Artificial Sequence
  Description of Artificial Sequence: Synthetic oligonucleotide
  Sense strand starting at position 426 of SEQ ID NO: 915275
ccacacagcuuauuggaau

SEQ ID NO: 1067641 - RNA, 19 nt, Artificial Sequence
  Description of Artificial Sequence: Synthetic oligonucleotide
  Antisense strand to SEQ ID NO: 1067640
auuccaauaagcugugugg

SEQ ID NO: 1067642 - RNA, 19 nt, Artificial Sequence
  Description of Artificial Sequence: Synthetic oligonucleotide
  Sense strand starting at position 442 of SEQ ID NO: 915275
aaucacuggcucugugaaa

SEQ ID NO: 1067643 - RNA, 19 nt, Artificial Sequence
  Description of Artificial Sequence: Synthetic oligonucleotide
  Antisense strand to SEQ ID NO: 1067642
uuucacagagccagugauu

SEQ ID NO: 1067644 - RNA, 19 nt, Artificial Sequence
  Description of Artificial Sequence: Synthetic oligonucleotide
  Sense strand starting at position 501 of SEQ ID NO: 915275
gggucaccauuacuaucau

SEQ ID NO: 1067645 - RNA, 19 nt, Artificial Sequence
  Description of Artificial Sequence: Synthetic oligonucleotide
  Antisense strand to SEQ ID NO: 1067644
augauaguaauggugaccc

SEQ ID NO: 1067646 - RNA, 19 nt, Artificial Sequence
  Description of Artificial Sequence: Synthetic oligonucleotide
  Sense strand starting at position 545 of SEQ ID NO: 915275
auuucuauguaucagagau

SEQ ID NO: 1067647 - RNA, 19 nt, Artificial Sequence
  Description of Artificial Sequence: Synthetic oligonucleotide
  Antisense strand to SEQ ID NO: 1067646
aucucugauacauagaaau

SEQ ID NO: 1067648 - RNA, 19 nt, Artificial Sequence
  Description of Artificial Sequence: Synthetic oligonucleotide
  Sense strand starting at position 549 of SEQ ID NO: 915275
cuauguaucagagauugug

SEQ ID NO: 1067649 - RNA, 19 nt, Artificial Sequence
  Description of Artificial Sequence: Synthetic oligonucleotide
  Antisense strand to SEQ ID NO: 1067648
cacaaucucugauacauag

SEQ ID NO: 1067650 - RNA, 19 nt, Artificial Sequence
  Description of Artificial Sequence: Synthetic oligonucleotide
  Sense strand starting at position 586 of SEQ ID NO: 915275
ggcacucagucaguccuaa

SEQ ID NO: 1067651 - RNA, 19 nt, Artificial Sequence
  Description of Artificial Sequence: Synthetic oligonucleotide
  Antisense strand to SEQ ID NO: 1067650
uuaggacugacugagugcc

SEQ ID NO: 1067652 - RNA, 19 nt, Artificial Sequence
  Description of Artificial Sequence: Synthetic oligonucleotide
  Sense strand starting at position 721 of SEQ ID NO: 915275
ucucuaauauuucugcguu

SEQ ID NO: 1067653 - RNA, 19 nt, Artificial Sequence
  Description of Artificial Sequence: Synthetic oligonucleotide
  Antisense strand to SEQ ID NO: 1067652
aacgcagaaauauuagaga

SEQ ID NO: 1067654 - RNA, 19 nt, Artificial Sequence
  Description of Artificial Sequence: Synthetic oligonucleotide
  Sense strand starting at position 725 of SEQ ID NO: 915275
uaauauuucugcguuugcu

SEQ ID NO: 1067655 - RNA, 19 nt, Artificial Sequence
  Description of Artificial Sequence: Synthetic oligonucleotide
  Antisense strand to SEQ ID NO: 1067654
agcaaacgcagaaauauua

SEQ ID NO: 1067656 - RNA, 19 nt, Artificial Sequence
  Description of Artificial Sequence: Synthetic oligonucleotide
  Sense strand starting at position 728 of SEQ ID NO: 915275
uauuucugcguuugcuuaa

SEQ ID NO: 1067657 - RNA, 19 nt, Artificial Sequence
  Description of Artificial Sequence: Synthetic oligonucleotide
  Antisense strand to SEQ ID NO: 1067656
uuaagcaaacgcagaaaua

SEQ ID NO: 1067658 - RNA, 19 nt, Artificial Sequence
  Description of Artificial Sequence: Synthetic oligonucleotide
  Sense strand starting at position 729 of SEQ ID NO: 915275
auuucugcguuugcuuaaa

SEQ ID NO: 1067659 - RNA, 19 nt, Artificial Sequence
  Description of Artificial Sequence: Synthetic oligonucleotide
  Antisense strand to SEQ ID NO: 1067658
uuuaagcaaacgcagaaau

SEQ ID NO: 1067660 - RNA, 19 nt, Artificial Sequence
  Description of Artificial Sequence: Synthetic oligonucleotide
  Sense strand starting at position 1030 of SEQ ID NO: 915275
uacaucucaguuugggaga

SEQ ID NO: 1067661 - RNA, 19 nt, Artificial Sequence
  Description of Artificial Sequence: Synthetic oligonucleotide
  Antisense strand to SEQ ID NO: 1067660
ucucccaaacugagaugua

SEQ ID NO: 1067662 - RNA, 19 nt, Artificial Sequence
  Description of Artificial Sequence: Synthetic oligonucleotide
  Sense strand starting at position 1555 of SEQ ID NO: 915275
gucacucagagcuauagag

SEQ ID NO: 1067663 - RNA, 19 nt, Artificial Sequence
  Description of Artificial Sequence: Synthetic oligonucleotide
  Antisense strand to SEQ ID NO: 1067662
cucuauagcucugagugac

SEQ ID NO: 1067664 - RNA, 19 nt, Artificial Sequence
  Description of Artificial Sequence: Synthetic oligonucleotide
  Sense strand starting at position 1559 of SEQ ID NO: 915275
cucagagcuauagagaguu

SEQ ID NO: 1067665 - RNA, 19 nt, Artificial Sequence
  Description of Artificial Sequence: Synthetic oligonucleotide
  Antisense strand to SEQ ID NO: 1067664
aacucucuauagcucugag

SEQ ID NO: 1067666 - RNA, 19 nt, Artificial Sequence
  Description of Artificial Sequence: Synthetic oligonucleotide
  Sense strand starting at position 1565 of SEQ ID NO: 915275
gcuauagagaguugcaaug

SEQ ID NO: 1067667 - RNA, 19 nt, Artificial Sequence
  Description of Artificial Sequence: Synthetic oligonucleotide
  Antisense strand to SEQ ID NO: 1067666
cauugcaacucucuauagc

SEQ ID NO: 1067668 - RNA, 19 nt, Artificial Sequence
  Description of Artificial Sequence: Synthetic oligonucleotide
  Sense strand starting at position 1607 of SEQ ID NO: 915275
cacugugauccauggguca

SEQ ID NO: 1067669 - RNA, 19 nt, Artificial Sequence
  Description of Artificial Sequence: Synthetic oligonucleotide
  Antisense strand to SEQ ID NO: 1067668
ugacccauggaucacagug

SEQ ID NO: 1067670 - RNA, 19 nt, Artificial Sequence
  Description of Artificial Sequence: Synthetic oligonucleotide
  Sense strand starting at position 1609 of SEQ ID NO: 915275
cugugauccaugggucaca

SEQ ID NO: 1067671 - RNA, 19 nt, Artificial Sequence
  Description of Artificial Sequence: Synthetic oligonucleotide
  Antisense strand to SEQ ID NO: 1067670
ugugacccauggaucacag

SEQ ID NO: 1067672 - RNA, 19 nt, Artificial Sequence
  Description of Artificial Sequence: Synthetic oligonucleotide
  Sense strand starting at position 1742 of SEQ ID NO: 915275
cgcucacaguaaucauuua

SEQ ID NO: 1067673 - RNA, 19 nt, Artificial Sequence
  Description of Artificial Sequence: Synthetic oligonucleotide
  Antisense strand to SEQ ID NO: 1067672
uaaaugauuacugugagcg

SEQ ID NO: 1067674 - RNA, 19 nt, Artificial Sequence
  Description of Artificial Sequence: Synthetic oligonucleotide
  Sense strand starting at position 2130 of SEQ ID NO: 915275
ggaggugaugucuggaaga

SEQ ID NO: 1067675 - RNA, 19 nt, Artificial Sequence
  Description of Artificial Sequence: Synthetic oligonucleotide
  Antisense strand to SEQ ID NO: 1067674
ucuuccagacaucaccucc

SEQ ID NO: 1067676 - RNA, 19 nt, Artificial Sequence
  Description of Artificial Sequence: Synthetic oligonucleotide
  Sense strand starting at position 2281 of SEQ ID NO: 915275
cuggguaucaaauggugau

SEQ ID NO: 1067677 - RNA, 19 nt, Artificial Sequence
  Description of Artificial Sequence: Synthetic oligonucleotide
  Antisense strand to SEQ ID NO: 1067676
aucaccauuugauacccag

SEQ ID NO: 1067678 - RNA, 19 nt, Artificial Sequence
  Description of Artificial Sequence: Synthetic oligonucleotide
  Sense strand starting at position 2282 of SEQ ID NO: 915275
uggguaucaaauggugauu

SEQ ID NO: 1067679 - RNA, 19 nt, Artificial Sequence
  Description of Artificial Sequence: Synthetic oligonucleotide
  Antisense strand to SEQ ID NO: 1067678
aaucaccauuugauaccca

SEQ ID NO: 1067680 - RNA, 19 nt, Artificial Sequence
  Description of Artificial Sequence: Synthetic oligonucleotide
  Sense strand starting at position 2446 of SEQ ID NO: 915275
auagcaauucuggagguau

SEQ ID NO: 1067681 - RNA, 19 nt, Artificial Sequence
  Description of Artificial Sequence: Synthetic oligonucleotide
  Antisense strand to SEQ ID NO: 1067680
auaccuccagaauugcuau

SEQ ID NO: 1067682 - RNA, 19 nt, Artificial Sequence
  Description of Artificial Sequence: Synthetic oligonucleotide
  Sense strand starting at position 2448 of SEQ ID NO: 915275
agcaauucuggagguauua

SEQ ID NO: 1067683 - RNA, 19 nt, Artificial Sequence
  Description of Artificial Sequence: Synthetic oligonucleotide
  Antisense strand to SEQ ID NO: 1067682
uaauaccuccagaauugcu

SEQ ID NO: 1067684 - RNA, 19 nt, Artificial Sequence
  Description of Artificial Sequence: Synthetic oligonucleotide
  Sense strand starting at position 2648 of SEQ ID NO: 915275
auaacaaucccaggagcuu

SEQ ID NO: 1067685 - RNA, 19 nt, Artificial Sequence
  Description of Artificial Sequence: Synthetic oligonucleotide
  Antisense strand to SEQ ID NO: 1067684
aagcuccugggauuguuau

SEQ ID NO: 1067686 - RNA, 19 nt, Artificial Sequence
  Description of Artificial Sequence: Synthetic oligonucleotide
  Sense strand starting at position 2709 of SEQ ID NO: 915275
gggagauuagcuugcucug

SEQ ID NO: 1067687 - RNA, 19 nt, Artificial Sequence
  Description of Artificial Sequence: Synthetic oligonucleotide
  Antisense strand to SEQ ID NO: 1067686
cagagcaagcuaaucuccc

SEQ ID NO: 1067688 - RNA, 19 nt, Artificial Sequence
  Description of Artificial Sequence: Synthetic oligonucleotide
  Sense strand starting at position 3079 of SEQ ID NO: 915275
uggaguugguaaucuagug

SEQ ID NO: 1067689 - RNA, 19 nt, Artificial Sequence
  Description of Artificial Sequence: Synthetic oligonucleotide
  Antisense strand to SEQ ID NO: 1067688
cacuagauuaccaacucca

SEQ ID NO: 1067690 - RNA, 19 nt, Artificial Sequence
  Description of Artificial Sequence: Synthetic oligonucleotide
  Sense strand starting at position 3085 of SEQ ID NO: 915275
ugguaaucuagugggaaac

SEQ ID NO: 1067691 - RNA, 19 nt, Artificial Sequence
  Description of Artificial Sequence: Synthetic oligonucleotide
  Antisense strand to SEQ ID NO: 1067690
guuucccacuagauuacca

SEQ ID NO: 1067692 - RNA, 19 nt, Artificial Sequence
  Description of Artificial Sequence: Synthetic oligonucleotide
  Sense strand starting at position 3086 of SEQ ID NO: 915275
gguaaucuagugggaaaca

SEQ ID NO: 1067693 - RNA, 19 nt, Artificial Sequence
  Description of Artificial Sequence: Synthetic oligonucleotide
  Antisense strand to SEQ ID NO: 1067692
uguuucccacuagauuacc

SEQ ID NO: 1067694 - RNA, 19 nt, Artificial Sequence
  Description of Artificial Sequence: Synthetic oligonucleotide
  Sense strand starting at position 3288 of SEQ ID NO: 915275
guuagacuuagccagguga

SEQ ID NO: 1067695 - RNA, 19 nt, Artificial Sequence
  Description of Artificial Sequence: Synthetic oligonucleotide
  Antisense strand to SEQ ID NO: 1067694
ucaccuggcuaagucuaac

SEQ ID NO: 1067696 - RNA, 19 nt, Artificial Sequence
  Description of Artificial Sequence: Synthetic oligonucleotide
  Sense strand starting at position 3290 of SEQ ID NO: 915275
uagacuuagccaggugaag

SEQ ID NO: 1067697 - RNA, 19 nt, Artificial Sequence
  Description of Artificial Sequence: Synthetic oligonucleotide
  Antisense strand to SEQ ID NO: 1067696
cuucaccuggcuaagucua

SEQ ID NO: 1067698 - RNA, 19 nt, Artificial Sequence
  Description of Artificial Sequence: Synthetic oligonucleotide
  Sense strand starting at position 3376 of SEQ ID NO: 915275
cugucaauguucuugagag

SEQ ID NO: 1067699 - RNA, 19 nt, Artificial Sequence
  Description of Artificial Sequence: Synthetic oligonucleotide
  Antisense strand to SEQ ID NO: 1067698
cucucaagaacauugacag

SEQ ID NO: 1067700 - RNA, 19 nt, Artificial Sequence
  Description of Artificial Sequence: Synthetic oligonucleotide
  Sense strand starting at position 3378 of SEQ ID NO: 915275
gucaauguucuugagagag

SEQ ID NO: 1067701 - RNA, 19 nt, Artificial Sequence
  Description of Artificial Sequence: Synthetic oligonucleotide
  Antisense strand to SEQ ID NO: 1067700
cucucucaagaacauugac

SEQ ID NO: 1067702 - RNA, 19 nt, Artificial Sequence
  Description of Artificial Sequence: Synthetic oligonucleotide
  Sense strand starting at position 3384 of SEQ ID NO: 915275
guucuugagagaggugaca

SEQ ID NO: 1067703 - RNA, 19 nt, Artificial Sequence
  Description of Artificial Sequence: Synthetic oligonucleotide
  Antisense strand to SEQ ID NO: 1067702
ugucaccucucucaagaac

SEQ ID NO: 1067704 - RNA, 19 nt, Artificial Sequence
  Description of Artificial Sequence: Synthetic oligonucleotide
  Sense strand starting at position 3395 of SEQ ID NO: 915275
aggugacaauucuuggacu

SEQ ID NO: 1067705 - RNA, 19 nt, Artificial Sequence
  Description of Artificial Sequence: Synthetic oligonucleotide
  Antisense strand to SEQ ID NO: 1067704
aguccaagaauugucaccu

SEQ ID NO: 1067706 - RNA, 19 nt, Artificial Sequence
  Description of Artificial Sequence: Synthetic oligonucleotide
  Sense strand starting at position 3397 of SEQ ID NO: 915275
gugacaauucuuggacucu

SEQ ID NO: 1067707 - RNA, 19 nt, Artificial Sequence
  Description of Artificial Sequence: Synthetic oligonucleotide
  Antisense strand to SEQ ID NO: 1067706
agaguccaagaauugucac

SEQ ID NO: 1067708 - RNA, 19 nt, Artificial Sequence
  Description of Artificial Sequence: Synthetic oligonucleotide
  Sense strand starting at position 3598 of SEQ ID NO: 915275
ucacacucuucccuaggua

SEQ ID NO: 1067709 - RNA, 19 nt, Artificial Sequence
  Description of Artificial Sequence: Synthetic oligonucleotide
  Antisense strand to SEQ ID NO: 1067708
uaccuagggaagaguguga

SEQ ID NO: 1067710 - RNA, 19 nt, Artificial Sequence
  Description of Artificial Sequence: Synthetic oligonucleotide
  Sense strand starting at position 3881 of SEQ ID NO: 915275
agacuaccgacuggagauu

SEQ ID NO: 1067711 - RNA, 19 nt, Artificial Sequence
  Description of Artificial Sequence: Synthetic oligonucleotide
  Antisense strand to SEQ ID NO: 1067710
aaucuccagucgguagucu

SEQ ID NO: 1067712 - RNA, 19 nt, Artificial Sequence
  Description of Artificial Sequence: Synthetic oligonucleotide
  Sense strand starting at position 3895 of SEQ ID NO: 915275
agauuauugcaaugcaugu

SEQ ID NO: 1067713 - RNA, 19 nt, Artificial Sequence
  Description of Artificial Sequence: Synthetic oligonucleotide
  Antisense strand to SEQ ID NO: 1067712
acaugcauugcaauaaucu

SEQ ID NO: 1067714 - RNA, 19 nt, Artificial Sequence
  Description of Artificial Sequence: Synthetic oligonucleotide
  Sense strand starting at position 10 of SEQ ID NO: 915276
cgagauuaauggcucuguu

SEQ ID NO: 1067715 - RNA, 19 nt, Artificial Sequence
  Description of Artificial Sequence: Synthetic oligonucleotide
  Antisense strand to SEQ ID NO: 1067714
aacagagccauuaaucucg

SEQ ID NO: 1067716 - RNA, 19 nt, Artificial Sequence
  Description of Artificial Sequence: Synthetic oligonucleotide
  Sense strand starting at position 13 of SEQ ID NO: 915276
gauuaauggcucuguuauc

SEQ ID NO: 1067717 - RNA, 19 nt, Artificial Sequence
  Description of Artificial Sequence: Synthetic oligonucleotide
  Antisense strand to SEQ ID NO: 1067716
gauaacagagccauuaauc

SEQ ID NO: 1067718 - RNA, 19 nt, Artificial Sequence
  Description of Artificial Sequence: Synthetic oligonucleotide
  Sense strand starting at position 14 of SEQ ID NO: 915276
auuaauggcucuguuaucu

SEQ ID NO: 1067719 - RNA, 19 nt, Artificial Sequence
  Description of Artificial Sequence: Synthetic oligonucleotide
  Antisense strand to SEQ ID NO: 1067718
agauaacagagccauuaau

SEQ ID NO: 1067720 - RNA, 19 nt, Artificial Sequence
  Description of Artificial Sequence: Synthetic oligonucleotide
  Sense strand starting at position 287 of SEQ ID NO: 915276
agcuguuguuaucuauaga

SEQ ID NO: 1067721 - RNA, 19 nt, Artificial Sequence
  Description of Artificial Sequence: Synthetic oligonucleotide
  Antisense strand to SEQ ID NO: 1067720
ucuauagauaacaacagcu

SEQ ID NO: 1067722 - RNA, 19 nt, Artificial Sequence
  Description of Artificial Sequence: Synthetic oligonucleotide
  Sense strand starting at position 309 of SEQ ID NO: 915276
cagagauuguauggaagga

SEQ ID NO: 1067723 - RNA, 19 nt, Artificial Sequence
  Description of Artificial Sequence: Synthetic oligonucleotide
  Antisense strand to SEQ ID NO: 1067722
uccuuccauacaaucucug

SEQ ID NO: 1067724 - RNA, 19 nt, Artificial Sequence
  Description of Artificial Sequence: Synthetic oligonucleotide
  Sense strand starting at position 790 of SEQ ID NO: 915276
gguacuuauuggccaccua

SEQ ID NO: 1067725 - RNA, 19 nt, Artificial Sequence
  Description of Artificial Sequence: Synthetic oligonucleotide
  Antisense strand to SEQ ID NO: 1067724
uagguggccaauaaguacc

SEQ ID NO: 1067726 - RNA, 19 nt, Artificial Sequence
  Description of Artificial Sequence: Synthetic oligonucleotide
  Sense strand starting at position 815 of SEQ ID NO: 915276
ucggguaauguucaacgca

SEQ ID NO: 1067727 - RNA, 19 nt, Artificial Sequence
  Description of Artificial Sequence: Synthetic oligonucleotide
  Antisense strand to SEQ ID NO: 1067726
ugcguugaacauuacccga

SEQ ID NO: 1067728 - RNA, 19 nt, Artificial Sequence
  Description of Artificial Sequence: Synthetic oligonucleotide
  Sense strand starting at position 851 of SEQ ID NO: 915276
aaguccugcccuugagaca

SEQ ID NO: 1067729 - RNA, 19 nt, Artificial Sequence
  Description of Artificial Sequence: Synthetic oligonucleotide
  Antisense strand to SEQ ID NO: 1067728
ugucucaagggcaggacuu

SEQ ID NO: 1067730 - RNA, 19 nt, Artificial Sequence
  Description of Artificial Sequence: Synthetic oligonucleotide
  Sense strand starting at position 862 of SEQ ID NO: 915276
uugagacaccuguagucua

SEQ ID NO: 1067731 - RNA, 19 nt, Artificial Sequence
  Description of Artificial Sequence: Synthetic oligonucleotide
  Antisense strand to SEQ ID NO: 1067730
uagacuacaggugucucaa

SEQ ID NO: 1067732 - RNA, 19 nt, Artificial Sequence
  Description of Artificial Sequence: Synthetic oligonucleotide
  Sense strand starting at position 936 of SEQ ID NO: 915276
ugauaagagcagcgauaua

SEQ ID NO: 1067733 - RNA, 19 nt, Artificial Sequence
  Description of Artificial Sequence: Synthetic oligonucleotide
  Antisense strand to SEQ ID NO: 1067732
uauaucgcugcucuuauca

SEQ ID NO: 1067734 - RNA, 19 nt, Artificial Sequence
  Description of Artificial Sequence: Synthetic oligonucleotide
  Sense strand starting at position 1343 of SEQ ID NO: 915276
gggacuugccugggucaca

SEQ ID NO: 1067735 - RNA, 19 nt, Artificial Sequence
  Description of Artificial Sequence: Synthetic oligonucleotide
  Antisense strand to SEQ ID NO: 1067734
ugugacccaggcaaguccc

SEQ ID NO: 1067736 - RNA, 19 nt, Artificial Sequence
  Description of Artificial Sequence: Synthetic oligonucleotide
  Sense strand starting at position 1394 of SEQ ID NO: 915276
uuggcauguccacaaaggu

SEQ ID NO: 1067737 - RNA, 19 nt, Artificial Sequence
  Description of Artificial Sequence: Synthetic oligonucleotide
  Antisense strand to SEQ ID NO: 1067736
accuuuguggacaugccaa

SEQ ID NO: 1067738 - RNA, 19 nt, Artificial Sequence
  Description of Artificial Sequence: Synthetic oligonucleotide
  Sense strand starting at position 1471 of SEQ ID NO: 915276
ccgucagcuccugguaaag

SEQ ID NO: 1067739 - RNA, 19 nt, Artificial Sequence
  Description of Artificial Sequence: Synthetic oligonucleotide
  Antisense strand to SEQ ID NO: 1067738
cuuuaccaggagcugacgg

SEQ ID NO: 1067740 - RNA, 19 nt, Artificial Sequence
  Description of Artificial Sequence: Synthetic oligonucleotide
  Sense strand starting at position 1989 of SEQ ID NO: 915276
cuccucuguccuuguggua

SEQ ID NO: 1067741 - RNA, 19 nt, Artificial Sequence
  Description of Artificial Sequence: Synthetic oligonucleotide
  Antisense strand to SEQ ID NO: 1067740
uaccacaaggacagaggag

SEQ ID NO: 1067742 - RNA, 19 nt, Artificial Sequence
  Description of Artificial Sequence: Synthetic oligonucleotide
  Sense strand starting at position 2059 of SEQ ID NO: 915276
gggaaagcuuguuccggga

SEQ ID NO: 1067743 - RNA, 19 nt, Artificial Sequence
  Description of Artificial Sequence: Synthetic oligonucleotide
  Antisense strand to SEQ ID NO: 1067742
ucccggaacaagcuuuccc

SEQ ID NO: 1067744 - RNA, 19 nt, Artificial Sequence
  Description of Artificial Sequence: Synthetic oligonucleotide
  Sense strand starting at position 2063 of SEQ ID NO: 915276
aagcuuguuccgggaggca

SEQ ID NO: 1067745 - RNA, 19 nt, Artificial Sequence
  Description of Artificial Sequence: Synthetic oligonucleotide
  Antisense strand to SEQ ID NO: 1067744
ugccucccggaacaagcuu

SEQ ID NO: 1067746 - RNA, 19 nt, Artificial Sequence
  Description of Artificial Sequence: Synthetic oligonucleotide
  Sense strand starting at position 2065 of SEQ ID NO: 915276
gcuuguuccgggaggcaga

SEQ ID NO: 1067747 - RNA, 19 nt, Artificial Sequence
  Description of Artificial Sequence: Synthetic oligonucleotide
  Antisense strand to SEQ ID NO: 1067746
ucugccucccggaacaagc

SEQ ID NO: 1067748 - RNA, 19 nt, Artificial Sequence
  Description of Artificial Sequence: Synthetic oligonucleotide
  Sense strand starting at position 2082 of SEQ ID NO: 915276
gaggcauagcccugaggua

SEQ ID NO: 1067749 - RNA, 19 nt, Artificial Sequence
  Description of Artificial Sequence: Synthetic oligonucleotide
  Antisense strand to SEQ ID NO: 1067748
uaccucagggcuaugccuc

SEQ ID NO: 1067750 - RNA, 19 nt, Artificial Sequence
  Description of Artificial Sequence: Synthetic oligonucleotide
  Sense strand starting at position 2148 of SEQ ID NO: 915276
caugaaugcugguugcaca

SEQ ID NO: 1067751 - RNA, 19 nt, Artificial Sequence
  Description of Artificial Sequence: Synthetic oligonucleotide
  Antisense strand to SEQ ID NO: 1067750
ugugcaaccagcauucaug

SEQ ID NO: 1067752 - RNA, 19 nt, Artificial Sequence
  Description of Artificial Sequence: Synthetic oligonucleotide
  Sense strand starting at position 2179 of SEQ ID NO: 915276
gggcuugucagccaugugu

SEQ ID NO: 1067753 - RNA, 19 nt, Artificial Sequence
  Description of Artificial Sequence: Synthetic oligonucleotide
  Antisense strand to SEQ ID NO: 1067752
acacauggcugacaagccc

SEQ ID NO: 1067754 - RNA, 19 nt, Artificial Sequence
  Description of Artificial Sequence: Synthetic oligonucleotide
  Sense strand starting at position 2192 of SEQ ID NO: 915276
auguguaccugugcuggaa

SEQ ID NO: 1067755 - RNA, 19 nt, Artificial Sequence
  Description of Artificial Sequence: Synthetic oligonucleotide
  Antisense strand to SEQ ID NO: 1067754
uuccagcacagguacacau

SEQ ID NO: 1067756 - RNA, 19 nt, Artificial Sequence
  Description of Artificial Sequence: Synthetic oligonucleotide
  Sense strand starting at position 2195 of SEQ ID NO: 915276
uguaccugugcuggaagau

SEQ ID NO: 1067757 - RNA, 19 nt, Artificial Sequence
  Description of Artificial Sequence: Synthetic oligonucleotide
  Antisense strand to SEQ ID NO: 1067756
aucuuccagcacagguaca

SEQ ID NO: 1067758 - RNA, 19 nt, Artificial Sequence
  Description of Artificial Sequence: Synthetic oligonucleotide
  Sense strand starting at position 2196 of SEQ ID NO: 915276
guaccugugcuggaagaug

SEQ ID NO: 1067759 - RNA, 19 nt, Artificial Sequence
  Description of Artificial Sequence: Synthetic oligonucleotide
  Antisense strand to SEQ ID NO: 1067758
caucuuccagcacagguac

SEQ ID NO: 1067760 - RNA, 19 nt, Artificial Sequence
  Description of Artificial Sequence: Synthetic oligonucleotide
  Sense strand starting at position 2207 of SEQ ID NO: 915276
ggaagaugcgcaugcauuc

SEQ ID NO: 1067761 - RNA, 19 nt, Artificial Sequence
  Description of Artificial Sequence: Synthetic oligonucleotide
  Antisense strand to SEQ ID NO: 1067760
gaaugcaugcgcaucuucc

SEQ ID NO: 1067762 - RNA, 19 nt, Artificial Sequence
  Description of Artificial Sequence: Synthetic oligonucleotide
  Sense strand starting at position 2230 of SEQ ID NO: 915276
ggcacagguguuuggaauu

SEQ ID NO: 1067763 - RNA, 19 nt, Artificial Sequence
  Description of Artificial Sequence: Synthetic oligonucleotide
  Antisense strand to SEQ ID NO: 1067762
aauuccaaacaccugugcc

SEQ ID NO: 1067764 - RNA, 19 nt, Artificial Sequence
  Description of Artificial Sequence: Synthetic oligonucleotide
  Sense strand starting at position 2241 of SEQ ID NO: 915276
uuggaauugugccuaagua

SEQ ID NO: 1067765 - RNA, 19 nt, Artificial Sequence
  Description of Artificial Sequence: Synthetic oligonucleotide
  Antisense strand to SEQ ID NO: 1067764
uacuuaggcacaauuccaa

SEQ ID NO: 1067766 - RNA, 19 nt, Artificial Sequence
  Description of Artificial Sequence: Synthetic oligonucleotide
  Sense strand starting at position 2242 of SEQ ID NO: 915276
uggaauugugccuaaguau

SEQ ID NO: 1067767 - RNA, 19 nt, Artificial Sequence
  Description of Artificial Sequence: Synthetic oligonucleotide
  Antisense strand to SEQ ID NO: 1067766
auacuuaggcacaauucca

SEQ ID NO: 1067768 - RNA, 19 nt, Artificial Sequence
  Description of Artificial Sequence: Synthetic oligonucleotide
  Sense strand starting at position 2443 of SEQ ID NO: 915276
cccagaugucacgggagau

SEQ ID NO: 1067769 - RNA, 19 nt, Artificial Sequence
  Description of Artificial Sequence: Synthetic oligonucleotide
  Antisense strand to SEQ ID NO: 1067768
aucucccgugacaucuggg

SEQ ID NO: 1067770 - RNA, 19 nt, Artificial Sequence
  Description of Artificial Sequence: Synthetic oligonucleotide
  Sense strand starting at position 2444 of SEQ ID NO: 915276
ccagaugucacgggagauu

SEQ ID NO: 1067771 - RNA, 19 nt, Artificial Sequence
  Description of Artificial Sequence: Synthetic oligonucleotide
  Antisense strand to SEQ ID NO: 1067770
aaucucccgugacaucugg

SEQ ID NO: 1067772 - RNA, 19 nt, Artificial Sequence
  Description of Artificial Sequence: Synthetic oligonucleotide
  Sense strand starting at position 2755 of SEQ ID NO: 915276
gggugaugcucaccacuag

SEQ ID NO: 1067773 - RNA, 19 nt, Artificial Sequence
  Description of Artificial Sequence: Synthetic oligonucleotide
  Antisense strand to SEQ ID NO: 1067772
cuaguggugagcaucaccc

SEQ ID NO: 1067774 - RNA, 19 nt, Artificial Sequence
  Description of Artificial Sequence: Synthetic oligonucleotide
  Sense strand starting at position 2988 of SEQ ID NO: 915276
gucucuguagccuguaaug

SEQ ID NO: 1067775 - RNA, 19 nt, Artificial Sequence
  Description of Artificial Sequence: Synthetic oligonucleotide
  Antisense strand to SEQ ID NO: 1067774
cauuacaggcuacagagac

SEQ ID NO: 1067776 - RNA, 19 nt, Artificial Sequence
  Description of Artificial Sequence: Synthetic oligonucleotide
  Sense strand starting at position 2990 of SEQ ID NO: 915276
cucuguagccuguaaugag

SEQ ID NO: 1067777 - RNA, 19 nt, Artificial Sequence
  Description of Artificial Sequence: Synthetic oligonucleotide
  Antisense strand to SEQ ID NO: 1067776
cucauuacaggcuacagag

SEQ ID NO: 1067778 - RNA, 19 nt, Artificial Sequence
  Description of Artificial Sequence: Synthetic oligonucleotide
  Sense strand starting at position 3105 of SEQ ID NO: 915276
agcccucuugacugaaaca

SEQ ID NO: 1067779 - RNA, 19 nt, Artificial Sequence
  Description of Artificial Sequence: Synthetic oligonucleotide
  Antisense strand to SEQ ID NO: 1067778
uguuucagucaagagggcu

SEQ ID NO: 1067780 - RNA, 19 nt, Artificial Sequence
  Description of Artificial Sequence: Synthetic oligonucleotide
  Sense strand starting at position 3401 of SEQ ID NO: 915276
gcuacuacgccuggcuaaa

SEQ ID NO: 1067781 - RNA, 19 nt, Artificial Sequence
  Description of Artificial Sequence: Synthetic oligonucleotide
  Antisense strand to SEQ ID NO: 1067780
uuuagccaggcguaguagc

SEQ ID NO: 1067782 - RNA, 19 nt, Artificial Sequence
  Description of Artificial Sequence: Synthetic oligonucleotide
  Sense strand starting at position 3608 of SEQ ID NO: 915276
cccucauacuguccagagu

SEQ ID NO: 1067783 - RNA, 19 nt, Artificial Sequence
  Description of Artificial Sequence: Synthetic oligonucleotide
  Antisense strand to SEQ ID NO: 1067782
acucuggacaguaugaggg

SEQ ID NO: 1067784 - RNA, 19 nt, Artificial Sequence
  Description of Artificial Sequence: Synthetic oligonucleotide
  Sense strand starting at position 3686 of SEQ ID NO: 915276
cagaguuguaaggagcaca

SEQ ID NO: 1067785 - RNA, 19 nt, Artificial Sequence
  Description of Artificial Sequence: Synthetic oligonucleotide
  Antisense strand to SEQ ID NO: 1067784
ugugcuccuuacaacucug

SEQ ID NO: 1067786 - RNA, 19 nt, Artificial Sequence
  Description of Artificial Sequence: Synthetic oligonucleotide
  Sense strand starting at position 3754 of SEQ ID NO: 915276
cggaaacagcuccacauaa

SEQ ID NO: 1067787 - RNA, 19 nt, Artificial Sequence
  Description of Artificial Sequence: Synthetic oligonucleotide
  Antisense strand to SEQ ID NO: 1067786
uuauguggagcuguuuccg

SEQ ID NO: 1067788 - RNA, 19 nt, Artificial Sequence
  Description of Artificial Sequence: Synthetic oligonucleotide
  Sense strand starting at position 3891 of SEQ ID NO: 915276
cuuacauaguguucuagcu

SEQ ID NO: 1067789 - RNA, 19 nt, Artificial Sequence
  Description of Artificial Sequence: Synthetic oligonucleotide
  Antisense strand to SEQ ID NO: 1067788
agcuagaacacuauguaag

SEQ ID NO: 1067790 - RNA, 19 nt, Artificial Sequence
  Description of Artificial Sequence: Synthetic oligonucleotide
  Sense strand starting at position 3918 of SEQ ID NO: 915276
cagcaaguugcaugugaag

SEQ ID NO: 1067791 - RNA, 19 nt, Artificial Sequence
  Description of Artificial Sequence: Synthetic oligonucleotide
  Antisense strand to SEQ ID NO: 1067790
cuucacaugcaacuugcug

SEQ ID NO: 1067792 - RNA, 19 nt, Artificial Sequence
  Description of Artificial Sequence: Synthetic oligonucleotide
  Sense strand starting at position 3920 of SEQ ID NO: 915276
gcaaguugcaugugaagag

SEQ ID NO: 1067793 - RNA, 19 nt, Artificial Sequence
  Description of Artificial Sequence: Synthetic oligonucleotide
  Antisense strand to SEQ ID NO: 1067792
cucuucacaugcaacuugc

SEQ ID NO: 1067794 - RNA, 19 nt, Artificial Sequence
  Description of Artificial Sequence: Synthetic oligonucleotide
  Sense strand starting at position 171 of SEQ ID NO: 915277
uuaacaagaucucucgcaa

SEQ ID NO: 1067795 - RNA, 19 nt, Artificial Sequence
  Description of Artificial Sequence: Synthetic oligonucleotide
  Antisense strand to SEQ ID NO: 1067794
uugcgagagaucuuguuaa

SEQ ID NO: 1067796 - RNA, 19 nt, Artificial Sequence
  Description of Artificial Sequence: Synthetic oligonucleotide
  Sense strand starting at position 402 of SEQ ID NO: 915277
gucuuugcucaaugauaag

SEQ ID NO: 1067797 - RNA, 19 nt, Artificial Sequence
  Description of Artificial Sequence: Synthetic oligonucleotide
  Antisense strand to SEQ ID NO: 1067796
cuuaucauugagcaaagac

SEQ ID NO: 1067798 - RNA, 19 nt, Artificial Sequence
  Description of Artificial Sequence: Synthetic oligonucleotide
  Sense strand starting at position 583 of SEQ ID NO: 915277
ggacacugcuaagucgaua

SEQ ID NO: 1067799 - RNA, 19 nt, Artificial Sequence
  Description of Artificial Sequence: Synthetic oligonucleotide
  Antisense strand to SEQ ID NO: 1067798
uaucgacuuagcagugucc

SEQ ID NO: 1067800 - RNA, 19 nt, Artificial Sequence
  Description of Artificial Sequence: Synthetic oligonucleotide
  Sense strand starting at position 586 of SEQ ID NO: 915277
cacugcuaagucgauacau

SEQ ID NO: 1067801 - RNA, 19 nt, Artificial Sequence
  Description of Artificial Sequence: Synthetic oligonucleotide
  Antisense strand to SEQ ID NO: 1067800
auguaucgacuuagcagug

SEQ ID NO: 1067802 - RNA, 19 nt, Artificial Sequence
  Description of Artificial Sequence: Synthetic oligonucleotide
  Sense strand starting at position 588 of SEQ ID NO: 915277
cugcuaagucgauacauga

SEQ ID NO: 1067803 - RNA, 19 nt, Artificial Sequence
  Description of Artificial Sequence: Synthetic oligonucleotide
  Antisense strand to SEQ ID NO: 1067802
ucauguaucgacuuagcag

SEQ ID NO: 1067804 - RNA, 19 nt, Artificial Sequence
  Description of Artificial Sequence: Synthetic oligonucleotide
  Sense strand starting at position 830 of SEQ ID NO: 915277
gcuucuacauguguaaaga

SEQ ID NO: 1067805 - RNA, 19 nt, Artificial Sequence
  Description of Artificial Sequence: Synthetic oligonucleotide
  Antisense strand to SEQ ID NO: 1067804
ucuuuacacauguagaagc

SEQ ID NO: 1067806 - RNA, 19 nt, Artificial Sequence
  Description of Artificial Sequence: Synthetic oligonucleotide
  Sense strand starting at position 831 of SEQ ID NO: 915277
cuucuacauguguaaagag

SEQ ID NO: 1067807 - RNA, 19 nt, Artificial Sequence
  Description of Artificial Sequence: Synthetic oligonucleotide
  Antisense strand to SEQ ID NO: 1067806
cucuuuacacauguagaag

SEQ ID NO: 1067808 - RNA, 19 nt, Artificial Sequence
  Description of Artificial Sequence: Synthetic oligonucleotide
  Sense strand starting at position 1055 of SEQ ID NO: 915277
acaguuacucagcaucauu

SEQ ID NO: 1067809 - RNA, 19 nt, Artificial Sequence
  Description of Artificial Sequence: Synthetic oligonucleotide
  Antisense strand to SEQ ID NO: 1067808
aaugaugcugaguaacugu

SEQ ID NO: 1067810 - RNA, 19 nt, Artificial Sequence
  Description of Artificial Sequence: Synthetic oligonucleotide
  Sense strand starting at position 1084 of SEQ ID NO: 915277
guaugauauccacaguguc

SEQ ID NO: 1067811 - RNA, 19 nt, Artificial Sequence
  Description of Artificial Sequence: Synthetic oligonucleotide
  Antisense strand to SEQ ID NO: 1067810
gacacuguggauaucauac

SEQ ID NO: 1067812 - RNA, 19 nt, Artificial Sequence
  Description of Artificial Sequence: Synthetic oligonucleotide
  Sense strand starting at position 1145 of SEQ ID NO: 915277
ggaagacugucaccugacu

SEQ ID NO: 1067813 - RNA, 19 nt, Artificial Sequence
  Description of Artificial Sequence: Synthetic oligonucleotide
  Antisense strand to SEQ ID NO: 1067812
agucaggugacagucuucc

SEQ ID NO: 1067814 - RNA, 19 nt, Artificial Sequence
  Description of Artificial Sequence: Synthetic oligonucleotide
  Sense strand starting at position 2267 of SEQ ID NO: 915277
cagggugagcgaugaauuc

SEQ ID NO: 1067815 - RNA, 19 nt, Artificial Sequence
  Description of Artificial Sequence: Synthetic oligonucleotide
  Antisense strand to SEQ ID NO: 1067814
gaauucaucgcucacccug

SEQ ID NO: 1067816 - RNA, 19 nt, Artificial Sequence
  Description of Artificial Sequence: Synthetic oligonucleotide
  Sense strand starting at position 2362 of SEQ ID NO: 915277
guaccauggagugggaaua

SEQ ID NO: 1067817 - RNA, 19 nt, Artificial Sequence
  Description of Artificial Sequence: Synthetic oligonucleotide
  Antisense strand to SEQ ID NO: 1067816
uauucccacuccaugguac

SEQ ID NO: 1067818 - RNA, 19 nt, Artificial Sequence
  Description of Artificial Sequence: Synthetic oligonucleotide
  Sense strand starting at position 2403 of SEQ ID NO: 915277
cagggacguccagaagagu

SEQ ID NO: 1067819 - RNA, 19 nt, Artificial Sequence
  Description of Artificial Sequence: Synthetic oligonucleotide
  Antisense strand to SEQ ID NO: 1067818
acucuucuggacgucccug

SEQ ID NO: 1067820 - RNA, 19 nt, Artificial Sequence
  Description of Artificial Sequence: Synthetic oligonucleotide
  Sense strand starting at position 2414 of SEQ ID NO: 915277
agaagagucaauuaugcgu

SEQ ID NO: 1067821 - RNA, 19 nt, Artificial Sequence
  Description of Artificial Sequence: Synthetic oligonucleotide
  Antisense strand to SEQ ID NO: 1067820
acgcauaauugacucuucu

SEQ ID NO: 1067822 - RNA, 19 nt, Artificial Sequence
  Description of Artificial Sequence: Synthetic oligonucleotide
  Sense strand starting at position 2622 of SEQ ID NO: 915277
agagucacuuaagcaaaua

SEQ ID NO: 1067823 - RNA, 19 nt, Artificial Sequence
  Description of Artificial Sequence: Synthetic oligonucleotide
  Antisense strand to SEQ ID NO: 1067822
uauuugcuuaagugacucu

SEQ ID NO: 1067824 - RNA, 19 nt, Artificial Sequence
  Description of Artificial Sequence: Synthetic oligonucleotide
  Sense strand starting at position 2845 of SEQ ID NO: 915277
gucagaguaacugaggguu

SEQ ID NO: 1067825 - RNA, 19 nt, Artificial Sequence
  Description of Artificial Sequence: Synthetic oligonucleotide
  Antisense strand to SEQ ID NO: 1067824
aacccucaguuacucugac

SEQ ID NO: 1067826 - RNA, 19 nt, Artificial Sequence
  Description of Artificial Sequence: Synthetic oligonucleotide
  Sense strand starting at position 2996 of SEQ ID NO: 915277
gcuuuccuggcagaaggua

SEQ ID NO: 1067827 - RNA, 19 nt, Artificial Sequence
  Description of Artificial Sequence: Synthetic oligonucleotide
  Antisense strand to SEQ ID NO: 1067826
uaccuucugccaggaaagc

SEQ ID NO: 1067828 - RNA, 19 nt, Artificial Sequence
  Description of Artificial Sequence: Synthetic oligonucleotide
  Sense strand starting at position 3074 of SEQ ID NO: 915277
uuucuugugcuugaaacua

SEQ ID NO: 1067829 - RNA, 19 nt, Artificial Sequence
  Description of Artificial Sequence: Synthetic oligonucleotide
  Antisense strand to SEQ ID NO: 1067828
uaguuucaagcacaagaaa

SEQ ID NO: 1067830 - RNA, 19 nt, Artificial Sequence
  Description of Artificial Sequence: Synthetic oligonucleotide
  Sense strand starting at position 3136 of SEQ ID NO: 915277
gugcuuguccucuaugaaa

SEQ ID NO: 1067831 - RNA, 19 nt, Artificial Sequence
  Description of Artificial Sequence: Synthetic oligonucleotide
  Antisense strand to SEQ ID NO: 1067830
uuucauagaggacaagcac

SEQ ID NO: 1067832 - RNA, 19 nt, Artificial Sequence
  Description of Artificial Sequence: Synthetic oligonucleotide
  Sense strand starting at position 3280 of SEQ ID NO: 915277
cucauuuaaucgcugucca

SEQ ID NO: 1067833 - RNA, 19 nt, Artificial Sequence
  Description of Artificial Sequence: Synthetic oligonucleotide
  Antisense strand to SEQ ID NO: 1067832
uggacagcgauuaaaugag

SEQ ID NO: 1067834 - RNA, 19 nt, Artificial Sequence
  Description of Artificial Sequence: Synthetic oligonucleotide
  Sense strand starting at position 3287 of SEQ ID NO: 915277
aaucgcuguccagaguauu

SEQ ID NO: 1067835 - RNA, 19 nt, Artificial Sequence
  Description of Artificial Sequence: Synthetic oligonucleotide
  Antisense strand to SEQ ID NO: 1067834
aauacucuggacagcgauu

SEQ ID NO: 1067836 - RNA, 19 nt, Artificial Sequence
  Description of Artificial Sequence: Synthetic oligonucleotide
  Sense strand starting at position 3385 of SEQ ID NO: 915277
ccacuuuaccgaugagaag

SEQ ID NO: 1067837 - RNA, 19 nt, Artificial Sequence
  Description of Artificial Sequence: Synthetic oligonucleotide
  Antisense strand to SEQ ID NO: 1067836
cuucucaucgguaaagugg

SEQ ID NO: 1067838 - RNA, 19 nt, Artificial Sequence
  Description of Artificial Sequence: Synthetic oligonucleotide
  Sense strand starting at position 3422 of SEQ ID NO: 915277
ucauuaaccuacucagugu

SEQ ID NO: 1067839 - RNA, 19 nt, Artificial Sequence
  Description of Artificial Sequence: Synthetic oligonucleotide
  Antisense strand to SEQ ID NO: 1067838
acacugaguagguuaauga

SEQ ID NO: 1067840 - RNA, 19 nt, Artificial Sequence
  Description of Artificial Sequence: Synthetic oligonucleotide
  Sense strand starting at position 3425 of SEQ ID NO: 915277
uuaaccuacucaguguuaa

SEQ ID NO: 1067841 - RNA, 19 nt, Artificial Sequence
  Description of Artificial Sequence: Synthetic oligonucleotide
  Antisense strand to SEQ ID NO: 1067840
uuaacacugaguagguuaa

SEQ ID NO: 1067842 - RNA, 19 nt, Artificial Sequence
  Description of Artificial Sequence: Synthetic oligonucleotide
  Sense strand starting at position 3509 of SEQ ID NO: 915277
guuuguggcauuugccaau

SEQ ID NO: 1067843 - RNA, 19 nt, Artificial Sequence
  Description of Artificial Sequence: Synthetic oligonucleotide
  Antisense strand to SEQ ID NO: 1067842
auuggcaaaugccacaaac

SEQ ID NO: 1067844 - RNA, 19 nt, Artificial Sequence
  Description of Artificial Sequence: Synthetic oligonucleotide
  Sense strand starting at position 3533 of SEQ ID NO: 915277
uggugucaauucucccaca

SEQ ID NO: 1067845 - RNA, 19 nt, Artificial Sequence
  Description of Artificial Sequence: Synthetic oligonucleotide
  Antisense strand to SEQ ID NO: 1067844
ugugggagaauugacacca

SEQ ID NO: 1067846 - RNA, 19 nt, Artificial Sequence
  Description of Artificial Sequence: Synthetic oligonucleotide
  Sense strand starting at position 3582 of SEQ ID NO: 915277
cacugacugugguuggaua

SEQ ID NO: 1067847 - RNA, 19 nt, Artificial Sequence
  Description of Artificial Sequence: Synthetic oligonucleotide
  Antisense strand to SEQ ID NO: 1067846
uauccaaccacagucagug

SEQ ID NO: 1067848 - RNA, 19 nt, Artificial Sequence
  Description of Artificial Sequence: Synthetic oligonucleotide
  Sense strand starting at position 3583 of SEQ ID NO: 915277
acugacugugguuggauaa

SEQ ID NO: 1067849 - RNA, 19 nt, Artificial Sequence
  Description of Artificial Sequence: Synthetic oligonucleotide
  Antisense strand to SEQ ID NO: 1067848
uuauccaaccacagucagu

SEQ ID NO: 1067850 - RNA, 19 nt, Artificial Sequence
  Description of Artificial Sequence: Synthetic oligonucleotide
  Sense strand starting at position 3584 of SEQ ID NO: 915277
cugacugugguuggauaaa

SEQ ID NO: 1067851 - RNA, 19 nt, Artificial Sequence
  Description of Artificial Sequence: Synthetic oligonucleotide
  Antisense strand to SEQ ID NO: 1067850
uuuauccaaccacagucag

SEQ ID NO: 1067852 - RNA, 19 nt, Artificial Sequence
  Description of Artificial Sequence: Synthetic oligonucleotide
  Sense strand starting at position 3650 of SEQ ID NO: 915277
acugcuuguguagacauga

SEQ ID NO: 1067853 - RNA, 19 nt, Artificial Sequence
  Description of Artificial Sequence: Synthetic oligonucleotide
  Antisense strand to SEQ ID NO: 1067852
ucaugucuacacaagcagu

SEQ ID NO: 1067854 - RNA, 19 nt, Artificial Sequence
  Description of Artificial Sequence: Synthetic oligonucleotide
  Sense strand starting at position 3655 of SEQ ID NO: 915277
uuguguagacaugagaugu

SEQ ID NO: 1067855 - RNA, 19 nt, Artificial Sequence
  Description of Artificial Sequence: Synthetic oligonucleotide
  Antisense strand to SEQ ID NO: 1067854
acaucucaugucuacacaa

SEQ ID NO: 1067856 - RNA, 19 nt, Artificial Sequence
  Description of Artificial Sequence: Synthetic oligonucleotide
  Sense strand starting at position 3659 of SEQ ID NO: 915277
guagacaugagauguaaca

SEQ ID NO: 1067857 - RNA, 19 nt, Artificial Sequence
  Description of Artificial Sequence: Synthetic oligonucleotide
  Antisense strand to SEQ ID NO: 1067856
uguuacaucucaugucuac

SEQ ID NO: 1067858 - RNA, 19 nt, Artificial Sequence
  Description of Artificial Sequence: Synthetic oligonucleotide
  Sense strand starting at position 3692 of SEQ ID NO: 915277
cgaagaaggacuuguugca

SEQ ID NO: 1067859 - RNA, 19 nt, Artificial Sequence
  Description of Artificial Sequence: Synthetic oligonucleotide
  Antisense strand to SEQ ID NO: 1067858
ugcaacaaguccuucuucg

SEQ ID NO: 1067860 - RNA, 19 nt, Artificial Sequence
  Description of Artificial Sequence: Synthetic oligonucleotide
  Sense strand starting at position 3733 of SEQ ID NO: 915277
aagaguauccaguggucag

SEQ ID NO: 1067861 - RNA, 19 nt, Artificial Sequence
  Description of Artificial Sequence: Synthetic oligonucleotide
  Antisense strand to SEQ ID NO: 1067860
cugaccacuggauacucuu

SEQ ID NO: 1067862 - RNA, 19 nt, Artificial Sequence
  Description of Artificial Sequence: Synthetic oligonucleotide
  Sense strand starting at position 3760 of SEQ ID NO: 915277
gggucuguccuauagcaga

SEQ ID NO: 1067863 - RNA, 19 nt, Artificial Sequence
  Description of Artificial Sequence: Synthetic oligonucleotide
  Antisense strand to SEQ ID NO: 1067862
ucugcuauaggacagaccc

SEQ ID NO: 1067864 - RNA, 19 nt, Artificial Sequence
  Description of Artificial Sequence: Synthetic oligonucleotide
  Sense strand starting at position 3780 of SEQ ID NO: 915277
agcagucucgcuuagggaa

SEQ ID NO: 1067865 - RNA, 19 nt, Artificial Sequence
  Description of Artificial Sequence: Synthetic oligonucleotide
  Antisense strand to SEQ ID NO: 1067864
uucccuaagcgagacugcu

SEQ ID NO: 1067866 - RNA, 19 nt, Artificial Sequence
  Description of Artificial Sequence: Synthetic oligonucleotide
  Sense strand starting at position 3816 of SEQ ID NO: 915277
gcccuaauccagcaaugga

SEQ ID NO: 1067867 - RNA, 19 nt, Artificial Sequence
  Description of Artificial Sequence: Synthetic oligonucleotide
  Antisense strand to SEQ ID NO: 1067866
uccauugcuggauuagggc

SEQ ID NO: 1067868 - RNA, 19 nt, Artificial Sequence
  Description of Artificial Sequence: Synthetic oligonucleotide
  Sense strand starting at position 3878 of SEQ ID NO: 915277
agacaauucuuacaggaaa

SEQ ID NO: 1067869 - RNA, 19 nt, Artificial Sequence
  Description of Artificial Sequence: Synthetic oligonucleotide
  Antisense strand to SEQ ID NO: 1067868
uuuccuguaagaauugucu

SEQ ID NO: 1067870 - RNA, 19 nt, Artificial Sequence
  Description of Artificial Sequence: Synthetic oligonucleotide
  Sense strand starting at position 3923 of SEQ ID NO: 915277
ugaucaaggcuuugucaag

SEQ ID NO: 1067871 - RNA, 19 nt, Artificial Sequence
  Description of Artificial Sequence: Synthetic oligonucleotide
  Antisense strand to SEQ ID NO: 1067870
cuugacaaagccuugauca

SEQ ID NO: 1067872 - RNA, 19 nt, Artificial Sequence
  Description of Artificial Sequence: Synthetic oligonucleotide
  Sense strand starting at position 3972 of SEQ ID NO: 915277
gcuuccuuucccuuucgua

SEQ ID NO: 1067873 - RNA, 19 nt, Artificial Sequence
  Description of Artificial Sequence: Synthetic oligonucleotide
  Antisense strand to SEQ ID NO: 1067872
uacgaaagggaaaggaagc

SEQ ID NO: 1067874 - RNA, 19 nt, Artificial Sequence
  Description of Artificial Sequence: Synthetic oligonucleotide
  Sense strand starting at position 3 of SEQ ID NO: 915278
ggguguuggccauacagua

SEQ ID NO: 1067875 - RNA, 19 nt, Artificial Sequence
  Description of Artificial Sequence: Synthetic oligonucleotide
  Antisense strand to SEQ ID NO: 1067874
uacuguauggccaacaccc

SEQ ID NO: 1067876 - RNA, 19 nt, Artificial Sequence
  Description of Artificial Sequence: Synthetic oligonucleotide
  Sense strand starting at position 42 of SEQ ID NO: 915278
gcagacuauuauguaagga

SEQ ID NO: 1067877 - RNA, 19 nt, Artificial Sequence
  Description of Artificial Sequence: Synthetic oligonucleotide
  Antisense strand to SEQ ID NO: 1067876
uccuuacauaauagucugc

SEQ ID NO: 1067878 - RNA, 19 nt, Artificial Sequence
  Description of Artificial Sequence: Synthetic oligonucleotide
  Sense strand starting at position 97 of SEQ ID NO: 915278
ggguauuaauccuucuccu

SEQ ID NO: 1067879 - RNA, 19 nt, Artificial Sequence
  Description of Artificial Sequence: Synthetic oligonucleotide
  Antisense strand to SEQ ID NO: 1067878
aggagaaggauuaauaccc

SEQ ID NO: 1067880 - RNA, 19 nt, Artificial Sequence
  Description of Artificial Sequence: Synthetic oligonucleotide
  Sense strand starting at position 183 of SEQ ID NO: 915278
ucauccuuccuacgaagaa

SEQ ID NO: 1067881 - RNA, 19 nt, Artificial Sequence
  Description of Artificial Sequence: Synthetic oligonucleotide
  Antisense strand to SEQ ID NO: 1067880
uucuucguaggaaggauga

SEQ ID NO: 1067882 - RNA, 19 nt, Artificial Sequence
  Description of Artificial Sequence: Synthetic oligonucleotide
  Sense strand starting at position 287 of SEQ ID NO: 915278
uggucauaguacuuagaca

SEQ ID NO: 1067883 - RNA, 19 nt, Artificial Sequence
  Description of Artificial Sequence: Synthetic oligonucleotide
  Antisense strand to SEQ ID NO: 1067882
ugucuaaguacuaugacca

SEQ ID NO: 1067884 - RNA, 19 nt, Artificial Sequence
  Description of Artificial Sequence: Synthetic oligonucleotide
  Sense strand starting at position 319 of SEQ ID NO: 915278
ccucucaucgaguauagau

SEQ ID NO: 1067885 - RNA, 19 nt, Artificial Sequence
  Description of Artificial Sequence: Synthetic oligonucleotide
  Antisense strand to SEQ ID NO: 1067884
aucuauacucgaugagagg

SEQ ID NO: 1067886 - RNA, 19 nt, Artificial Sequence
  Description of Artificial Sequence: Synthetic oligonucleotide
  Sense strand starting at position 321 of SEQ ID NO: 915278
ucucaucgaguauagauca

SEQ ID NO: 1067887 - RNA, 19 nt, Artificial Sequence
  Description of Artificial Sequence: Synthetic oligonucleotide
  Antisense strand to SEQ ID NO: 1067886
ugaucuauacucgaugaga

SEQ ID NO: 1067888 - RNA, 19 nt, Artificial Sequence
  Description of Artificial Sequence: Synthetic oligonucleotide
  Sense strand starting at position 326 of SEQ ID NO: 915278
ucgaguauagaucauucua

SEQ ID NO: 1067889 - RNA, 19 nt, Artificial Sequence
  Description of Artificial Sequence: Synthetic oligonucleotide
  Antisense strand to SEQ ID NO: 1067888
uagaaugaucuauacucga

SEQ ID NO: 1067890 - RNA, 19 nt, Artificial Sequence
  Description of Artificial Sequence: Synthetic oligonucleotide
  Sense strand starting at position 328 of SEQ ID NO: 915278
gaguauagaucauucuaag

SEQ ID NO: 1067891 - RNA, 19 nt, Artificial Sequence
  Description of Artificial Sequence: Synthetic oligonucleotide
  Antisense strand to SEQ ID NO: 1067890
cuuagaaugaucuauacuc

SEQ ID NO: 1067892 - RNA, 19 nt, Artificial Sequence
  Description of Artificial Sequence: Synthetic oligonucleotide
  Sense strand starting at position 396 of SEQ ID NO: 915278
ugaauagauaucuguuggu

SEQ ID NO: 1067893 - RNA, 19 nt, Artificial Sequence
  Description of Artificial Sequence: Synthetic oligonucleotide
  Antisense strand to SEQ ID NO: 1067892
accaacagauaucuauuca

SEQ ID NO: 1067894 - RNA, 19 nt, Artificial Sequence
  Description of Artificial Sequence: Synthetic oligonucleotide
  Sense strand starting at position 400 of SEQ ID NO: 915278
uagauaucuguugguuaaa

SEQ ID NO: 1067895 - RNA, 19 nt, Artificial Sequence
  Description of Artificial Sequence: Synthetic oligonucleotide
  Antisense strand to SEQ ID NO: 1067894
uuuaaccaacagauaucua

SEQ ID NO: 1067896 - RNA, 19 nt, Artificial Sequence
  Description of Artificial Sequence: Synthetic oligonucleotide
  Sense strand starting at position 401 of SEQ ID NO: 915278
agauaucuguugguuaaau

SEQ ID NO: 1067897 - RNA, 19 nt, Artificial Sequence
  Description of Artificial Sequence: Synthetic oligonucleotide
  Antisense strand to SEQ ID NO: 1067896
auuuaaccaacagauaucu

SEQ ID NO: 1067898 - RNA, 19 nt, Artificial Sequence
  Description of Artificial Sequence: Synthetic oligonucleotide
  Sense strand starting at position 402 of SEQ ID NO: 915278
gauaucuguugguuaaauu

SEQ ID NO: 1067899 - RNA, 19 nt, Artificial Sequence
  Description of Artificial Sequence: Synthetic oligonucleotide
  Antisense strand to SEQ ID NO: 1067898
aauuuaaccaacagauauc

SEQ ID NO: 1067900 - RNA, 19 nt, Artificial Sequence
  Description of Artificial Sequence: Synthetic oligonucleotide
  Sense strand starting at position 625 of SEQ ID NO: 915278
guauaauggaaagggucua

SEQ ID NO: 1067901 - RNA, 19 nt, Artificial Sequence
  Description of Artificial Sequence: Synthetic oligonucleotide
  Antisense strand to SEQ ID NO: 1067900
uagacccuuuccauuauac

SEQ ID NO: 1067902 - RNA, 19 nt, Artificial Sequence
  Description of Artificial Sequence: Synthetic oligonucleotide
  Sense strand starting at position 641 of SEQ ID NO: 915278
cuaugcauuuaagacagaa

SEQ ID NO: 1067903 - RNA, 19 nt, Artificial Sequence
  Description of Artificial Sequence: Synthetic oligonucleotide
  Antisense strand to SEQ ID NO: 1067902
uucugucuuaaaugcauag

SEQ ID NO: 1067904 - RNA, 19 nt, Artificial Sequence
  Description of Artificial Sequence: Synthetic oligonucleotide
  Sense strand starting at position 680 of SEQ ID NO: 915278
ccucuaucauuugacgaga

SEQ ID NO: 1067905 - RNA, 19 nt, Artificial Sequence
  Description of Artificial Sequence: Synthetic oligonucleotide
  Antisense strand to SEQ ID NO: 1067904
ucucgucaaaugauagagg

SEQ ID NO: 1067906 - RNA, 19 nt, Artificial Sequence
  Description of Artificial Sequence: Synthetic oligonucleotide
  Sense strand starting at position 691 of SEQ ID NO: 915278
ugacgagaugcaugaucuu

SEQ ID NO: 1067907 - RNA, 19 nt, Artificial Sequence
  Description of Artificial Sequence: Synthetic oligonucleotide
  Antisense strand to SEQ ID NO: 1067906
aagaucaugcaucucguca

SEQ ID NO: 1067908 - RNA, 19 nt, Artificial Sequence
  Description of Artificial Sequence: Synthetic oligonucleotide
  Sense strand starting at position 698 of SEQ ID NO: 915278
augcaugaucuugggcaaa

SEQ ID NO: 1067909 - RNA, 19 nt, Artificial Sequence
  Description of Artificial Sequence: Synthetic oligonucleotide
  Antisense strand to SEQ ID NO: 1067908
uuugcccaagaucaugcau

SEQ ID NO: 1067910 - RNA, 19 nt, Artificial Sequence
  Description of Artificial Sequence: Synthetic oligonucleotide
  Sense strand starting at position 1047 of SEQ ID NO: 915278
guguauuccuaauuaagac

SEQ ID NO: 1067911 - RNA, 19 nt, Artificial Sequence
  Description of Artificial Sequence: Synthetic oligonucleotide
  Antisense strand to SEQ ID NO: 1067910
gucuuaauuaggaauacac

SEQ ID NO: 1067912 - RNA, 19 nt, Artificial Sequence
  Description of Artificial Sequence: Synthetic oligonucleotide
  Sense strand starting at position 1056 of SEQ ID NO: 915278
uaauuaagacgucagcuuu

SEQ ID NO: 1067913 - RNA, 19 nt, Artificial Sequence
  Description of Artificial Sequence: Synthetic oligonucleotide
  Antisense strand to SEQ ID NO: 1067912
aaagcugacgucuuaauua

SEQ ID NO: 1067914 - RNA, 19 nt, Artificial Sequence
  Description of Artificial Sequence: Synthetic oligonucleotide
  Sense strand starting at position 1460 of SEQ ID NO: 915278
guauuaguuuccuuaauag

SEQ ID NO: 1067915 - RNA, 19 nt, Artificial Sequence
  Description of Artificial Sequence: Synthetic oligonucleotide
  Antisense strand to SEQ ID NO: 1067914
cuauuaaggaaacuaauac

SEQ ID NO: 1067916 - RNA, 19 nt, Artificial Sequence
  Description of Artificial Sequence: Synthetic oligonucleotide
  Sense strand starting at position 1474 of SEQ ID NO: 915278
aauaguaucguccaguaug

SEQ ID NO: 1067917 - RNA, 19 nt, Artificial Sequence
  Description of Artificial Sequence: Synthetic oligonucleotide
  Antisense strand to SEQ ID NO: 1067916
cauacuggacgauacuauu

SEQ ID NO: 1067918 - RNA, 19 nt, Artificial Sequence
  Description of Artificial Sequence: Synthetic oligonucleotide
  Sense strand starting at position 1579 of SEQ ID NO: 915278
acugacgacuaaucaauau

SEQ ID NO: 1067919 - RNA, 19 nt, Artificial Sequence
  Description of Artificial Sequence: Synthetic oligonucleotide
  Antisense strand to SEQ ID NO: 1067918
auauugauuagucgucagu

SEQ ID NO: 1067920 - RNA, 19 nt, Artificial Sequence
  Description of Artificial Sequence: Synthetic oligonucleotide
  Sense strand starting at position 1737 of SEQ ID NO: 915278
accauacggguuugauacu

SEQ ID NO: 1067921 - RNA, 19 nt, Artificial Sequence
  Description of Artificial Sequence: Synthetic oligonucleotide
  Antisense strand to SEQ ID NO: 1067920
aguaucaaacccguauggu

SEQ ID NO: 1067922 - RNA, 19 nt, Artificial Sequence
  Description of Artificial Sequence: Synthetic oligonucleotide
  Sense strand starting at position 1765 of SEQ ID NO: 915278
ggacccuguucccuccaua

SEQ ID NO: 1067923 - RNA, 19 nt, Artificial Sequence
  Description of Artificial Sequence: Synthetic oligonucleotide
  Antisense strand to SEQ ID NO: 1067922
uauggagggaacagggucc

SEQ ID NO: 1067924 - RNA, 19 nt, Artificial Sequence
  Description of Artificial Sequence: Synthetic oligonucleotide
  Sense strand starting at position 1788 of SEQ ID NO: 915278
ucgacaauugacgaaguaa

SEQ ID NO: 1067925 - RNA, 19 nt, Artificial Sequence
  Description of Artificial Sequence: Synthetic oligonucleotide
  Antisense strand to SEQ ID NO: 1067924
uuacuucgucaauugucga

SEQ ID NO: 1067926 - RNA, 19 nt, Artificial Sequence
  Description of Artificial Sequence: Synthetic oligonucleotide
  Sense strand starting at position 1811 of SEQ ID NO: 915278
uauugauauccuggaccag

SEQ ID NO: 1067927 - RNA, 19 nt, Artificial Sequence
  Description of Artificial Sequence: Synthetic oligonucleotide
  Antisense strand to SEQ ID NO: 1067926
cugguccaggauaucaaua

SEQ ID NO: 1067928 - RNA, 19 nt, Artificial Sequence
  Description of Artificial Sequence: Synthetic oligonucleotide
  Sense strand starting at position 2116 of SEQ ID NO: 915278
ugguuccugaaaggaugua

SEQ ID NO: 1067929 - RNA, 19 nt, Artificial Sequence
  Description of Artificial Sequence: Synthetic oligonucleotide
  Antisense strand to SEQ ID NO: 1067928
uacauccuuucaggaacca

SEQ ID NO: 1067930 - RNA, 19 nt, Artificial Sequence
  Description of Artificial Sequence: Synthetic oligonucleotide
  Sense strand starting at position 2376 of SEQ ID NO: 915278
ccaugacuuccuuguuuag

SEQ ID NO: 1067931 - RNA, 19 nt, Artificial Sequence
  Description of Artificial Sequence: Synthetic oligonucleotide
  Antisense strand to SEQ ID NO: 1067930
cuaaacaaggaagucaugg

SEQ ID NO: 1067932 - RNA, 19 nt, Artificial Sequence
  Description of Artificial Sequence: Synthetic oligonucleotide
  Sense strand starting at position 2633 of SEQ ID NO: 915278
aggcguagugcugggauuu

SEQ ID NO: 1067933 - RNA, 19 nt, Artificial Sequence
  Description of Artificial Sequence: Synthetic oligonucleotide
  Antisense strand to SEQ ID NO: 1067932
aaaucccagcacuacgccu

SEQ ID NO: 1067934 - RNA, 19 nt, Artificial Sequence
  Description of Artificial Sequence: Synthetic oligonucleotide
  Sense strand starting at position 2657 of SEQ ID NO: 915278
cggaucucuugguuuagga

SEQ ID NO: 1067935 - RNA, 19 nt, Artificial Sequence
  Description of Artificial Sequence: Synthetic oligonucleotide
  Antisense strand to SEQ ID NO: 1067934
uccuaaaccaagagauccg

SEQ ID NO: 1067936 - RNA, 19 nt, Artificial Sequence
  Description of Artificial Sequence: Synthetic oligonucleotide
  Sense strand starting at position 2744 of SEQ ID NO: 915278
caguguauuuaggaagaga

SEQ ID NO: 1067937 - RNA, 19 nt, Artificial Sequence
  Description of Artificial Sequence: Synthetic oligonucleotide
  Antisense strand to SEQ ID NO: 1067936
ucucuuccuaaauacacug

SEQ ID NO: 1067938 - RNA, 19 nt, Artificial Sequence
  Description of Artificial Sequence: Synthetic oligonucleotide
  Sense strand starting at position 2994 of SEQ ID NO: 915278
ugugcuuccagagagguua

SEQ ID NO: 1067939 - RNA, 19 nt, Artificial Sequence
  Description of Artificial Sequence: Synthetic oligonucleotide
  Antisense strand to SEQ ID NO: 1067938
uaaccucucuggaagcaca

SEQ ID NO: 1067940 - RNA, 19 nt, Artificial Sequence
  Description of Artificial Sequence: Synthetic oligonucleotide
  Sense strand starting at position 3121 of SEQ ID NO: 915278
aaaugaguuguguaaagug

SEQ ID NO: 1067941 - RNA, 19 nt, Artificial Sequence
  Description of Artificial Sequence: Synthetic oligonucleotide
  Antisense strand to SEQ ID NO: 1067940
cacuuuacacaacucauuu

SEQ ID NO: 1067942 - RNA, 19 nt, Artificial Sequence
  Description of Artificial Sequence: Synthetic oligonucleotide
  Sense strand starting at position 3204 of SEQ ID NO: 915278
ccuacaaagccuugugaug

SEQ ID NO: 1067943 - RNA, 19 nt, Artificial Sequence
  Description of Artificial Sequence: Synthetic oligonucleotide
  Antisense strand to SEQ ID NO: 1067942
caucacaaggcuuuguagg

SEQ ID NO: 1067944 - RNA, 19 nt, Artificial Sequence
  Description of Artificial Sequence: Synthetic oligonucleotide
  Sense strand starting at position 3210 of SEQ ID NO: 915278
aagccuugugaugaucacu

SEQ ID NO: 1067945 - RNA, 19 nt, Artificial Sequence
  Description of Artificial Sequence: Synthetic oligonucleotide
  Antisense strand to SEQ ID NO: 1067944
agugaucaucacaaggcuu

SEQ ID NO: 1067946 - RNA, 19 nt, Artificial Sequence
  Description of Artificial Sequence: Synthetic oligonucleotide
  Sense strand starting at position 3215 of SEQ ID NO: 915278
uugugaugaucacuuacuu

SEQ ID NO: 1067947 - RNA, 19 nt, Artificial Sequence
  Description of Artificial Sequence: Synthetic oligonucleotide
  Antisense strand to SEQ ID NO: 1067946
aaguaagugaucaucacaa

SEQ ID NO: 1067948 - RNA, 19 nt, Artificial Sequence
  Description of Artificial Sequence: Synthetic oligonucleotide
  Sense strand starting at position 3497 of SEQ ID NO: 915278
cuguacacuguguaguaaa

SEQ ID NO: 1067949 - RNA, 19 nt, Artificial Sequence
  Description of Artificial Sequence: Synthetic oligonucleotide
  Antisense strand to SEQ ID NO: 1067948
uuuacuacacaguguacag

SEQ ID NO: 1067950 - RNA, 19 nt, Artificial Sequence
  Description of Artificial Sequence: Synthetic oligonucleotide
  Sense strand starting at position 3610 of SEQ ID NO: 915278
gguacaugauagguacuua

SEQ ID NO: 1067951 - RNA, 19 nt, Artificial Sequence
  Description of Artificial Sequence: Synthetic oligonucleotide
  Antisense strand to SEQ ID NO: 1067950
uaaguaccuaucauguacc

SEQ ID NO: 1067952 - RNA, 19 nt, Artificial Sequence
  Description of Artificial Sequence: Synthetic oligonucleotide
  Sense strand starting at position 3793 of SEQ ID NO: 915278
aagacaguuugggcaaaua

SEQ ID NO: 1067953 - RNA, 19 nt, Artificial Sequence
  Description of Artificial Sequence: Synthetic oligonucleotide
  Antisense strand to SEQ ID NO: 1067952
uauuugcccaaacugucuu

SEQ ID NO: 1067954 - RNA, 19 nt, Artificial Sequence
  Description of Artificial Sequence: Synthetic oligonucleotide
  Sense strand starting at position 17 of SEQ ID NO: 915279
uggucauaguacuuagaca

SEQ ID NO: 1067955 - RNA, 19 nt, Artificial Sequence
  Description of Artificial Sequence: Synthetic oligonucleotide
  Antisense strand to SEQ ID NO: 1067954
ugucuaaguacuaugacca

SEQ ID NO: 1067956 - RNA, 19 nt, Artificial Sequence
  Description of Artificial Sequence: Synthetic oligonucleotide
  Sense strand starting at position 44 of SEQ ID NO: 915279
uccaaccucucaucgagua

SEQ ID NO: 1067957 - RNA, 19 nt, Artificial Sequence
  Description of Artificial Sequence: Synthetic oligonucleotide
  Antisense strand to SEQ ID NO: 1067956
uacucgaugagagguugga

SEQ ID NO: 1067958 - RNA, 19 nt, Artificial Sequence
  Description of Artificial Sequence: Synthetic oligonucleotide
  Sense strand starting at position 49 of SEQ ID NO: 915279
ccucucaucgaguauagau

SEQ ID NO: 1067959 - RNA, 19 nt, Artificial Sequence
  Description of Artificial Sequence: Synthetic oligonucleotide
  Antisense strand to SEQ ID NO: 1067958
aucuauacucgaugagagg

SEQ ID NO: 1067960 - RNA, 19 nt, Artificial Sequence
  Description of Artificial Sequence: Synthetic oligonucleotide
  Sense strand starting at position 51 of SEQ ID NO: 915279
ucucaucgaguauagauca

SEQ ID NO: 1067961 - RNA, 19 nt, Artificial Sequence
  Description of Artificial Sequence: Synthetic oligonucleotide
  Antisense strand to SEQ ID NO: 1067960
ugaucuauacucgaugaga

SEQ ID NO: 1067962 - RNA, 19 nt, Artificial Sequence
  Description of Artificial Sequence: Synthetic oligonucleotide
  Sense strand starting at position 56 of SEQ ID NO: 915279
ucgaguauagaucauucua

SEQ ID NO: 1067963 - RNA, 19 nt, Artificial Sequence
  Description of Artificial Sequence: Synthetic oligonucleotide
  Antisense strand to SEQ ID NO: 1067962
uagaaugaucuauacucga

SEQ ID NO: 1067964 - RNA, 19 nt, Artificial Sequence
  Description of Artificial Sequence: Synthetic oligonucleotide
  Sense strand starting at position 58 of SEQ ID NO: 915279
gaguauagaucauucuaag

SEQ ID NO: 1067965 - RNA, 19 nt, Artificial Sequence
  Description of Artificial Sequence: Synthetic oligonucleotide
  Antisense strand to SEQ ID NO: 1067964
cuuagaaugaucuauacuc

SEQ ID NO: 1067966 - RNA, 19 nt, Artificial Sequence
  Description of Artificial Sequence: Synthetic oligonucleotide
  Sense strand starting at position 126 of SEQ ID NO: 915279
ugaauagauaucuguuggu

SEQ ID NO: 1067967 - RNA, 19 nt, Artificial Sequence
  Description of Artificial Sequence: Synthetic oligonucleotide
  Antisense strand to SEQ ID NO: 1067966
accaacagauaucuauuca

SEQ ID NO: 1067968 - RNA, 19 nt, Artificial Sequence
  Description of Artificial Sequence: Synthetic oligonucleotide
  Sense strand starting at position 130 of SEQ ID NO: 915279
uagauaucuguugguuaaa

SEQ ID NO: 1067969 - RNA, 19 nt, Artificial Sequence
  Description of Artificial Sequence: Synthetic oligonucleotide
  Antisense strand to SEQ ID NO: 1067968
uuuaaccaacagauaucua

SEQ ID NO: 1067970 - RNA, 19 nt, Artificial Sequence
  Description of Artificial Sequence: Synthetic oligonucleotide
  Sense strand starting at position 131 of SEQ ID NO: 915279
agauaucuguugguuaaau

SEQ ID NO: 1067971 - RNA, 19 nt, Artificial Sequence
  Description of Artificial Sequence: Synthetic oligonucleotide
  Antisense strand to SEQ ID NO: 1067970
auuuaaccaacagauaucu

SEQ ID NO: 1067972 - RNA, 19 nt, Artificial Sequence
  Description of Artificial Sequence: Synthetic oligonucleotide
  Sense strand starting at position 132 of SEQ ID NO: 915279
gauaucuguugguuaaauu

SEQ ID NO: 1067973 - RNA, 19 nt, Artificial Sequence
  Description of Artificial Sequence: Synthetic oligonucleotide
  Antisense strand to SEQ ID NO: 1067972
aauuuaaccaacagauauc

SEQ ID NO: 1067974 - RNA, 19 nt, Artificial Sequence
  Description of Artificial Sequence: Synthetic oligonucleotide
  Sense strand starting at position 355 of SEQ ID NO: 915279
guauaauggaaagggucua

SEQ ID NO: 1067975 - RNA, 19 nt, Artificial Sequence
  Description of Artificial Sequence: Synthetic oligonucleotide
  Antisense strand to SEQ ID NO: 1067974
uagacccuuuccauuauac

SEQ ID NO: 1067976 - RNA, 19 nt, Artificial Sequence
  Description of Artificial Sequence: Synthetic oligonucleotide
  Sense strand starting at position 371 of SEQ ID NO: 915279
cuaugcauuuaagacagaa

SEQ ID NO: 1067977 - RNA, 19 nt, Artificial Sequence
  Description of Artificial Sequence: Synthetic oligonucleotide
  Antisense strand to SEQ ID NO: 1067976
uucugucuuaaaugcauag

SEQ ID NO: 1067978 - RNA, 19 nt, Artificial Sequence
  Description of Artificial Sequence: Synthetic oligonucleotide
  Sense strand starting at position 410 of SEQ ID NO: 915279
ccucuaucauuugacgaga

SEQ ID NO: 1067979 - RNA, 19 nt, Artificial Sequence
  Description of Artificial Sequence: Synthetic oligonucleotide
  Antisense strand to SEQ ID NO: 1067978
ucucgucaaaugauagagg

SEQ ID NO: 1067980 - RNA, 19 nt, Artificial Sequence
  Description of Artificial Sequence: Synthetic oligonucleotide
  Sense strand starting at position 421 of SEQ ID NO: 915279
ugacgagaugcaugaucuu

SEQ ID NO: 1067981 - RNA, 19 nt, Artificial Sequence
  Description of Artificial Sequence: Synthetic oligonucleotide
  Antisense strand to SEQ ID NO: 1067980
aagaucaugcaucucguca

SEQ ID NO: 1067982 - RNA, 19 nt, Artificial Sequence
  Description of Artificial Sequence: Synthetic oligonucleotide
  Sense strand starting at position 428 of SEQ ID NO: 915279
augcaugaucuugggcaaa

SEQ ID NO: 1067983 - RNA, 19 nt, Artificial Sequence
  Description of Artificial Sequence: Synthetic oligonucleotide
  Antisense strand to SEQ ID NO: 1067982
uuugcccaagaucaugcau

SEQ ID NO: 1067984 - RNA, 19 nt, Artificial Sequence
  Description of Artificial Sequence: Synthetic oligonucleotide
  Sense strand starting at position 777 of SEQ ID NO: 915279
guguauuccuaauuaagac

SEQ ID NO: 1067985 - RNA, 19 nt, Artificial Sequence
  Description of Artificial Sequence: Synthetic oligonucleotide
  Antisense strand to SEQ ID NO: 1067984
gucuuaauuaggaauacac

SEQ ID NO: 1067986 - RNA, 19 nt, Artificial Sequence
  Description of Artificial Sequence: Synthetic oligonucleotide
  Sense strand starting at position 786 of SEQ ID NO: 915279
uaauuaagacgucagcuuu

SEQ ID NO: 1067987 - RNA, 19 nt, Artificial Sequence
  Description of Artificial Sequence: Synthetic oligonucleotide
  Antisense strand to SEQ ID NO: 1067986
aaagcugacgucuuaauua

SEQ ID NO: 1067988 - RNA, 19 nt, Artificial Sequence
  Description of Artificial Sequence: Synthetic oligonucleotide
  Sense strand starting at position 1190 of SEQ ID NO: 915279
guauuaguuuccuuaauag

SEQ ID NO: 1067989 - RNA, 19 nt, Artificial Sequence
  Description of Artificial Sequence: Synthetic oligonucleotide
  Antisense strand to SEQ ID NO: 1067988
cuauuaaggaaacuaauac

SEQ ID NO: 1067990 - RNA, 19 nt, Artificial Sequence
  Description of Artificial Sequence: Synthetic oligonucleotide
  Sense strand starting at position 1204 of SEQ ID NO: 915279
aauaguaucguccaguaug

SEQ ID NO: 1067991 - RNA, 19 nt, Artificial Sequence
  Description of Artificial Sequence: Synthetic oligonucleotide
  Antisense strand to SEQ ID NO: 1067990
cauacuggacgauacuauu

SEQ ID NO: 1067992 - RNA, 19 nt, Artificial Sequence
  Description of Artificial Sequence: Synthetic oligonucleotide
  Sense strand starting at position 1309 of SEQ ID NO: 915279
acugacgacuaaucaauau

SEQ ID NO: 1067993 - RNA, 19 nt, Artificial Sequence
  Description of Artificial Sequence: Synthetic oligonucleotide
  Antisense strand to SEQ ID NO: 1067992
auauugauuagucgucagu

SEQ ID NO: 1067994 - RNA, 19 nt, Artificial Sequence
  Description of Artificial Sequence: Synthetic oligonucleotide
  Sense strand starting at position 1467 of SEQ ID NO: 915279
accauacggguuugauacu

SEQ ID NO: 1067995 - RNA, 19 nt, Artificial Sequence
  Description of Artificial Sequence: Synthetic oligonucleotide
  Antisense strand to SEQ ID NO: 1067994
aguaucaaacccguauggu

SEQ ID NO: 1067996 - RNA, 19 nt, Artificial Sequence
  Description of Artificial Sequence: Synthetic oligonucleotide
  Sense strand starting at position 1495 of SEQ ID NO: 915279
ggacccuguucccuccaua

SEQ ID NO: 1067997 - RNA, 19 nt, Artificial Sequence
  Description of Artificial Sequence: Synthetic oligonucleotide
  Antisense strand to SEQ ID NO: 1067996
uauggagggaacagggucc

SEQ ID NO: 1067998 - RNA, 19 nt, Artificial Sequence
  Description of Artificial Sequence: Synthetic oligonucleotide
  Sense strand starting at position 1518 of SEQ ID NO: 915279
ucgacaauugacgaaguaa

SEQ ID NO: 1067999 - RNA, 19 nt, Artificial Sequence
  Description of Artificial Sequence: Synthetic oligonucleotide
  Antisense strand to SEQ ID NO: 1067998
uuacuucgucaauugucga

SEQ ID NO: 1068000 - RNA, 19 nt, Artificial Sequence
  Description of Artificial Sequence: Synthetic oligonucleotide
  Sense strand starting at position 1541 of SEQ ID NO: 915279
uauugauauccuggaccag

SEQ ID NO: 1068001 - RNA, 19 nt, Artificial Sequence
  Description of Artificial Sequence: Synthetic oligonucleotide
  Antisense strand to SEQ ID NO: 1068000
cugguccaggauaucaaua

SEQ ID NO: 1068002 - RNA, 19 nt, Artificial Sequence
  Description of Artificial Sequence: Synthetic oligonucleotide
  Sense strand starting at position 1846 of SEQ ID NO: 915279
ugguuccugaaaggaugua

SEQ ID NO: 1068003 - RNA, 19 nt, Artificial Sequence
  Description of Artificial Sequence: Synthetic oligonucleotide
  Antisense strand to SEQ ID NO: 1068002
uacauccuuucaggaacca

SEQ ID NO: 1068004 - RNA, 19 nt, Artificial Sequence
  Description of Artificial Sequence: Synthetic oligonucleotide
  Sense strand starting at position 2106 of SEQ ID NO: 915279
ccaugacuuccuuguuuag

SEQ ID NO: 1068005 - RNA, 19 nt, Artificial Sequence
  Description of Artificial Sequence: Synthetic oligonucleotide
  Antisense strand to SEQ ID NO: 1068004
cuaaacaaggaagucaugg

SEQ ID NO: 1068006 - RNA, 19 nt, Artificial Sequence
  Description of Artificial Sequence: Synthetic oligonucleotide
  Sense strand starting at position 2363 of SEQ ID NO: 915279
aggcguagugcugggauuu

SEQ ID NO: 1068007 - RNA, 19 nt, Artificial Sequence
  Description of Artificial Sequence: Synthetic oligonucleotide
  Antisense strand to SEQ ID NO: 1068006
aaaucccagcacuacgccu

SEQ ID NO: 1068008 - RNA, 19 nt, Artificial Sequence
  Description of Artificial Sequence: Synthetic oligonucleotide
  Sense strand starting at position 2387 of SEQ ID NO: 915279
cggaucucuugguuuagga

SEQ ID NO: 1068009 - RNA, 19 nt, Artificial Sequence
  Description of Artificial Sequence: Synthetic oligonucleotide
  Antisense strand to SEQ ID NO: 1068008
uccuaaaccaagagauccg

SEQ ID NO: 1068010 - RNA, 19 nt, Artificial Sequence
  Description of Artificial Sequence: Synthetic oligonucleotide
  Sense strand starting at position 2474 of SEQ ID NO: 915279
caguguauuuaggaagaga

SEQ ID NO: 1068011 - RNA, 19 nt, Artificial Sequence
  Description of Artificial Sequence: Synthetic oligonucleotide
  Antisense strand to SEQ ID NO: 1068010
ucucuuccuaaauacacug

SEQ ID NO: 1068012 - RNA, 19 nt, Artificial Sequence
  Description of Artificial Sequence: Synthetic oligonucleotide
  Sense strand starting at position 2724 of SEQ ID NO: 915279
ugugcuuccagagagguua

SEQ ID NO: 1068013 - RNA, 19 nt, Artificial Sequence
  Description of Artificial Sequence: Synthetic oligonucleotide
  Antisense strand to SEQ ID NO: 1068012
uaaccucucuggaagcaca

SEQ ID NO: 1068014 - RNA, 19 nt, Artificial Sequence
  Description of Artificial Sequence: Synthetic oligonucleotide
  Sense strand starting at position 2726 of SEQ ID NO: 915279
ugcuuccagagagguuauu

SEQ ID NO: 1068015 - RNA, 19 nt, Artificial Sequence
  Description of Artificial Sequence: Synthetic oligonucleotide
  Antisense strand to SEQ ID NO: 1068014
aauaaccucucuggaagca

SEQ ID NO: 1068016 - RNA, 19 nt, Artificial Sequence
  Description of Artificial Sequence: Synthetic oligonucleotide
  Sense strand starting at position 2847 of SEQ ID NO: 915279
aggcaaaugaguuguguaa

SEQ ID NO: 1068017 - RNA, 19 nt, Artificial Sequence
  Description of Artificial Sequence: Synthetic oligonucleotide
  Antisense strand to SEQ ID NO: 1068016
uuacacaacucauuugccu

SEQ ID NO: 1068018 - RNA, 19 nt, Artificial Sequence
  Description of Artificial Sequence: Synthetic oligonucleotide
  Sense strand starting at position 2851 of SEQ ID NO: 915279
aaaugaguuguguaaagug

SEQ ID NO: 1068019 - RNA, 19 nt, Artificial Sequence
  Description of Artificial Sequence: Synthetic oligonucleotide
  Antisense strand to SEQ ID NO: 1068018
cacuuuacacaacucauuu

SEQ ID NO: 1068020 - RNA, 19 nt, Artificial Sequence
  Description of Artificial Sequence: Synthetic oligonucleotide
  Sense strand starting at position 2934 of SEQ ID NO: 915279
ccuacaaagccuugugaug

SEQ ID NO: 1068021 - RNA, 19 nt, Artificial Sequence
  Description of Artificial Sequence: Synthetic oligonucleotide
  Antisense strand to SEQ ID NO: 1068020
caucacaaggcuuuguagg

SEQ ID NO: 1068022 - RNA, 19 nt, Artificial Sequence
  Description of Artificial Sequence: Synthetic oligonucleotide
  Sense strand starting at position 2940 of SEQ ID NO: 915279
aagccuugugaugaucacu

SEQ ID NO: 1068023 - RNA, 19 nt, Artificial Sequence
  Description of Artificial Sequence: Synthetic oligonucleotide
  Antisense strand to SEQ ID NO: 1068022
agugaucaucacaaggcuu

SEQ ID NO: 1068024 - RNA, 19 nt, Artificial Sequence
  Description of Artificial Sequence: Synthetic oligonucleotide
  Sense strand starting at position 2945 of SEQ ID NO: 915279
uugugaugaucacuuacuu

SEQ ID NO: 1068025 - RNA, 19 nt, Artificial Sequence
  Description of Artificial Sequence: Synthetic oligonucleotide
  Antisense strand to SEQ ID NO: 1068024
aaguaagugaucaucacaa

SEQ ID NO: 1068026 - RNA, 19 nt, Artificial Sequence
  Description of Artificial Sequence: Synthetic oligonucleotide
  Sense strand starting at position 3227 of SEQ ID NO: 915279
cuguacacuguguaguaaa

SEQ ID NO: 1068027 - RNA, 19 nt, Artificial Sequence
  Description of Artificial Sequence: Synthetic oligonucleotide
  Antisense strand to SEQ ID NO: 1068026
uuuacuacacaguguacag

SEQ ID NO: 1068028 - RNA, 19 nt, Artificial Sequence
  Description of Artificial Sequence: Synthetic oligonucleotide
  Sense strand starting at position 3340 of SEQ ID NO: 915279
gguacaugauagguacuua

SEQ ID NO: 1068029 - RNA, 19 nt, Artificial Sequence
  Description of Artificial Sequence: Synthetic oligonucleotide
  Antisense strand to SEQ ID NO: 1068028
uaaguaccuaucauguacc

SEQ ID NO: 1068030 - RNA, 19 nt, Artificial Sequence
  Description of Artificial Sequence: Synthetic oligonucleotide
  Sense strand starting at position 3523 of SEQ ID NO: 915279
aagacaguuugggcaaaua

SEQ ID NO: 1068031 - RNA, 19 nt, Artificial Sequence
  Description of Artificial Sequence: Synthetic oligonucleotide
  Antisense strand to SEQ ID NO: 1068030
uauuugcccaaacugucuu

SEQ ID NO: 1068032 - RNA, 19 nt, Artificial Sequence
  Description of Artificial Sequence: Synthetic oligonucleotide
  Sense strand starting at position 3758 of SEQ ID NO: 915279
cgaucuuuggcucacuaca

SEQ ID NO: 1068033 - RNA, 19 nt, Artificial Sequence
  Description of Artificial Sequence: Synthetic oligonucleotide
  Antisense strand to SEQ ID NO: 1068032
uguagugagccaaagaucg

SEQ ID NO: 1068034 - RNA, 19 nt, Artificial Sequence
  Description of Artificial Sequence: Synthetic oligonucleotide
  Sense strand starting at position 3 of SEQ ID NO: 915280
gggaaaugugugcauuacu

SEQ ID NO: 1068035 - RNA, 19 nt, Artificial Sequence
  Description of Artificial Sequence: Synthetic oligonucleotide
  Antisense strand to SEQ ID NO: 1068034
aguaaugcacacauuuccc

SEQ ID NO: 1068036 - RNA, 19 nt, Artificial Sequence
  Description of Artificial Sequence: Synthetic oligonucleotide
  Sense strand starting at position 14 of SEQ ID NO: 915280
gcauuacuguggguguuaa

SEQ ID NO: 1068037 - RNA, 19 nt, Artificial Sequence
  Description of Artificial Sequence: Synthetic oligonucleotide
  Antisense strand to SEQ ID NO: 1068036
uuaacacccacaguaaugc

SEQ ID NO: 1068038 - RNA, 19 nt, Artificial Sequence
  Description of Artificial Sequence: Synthetic oligonucleotide
  Sense strand starting at position 15 of SEQ ID NO: 915280
cauuacuguggguguuaaa

SEQ ID NO: 1068039 - RNA, 19 nt, Artificial Sequence
  Description of Artificial Sequence: Synthetic oligonucleotide
  Antisense strand to SEQ ID NO: 1068038
uuuaacacccacaguaaug

SEQ ID NO: 1068040 - RNA, 19 nt, Artificial Sequence
  Description of Artificial Sequence: Synthetic oligonucleotide
  Sense strand starting at position 136 of SEQ ID NO: 915280
ggaugauucucacaaaccu

SEQ ID NO: 1068041 - RNA, 19 nt, Artificial Sequence
  Description of Artificial Sequence: Synthetic oligonucleotide
  Antisense strand to SEQ ID NO: 1068040
agguuugugagaaucaucc

SEQ ID NO: 1068042 - RNA, 19 nt, Artificial Sequence
  Description of Artificial Sequence: Synthetic oligonucleotide
  Sense strand starting at position 326 of SEQ ID NO: 915280
aguguuuaccuuuguagaa

SEQ ID NO: 1068043 - RNA, 19 nt, Artificial Sequence
  Description of Artificial Sequence: Synthetic oligonucleotide
  Antisense strand to SEQ ID NO: 1068042
uucuacaaagguaaacacu

SEQ ID NO: 1068044 - RNA, 19 nt, Artificial Sequence
  Description of Artificial Sequence: Synthetic oligonucleotide
  Sense strand starting at position 327 of SEQ ID NO: 915280
guguuuaccuuuguagaag

SEQ ID NO: 1068045 - RNA, 19 nt, Artificial Sequence
  Description of Artificial Sequence: Synthetic oligonucleotide
  Antisense strand to SEQ ID NO: 1068044
cuucuacaaagguaaacac

SEQ ID NO: 1068046 - RNA, 19 nt, Artificial Sequence
  Description of Artificial Sequence: Synthetic oligonucleotide
  Sense strand starting at position 407 of SEQ ID NO: 915280
guuccuuaagcugagcgaa

SEQ ID NO: 1068047 - RNA, 19 nt, Artificial Sequence
  Description of Artificial Sequence: Synthetic oligonucleotide
  Antisense strand to SEQ ID NO: 1068046
uucgcucagcuuaaggaac

SEQ ID NO: 1068048 - RNA, 19 nt, Artificial Sequence
  Description of Artificial Sequence: Synthetic oligonucleotide
  Sense strand starting at position 657 of SEQ ID NO: 915280
cugggcuuucugggugaaa

SEQ ID NO: 1068049 - RNA, 19 nt, Artificial Sequence
  Description of Artificial Sequence: Synthetic oligonucleotide
  Antisense strand to SEQ ID NO: 1068048
uuucacccagaaagcccag

SEQ ID NO: 1068050 - RNA, 19 nt, Artificial Sequence
  Description of Artificial Sequence: Synthetic oligonucleotide
  Sense strand starting at position 658 of SEQ ID NO: 915280
ugggcuuucugggugaaac

SEQ ID NO: 1068051 - RNA, 19 nt, Artificial Sequence
  Description of Artificial Sequence: Synthetic oligonucleotide
  Antisense strand to SEQ ID NO: 1068050
guuucacccagaaagccca

SEQ ID NO: 1068052 - RNA, 19 nt, Artificial Sequence
  Description of Artificial Sequence: Synthetic oligonucleotide
  Sense strand starting at position 659 of SEQ ID NO: 915280
gggcuuucugggugaaacc

SEQ ID NO: 1068053 - RNA, 19 nt, Artificial Sequence
  Description of Artificial Sequence: Synthetic oligonucleotide
  Antisense strand to SEQ ID NO: 1068052
gguuucacccagaaagccc

SEQ ID NO: 1068054 - RNA, 19 nt, Artificial Sequence
  Description of Artificial Sequence: Synthetic oligonucleotide
  Sense strand starting at position 660 of SEQ ID NO: 915280
ggcuuucugggugaaacca

SEQ ID NO: 1068055 - RNA, 19 nt, Artificial Sequence
  Description of Artificial Sequence: Synthetic oligonucleotide
  Antisense strand to SEQ ID NO: 1068054
ugguuucacccagaaagcc

SEQ ID NO: 1068056 - RNA, 19 nt, Artificial Sequence
  Description of Artificial Sequence: Synthetic oligonucleotide
  Sense strand starting at position 887 of SEQ ID NO: 915280
ccugcagagcugggagauu

SEQ ID NO: 1068057 - RNA, 19 nt, Artificial Sequence
  Description of Artificial Sequence: Synthetic oligonucleotide
  Antisense strand to SEQ ID NO: 1068056
aaucucccagcucugcagg

SEQ ID NO: 1068058 - RNA, 19 nt, Artificial Sequence
  Description of Artificial Sequence: Synthetic oligonucleotide
  Sense strand starting at position 992 of SEQ ID NO: 915280
ugggacagaacguguguaa

SEQ ID NO: 1068059 - RNA, 19 nt, Artificial Sequence
  Description of Artificial Sequence: Synthetic oligonucleotide
  Antisense strand to SEQ ID NO: 1068058
uuacacacguucuguccca

SEQ ID NO: 1068060 - RNA, 19 nt, Artificial Sequence
  Description of Artificial Sequence: Synthetic oligonucleotide
  Sense strand starting at position 995 of SEQ ID NO: 915280
gacagaacguguguaauau

SEQ ID NO: 1068061 - RNA, 19 nt, Artificial Sequence
  Description of Artificial Sequence: Synthetic oligonucleotide
  Antisense strand to SEQ ID NO: 1068060
auauuacacacguucuguc

SEQ ID NO: 1068062 - RNA, 19 nt, Artificial Sequence
  Description of Artificial Sequence: Synthetic oligonucleotide
  Sense strand starting at position 996 of SEQ ID NO: 915280
acagaacguguguaauaug

SEQ ID NO: 1068063 - RNA, 19 nt, Artificial Sequence
  Description of Artificial Sequence: Synthetic oligonucleotide
  Antisense strand to SEQ ID NO: 1068062
cauauuacacacguucugu

SEQ ID NO: 1068064 - RNA, 19 nt, Artificial Sequence
  Description of Artificial Sequence: Synthetic oligonucleotide
  Sense strand starting at position 1001 of SEQ ID NO: 915280
acguguguaauaugaaguu

SEQ ID NO: 1068065 - RNA, 19 nt, Artificial Sequence
  Description of Artificial Sequence: Synthetic oligonucleotide
  Antisense strand to SEQ ID NO: 1068064
aacuucauauuacacacgu

SEQ ID NO: 1068066 - RNA, 19 nt, Artificial Sequence
  Description of Artificial Sequence: Synthetic oligonucleotide
  Sense strand starting at position 1062 of SEQ ID NO: 915280
gugauuauaugagcuuuac

SEQ ID NO: 1068067 - RNA, 19 nt, Artificial Sequence
  Description of Artificial Sequence: Synthetic oligonucleotide
  Antisense strand to SEQ ID NO: 1068066
guaaagcucauauaaucac

SEQ ID NO: 1068068 - RNA, 19 nt, Artificial Sequence
  Description of Artificial Sequence: Synthetic oligonucleotide
  Sense strand starting at position 1068 of SEQ ID NO: 915280
auaugagcuuuaccugcaa

SEQ ID NO: 1068069 - RNA, 19 nt, Artificial Sequence
  Description of Artificial Sequence: Synthetic oligonucleotide
  Antisense strand to SEQ ID NO: 1068068
uugcagguaaagcucauau

SEQ ID NO: 1068070 - RNA, 19 nt, Artificial Sequence
  Description of Artificial Sequence: Synthetic oligonucleotide
  Sense strand starting at position 1086 of SEQ ID NO: 915280
agaggugacaaucgaguuu

SEQ ID NO: 1068071 - RNA, 19 nt, Artificial Sequence
  Description of Artificial Sequence: Synthetic oligonucleotide
  Antisense strand to SEQ ID NO: 1068070
aaacucgauugucaccucu

SEQ ID NO: 1068072 - RNA, 19 nt, Artificial Sequence
  Description of Artificial Sequence: Synthetic oligonucleotide
  Sense strand starting at position 1105 of SEQ ID NO: 915280
ggcacaugcugagucuauu

SEQ ID NO: 1068073 - RNA, 19 nt, Artificial Sequence
  Description of Artificial Sequence: Synthetic oligonucleotide
  Antisense strand to SEQ ID NO: 1068072
aauagacucagcaugugcc

SEQ ID NO: 1068074 - RNA, 19 nt, Artificial Sequence
  Description of Artificial Sequence: Synthetic oligonucleotide
  Sense strand starting at position 1114 of SEQ ID NO: 915280
ugagucuauugggaaauaa

SEQ ID NO: 1068075 - RNA, 19 nt, Artificial Sequence
  Description of Artificial Sequence: Synthetic oligonucleotide
  Antisense strand to SEQ ID NO: 1068074
uuauuucccaauagacuca

SEQ ID NO: 1068076 - RNA, 19 nt, Artificial Sequence
  Description of Artificial Sequence: Synthetic oligonucleotide
  Sense strand starting at position 1124 of SEQ ID NO: 915280
gggaaauaauaauaucaag

SEQ ID NO: 1068077 - RNA, 19 nt, Artificial Sequence
  Description of Artificial Sequence: Synthetic oligonucleotide
  Antisense strand to SEQ ID NO: 1068076
cuugauauuauuauuuccc

SEQ ID NO: 1068078 - RNA, 19 nt, Artificial Sequence
  Description of Artificial Sequence: Synthetic oligonucleotide
  Sense strand starting at position 2384 of SEQ ID NO: 915280
ucgggucuucggagccaau

SEQ ID NO: 1068079 - RNA, 19 nt, Artificial Sequence
  Description of Artificial Sequence: Synthetic oligonucleotide
  Antisense strand to SEQ ID NO: 1068078
auuggcuccgaagacccga

SEQ ID NO: 1068080 - RNA, 19 nt, Artificial Sequence
  Description of Artificial Sequence: Synthetic oligonucleotide
  Sense strand starting at position 2590 of SEQ ID NO: 915280
uccagaagguucuucgcau

SEQ ID NO: 1068081 - RNA, 19 nt, Artificial Sequence
  Description of Artificial Sequence: Synthetic oligonucleotide
  Antisense strand to SEQ ID NO: 1068080
augcgaagaaccuucugga

SEQ ID NO: 1068082 - RNA, 19 nt, Artificial Sequence
  Description of Artificial Sequence: Synthetic oligonucleotide
  Sense strand starting at position 2591 of SEQ ID NO: 915280
ccagaagguucuucgcaua

SEQ ID NO: 1068083 - RNA, 19 nt, Artificial Sequence
  Description of Artificial Sequence: Synthetic oligonucleotide
  Antisense strand to SEQ ID NO: 1068082
uaugcgaagaaccuucugg

SEQ ID NO: 1068084 - RNA, 19 nt, Artificial Sequence
  Description of Artificial Sequence: Synthetic oligonucleotide
  Sense strand starting at position 2596 of SEQ ID NO: 915280
agguucuucgcauaaguga

SEQ ID NO: 1068085 - RNA, 19 nt, Artificial Sequence
  Description of Artificial Sequence: Synthetic oligonucleotide
  Antisense strand to SEQ ID NO: 1068084
ucacuuaugcgaagaaccu

SEQ ID NO: 1068086 - RNA, 19 nt, Artificial Sequence
  Description of Artificial Sequence: Synthetic oligonucleotide
  Sense strand starting at position 2607 of SEQ ID NO: 915280
auaagugaauucucaagcu

SEQ ID NO: 1068087 - RNA, 19 nt, Artificial Sequence
  Description of Artificial Sequence: Synthetic oligonucleotide
  Antisense strand to SEQ ID NO: 1068086
agcuugagaauucacuuau

SEQ ID NO: 1068088 - RNA, 19 nt, Artificial Sequence
  Description of Artificial Sequence: Synthetic oligonucleotide
  Sense strand starting at position 2673 of SEQ ID NO: 915280
ccaaaugccucuuuagagu

SEQ ID NO: 1068089 - RNA, 19 nt, Artificial Sequence
  Description of Artificial Sequence: Synthetic oligonucleotide
  Antisense strand to SEQ ID NO: 1068088
acucuaaagaggcauuugg

SEQ ID NO: 1068090 - RNA, 19 nt, Artificial Sequence
  Description of Artificial Sequence: Synthetic oligonucleotide
  Sense strand starting at position 2697 of SEQ ID NO: 915280
ugcuuuguugcuuaccaaa

SEQ ID NO: 1068091 - RNA, 19 nt, Artificial Sequence
  Description of Artificial Sequence: Synthetic oligonucleotide
  Antisense strand to SEQ ID NO: 1068090
uuugguaagcaacaaagca

SEQ ID NO: 1068092 - RNA, 19 nt, Artificial Sequence
  Description of Artificial Sequence: Synthetic oligonucleotide
  Sense strand starting at position 2921 of SEQ ID NO: 915280
cugcucuagucugucagaa

SEQ ID NO: 1068093 - RNA, 19 nt, Artificial Sequence
  Description of Artificial Sequence: Synthetic oligonucleotide
  Antisense strand to SEQ ID NO: 1068092
uucugacagacuagagcag

SEQ ID NO: 1068094 - RNA, 19 nt, Artificial Sequence
  Description of Artificial Sequence: Synthetic oligonucleotide
  Sense strand starting at position 3073 of SEQ ID NO: 915280
uauguugucgcacagguaa

SEQ ID NO: 1068095 - RNA, 19 nt, Artificial Sequence
  Description of Artificial Sequence: Synthetic oligonucleotide
  Antisense strand to SEQ ID NO: 1068094
uuaccugugcgacaacaua

SEQ ID NO: 1068096 - RNA, 19 nt, Artificial Sequence
  Description of Artificial Sequence: Synthetic oligonucleotide
  Sense strand starting at position 3320 of SEQ ID NO: 915280
gucaaaugcgccgucuaau

SEQ ID NO: 1068097 - RNA, 19 nt, Artificial Sequence
  Description of Artificial Sequence: Synthetic oligonucleotide
  Antisense strand to SEQ ID NO: 1068096
auuagacggcgcauuugac

SEQ ID NO: 1068098 - RNA, 19 nt, Artificial Sequence
  Description of Artificial Sequence: Synthetic oligonucleotide
  Sense strand starting at position 3321 of SEQ ID NO: 915280
ucaaaugcgccgucuaauc

SEQ ID NO: 1068099 - RNA, 19 nt, Artificial Sequence
  Description of Artificial Sequence: Synthetic oligonucleotide
  Antisense strand to SEQ ID NO: 1068098
gauuagacggcgcauuuga

SEQ ID NO: 1068100 - RNA, 19 nt, Artificial Sequence
  Description of Artificial Sequence: Synthetic oligonucleotide
  Sense strand starting at position 3366 of SEQ ID NO: 915280
cagcccagugauuguagaa

SEQ ID NO: 1068101 - RNA, 19 nt, Artificial Sequence
  Description of Artificial Sequence: Synthetic oligonucleotide
  Antisense strand to SEQ ID NO: 1068100
uucuacaaucacugggcug

SEQ ID NO: 1068102 - RNA, 19 nt, Artificial Sequence
  Description of Artificial Sequence: Synthetic oligonucleotide
  Sense strand starting at position 3433 of SEQ ID NO: 915280
gaggcucaggaguguuaaa

SEQ ID NO: 1068103 - RNA, 19 nt, Artificial Sequence
  Description of Artificial Sequence: Synthetic oligonucleotide
  Antisense strand to SEQ ID NO: 1068102
uuuaacacuccugagccuc

SEQ ID NO: 1068104 - RNA, 19 nt, Artificial Sequence
  Description of Artificial Sequence: Synthetic oligonucleotide
  Sense strand starting at position 3763 of SEQ ID NO: 915280
gacauagaagucuguggga

SEQ ID NO: 1068105 - RNA, 19 nt, Artificial Sequence
  Description of Artificial Sequence: Synthetic oligonucleotide
  Antisense strand to SEQ ID NO: 1068104
ucccacagacuucuauguc

SEQ ID NO: 1068106 - RNA, 19 nt, Artificial Sequence
  Description of Artificial Sequence: Synthetic oligonucleotide
  Sense strand starting at position 3765 of SEQ ID NO: 915280
cauagaagucugugggaaa

SEQ ID NO: 1068107 - RNA, 19 nt, Artificial Sequence
  Description of Artificial Sequence: Synthetic oligonucleotide
  Antisense strand to SEQ ID NO: 1068106
uuucccacagacuucuaug

SEQ ID NO: 1068108 - RNA, 19 nt, Artificial Sequence
  Description of Artificial Sequence: Synthetic oligonucleotide
  Sense strand starting at position 3793 of SEQ ID NO: 915280
ucugaauucucuucgagcu

SEQ ID NO: 1068109 - RNA, 19 nt, Artificial Sequence
  Description of Artificial Sequence: Synthetic oligonucleotide
  Antisense strand to SEQ ID NO: 1068108
agcucgaagagaauucaga

SEQ ID NO: 1068110 - RNA, 19 nt, Artificial Sequence
  Description of Artificial Sequence: Synthetic oligonucleotide
  Sense strand starting at position 3839 of SEQ ID NO: 915280
cccucaucguccuuaaaga

SEQ ID NO: 1068111 - RNA, 19 nt, Artificial Sequence
  Description of Artificial Sequence: Synthetic oligonucleotide
  Antisense strand to SEQ ID NO: 1068110
ucuuuaaggacgaugaggg

SEQ ID NO: 1068112 - RNA, 19 nt, Artificial Sequence
  Description of Artificial Sequence: Synthetic oligonucleotide
  Sense strand starting at position 3840 of SEQ ID NO: 915280
ccucaucguccuuaaagag

SEQ ID NO: 1068113 - RNA, 19 nt, Artificial Sequence
  Description of Artificial Sequence: Synthetic oligonucleotide
  Antisense strand to SEQ ID NO: 1068112
cucuuuaaggacgaugagg

SEQ ID NO: 1068114 - RNA, 19 nt, Artificial Sequence
  Description of Artificial Sequence: Synthetic oligonucleotide
  Sense strand starting at position 11 of SEQ ID NO: 915281
aggauucugauuugugugu

SEQ ID NO: 1068115 - RNA, 19 nt, Artificial Sequence
  Description of Artificial Sequence: Synthetic oligonucleotide
  Antisense strand to SEQ ID NO: 1068114
acacacaaaucagaauccu

SEQ ID NO: 1068116 - RNA, 19 nt, Artificial Sequence
  Description of Artificial Sequence: Synthetic oligonucleotide
  Sense strand starting at position 120 of SEQ ID NO: 915281
gugggaaugcuugguccaa

SEQ ID NO: 1068117 - RNA, 19 nt, Artificial Sequence
  Description of Artificial Sequence: Synthetic oligonucleotide
  Antisense strand to SEQ ID NO: 1068116
uuggaccaagcauucccac

SEQ ID NO: 1068118 - RNA, 19 nt, Artificial Sequence
  Description of Artificial Sequence: Synthetic oligonucleotide
  Sense strand starting at position 121 of SEQ ID NO: 915281
ugggaaugcuugguccaag

SEQ ID NO: 1068119 - RNA, 19 nt, Artificial Sequence
  Description of Artificial Sequence: Synthetic oligonucleotide
  Antisense strand to SEQ ID NO: 1068118
cuuggaccaagcauuccca

SEQ ID NO: 1068120 - RNA, 19 nt, Artificial Sequence
  Description of Artificial Sequence: Synthetic oligonucleotide
  Sense strand starting at position 122 of SEQ ID NO: 915281
gggaaugcuugguccaagu

SEQ ID NO: 1068121 - RNA, 19 nt, Artificial Sequence
  Description of Artificial Sequence: Synthetic oligonucleotide
  Antisense strand to SEQ ID NO: 1068120
acuuggaccaagcauuccc

SEQ ID NO: 1068122 - RNA, 19 nt, Artificial Sequence
  Description of Artificial Sequence: Synthetic oligonucleotide
  Sense strand starting at position 253 of SEQ ID NO: 915281
uguccugucugcccagaaa

SEQ ID NO: 1068123 - RNA, 19 nt, Artificial Sequence
  Description of Artificial Sequence: Synthetic oligonucleotide
  Antisense strand to SEQ ID NO: 1068122
uuucugggcagacaggaca

SEQ ID NO: 1068124 - RNA, 19 nt, Artificial Sequence
  Description of Artificial Sequence: Synthetic oligonucleotide
  Sense strand starting at position 767 of SEQ ID NO: 915281
guaggaagucccugguuca

SEQ ID NO: 1068125 - RNA, 19 nt, Artificial Sequence
  Description of Artificial Sequence: Synthetic oligonucleotide
  Antisense strand to SEQ ID NO: 1068124
ugaaccagggacuuccuac

SEQ ID NO: 1068126 - RNA, 19 nt, Artificial Sequence
  Description of Artificial Sequence: Synthetic oligonucleotide
  Sense strand starting at position 976 of SEQ ID NO: 915281
gcucuaggauuugaggaca

SEQ ID NO: 1068127 - RNA, 19 nt, Artificial Sequence
  Description of Artificial Sequence: Synthetic oligonucleotide
  Antisense strand to SEQ ID NO: 1068126
uguccucaaauccuagagc

SEQ ID NO: 1068128 - RNA, 19 nt, Artificial Sequence
  Description of Artificial Sequence: Synthetic oligonucleotide
  Sense strand starting at position 1386 of SEQ ID NO: 915281
ucuagacuucuuggccaaa

SEQ ID NO: 1068129 - RNA, 19 nt, Artificial Sequence
  Description of Artificial Sequence: Synthetic oligonucleotide
  Antisense strand to SEQ ID NO: 1068128
uuuggccaagaagucuaga

SEQ ID NO: 1068130 - RNA, 19 nt, Artificial Sequence
  Description of Artificial Sequence: Synthetic oligonucleotide
  Sense strand starting at position 1389 of SEQ ID NO: 915281
agacuucuuggccaaacuu

SEQ ID NO: 1068131 - RNA, 19 nt, Artificial Sequence
  Description of Artificial Sequence: Synthetic oligonucleotide
  Antisense strand to SEQ ID NO: 1068130
aaguuuggccaagaagucu

SEQ ID NO: 1068132 - RNA, 19 nt, Artificial Sequence
  Description of Artificial Sequence: Synthetic oligonucleotide
  Sense strand starting at position 1397 of SEQ ID NO: 915281
uggccaaacuuguugaacu

SEQ ID NO: 1068133 - RNA, 19 nt, Artificial Sequence
  Description of Artificial Sequence: Synthetic oligonucleotide
  Antisense strand to SEQ ID NO: 1068132
aguucaacaaguuuggcca

SEQ ID NO: 1068134 - RNA, 19 nt, Artificial Sequence
  Description of Artificial Sequence: Synthetic oligonucleotide
  Sense strand starting at position 2327 of SEQ ID NO: 915281
cugcacagcuuguuuagaa

SEQ ID NO: 1068135 - RNA, 19 nt, Artificial Sequence
  Description of Artificial Sequence: Synthetic oligonucleotide
  Antisense strand to SEQ ID NO: 1068134
uucuaaacaagcugugcag

SEQ ID NO: 1068136 - RNA, 19 nt, Artificial Sequence
  Description of Artificial Sequence: Synthetic oligonucleotide
  Sense strand starting at position 2328 of SEQ ID NO: 915281
ugcacagcuuguuuagaaa

SEQ ID NO: 1068137 - RNA, 19 nt, Artificial Sequence
  Description of Artificial Sequence: Synthetic oligonucleotide
  Antisense strand to SEQ ID NO: 1068136
uuucuaaacaagcugugca

SEQ ID NO: 1068138 - RNA, 19 nt, Artificial Sequence
  Description of Artificial Sequence: Synthetic oligonucleotide
  Sense strand starting at position 2341 of SEQ ID NO: 915281
uagaaauuggcucaggcga

SEQ ID NO: 1068139 - RNA, 19 nt, Artificial Sequence
  Description of Artificial Sequence: Synthetic oligonucleotide
  Antisense strand to SEQ ID NO: 1068138
ucgccugagccaauuucua

SEQ ID NO: 1068140 - RNA, 19 nt, Artificial Sequence
  Description of Artificial Sequence: Synthetic oligonucleotide
  Sense strand starting at position 2374 of SEQ ID NO: 915281
ccuuguaagcauuaggauu

SEQ ID NO: 1068141 - RNA, 19 nt, Artificial Sequence
  Description of Artificial Sequence: Synthetic oligonucleotide
  Antisense strand to SEQ ID NO: 1068140
aauccuaaugcuuacaagg

SEQ ID NO: 1068142 - RNA, 19 nt, Artificial Sequence
  Description of Artificial Sequence: Synthetic oligonucleotide
  Sense strand starting at position 2585 of SEQ ID NO: 915281
cccgcuccgaguucuuauu

SEQ ID NO: 1068143 - RNA, 19 nt, Artificial Sequence
  Description of Artificial Sequence: Synthetic oligonucleotide
  Antisense strand to SEQ ID NO: 1068142
aauaagaacucggagcggg

SEQ ID NO: 1068144 - RNA, 19 nt, Artificial Sequence
  Description of Artificial Sequence: Synthetic oligonucleotide
  Sense strand starting at position 2651 of SEQ ID NO: 915281
ccuuuaucagucugguaca

SEQ ID NO: 1068145 - RNA, 19 nt, Artificial Sequence
  Description of Artificial Sequence: Synthetic oligonucleotide
  Antisense strand to SEQ ID NO: 1068144
uguaccagacugauaaagg

SEQ ID NO: 1068146 - RNA, 19 nt, Artificial Sequence
  Description of Artificial Sequence: Synthetic oligonucleotide
  Sense strand starting at position 2654 of SEQ ID NO: 915281
uuaucagucugguacauuu

SEQ ID NO: 1068147 - RNA, 19 nt, Artificial Sequence
  Description of Artificial Sequence: Synthetic oligonucleotide
  Antisense strand to SEQ ID NO: 1068146
aaauguaccagacugauaa

SEQ ID NO: 1068148 - RNA, 19 nt, Artificial Sequence
  Description of Artificial Sequence: Synthetic oligonucleotide
  Sense strand starting at position 2776 of SEQ ID NO: 915281
gcggcuccgucuguuauuu

SEQ ID NO: 1068149 - RNA, 19 nt, Artificial Sequence
  Description of Artificial Sequence: Synthetic oligonucleotide
  Antisense strand to SEQ ID NO: 1068148
aaauaacagacggagccgc

SEQ ID NO: 1068150 - RNA, 19 nt, Artificial Sequence
  Description of Artificial Sequence: Synthetic oligonucleotide
  Sense strand starting at position 2780 of SEQ ID NO: 915281
cuccgucuguuauuuauau

SEQ ID NO: 1068151 - RNA, 19 nt, Artificial Sequence
  Description of Artificial Sequence: Synthetic oligonucleotide
  Antisense strand to SEQ ID NO: 1068150
auauaaauaacagacggag

SEQ ID NO: 1068152 - RNA, 19 nt, Artificial Sequence
  Description of Artificial Sequence: Synthetic oligonucleotide
  Sense strand starting at position 2801 of SEQ ID NO: 915281
acuggagcgguccaagaau

SEQ ID NO: 1068153 - RNA, 19 nt, Artificial Sequence
  Description of Artificial Sequence: Synthetic oligonucleotide
  Antisense strand to SEQ ID NO: 1068152
auucuuggaccgcuccagu

SEQ ID NO: 1068154 - RNA, 19 nt, Artificial Sequence
  Description of Artificial Sequence: Synthetic oligonucleotide
  Sense strand starting at position 2810 of SEQ ID NO: 915281
guccaagaauguuccgaag

SEQ ID NO: 1068155 - RNA, 19 nt, Artificial Sequence
  Description of Artificial Sequence: Synthetic oligonucleotide
  Antisense strand to SEQ ID NO: 1068154
cuucggaacauucuuggac

SEQ ID NO: 1068156 - RNA, 19 nt, Artificial Sequence
  Description of Artificial Sequence: Synthetic oligonucleotide
  Sense strand starting at position 3208 of SEQ ID NO: 915281
ggaggaaucacugacgcgu

SEQ ID NO: 1068157 - RNA, 19 nt, Artificial Sequence
  Description of Artificial Sequence: Synthetic oligonucleotide
  Antisense strand to SEQ ID NO: 1068156
acgcgucagugauuccucc

SEQ ID NO: 1068158 - RNA, 19 nt, Artificial Sequence
  Description of Artificial Sequence: Synthetic oligonucleotide
  Sense strand starting at position 3223 of SEQ ID NO: 915281
gcguucuuuacgcagauga

SEQ ID NO: 1068159 - RNA, 19 nt, Artificial Sequence
  Description of Artificial Sequence: Synthetic oligonucleotide
  Antisense strand to SEQ ID NO: 1068158
ucaucugcguaaagaacgc

SEQ ID NO: 1068160 - RNA, 19 nt, Artificial Sequence
  Description of Artificial Sequence: Synthetic oligonucleotide
  Sense strand starting at position 3225 of SEQ ID NO: 915281
guucuuuacgcagaugaau

SEQ ID NO: 1068161 - RNA, 19 nt, Artificial Sequence
  Description of Artificial Sequence: Synthetic oligonucleotide
  Antisense strand to SEQ ID NO: 1068160
auucaucugcguaaagaac

SEQ ID NO: 1068162 - RNA, 19 nt, Artificial Sequence
  Description of Artificial Sequence: Synthetic oligonucleotide
  Sense strand starting at position 3234 of SEQ ID NO: 915281
gcagaugaauccgcucaca

SEQ ID NO: 1068163 - RNA, 19 nt, Artificial Sequence
  Description of Artificial Sequence: Synthetic oligonucleotide
  Antisense strand to SEQ ID NO: 1068162
ugugagcggauucaucugc

SEQ ID NO: 1068164 - RNA, 19 nt, Artificial Sequence
  Description of Artificial Sequence: Synthetic oligonucleotide
  Sense strand starting at position 3322 of SEQ ID NO: 915281
gugcuaauggaaggguaaa

SEQ ID NO: 1068165 - RNA, 19 nt, Artificial Sequence
  Description of Artificial Sequence: Synthetic oligonucleotide
  Antisense strand to SEQ ID NO: 1068164
uuuacccuuccauuagcac

SEQ ID NO: 1068166 - RNA, 19 nt, Artificial Sequence
  Description of Artificial Sequence: Synthetic oligonucleotide
  Sense strand starting at position 3380 of SEQ ID NO: 915281
ccaccuuuggccugaggau

SEQ ID NO: 1068167 - RNA, 19 nt, Artificial Sequence
  Description of Artificial Sequence: Synthetic oligonucleotide
  Antisense strand to SEQ ID NO: 1068166
auccucaggccaaaggugg

SEQ ID NO: 1068168 - RNA, 19 nt, Artificial Sequence
  Description of Artificial Sequence: Synthetic oligonucleotide
  Sense strand starting at position 3381 of SEQ ID NO: 915281
caccuuuggccugaggauu

SEQ ID NO: 1068169 - RNA, 19 nt, Artificial Sequence
  Description of Artificial Sequence: Synthetic oligonucleotide
  Antisense strand to SEQ ID NO: 1068168
aauccucaggccaaaggug

SEQ ID NO: 1068170 - RNA, 19 nt, Artificial Sequence
  Description of Artificial Sequence: Synthetic oligonucleotide
  Sense strand starting at position 3392 of SEQ ID NO: 915281
ugaggauucuggccguguu

SEQ ID NO: 1068171 - RNA, 19 nt, Artificial Sequence
  Description of Artificial Sequence: Synthetic oligonucleotide
  Antisense strand to SEQ ID NO: 1068170
aacacggccagaauccuca

SEQ ID NO: 1068172 - RNA, 19 nt, Artificial Sequence
  Description of Artificial Sequence: Synthetic oligonucleotide
  Sense strand starting at position 3393 of SEQ ID NO: 915281
gaggauucuggccguguuu

SEQ ID NO: 1068173 - RNA, 19 nt, Artificial Sequence
  Description of Artificial Sequence: Synthetic oligonucleotide
  Antisense strand to SEQ ID NO: 1068172
aaacacggccagaauccuc

SEQ ID NO: 1068174 - RNA, 19 nt, Artificial Sequence
  Description of Artificial Sequence: Synthetic oligonucleotide
  Sense strand starting at position 3412 of SEQ ID NO: 915281
ggcaaaucauagcugagua

SEQ ID NO: 1068175 - RNA, 19 nt, Artificial Sequence
  Description of Artificial Sequence: Synthetic oligonucleotide
  Antisense strand to SEQ ID NO: 1068174
uacucagcuaugauuugcc

SEQ ID NO: 1068176 - RNA, 19 nt, Artificial Sequence
  Description of Artificial Sequence: Synthetic oligonucleotide
  Sense strand starting at position 3413 of SEQ ID NO: 915281
gcaaaucauagcugaguag

SEQ ID NO: 1068177 - RNA, 19 nt, Artificial Sequence
  Description of Artificial Sequence: Synthetic oligonucleotide
  Antisense strand to SEQ ID NO: 1068176
cuacucagcuaugauuugc

SEQ ID NO: 1068178 - RNA, 19 nt, Artificial Sequence
  Description of Artificial Sequence: Synthetic oligonucleotide
  Sense strand starting at position 3416 of SEQ ID NO: 915281
aaucauagcugaguaguga

SEQ ID NO: 1068179 - RNA, 19 nt, Artificial Sequence
  Description of Artificial Sequence: Synthetic oligonucleotide
  Antisense strand to SEQ ID NO: 1068178
ucacuacucagcuaugauu

SEQ ID NO: 1068180 - RNA, 19 nt, Artificial Sequence
  Description of Artificial Sequence: Synthetic oligonucleotide
  Sense strand starting at position 3417 of SEQ ID NO: 915281
aucauagcugaguagugaa

SEQ ID NO: 1068181 - RNA, 19 nt, Artificial Sequence
  Description of Artificial Sequence: Synthetic oligonucleotide
  Antisense strand to SEQ ID NO: 1068180
uucacuacucagcuaugau

SEQ ID NO: 1068182 - RNA, 19 nt, Artificial Sequence
  Description of Artificial Sequence: Synthetic oligonucleotide
  Sense strand starting at position 3427 of SEQ ID NO: 915281
aguagugaaucugaaaccu

SEQ ID NO: 1068183 - RNA, 19 nt, Artificial Sequence
  Description of Artificial Sequence: Synthetic oligonucleotide
  Antisense strand to SEQ ID NO: 1068182
agguuucagauucacuacu

SEQ ID NO: 1068184 - RNA, 19 nt, Artificial Sequence
  Description of Artificial Sequence: Synthetic oligonucleotide
  Sense strand starting at position 3483 of SEQ ID NO: 915281
ucucuuagggcuuggacaa

SEQ ID NO: 1068185 - RNA, 19 nt, Artificial Sequence
  Description of Artificial Sequence: Synthetic oligonucleotide
  Antisense strand to SEQ ID NO: 1068184
uuguccaagcccuaagaga

SEQ ID NO: 1068186 - RNA, 19 nt, Artificial Sequence
  Description of Artificial Sequence: Synthetic oligonucleotide
  Sense strand starting at position 3496 of SEQ ID NO: 915281
ggacaagucccuuaucucu

SEQ ID NO: 1068187 - RNA, 19 nt, Artificial Sequence
  Description of Artificial Sequence: Synthetic oligonucleotide
  Antisense strand to SEQ ID NO: 1068186
agagauaagggacuugucc

SEQ ID NO: 1068188 - RNA, 19 nt, Artificial Sequence
  Description of Artificial Sequence: Synthetic oligonucleotide
  Sense strand starting at position 3705 of SEQ ID NO: 915281
ccuagaccgaagugugaaa

SEQ ID NO: 1068189 - RNA, 19 nt, Artificial Sequence
  Description of Artificial Sequence: Synthetic oligonucleotide
  Antisense strand to SEQ ID NO: 1068188
uuucacacuucggucuagg

SEQ ID NO: 1068190 - RNA, 19 nt, Artificial Sequence
  Description of Artificial Sequence: Synthetic oligonucleotide
  Sense strand starting at position 3791 of SEQ ID NO: 915281
ggcugugggaucugggaaa

SEQ ID NO: 1068191 - RNA, 19 nt, Artificial Sequence
  Description of Artificial Sequence: Synthetic oligonucleotide
  Antisense strand to SEQ ID NO: 1068190
uuucccagaucccacagcc

SEQ ID NO: 1068192 - RNA, 19 nt, Artificial Sequence
  Description of Artificial Sequence: Synthetic oligonucleotide
  Sense strand starting at position 3929 of SEQ ID NO: 915281
uguugcagcugaucuuaau

SEQ ID NO: 1068193 - RNA, 19 nt, Artificial Sequence
  Description of Artificial Sequence: Synthetic oligonucleotide
  Antisense strand to SEQ ID NO: 1068192
auuaagaucagcugcaaca

SEQ ID NO: 1068194 - RNA, 19 nt, Artificial Sequence
  Description of Artificial Sequence: Synthetic oligonucleotide
  Sense strand starting at position 449 of SEQ ID NO: 915282
ggcaucuucuccucaguca

SEQ ID NO: 1068195 - RNA, 19 nt, Artificial Sequence
  Description of Artificial Sequence: Synthetic oligonucleotide
  Antisense strand to SEQ ID NO: 1068194
ugacugaggagaagaugcc

SEQ ID NO: 1068196 - RNA, 19 nt, Artificial Sequence
  Description of Artificial Sequence: Synthetic oligonucleotide
  Sense strand starting at position 523 of SEQ ID NO: 915282
guguauaacccauggaguu

SEQ ID NO: 1068197 - RNA, 19 nt, Artificial Sequence
  Description of Artificial Sequence: Synthetic oligonucleotide
  Antisense strand to SEQ ID NO: 1068196
aacuccauggguuauacac

SEQ ID NO: 1068198 - RNA, 19 nt, Artificial Sequence
  Description of Artificial Sequence: Synthetic oligonucleotide
  Sense strand starting at position 536 of SEQ ID NO: 915282
ggaguuguggcugacagga

SEQ ID NO: 1068199 - RNA, 19 nt, Artificial Sequence
  Description of Artificial Sequence: Synthetic oligonucleotide
  Antisense strand to SEQ ID NO: 1068198
uccugucagccacaacucc

SEQ ID NO: 1068200 - RNA, 19 nt, Artificial Sequence
  Description of Artificial Sequence: Synthetic oligonucleotide
  Sense strand starting at position 576 of SEQ ID NO: 915282
gacagaggcuuccaggauu

SEQ ID NO: 1068201 - RNA, 19 nt, Artificial Sequence
  Description of Artificial Sequence: Synthetic oligonucleotide
  Antisense strand to SEQ ID NO: 1068200
aauccuggaagccucuguc

SEQ ID NO: 1068202 - RNA, 19 nt, Artificial Sequence
  Description of Artificial Sequence: Synthetic oligonucleotide
  Sense strand starting at position 589 of SEQ ID NO: 915282
aggauucugauuugugugu

SEQ ID NO: 1068203 - RNA, 19 nt, Artificial Sequence
  Description of Artificial Sequence: Synthetic oligonucleotide
  Antisense strand to SEQ ID NO: 1068202
acacacaaaucagaauccu

SEQ ID NO: 1068204 - RNA, 19 nt, Artificial Sequence
  Description of Artificial Sequence: Synthetic oligonucleotide
  Sense strand starting at position 698 of SEQ ID NO: 915282
gugggaaugcuugguccaa

SEQ ID NO: 1068205 - RNA, 19 nt, Artificial Sequence
  Description of Artificial Sequence: Synthetic oligonucleotide
  Antisense strand to SEQ ID NO: 1068204
uuggaccaagcauucccac

SEQ ID NO: 1068206 - RNA, 19 nt, Artificial Sequence
  Description of Artificial Sequence: Synthetic oligonucleotide
  Sense strand starting at position 699 of SEQ ID NO: 915282
ugggaaugcuugguccaag

SEQ ID NO: 1068207 - RNA, 19 nt, Artificial Sequence
  Description of Artificial Sequence: Synthetic oligonucleotide
  Antisense strand to SEQ ID NO: 1068206
cuuggaccaagcauuccca

SEQ ID NO: 1068208 - RNA, 19 nt, Artificial Sequence
  Description of Artificial Sequence: Synthetic oligonucleotide
  Sense strand starting at position 700 of SEQ ID NO: 915282
gggaaugcuugguccaagu

SEQ ID NO: 1068209 - RNA, 19 nt, Artificial Sequence
  Description of Artificial Sequence: Synthetic oligonucleotide
  Antisense strand to SEQ ID NO: 1068208
acuuggaccaagcauuccc

SEQ ID NO: 1068210 - RNA, 19 nt, Artificial Sequence
  Description of Artificial Sequence: Synthetic oligonucleotide
  Sense strand starting at position 831 of SEQ ID NO: 915282
uguccugucugcccagaaa

SEQ ID NO: 1068211 - RNA, 19 nt, Artificial Sequence
  Description of Artificial Sequence: Synthetic oligonucleotide
  Antisense strand to SEQ ID NO: 1068210
uuucugggcagacaggaca

SEQ ID NO: 1068212 - RNA, 19 nt, Artificial Sequence
  Description of Artificial Sequence: Synthetic oligonucleotide
  Sense strand starting at position 876 of SEQ ID NO: 915282
gagagcugcugccaugaau

SEQ ID NO: 1068213 - RNA, 19 nt, Artificial Sequence
  Description of Artificial Sequence: Synthetic oligonucleotide
  Antisense strand to SEQ ID NO: 1068212
auucauggcagcagcucuc

SEQ ID NO: 1068214 - RNA, 19 nt, Artificial Sequence
  Description of Artificial Sequence: Synthetic oligonucleotide
  Sense strand starting at position 1345 of SEQ ID NO: 915282
guaggaagucccugguuca

SEQ ID NO: 1068215 - RNA, 19 nt, Artificial Sequence
  Description of Artificial Sequence: Synthetic oligonucleotide
  Antisense strand to SEQ ID NO: 1068214
ugaaccagggacuuccuac

SEQ ID NO: 1068216 - RNA, 19 nt, Artificial Sequence
  Description of Artificial Sequence: Synthetic oligonucleotide
  Sense strand starting at position 1352 of SEQ ID NO: 915282
gucccugguucagggaaga

SEQ ID NO: 1068217 - RNA, 19 nt, Artificial Sequence
  Description of Artificial Sequence: Synthetic oligonucleotide
  Antisense strand to SEQ ID NO: 1068216
ucuucccugaaccagggac

SEQ ID NO: 1068218 - RNA, 19 nt, Artificial Sequence
  Description of Artificial Sequence: Synthetic oligonucleotide
  Sense strand starting at position 1554 of SEQ ID NO: 915282
gcucuaggauuugaggaca

SEQ ID NO: 1068219 - RNA, 19 nt, Artificial Sequence
  Description of Artificial Sequence: Synthetic oligonucleotide
  Antisense strand to SEQ ID NO: 1068218
uguccucaaauccuagagc

SEQ ID NO: 1068220 - RNA, 19 nt, Artificial Sequence
  Description of Artificial Sequence: Synthetic oligonucleotide
  Sense strand starting at position 1964 of SEQ ID NO: 915282
ucuagacuucuuggccaaa

SEQ ID NO: 1068221 - RNA, 19 nt, Artificial Sequence
  Description of Artificial Sequence: Synthetic oligonucleotide
  Antisense strand to SEQ ID NO: 1068220
uuuggccaagaagucuaga

SEQ ID NO: 1068222 - RNA, 19 nt, Artificial Sequence
  Description of Artificial Sequence: Synthetic oligonucleotide
  Sense strand starting at position 1967 of SEQ ID NO: 915282
agacuucuuggccaaacuu

SEQ ID NO: 1068223 - RNA, 19 nt, Artificial Sequence
  Description of Artificial Sequence: Synthetic oligonucleotide
  Antisense strand to SEQ ID NO: 1068222
aaguuuggccaagaagucu

SEQ ID NO: 1068224 - RNA, 19 nt, Artificial Sequence
  Description of Artificial Sequence: Synthetic oligonucleotide
  Sense strand starting at position 1975 of SEQ ID NO: 915282
uggccaaacuuguugaacu

SEQ ID NO: 1068225 - RNA, 19 nt, Artificial Sequence
  Description of Artificial Sequence: Synthetic oligonucleotide
  Antisense strand to SEQ ID NO: 1068224
aguucaacaaguuuggcca

SEQ ID NO: 1068226 - RNA, 19 nt, Artificial Sequence
  Description of Artificial Sequence: Synthetic oligonucleotide
  Sense strand starting at position 2697 of SEQ ID NO: 915282
ggucgagguuucucugcuu

SEQ ID NO: 1068227 - RNA, 19 nt, Artificial Sequence
  Description of Artificial Sequence: Synthetic oligonucleotide
  Antisense strand to SEQ ID NO: 1068226
aagcagagaaaccucgacc

SEQ ID NO: 1068228 - RNA, 19 nt, Artificial Sequence
  Description of Artificial Sequence: Synthetic oligonucleotide
  Sense strand starting at position 2905 of SEQ ID NO: 915282
cugcacagcuuguuuagaa

SEQ ID NO: 1068229 - RNA, 19 nt, Artificial Sequence
  Description of Artificial Sequence: Synthetic oligonucleotide
  Antisense strand to SEQ ID NO: 1068228
uucuaaacaagcugugcag

SEQ ID NO: 1068230 - RNA, 19 nt, Artificial Sequence
  Description of Artificial Sequence: Synthetic oligonucleotide
  Sense strand starting at position 2906 of SEQ ID NO: 915282
ugcacagcuuguuuagaaa

SEQ ID NO: 1068231 - RNA, 19 nt, Artificial Sequence
  Description of Artificial Sequence: Synthetic oligonucleotide
  Antisense strand to SEQ ID NO: 1068230
uuucuaaacaagcugugca

SEQ ID NO: 1068232 - RNA, 19 nt, Artificial Sequence
  Description of Artificial Sequence: Synthetic oligonucleotide
  Sense strand starting at position 2919 of SEQ ID NO: 915282
uagaaauuggcucaggcga

SEQ ID NO: 1068233 - RNA, 19 nt, Artificial Sequence
  Description of Artificial Sequence: Synthetic oligonucleotide
  Antisense strand to SEQ ID NO: 1068232
ucgccugagccaauuucua

SEQ ID NO: 1068234 - RNA, 19 nt, Artificial Sequence
  Description of Artificial Sequence: Synthetic oligonucleotide
  Sense strand starting at position 2952 of SEQ ID NO: 915282
ccuuguaagcauuaggauu

SEQ ID NO: 1068235 - RNA, 19 nt, Artificial Sequence
  Description of Artificial Sequence: Synthetic oligonucleotide
  Antisense strand to SEQ ID NO: 1068234
aauccuaaugcuuacaagg

SEQ ID NO: 1068236 - RNA, 19 nt, Artificial Sequence
  Description of Artificial Sequence: Synthetic oligonucleotide
  Sense strand starting at position 3163 of SEQ ID NO: 915282
cccgcuccgaguucuuauu

SEQ ID NO: 1068237 - RNA, 19 nt, Artificial Sequence
  Description of Artificial Sequence: Synthetic oligonucleotide
  Antisense strand to SEQ ID NO: 1068236
aauaagaacucggagcggg

SEQ ID NO: 1068238 - RNA, 19 nt, Artificial Sequence
  Description of Artificial Sequence: Synthetic oligonucleotide
  Sense strand starting at position 3229 of SEQ ID NO: 915282
ccuuuaucagucugguaca

SEQ ID NO: 1068239 - RNA, 19 nt, Artificial Sequence
  Description of Artificial Sequence: Synthetic oligonucleotide
  Antisense strand to SEQ ID NO: 1068238
uguaccagacugauaaagg

SEQ ID NO: 1068240 - RNA, 19 nt, Artificial Sequence
  Description of Artificial Sequence: Synthetic oligonucleotide
  Sense strand starting at position 3232 of SEQ ID NO: 915282
uuaucagucugguacauuu

SEQ ID NO: 1068241 - RNA, 19 nt, Artificial Sequence
  Description of Artificial Sequence: Synthetic oligonucleotide
  Antisense strand to SEQ ID NO: 1068240
aaauguaccagacugauaa

SEQ ID NO: 1068242 - RNA, 19 nt, Artificial Sequence
  Description of Artificial Sequence: Synthetic oligonucleotide
  Sense strand starting at position 3353 of SEQ ID NO: 915282
agcggcuccgucuguuauu

SEQ ID NO: 1068243 - RNA, 19 nt, Artificial Sequence
  Description of Artificial Sequence: Synthetic oligonucleotide
  Antisense strand to SEQ ID NO: 1068242
aauaacagacggagccgcu

SEQ ID NO: 1068244 - RNA, 19 nt, Artificial Sequence
  Description of Artificial Sequence: Synthetic oligonucleotide
  Sense strand starting at position 3354 of SEQ ID NO: 915282
gcggcuccgucuguuauuu

SEQ ID NO: 1068245 - RNA, 19 nt, Artificial Sequence
  Description of Artificial Sequence: Synthetic oligonucleotide
  Antisense strand to SEQ ID NO: 1068244
aaauaacagacggagccgc

SEQ ID NO: 1068246 - RNA, 19 nt, Artificial Sequence
  Description of Artificial Sequence: Synthetic oligonucleotide
  Sense strand starting at position 3356 of SEQ ID NO: 915282
ggcuccgucuguuauuuau

SEQ ID NO: 1068247 - RNA, 19 nt, Artificial Sequence
  Description of Artificial Sequence: Synthetic oligonucleotide
  Antisense strand to SEQ ID NO: 1068246
auaaauaacagacggagcc

SEQ ID NO: 1068248 - RNA, 19 nt, Artificial Sequence
  Description of Artificial Sequence: Synthetic oligonucleotide
  Sense strand starting at position 3358 of SEQ ID NO: 915282
cuccgucuguuauuuauau

SEQ ID NO: 1068249 - RNA, 19 nt, Artificial Sequence
  Description of Artificial Sequence: Synthetic oligonucleotide
  Antisense strand to SEQ ID NO: 1068248
auauaaauaacagacggag

SEQ ID NO: 1068250 - RNA, 19 nt, Artificial Sequence
  Description of Artificial Sequence: Synthetic oligonucleotide
  Sense strand starting at position 3379 of SEQ ID NO: 915282
acuggagcgguccaagaau

SEQ ID NO: 1068251 - RNA, 19 nt, Artificial Sequence
  Description of Artificial Sequence: Synthetic oligonucleotide
  Antisense strand to SEQ ID NO: 1068250
auucuuggaccgcuccagu

SEQ ID NO: 1068252 - RNA, 19 nt, Artificial Sequence
  Description of Artificial Sequence: Synthetic oligonucleotide
  Sense strand starting at position 3388 of SEQ ID NO: 915282
guccaagaauguuccgaag

SEQ ID NO: 1068253 - RNA, 19 nt, Artificial Sequence
  Description of Artificial Sequence: Synthetic oligonucleotide
  Antisense strand to SEQ ID NO: 1068252
cuucggaacauucuuggac

SEQ ID NO: 1068254 - RNA, 19 nt, Artificial Sequence
  Description of Artificial Sequence: Synthetic oligonucleotide
  Sense strand starting at position 3391 of SEQ ID NO: 915282
caagaauguuccgaagcug

SEQ ID NO: 1068255 - RNA, 19 nt, Artificial Sequence
  Description of Artificial Sequence: Synthetic oligonucleotide
  Antisense strand to SEQ ID NO: 1068254
cagcuucggaacauucuug

SEQ ID NO: 1068256 - RNA, 19 nt, Artificial Sequence
  Description of Artificial Sequence: Synthetic oligonucleotide
  Sense strand starting at position 3786 of SEQ ID NO: 915282
ggaggaaucacugacgcgu

SEQ ID NO: 1068257 - RNA, 19 nt, Artificial Sequence
  Description of Artificial Sequence: Synthetic oligonucleotide
  Antisense strand to SEQ ID NO: 1068256
acgcgucagugauuccucc

SEQ ID NO: 1068258 - RNA, 19 nt, Artificial Sequence
  Description of Artificial Sequence: Synthetic oligonucleotide
  Sense strand starting at position 3801 of SEQ ID NO: 915282
gcguucuuuacgcagauga

SEQ ID NO: 1068259 - RNA, 19 nt, Artificial Sequence
  Description of Artificial Sequence: Synthetic oligonucleotide
  Antisense strand to SEQ ID NO: 1068258
ucaucugcguaaagaacgc

SEQ ID NO: 1068260 - RNA, 19 nt, Artificial Sequence
  Description of Artificial Sequence: Synthetic oligonucleotide
  Sense strand starting at position 3803 of SEQ ID NO: 915282
guucuuuacgcagaugaau

SEQ ID NO: 1068261 - RNA, 19 nt, Artificial Sequence
  Description of Artificial Sequence: Synthetic oligonucleotide
  Antisense strand to SEQ ID NO: 1068260
auucaucugcguaaagaac

SEQ ID NO: 1068262 - RNA, 19 nt, Artificial Sequence
  Description of Artificial Sequence: Synthetic oligonucleotide
  Sense strand starting at position 3812 of SEQ ID NO: 915282
gcagaugaauccgcucaca

SEQ ID NO: 1068263 - RNA, 19 nt, Artificial Sequence
  Description of Artificial Sequence: Synthetic oligonucleotide
  Antisense strand to SEQ ID NO: 1068262
ugugagcggauucaucugc

SEQ ID NO: 1068264 - RNA, 19 nt, Artificial Sequence
  Description of Artificial Sequence: Synthetic oligonucleotide
  Sense strand starting at position 3900 of SEQ ID NO: 915282
gugcuaauggaaggguaaa

SEQ ID NO: 1068265 - RNA, 19 nt, Artificial Sequence
  Description of Artificial Sequence: Synthetic oligonucleotide
  Antisense strand to SEQ ID NO: 1068264
uuuacccuuccauuagcac

SEQ ID NO: 1068266 - RNA, 19 nt, Artificial Sequence
  Description of Artificial Sequence: Synthetic oligonucleotide
  Sense strand starting at position 3958 of SEQ ID NO: 915282
ccaccuuuggccugaggau

SEQ ID NO: 1068267 - RNA, 19 nt, Artificial Sequence
  Description of Artificial Sequence: Synthetic oligonucleotide
  Antisense strand to SEQ ID NO: 1068266
auccucaggccaaaggugg

SEQ ID NO: 1068268 - RNA, 19 nt, Artificial Sequence
  Description of Artificial Sequence: Synthetic oligonucleotide
  Sense strand starting at position 3959 of SEQ ID NO: 915282
caccuuuggccugaggauu

SEQ ID NO: 1068269 - RNA, 19 nt, Artificial Sequence
  Description of Artificial Sequence: Synthetic oligonucleotide
  Antisense strand to SEQ ID NO: 1068268
aauccucaggccaaaggug

SEQ ID NO: 1068270 - RNA, 19 nt, Artificial Sequence
  Description of Artificial Sequence: Synthetic oligonucleotide
  Sense strand starting at position 3970 of SEQ ID NO: 915282
ugaggauucuggccguguu

SEQ ID NO: 1068271 - RNA, 19 nt, Artificial Sequence
  Description of Artificial Sequence: Synthetic oligonucleotide
  Antisense strand to SEQ ID NO: 1068270
aacacggccagaauccuca

SEQ ID NO: 1068272 - RNA, 19 nt, Artificial Sequence
  Description of Artificial Sequence: Synthetic oligonucleotide
  Sense strand starting at position 3971 of SEQ ID NO: 915282
gaggauucuggccguguuu

SEQ ID NO: 1068273 - RNA, 19 nt, Artificial Sequence
  Description of Artificial Sequence: Synthetic oligonucleotide
  Antisense strand to SEQ ID NO: 1068272
aaacacggccagaauccuc

SEQ ID NO: 1068274 - RNA, 19 nt, Artificial Sequence
  Description of Artificial Sequence: Synthetic oligonucleotide
  Sense strand starting at position 47 of SEQ ID NO: 915283
ggcacaugccuauaagcuu

SEQ ID NO: 1068275 - RNA, 19 nt, Artificial Sequence
  Description of Artificial Sequence: Synthetic oligonucleotide
  Antisense strand to SEQ ID NO: 1068274
aagcuuauaggcaugugcc

SEQ ID NO: 1068276 - RNA, 19 nt, Artificial Sequence
  Description of Artificial Sequence: Synthetic oligonucleotide
  Sense strand starting at position 253 of SEQ ID NO: 915283
gaagcuuuguuguccauua

SEQ ID NO: 1068277 - RNA, 19 nt, Artificial Sequence
  Description of Artificial Sequence: Synthetic oligonucleotide
  Antisense strand to SEQ ID NO: 1068276
uaauggacaacaaagcuuc

SEQ ID NO: 1068278 - RNA, 19 nt, Artificial Sequence
  Description of Artificial Sequence: Synthetic oligonucleotide
  Sense strand starting at position 255 of SEQ ID NO: 915283
agcuuuguuguccauuaaa

SEQ ID NO: 1068279 - RNA, 19 nt, Artificial Sequence
  Description of Artificial Sequence: Synthetic oligonucleotide
  Antisense strand to SEQ ID NO: 1068278
uuuaauggacaacaaagcu

SEQ ID NO: 1068280 - RNA, 19 nt, Artificial Sequence
  Description of Artificial Sequence: Synthetic oligonucleotide
  Sense strand starting at position 263 of SEQ ID NO: 915283
uguccauuaaagugaguuc

SEQ ID NO: 1068281 - RNA, 19 nt, Artificial Sequence
  Description of Artificial Sequence: Synthetic oligonucleotide
  Antisense strand to SEQ ID NO: 1068280
gaacucacuuuaauggaca

SEQ ID NO: 1068282 - RNA, 19 nt, Artificial Sequence
  Description of Artificial Sequence: Synthetic oligonucleotide
  Sense strand starting at position 266 of SEQ ID NO: 915283
ccauuaaagugaguucucu

SEQ ID NO: 1068283 - RNA, 19 nt, Artificial Sequence
  Description of Artificial Sequence: Synthetic oligonucleotide
  Antisense strand to SEQ ID NO: 1068282
agagaacucacuuuaaugg

SEQ ID NO: 1068284 - RNA, 19 nt, Artificial Sequence
  Description of Artificial Sequence: Synthetic oligonucleotide
  Sense strand starting at position 270 of SEQ ID NO: 915283
uaaagugaguucucuggga

SEQ ID NO: 1068285 - RNA, 19 nt, Artificial Sequence
  Description of Artificial Sequence: Synthetic oligonucleotide
  Antisense strand to SEQ ID NO: 1068284
ucccagagaacucacuuua

SEQ ID NO: 1068286 - RNA, 19 nt, Artificial Sequence
  Description of Artificial Sequence: Synthetic oligonucleotide
  Sense strand starting at position 272 of SEQ ID NO: 915283
aagugaguucucugggaag

SEQ ID NO: 1068287 - RNA, 19 nt, Artificial Sequence
  Description of Artificial Sequence: Synthetic oligonucleotide
  Antisense strand to SEQ ID NO: 1068286
cuucccagagaacucacuu

SEQ ID NO: 1068288 - RNA, 19 nt, Artificial Sequence
  Description of Artificial Sequence: Synthetic oligonucleotide
  Sense strand starting at position 274 of SEQ ID NO: 915283
gugaguucucugggaagac

SEQ ID NO: 1068289 - RNA, 19 nt, Artificial Sequence
  Description of Artificial Sequence: Synthetic oligonucleotide
  Antisense strand to SEQ ID NO: 1068288
gucuucccagagaacucac

SEQ ID NO: 1068290 - RNA, 19 nt, Artificial Sequence
  Description of Artificial Sequence: Synthetic oligonucleotide
  Sense strand starting at position 385 of SEQ ID NO: 915283
agcauagugcaauguauuu

SEQ ID NO: 1068291 - RNA, 19 nt, Artificial Sequence
  Description of Artificial Sequence: Synthetic oligonucleotide
  Antisense strand to SEQ ID NO: 1068290
aaauacauugcacuaugcu

SEQ ID NO: 1068292 - RNA, 19 nt, Artificial Sequence
  Description of Artificial Sequence: Synthetic oligonucleotide
  Sense strand starting at position 397 of SEQ ID NO: 915283
uguauuuaaugagaaacca

SEQ ID NO: 1068293 - RNA, 19 nt, Artificial Sequence
  Description of Artificial Sequence: Synthetic oligonucleotide
  Antisense strand to SEQ ID NO: 1068292
ugguuucucauuaaauaca

SEQ ID NO: 1068294 - RNA, 19 nt, Artificial Sequence
  Description of Artificial Sequence: Synthetic oligonucleotide
  Sense strand starting at position 422 of SEQ ID NO: 915283
acaacaaagcguuauaacu

SEQ ID NO: 1068295 - RNA, 19 nt, Artificial Sequence
  Description of Artificial Sequence: Synthetic oligonucleotide
  Antisense strand to SEQ ID NO: 1068294
aguuauaacgcuuuguugu

SEQ ID NO: 1068296 - RNA, 19 nt, Artificial Sequence
  Description of Artificial Sequence: Synthetic oligonucleotide
  Sense strand starting at position 432 of SEQ ID NO: 915283
guuauaacuucuccagcug

SEQ ID NO: 1068297 - RNA, 19 nt, Artificial Sequence
  Description of Artificial Sequence: Synthetic oligonucleotide
  Antisense strand to SEQ ID NO: 1068296
cagcuggagaaguuauaac

SEQ ID NO: 1068298 - RNA, 19 nt, Artificial Sequence
  Description of Artificial Sequence: Synthetic oligonucleotide
  Sense strand starting at position 558 of SEQ ID NO: 915283
agggaguggguaugguuau

SEQ ID NO: 1068299 - RNA, 19 nt, Artificial Sequence
  Description of Artificial Sequence: Synthetic oligonucleotide
  Antisense strand to SEQ ID NO: 1068298
auaaccauacccacucccu

SEQ ID NO: 1068300 - RNA, 19 nt, Artificial Sequence
  Description of Artificial Sequence: Synthetic oligonucleotide
  Sense strand starting at position 564 of SEQ ID NO: 915283
uggguaugguuauucugaa

SEQ ID NO: 1068301 - RNA, 19 nt, Artificial Sequence
  Description of Artificial Sequence: Synthetic oligonucleotide
  Antisense strand to SEQ ID NO: 1068300
uucagaauaaccauaccca

SEQ ID NO: 1068302 - RNA, 19 nt, Artificial Sequence
  Description of Artificial Sequence: Synthetic oligonucleotide
  Sense strand starting at position 565 of SEQ ID NO: 915283
ggguaugguuauucugaag

SEQ ID NO: 1068303 - RNA, 19 nt, Artificial Sequence
  Description of Artificial Sequence: Synthetic oligonucleotide
  Antisense strand to SEQ ID NO: 1068302
cuucagaauaaccauaccc

SEQ ID NO: 1068304 - RNA, 19 nt, Artificial Sequence
  Description of Artificial Sequence: Synthetic oligonucleotide
  Sense strand starting at position 716 of SEQ ID NO: 915283
ggaggcaaccuuuauguca

SEQ ID NO: 1068305 - RNA, 19 nt, Artificial Sequence
  Description of Artificial Sequence: Synthetic oligonucleotide
  Antisense strand to SEQ ID NO: 1068304
ugacauaaagguugccucc

SEQ ID NO: 1068306 - RNA, 19 nt, Artificial Sequence
  Description of Artificial Sequence: Synthetic oligonucleotide
  Sense strand starting at position 719 of SEQ ID NO: 915283
ggcaaccuuuaugucagaa

SEQ ID NO: 1068307 - RNA, 19 nt, Artificial Sequence
  Description of Artificial Sequence: Synthetic oligonucleotide
  Antisense strand to SEQ ID NO: 1068306
uucugacauaaagguugcc

SEQ ID NO: 1068308 - RNA, 19 nt, Artificial Sequence
  Description of Artificial Sequence: Synthetic oligonucleotide
  Sense strand starting at position 904 of SEQ ID NO: 915283
uuccuuucucuacggguaa

SEQ ID NO: 1068309 - RNA, 19 nt, Artificial Sequence
  Description of Artificial Sequence: Synthetic oligonucleotide
  Antisense strand to SEQ ID NO: 1068308
uuacccguagagaaaggaa

SEQ ID NO: 1068310 - RNA, 19 nt, Artificial Sequence
  Description of Artificial Sequence: Synthetic oligonucleotide
  Sense strand starting at position 915 of SEQ ID NO: 915283
acggguaagcucuacaaag

SEQ ID NO: 1068311 - RNA, 19 nt, Artificial Sequence
  Description of Artificial Sequence: Synthetic oligonucleotide
  Antisense strand to SEQ ID NO: 1068310
cuuuguagagcuuacccgu

SEQ ID NO: 1068312 - RNA, 19 nt, Artificial Sequence
  Description of Artificial Sequence: Synthetic oligonucleotide
  Sense strand starting at position 936 of SEQ ID NO: 915283
gcgaaagcuccgaguguua

SEQ ID NO: 1068313 - RNA, 19 nt, Artificial Sequence
  Description of Artificial Sequence: Synthetic oligonucleotide
  Antisense strand to SEQ ID NO: 1068312
uaacacucggagcuuucgc

SEQ ID NO: 1068314 - RNA, 19 nt, Artificial Sequence
  Description of Artificial Sequence: Synthetic oligonucleotide
  Sense strand starting at position 945 of SEQ ID NO: 915283
ccgaguguuaguucuuguu

SEQ ID NO: 1068315 - RNA, 19 nt, Artificial Sequence
  Description of Artificial Sequence: Synthetic oligonucleotide
  Antisense strand to SEQ ID NO: 1068314
aacaagaacuaacacucgg

SEQ ID NO: 1068316 - RNA, 19 nt, Artificial Sequence
  Description of Artificial Sequence: Synthetic oligonucleotide
  Sense strand starting at position 949 of SEQ ID NO: 915283
guguuaguucuuguuugug

SEQ ID NO: 1068317 - RNA, 19 nt, Artificial Sequence
  Description of Artificial Sequence: Synthetic oligonucleotide
  Antisense strand to SEQ ID NO: 1068316
cacaaacaagaacuaacac

SEQ ID NO: 1068318 - RNA, 19 nt, Artificial Sequence
  Description of Artificial Sequence: Synthetic oligonucleotide
  Sense strand starting at position 958 of SEQ ID NO: 915283
cuuguuuguguauaaauuc

SEQ ID NO: 1068319 - RNA, 19 nt, Artificial Sequence
  Description of Artificial Sequence: Synthetic oligonucleotide
  Antisense strand to SEQ ID NO: 1068318
gaauuuauacacaaacaag

SEQ ID NO: 1068320 - RNA, 19 nt, Artificial Sequence
  Description of Artificial Sequence: Synthetic oligonucleotide
  Sense strand starting at position 990 of SEQ ID NO: 915283
uggccugcgagcuaugaaa

SEQ ID NO: 1068321 - RNA, 19 nt, Artificial Sequence
  Description of Artificial Sequence: Synthetic oligonucleotide
  Antisense strand to SEQ ID NO: 1068320
uuucauagcucgcaggcca

SEQ ID NO: 1068322 - RNA, 19 nt, Artificial Sequence
  Description of Artificial Sequence: Synthetic oligonucleotide
  Sense strand starting at position 1127 of SEQ ID NO: 915283
gguuuaucuagcuggcuga

SEQ ID NO: 1068323 - RNA, 19 nt, Artificial Sequence
  Description of Artificial Sequence: Synthetic oligonucleotide
  Antisense strand to SEQ ID NO: 1068322
ucagccagcuagauaaacc

SEQ ID NO: 1068324 - RNA, 19 nt, Artificial Sequence
  Description of Artificial Sequence: Synthetic oligonucleotide
  Sense strand starting at position 1392 of SEQ ID NO: 915283
agagaagagugagaaguua

SEQ ID NO: 1068325 - RNA, 19 nt, Artificial Sequence
  Description of Artificial Sequence: Synthetic oligonucleotide
  Antisense strand to SEQ ID NO: 1068324
uaacuucucacucuucucu

SEQ ID NO: 1068326 - RNA, 19 nt, Artificial Sequence
  Description of Artificial Sequence: Synthetic oligonucleotide
  Sense strand starting at position 1610 of SEQ ID NO: 915283
gccagcuuucgguauggaa

SEQ ID NO: 1068327 - RNA, 19 nt, Artificial Sequence
  Description of Artificial Sequence: Synthetic oligonucleotide
  Antisense strand to SEQ ID NO: 1068326
uuccauaccgaaagcuggc

SEQ ID NO: 1068328 - RNA, 19 nt, Artificial Sequence
  Description of Artificial Sequence: Synthetic oligonucleotide
  Sense strand starting at position 1612 of SEQ ID NO: 915283
cagcuuucgguauggaaua

SEQ ID NO: 1068329 - RNA, 19 nt, Artificial Sequence
  Description of Artificial Sequence: Synthetic oligonucleotide
  Antisense strand to SEQ ID NO: 1068328
uauuccauaccgaaagcug

SEQ ID NO: 1068330 - RNA, 19 nt, Artificial Sequence
  Description of Artificial Sequence: Synthetic oligonucleotide
  Sense strand starting at position 1855 of SEQ ID NO: 915283
ggaugcacucacugaagua

SEQ ID NO: 1068331 - RNA, 19 nt, Artificial Sequence
  Description of Artificial Sequence: Synthetic oligonucleotide
  Antisense strand to SEQ ID NO: 1068330
uacuucagugagugcaucc

SEQ ID NO: 1068332 - RNA, 19 nt, Artificial Sequence
  Description of Artificial Sequence: Synthetic oligonucleotide
  Sense strand starting at position 2151 of SEQ ID NO: 915283
ugcuuuguucucgcgguua

SEQ ID NO: 1068333 - RNA, 19 nt, Artificial Sequence
  Description of Artificial Sequence: Synthetic oligonucleotide
  Antisense strand to SEQ ID NO: 1068332
uaaccgcgagaacaaagca

SEQ ID NO: 1068334 - RNA, 19 nt, Artificial Sequence
  Description of Artificial Sequence: Synthetic oligonucleotide
  Sense strand starting at position 2401 of SEQ ID NO: 915283
ggcaguaccugacauuuau

SEQ ID NO: 1068335 - RNA, 19 nt, Artificial Sequence
  Description of Artificial Sequence: Synthetic oligonucleotide
  Antisense strand to SEQ ID NO: 1068334
auaaaugucagguacugcc

SEQ ID NO: 1068336 - RNA, 19 nt, Artificial Sequence
  Description of Artificial Sequence: Synthetic oligonucleotide
  Sense strand starting at position 2411 of SEQ ID NO: 915283
gacauuuauuaguggaauu

SEQ ID NO: 1068337 - RNA, 19 nt, Artificial Sequence
  Description of Artificial Sequence: Synthetic oligonucleotide
  Antisense strand to SEQ ID NO: 1068336
aauuccacuaauaaauguc

SEQ ID NO: 1068338 - RNA, 19 nt, Artificial Sequence
  Description of Artificial Sequence: Synthetic oligonucleotide
  Sense strand starting at position 2467 of SEQ ID NO: 915283
gccuguaaaggugauacau

SEQ ID NO: 1068339 - RNA, 19 nt, Artificial Sequence
  Description of Artificial Sequence: Synthetic oligonucleotide
  Antisense strand to SEQ ID NO: 1068338
auguaucaccuuuacaggc

SEQ ID NO: 1068340 - RNA, 19 nt, Artificial Sequence
  Description of Artificial Sequence: Synthetic oligonucleotide
  Sense strand starting at position 2616 of SEQ ID NO: 915283
gggcaagagaugugcucaa

SEQ ID NO: 1068341 - RNA, 19 nt, Artificial Sequence
  Description of Artificial Sequence: Synthetic oligonucleotide
  Antisense strand to SEQ ID NO: 1068340
uugagcacaucucuugccc

SEQ ID NO: 1068342 - RNA, 19 nt, Artificial Sequence
  Description of Artificial Sequence: Synthetic oligonucleotide
  Sense strand starting at position 2620 of SEQ ID NO: 915283
aagagaugugcucaagcuu

SEQ ID NO: 1068343 - RNA, 19 nt, Artificial Sequence
  Description of Artificial Sequence: Synthetic oligonucleotide
  Antisense strand to SEQ ID NO: 1068342
aagcuugagcacaucucuu

SEQ ID NO: 1068344 - RNA, 19 nt, Artificial Sequence
  Description of Artificial Sequence: Synthetic oligonucleotide
  Sense strand starting at position 2693 of SEQ ID NO: 915283
cagcucuaugcuggugaau

SEQ ID NO: 1068345 - RNA, 19 nt, Artificial Sequence
  Description of Artificial Sequence: Synthetic oligonucleotide
  Antisense strand to SEQ ID NO: 1068344
auucaccagcauagagcug

SEQ ID NO: 1068346 - RNA, 19 nt, Artificial Sequence
  Description of Artificial Sequence: Synthetic oligonucleotide
  Sense strand starting at position 2773 of SEQ ID NO: 915283
accuguuaagaauacugua

SEQ ID NO: 1068347 - RNA, 19 nt, Artificial Sequence
  Description of Artificial Sequence: Synthetic oligonucleotide
  Antisense strand to SEQ ID NO: 1068346
uacaguauucuuaacaggu

SEQ ID NO: 1068348 - RNA, 19 nt, Artificial Sequence
  Description of Artificial Sequence: Synthetic oligonucleotide
  Sense strand starting at position 2810 of SEQ ID NO: 915283
augucaagauaugucaagu

SEQ ID NO: 1068349 - RNA, 19 nt, Artificial Sequence
  Description of Artificial Sequence: Synthetic oligonucleotide
  Antisense strand to SEQ ID NO: 1068348
acuugacauaucuugacau

SEQ ID NO: 1068350 - RNA, 19 nt, Artificial Sequence
  Description of Artificial Sequence: Synthetic oligonucleotide
  Sense strand starting at position 2944 of SEQ ID NO: 915283
ucauuuacauuccguauuu

SEQ ID NO: 1068351 - RNA, 19 nt, Artificial Sequence
  Description of Artificial Sequence: Synthetic oligonucleotide
  Antisense strand to SEQ ID NO: 1068350
aaauacggaauguaaauga

SEQ ID NO: 1068352 - RNA, 19 nt, Artificial Sequence
  Description of Artificial Sequence: Synthetic oligonucleotide
  Sense strand starting at position 2953 of SEQ ID NO: 915283
uuccguauuucuccuaaug

SEQ ID NO: 1068353 - RNA, 19 nt, Artificial Sequence
  Description of Artificial Sequence: Synthetic oligonucleotide
  Antisense strand to SEQ ID NO: 1068352
cauuaggagaaauacggaa

SEQ ID NO: 1068354 - RNA, 19 nt, Artificial Sequence
  Description of Artificial Sequence: Synthetic oligonucleotide
  Sense strand starting at position 48 of SEQ ID NO: 915284
uagcaagaggccugaaaca

SEQ ID NO: 1068355 - RNA, 19 nt, Artificial Sequence
  Description of Artificial Sequence: Synthetic oligonucleotide
  Antisense strand to SEQ ID NO: 1068354
uguuucaggccucuugcua

SEQ ID NO: 1068356 - RNA, 19 nt, Artificial Sequence
  Description of Artificial Sequence: Synthetic oligonucleotide
  Sense strand starting at position 76 of SEQ ID NO: 915284
uccgaacuccaguaauguu

SEQ ID NO: 1068357 - RNA, 19 nt, Artificial Sequence
  Description of Artificial Sequence: Synthetic oligonucleotide
  Antisense strand to SEQ ID NO: 1068356
aacauuacuggaguucgga

SEQ ID NO: 1068358 - RNA, 19 nt, Artificial Sequence
  Description of Artificial Sequence: Synthetic oligonucleotide
  Sense strand starting at position 83 of SEQ ID NO: 915284
uccaguaauguuggauaaa

SEQ ID NO: 1068359 - RNA, 19 nt, Artificial Sequence
  Description of Artificial Sequence: Synthetic oligonucleotide
  Antisense strand to SEQ ID NO: 1068358
uuuauccaacauuacugga

SEQ ID NO: 1068360 - RNA, 19 nt, Artificial Sequence
  Description of Artificial Sequence: Synthetic oligonucleotide
  Sense strand starting at position 142 of SEQ ID NO: 915284
gagcucauguaguuaaaga

SEQ ID NO: 1068361 - RNA, 19 nt, Artificial Sequence
  Description of Artificial Sequence: Synthetic oligonucleotide
  Antisense strand to SEQ ID NO: 1068360
ucuuuaacuacaugagcuc

SEQ ID NO: 1068362 - RNA, 19 nt, Artificial Sequence
  Description of Artificial Sequence: Synthetic oligonucleotide
  Sense strand starting at position 150 of SEQ ID NO: 915284
guaguuaaagaguauggau

SEQ ID NO: 1068363 - RNA, 19 nt, Artificial Sequence
  Description of Artificial Sequence: Synthetic oligonucleotide
  Antisense strand to SEQ ID NO: 1068362
auccauacucuuuaacuac

SEQ ID NO: 1068364 - RNA, 19 nt, Artificial Sequence
  Description of Artificial Sequence: Synthetic oligonucleotide
  Sense strand starting at position 197 of SEQ ID NO: 915284
cagggucaauguucccaaa

SEQ ID NO: 1068365 - RNA, 19 nt, Artificial Sequence
  Description of Artificial Sequence: Synthetic oligonucleotide
  Antisense strand to SEQ ID NO: 1068364
uuugggaacauugacccug

SEQ ID NO: 1068366 - RNA, 19 nt, Artificial Sequence
  Description of Artificial Sequence: Synthetic oligonucleotide
  Sense strand starting at position 231 of SEQ ID NO: 915284
cauaguuucuaguugaggu

SEQ ID NO: 1068367 - RNA, 19 nt, Artificial Sequence
  Description of Artificial Sequence: Synthetic oligonucleotide
  Antisense strand to SEQ ID NO: 1068366
accucaacuagaaacuaug

SEQ ID NO: 1068368 - RNA, 19 nt, Artificial Sequence
  Description of Artificial Sequence: Synthetic oligonucleotide
  Sense strand starting at position 261 of SEQ ID NO: 915284
auaugcaccugacuuagaa

SEQ ID NO: 1068369 - RNA, 19 nt, Artificial Sequence
  Description of Artificial Sequence: Synthetic oligonucleotide
  Antisense strand to SEQ ID NO: 1068368
uucuaagucaggugcauau

SEQ ID NO: 1068370 - RNA, 19 nt, Artificial Sequence
  Description of Artificial Sequence: Synthetic oligonucleotide
  Sense strand starting at position 344 of SEQ ID NO: 915284
gaaaucagcucugucugua

SEQ ID NO: 1068371 - RNA, 19 nt, Artificial Sequence
  Description of Artificial Sequence: Synthetic oligonucleotide
  Antisense strand to SEQ ID NO: 1068370
uacagacagagcugauuuc

SEQ ID NO: 1068372 - RNA, 19 nt, Artificial Sequence
  Description of Artificial Sequence: Synthetic oligonucleotide
  Sense strand starting at position 347 of SEQ ID NO: 915284
aucagcucugucuguaaga

SEQ ID NO: 1068373 - RNA, 19 nt, Artificial Sequence
  Description of Artificial Sequence: Synthetic oligonucleotide
  Antisense strand to SEQ ID NO: 1068372
ucuuacagacagagcugau

SEQ ID NO: 1068374 - RNA, 19 nt, Artificial Sequence
  Description of Artificial Sequence: Synthetic oligonucleotide
  Sense strand starting at position 403 of SEQ ID NO: 915284
gugggaauucuucagugga

SEQ ID NO: 1068375 - RNA, 19 nt, Artificial Sequence
  Description of Artificial Sequence: Synthetic oligonucleotide
  Antisense strand to SEQ ID NO: 1068374
uccacugaagaauucccac

SEQ ID NO: 1068376 - RNA, 19 nt, Artificial Sequence
  Description of Artificial Sequence: Synthetic oligonucleotide
  Sense strand starting at position 405 of SEQ ID NO: 915284
gggaauucuucaguggacu

SEQ ID NO: 1068377 - RNA, 19 nt, Artificial Sequence
  Description of Artificial Sequence: Synthetic oligonucleotide
  Antisense strand to SEQ ID NO: 1068376
aguccacugaagaauuccc

SEQ ID NO: 1068378 - RNA, 19 nt, Artificial Sequence
  Description of Artificial Sequence: Synthetic oligonucleotide
  Sense strand starting at position 473 of SEQ ID NO: 915284
accaaacuucuggagcuuu

SEQ ID NO: 1068379 - RNA, 19 nt, Artificial Sequence
  Description of Artificial Sequence: Synthetic oligonucleotide
  Antisense strand to SEQ ID NO: 1068378
aaagcuccagaaguuuggu

SEQ ID NO: 1068380 - RNA, 19 nt, Artificial Sequence
  Description of Artificial Sequence: Synthetic oligonucleotide
  Sense strand starting at position 497 of SEQ ID NO: 915284
cuggaagugaccugcucaa

SEQ ID NO: 1068381 - RNA, 19 nt, Artificial Sequence
  Description of Artificial Sequence: Synthetic oligonucleotide
  Antisense strand to SEQ ID NO: 1068380
uugagcaggucacuuccag

SEQ ID NO: 1068382 - RNA, 19 nt, Artificial Sequence
  Description of Artificial Sequence: Synthetic oligonucleotide
  Sense strand starting at position 553 of SEQ ID NO: 915284
agaugagguaucuguacug

SEQ ID NO: 1068383 - RNA, 19 nt, Artificial Sequence
  Description of Artificial Sequence: Synthetic oligonucleotide
  Antisense strand to SEQ ID NO: 1068382
caguacagauaccucaucu

SEQ ID NO: 1068384 - RNA, 19 nt, Artificial Sequence
  Description of Artificial Sequence: Synthetic oligonucleotide
  Sense strand starting at position 632 of SEQ ID NO: 915284
uaaagauuguucucaggaa

SEQ ID NO: 1068385 - RNA, 19 nt, Artificial Sequence
  Description of Artificial Sequence: Synthetic oligonucleotide
  Antisense strand to SEQ ID NO: 1068384
uuccugagaacaaucuuua

SEQ ID NO: 1068386 - RNA, 19 nt, Artificial Sequence
  Description of Artificial Sequence: Synthetic oligonucleotide
  Sense strand starting at position 688 of SEQ ID NO: 915284
auuaguaaccacggaacua

SEQ ID NO: 1068387 - RNA, 19 nt, Artificial Sequence
  Description of Artificial Sequence: Synthetic oligonucleotide
  Antisense strand to SEQ ID NO: 1068386
uaguuccgugguuacuaau

SEQ ID NO: 1068388 - RNA, 19 nt, Artificial Sequence
  Description of Artificial Sequence: Synthetic oligonucleotide
  Sense strand starting at position 836 of SEQ ID NO: 915284
auguguacugcugaaauag

SEQ ID NO: 1068389 - RNA, 19 nt, Artificial Sequence
  Description of Artificial Sequence: Synthetic oligonucleotide
  Antisense strand to SEQ ID NO: 1068388
cuauuucagcaguacacau

SEQ ID NO: 1068390 - RNA, 19 nt, Artificial Sequence
  Description of Artificial Sequence: Synthetic oligonucleotide
  Sense strand starting at position 845 of SEQ ID NO: 915284
gcugaaauaggauagcgaa

SEQ ID NO: 1068391 - RNA, 19 nt, Artificial Sequence
  Description of Artificial Sequence: Synthetic oligonucleotide
  Antisense strand to SEQ ID NO: 1068390
uucgcuauccuauuucagc

SEQ ID NO: 1068392 - RNA, 19 nt, Artificial Sequence
  Description of Artificial Sequence: Synthetic oligonucleotide
  Sense strand starting at position 1027 of SEQ ID NO: 915284
ccuaaaggugacuguccaa

SEQ ID NO: 1068393 - RNA, 19 nt, Artificial Sequence
  Description of Artificial Sequence: Synthetic oligonucleotide
  Antisense strand to SEQ ID NO: 1068392
uuggacagucaccuuuagg

SEQ ID NO: 1068394 - RNA, 19 nt, Artificial Sequence
  Description of Artificial Sequence: Synthetic oligonucleotide
  Sense strand starting at position 1576 of SEQ ID NO: 915284
gcgagcuaccgcuucacuu

SEQ ID NO: 1068395 - RNA, 19 nt, Artificial Sequence
  Description of Artificial Sequence: Synthetic oligonucleotide
  Antisense strand to SEQ ID NO: 1068394
aagugaagcgguagcucgc

SEQ ID NO: 1068396 - RNA, 19 nt, Artificial Sequence
  Description of Artificial Sequence: Synthetic oligonucleotide
  Sense strand starting at position 2394 of SEQ ID NO: 915284
ccgugcagccuuucuauca

SEQ ID NO: 1068397 - RNA, 19 nt, Artificial Sequence
  Description of Artificial Sequence: Synthetic oligonucleotide
  Antisense strand to SEQ ID NO: 1068396
ugauagaaaggcugcacgg

SEQ ID NO: 1068398 - RNA, 19 nt, Artificial Sequence
  Description of Artificial Sequence: Synthetic oligonucleotide
  Sense strand starting at position 2424 of SEQ ID NO: 915284
gacgauuucugggagggcu

SEQ ID NO: 1068399 - RNA, 19 nt, Artificial Sequence
  Description of Artificial Sequence: Synthetic oligonucleotide
  Antisense strand to SEQ ID NO: 1068398
agcccucccagaaaucguc

SEQ ID NO: 1068400 - RNA, 19 nt, Artificial Sequence
  Description of Artificial Sequence: Synthetic oligonucleotide
  Sense strand starting at position 2519 of SEQ ID NO: 915284
gcaucuaugagcucguugu

SEQ ID NO: 1068401 - RNA, 19 nt, Artificial Sequence
  Description of Artificial Sequence: Synthetic oligonucleotide
  Antisense strand to SEQ ID NO: 1068400
acaacgagcucauagaugc

SEQ ID NO: 1068402 - RNA, 19 nt, Artificial Sequence
  Description of Artificial Sequence: Synthetic oligonucleotide
  Sense strand starting at position 2533 of SEQ ID NO: 915284
guugucaagggcugaauuu

SEQ ID NO: 1068403 - RNA, 19 nt, Artificial Sequence
  Description of Artificial Sequence: Synthetic oligonucleotide
  Antisense strand to SEQ ID NO: 1068402
aaauucagcccuugacaac

SEQ ID NO: 1068404 - RNA, 19 nt, Artificial Sequence
  Description of Artificial Sequence: Synthetic oligonucleotide
  Sense strand starting at position 2647 of SEQ ID NO: 915284
uuauaacggagauguuuga

SEQ ID NO: 1068405 - RNA, 19 nt, Artificial Sequence
  Description of Artificial Sequence: Synthetic oligonucleotide
  Antisense strand to SEQ ID NO: 1068404
ucaaacaucuccguuauaa

SEQ ID NO: 1068406 - RNA, 19 nt, Artificial Sequence
  Description of Artificial Sequence: Synthetic oligonucleotide
  Sense strand starting at position 2651 of SEQ ID NO: 915284
aacggagauguuugaacua

SEQ ID NO: 1068407 - RNA, 19 nt, Artificial Sequence
  Description of Artificial Sequence: Synthetic oligonucleotide
  Antisense strand to SEQ ID NO: 1068406
uaguucaaacaucuccguu

SEQ ID NO: 1068408 - RNA, 19 nt, Artificial Sequence
  Description of Artificial Sequence: Synthetic oligonucleotide
  Sense strand starting at position 2838 of SEQ ID NO: 915284
gcgaaacugagacagcauu

SEQ ID NO: 1068409 - RNA, 19 nt, Artificial Sequence
  Description of Artificial Sequence: Synthetic oligonucleotide
  Antisense strand to SEQ ID NO: 1068408
aaugcugucucaguuucgc

SEQ ID NO: 1068410 - RNA, 19 nt, Artificial Sequence
  Description of Artificial Sequence: Synthetic oligonucleotide
  Sense strand starting at position 2918 of SEQ ID NO: 915284
gugauaggaccuugacauu

SEQ ID NO: 1068411 - RNA, 19 nt, Artificial Sequence
  Description of Artificial Sequence: Synthetic oligonucleotide
  Antisense strand to SEQ ID NO: 1068410
aaugucaagguccuaucac

SEQ ID NO: 1068412 - RNA, 19 nt, Artificial Sequence
  Description of Artificial Sequence: Synthetic oligonucleotide
  Sense strand starting at position 3026 of SEQ ID NO: 915284
uuuagaauguuggcuauua

SEQ ID NO: 1068413 - RNA, 19 nt, Artificial Sequence
  Description of Artificial Sequence: Synthetic oligonucleotide
  Antisense strand to SEQ ID NO: 1068412
uaauagccaacauucuaaa

SEQ ID NO: 1068414 - RNA, 19 nt, Artificial Sequence
  Description of Artificial Sequence: Synthetic oligonucleotide
  Sense strand starting at position 3027 of SEQ ID NO: 915284
uuagaauguuggcuauuau

SEQ ID NO: 1068415 - RNA, 19 nt, Artificial Sequence
  Description of Artificial Sequence: Synthetic oligonucleotide
  Antisense strand to SEQ ID NO: 1068414
auaauagccaacauucuaa

SEQ ID NO: 1068416 - RNA, 19 nt, Artificial Sequence
  Description of Artificial Sequence: Synthetic oligonucleotide
  Sense strand starting at position 3028 of SEQ ID NO: 915284
uagaauguuggcuauuauu

SEQ ID NO: 1068417 - RNA, 19 nt, Artificial Sequence
  Description of Artificial Sequence: Synthetic oligonucleotide
  Antisense strand to SEQ ID NO: 1068416
aauaauagccaacauucua

SEQ ID NO: 1068418 - RNA, 19 nt, Artificial Sequence
  Description of Artificial Sequence: Synthetic oligonucleotide
  Sense strand starting at position 3075 of SEQ ID NO: 915284
cguuccuuuccguucucaa

SEQ ID NO: 1068419 - RNA, 19 nt, Artificial Sequence
  Description of Artificial Sequence: Synthetic oligonucleotide
  Antisense strand to SEQ ID NO: 1068418
uugagaacggaaaggaacg

SEQ ID NO: 1068420 - RNA, 19 nt, Artificial Sequence
  Description of Artificial Sequence: Synthetic oligonucleotide
  Sense strand starting at position 3232 of SEQ ID NO: 915284
gccugugucgucuucuacu

SEQ ID NO: 1068421 - RNA, 19 nt, Artificial Sequence
  Description of Artificial Sequence: Synthetic oligonucleotide
  Antisense strand to SEQ ID NO: 1068420
aguagaagacgacacaggc

SEQ ID NO: 1068422 - RNA, 19 nt, Artificial Sequence
  Description of Artificial Sequence: Synthetic oligonucleotide
  Sense strand starting at position 3307 of SEQ ID NO: 915284
cucacuaguuaccugagua

SEQ ID NO: 1068423 - RNA, 19 nt, Artificial Sequence
  Description of Artificial Sequence: Synthetic oligonucleotide
  Antisense strand to SEQ ID NO: 1068422
uacucagguaacuagugag

SEQ ID NO: 1068424 - RNA, 19 nt, Artificial Sequence
  Description of Artificial Sequence: Synthetic oligonucleotide
  Sense strand starting at position 3315 of SEQ ID NO: 915284
uuaccugaguagccuuaua

SEQ ID NO: 1068425 - RNA, 19 nt, Artificial Sequence
  Description of Artificial Sequence: Synthetic oligonucleotide
  Antisense strand to SEQ ID NO: 1068424
uauaaggcuacucagguaa

SEQ ID NO: 1068426 - RNA, 19 nt, Artificial Sequence
  Description of Artificial Sequence: Synthetic oligonucleotide
  Sense strand starting at position 3360 of SEQ ID NO: 915284
cguuuaaacaccgaaagga

SEQ ID NO: 1068427 - RNA, 19 nt, Artificial Sequence
  Description of Artificial Sequence: Synthetic oligonucleotide
  Antisense strand to SEQ ID NO: 1068426
uccuuucgguguuuaaacg

SEQ ID NO: 1068428 - RNA, 19 nt, Artificial Sequence
  Description of Artificial Sequence: Synthetic oligonucleotide
  Sense strand starting at position 3580 of SEQ ID NO: 915284
guacaaagcugagcucaaa

SEQ ID NO: 1068429 - RNA, 19 nt, Artificial Sequence
  Description of Artificial Sequence: Synthetic oligonucleotide
  Antisense strand to SEQ ID NO: 1068428
uuugagcucagcuuuguac

SEQ ID NO: 1068430 - RNA, 19 nt, Artificial Sequence
  Description of Artificial Sequence: Synthetic oligonucleotide
  Sense strand starting at position 3677 of SEQ ID NO: 915284
auaguauuucuaugccuuu

SEQ ID NO: 1068431 - RNA, 19 nt, Artificial Sequence
  Description of Artificial Sequence: Synthetic oligonucleotide
  Antisense strand to SEQ ID NO: 1068430
aaaggcauagaaauacuau

SEQ ID NO: 1068432 - RNA, 19 nt, Artificial Sequence
  Description of Artificial Sequence: Synthetic oligonucleotide
  Sense strand starting at position 3702 of SEQ ID NO: 915284
aguaacugcauuuguguau

SEQ ID NO: 1068433 - RNA, 19 nt, Artificial Sequence
  Description of Artificial Sequence: Synthetic oligonucleotide
  Antisense strand to SEQ ID NO: 1068432
auacacaaaugcaguuacu

SEQ ID NO: 1068434 - RNA, 19 nt, Artificial Sequence
  Description of Artificial Sequence: Synthetic oligonucleotide
  Sense strand starting at position 134 of SEQ ID NO: 915285
gcaaguguuuagguuuaug

SEQ ID NO: 1068435 - RNA, 19 nt, Artificial Sequence
  Description of Artificial Sequence: Synthetic oligonucleotide
  Antisense strand to SEQ ID NO: 1068434
cauaaaccuaaacacuugc

SEQ ID NO: 1068436 - RNA, 19 nt, Artificial Sequence
  Description of Artificial Sequence: Synthetic oligonucleotide
  Sense strand starting at position 137 of SEQ ID NO: 915285
aguguuuagguuuauggau

SEQ ID NO: 1068437 - RNA, 19 nt, Artificial Sequence
  Description of Artificial Sequence: Synthetic oligonucleotide
  Antisense strand to SEQ ID NO: 1068436
auccauaaaccuaaacacu

SEQ ID NO: 1068438 - RNA, 19 nt, Artificial Sequence
  Description of Artificial Sequence: Synthetic oligonucleotide
  Sense strand starting at position 149 of SEQ ID NO: 915285
uauggauugucagcccuua

SEQ ID NO: 1068439 - RNA, 19 nt, Artificial Sequence
  Description of Artificial Sequence: Synthetic oligonucleotide
  Antisense strand to SEQ ID NO: 1068438
uaagggcugacaauccaua

SEQ ID NO: 1068440 - RNA, 19 nt, Artificial Sequence
  Description of Artificial Sequence: Synthetic oligonucleotide
  Sense strand starting at position 187 of SEQ ID NO: 915285
uuauuauugucuuugggcu

SEQ ID NO: 1068441 - RNA, 19 nt, Artificial Sequence
  Description of Artificial Sequence: Synthetic oligonucleotide
  Antisense strand to SEQ ID NO: 1068440
agcccaaagacaauaauaa

SEQ ID NO: 1068442 - RNA, 19 nt, Artificial Sequence
  Description of Artificial Sequence: Synthetic oligonucleotide
  Sense strand starting at position 357 of SEQ ID NO: 915285
uucguugaucaugaaggga

SEQ ID NO: 1068443 - RNA, 19 nt, Artificial Sequence
  Description of Artificial Sequence: Synthetic oligonucleotide
  Antisense strand to SEQ ID NO: 1068442
ucccuucaugaucaacgaa

SEQ ID NO: 1068444 - RNA, 19 nt, Artificial Sequence
  Description of Artificial Sequence: Synthetic oligonucleotide
  Sense strand starting at position 359 of SEQ ID NO: 915285
cguugaucaugaagggaug

SEQ ID NO: 1068445 - RNA, 19 nt, Artificial Sequence
  Description of Artificial Sequence: Synthetic oligonucleotide
  Antisense strand to SEQ ID NO: 1068444
caucccuucaugaucaacg

SEQ ID NO: 1068446 - RNA, 19 nt, Artificial Sequence
  Description of Artificial Sequence: Synthetic oligonucleotide
  Sense strand starting at position 370 of SEQ ID NO: 915285
aagggaugugccuauggcu

SEQ ID NO: 1068447 - RNA, 19 nt, Artificial Sequence
  Description of Artificial Sequence: Synthetic oligonucleotide
  Antisense strand to SEQ ID NO: 1068446
agccauaggcacaucccuu

SEQ ID NO: 1068448 - RNA, 19 nt, Artificial Sequence
  Description of Artificial Sequence: Synthetic oligonucleotide
  Sense strand starting at position 384 of SEQ ID NO: 915285
uggcuaaguuucccuucua

SEQ ID NO: 1068449 - RNA, 19 nt, Artificial Sequence
  Description of Artificial Sequence: Synthetic oligonucleotide
  Antisense strand to SEQ ID NO: 1068448
uagaagggaaacuuagcca

SEQ ID NO: 1068450 - RNA, 19 nt, Artificial Sequence
  Description of Artificial Sequence: Synthetic oligonucleotide
  Sense strand starting at position 385 of SEQ ID NO: 915285
ggcuaaguuucccuucuac

SEQ ID NO: 1068451 - RNA, 19 nt, Artificial Sequence
  Description of Artificial Sequence: Synthetic oligonucleotide
  Antisense strand to SEQ ID NO: 1068450
guagaagggaaacuuagcc

SEQ ID NO: 1068452 - RNA, 19 nt, Artificial Sequence
  Description of Artificial Sequence: Synthetic oligonucleotide
  Sense strand starting at position 735 of SEQ ID NO: 915285
gcuggaucuccguaucaug

SEQ ID NO: 1068453 - RNA, 19 nt, Artificial Sequence
  Description of Artificial Sequence: Synthetic oligonucleotide
  Antisense strand to SEQ ID NO: 1068452
caugauacggagauccagc

SEQ ID NO: 1068454 - RNA, 19 nt, Artificial Sequence
  Description of Artificial Sequence: Synthetic oligonucleotide
  Sense strand starting at position 908 of SEQ ID NO: 915285
ucacucucaucagaaagga

SEQ ID NO: 1068455 - RNA, 19 nt, Artificial Sequence
  Description of Artificial Sequence: Synthetic oligonucleotide
  Antisense strand to SEQ ID NO: 1068454
uccuuucugaugagaguga

SEQ ID NO: 1068456 - RNA, 19 nt, Artificial Sequence
  Description of Artificial Sequence: Synthetic oligonucleotide
  Sense strand starting at position 933 of SEQ ID NO: 915285
ucuauauaugcugagugag

SEQ ID NO: 1068457 - RNA, 19 nt, Artificial Sequence
  Description of Artificial Sequence: Synthetic oligonucleotide
  Antisense strand to SEQ ID NO: 1068456
cucacucagcauauauaga

SEQ ID NO: 1068458 - RNA, 19 nt, Artificial Sequence
  Description of Artificial Sequence: Synthetic oligonucleotide
  Sense strand starting at position 935 of SEQ ID NO: 915285
uauauaugcugagugaguc

SEQ ID NO: 1068459 - RNA, 19 nt, Artificial Sequence
  Description of Artificial Sequence: Synthetic oligonucleotide
  Antisense strand to SEQ ID NO: 1068458
gacucacucagcauauaua

SEQ ID NO: 1068460 - RNA, 19 nt, Artificial Sequence
  Description of Artificial Sequence: Synthetic oligonucleotide
  Sense strand starting at position 936 of SEQ ID NO: 915285
auauaugcugagugaguca

SEQ ID NO: 1068461 - RNA, 19 nt, Artificial Sequence
  Description of Artificial Sequence: Synthetic oligonucleotide
  Antisense strand to SEQ ID NO: 1068460
ugacucacucagcauauau

SEQ ID NO: 1068462 - RNA, 19 nt, Artificial Sequence
  Description of Artificial Sequence: Synthetic oligonucleotide
  Sense strand starting at position 993 of SEQ ID NO: 915285
guaggaguucgugaagcaa

SEQ ID NO: 1068463 - RNA, 19 nt, Artificial Sequence
  Description of Artificial Sequence: Synthetic oligonucleotide
  Antisense strand to SEQ ID NO: 1068462
uugcuucacgaacuccuac

SEQ ID NO: 1068464 - RNA, 19 nt, Artificial Sequence
  Description of Artificial Sequence: Synthetic oligonucleotide
  Sense strand starting at position 995 of SEQ ID NO: 915285
aggaguucgugaagcaaga

SEQ ID NO: 1068465 - RNA, 19 nt, Artificial Sequence
  Description of Artificial Sequence: Synthetic oligonucleotide
  Antisense strand to SEQ ID NO: 1068464
ucuugcuucacgaacuccu

SEQ ID NO: 1068466 - RNA, 19 nt, Artificial Sequence
  Description of Artificial Sequence: Synthetic oligonucleotide
  Sense strand starting at position 997 of SEQ ID NO: 915285
gaguucgugaagcaagauu

SEQ ID NO: 1068467 - RNA, 19 nt, Artificial Sequence
  Description of Artificial Sequence: Synthetic oligonucleotide
  Antisense strand to SEQ ID NO: 1068466
aaucuugcuucacgaacuc

SEQ ID NO: 1068468 - RNA, 19 nt, Artificial Sequence
  Description of Artificial Sequence: Synthetic oligonucleotide
  Sense strand starting at position 2152 of SEQ ID NO: 915285
uuggaaagcuuauuaucuu

SEQ ID NO: 1068469 - RNA, 19 nt, Artificial Sequence
  Description of Artificial Sequence: Synthetic oligonucleotide
  Antisense strand to SEQ ID NO: 1068468
aagauaauaagcuuuccaa

SEQ ID NO: 1068470 - RNA, 19 nt, Artificial Sequence
  Description of Artificial Sequence: Synthetic oligonucleotide
  Sense strand starting at position 2223 of SEQ ID NO: 915285
uggugaauucagcgacaua

SEQ ID NO: 1068471 - RNA, 19 nt, Artificial Sequence
  Description of Artificial Sequence: Synthetic oligonucleotide
  Antisense strand to SEQ ID NO: 1068470
uaugucgcugaauucacca

SEQ ID NO: 1068472 - RNA, 19 nt, Artificial Sequence
  Description of Artificial Sequence: Synthetic oligonucleotide
  Sense strand starting at position 2479 of SEQ ID NO: 915285
ccaggugucauguaccuua

SEQ ID NO: 1068473 - RNA, 19 nt, Artificial Sequence
  Description of Artificial Sequence: Synthetic oligonucleotide
  Antisense strand to SEQ ID NO: 1068472
uaagguacaugacaccugg

SEQ ID NO: 1068474 - RNA, 19 nt, Artificial Sequence
  Description of Artificial Sequence: Synthetic oligonucleotide
  Sense strand starting at position 2482 of SEQ ID NO: 915285
ggugucauguaccuuacau

SEQ ID NO: 1068475 - RNA, 19 nt, Artificial Sequence
  Description of Artificial Sequence: Synthetic oligonucleotide
  Antisense strand to SEQ ID NO: 1068474
auguaagguacaugacacc

SEQ ID NO: 1068476 - RNA, 19 nt, Artificial Sequence
  Description of Artificial Sequence: Synthetic oligonucleotide
  Sense strand starting at position 2653 of SEQ ID NO: 915285
gcuauagucuuagccacua

SEQ ID NO: 1068477 - RNA, 19 nt, Artificial Sequence
  Description of Artificial Sequence: Synthetic oligonucleotide
  Antisense strand to SEQ ID NO: 1068476
uaguggcuaagacuauagc

SEQ ID NO: 1068478 - RNA, 19 nt, Artificial Sequence
  Description of Artificial Sequence: Synthetic oligonucleotide
  Sense strand starting at position 2689 of SEQ ID NO: 915285
ggaugcuacauaugcagaa

SEQ ID NO: 1068479 - RNA, 19 nt, Artificial Sequence
  Description of Artificial Sequence: Synthetic oligonucleotide
  Antisense strand to SEQ ID NO: 1068478
uucugcauauguagcaucc

SEQ ID NO: 1068480 - RNA, 19 nt, Artificial Sequence
  Description of Artificial Sequence: Synthetic oligonucleotide
  Sense strand starting at position 2693 of SEQ ID NO: 915285
gcuacauaugcagaauugu

SEQ ID NO: 1068481 - RNA, 19 nt, Artificial Sequence
  Description of Artificial Sequence: Synthetic oligonucleotide
  Antisense strand to SEQ ID NO: 1068480
acaauucugcauauguagc

SEQ ID NO: 1068482 - RNA, 19 nt, Artificial Sequence
  Description of Artificial Sequence: Synthetic oligonucleotide
  Sense strand starting at position 2913 of SEQ ID NO: 915285
aagcaaagucucgggaaga

SEQ ID NO: 1068483 - RNA, 19 nt, Artificial Sequence
  Description of Artificial Sequence: Synthetic oligonucleotide
  Antisense strand to SEQ ID NO: 1068482
ucuucccgagacuuugcuu

SEQ ID NO: 1068484 - RNA, 19 nt, Artificial Sequence
  Description of Artificial Sequence: Synthetic oligonucleotide
  Sense strand starting at position 2931 of SEQ ID NO: 915285
agaagucacccuggacuau

SEQ ID NO: 1068485 - RNA, 19 nt, Artificial Sequence
  Description of Artificial Sequence: Synthetic oligonucleotide
  Antisense strand to SEQ ID NO: 1068484
auaguccagggugacuucu

SEQ ID NO: 1068486 - RNA, 19 nt, Artificial Sequence
  Description of Artificial Sequence: Synthetic oligonucleotide
  Sense strand starting at position 2950 of SEQ ID NO: 915285
ugaugaaggccuggaguaa

SEQ ID NO: 1068487 - RNA, 19 nt, Artificial Sequence
  Description of Artificial Sequence: Synthetic oligonucleotide
  Antisense strand to SEQ ID NO: 1068486
uuacuccaggccuucauca

SEQ ID NO: 1068488 - RNA, 19 nt, Artificial Sequence
  Description of Artificial Sequence: Synthetic oligonucleotide
  Sense strand starting at position 3027 of SEQ ID NO: 915285
aucuguaaagcucaggaca

SEQ ID NO: 1068489 - RNA, 19 nt, Artificial Sequence
  Description of Artificial Sequence: Synthetic oligonucleotide
  Antisense strand to SEQ ID NO: 1068488
uguccugagcuuuacagau

SEQ ID NO: 1068490 - RNA, 19 nt, Artificial Sequence
  Description of Artificial Sequence: Synthetic oligonucleotide
  Sense strand starting at position 3120 of SEQ ID NO: 915285
gccuauugcagugaaguga

SEQ ID NO: 1068491 - RNA, 19 nt, Artificial Sequence
  Description of Artificial Sequence: Synthetic oligonucleotide
  Antisense strand to SEQ ID NO: 1068490
ucacuucacugcaauaggc

SEQ ID NO: 1068492 - RNA, 19 nt, Artificial Sequence
  Description of Artificial Sequence: Synthetic oligonucleotide
  Sense strand starting at position 3274 of SEQ ID NO: 915285
uuuguagaucacuggaaga

SEQ ID NO: 1068493 - RNA, 19 nt, Artificial Sequence
  Description of Artificial Sequence: Synthetic oligonucleotide
  Antisense strand to SEQ ID NO: 1068492
ucuuccagugaucuacaaa

SEQ ID NO: 1068494 - RNA, 19 nt, Artificial Sequence
  Description of Artificial Sequence: Synthetic oligonucleotide
  Sense strand starting at position 3296 of SEQ ID NO: 915285
uaauaagauuacgcaugua

SEQ ID NO: 1068495 - RNA, 19 nt, Artificial Sequence
  Description of Artificial Sequence: Synthetic oligonucleotide
  Antisense strand to SEQ ID NO: 1068494
uacaugcguaaucuuauua

SEQ ID NO: 1068496 - RNA, 19 nt, Artificial Sequence
  Description of Artificial Sequence: Synthetic oligonucleotide
  Sense strand starting at position 3299 of SEQ ID NO: 915285
uaagauuacgcauguaagg

SEQ ID NO: 1068497 - RNA, 19 nt, Artificial Sequence
  Description of Artificial Sequence: Synthetic oligonucleotide
  Antisense strand to SEQ ID NO: 1068496
ccuuacaugcguaaucuua

SEQ ID NO: 1068498 - RNA, 19 nt, Artificial Sequence
  Description of Artificial Sequence: Synthetic oligonucleotide
  Sense strand starting at position 3373 of SEQ ID NO: 915285
ucuauuaucugaccugaga

SEQ ID NO: 1068499 - RNA, 19 nt, Artificial Sequence
  Description of Artificial Sequence: Synthetic oligonucleotide
  Antisense strand to SEQ ID NO: 1068498
ucucaggucagauaauaga

SEQ ID NO: 1068500 - RNA, 19 nt, Artificial Sequence
  Description of Artificial Sequence: Synthetic oligonucleotide
  Sense strand starting at position 3401 of SEQ ID NO: 915285
agaacaucucaugguauga

SEQ ID NO: 1068501 - RNA, 19 nt, Artificial Sequence
  Description of Artificial Sequence: Synthetic oligonucleotide
  Antisense strand to SEQ ID NO: 1068500
ucauaccaugagauguucu

SEQ ID NO: 1068502 - RNA, 19 nt, Artificial Sequence
  Description of Artificial Sequence: Synthetic oligonucleotide
  Sense strand starting at position 3414 of SEQ ID NO: 915285
guaugagucuuguuccuac

SEQ ID NO: 1068503 - RNA, 19 nt, Artificial Sequence
  Description of Artificial Sequence: Synthetic oligonucleotide
  Antisense strand to SEQ ID NO: 1068502
guaggaacaagacucauac

SEQ ID NO: 1068504 - RNA, 19 nt, Artificial Sequence
  Description of Artificial Sequence: Synthetic oligonucleotide
  Sense strand starting at position 3417 of SEQ ID NO: 915285
ugagucuuguuccuacacu

SEQ ID NO: 1068505 - RNA, 19 nt, Artificial Sequence
  Description of Artificial Sequence: Synthetic oligonucleotide
  Antisense strand to SEQ ID NO: 1068504
aguguaggaacaagacuca

SEQ ID NO: 1068506 - RNA, 19 nt, Artificial Sequence
  Description of Artificial Sequence: Synthetic oligonucleotide
  Sense strand starting at position 3626 of SEQ ID NO: 915285
cccaaauaacuguaggcau

SEQ ID NO: 1068507 - RNA, 19 nt, Artificial Sequence
  Description of Artificial Sequence: Synthetic oligonucleotide
  Antisense strand to SEQ ID NO: 1068506
augccuacaguuauuuggg

SEQ ID NO: 1068508 - RNA, 19 nt, Artificial Sequence
  Description of Artificial Sequence: Synthetic oligonucleotide
  Sense strand starting at position 3683 of SEQ ID NO: 915285
gcaccugagcuuuacagau

SEQ ID NO: 1068509 - RNA, 19 nt, Artificial Sequence
  Description of Artificial Sequence: Synthetic oligonucleotide
  Antisense strand to SEQ ID NO: 1068508
aucuguaaagcucaggugc

SEQ ID NO: 1068510 - RNA, 19 nt, Artificial Sequence
  Description of Artificial Sequence: Synthetic oligonucleotide
  Sense strand starting at position 3776 of SEQ ID NO: 915285
ucaauaguccagggugacu

SEQ ID NO: 1068511 - RNA, 19 nt, Artificial Sequence
  Description of Artificial Sequence: Synthetic oligonucleotide
  Antisense strand to SEQ ID NO: 1068510
agucacccuggacuauuga

SEQ ID NO: 1068512 - RNA, 19 nt, Artificial Sequence
  Description of Artificial Sequence: Synthetic oligonucleotide
  Sense strand starting at position 3788 of SEQ ID NO: 915285
ggugacuucucuucccaag

SEQ ID NO: 1068513 - RNA, 19 nt, Artificial Sequence
  Description of Artificial Sequence: Synthetic oligonucleotide
  Antisense strand to SEQ ID NO: 1068512
cuugggaagagaagucacc

SEQ ID NO: 1068514 - RNA, 19 nt, Artificial Sequence
  Description of Artificial Sequence: Synthetic oligonucleotide
  Sense strand starting at position 222 of SEQ ID NO: 915286
guuacuccucacuagguau

SEQ ID NO: 1068515 - RNA, 19 nt, Artificial Sequence
  Description of Artificial Sequence: Synthetic oligonucleotide
  Antisense strand to SEQ ID NO: 1068514
auaccuagugaggaguaac

SEQ ID NO: 1068516 - RNA, 19 nt, Artificial Sequence
  Description of Artificial Sequence: Synthetic oligonucleotide
  Sense strand starting at position 401 of SEQ ID NO: 915286
cuguuuggcuauuugcuaa

SEQ ID NO: 1068517 - RNA, 19 nt, Artificial Sequence
  Description of Artificial Sequence: Synthetic oligonucleotide
  Antisense strand to SEQ ID NO: 1068516
uuagcaaauagccaaacag

SEQ ID NO: 1068518 - RNA, 19 nt, Artificial Sequence
  Description of Artificial Sequence: Synthetic oligonucleotide
  Sense strand starting at position 509 of SEQ ID NO: 915286
guugauuuguuaguuuguu

SEQ ID NO: 1068519 - RNA, 19 nt, Artificial Sequence
  Description of Artificial Sequence: Synthetic oligonucleotide
  Antisense strand to SEQ ID NO: 1068518
aacaaacuaacaaaucaac

SEQ ID NO: 1068520 - RNA, 19 nt, Artificial Sequence
  Description of Artificial Sequence: Synthetic oligonucleotide
  Sense strand starting at position 513 of SEQ ID NO: 915286
auuuguuaguuuguuguca

SEQ ID NO: 1068521 - RNA, 19 nt, Artificial Sequence
  Description of Artificial Sequence: Synthetic oligonucleotide
  Antisense strand to SEQ ID NO: 1068520
ugacaacaaacuaacaaau

SEQ ID NO: 1068522 - RNA, 19 nt, Artificial Sequence
  Description of Artificial Sequence: Synthetic oligonucleotide
  Sense strand starting at position 586 of SEQ ID NO: 915286
aaagaugcucugcaaaggu

SEQ ID NO: 1068523 - RNA, 19 nt, Artificial Sequence
  Description of Artificial Sequence: Synthetic oligonucleotide
  Antisense strand to SEQ ID NO: 1068522
accuuugcagagcaucuuu

SEQ ID NO: 1068524 - RNA, 19 nt, Artificial Sequence
  Description of Artificial Sequence: Synthetic oligonucleotide
  Sense strand starting at position 652 of SEQ ID NO: 915286
cuuguugaacugcacaaua

SEQ ID NO: 1068525 - RNA, 19 nt, Artificial Sequence
  Description of Artificial Sequence: Synthetic oligonucleotide
  Antisense strand to SEQ ID NO: 1068524
uauugugcaguucaacaag

SEQ ID NO: 1068526 - RNA, 19 nt, Artificial Sequence
  Description of Artificial Sequence: Synthetic oligonucleotide
  Sense strand starting at position 654 of SEQ ID NO: 915286
uguugaacugcacaauaau

SEQ ID NO: 1068527 - RNA, 19 nt, Artificial Sequence
  Description of Artificial Sequence: Synthetic oligonucleotide
  Antisense strand to SEQ ID NO: 1068526
auuauugugcaguucaaca

SEQ ID NO: 1068528 - RNA, 19 nt, Artificial Sequence
  Description of Artificial Sequence: Synthetic oligonucleotide
  Sense strand starting at position 694 of SEQ ID NO: 915286
ggagaacuguuauuaugac

SEQ ID NO: 1068529 - RNA, 19 nt, Artificial Sequence
  Description of Artificial Sequence: Synthetic oligonucleotide
  Antisense strand to SEQ ID NO: 1068528
gucauaauaacaguucucc

SEQ ID NO: 1068530 - RNA, 19 nt, Artificial Sequence
  Description of Artificial Sequence: Synthetic oligonucleotide
  Sense strand starting at position 840 of SEQ ID NO: 915286
guucuaaaucaaggauucu

SEQ ID NO: 1068531 - RNA, 19 nt, Artificial Sequence
  Description of Artificial Sequence: Synthetic oligonucleotide
  Antisense strand to SEQ ID NO: 1068530
agaauccuugauuuagaac

SEQ ID NO: 1068532 - RNA, 19 nt, Artificial Sequence
  Description of Artificial Sequence: Synthetic oligonucleotide
  Sense strand starting at position 959 of SEQ ID NO: 915286
gccauagccuucucauuug

SEQ ID NO: 1068533 - RNA, 19 nt, Artificial Sequence
  Description of Artificial Sequence: Synthetic oligonucleotide
  Antisense strand to SEQ ID NO: 1068532
caaaugagaaggcuauggc

SEQ ID NO: 1068534 - RNA, 19 nt, Artificial Sequence
  Description of Artificial Sequence: Synthetic oligonucleotide
  Sense strand starting at position 1081 of SEQ ID NO: 915286
aaucauugagucuaggcua

SEQ ID NO: 1068535 - RNA, 19 nt, Artificial Sequence
  Description of Artificial Sequence: Synthetic oligonucleotide
  Antisense strand to SEQ ID NO: 1068534
uagccuagacucaaugauu

SEQ ID NO: 1068536 - RNA, 19 nt, Artificial Sequence
  Description of Artificial Sequence: Synthetic oligonucleotide
  Sense strand starting at position 1086 of SEQ ID NO: 915286
uugagucuaggcuauaaac

SEQ ID NO: 1068537 - RNA, 19 nt, Artificial Sequence
  Description of Artificial Sequence: Synthetic oligonucleotide
  Antisense strand to SEQ ID NO: 1068536
guuuauagccuagacucaa

SEQ ID NO: 1068538 - RNA, 19 nt, Artificial Sequence
  Description of Artificial Sequence: Synthetic oligonucleotide
  Sense strand starting at position 1185 of SEQ ID NO: 915286
ggaccauacugacuaaugu

SEQ ID NO: 1068539 - RNA, 19 nt, Artificial Sequence
  Description of Artificial Sequence: Synthetic oligonucleotide
  Antisense strand to SEQ ID NO: 1068538
acauuagucaguauggucc

SEQ ID NO: 1068540 - RNA, 19 nt, Artificial Sequence
  Description of Artificial Sequence: Synthetic oligonucleotide
  Sense strand starting at position 1196 of SEQ ID NO: 915286
acuaauguugaaugcagau

SEQ ID NO: 1068541 - RNA, 19 nt, Artificial Sequence
  Description of Artificial Sequence: Synthetic oligonucleotide
  Antisense strand to SEQ ID NO: 1068540
aucugcauucaacauuagu

SEQ ID NO: 1068542 - RNA, 19 nt, Artificial Sequence
  Description of Artificial Sequence: Synthetic oligonucleotide
  Sense strand starting at position 1279 of SEQ ID NO: 915286
aucuguuaagucugaagaa

SEQ ID NO: 1068543 - RNA, 19 nt, Artificial Sequence
  Description of Artificial Sequence: Synthetic oligonucleotide
  Antisense strand to SEQ ID NO: 1068542
uucuucagacuuaacagau

SEQ ID NO: 1068544 - RNA, 19 nt, Artificial Sequence
  Description of Artificial Sequence: Synthetic oligonucleotide
  Sense strand starting at position 1308 of SEQ ID NO: 915286
ugccauuagggcuagagua

SEQ ID NO: 1068545 - RNA, 19 nt, Artificial Sequence
  Description of Artificial Sequence: Synthetic oligonucleotide
  Antisense strand to SEQ ID NO: 1068544
uacucuagcccuaauggca

SEQ ID NO: 1068546 - RNA, 19 nt, Artificial Sequence
  Description of Artificial Sequence: Synthetic oligonucleotide
  Sense strand starting at position 1449 of SEQ ID NO: 915286
caagaaaggcuguguauga

SEQ ID NO: 1068547 - RNA, 19 nt, Artificial Sequence
  Description of Artificial Sequence: Synthetic oligonucleotide
  Antisense strand to SEQ ID NO: 1068546
ucauacacagccuuucuug

SEQ ID NO: 1068548 - RNA, 19 nt, Artificial Sequence
  Description of Artificial Sequence: Synthetic oligonucleotide
  Sense strand starting at position 1450 of SEQ ID NO: 915286
aagaaaggcuguguaugaa

SEQ ID NO: 1068549 - RNA, 19 nt, Artificial Sequence
  Description of Artificial Sequence: Synthetic oligonucleotide
  Antisense strand to SEQ ID NO: 1068548
uucauacacagccuuucuu

SEQ ID NO: 1068550 - RNA, 19 nt, Artificial Sequence
  Description of Artificial Sequence: Synthetic oligonucleotide
  Sense strand starting at position 1495 of SEQ ID NO: 915286
agggcaugauaccuggaau

SEQ ID NO: 1068551 - RNA, 19 nt, Artificial Sequence
  Description of Artificial Sequence: Synthetic oligonucleotide
  Antisense strand to SEQ ID NO: 1068550
auuccagguaucaugcccu

SEQ ID NO: 1068552 - RNA, 19 nt, Artificial Sequence
  Description of Artificial Sequence: Synthetic oligonucleotide
  Sense strand starting at position 1496 of SEQ ID NO: 915286
gggcaugauaccuggaauu

SEQ ID NO: 1068553 - RNA, 19 nt, Artificial Sequence
  Description of Artificial Sequence: Synthetic oligonucleotide
  Antisense strand to SEQ ID NO: 1068552
aauuccagguaucaugccc

SEQ ID NO: 1068554 - RNA, 19 nt, Artificial Sequence
  Description of Artificial Sequence: Synthetic oligonucleotide
  Sense strand starting at position 2213 of SEQ ID NO: 915286
ggaaaccuguucuugacau

SEQ ID NO: 1068555 - RNA, 19 nt, Artificial Sequence
  Description of Artificial Sequence: Synthetic oligonucleotide
  Antisense strand to SEQ ID NO: 1068554
augucaagaacagguuucc

SEQ ID NO: 1068556 - RNA, 19 nt, Artificial Sequence
  Description of Artificial Sequence: Synthetic oligonucleotide
  Sense strand starting at position 2223 of SEQ ID NO: 915286
ucuugacauccauauguau

SEQ ID NO: 1068557 - RNA, 19 nt, Artificial Sequence
  Description of Artificial Sequence: Synthetic oligonucleotide
  Antisense strand to SEQ ID NO: 1068556
auacauauggaugucaaga

SEQ ID NO: 1068558 - RNA, 19 nt, Artificial Sequence
  Description of Artificial Sequence: Synthetic oligonucleotide
  Sense strand starting at position 2226 of SEQ ID NO: 915286
ugacauccauauguauauu

SEQ ID NO: 1068559 - RNA, 19 nt, Artificial Sequence
  Description of Artificial Sequence: Synthetic oligonucleotide
  Antisense strand to SEQ ID NO: 1068558
aauauacauauggauguca

SEQ ID NO: 1068560 - RNA, 19 nt, Artificial Sequence
  Description of Artificial Sequence: Synthetic oligonucleotide
  Sense strand starting at position 2608 of SEQ ID NO: 915286
ucaaucaauguguaccauu

SEQ ID NO: 1068561 - RNA, 19 nt, Artificial Sequence
  Description of Artificial Sequence: Synthetic oligonucleotide
  Antisense strand to SEQ ID NO: 1068560
aaugguacacauugauuga

SEQ ID NO: 1068562 - RNA, 19 nt, Artificial Sequence
  Description of Artificial Sequence: Synthetic oligonucleotide
  Sense strand starting at position 2646 of SEQ ID NO: 915286
guaacuaucuaucuaugag

SEQ ID NO: 1068563 - RNA, 19 nt, Artificial Sequence
  Description of Artificial Sequence: Synthetic oligonucleotide
  Antisense strand to SEQ ID NO: 1068562
cucauagauagauaguuac

SEQ ID NO: 1068564 - RNA, 19 nt, Artificial Sequence
  Description of Artificial Sequence: Synthetic oligonucleotide
  Sense strand starting at position 2698 of SEQ ID NO: 915286
agagaaguggcuugaacug

SEQ ID NO: 1068565 - RNA, 19 nt, Artificial Sequence
  Description of Artificial Sequence: Synthetic oligonucleotide
  Antisense strand to SEQ ID NO: 1068564
caguucaagccacuucucu

SEQ ID NO: 1068566 - RNA, 19 nt, Artificial Sequence
  Description of Artificial Sequence: Synthetic oligonucleotide
  Sense strand starting at position 2739 of SEQ ID NO: 915286
ggaugagaucugugauuga

SEQ ID NO: 1068567 - RNA, 19 nt, Artificial Sequence
  Description of Artificial Sequence: Synthetic oligonucleotide
  Antisense strand to SEQ ID NO: 1068566
ucaaucacagaucucaucc

SEQ ID NO: 1068568 - RNA, 19 nt, Artificial Sequence
  Description of Artificial Sequence: Synthetic oligonucleotide
  Sense strand starting at position 2742 of SEQ ID NO: 915286
ugagaucugugauugauga

SEQ ID NO: 1068569 - RNA, 19 nt, Artificial Sequence
  Description of Artificial Sequence: Synthetic oligonucleotide
  Antisense strand to SEQ ID NO: 1068568
ucaucaaucacagaucuca

SEQ ID NO: 1068570 - RNA, 19 nt, Artificial Sequence
  Description of Artificial Sequence: Synthetic oligonucleotide
  Sense strand starting at position 2743 of SEQ ID NO: 915286
gagaucugugauugaugau

SEQ ID NO: 1068571 - RNA, 19 nt, Artificial Sequence
  Description of Artificial Sequence: Synthetic oligonucleotide
  Antisense strand to SEQ ID NO: 1068570
aucaucaaucacagaucuc

SEQ ID NO: 1068572 - RNA, 19 nt, Artificial Sequence
  Description of Artificial Sequence: Synthetic oligonucleotide
  Sense strand starting at position 2878 of SEQ ID NO: 915286
agauuacucugucugggag

SEQ ID NO: 1068573 - RNA, 19 nt, Artificial Sequence
  Description of Artificial Sequence: Synthetic oligonucleotide
  Antisense strand to SEQ ID NO: 1068572
cucccagacagaguaaucu

SEQ ID NO: 1068574 - RNA, 19 nt, Artificial Sequence
  Description of Artificial Sequence: Synthetic oligonucleotide
  Sense strand starting at position 2879 of SEQ ID NO: 915286
gauuacucugucugggaga

SEQ ID NO: 1068575 - RNA, 19 nt, Artificial Sequence
  Description of Artificial Sequence: Synthetic oligonucleotide
  Antisense strand to SEQ ID NO: 1068574
ucucccagacagaguaauc

SEQ ID NO: 1068576 - RNA, 19 nt, Artificial Sequence
  Description of Artificial Sequence: Synthetic oligonucleotide
  Sense strand starting at position 2881 of SEQ ID NO: 915286
uuacucugucugggagaau

SEQ ID NO: 1068577 - RNA, 19 nt, Artificial Sequence
  Description of Artificial Sequence: Synthetic oligonucleotide
  Antisense strand to SEQ ID NO: 1068576
auucucccagacagaguaa

SEQ ID NO: 1068578 - RNA, 19 nt, Artificial Sequence
  Description of Artificial Sequence: Synthetic oligonucleotide
  Sense strand starting at position 2962 of SEQ ID NO: 915286
ccugaaugagcuugagaac

SEQ ID NO: 1068579 - RNA, 19 nt, Artificial Sequence
  Description of Artificial Sequence: Synthetic oligonucleotide
  Antisense strand to SEQ ID NO: 1068578
guucucaagcucauucagg

SEQ ID NO: 1068580 - RNA, 19 nt, Artificial Sequence
  Description of Artificial Sequence: Synthetic oligonucleotide
  Sense strand starting at position 3092 of SEQ ID NO: 915286
gucagaaacugggcaagau

SEQ ID NO: 1068581 - RNA, 19 nt, Artificial Sequence
  Description of Artificial Sequence: Synthetic oligonucleotide
  Antisense strand to SEQ ID NO: 1068580
aucuugcccaguuucugac

SEQ ID NO: 1068582 - RNA, 19 nt, Artificial Sequence
  Description of Artificial Sequence: Synthetic oligonucleotide
  Sense strand starting at position 3206 of SEQ ID NO: 915286
guauuucucucaguccuca

SEQ ID NO: 1068583 - RNA, 19 nt, Artificial Sequence
  Description of Artificial Sequence: Synthetic oligonucleotide
  Antisense strand to SEQ ID NO: 1068582
ugaggacugagagaaauac

SEQ ID NO: 1068584 - RNA, 19 nt, Artificial Sequence
  Description of Artificial Sequence: Synthetic oligonucleotide
  Sense strand starting at position 3242 of SEQ ID NO: 915286
gucaaagucccaggagauu

SEQ ID NO: 1068585 - RNA, 19 nt, Artificial Sequence
  Description of Artificial Sequence: Synthetic oligonucleotide
  Antisense strand to SEQ ID NO: 1068584
aaucuccugggacuuugac

SEQ ID NO: 1068586 - RNA, 19 nt, Artificial Sequence
  Description of Artificial Sequence: Synthetic oligonucleotide
  Sense strand starting at position 3356 of SEQ ID NO: 915286
ucaccacuauggucugaau

SEQ ID NO: 1068587 - RNA, 19 nt, Artificial Sequence
  Description of Artificial Sequence: Synthetic oligonucleotide
  Antisense strand to SEQ ID NO: 1068586
auucagaccauagugguga

SEQ ID NO: 1068588 - RNA, 19 nt, Artificial Sequence
  Description of Artificial Sequence: Synthetic oligonucleotide
  Sense strand starting at position 3421 of SEQ ID NO: 915286
gguauuaagaggugggaac

SEQ ID NO: 1068589 - RNA, 19 nt, Artificial Sequence
  Description of Artificial Sequence: Synthetic oligonucleotide
  Antisense strand to SEQ ID NO: 1068588
guucccaccucuuaauacc

SEQ ID NO: 1068590 - RNA, 19 nt, Artificial Sequence
  Description of Artificial Sequence: Synthetic oligonucleotide
  Sense strand starting at position 3481 of SEQ ID NO: 915286
ggagauugguauucuuaua

SEQ ID NO: 1068591 - RNA, 19 nt, Artificial Sequence
  Description of Artificial Sequence: Synthetic oligonucleotide
  Antisense strand to SEQ ID NO: 1068590
uauaagaauaccaaucucc

SEQ ID NO: 1068592 - RNA, 19 nt, Artificial Sequence
  Description of Artificial Sequence: Synthetic oligonucleotide
  Sense strand starting at position 3930 of SEQ ID NO: 915286
gucuauauaucaguaaaca

SEQ ID NO: 1068593 - RNA, 19 nt, Artificial Sequence
  Description of Artificial Sequence: Synthetic oligonucleotide
  Antisense strand to SEQ ID NO: 1068592
uguuuacugauauauagac

SEQ ID NO: 1068594 - RNA, 19 nt, Artificial Sequence
  Description of Artificial Sequence: Synthetic oligonucleotide
  Sense strand starting at position 292 of SEQ ID NO: 915287
ggucccugugagcaacaaa

SEQ ID NO: 1068595 - RNA, 19 nt, Artificial Sequence
  Description of Artificial Sequence: Synthetic oligonucleotide
  Antisense strand to SEQ ID NO: 1068594
uuuguugcucacagggacc

SEQ ID NO: 1068596 - RNA, 19 nt, Artificial Sequence
  Description of Artificial Sequence: Synthetic oligonucleotide
  Sense strand starting at position 2123 of SEQ ID NO: 915287
cuggccagcugucucauaa

SEQ ID NO: 1068597 - RNA, 19 nt, Artificial Sequence
  Description of Artificial Sequence: Synthetic oligonucleotide
  Antisense strand to SEQ ID NO: 1068596
uuaugagacagcuggccag

SEQ ID NO: 1068598 - RNA, 19 nt, Artificial Sequence
  Description of Artificial Sequence: Synthetic oligonucleotide
  Sense strand starting at position 2329 of SEQ ID NO: 915287
cuucucuucuugggacgaa

SEQ ID NO: 1068599 - RNA, 19 nt, Artificial Sequence
  Description of Artificial Sequence: Synthetic oligonucleotide
  Antisense strand to SEQ ID NO: 1068598
uucgucccaagaagagaag

SEQ ID NO: 1068600 - RNA, 19 nt, Artificial Sequence
  Description of Artificial Sequence: Synthetic oligonucleotide
  Sense strand starting at position 2330 of SEQ ID NO: 915287
uucucuucuugggacgaau

SEQ ID NO: 1068601 - RNA, 19 nt, Artificial Sequence
  Description of Artificial Sequence: Synthetic oligonucleotide
  Antisense strand to SEQ ID NO: 1068600
auucgucccaagaagagaa

SEQ ID NO: 1068602 - RNA, 19 nt, Artificial Sequence
  Description of Artificial Sequence: Synthetic oligonucleotide
  Sense strand starting at position 2368 of SEQ ID NO: 915287
cggccugacuuccaggauu

SEQ ID NO: 1068603 - RNA, 19 nt, Artificial Sequence
  Description of Artificial Sequence: Synthetic oligonucleotide
  Antisense strand to SEQ ID NO: 1068602
aauccuggaagucaggccg

SEQ ID NO: 1068604 - RNA, 19 nt, Artificial Sequence
  Description of Artificial Sequence: Synthetic oligonucleotide
  Sense strand starting at position 2486 of SEQ ID NO: 915287
ggacuagaguggagaugaa

SEQ ID NO: 1068605 - RNA, 19 nt, Artificial Sequence
  Description of Artificial Sequence: Synthetic oligonucleotide
  Antisense strand to SEQ ID NO: 1068604
uucaucuccacucuagucc

SEQ ID NO: 1068606 - RNA, 19 nt, Artificial Sequence
  Description of Artificial Sequence: Synthetic oligonucleotide
  Sense strand starting at position 2534 of SEQ ID NO: 915287
cagucugcacccgaagagu

SEQ ID NO: 1068607 - RNA, 19 nt, Artificial Sequence
  Description of Artificial Sequence: Synthetic oligonucleotide
  Antisense strand to SEQ ID NO: 1068606
acucuucgggugcagacug

SEQ ID NO: 1068608 - RNA, 19 nt, Artificial Sequence
  Description of Artificial Sequence: Synthetic oligonucleotide
  Sense strand starting at position 2588 of SEQ ID NO: 915287
gguagaaguucagagguca

SEQ ID NO: 1068609 - RNA, 19 nt, Artificial Sequence
  Description of Artificial Sequence: Synthetic oligonucleotide
  Antisense strand to SEQ ID NO: 1068608
ugaccucugaacuucuacc

SEQ ID NO: 1068610 - RNA, 19 nt, Artificial Sequence
  Description of Artificial Sequence: Synthetic oligonucleotide
  Sense strand starting at position 2814 of SEQ ID NO: 915287
gcaugaggcuucccugaca

SEQ ID NO: 1068611 - RNA, 19 nt, Artificial Sequence
  Description of Artificial Sequence: Synthetic oligonucleotide
  Antisense strand to SEQ ID NO: 1068610
ugucagggaagccucaugc

SEQ ID NO: 1068612 - RNA, 19 nt, Artificial Sequence
  Description of Artificial Sequence: Synthetic oligonucleotide
  Sense strand starting at position 2819 of SEQ ID NO: 915287
aggcuucccugacaugcau

SEQ ID NO: 1068613 - RNA, 19 nt, Artificial Sequence
  Description of Artificial Sequence: Synthetic oligonucleotide
  Antisense strand to SEQ ID NO: 1068612
augcaugucagggaagccu

SEQ ID NO: 1068614 - RNA, 19 nt, Artificial Sequence
  Description of Artificial Sequence: Synthetic oligonucleotide
  Sense strand starting at position 2904 of SEQ ID NO: 915287
cggauucccuguccaggua

SEQ ID NO: 1068615 - RNA, 19 nt, Artificial Sequence
  Description of Artificial Sequence: Synthetic oligonucleotide
  Antisense strand to SEQ ID NO: 1068614
uaccuggacagggaauccg

SEQ ID NO: 1068616 - RNA, 19 nt, Artificial Sequence
  Description of Artificial Sequence: Synthetic oligonucleotide
  Sense strand starting at position 2942 of SEQ ID NO: 915287
cggagaaagccucauucuc

SEQ ID NO: 1068617 - RNA, 19 nt, Artificial Sequence
  Description of Artificial Sequence: Synthetic oligonucleotide
  Antisense strand to SEQ ID NO: 1068616
gagaaugaggcuuucuccg

SEQ ID NO: 1068618 - RNA, 19 nt, Artificial Sequence
  Description of Artificial Sequence: Synthetic oligonucleotide
  Sense strand starting at position 3406 of SEQ ID NO: 915287
uuacgagucccugaggauc

SEQ ID NO: 1068619 - RNA, 19 nt, Artificial Sequence
  Description of Artificial Sequence: Synthetic oligonucleotide
  Antisense strand to SEQ ID NO: 1068618
gauccucagggacucguaa

SEQ ID NO: 1068620 - RNA, 19 nt, Artificial Sequence
  Description of Artificial Sequence: Synthetic oligonucleotide
  Sense strand starting at position 3713 of SEQ ID NO: 915287
cuguguguccaugagugaa

SEQ ID NO: 1068621 - RNA, 19 nt, Artificial Sequence
  Description of Artificial Sequence: Synthetic oligonucleotide
  Antisense strand to SEQ ID NO: 1068620
uucacucauggacacacag

SEQ ID NO: 1068622 - RNA, 19 nt, Artificial Sequence
  Description of Artificial Sequence: Synthetic oligonucleotide
  Sense strand starting at position 3715 of SEQ ID NO: 915287
guguguccaugagugaaac

SEQ ID NO: 1068623 - RNA, 19 nt, Artificial Sequence
  Description of Artificial Sequence: Synthetic oligonucleotide
  Antisense strand to SEQ ID NO: 1068622
guuucacucauggacacac

SEQ ID NO: 1068624 - RNA, 19 nt, Artificial Sequence
  Description of Artificial Sequence: Synthetic oligonucleotide
  Sense strand starting at position 3716 of SEQ ID NO: 915287
uguguccaugagugaaacu

SEQ ID NO: 1068625 - RNA, 19 nt, Artificial Sequence
  Description of Artificial Sequence: Synthetic oligonucleotide
  Antisense strand to SEQ ID NO: 1068624
aguuucacucauggacaca

SEQ ID NO: 1068626 - RNA, 19 nt, Artificial Sequence
  Description of Artificial Sequence: Synthetic oligonucleotide
  Sense strand starting at position 3843 of SEQ ID NO: 915287
agagcuauaccugggauag

SEQ ID NO: 1068627 - RNA, 19 nt, Artificial Sequence
  Description of Artificial Sequence: Synthetic oligonucleotide
  Antisense strand to SEQ ID NO: 1068626
cuaucccagguauagcucu

SEQ ID NO: 1068628 - RNA, 19 nt, Artificial Sequence
  Description of Artificial Sequence: Synthetic oligonucleotide
  Sense strand starting at position 3844 of SEQ ID NO: 915287
gagcuauaccugggauagc

SEQ ID NO: 1068629 - RNA, 19 nt, Artificial Sequence
  Description of Artificial Sequence: Synthetic oligonucleotide
  Antisense strand to SEQ ID NO: 1068628
gcuaucccagguauagcuc

SEQ ID NO: 1068630 - RNA, 19 nt, Artificial Sequence
  Description of Artificial Sequence: Synthetic oligonucleotide
  Sense strand starting at position 3845 of SEQ ID NO: 915287
agcuauaccugggauagcu

SEQ ID NO: 1068631 - RNA, 19 nt, Artificial Sequence
  Description of Artificial Sequence: Synthetic oligonucleotide
  Antisense strand to SEQ ID NO: 1068630
agcuaucccagguauagcu

SEQ ID NO: 1068632 - RNA, 19 nt, Artificial Sequence
  Description of Artificial Sequence: Synthetic oligonucleotide
  Sense strand starting at position 3939 of SEQ ID NO: 915287
ucucucugugcugaaggau

SEQ ID NO: 1068633 - RNA, 19 nt, Artificial Sequence
  Description of Artificial Sequence: Synthetic oligonucleotide
  Antisense strand to SEQ ID NO: 1068632
auccuucagcacagagaga

SEQ ID NO: 1068634 - RNA, 19 nt, Artificial Sequence
  Description of Artificial Sequence: Synthetic oligonucleotide
  Sense strand starting at position 32 of SEQ ID NO: 915288
acaacuuagugcugcagau

SEQ ID NO: 1068635 - RNA, 19 nt, Artificial Sequence
  Description of Artificial Sequence: Synthetic oligonucleotide
  Antisense strand to SEQ ID NO: 1068634
aucugcagcacuaaguugu

SEQ ID NO: 1068636 - RNA, 19 nt, Artificial Sequence
  Description of Artificial Sequence: Synthetic oligonucleotide
  Sense strand starting at position 528 of SEQ ID NO: 915288
gugucucucuuuccaggaa

SEQ ID NO: 1068637 - RNA, 19 nt, Artificial Sequence
  Description of Artificial Sequence: Synthetic oligonucleotide
  Antisense strand to SEQ ID NO: 1068636
uuccuggaaagagagacac

SEQ ID NO: 1068638 - RNA, 19 nt, Artificial Sequence
  Description of Artificial Sequence: Synthetic oligonucleotide
  Sense strand starting at position 893 of SEQ ID NO: 915288
aguugaggaucccucuaau

SEQ ID NO: 1068639 - RNA, 19 nt, Artificial Sequence
  Description of Artificial Sequence: Synthetic oligonucleotide
  Antisense strand to SEQ ID NO: 1068638
auuagagggauccucaacu

SEQ ID NO: 1068640 - RNA, 19 nt, Artificial Sequence
  Description of Artificial Sequence: Synthetic oligonucleotide
  Sense strand starting at position 1049 of SEQ ID NO: 915288
caggaacuucucuggugua

SEQ ID NO: 1068641 - RNA, 19 nt, Artificial Sequence
  Description of Artificial Sequence: Synthetic oligonucleotide
  Antisense strand to SEQ ID NO: 1068640
uacaccagagaaguuccug

SEQ ID NO: 1068642 - RNA, 19 nt, Artificial Sequence
  Description of Artificial Sequence: Synthetic oligonucleotide
  Sense strand starting at position 1050 of SEQ ID NO: 915288
aggaacuucucugguguaa

SEQ ID NO: 1068643 - RNA, 19 nt, Artificial Sequence
  Description of Artificial Sequence: Synthetic oligonucleotide
  Antisense strand to SEQ ID NO: 1068642
uuacaccagagaaguuccu

SEQ ID NO: 1068644 - RNA, 19 nt, Artificial Sequence
  Description of Artificial Sequence: Synthetic oligonucleotide
  Sense strand starting at position 1121 of SEQ ID NO: 915288
acagcuauucuuggcaaau

SEQ ID NO: 1068645 - RNA, 19 nt, Artificial Sequence
  Description of Artificial Sequence: Synthetic oligonucleotide
  Antisense strand to SEQ ID NO: 1068644
auuugccaagaauagcugu

SEQ ID NO: 1068646 - RNA, 19 nt, Artificial Sequence
  Description of Artificial Sequence: Synthetic oligonucleotide
  Sense strand starting at position 1123 of SEQ ID NO: 915288
agcuauucuuggcaaaucu

SEQ ID NO: 1068647 - RNA, 19 nt, Artificial Sequence
  Description of Artificial Sequence: Synthetic oligonucleotide
  Antisense strand to SEQ ID NO: 1068646
agauuugccaagaauagcu

SEQ ID NO: 1068648 - RNA, 19 nt, Artificial Sequence
  Description of Artificial Sequence: Synthetic oligonucleotide
  Sense strand starting at position 1153 of SEQ ID NO: 915288
gccaguucuaaggguggaa

SEQ ID NO: 1068649 - RNA, 19 nt, Artificial Sequence
  Description of Artificial Sequence: Synthetic oligonucleotide
  Antisense strand to SEQ ID NO: 1068648
uuccacccuuagaacuggc

SEQ ID NO: 1068650 - RNA, 19 nt, Artificial Sequence
  Description of Artificial Sequence: Synthetic oligonucleotide
  Sense strand starting at position 1156 of SEQ ID NO: 915288
aguucuaaggguggaacau

SEQ ID NO: 1068651 - RNA, 19 nt, Artificial Sequence
  Description of Artificial Sequence: Synthetic oligonucleotide
  Antisense strand to SEQ ID NO: 1068650
auguuccacccuuagaacu

SEQ ID NO: 1068652 - RNA, 19 nt, Artificial Sequence
  Description of Artificial Sequence: Synthetic oligonucleotide
  Sense strand starting at position 1428 of SEQ ID NO: 915288
aggcuuaccaaucgagauc

SEQ ID NO: 1068653 - RNA, 19 nt, Artificial Sequence
  Description of Artificial Sequence: Synthetic oligonucleotide
  Antisense strand to SEQ ID NO: 1068652
gaucucgauugguaagccu

SEQ ID NO: 1068654 - RNA, 19 nt, Artificial Sequence
  Description of Artificial Sequence: Synthetic oligonucleotide
  Sense strand starting at position 2053 of SEQ ID NO: 915288
cgcgcucuuccggaaccau

SEQ ID NO: 1068655 - RNA, 19 nt, Artificial Sequence
  Description of Artificial Sequence: Synthetic oligonucleotide
  Antisense strand to SEQ ID NO: 1068654
augguuccggaagagcgcg

SEQ ID NO: 1068656 - RNA, 19 nt, Artificial Sequence
  Description of Artificial Sequence: Synthetic oligonucleotide
  Sense strand starting at position 2160 of SEQ ID NO: 915288
cgggccacucucugacaaa

SEQ ID NO: 1068657 - RNA, 19 nt, Artificial Sequence
  Description of Artificial Sequence: Synthetic oligonucleotide
  Antisense strand to SEQ ID NO: 1068656
uuugucagagaguggcccg

SEQ ID NO: 1068658 - RNA, 19 nt, Artificial Sequence
  Description of Artificial Sequence: Synthetic oligonucleotide
  Sense strand starting at position 2194 of SEQ ID NO: 915288
agcggcaccuuuggaaauu

SEQ ID NO: 1068659 - RNA, 19 nt, Artificial Sequence
  Description of Artificial Sequence: Synthetic oligonucleotide
  Antisense strand to SEQ ID NO: 1068658
aauuuccaaaggugccgcu

SEQ ID NO: 1068660 - RNA, 19 nt, Artificial Sequence
  Description of Artificial Sequence: Synthetic oligonucleotide
  Sense strand starting at position 2205 of SEQ ID NO: 915288
uggaaauucucccgucccu

SEQ ID NO: 1068661 - RNA, 19 nt, Artificial Sequence
  Description of Artificial Sequence: Synthetic oligonucleotide
  Antisense strand to SEQ ID NO: 1068660
agggacgggagaauuucca

SEQ ID NO: 1068662 - RNA, 19 nt, Artificial Sequence
  Description of Artificial Sequence: Synthetic oligonucleotide
  Sense strand starting at position 2280 of SEQ ID NO: 915288
agcgacucuuucuguggau

SEQ ID NO: 1068663 - RNA, 19 nt, Artificial Sequence
  Description of Artificial Sequence: Synthetic oligonucleotide
  Antisense strand to SEQ ID NO: 1068662
auccacagaaagagucgcu

SEQ ID NO: 1068664 - RNA, 19 nt, Artificial Sequence
  Description of Artificial Sequence: Synthetic oligonucleotide
  Sense strand starting at position 2284 of SEQ ID NO: 915288
acucuuucuguggauggga

SEQ ID NO: 1068665 - RNA, 19 nt, Artificial Sequence
  Description of Artificial Sequence: Synthetic oligonucleotide
  Antisense strand to SEQ ID NO: 1068664
ucccauccacagaaagagu

SEQ ID NO: 1068666 - RNA, 19 nt, Artificial Sequence
  Description of Artificial Sequence: Synthetic oligonucleotide
  Sense strand starting at position 2339 of SEQ ID NO: 915288
acggugaaaucggguuaga

SEQ ID NO: 1068667 - RNA, 19 nt, Artificial Sequence
  Description of Artificial Sequence: Synthetic oligonucleotide
  Antisense strand to SEQ ID NO: 1068666
ucuaacccgauuucaccgu

SEQ ID NO: 1068668 - RNA, 19 nt, Artificial Sequence
  Description of Artificial Sequence: Synthetic oligonucleotide
  Sense strand starting at position 2498 of SEQ ID NO: 915288
guggaguuucgaggccuga

SEQ ID NO: 1068669 - RNA, 19 nt, Artificial Sequence
  Description of Artificial Sequence: Synthetic oligonucleotide
  Antisense strand to SEQ ID NO: 1068668
ucaggccucgaaacuccac

SEQ ID NO: 1068670 - RNA, 19 nt, Artificial Sequence
  Description of Artificial Sequence: Synthetic oligonucleotide
  Sense strand starting at position 2675 of SEQ ID NO: 915288
aggaaauacucugaccagu

SEQ ID NO: 1068671 - RNA, 19 nt, Artificial Sequence
  Description of Artificial Sequence: Synthetic oligonucleotide
  Antisense strand to SEQ ID NO: 1068670
acuggucagaguauuuccu

SEQ ID NO: 1068672 - RNA, 19 nt, Artificial Sequence
  Description of Artificial Sequence: Synthetic oligonucleotide
  Sense strand starting at position 2677 of SEQ ID NO: 915288
gaaauacucugaccagugu

SEQ ID NO: 1068673 - RNA, 19 nt, Artificial Sequence
  Description of Artificial Sequence: Synthetic oligonucleotide
  Antisense strand to SEQ ID NO: 1068672
acacuggucagaguauuuc

SEQ ID NO: 1068674 - RNA, 19 nt, Artificial Sequence
  Description of Artificial Sequence: Synthetic oligonucleotide
  Sense strand starting at position 2688 of SEQ ID NO: 915288
accaguguccacggaaauu

SEQ ID NO: 1068675 - RNA, 19 nt, Artificial Sequence
  Description of Artificial Sequence: Synthetic oligonucleotide
  Antisense strand to SEQ ID NO: 1068674
aauuuccguggacacuggu

SEQ ID NO: 1068676 - RNA, 19 nt, Artificial Sequence
  Description of Artificial Sequence: Synthetic oligonucleotide
  Sense strand starting at position 2700 of SEQ ID NO: 915288
ggaaauuaaggcuguugaa

SEQ ID NO: 1068677 - RNA, 19 nt, Artificial Sequence
  Description of Artificial Sequence: Synthetic oligonucleotide
  Antisense strand to SEQ ID NO: 1068676
uucaacagccuuaauuucc

SEQ ID NO: 1068678 - RNA, 19 nt, Artificial Sequence
  Description of Artificial Sequence: Synthetic oligonucleotide
  Sense strand starting at position 2703 of SEQ ID NO: 915288
aauuaaggcuguugaagua

SEQ ID NO: 1068679 - RNA, 19 nt, Artificial Sequence
  Description of Artificial Sequence: Synthetic oligonucleotide
  Antisense strand to SEQ ID NO: 1068678
uacuucaacagccuuaauu

SEQ ID NO: 1068680 - RNA, 19 nt, Artificial Sequence
  Description of Artificial Sequence: Synthetic oligonucleotide
  Sense strand starting at position 2710 of SEQ ID NO: 915288
gcuguugaaguagaaauaa

SEQ ID NO: 1068681 - RNA, 19 nt, Artificial Sequence
  Description of Artificial Sequence: Synthetic oligonucleotide
  Antisense strand to SEQ ID NO: 1068680
uuauuucuacuucaacagc

SEQ ID NO: 1068682 - RNA, 19 nt, Artificial Sequence
  Description of Artificial Sequence: Synthetic oligonucleotide
  Sense strand starting at position 2857 of SEQ ID NO: 915288
ccuuauaucagagguggga

SEQ ID NO: 1068683 - RNA, 19 nt, Artificial Sequence
  Description of Artificial Sequence: Synthetic oligonucleotide
  Antisense strand to SEQ ID NO: 1068682
ucccaccucugauauaagg

SEQ ID NO: 1068684 - RNA, 19 nt, Artificial Sequence
  Description of Artificial Sequence: Synthetic oligonucleotide
  Sense strand starting at position 2859 of SEQ ID NO: 915288
uuauaucagaggugggauu

SEQ ID NO: 1068685 - RNA, 19 nt, Artificial Sequence
  Description of Artificial Sequence: Synthetic oligonucleotide
  Antisense strand to SEQ ID NO: 1068684
aaucccaccucugauauaa

SEQ ID NO: 1068686 - RNA, 19 nt, Artificial Sequence
  Description of Artificial Sequence: Synthetic oligonucleotide
  Sense strand starting at position 2890 of SEQ ID NO: 915288
ggguaugguacacagguua

SEQ ID NO: 1068687 - RNA, 19 nt, Artificial Sequence
  Description of Artificial Sequence: Synthetic oligonucleotide
  Antisense strand to SEQ ID NO: 1068686
uaaccuguguaccauaccc

SEQ ID NO: 1068688 - RNA, 19 nt, Artificial Sequence
  Description of Artificial Sequence: Synthetic oligonucleotide
  Sense strand starting at position 2984 of SEQ ID NO: 915288
gaaacaagucaguguucuu

SEQ ID NO: 1068689 - RNA, 19 nt, Artificial Sequence
  Description of Artificial Sequence: Synthetic oligonucleotide
  Antisense strand to SEQ ID NO: 1068688
aagaacacugacuuguuuc

SEQ ID NO: 1068690 - RNA, 19 nt, Artificial Sequence
  Description of Artificial Sequence: Synthetic oligonucleotide
  Sense strand starting at position 3034 of SEQ ID NO: 915288
acaucagcaguuugaggaa

SEQ ID NO: 1068691 - RNA, 19 nt, Artificial Sequence
  Description of Artificial Sequence: Synthetic oligonucleotide
  Antisense strand to SEQ ID NO: 1068690
uuccucaaacugcugaugu

SEQ ID NO: 1068692 - RNA, 19 nt, Artificial Sequence
  Description of Artificial Sequence: Synthetic oligonucleotide
  Sense strand starting at position 3103 of SEQ ID NO: 915288
ggaucuaagccaugaauca

SEQ ID NO: 1068693 - RNA, 19 nt, Artificial Sequence
  Description of Artificial Sequence: Synthetic oligonucleotide
  Antisense strand to SEQ ID NO: 1068692
ugauucauggcuuagaucc

SEQ ID NO: 1068694 - RNA, 19 nt, Artificial Sequence
  Description of Artificial Sequence: Synthetic oligonucleotide
  Sense strand starting at position 3129 of SEQ ID NO: 915288
uuucuuagauggcuuaguu

SEQ ID NO: 1068695 - RNA, 19 nt, Artificial Sequence
  Description of Artificial Sequence: Synthetic oligonucleotide
  Antisense strand to SEQ ID NO: 1068694
aacuaagccaucuaagaaa

SEQ ID NO: 1068696 - RNA, 19 nt, Artificial Sequence
  Description of Artificial Sequence: Synthetic oligonucleotide
  Sense strand starting at position 3159 of SEQ ID NO: 915288
ucaaaugugacauguaggu

SEQ ID NO: 1068697 - RNA, 19 nt, Artificial Sequence
  Description of Artificial Sequence: Synthetic oligonucleotide
  Antisense strand to SEQ ID NO: 1068696
accuacaugucacauuuga

SEQ ID NO: 1068698 - RNA, 19 nt, Artificial Sequence
  Description of Artificial Sequence: Synthetic oligonucleotide
  Sense strand starting at position 3172 of SEQ ID NO: 915288
guagguuaucaccaguaac

SEQ ID NO: 1068699 - RNA, 19 nt, Artificial Sequence
  Description of Artificial Sequence: Synthetic oligonucleotide
  Antisense strand to SEQ ID NO: 1068698
guuacuggugauaaccuac

SEQ ID NO: 1068700 - RNA, 19 nt, Artificial Sequence
  Description of Artificial Sequence: Synthetic oligonucleotide
  Sense strand starting at position 3175 of SEQ ID NO: 915288
gguuaucaccaguaacauu

SEQ ID NO: 1068701 - RNA, 19 nt, Artificial Sequence
  Description of Artificial Sequence: Synthetic oligonucleotide
  Antisense strand to SEQ ID NO: 1068700
aauguuacuggugauaacc

SEQ ID NO: 1068702 - RNA, 19 nt, Artificial Sequence
  Description of Artificial Sequence: Synthetic oligonucleotide
  Sense strand starting at position 3930 of SEQ ID NO: 915288
gaugucacuucccugggaa

SEQ ID NO: 1068703 - RNA, 19 nt, Artificial Sequence
  Description of Artificial Sequence: Synthetic oligonucleotide
  Antisense strand to SEQ ID NO: 1068702
uucccagggaagugacauc

SEQ ID NO: 1068704 - RNA, 19 nt, Artificial Sequence
  Description of Artificial Sequence: Synthetic oligonucleotide
  Sense strand starting at position 3931 of SEQ ID NO: 915288
augucacuucccugggaaa

SEQ ID NO: 1068705 - RNA, 19 nt, Artificial Sequence
  Description of Artificial Sequence: Synthetic oligonucleotide
  Antisense strand to SEQ ID NO: 1068704
uuucccagggaagugacau

SEQ ID NO: 1068706 - RNA, 19 nt, Artificial Sequence
  Description of Artificial Sequence: Synthetic oligonucleotide
  Sense strand starting at position 3944 of SEQ ID NO: 915288
gggaaagccuucccuaagu

SEQ ID NO: 1068707 - RNA, 19 nt, Artificial Sequence
  Description of Artificial Sequence: Synthetic oligonucleotide
  Antisense strand to SEQ ID NO: 1068706
acuuagggaaggcuuuccc

SEQ ID NO: 1068708 - RNA, 19 nt, Artificial Sequence
  Description of Artificial Sequence: Synthetic oligonucleotide
  Sense strand starting at position 3946 of SEQ ID NO: 915288
gaaagccuucccuaaguag

SEQ ID NO: 1068709 - RNA, 19 nt, Artificial Sequence
  Description of Artificial Sequence: Synthetic oligonucleotide
  Antisense strand to SEQ ID NO: 1068708
cuacuuagggaaggcuuuc

SEQ ID NO: 1068710 - RNA, 19 nt, Artificial Sequence
  Description of Artificial Sequence: Synthetic oligonucleotide
  Sense strand starting at position 3975 of SEQ ID NO: 915288
uuaggucccuuugugaaau

SEQ ID NO: 1068711 - RNA, 19 nt, Artificial Sequence
  Description of Artificial Sequence: Synthetic oligonucleotide
  Antisense strand to SEQ ID NO: 1068710
auuucacaaagggaccuaa

SEQ ID NO: 1068712 - RNA, 19 nt, Artificial Sequence
  Description of Artificial Sequence: Synthetic oligonucleotide
  Sense strand starting at position 3976 of SEQ ID NO: 915288
uaggucccuuugugaaauu

SEQ ID NO: 1068713 - RNA, 19 nt, Artificial Sequence
  Description of Artificial Sequence: Synthetic oligonucleotide
  Antisense strand to SEQ ID NO: 1068712
aauuucacaaagggaccua

SEQ ID NO: 1068714 - RNA, 19 nt, Artificial Sequence
  Description of Artificial Sequence: Synthetic oligonucleotide
  Sense strand starting at position 107 of SEQ ID NO: 915289
uugaaugacucuucuagga

SEQ ID NO: 1068715 - RNA, 19 nt, Artificial Sequence
  Description of Artificial Sequence: Synthetic oligonucleotide
  Antisense strand to SEQ ID NO: 1068714
uccuagaagagucauucaa

SEQ ID NO: 1068716 - RNA, 19 nt, Artificial Sequence
  Description of Artificial Sequence: Synthetic oligonucleotide
  Sense strand starting at position 421 of SEQ ID NO: 915289
gagaguuugcuuuaccuug

SEQ ID NO: 1068717 - RNA, 19 nt, Artificial Sequence
  Description of Artificial Sequence: Synthetic oligonucleotide
  Antisense strand to SEQ ID NO: 1068716
caagguaaagcaaacucuc

SEQ ID NO: 1068718 - RNA, 19 nt, Artificial Sequence
  Description of Artificial Sequence: Synthetic oligonucleotide
  Sense strand starting at position 973 of SEQ ID NO: 915289
gagaaagggugggcaaauu

SEQ ID NO: 1068719 - RNA, 19 nt, Artificial Sequence
  Description of Artificial Sequence: Synthetic oligonucleotide
  Antisense strand to SEQ ID NO: 1068718
aauuugcccacccuuucuc

SEQ ID NO: 1068720 - RNA, 19 nt, Artificial Sequence
  Description of Artificial Sequence: Synthetic oligonucleotide
  Sense strand starting at position 985 of SEQ ID NO: 915289
gcaaauuaugccgaaagga

SEQ ID NO: 1068721 - RNA, 19 nt, Artificial Sequence
  Description of Artificial Sequence: Synthetic oligonucleotide
  Antisense strand to SEQ ID NO: 1068720
uccuuucggcauaauuugc

SEQ ID NO: 1068722 - RNA, 19 nt, Artificial Sequence
  Description of Artificial Sequence: Synthetic oligonucleotide
  Sense strand starting at position 1014 of SEQ ID NO: 915289
ggaggagaguuccugccuu

SEQ ID NO: 1068723 - RNA, 19 nt, Artificial Sequence
  Description of Artificial Sequence: Synthetic oligonucleotide
  Antisense strand to SEQ ID NO: 1068722
aaggcaggaacucuccucc

SEQ ID NO: 1068724 - RNA, 19 nt, Artificial Sequence
  Description of Artificial Sequence: Synthetic oligonucleotide
  Sense strand starting at position 1088 of SEQ ID NO: 915289
ccugguuguggaugaauaa

SEQ ID NO: 1068725 - RNA, 19 nt, Artificial Sequence
  Description of Artificial Sequence: Synthetic oligonucleotide
  Antisense strand to SEQ ID NO: 1068724
uuauucauccacaaccagg

SEQ ID NO: 1068726 - RNA, 19 nt, Artificial Sequence
  Description of Artificial Sequence: Synthetic oligonucleotide
  Sense strand starting at position 1124 of SEQ ID NO: 915289
ggcacaccuguuugggaaa

SEQ ID NO: 1068727 - RNA, 19 nt, Artificial Sequence
  Description of Artificial Sequence: Synthetic oligonucleotide
  Antisense strand to SEQ ID NO: 1068726
uuucccaaacaggugugcc

SEQ ID NO: 1068728 - RNA, 19 nt, Artificial Sequence
  Description of Artificial Sequence: Synthetic oligonucleotide
  Sense strand starting at position 1131 of SEQ ID NO: 915289
cuguuugggaaauguagua

SEQ ID NO: 1068729 - RNA, 19 nt, Artificial Sequence
  Description of Artificial Sequence: Synthetic oligonucleotide
  Antisense strand to SEQ ID NO: 1068728
uacuacauuucccaaacag

SEQ ID NO: 1068730 - RNA, 19 nt, Artificial Sequence
  Description of Artificial Sequence: Synthetic oligonucleotide
  Sense strand starting at position 1177 of SEQ ID NO: 915289
ccagaagucucaguucuca

SEQ ID NO: 1068731 - RNA, 19 nt, Artificial Sequence
  Description of Artificial Sequence: Synthetic oligonucleotide
  Antisense strand to SEQ ID NO: 1068730
ugagaacugagacuucugg

SEQ ID NO: 1068732 - RNA, 19 nt, Artificial Sequence
  Description of Artificial Sequence: Synthetic oligonucleotide
  Sense strand starting at position 1181 of SEQ ID NO: 915289
aagucucaguucucaggaa

SEQ ID NO: 1068733 - RNA, 19 nt, Artificial Sequence
  Description of Artificial Sequence: Synthetic oligonucleotide
  Antisense strand to SEQ ID NO: 1068732
uuccugagaacugagacuu

SEQ ID NO: 1068734 - RNA, 19 nt, Artificial Sequence
  Description of Artificial Sequence: Synthetic oligonucleotide
  Sense strand starting at position 1377 of SEQ ID NO: 915289
agucaauaacccuggaguu

SEQ ID NO: 1068735 - RNA, 19 nt, Artificial Sequence
  Description of Artificial Sequence: Synthetic oligonucleotide
  Antisense strand to SEQ ID NO: 1068734
aacuccaggguuauugacu

SEQ ID NO: 1068736 - RNA, 19 nt, Artificial Sequence
  Description of Artificial Sequence: Synthetic oligonucleotide
  Sense strand starting at position 1378 of SEQ ID NO: 915289
gucaauaacccuggaguug

SEQ ID NO: 1068737 - RNA, 19 nt, Artificial Sequence
  Description of Artificial Sequence: Synthetic oligonucleotide
  Antisense strand to SEQ ID NO: 1068736
caacuccaggguuauugac

SEQ ID NO: 1068738 - RNA, 19 nt, Artificial Sequence
  Description of Artificial Sequence: Synthetic oligonucleotide
  Sense strand starting at position 1801 of SEQ ID NO: 915289
gggucuuggaagcaacuua

SEQ ID NO: 1068739 - RNA, 19 nt, Artificial Sequence
  Description of Artificial Sequence: Synthetic oligonucleotide
  Antisense strand to SEQ ID NO: 1068738
uaaguugcuuccaagaccc

SEQ ID NO: 1068740 - RNA, 19 nt, Artificial Sequence
  Description of Artificial Sequence: Synthetic oligonucleotide
  Sense strand starting at position 2119 of SEQ ID NO: 915289
auggauaucucugcuggga

SEQ ID NO: 1068741 - RNA, 19 nt, Artificial Sequence
  Description of Artificial Sequence: Synthetic oligonucleotide
  Antisense strand to SEQ ID NO: 1068740
ucccagcagagauauccau

SEQ ID NO: 1068742 - RNA, 19 nt, Artificial Sequence
  Description of Artificial Sequence: Synthetic oligonucleotide
  Sense strand starting at position 2186 of SEQ ID NO: 915289
gcuaauuagagggaggcau

SEQ ID NO: 1068743 - RNA, 19 nt, Artificial Sequence
  Description of Artificial Sequence: Synthetic oligonucleotide
  Antisense strand to SEQ ID NO: 1068742
augccucccucuaauuagc

SEQ ID NO: 1068744 - RNA, 19 nt, Artificial Sequence
  Description of Artificial Sequence: Synthetic oligonucleotide
  Sense strand starting at position 2270 of SEQ ID NO: 915289
uggauuguccuagagcaga

SEQ ID NO: 1068745 - RNA, 19 nt, Artificial Sequence
  Description of Artificial Sequence: Synthetic oligonucleotide
  Antisense strand to SEQ ID NO: 1068744
ucugcucuaggacaaucca

SEQ ID NO: 1068746 - RNA, 19 nt, Artificial Sequence
  Description of Artificial Sequence: Synthetic oligonucleotide
  Sense strand starting at position 2394 of SEQ ID NO: 915289
uugggugaggauugcuuaa

SEQ ID NO: 1068747 - RNA, 19 nt, Artificial Sequence
  Description of Artificial Sequence: Synthetic oligonucleotide
  Antisense strand to SEQ ID NO: 1068746
uuaagcaauccucacccaa

SEQ ID NO: 1068748 - RNA, 19 nt, Artificial Sequence
  Description of Artificial Sequence: Synthetic oligonucleotide
  Sense strand starting at position 2396 of SEQ ID NO: 915289
gggugaggauugcuuaaau

SEQ ID NO: 1068749 - RNA, 19 nt, Artificial Sequence
  Description of Artificial Sequence: Synthetic oligonucleotide
  Antisense strand to SEQ ID NO: 1068748
auuuaagcaauccucaccc

SEQ ID NO: 1068750 - RNA, 19 nt, Artificial Sequence
  Description of Artificial Sequence: Synthetic oligonucleotide
  Sense strand starting at position 2434 of SEQ ID NO: 915289
ugugguuuggagugggaau

SEQ ID NO: 1068751 - RNA, 19 nt, Artificial Sequence
  Description of Artificial Sequence: Synthetic oligonucleotide
  Antisense strand to SEQ ID NO: 1068750
auucccacuccaaaccaca

SEQ ID NO: 1068752 - RNA, 19 nt, Artificial Sequence
  Description of Artificial Sequence: Synthetic oligonucleotide
  Sense strand starting at position 2472 of SEQ ID NO: 915289
ugggauugcuacccuacau

SEQ ID NO: 1068753 - RNA, 19 nt, Artificial Sequence
  Description of Artificial Sequence: Synthetic oligonucleotide
  Antisense strand to SEQ ID NO: 1068752
auguaggguagcaauccca

SEQ ID NO: 1068754 - RNA, 19 nt, Artificial Sequence
  Description of Artificial Sequence: Synthetic oligonucleotide
  Sense strand starting at position 2476 of SEQ ID NO: 915289
auugcuacccuacauagua

SEQ ID NO: 1068755 - RNA, 19 nt, Artificial Sequence
  Description of Artificial Sequence: Synthetic oligonucleotide
  Antisense strand to SEQ ID NO: 1068754
uacuauguaggguagcaau

SEQ ID NO: 1068756 - RNA, 19 nt, Artificial Sequence
  Description of Artificial Sequence: Synthetic oligonucleotide
  Sense strand starting at position 2552 of SEQ ID NO: 915289
uguauuugguguuagauuu

SEQ ID NO: 1068757 - RNA, 19 nt, Artificial Sequence
  Description of Artificial Sequence: Synthetic oligonucleotide
  Antisense strand to SEQ ID NO: 1068756
aaaucuaacaccaaauaca

SEQ ID NO: 1068758 - RNA, 19 nt, Artificial Sequence
  Description of Artificial Sequence: Synthetic oligonucleotide
  Sense strand starting at position 2560 of SEQ ID NO: 915289
guguuagauuuccuucccu

SEQ ID NO: 1068759 - RNA, 19 nt, Artificial Sequence
  Description of Artificial Sequence: Synthetic oligonucleotide
  Antisense strand to SEQ ID NO: 1068758
agggaaggaaaucuaacac

SEQ ID NO: 1068760 - RNA, 19 nt, Artificial Sequence
  Description of Artificial Sequence: Synthetic oligonucleotide
  Sense strand starting at position 2854 of SEQ ID NO: 915289
aagaguauuguuugugaag

SEQ ID NO: 1068761 - RNA, 19 nt, Artificial Sequence
  Description of Artificial Sequence: Synthetic oligonucleotide
  Antisense strand to SEQ ID NO: 1068760
cuucacaaacaauacucuu

SEQ ID NO: 1068762 - RNA, 19 nt, Artificial Sequence
  Description of Artificial Sequence: Synthetic oligonucleotide
  Sense strand starting at position 2876 of SEQ ID NO: 915289
cuuuguaaaccguaaagug

SEQ ID NO: 1068763 - RNA, 19 nt, Artificial Sequence
  Description of Artificial Sequence: Synthetic oligonucleotide
  Antisense strand to SEQ ID NO: 1068762
cacuuuacgguuuacaaag

SEQ ID NO: 1068764 - RNA, 19 nt, Artificial Sequence
  Description of Artificial Sequence: Synthetic oligonucleotide
  Sense strand starting at position 2883 of SEQ ID NO: 915289
aaccguaaaguguagcaga

SEQ ID NO: 1068765 - RNA, 19 nt, Artificial Sequence
  Description of Artificial Sequence: Synthetic oligonucleotide
  Antisense strand to SEQ ID NO: 1068764
ucugcuacacuuuacgguu

SEQ ID NO: 1068766 - RNA, 19 nt, Artificial Sequence
  Description of Artificial Sequence: Synthetic oligonucleotide
  Sense strand starting at position 3019 of SEQ ID NO: 915289
uguccuucucaugaggcaa

SEQ ID NO: 1068767 - RNA, 19 nt, Artificial Sequence
  Description of Artificial Sequence: Synthetic oligonucleotide
  Antisense strand to SEQ ID NO: 1068766
uugccucaugagaaggaca

SEQ ID NO: 1068768 - RNA, 19 nt, Artificial Sequence
  Description of Artificial Sequence: Synthetic oligonucleotide
  Sense strand starting at position 3238 of SEQ ID NO: 915289
ggaugcaauuuauaaaucu

SEQ ID NO: 1068769 - RNA, 19 nt, Artificial Sequence
  Description of Artificial Sequence: Synthetic oligonucleotide
  Antisense strand to SEQ ID NO: 1068768
agauuuauaaauugcaucc

SEQ ID NO: 1068770 - RNA, 19 nt, Artificial Sequence
  Description of Artificial Sequence: Synthetic oligonucleotide
  Sense strand starting at position 3347 of SEQ ID NO: 915289
gucugaggauucuaaauuu

SEQ ID NO: 1068771 - RNA, 19 nt, Artificial Sequence
  Description of Artificial Sequence: Synthetic oligonucleotide
  Antisense strand to SEQ ID NO: 1068770
aaauuuagaauccucagac

SEQ ID NO: 1068772 - RNA, 19 nt, Artificial Sequence
  Description of Artificial Sequence: Synthetic oligonucleotide
  Sense strand starting at position 3369 of SEQ ID NO: 915289
ucuggcauuccugaucauu

SEQ ID NO: 1068773 - RNA, 19 nt, Artificial Sequence
  Description of Artificial Sequence: Synthetic oligonucleotide
  Antisense strand to SEQ ID NO: 1068772
aaugaucaggaaugccaga

SEQ ID NO: 1068774 - RNA, 19 nt, Artificial Sequence
  Description of Artificial Sequence: Synthetic oligonucleotide
  Sense strand starting at position 3371 of SEQ ID NO: 915289
uggcauuccugaucauuau

SEQ ID NO: 1068775 - RNA, 19 nt, Artificial Sequence
  Description of Artificial Sequence: Synthetic oligonucleotide
  Antisense strand to SEQ ID NO: 1068774
auaaugaucaggaaugcca

SEQ ID NO: 1068776 - RNA, 19 nt, Artificial Sequence
  Description of Artificial Sequence: Synthetic oligonucleotide
  Sense strand starting at position 3372 of SEQ ID NO: 915289
ggcauuccugaucauuaug

SEQ ID NO: 1068777 - RNA, 19 nt, Artificial Sequence
  Description of Artificial Sequence: Synthetic oligonucleotide
  Antisense strand to SEQ ID NO: 1068776
cauaaugaucaggaaugcc

SEQ ID NO: 1068778 - RNA, 19 nt, Artificial Sequence
  Description of Artificial Sequence: Synthetic oligonucleotide
  Sense strand starting at position 3408 of SEQ ID NO: 915289
ucuauauaugucuagguga

SEQ ID NO: 1068779 - RNA, 19 nt, Artificial Sequence
  Description of Artificial Sequence: Synthetic oligonucleotide
  Antisense strand to SEQ ID NO: 1068778
ucaccuagacauauauaga

SEQ ID NO: 1068780 - RNA, 19 nt, Artificial Sequence
  Description of Artificial Sequence: Synthetic oligonucleotide
  Sense strand starting at position 3415 of SEQ ID NO: 915289
augucuaggugagcaagaa

SEQ ID NO: 1068781 - RNA, 19 nt, Artificial Sequence
  Description of Artificial Sequence: Synthetic oligonucleotide
  Antisense strand to SEQ ID NO: 1068780
uucuugcucaccuagacau

SEQ ID NO: 1068782 - RNA, 19 nt, Artificial Sequence
  Description of Artificial Sequence: Synthetic oligonucleotide
  Sense strand starting at position 3416 of SEQ ID NO: 915289
ugucuaggugagcaagaau

SEQ ID NO: 1068783 - RNA, 19 nt, Artificial Sequence
  Description of Artificial Sequence: Synthetic oligonucleotide
  Antisense strand to SEQ ID NO: 1068782
auucuugcucaccuagaca

SEQ ID NO: 1068784 - RNA, 19 nt, Artificial Sequence
  Description of Artificial Sequence: Synthetic oligonucleotide
  Sense strand starting at position 3457 of SEQ ID NO: 915289
guuaacuugguuuauaacu

SEQ ID NO: 1068785 - RNA, 19 nt, Artificial Sequence
  Description of Artificial Sequence: Synthetic oligonucleotide
  Antisense strand to SEQ ID NO: 1068784
aguuauaaaccaaguuaac

SEQ ID NO: 1068786 - RNA, 19 nt, Artificial Sequence
  Description of Artificial Sequence: Synthetic oligonucleotide
  Sense strand starting at position 3487 of SEQ ID NO: 915289
agauauaugguauguggau

SEQ ID NO: 1068787 - RNA, 19 nt, Artificial Sequence
  Description of Artificial Sequence: Synthetic oligonucleotide
  Antisense strand to SEQ ID NO: 1068786
auccacauaccauauaucu

SEQ ID NO: 1068788 - RNA, 19 nt, Artificial Sequence
  Description of Artificial Sequence: Synthetic oligonucleotide
  Sense strand starting at position 3488 of SEQ ID NO: 915289
gauauaugguauguggauc

SEQ ID NO: 1068789 - RNA, 19 nt, Artificial Sequence
  Description of Artificial Sequence: Synthetic oligonucleotide
  Antisense strand to SEQ ID NO: 1068788
gauccacauaccauauauc

SEQ ID NO: 1068790 - RNA, 19 nt, Artificial Sequence
  Description of Artificial Sequence: Synthetic oligonucleotide
  Sense strand starting at position 3722 of SEQ ID NO: 915289
gccaaauguuuauuauuag

SEQ ID NO: 1068791 - RNA, 19 nt, Artificial Sequence
  Description of Artificial Sequence: Synthetic oligonucleotide
  Antisense strand to SEQ ID NO: 1068790
cuaauaauaaacauuuggc

SEQ ID NO: 1068792 - RNA, 19 nt, Artificial Sequence
  Description of Artificial Sequence: Synthetic oligonucleotide
  Sense strand starting at position 3796 of SEQ ID NO: 915289
auguacacaccuuaguauu

SEQ ID NO: 1068793 - RNA, 19 nt, Artificial Sequence
  Description of Artificial Sequence: Synthetic oligonucleotide
  Antisense strand to SEQ ID NO: 1068792
aauacuaagguguguacau

SEQ ID NO: 1068794 - RNA, 19 nt, Artificial Sequence
  Description of Artificial Sequence: Synthetic oligonucleotide
  Sense strand starting at position 24 of SEQ ID NO: 915290
cuagaauuccaguggucua

SEQ ID NO: 1068795 - RNA, 19 nt, Artificial Sequence
  Description of Artificial Sequence: Synthetic oligonucleotide
  Antisense strand to SEQ ID NO: 1068794
uagaccacuggaauucuag

SEQ ID NO: 1068796 - RNA, 19 nt, Artificial Sequence
  Description of Artificial Sequence: Synthetic oligonucleotide
  Sense strand starting at position 27 of SEQ ID NO: 915290
gaauuccaguggucuagca

SEQ ID NO: 1068797 - RNA, 19 nt, Artificial Sequence
  Description of Artificial Sequence: Synthetic oligonucleotide
  Antisense strand to SEQ ID NO: 1068796
ugcuagaccacuggaauuc

SEQ ID NO: 1068798 - RNA, 19 nt, Artificial Sequence
  Description of Artificial Sequence: Synthetic oligonucleotide
  Sense strand starting at position 29 of SEQ ID NO: 915290
auuccaguggucuagcaua

SEQ ID NO: 1068799 - RNA, 19 nt, Artificial Sequence
  Description of Artificial Sequence: Synthetic oligonucleotide
  Antisense strand to SEQ ID NO: 1068798
uaugcuagaccacuggaau

SEQ ID NO: 1068800 - RNA, 19 nt, Artificial Sequence
  Description of Artificial Sequence: Synthetic oligonucleotide
  Sense strand starting at position 34 of SEQ ID NO: 915290
aguggucuagcauagagaa

SEQ ID NO: 1068801 - RNA, 19 nt, Artificial Sequence
  Description of Artificial Sequence: Synthetic oligonucleotide
  Antisense strand to SEQ ID NO: 1068800
uucucuaugcuagaccacu

SEQ ID NO: 1068802 - RNA, 19 nt, Artificial Sequence
  Description of Artificial Sequence: Synthetic oligonucleotide
  Sense strand starting at position 59 of SEQ ID NO: 915290
aaucuuuaacgugauggau

SEQ ID NO: 1068803 - RNA, 19 nt, Artificial Sequence
  Description of Artificial Sequence: Synthetic oligonucleotide
  Antisense strand to SEQ ID NO: 1068802
auccaucacguuaaagauu

SEQ ID NO: 1068804 - RNA, 19 nt, Artificial Sequence
  Description of Artificial Sequence: Synthetic oligonucleotide
  Sense strand starting at position 62 of SEQ ID NO: 915290
cuuuaacgugauggauauc

SEQ ID NO: 1068805 - RNA, 19 nt, Artificial Sequence
  Description of Artificial Sequence: Synthetic oligonucleotide
  Antisense strand to SEQ ID NO: 1068804
gauauccaucacguuaaag

SEQ ID NO: 1068806 - RNA, 19 nt, Artificial Sequence
  Description of Artificial Sequence: Synthetic oligonucleotide
  Sense strand starting at position 326 of SEQ ID NO: 915290
ucuggucguccucacugau

SEQ ID NO: 1068807 - RNA, 19 nt, Artificial Sequence
  Description of Artificial Sequence: Synthetic oligonucleotide
  Antisense strand to SEQ ID NO: 1068806
aucagugaggacgaccaga

SEQ ID NO: 1068808 - RNA, 19 nt, Artificial Sequence
  Description of Artificial Sequence: Synthetic oligonucleotide
  Sense strand starting at position 645 of SEQ ID NO: 915290
ugugcaauuugaucuuuac

SEQ ID NO: 1068809 - RNA, 19 nt, Artificial Sequence
  Description of Artificial Sequence: Synthetic oligonucleotide
  Antisense strand to SEQ ID NO: 1068808
guaaagaucaaauugcaca

SEQ ID NO: 1068810 - RNA, 19 nt, Artificial Sequence
  Description of Artificial Sequence: Synthetic oligonucleotide
  Sense strand starting at position 905 of SEQ ID NO: 915290
agaauaaggucgccucaau

SEQ ID NO: 1068811 - RNA, 19 nt, Artificial Sequence
  Description of Artificial Sequence: Synthetic oligonucleotide
  Antisense strand to SEQ ID NO: 1068810
auugaggcgaccuuauucu

SEQ ID NO: 1068812 - RNA, 19 nt, Artificial Sequence
  Description of Artificial Sequence: Synthetic oligonucleotide
  Sense strand starting at position 1032 of SEQ ID NO: 915290
ggaguuuauuguguauuac

SEQ ID NO: 1068813 - RNA, 19 nt, Artificial Sequence
  Description of Artificial Sequence: Synthetic oligonucleotide
  Antisense strand to SEQ ID NO: 1068812
guaauacacaauaaacucc

SEQ ID NO: 1068814 - RNA, 19 nt, Artificial Sequence
  Description of Artificial Sequence: Synthetic oligonucleotide
  Sense strand starting at position 1033 of SEQ ID NO: 915290
gaguuuauuguguauuaca

SEQ ID NO: 1068815 - RNA, 19 nt, Artificial Sequence
  Description of Artificial Sequence: Synthetic oligonucleotide
  Antisense strand to SEQ ID NO: 1068814
uguaauacacaauaaacuc

SEQ ID NO: 1068816 - RNA, 19 nt, Artificial Sequence
  Description of Artificial Sequence: Synthetic oligonucleotide
  Sense strand starting at position 1042 of SEQ ID NO: 915290
guguauuacaccgagggca

SEQ ID NO: 1068817 - RNA, 19 nt, Artificial Sequence
  Description of Artificial Sequence: Synthetic oligonucleotide
  Antisense strand to SEQ ID NO: 1068816
ugcccucgguguaauacac

SEQ ID NO: 1068818 - RNA, 19 nt, Artificial Sequence
  Description of Artificial Sequence: Synthetic oligonucleotide
  Sense strand starting at position 2650 of SEQ ID NO: 915290
ccagacucauuugagauaa

SEQ ID NO: 1068819 - RNA, 19 nt, Artificial Sequence
  Description of Artificial Sequence: Synthetic oligonucleotide
  Antisense strand to SEQ ID NO: 1068818
uuaucucaaaugagucugg

SEQ ID NO: 1068820 - RNA, 19 nt, Artificial Sequence
  Description of Artificial Sequence: Synthetic oligonucleotide
  Sense strand starting at position 2652 of SEQ ID NO: 915290
agacucauuugagauaaca

SEQ ID NO: 1068821 - RNA, 19 nt, Artificial Sequence
  Description of Artificial Sequence: Synthetic oligonucleotide
  Antisense strand to SEQ ID NO: 1068820
uguuaucucaaaugagucu

SEQ ID NO: 1068822 - RNA, 19 nt, Artificial Sequence
  Description of Artificial Sequence: Synthetic oligonucleotide
  Sense strand starting at position 2731 of SEQ ID NO: 915290
uguuauugagcuuacccau

SEQ ID NO: 1068823 - RNA, 19 nt, Artificial Sequence
  Description of Artificial Sequence: Synthetic oligonucleotide
  Antisense strand to SEQ ID NO: 1068822
auggguaagcucaauaaca

SEQ ID NO: 1068824 - RNA, 19 nt, Artificial Sequence
  Description of Artificial Sequence: Synthetic oligonucleotide
  Sense strand starting at position 2855 of SEQ ID NO: 915290
gcugauugaaccuggguga

SEQ ID NO: 1068825 - RNA, 19 nt, Artificial Sequence
  Description of Artificial Sequence: Synthetic oligonucleotide
  Antisense strand to SEQ ID NO: 1068824
ucacccagguucaaucagc

SEQ ID NO: 1068826 - RNA, 19 nt, Artificial Sequence
  Description of Artificial Sequence: Synthetic oligonucleotide
  Sense strand starting at position 2856 of SEQ ID NO: 915290
cugauugaaccugggugaa

SEQ ID NO: 1068827 - RNA, 19 nt, Artificial Sequence
  Description of Artificial Sequence: Synthetic oligonucleotide
  Antisense strand to SEQ ID NO: 1068826
uucacccagguucaaucag

SEQ ID NO: 1068828 - RNA, 19 nt, Artificial Sequence
  Description of Artificial Sequence: Synthetic oligonucleotide
  Sense strand starting at position 2897 of SEQ ID NO: 915290
ugcuuuacugaagagcaga

SEQ ID NO: 1068829 - RNA, 19 nt, Artificial Sequence
  Description of Artificial Sequence: Synthetic oligonucleotide
  Antisense strand to SEQ ID NO: 1068828
ucugcucuucaguaaagca

SEQ ID NO: 1068830 - RNA, 19 nt, Artificial Sequence
  Description of Artificial Sequence: Synthetic oligonucleotide
  Sense strand starting at position 2928 of SEQ ID NO: 915290
cccaguuaagacugcacua

SEQ ID NO: 1068831 - RNA, 19 nt, Artificial Sequence
  Description of Artificial Sequence: Synthetic oligonucleotide
  Antisense strand to SEQ ID NO: 1068830
uagugcagucuuaacuggg

SEQ ID NO: 1068832 - RNA, 19 nt, Artificial Sequence
  Description of Artificial Sequence: Synthetic oligonucleotide
  Sense strand starting at position 2952 of SEQ ID NO: 915290
gagagacuguugucagaag

SEQ ID NO: 1068833 - RNA, 19 nt, Artificial Sequence
  Description of Artificial Sequence: Synthetic oligonucleotide
  Antisense strand to SEQ ID NO: 1068832
cuucugacaacagucucuc

SEQ ID NO: 1068834 - RNA, 19 nt, Artificial Sequence
  Description of Artificial Sequence: Synthetic oligonucleotide
  Sense strand starting at position 2981 of SEQ ID NO: 915290
gacugaugaucauucgcaa

SEQ ID NO: 1068835 - RNA, 19 nt, Artificial Sequence
  Description of Artificial Sequence: Synthetic oligonucleotide
  Antisense strand to SEQ ID NO: 1068834
uugcgaaugaucaucaguc

SEQ ID NO: 1068836 - RNA, 19 nt, Artificial Sequence
  Description of Artificial Sequence: Synthetic oligonucleotide
  Sense strand starting at position 2984 of SEQ ID NO: 915290
ugaugaucauucgcaauca

SEQ ID NO: 1068837 - RNA, 19 nt, Artificial Sequence
  Description of Artificial Sequence: Synthetic oligonucleotide
  Antisense strand to SEQ ID NO: 1068836
ugauugcgaaugaucauca

SEQ ID NO: 1068838 - RNA, 19 nt, Artificial Sequence
  Description of Artificial Sequence: Synthetic oligonucleotide
  Sense strand starting at position 3027 of SEQ ID NO: 915290
acgugcaugcugaggagua

SEQ ID NO: 1068839 - RNA, 19 nt, Artificial Sequence
  Description of Artificial Sequence: Synthetic oligonucleotide
  Antisense strand to SEQ ID NO: 1068838
uacuccucagcaugcacgu

SEQ ID NO: 1068840 - RNA, 19 nt, Artificial Sequence
  Description of Artificial Sequence: Synthetic oligonucleotide
  Sense strand starting at position 3063 of SEQ ID NO: 915290
agcaaagaagugugcucaa

SEQ ID NO: 1068841 - RNA, 19 nt, Artificial Sequence
  Description of Artificial Sequence: Synthetic oligonucleotide
  Antisense strand to SEQ ID NO: 1068840
uugagcacacuucuuugcu

SEQ ID NO: 1068842 - RNA, 19 nt, Artificial Sequence
  Description of Artificial Sequence: Synthetic oligonucleotide
  Sense strand starting at position 3066 of SEQ ID NO: 915290
aaagaagugugcucaagaa

SEQ ID NO: 1068843 - RNA, 19 nt, Artificial Sequence
  Description of Artificial Sequence: Synthetic oligonucleotide
  Antisense strand to SEQ ID NO: 1068842
uucuugagcacacuucuuu

SEQ ID NO: 1068844 - RNA, 19 nt, Artificial Sequence
  Description of Artificial Sequence: Synthetic oligonucleotide
  Sense strand starting at position 3181 of SEQ ID NO: 915290
ugcuucuucccaggagaug

SEQ ID NO: 1068845 - RNA, 19 nt, Artificial Sequence
  Description of Artificial Sequence: Synthetic oligonucleotide
  Antisense strand to SEQ ID NO: 1068844
caucuccugggaagaagca

SEQ ID NO: 1068846 - RNA, 19 nt, Artificial Sequence
  Description of Artificial Sequence: Synthetic oligonucleotide
  Sense strand starting at position 3182 of SEQ ID NO: 915290
gcuucuucccaggagaugu

SEQ ID NO: 1068847 - RNA, 19 nt, Artificial Sequence
  Description of Artificial Sequence: Synthetic oligonucleotide
  Antisense strand to SEQ ID NO: 1068846
acaucuccugggaagaagc

SEQ ID NO: 1068848 - RNA, 19 nt, Artificial Sequence
  Description of Artificial Sequence: Synthetic oligonucleotide
  Sense strand starting at position 3193 of SEQ ID NO: 915290
ggagauguuacucagccuu

SEQ ID NO: 1068849 - RNA, 19 nt, Artificial Sequence
  Description of Artificial Sequence: Synthetic oligonucleotide
  Antisense strand to SEQ ID NO: 1068848
aaggcugaguaacaucucc

SEQ ID NO: 1068850 - RNA, 19 nt, Artificial Sequence
  Description of Artificial Sequence: Synthetic oligonucleotide
  Sense strand starting at position 3257 of SEQ ID NO: 915290
aacaguuucugaguagaac

SEQ ID NO: 1068851 - RNA, 19 nt, Artificial Sequence
  Description of Artificial Sequence: Synthetic oligonucleotide
  Antisense strand to SEQ ID NO: 1068850
guucuacucagaaacuguu

SEQ ID NO: 1068852 - RNA, 19 nt, Artificial Sequence
  Description of Artificial Sequence: Synthetic oligonucleotide
  Sense strand starting at position 3258 of SEQ ID NO: 915290
acaguuucugaguagaacu

SEQ ID NO: 1068853 - RNA, 19 nt, Artificial Sequence
  Description of Artificial Sequence: Synthetic oligonucleotide
  Antisense strand to SEQ ID NO: 1068852
aguucuacucagaaacugu

SEQ ID NO: 1068854 - RNA, 19 nt, Artificial Sequence
  Description of Artificial Sequence: Synthetic oligonucleotide
  Sense strand starting at position 3300 of SEQ ID NO: 915290
acagauucucaacaccgua

SEQ ID NO: 1068855 - RNA, 19 nt, Artificial Sequence
  Description of Artificial Sequence: Synthetic oligonucleotide
  Antisense strand to SEQ ID NO: 1068854
uacgguguugagaaucugu

SEQ ID NO: 1068856 - RNA, 19 nt, Artificial Sequence
  Description of Artificial Sequence: Synthetic oligonucleotide
  Sense strand starting at position 3421 of SEQ ID NO: 915290
ucugcuagccugggaagau

SEQ ID NO: 1068857 - RNA, 19 nt, Artificial Sequence
  Description of Artificial Sequence: Synthetic oligonucleotide
  Antisense strand to SEQ ID NO: 1068856
aucuucccaggcuagcaga

SEQ ID NO: 1068858 - RNA, 19 nt, Artificial Sequence
  Description of Artificial Sequence: Synthetic oligonucleotide
  Sense strand starting at position 3600 of SEQ ID NO: 915290
agagacacguagcucaaua

SEQ ID NO: 1068859 - RNA, 19 nt, Artificial Sequence
  Description of Artificial Sequence: Synthetic oligonucleotide
  Antisense strand to SEQ ID NO: 1068858
uauugagcuacgugucucu

SEQ ID NO: 1068860 - RNA, 19 nt, Artificial Sequence
  Description of Artificial Sequence: Synthetic oligonucleotide
  Sense strand starting at position 3620 of SEQ ID NO: 915290
cggugugaucuuggaaagg

SEQ ID NO: 1068861 - RNA, 19 nt, Artificial Sequence
  Description of Artificial Sequence: Synthetic oligonucleotide
  Antisense strand to SEQ ID NO: 1068860
ccuuuccaagaucacaccg

SEQ ID NO: 1068862 - RNA, 19 nt, Artificial Sequence
  Description of Artificial Sequence: Synthetic oligonucleotide
  Sense strand starting at position 3677 of SEQ ID NO: 915290
aaaugaaaugguuggcaca

SEQ ID NO: 1068863 - RNA, 19 nt, Artificial Sequence
  Description of Artificial Sequence: Synthetic oligonucleotide
  Antisense strand to SEQ ID NO: 1068862
ugugccaaccauuucauuu

SEQ ID NO: 1068864 - RNA, 19 nt, Artificial Sequence
  Description of Artificial Sequence: Synthetic oligonucleotide
  Sense strand starting at position 3679 of SEQ ID NO: 915290
augaaaugguuggcacaga

SEQ ID NO: 1068865 - RNA, 19 nt, Artificial Sequence
  Description of Artificial Sequence: Synthetic oligonucleotide
  Antisense strand to SEQ ID NO: 1068864
ucugugccaaccauuucau

SEQ ID NO: 1068866 - RNA, 19 nt, Artificial Sequence
  Description of Artificial Sequence: Synthetic oligonucleotide
  Sense strand starting at position 3724 of SEQ ID NO: 915290
aucacagucgcuuagaagu

SEQ ID NO: 1068867 - RNA, 19 nt, Artificial Sequence
  Description of Artificial Sequence: Synthetic oligonucleotide
  Antisense strand to SEQ ID NO: 1068866
acuucuaagcgacugugau

SEQ ID NO: 1068868 - RNA, 19 nt, Artificial Sequence
  Description of Artificial Sequence: Synthetic oligonucleotide
  Sense strand starting at position 3869 of SEQ ID NO: 915290
ccugaugucuugccauuua

SEQ ID NO: 1068869 - RNA, 19 nt, Artificial Sequence
  Description of Artificial Sequence: Synthetic oligonucleotide
  Antisense strand to SEQ ID NO: 1068868
uaaauggcaagacaucagg

SEQ ID NO: 1068870 - RNA, 19 nt, Artificial Sequence
  Description of Artificial Sequence: Synthetic oligonucleotide
  Sense strand starting at position 3938 of SEQ ID NO: 915290
ugcuaauaucuguaugcaa

SEQ ID NO: 1068871 - RNA, 19 nt, Artificial Sequence
  Description of Artificial Sequence: Synthetic oligonucleotide
  Antisense strand to SEQ ID NO: 1068870
uugcauacagauauuagca

SEQ ID NO: 1068872 - RNA, 19 nt, Artificial Sequence
  Description of Artificial Sequence: Synthetic oligonucleotide
  Sense strand starting at position 3962 of SEQ ID NO: 915290
aguccuaaaugugccauaa

SEQ ID NO: 1068873 - RNA, 19 nt, Artificial Sequence
  Description of Artificial Sequence: Synthetic oligonucleotide
  Antisense strand to SEQ ID NO: 1068872
uuauggcacauuuaggacu

SEQ ID NO: 1068874 - RNA, 19 nt, Artificial Sequence
  Description of Artificial Sequence: Synthetic oligonucleotide
  Sense strand starting at position 184 of SEQ ID NO: 915291
uuacccauugggcauagau

SEQ ID NO: 1068875 - RNA, 19 nt, Artificial Sequence
  Description of Artificial Sequence: Synthetic oligonucleotide
  Antisense strand to SEQ ID NO: 1068874
aucuaugcccaauggguaa

SEQ ID NO: 1068876 - RNA, 19 nt, Artificial Sequence
  Description of Artificial Sequence: Synthetic oligonucleotide
  Sense strand starting at position 349 of SEQ ID NO: 915291
agccaucccagguaugaga

SEQ ID NO: 1068877 - RNA, 19 nt, Artificial Sequence
  Description of Artificial Sequence: Synthetic oligonucleotide
  Antisense strand to SEQ ID NO: 1068876
ucucauaccugggauggcu

SEQ ID NO: 1068878 - RNA, 19 nt, Artificial Sequence
  Description of Artificial Sequence: Synthetic oligonucleotide
  Sense strand starting at position 357 of SEQ ID NO: 915291
cagguaugagacugccuau

SEQ ID NO: 1068879 - RNA, 19 nt, Artificial Sequence
  Description of Artificial Sequence: Synthetic oligonucleotide
  Antisense strand to SEQ ID NO: 1068878
auaggcagucucauaccug

SEQ ID NO: 1068880 - RNA, 19 nt, Artificial Sequence
  Description of Artificial Sequence: Synthetic oligonucleotide
  Sense strand starting at position 363 of SEQ ID NO: 915291
ugagacugccuauaguaaa

SEQ ID NO: 1068881 - RNA, 19 nt, Artificial Sequence
  Description of Artificial Sequence: Synthetic oligonucleotide
  Antisense strand to SEQ ID NO: 1068880
uuuacuauaggcagucuca

SEQ ID NO: 1068882 - RNA, 19 nt, Artificial Sequence
  Description of Artificial Sequence: Synthetic oligonucleotide
  Sense strand starting at position 588 of SEQ ID NO: 915291
ucuaucacuuggccagaga

SEQ ID NO: 1068883 - RNA, 19 nt, Artificial Sequence
  Description of Artificial Sequence: Synthetic oligonucleotide
  Antisense strand to SEQ ID NO: 1068882
ucucuggccaagugauaga

SEQ ID NO: 1068884 - RNA, 19 nt, Artificial Sequence
  Description of Artificial Sequence: Synthetic oligonucleotide
  Sense strand starting at position 720 of SEQ ID NO: 915291
accucuuccucuguggaaa

SEQ ID NO: 1068885 - RNA, 19 nt, Artificial Sequence
  Description of Artificial Sequence: Synthetic oligonucleotide
  Antisense strand to SEQ ID NO: 1068884
uuuccacagaggaagaggu

SEQ ID NO: 1068886 - RNA, 19 nt, Artificial Sequence
  Description of Artificial Sequence: Synthetic oligonucleotide
  Sense strand starting at position 745 of SEQ ID NO: 915291
aagccaagagagugauuga

SEQ ID NO: 1068887 - RNA, 19 nt, Artificial Sequence
  Description of Artificial Sequence: Synthetic oligonucleotide
  Antisense strand to SEQ ID NO: 1068886
ucaaucacucucuuggcuu

SEQ ID NO: 1068888 - RNA, 19 nt, Artificial Sequence
  Description of Artificial Sequence: Synthetic oligonucleotide
  Sense strand starting at position 748 of SEQ ID NO: 915291
ccaagagagugauugaggu

SEQ ID NO: 1068889 - RNA, 19 nt, Artificial Sequence
  Description of Artificial Sequence: Synthetic oligonucleotide
  Antisense strand to SEQ ID NO: 1068888
accucaaucacucucuugg

SEQ ID NO: 1068890 - RNA, 19 nt, Artificial Sequence
  Description of Artificial Sequence: Synthetic oligonucleotide
  Sense strand starting at position 946 of SEQ ID NO: 915291
ucugaaaugugccugagau

SEQ ID NO: 1068891 - RNA, 19 nt, Artificial Sequence
  Description of Artificial Sequence: Synthetic oligonucleotide
  Antisense strand to SEQ ID NO: 1068890
aucucaggcacauuucaga

SEQ ID NO: 1068892 - RNA, 19 nt, Artificial Sequence
  Description of Artificial Sequence: Synthetic oligonucleotide
  Sense strand starting at position 947 of SEQ ID NO: 915291
cugaaaugugccugagauu

SEQ ID NO: 1068893 - RNA, 19 nt, Artificial Sequence
  Description of Artificial Sequence: Synthetic oligonucleotide
  Antisense strand to SEQ ID NO: 1068892
aaucucaggcacauuucag

SEQ ID NO: 1068894 - RNA, 19 nt, Artificial Sequence
  Description of Artificial Sequence: Synthetic oligonucleotide
  Sense strand starting at position 956 of SEQ ID NO: 915291
gccugagauuuacucuugu

SEQ ID NO: 1068895 - RNA, 19 nt, Artificial Sequence
  Description of Artificial Sequence: Synthetic oligonucleotide
  Antisense strand to SEQ ID NO: 1068894
acaagaguaaaucucaggc

SEQ ID NO: 1068896 - RNA, 19 nt, Artificial Sequence
  Description of Artificial Sequence: Synthetic oligonucleotide
  Sense strand starting at position 1251 of SEQ ID NO: 915291
gugccuggaaucugacaau

SEQ ID NO: 1068897 - RNA, 19 nt, Artificial Sequence
  Description of Artificial Sequence: Synthetic oligonucleotide
  Antisense strand to SEQ ID NO: 1068896
auugucagauuccaggcac

SEQ ID NO: 1068898 - RNA, 19 nt, Artificial Sequence
  Description of Artificial Sequence: Synthetic oligonucleotide
  Sense strand starting at position 1293 of SEQ ID NO: 915291
guugccacgcuuuagauuu

SEQ ID NO: 1068899 - RNA, 19 nt, Artificial Sequence
  Description of Artificial Sequence: Synthetic oligonucleotide
  Antisense strand to SEQ ID NO: 1068898
aaaucuaaagcguggcaac

SEQ ID NO: 1068900 - RNA, 19 nt, Artificial Sequence
  Description of Artificial Sequence: Synthetic oligonucleotide
  Sense strand starting at position 1299 of SEQ ID NO: 915291
acgcuuuagauuuggccaa

SEQ ID NO: 1068901 - RNA, 19 nt, Artificial Sequence
  Description of Artificial Sequence: Synthetic oligonucleotide
  Antisense strand to SEQ ID NO: 1068900
uuggccaaaucuaaagcgu

SEQ ID NO: 1068902 - RNA, 19 nt, Artificial Sequence
  Description of Artificial Sequence: Synthetic oligonucleotide
  Sense strand starting at position 1465 of SEQ ID NO: 915291
agguuguugcguguuggaa

SEQ ID NO: 1068903 - RNA, 19 nt, Artificial Sequence
  Description of Artificial Sequence: Synthetic oligonucleotide
  Antisense strand to SEQ ID NO: 1068902
uuccaacacgcaacaaccu

SEQ ID NO: 1068904 - RNA, 19 nt, Artificial Sequence
  Description of Artificial Sequence: Synthetic oligonucleotide
  Sense strand starting at position 1466 of SEQ ID NO: 915291
gguuguugcguguuggaac

SEQ ID NO: 1068905 - RNA, 19 nt, Artificial Sequence
  Description of Artificial Sequence: Synthetic oligonucleotide
  Antisense strand to SEQ ID NO: 1068904
guuccaacacgcaacaacc

SEQ ID NO: 1068906 - RNA, 19 nt, Artificial Sequence
  Description of Artificial Sequence: Synthetic oligonucleotide
  Sense strand starting at position 1477 of SEQ ID NO: 915291
guuggaacucaaggucuau

SEQ ID NO: 1068907 - RNA, 19 nt, Artificial Sequence
  Description of Artificial Sequence: Synthetic oligonucleotide
  Antisense strand to SEQ ID NO: 1068906
auagaccuugaguuccaac

SEQ ID NO: 1068908 - RNA, 19 nt, Artificial Sequence
  Description of Artificial Sequence: Synthetic oligonucleotide
  Sense strand starting at position 1650 of SEQ ID NO: 915291
gagauacacugucugcaga

SEQ ID NO: 1068909 - RNA, 19 nt, Artificial Sequence
  Description of Artificial Sequence: Synthetic oligonucleotide
  Antisense strand to SEQ ID NO: 1068908
ucugcagacaguguaucuc

SEQ ID NO: 1068910 - RNA, 19 nt, Artificial Sequence
  Description of Artificial Sequence: Synthetic oligonucleotide
  Sense strand starting at position 2025 of SEQ ID NO: 915291
cuucgagagugccuauuua

SEQ ID NO: 1068911 - RNA, 19 nt, Artificial Sequence
  Description of Artificial Sequence: Synthetic oligonucleotide
  Antisense strand to SEQ ID NO: 1068910
uaaauaggcacucucgaag

SEQ ID NO: 1068912 - RNA, 19 nt, Artificial Sequence
  Description of Artificial Sequence: Synthetic oligonucleotide
  Sense strand starting at position 2060 of SEQ ID NO: 915291
ggcuuuccugcgaaggguu

SEQ ID NO: 1068913 - RNA, 19 nt, Artificial Sequence
  Description of Artificial Sequence: Synthetic oligonucleotide
  Antisense strand to SEQ ID NO: 1068912
aacccuucgcaggaaagcc

SEQ ID NO: 1068914 - RNA, 19 nt, Artificial Sequence
  Description of Artificial Sequence: Synthetic oligonucleotide
  Sense strand starting at position 2098 of SEQ ID NO: 915291
aaguucuuggaaggcauaa

SEQ ID NO: 1068915 - RNA, 19 nt, Artificial Sequence
  Description of Artificial Sequence: Synthetic oligonucleotide
  Antisense strand to SEQ ID NO: 1068914
uuaugccuuccaagaacuu

SEQ ID NO: 1068916 - RNA, 19 nt, Artificial Sequence
  Description of Artificial Sequence: Synthetic oligonucleotide
  Sense strand starting at position 2128 of SEQ ID NO: 915291
ggaaaucaaugacucuguu

SEQ ID NO: 1068917 - RNA, 19 nt, Artificial Sequence
  Description of Artificial Sequence: Synthetic oligonucleotide
  Antisense strand to SEQ ID NO: 1068916
aacagagucauugauuucc

SEQ ID NO: 1068918 - RNA, 19 nt, Artificial Sequence
  Description of Artificial Sequence: Synthetic oligonucleotide
  Sense strand starting at position 2176 of SEQ ID NO: 915291
agguaauggccaggucaau

SEQ ID NO: 1068919 - RNA, 19 nt, Artificial Sequence
  Description of Artificial Sequence: Synthetic oligonucleotide
  Antisense strand to SEQ ID NO: 1068918
auugaccuggccauuaccu

SEQ ID NO: 1068920 - RNA, 19 nt, Artificial Sequence
  Description of Artificial Sequence: Synthetic oligonucleotide
  Sense strand starting at position 2188 of SEQ ID NO: 915291
ggucaauccugagucugau

SEQ ID NO: 1068921 - RNA, 19 nt, Artificial Sequence
  Description of Artificial Sequence: Synthetic oligonucleotide
  Antisense strand to SEQ ID NO: 1068920
aucagacucaggauugacc

SEQ ID NO: 1068922 - RNA, 19 nt, Artificial Sequence
  Description of Artificial Sequence: Synthetic oligonucleotide
  Sense strand starting at position 2453 of SEQ ID NO: 915291
cagaaagguuaggcucaga

SEQ ID NO: 1068923 - RNA, 19 nt, Artificial Sequence
  Description of Artificial Sequence: Synthetic oligonucleotide
  Antisense strand to SEQ ID NO: 1068922
ucugagccuaaccuuucug

SEQ ID NO: 1068924 - RNA, 19 nt, Artificial Sequence
  Description of Artificial Sequence: Synthetic oligonucleotide
  Sense strand starting at position 2496 of SEQ ID NO: 915291
agaguaaaguuucucacug

SEQ ID NO: 1068925 - RNA, 19 nt, Artificial Sequence
  Description of Artificial Sequence: Synthetic oligonucleotide
  Antisense strand to SEQ ID NO: 1068924
cagugagaaacuuuacucu

SEQ ID NO: 1068926 - RNA, 19 nt, Artificial Sequence
  Description of Artificial Sequence: Synthetic oligonucleotide
  Sense strand starting at position 2514 of SEQ ID NO: 915291
gucaaucauccuggaaaga

SEQ ID NO: 1068927 - RNA, 19 nt, Artificial Sequence
  Description of Artificial Sequence: Synthetic oligonucleotide
  Antisense strand to SEQ ID NO: 1068926
ucuuuccaggaugauugac

SEQ ID NO: 1068928 - RNA, 19 nt, Artificial Sequence
  Description of Artificial Sequence: Synthetic oligonucleotide
  Sense strand starting at position 2609 of SEQ ID NO: 915291
uuagacuuuaguugggaga

SEQ ID NO: 1068929 - RNA, 19 nt, Artificial Sequence
  Description of Artificial Sequence: Synthetic oligonucleotide
  Antisense strand to SEQ ID NO: 1068928
ucucccaacuaaagucuaa

SEQ ID NO: 1068930 - RNA, 19 nt, Artificial Sequence
  Description of Artificial Sequence: Synthetic oligonucleotide
  Sense strand starting at position 2693 of SEQ ID NO: 915291
ggguauugaaccuguggau

SEQ ID NO: 1068931 - RNA, 19 nt, Artificial Sequence
  Description of Artificial Sequence: Synthetic oligonucleotide
  Antisense strand to SEQ ID NO: 1068930
auccacagguucaauaccc

SEQ ID NO: 1068932 - RNA, 19 nt, Artificial Sequence
  Description of Artificial Sequence: Synthetic oligonucleotide
  Sense strand starting at position 2818 of SEQ ID NO: 915291
auugucauuguagagaacu

SEQ ID NO: 1068933 - RNA, 19 nt, Artificial Sequence
  Description of Artificial Sequence: Synthetic oligonucleotide
  Antisense strand to SEQ ID NO: 1068932
aguucucuacaaugacaau

SEQ ID NO: 1068934 - RNA, 19 nt, Artificial Sequence
  Description of Artificial Sequence: Synthetic oligonucleotide
  Sense strand starting at position 2880 of SEQ ID NO: 915291
cuaggagcaucuucucuau

SEQ ID NO: 1068935 - RNA, 19 nt, Artificial Sequence
  Description of Artificial Sequence: Synthetic oligonucleotide
  Antisense strand to SEQ ID NO: 1068934
auagagaagaugcuccuag

SEQ ID NO: 1068936 - RNA, 19 nt, Artificial Sequence
  Description of Artificial Sequence: Synthetic oligonucleotide
  Sense strand starting at position 2883 of SEQ ID NO: 915291
ggagcaucuucucuauaug

SEQ ID NO: 1068937 - RNA, 19 nt, Artificial Sequence
  Description of Artificial Sequence: Synthetic oligonucleotide
  Antisense strand to SEQ ID NO: 1068936
cauauagagaagaugcucc

SEQ ID NO: 1068938 - RNA, 19 nt, Artificial Sequence
  Description of Artificial Sequence: Synthetic oligonucleotide
  Sense strand starting at position 2886 of SEQ ID NO: 915291
gcaucuucucuauaugaga

SEQ ID NO: 1068939 - RNA, 19 nt, Artificial Sequence
  Description of Artificial Sequence: Synthetic oligonucleotide
  Antisense strand to SEQ ID NO: 1068938
ucucauauagagaagaugc

SEQ ID NO: 1068940 - RNA, 19 nt, Artificial Sequence
  Description of Artificial Sequence: Synthetic oligonucleotide
  Sense strand starting at position 3436 of SEQ ID NO: 915291
gaggaaauguucucuuccu

SEQ ID NO: 1068941 - RNA, 19 nt, Artificial Sequence
  Description of Artificial Sequence: Synthetic oligonucleotide
  Antisense strand to SEQ ID NO: 1068940
aggaagagaacauuuccuc

SEQ ID NO: 1068942 - RNA, 19 nt, Artificial Sequence
  Description of Artificial Sequence: Synthetic oligonucleotide
  Sense strand starting at position 3437 of SEQ ID NO: 915291
aggaaauguucucuuccuc

SEQ ID NO: 1068943 - RNA, 19 nt, Artificial Sequence
  Description of Artificial Sequence: Synthetic oligonucleotide
  Antisense strand to SEQ ID NO: 1068942
gaggaagagaacauuuccu

SEQ ID NO: 1068944 - RNA, 19 nt, Artificial Sequence
  Description of Artificial Sequence: Synthetic oligonucleotide
  Sense strand starting at position 3888 of SEQ ID NO: 915291
ucaguuaguccagaagagu

SEQ ID NO: 1068945 - RNA, 19 nt, Artificial Sequence
  Description of Artificial Sequence: Synthetic oligonucleotide
  Antisense strand to SEQ ID NO: 1068944
acucuucuggacuaacuga

SEQ ID NO: 1068946 - RNA, 19 nt, Artificial Sequence
  Description of Artificial Sequence: Synthetic oligonucleotide
  Sense strand starting at position 3919 of SEQ ID NO: 915291
auaccucaucucugagagu

SEQ ID NO: 1068947 - RNA, 19 nt, Artificial Sequence
  Description of Artificial Sequence: Synthetic oligonucleotide
  Antisense strand to SEQ ID NO: 1068946
acucucagagaugagguau

SEQ ID NO: 1068948 - RNA, 19 nt, Artificial Sequence
  Description of Artificial Sequence: Synthetic oligonucleotide
  Sense strand starting at position 3937 of SEQ ID NO: 915291
ugaugagguacuuaguuau

SEQ ID NO: 1068949 - RNA, 19 nt, Artificial Sequence
  Description of Artificial Sequence: Synthetic oligonucleotide
  Antisense strand to SEQ ID NO: 1068948
auaacuaaguaccucauca

SEQ ID NO: 1068950 - RNA, 19 nt, Artificial Sequence
  Description of Artificial Sequence: Synthetic oligonucleotide
  Sense strand starting at position 3966 of SEQ ID NO: 915291
guacgauuagaagauguuu

SEQ ID NO: 1068951 - RNA, 19 nt, Artificial Sequence
  Description of Artificial Sequence: Synthetic oligonucleotide
  Antisense strand to SEQ ID NO: 1068950
aaacaucuucuaaucguac

SEQ ID NO: 1068952 - RNA, 19 nt, Artificial Sequence
  Description of Artificial Sequence: Synthetic oligonucleotide
  Sense strand starting at position 3982 of SEQ ID NO: 915291
uuuagauuauagcugagaa

SEQ ID NO: 1068953 - RNA, 19 nt, Artificial Sequence
  Description of Artificial Sequence: Synthetic oligonucleotide
  Antisense strand to SEQ ID NO: 1068952
uucucagcuauaaucuaaa

SEQ ID NO: 1068954 - RNA, 19 nt, Artificial Sequence
  Description of Artificial Sequence: Synthetic oligonucleotide
  Sense strand starting at position 209 of SEQ ID NO: 915292
gucacagaauucucaguac

SEQ ID NO: 1068955 - RNA, 19 nt, Artificial Sequence
  Description of Artificial Sequence: Synthetic oligonucleotide
  Antisense strand to SEQ ID NO: 1068954
guacugagaauucugugac

SEQ ID NO: 1068956 - RNA, 19 nt, Artificial Sequence
  Description of Artificial Sequence: Synthetic oligonucleotide
  Sense strand starting at position 235 of SEQ ID NO: 915292
agauuauuauggcccaagu

SEQ ID NO: 1068957 - RNA, 19 nt, Artificial Sequence
  Description of Artificial Sequence: Synthetic oligonucleotide
  Antisense strand to SEQ ID NO: 1068956
acuugggccauaauaaucu

SEQ ID NO: 1068958 - RNA, 19 nt, Artificial Sequence
  Description of Artificial Sequence: Synthetic oligonucleotide
  Sense strand starting at position 237 of SEQ ID NO: 915292
auuauuauggcccaagugu

SEQ ID NO: 1068959 - RNA, 19 nt, Artificial Sequence
  Description of Artificial Sequence: Synthetic oligonucleotide
  Antisense strand to SEQ ID NO: 1068958
acacuugggccauaauaau

SEQ ID NO: 1068960 - RNA, 19 nt, Artificial Sequence
  Description of Artificial Sequence: Synthetic oligonucleotide
  Sense strand starting at position 284 of SEQ ID NO: 915292
gaccaagucugagcuuauu

SEQ ID NO: 1068961 - RNA, 19 nt, Artificial Sequence
  Description of Artificial Sequence: Synthetic oligonucleotide
  Antisense strand to SEQ ID NO: 1068960
aauaagcucagacuugguc

SEQ ID NO: 1068962 - RNA, 19 nt, Artificial Sequence
  Description of Artificial Sequence: Synthetic oligonucleotide
  Sense strand starting at position 306 of SEQ ID NO: 915292
ggcaguaucacguaaggag

SEQ ID NO: 1068963 - RNA, 19 nt, Artificial Sequence
  Description of Artificial Sequence: Synthetic oligonucleotide
  Antisense strand to SEQ ID NO: 1068962
cuccuuacgugauacugcc

SEQ ID NO: 1068964 - RNA, 19 nt, Artificial Sequence
  Description of Artificial Sequence: Synthetic oligonucleotide
  Sense strand starting at position 340 of SEQ ID NO: 915292
accuguuagcgacagggau

SEQ ID NO: 1068965 - RNA, 19 nt, Artificial Sequence
  Description of Artificial Sequence: Synthetic oligonucleotide
  Antisense strand to SEQ ID NO: 1068964
aucccugucgcuaacaggu

SEQ ID NO: 1068966 - RNA, 19 nt, Artificial Sequence
  Description of Artificial Sequence: Synthetic oligonucleotide
  Sense strand starting at position 637 of SEQ ID NO: 915292
ggaaguugauguccucaca

SEQ ID NO: 1068967 - RNA, 19 nt, Artificial Sequence
  Description of Artificial Sequence: Synthetic oligonucleotide
  Antisense strand to SEQ ID NO: 1068966
ugugaggacaucaacuucc

SEQ ID NO: 1068968 - RNA, 19 nt, Artificial Sequence
  Description of Artificial Sequence: Synthetic oligonucleotide
  Sense strand starting at position 640 of SEQ ID NO: 915292
aguugauguccucacagcu

SEQ ID NO: 1068969 - RNA, 19 nt, Artificial Sequence
  Description of Artificial Sequence: Synthetic oligonucleotide
  Antisense strand to SEQ ID NO: 1068968
agcugugaggacaucaacu

SEQ ID NO: 1068970 - RNA, 19 nt, Artificial Sequence
  Description of Artificial Sequence: Synthetic oligonucleotide
  Sense strand starting at position 777 of SEQ ID NO: 915292
uuguguccucacuaaccuu

SEQ ID NO: 1068971 - RNA, 19 nt, Artificial Sequence
  Description of Artificial Sequence: Synthetic oligonucleotide
  Antisense strand to SEQ ID NO: 1068970
aagguuagugaggacacaa

SEQ ID NO: 1068972 - RNA, 19 nt, Artificial Sequence
  Description of Artificial Sequence: Synthetic oligonucleotide
  Sense strand starting at position 818 of SEQ ID NO: 915292
aaagcugagucuguuaauu

SEQ ID NO: 1068973 - RNA, 19 nt, Artificial Sequence
  Description of Artificial Sequence: Synthetic oligonucleotide
  Antisense strand to SEQ ID NO: 1068972
aauuaacagacucagcuuu

SEQ ID NO: 1068974 - RNA, 19 nt, Artificial Sequence
  Description of Artificial Sequence: Synthetic oligonucleotide
  Sense strand starting at position 834 of SEQ ID NO: 915292
auugcugacccagagagua

SEQ ID NO: 1068975 - RNA, 19 nt, Artificial Sequence
  Description of Artificial Sequence: Synthetic oligonucleotide
  Antisense strand to SEQ ID NO: 1068974
uacucucugggucagcaau

SEQ ID NO: 1068976 - RNA, 19 nt, Artificial Sequence
  Description of Artificial Sequence: Synthetic oligonucleotide
  Sense strand starting at position 995 of SEQ ID NO: 915292
cacuacuguuucucaggga

SEQ ID NO: 1068977 - RNA, 19 nt, Artificial Sequence
  Description of Artificial Sequence: Synthetic oligonucleotide
  Antisense strand to SEQ ID NO: 1068976
ucccugagaaacaguagug

SEQ ID NO: 1068978 - RNA, 19 nt, Artificial Sequence
  Description of Artificial Sequence: Synthetic oligonucleotide
  Sense strand starting at position 999 of SEQ ID NO: 915292
acuguuucucagggauggu

SEQ ID NO: 1068979 - RNA, 19 nt, Artificial Sequence
  Description of Artificial Sequence: Synthetic oligonucleotide
  Antisense strand to SEQ ID NO: 1068978
accaucccugagaaacagu

SEQ ID NO: 1068980 - RNA, 19 nt, Artificial Sequence
  Description of Artificial Sequence: Synthetic oligonucleotide
  Sense strand starting at position 1113 of SEQ ID NO: 915292
gcaggaugucaugacacca

SEQ ID NO: 1068981 - RNA, 19 nt, Artificial Sequence
  Description of Artificial Sequence: Synthetic oligonucleotide
  Antisense strand to SEQ ID NO: 1068980
uggugucaugacauccugc

SEQ ID NO: 1068982 - RNA, 19 nt, Artificial Sequence
  Description of Artificial Sequence: Synthetic oligonucleotide
  Sense strand starting at position 1299 of SEQ ID NO: 915292
cauggacucuugguaaucu

SEQ ID NO: 1068983 - RNA, 19 nt, Artificial Sequence
  Description of Artificial Sequence: Synthetic oligonucleotide
  Antisense strand to SEQ ID NO: 1068982
agauuaccaagaguccaug

SEQ ID NO: 1068984 - RNA, 19 nt, Artificial Sequence
  Description of Artificial Sequence: Synthetic oligonucleotide
  Sense strand starting at position 1456 of SEQ ID NO: 915292
aggucaggguucccaugaa

SEQ ID NO: 1068985 - RNA, 19 nt, Artificial Sequence
  Description of Artificial Sequence: Synthetic oligonucleotide
  Antisense strand to SEQ ID NO: 1068984
uucaugggaacccugaccu

SEQ ID NO: 1068986 - RNA, 19 nt, Artificial Sequence
  Description of Artificial Sequence: Synthetic oligonucleotide
  Sense strand starting at position 1504 of SEQ ID NO: 915292
ccuuaucuagccugaugau

SEQ ID NO: 1068987 - RNA, 19 nt, Artificial Sequence
  Description of Artificial Sequence: Synthetic oligonucleotide
  Antisense strand to SEQ ID NO: 1068986
aucaucaggcuagauaagg

SEQ ID NO: 1068988 - RNA, 19 nt, Artificial Sequence
  Description of Artificial Sequence: Synthetic oligonucleotide
  Sense strand starting at position 1505 of SEQ ID NO: 915292
cuuaucuagccugaugauu

SEQ ID NO: 1068989 - RNA, 19 nt, Artificial Sequence
  Description of Artificial Sequence: Synthetic oligonucleotide
  Antisense strand to SEQ ID NO: 1068988
aaucaucaggcuagauaag

SEQ ID NO: 1068990 - RNA, 19 nt, Artificial Sequence
  Description of Artificial Sequence: Synthetic oligonucleotide
  Sense strand starting at position 1660 of SEQ ID NO: 915292
aaggaaagguuugcuccua

SEQ ID NO: 1068991 - RNA, 19 nt, Artificial Sequence
  Description of Artificial Sequence: Synthetic oligonucleotide
  Antisense strand to SEQ ID NO: 1068990
uaggagcaaaccuuuccuu

SEQ ID NO: 1068992 - RNA, 19 nt, Artificial Sequence
  Description of Artificial Sequence: Synthetic oligonucleotide
  Sense strand starting at position 1661 of SEQ ID NO: 915292
aggaaagguuugcuccuaa

SEQ ID NO: 1068993 - RNA, 19 nt, Artificial Sequence
  Description of Artificial Sequence: Synthetic oligonucleotide
  Antisense strand to SEQ ID NO: 1068992
uuaggagcaaaccuuuccu

SEQ ID NO: 1068994 - RNA, 19 nt, Artificial Sequence
  Description of Artificial Sequence: Synthetic oligonucleotide
  Sense strand starting at position 2019 of SEQ ID NO: 915292
uugggcuagucaucuaaau

SEQ ID NO: 1068995 - RNA, 19 nt, Artificial Sequence
  Description of Artificial Sequence: Synthetic oligonucleotide
  Antisense strand to SEQ ID NO: 1068994
auuuagaugacuagcccaa

SEQ ID NO: 1068996 - RNA, 19 nt, Artificial Sequence
  Description of Artificial Sequence: Synthetic oligonucleotide
  Sense strand starting at position 2145 of SEQ ID NO: 915292
gugcaaauccucuaaugaa

SEQ ID NO: 1068997 - RNA, 19 nt, Artificial Sequence
  Description of Artificial Sequence: Synthetic oligonucleotide
  Antisense strand to SEQ ID NO: 1068996
uucauuagaggauuugcac

SEQ ID NO: 1068998 - RNA, 19 nt, Artificial Sequence
  Description of Artificial Sequence: Synthetic oligonucleotide
  Sense strand starting at position 2170 of SEQ ID NO: 915292
augguaauguuccugauuc

SEQ ID NO: 1068999 - RNA, 19 nt, Artificial Sequence
  Description of Artificial Sequence: Synthetic oligonucleotide
  Antisense strand to SEQ ID NO: 1068998
gaaucaggaacauuaccau

SEQ ID NO: 1069000 - RNA, 19 nt, Artificial Sequence
  Description of Artificial Sequence: Synthetic oligonucleotide
  Sense strand starting at position 2413 of SEQ ID NO: 915292
ggagguguucuuuacaucu

SEQ ID NO: 1069001 - RNA, 19 nt, Artificial Sequence
  Description of Artificial Sequence: Synthetic oligonucleotide
  Antisense strand to SEQ ID NO: 1069000
agauguaaagaacaccucc

SEQ ID NO: 1069002 - RNA, 19 nt, Artificial Sequence
  Description of Artificial Sequence: Synthetic oligonucleotide
  Sense strand starting at position 2495 of SEQ ID NO: 915292
cucacauggguuuauuauu

SEQ ID NO: 1069003 - RNA, 19 nt, Artificial Sequence
  Description of Artificial Sequence: Synthetic oligonucleotide
  Antisense strand to SEQ ID NO: 1069002
aauaauaaacccaugugag

SEQ ID NO: 1069004 - RNA, 19 nt, Artificial Sequence
  Description of Artificial Sequence: Synthetic oligonucleotide
  Sense strand starting at position 2736 of SEQ ID NO: 915292
auggcuuugucauuaugag

SEQ ID NO: 1069005 - RNA, 19 nt, Artificial Sequence
  Description of Artificial Sequence: Synthetic oligonucleotide
  Antisense strand to SEQ ID NO: 1069004
cucauaaugacaaagccau

SEQ ID NO: 1069006 - RNA, 19 nt, Artificial Sequence
  Description of Artificial Sequence: Synthetic oligonucleotide
  Sense strand starting at position 2986 of SEQ ID NO: 915292
guuucuuugguuuaucaug

SEQ ID NO: 1069007 - RNA, 19 nt, Artificial Sequence
  Description of Artificial Sequence: Synthetic oligonucleotide
  Antisense strand to SEQ ID NO: 1069006
caugauaaaccaaagaaac

SEQ ID NO: 1069008 - RNA, 19 nt, Artificial Sequence
  Description of Artificial Sequence: Synthetic oligonucleotide
  Sense strand starting at position 3047 of SEQ ID NO: 915292
acaaauauuugugggagga

SEQ ID NO: 1069009 - RNA, 19 nt, Artificial Sequence
  Description of Artificial Sequence: Synthetic oligonucleotide
  Antisense strand to SEQ ID NO: 1069008
uccucccacaaauauuugu

SEQ ID NO: 1069010 - RNA, 19 nt, Artificial Sequence
  Description of Artificial Sequence: Synthetic oligonucleotide
  Sense strand starting at position 3122 of SEQ ID NO: 915292
agcauccagcuuuaucaga

SEQ ID NO: 1069011 - RNA, 19 nt, Artificial Sequence
  Description of Artificial Sequence: Synthetic oligonucleotide
  Antisense strand to SEQ ID NO: 1069010
ucugauaaagcuggaugcu

SEQ ID NO: 1069012 - RNA, 19 nt, Artificial Sequence
  Description of Artificial Sequence: Synthetic oligonucleotide
  Sense strand starting at position 3246 of SEQ ID NO: 915292
uaugcuacuuaggcagauu

SEQ ID NO: 1069013 - RNA, 19 nt, Artificial Sequence
  Description of Artificial Sequence: Synthetic oligonucleotide
  Antisense strand to SEQ ID NO: 1069012
aaucugccuaaguagcaua

SEQ ID NO: 1069014 - RNA, 19 nt, Artificial Sequence
  Description of Artificial Sequence: Synthetic oligonucleotide
  Sense strand starting at position 3279 of SEQ ID NO: 915292
augaaaccguguuuaauau

SEQ ID NO: 1069015 - RNA, 19 nt, Artificial Sequence
  Description of Artificial Sequence: Synthetic oligonucleotide
  Antisense strand to SEQ ID NO: 1069014
auauuaaacacgguuucau

SEQ ID NO: 1069016 - RNA, 19 nt, Artificial Sequence
  Description of Artificial Sequence: Synthetic oligonucleotide
  Sense strand starting at position 3289 of SEQ ID NO: 915292
guuuaauauccuggacuug

SEQ ID NO: 1069017 - RNA, 19 nt, Artificial Sequence
  Description of Artificial Sequence: Synthetic oligonucleotide
  Antisense strand to SEQ ID NO: 1069016
caaguccaggauauuaaac

SEQ ID NO: 1069018 - RNA, 19 nt, Artificial Sequence
  Description of Artificial Sequence: Synthetic oligonucleotide
  Sense strand starting at position 3554 of SEQ ID NO: 915292
gggcgaaucucccuauuau

SEQ ID NO: 1069019 - RNA, 19 nt, Artificial Sequence
  Description of Artificial Sequence: Synthetic oligonucleotide
  Antisense strand to SEQ ID NO: 1069018
auaauagggagauucgccc

SEQ ID NO: 1069020 - RNA, 19 nt, Artificial Sequence
  Description of Artificial Sequence: Synthetic oligonucleotide
  Sense strand starting at position 3555 of SEQ ID NO: 915292
ggcgaaucucccuauuaua

SEQ ID NO: 1069021 - RNA, 19 nt, Artificial Sequence
  Description of Artificial Sequence: Synthetic oligonucleotide
  Antisense strand to SEQ ID NO: 1069020
uauaauagggagauucgcc

SEQ ID NO: 1069022 - RNA, 19 nt, Artificial Sequence
  Description of Artificial Sequence: Synthetic oligonucleotide
  Sense strand starting at position 3625 of SEQ ID NO: 915292
agacgcagucaauaauaau

SEQ ID NO: 1069023 - RNA, 19 nt, Artificial Sequence
  Description of Artificial Sequence: Synthetic oligonucleotide
  Antisense strand to SEQ ID NO: 1069022
auuauuauugacugcgucu

SEQ ID NO: 1069024 - RNA, 19 nt, Artificial Sequence
  Description of Artificial Sequence: Synthetic oligonucleotide
  Sense strand starting at position 3696 of SEQ ID NO: 915292
uggugaaccuugcuccuaa

SEQ ID NO: 1069025 - RNA, 19 nt, Artificial Sequence
  Description of Artificial Sequence: Synthetic oligonucleotide
  Antisense strand to SEQ ID NO: 1069024
uuaggagcaagguucacca

SEQ ID NO: 1069026 - RNA, 19 nt, Artificial Sequence
  Description of Artificial Sequence: Synthetic oligonucleotide
  Sense strand starting at position 3697 of SEQ ID NO: 915292
ggugaaccuugcuccuaau

SEQ ID NO: 1069027 - RNA, 19 nt, Artificial Sequence
  Description of Artificial Sequence: Synthetic oligonucleotide
  Antisense strand to SEQ ID NO: 1069026
auuaggagcaagguucacc

SEQ ID NO: 1069028 - RNA, 19 nt, Artificial Sequence
  Description of Artificial Sequence: Synthetic oligonucleotide
  Sense strand starting at position 3768 of SEQ ID NO: 915292
acaacuguguuggcaagau

SEQ ID NO: 1069029 - RNA, 19 nt, Artificial Sequence
  Description of Artificial Sequence: Synthetic oligonucleotide
  Antisense strand to SEQ ID NO: 1069028
aucuugccaacacaguugu

SEQ ID NO: 1069030 - RNA, 19 nt, Artificial Sequence
  Description of Artificial Sequence: Synthetic oligonucleotide
  Sense strand starting at position 3801 of SEQ ID NO: 915292
acugucauacauugcugau

SEQ ID NO: 1069031 - RNA, 19 nt, Artificial Sequence
  Description of Artificial Sequence: Synthetic oligonucleotide
  Antisense strand to SEQ ID NO: 1069030
aucagcaauguaugacagu

SEQ ID NO: 1069032 - RNA, 19 nt, Artificial Sequence
  Description of Artificial Sequence: Synthetic oligonucleotide
  Sense strand starting at position 3856 of SEQ ID NO: 915292
uagacaauagcucgucaau

SEQ ID NO: 1069033 - RNA, 19 nt, Artificial Sequence
  Description of Artificial Sequence: Synthetic oligonucleotide
  Antisense strand to SEQ ID NO: 1069032
auugacgagcuauugucua

SEQ ID NO: 1069034 - RNA, 19 nt, Artificial Sequence
  Description of Artificial Sequence: Synthetic oligonucleotide
  Sense strand starting at position 34 of SEQ ID NO: 915293
gcuccuauacaugauuaag

SEQ ID NO: 1069035 - RNA, 19 nt, Artificial Sequence
  Description of Artificial Sequence: Synthetic oligonucleotide
  Antisense strand to SEQ ID NO: 1069034
cuuaaucauguauaggagc

SEQ ID NO: 1069036 - RNA, 19 nt, Artificial Sequence
  Description of Artificial Sequence: Synthetic oligonucleotide
  Sense strand starting at position 48 of SEQ ID NO: 915293
uuaagaacaugggauauuu

SEQ ID NO: 1069037 - RNA, 19 nt, Artificial Sequence
  Description of Artificial Sequence: Synthetic oligonucleotide
  Antisense strand to SEQ ID NO: 1069036
aaauaucccauguucuuaa

SEQ ID NO: 1069038 - RNA, 19 nt, Artificial Sequence
  Description of Artificial Sequence: Synthetic oligonucleotide
  Sense strand starting at position 272 of SEQ ID NO: 915293
ggugaugaauauccaguua

SEQ ID NO: 1069039 - RNA, 19 nt, Artificial Sequence
  Description of Artificial Sequence: Synthetic oligonucleotide
  Antisense strand to SEQ ID NO: 1069038
uaacuggauauucaucacc

SEQ ID NO: 1069040 - RNA, 19 nt, Artificial Sequence
  Description of Artificial Sequence: Synthetic oligonucleotide
  Sense strand starting at position 361 of SEQ ID NO: 915293
uuaugugucgauuaucaaa

SEQ ID NO: 1069041 - RNA, 19 nt, Artificial Sequence
  Description of Artificial Sequence: Synthetic oligonucleotide
  Antisense strand to SEQ ID NO: 1069040
uuugauaaucgacacauaa

SEQ ID NO: 1069042 - RNA, 19 nt, Artificial Sequence
  Description of Artificial Sequence: Synthetic oligonucleotide
  Sense strand starting at position 717 of SEQ ID NO: 915293
gaugucacugcuggagaga

SEQ ID NO: 1069043 - RNA, 19 nt, Artificial Sequence
  Description of Artificial Sequence: Synthetic oligonucleotide
  Antisense strand to SEQ ID NO: 1069042
ucucuccagcagugacauc

SEQ ID NO: 1069044 - RNA, 19 nt, Artificial Sequence
  Description of Artificial Sequence: Synthetic oligonucleotide
  Sense strand starting at position 853 of SEQ ID NO: 915293
ggguauuuaggcgguaaac

SEQ ID NO: 1069045 - RNA, 19 nt, Artificial Sequence
  Description of Artificial Sequence: Synthetic oligonucleotide
  Antisense strand to SEQ ID NO: 1069044
guuuaccgccuaaauaccc

SEQ ID NO: 1069046 - RNA, 19 nt, Artificial Sequence
  Description of Artificial Sequence: Synthetic oligonucleotide
  Sense strand starting at position 1040 of SEQ ID NO: 915293
gccuacuagagauaugggu

SEQ ID NO: 1069047 - RNA, 19 nt, Artificial Sequence
  Description of Artificial Sequence: Synthetic oligonucleotide
  Antisense strand to SEQ ID NO: 1069046
acccauaucucuaguaggc

SEQ ID NO: 1069048 - RNA, 19 nt, Artificial Sequence
  Description of Artificial Sequence: Synthetic oligonucleotide
  Sense strand starting at position 1044 of SEQ ID NO: 915293
acuagagauauggguguga

SEQ ID NO: 1069049 - RNA, 19 nt, Artificial Sequence
  Description of Artificial Sequence: Synthetic oligonucleotide
  Antisense strand to SEQ ID NO: 1069048
ucacacccauaucucuagu

SEQ ID NO: 1069050 - RNA, 19 nt, Artificial Sequence
  Description of Artificial Sequence: Synthetic oligonucleotide
  Sense strand starting at position 1046 of SEQ ID NO: 915293
uagagauaugggugugaua

SEQ ID NO: 1069051 - RNA, 19 nt, Artificial Sequence
  Description of Artificial Sequence: Synthetic oligonucleotide
  Antisense strand to SEQ ID NO: 1069050
uaucacacccauaucucua

SEQ ID NO: 1069052 - RNA, 19 nt, Artificial Sequence
  Description of Artificial Sequence: Synthetic oligonucleotide
  Sense strand starting at position 1048 of SEQ ID NO: 915293
gagauaugggugugauaag

SEQ ID NO: 1069053 - RNA, 19 nt, Artificial Sequence
  Description of Artificial Sequence: Synthetic oligonucleotide
  Antisense strand to SEQ ID NO: 1069052
cuuaucacacccauaucuc

SEQ ID NO: 1069054 - RNA, 19 nt, Artificial Sequence
  Description of Artificial Sequence: Synthetic oligonucleotide
  Sense strand starting at position 1162 of SEQ ID NO: 915293
aggcaucaucaauaauagu

SEQ ID NO: 1069055 - RNA, 19 nt, Artificial Sequence
  Description of Artificial Sequence: Synthetic oligonucleotide
  Antisense strand to SEQ ID NO: 1069054
acuauuauugaugaugccu

SEQ ID NO: 1069056 - RNA, 19 nt, Artificial Sequence
  Description of Artificial Sequence: Synthetic oligonucleotide
  Sense strand starting at position 1257 of SEQ ID NO: 915293
agugcaccugaaugagaaa

SEQ ID NO: 1069057 - RNA, 19 nt, Artificial Sequence
  Description of Artificial Sequence: Synthetic oligonucleotide
  Antisense strand to SEQ ID NO: 1069056
uuucucauucaggugcacu

SEQ ID NO: 1069058 - RNA, 19 nt, Artificial Sequence
  Description of Artificial Sequence: Synthetic oligonucleotide
  Sense strand starting at position 1330 of SEQ ID NO: 915293
ccgauuuaauccucgcaaa

SEQ ID NO: 1069059 - RNA, 19 nt, Artificial Sequence
  Description of Artificial Sequence: Synthetic oligonucleotide
  Antisense strand to SEQ ID NO: 1069058
uuugcgaggauuaaaucgg

SEQ ID NO: 1069060 - RNA, 19 nt, Artificial Sequence
  Description of Artificial Sequence: Synthetic oligonucleotide
  Sense strand starting at position 1708 of SEQ ID NO: 915293
ugcccaucuggaggagaau

SEQ ID NO: 1069061 - RNA, 19 nt, Artificial Sequence
  Description of Artificial Sequence: Synthetic oligonucleotide
  Antisense strand to SEQ ID NO: 1069060
auucuccuccagaugggca

SEQ ID NO: 1069062 - RNA, 19 nt, Artificial Sequence
  Description of Artificial Sequence: Synthetic oligonucleotide
  Sense strand starting at position 1745 of SEQ ID NO: 915293
auggaagaguugucaggga

SEQ ID NO: 1069063 - RNA, 19 nt, Artificial Sequence
  Description of Artificial Sequence: Synthetic oligonucleotide
  Antisense strand to SEQ ID NO: 1069062
ucccugacaacucuuccau

SEQ ID NO: 1069064 - RNA, 19 nt, Artificial Sequence
  Description of Artificial Sequence: Synthetic oligonucleotide
  Sense strand starting at position 1750 of SEQ ID NO: 915293
agaguugucagggaaggca

SEQ ID NO: 1069065 - RNA, 19 nt, Artificial Sequence
  Description of Artificial Sequence: Synthetic oligonucleotide
  Antisense strand to SEQ ID NO: 1069064
ugccuucccugacaacucu

SEQ ID NO: 1069066 - RNA, 19 nt, Artificial Sequence
  Description of Artificial Sequence: Synthetic oligonucleotide
  Sense strand starting at position 2168 of SEQ ID NO: 915293
gagguuugcauggagcuaa

SEQ ID NO: 1069067 - RNA, 19 nt, Artificial Sequence
  Description of Artificial Sequence: Synthetic oligonucleotide
  Antisense strand to SEQ ID NO: 1069066
uuagcuccaugcaaaccuc

SEQ ID NO: 1069068 - RNA, 19 nt, Artificial Sequence
  Description of Artificial Sequence: Synthetic oligonucleotide
  Sense strand starting at position 2284 of SEQ ID NO: 915293
ucacauauccagugagaua

SEQ ID NO: 1069069 - RNA, 19 nt, Artificial Sequence
  Description of Artificial Sequence: Synthetic oligonucleotide
  Antisense strand to SEQ ID NO: 1069068
uaucucacuggauauguga

SEQ ID NO: 1069070 - RNA, 19 nt, Artificial Sequence
  Description of Artificial Sequence: Synthetic oligonucleotide
  Sense strand starting at position 2481 of SEQ ID NO: 915293
cucacauuauggguaagaa

SEQ ID NO: 1069071 - RNA, 19 nt, Artificial Sequence
  Description of Artificial Sequence: Synthetic oligonucleotide
  Antisense strand to SEQ ID NO: 1069070
uucuuacccauaaugugag

SEQ ID NO: 1069072 - RNA, 19 nt, Artificial Sequence
  Description of Artificial Sequence: Synthetic oligonucleotide
  Sense strand starting at position 2519 of SEQ ID NO: 915293
aaagauauauagucuguga

SEQ ID NO: 1069073 - RNA, 19 nt, Artificial Sequence
  Description of Artificial Sequence: Synthetic oligonucleotide
  Antisense strand to SEQ ID NO: 1069072
ucacagacuauauaucuuu

SEQ ID NO: 1069074 - RNA, 19 nt, Artificial Sequence
  Description of Artificial Sequence: Synthetic oligonucleotide
  Sense strand starting at position 2522 of SEQ ID NO: 915293
gauauauagucugugacca

SEQ ID NO: 1069075 - RNA, 19 nt, Artificial Sequence
  Description of Artificial Sequence: Synthetic oligonucleotide
  Antisense strand to SEQ ID NO: 1069074
uggucacagacuauauauc

SEQ ID NO: 1069076 - RNA, 19 nt, Artificial Sequence
  Description of Artificial Sequence: Synthetic oligonucleotide
  Sense strand starting at position 2523 of SEQ ID NO: 915293
auauauagucugugaccaa

SEQ ID NO: 1069077 - RNA, 19 nt, Artificial Sequence
  Description of Artificial Sequence: Synthetic oligonucleotide
  Antisense strand to SEQ ID NO: 1069076
uuggucacagacuauauau

SEQ ID NO: 1069078 - RNA, 19 nt, Artificial Sequence
  Description of Artificial Sequence: Synthetic oligonucleotide
  Sense strand starting at position 2565 of SEQ ID NO: 915293
ugauucucagucgagaacu

SEQ ID NO: 1069079 - RNA, 19 nt, Artificial Sequence
  Description of Artificial Sequence: Synthetic oligonucleotide
  Antisense strand to SEQ ID NO: 1069078
aguucucgacugagaauca

SEQ ID NO: 1069080 - RNA, 19 nt, Artificial Sequence
  Description of Artificial Sequence: Synthetic oligonucleotide
  Sense strand starting at position 2655 of SEQ ID NO: 915293
agaauuauuccaugacuug

SEQ ID NO: 1069081 - RNA, 19 nt, Artificial Sequence
  Description of Artificial Sequence: Synthetic oligonucleotide
  Antisense strand to SEQ ID NO: 1069080
caagucauggaauaauucu

SEQ ID NO: 1069082 - RNA, 19 nt, Artificial Sequence
  Description of Artificial Sequence: Synthetic oligonucleotide
  Sense strand starting at position 2666 of SEQ ID NO: 915293
augacuugaucuuuagcaa

SEQ ID NO: 1069083 - RNA, 19 nt, Artificial Sequence
  Description of Artificial Sequence: Synthetic oligonucleotide
  Antisense strand to SEQ ID NO: 1069082
uugcuaaagaucaagucau

SEQ ID NO: 1069084 - RNA, 19 nt, Artificial Sequence
  Description of Artificial Sequence: Synthetic oligonucleotide
  Sense strand starting at position 2667 of SEQ ID NO: 915293
ugacuugaucuuuagcaaa

SEQ ID NO: 1069085 - RNA, 19 nt, Artificial Sequence
  Description of Artificial Sequence: Synthetic oligonucleotide
  Antisense strand to SEQ ID NO: 1069084
uuugcuaaagaucaaguca

SEQ ID NO: 1069086 - RNA, 19 nt, Artificial Sequence
  Description of Artificial Sequence: Synthetic oligonucleotide
  Sense strand starting at position 2725 of SEQ ID NO: 915293
agaugucuaucuuuaugaa

SEQ ID NO: 1069087 - RNA, 19 nt, Artificial Sequence
  Description of Artificial Sequence: Synthetic oligonucleotide
  Antisense strand to SEQ ID NO: 1069086
uucauaaagauagacaucu

SEQ ID NO: 1069088 - RNA, 19 nt, Artificial Sequence
  Description of Artificial Sequence: Synthetic oligonucleotide
  Sense strand starting at position 2897 of SEQ ID NO: 915293
ucuuuaguuguaggaauga

SEQ ID NO: 1069089 - RNA, 19 nt, Artificial Sequence
  Description of Artificial Sequence: Synthetic oligonucleotide
  Antisense strand to SEQ ID NO: 1069088
ucauuccuacaacuaaaga

SEQ ID NO: 1069090 - RNA, 19 nt, Artificial Sequence
  Description of Artificial Sequence: Synthetic oligonucleotide
  Sense strand starting at position 2926 of SEQ ID NO: 915293
gaaauauauugagucugac

SEQ ID NO: 1069091 - RNA, 19 nt, Artificial Sequence
  Description of Artificial Sequence: Synthetic oligonucleotide
  Antisense strand to SEQ ID NO: 1069090
gucagacucaauauauuuc

SEQ ID NO: 1069092 - RNA, 19 nt, Artificial Sequence
  Description of Artificial Sequence: Synthetic oligonucleotide
  Sense strand starting at position 3181 of SEQ ID NO: 915293
uuuagaagaggguguugaa

SEQ ID NO: 1069093 - RNA, 19 nt, Artificial Sequence
  Description of Artificial Sequence: Synthetic oligonucleotide
  Antisense strand to SEQ ID NO: 1069092
uucaacacccucuucuaaa

SEQ ID NO: 1069094 - RNA, 19 nt, Artificial Sequence
  Description of Artificial Sequence: Synthetic oligonucleotide
  Sense strand starting at position 3218 of SEQ ID NO: 915293
agaacauucccaggcuuau

SEQ ID NO: 1069095 - RNA, 19 nt, Artificial Sequence
  Description of Artificial Sequence: Synthetic oligonucleotide
  Antisense strand to SEQ ID NO: 1069094
auaagccugggaauguucu

SEQ ID NO: 1069096 - RNA, 19 nt, Artificial Sequence
  Description of Artificial Sequence: Synthetic oligonucleotide
  Sense strand starting at position 3224 of SEQ ID NO: 915293
uucccaggcuuaucaagaa

SEQ ID NO: 1069097 - RNA, 19 nt, Artificial Sequence
  Description of Artificial Sequence: Synthetic oligonucleotide
  Antisense strand to SEQ ID NO: 1069096
uucuugauaagccugggaa

SEQ ID NO: 1069098 - RNA, 19 nt, Artificial Sequence
  Description of Artificial Sequence: Synthetic oligonucleotide
  Sense strand starting at position 3377 of SEQ ID NO: 915293
gcacuagaugcccaaacuu

SEQ ID NO: 1069099 - RNA, 19 nt, Artificial Sequence
  Description of Artificial Sequence: Synthetic oligonucleotide
  Antisense strand to SEQ ID NO: 1069098
aaguuugggcaucuagugc

SEQ ID NO: 1069100 - RNA, 19 nt, Artificial Sequence
  Description of Artificial Sequence: Synthetic oligonucleotide
  Sense strand starting at position 3402 of SEQ ID NO: 915293
uugacuaucuguccacaua

SEQ ID NO: 1069101 - RNA, 19 nt, Artificial Sequence
  Description of Artificial Sequence: Synthetic oligonucleotide
  Antisense strand to SEQ ID NO: 1069100
uauguggacagauagucaa

SEQ ID NO: 1069102 - RNA, 19 nt, Artificial Sequence
  Description of Artificial Sequence: Synthetic oligonucleotide
  Sense strand starting at position 3516 of SEQ ID NO: 915293
gcagacauucuagguuaaa

SEQ ID NO: 1069103 - RNA, 19 nt, Artificial Sequence
  Description of Artificial Sequence: Synthetic oligonucleotide
  Antisense strand to SEQ ID NO: 1069102
uuuaaccuagaaugucugc

SEQ ID NO: 1069104 - RNA, 19 nt, Artificial Sequence
  Description of Artificial Sequence: Synthetic oligonucleotide
  Sense strand starting at position 3632 of SEQ ID NO: 915293
uccaguuaagauuguagaa

SEQ ID NO: 1069105 - RNA, 19 nt, Artificial Sequence
  Description of Artificial Sequence: Synthetic oligonucleotide
  Antisense strand to SEQ ID NO: 1069104
uucuacaaucuuaacugga

SEQ ID NO: 1069106 - RNA, 19 nt, Artificial Sequence
  Description of Artificial Sequence: Synthetic oligonucleotide
  Sense strand starting at position 3843 of SEQ ID NO: 915293
agaccugugccugaucacu

SEQ ID NO: 1069107 - RNA, 19 nt, Artificial Sequence
  Description of Artificial Sequence: Synthetic oligonucleotide
  Antisense strand to SEQ ID NO: 1069106
agugaucaggcacaggucu

SEQ ID NO: 1069108 - RNA, 19 nt, Artificial Sequence
  Description of Artificial Sequence: Synthetic oligonucleotide
  Sense strand starting at position 3849 of SEQ ID NO: 915293
gugccugaucacuagauaa

SEQ ID NO: 1069109 - RNA, 19 nt, Artificial Sequence
  Description of Artificial Sequence: Synthetic oligonucleotide
  Antisense strand to SEQ ID NO: 1069108
uuaucuagugaucaggcac

SEQ ID NO: 1069110 - RNA, 19 nt, Artificial Sequence
  Description of Artificial Sequence: Synthetic oligonucleotide
  Sense strand starting at position 3851 of SEQ ID NO: 915293
gccugaucacuagauaacu

SEQ ID NO: 1069111 - RNA, 19 nt, Artificial Sequence
  Description of Artificial Sequence: Synthetic oligonucleotide
  Antisense strand to SEQ ID NO: 1069110
aguuaucuagugaucaggc

SEQ ID NO: 1069112 - RNA, 19 nt, Artificial Sequence
  Description of Artificial Sequence: Synthetic oligonucleotide
  Sense strand starting at position 3956 of SEQ ID NO: 915293
cacgacauacgucaugaaa

SEQ ID NO: 1069113 - RNA, 19 nt, Artificial Sequence
  Description of Artificial Sequence: Synthetic oligonucleotide
  Antisense strand to SEQ ID NO: 1069112
uuucaugacguaugucgug

SEQ ID NO: 1069114 - RNA, 19 nt, Artificial Sequence
  Description of Artificial Sequence: Synthetic oligonucleotide
  Sense strand starting at position 132 of SEQ ID NO: 915294
ugauaaugcucuucgaaua

SEQ ID NO: 1069115 - RNA, 19 nt, Artificial Sequence
  Description of Artificial Sequence: Synthetic oligonucleotide
  Antisense strand to SEQ ID NO: 1069114
uauucgaagagcauuauca

SEQ ID NO: 1069116 - RNA, 19 nt, Artificial Sequence
  Description of Artificial Sequence: Synthetic oligonucleotide
  Sense strand starting at position 159 of SEQ ID NO: 915294
uuugaucuuuaaccugagu

SEQ ID NO: 1069117 - RNA, 19 nt, Artificial Sequence
  Description of Artificial Sequence: Synthetic oligonucleotide
  Antisense strand to SEQ ID NO: 1069116
acucagguuaaagaucaaa

SEQ ID NO: 1069118 - RNA, 19 nt, Artificial Sequence
  Description of Artificial Sequence: Synthetic oligonucleotide
  Sense strand starting at position 259 of SEQ ID NO: 915294
aagaauguuguguaaaguu

SEQ ID NO: 1069119 - RNA, 19 nt, Artificial Sequence
  Description of Artificial Sequence: Synthetic oligonucleotide
  Antisense strand to SEQ ID NO: 1069118
aacuuuacacaacauucuu

SEQ ID NO: 1069120 - RNA, 19 nt, Artificial Sequence
  Description of Artificial Sequence: Synthetic oligonucleotide
  Sense strand starting at position 477 of SEQ ID NO: 915294
guauacuaaguguauagua

SEQ ID NO: 1069121 - RNA, 19 nt, Artificial Sequence
  Description of Artificial Sequence: Synthetic oligonucleotide
  Antisense strand to SEQ ID NO: 1069120
uacuauacacuuaguauac

SEQ ID NO: 1069122 - RNA, 19 nt, Artificial Sequence
  Description of Artificial Sequence: Synthetic oligonucleotide
  Sense strand starting at position 531 of SEQ ID NO: 915294
agucucuuaugagaauuua

SEQ ID NO: 1069123 - RNA, 19 nt, Artificial Sequence
  Description of Artificial Sequence: Synthetic oligonucleotide
  Antisense strand to SEQ ID NO: 1069122
uaaauucucauaagagacu

SEQ ID NO: 1069124 - RNA, 19 nt, Artificial Sequence
  Description of Artificial Sequence: Synthetic oligonucleotide
  Sense strand starting at position 612 of SEQ ID NO: 915294
gugggaguauaucuauaag

SEQ ID NO: 1069125 - RNA, 19 nt, Artificial Sequence
  Description of Artificial Sequence: Synthetic oligonucleotide
  Antisense strand to SEQ ID NO: 1069124
cuuauagauauacucccac

SEQ ID NO: 1069126 - RNA, 19 nt, Artificial Sequence
  Description of Artificial Sequence: Synthetic oligonucleotide
  Sense strand starting at position 642 of SEQ ID NO: 915294
caagcagaauugcuggaua

SEQ ID NO: 1069127 - RNA, 19 nt, Artificial Sequence
  Description of Artificial Sequence: Synthetic oligonucleotide
  Antisense strand to SEQ ID NO: 1069126
uauccagcaauucugcuug

SEQ ID NO: 1069128 - RNA, 19 nt, Artificial Sequence
  Description of Artificial Sequence: Synthetic oligonucleotide
  Sense strand starting at position 644 of SEQ ID NO: 915294
agcagaauugcuggauaaa

SEQ ID NO: 1069129 - RNA, 19 nt, Artificial Sequence
  Description of Artificial Sequence: Synthetic oligonucleotide
  Antisense strand to SEQ ID NO: 1069128
uuuauccagcaauucugcu

SEQ ID NO: 1069130 - RNA, 19 nt, Artificial Sequence
  Description of Artificial Sequence: Synthetic oligonucleotide
  Sense strand starting at position 694 of SEQ ID NO: 915294
ugcugaauugcccaccaga

SEQ ID NO: 1069131 - RNA, 19 nt, Artificial Sequence
  Description of Artificial Sequence: Synthetic oligonucleotide
  Antisense strand to SEQ ID NO: 1069130
ucuggugggcaauucagca

SEQ ID NO: 1069132 - RNA, 19 nt, Artificial Sequence
  Description of Artificial Sequence: Synthetic oligonucleotide
  Sense strand starting at position 732 of SEQ ID NO: 915294
ugcuaucaaugcuuggaaa

SEQ ID NO: 1069133 - RNA, 19 nt, Artificial Sequence
  Description of Artificial Sequence: Synthetic oligonucleotide
  Antisense strand to SEQ ID NO: 1069132
uuuccaagcauugauagca

SEQ ID NO: 1069134 - RNA, 19 nt, Artificial Sequence
  Description of Artificial Sequence: Synthetic oligonucleotide
  Sense strand starting at position 861 of SEQ ID NO: 915294
cuuaguaugagugagauug

SEQ ID NO: 1069135 - RNA, 19 nt, Artificial Sequence
  Description of Artificial Sequence: Synthetic oligonucleotide
  Antisense strand to SEQ ID NO: 1069134
caaucucacucauacuaag

SEQ ID NO: 1069136 - RNA, 19 nt, Artificial Sequence
  Description of Artificial Sequence: Synthetic oligonucleotide
  Sense strand starting at position 869 of SEQ ID NO: 915294
gagugagauugagcacuuu

SEQ ID NO: 1069137 - RNA, 19 nt, Artificial Sequence
  Description of Artificial Sequence: Synthetic oligonucleotide
  Antisense strand to SEQ ID NO: 1069136
aaagugcucaaucucacuc

SEQ ID NO: 1069138 - RNA, 19 nt, Artificial Sequence
  Description of Artificial Sequence: Synthetic oligonucleotide
  Sense strand starting at position 1022 of SEQ ID NO: 915294
auuuguuugaugugaguug

SEQ ID NO: 1069139 - RNA, 19 nt, Artificial Sequence
  Description of Artificial Sequence: Synthetic oligonucleotide
  Antisense strand to SEQ ID NO: 1069138
caacucacaucaaacaaau

SEQ ID NO: 1069140 - RNA, 19 nt, Artificial Sequence
  Description of Artificial Sequence: Synthetic oligonucleotide
  Sense strand starting at position 1027 of SEQ ID NO: 915294
uuugaugugaguugcauuu

SEQ ID NO: 1069141 - RNA, 19 nt, Artificial Sequence
  Description of Artificial Sequence: Synthetic oligonucleotide
  Antisense strand to SEQ ID NO: 1069140
aaaugcaacucacaucaaa

SEQ ID NO: 1069142 - RNA, 19 nt, Artificial Sequence
  Description of Artificial Sequence: Synthetic oligonucleotide
  Sense strand starting at position 1079 of SEQ ID NO: 915294
augugucaaauuugucagu

SEQ ID NO: 1069143 - RNA, 19 nt, Artificial Sequence
  Description of Artificial Sequence: Synthetic oligonucleotide
  Antisense strand to SEQ ID NO: 1069142
acugacaaauuugacacau

SEQ ID NO: 1069144 - RNA, 19 nt, Artificial Sequence
  Description of Artificial Sequence: Synthetic oligonucleotide
  Sense strand starting at position 1287 of SEQ ID NO: 915294
guagaaagcauaggaauca

SEQ ID NO: 1069145 - RNA, 19 nt, Artificial Sequence
  Description of Artificial Sequence: Synthetic oligonucleotide
  Antisense strand to SEQ ID NO: 1069144
ugauuccuaugcuuucuac

SEQ ID NO: 1069146 - RNA, 19 nt, Artificial Sequence
  Description of Artificial Sequence: Synthetic oligonucleotide
  Sense strand starting at position 1371 of SEQ ID NO: 915294
guguuuguugaugaaagac

SEQ ID NO: 1069147 - RNA, 19 nt, Artificial Sequence
  Description of Artificial Sequence: Synthetic oligonucleotide
  Antisense strand to SEQ ID NO: 1069146
gucuuucaucaacaaacac

SEQ ID NO: 1069148 - RNA, 19 nt, Artificial Sequence
  Description of Artificial Sequence: Synthetic oligonucleotide
  Sense strand starting at position 1401 of SEQ ID NO: 915294
auagaaaucuggcuaggau

SEQ ID NO: 1069149 - RNA, 19 nt, Artificial Sequence
  Description of Artificial Sequence: Synthetic oligonucleotide
  Antisense strand to SEQ ID NO: 1069148
auccuagccagauuucuau

SEQ ID NO: 1069150 - RNA, 19 nt, Artificial Sequence
  Description of Artificial Sequence: Synthetic oligonucleotide
  Sense strand starting at position 1404 of SEQ ID NO: 915294
gaaaucuggcuaggauaua

SEQ ID NO: 1069151 - RNA, 19 nt, Artificial Sequence
  Description of Artificial Sequence: Synthetic oligonucleotide
  Antisense strand to SEQ ID NO: 1069150
uauauccuagccagauuuc

SEQ ID NO: 1069152 - RNA, 19 nt, Artificial Sequence
  Description of Artificial Sequence: Synthetic oligonucleotide
  Sense strand starting at position 1464 of SEQ ID NO: 915294
ggaaguggguaaguugaua

SEQ ID NO: 1069153 - RNA, 19 nt, Artificial Sequence
  Description of Artificial Sequence: Synthetic oligonucleotide
  Antisense strand to SEQ ID NO: 1069152
uaucaacuuacccacuucc

SEQ ID NO: 1069154 - RNA, 19 nt, Artificial Sequence
  Description of Artificial Sequence: Synthetic oligonucleotide
  Sense strand starting at position 1486 of SEQ ID NO: 915294
aggagggucugaguggaua

SEQ ID NO: 1069155 - RNA, 19 nt, Artificial Sequence
  Description of Artificial Sequence: Synthetic oligonucleotide
  Antisense strand to SEQ ID NO: 1069154
uauccacucagacccuccu

SEQ ID NO: 1069156 - RNA, 19 nt, Artificial Sequence
  Description of Artificial Sequence: Synthetic oligonucleotide
  Sense strand starting at position 1504 of SEQ ID NO: 915294
aguauaaagccuuaaggua

SEQ ID NO: 1069157 - RNA, 19 nt, Artificial Sequence
  Description of Artificial Sequence: Synthetic oligonucleotide
  Antisense strand to SEQ ID NO: 1069156
uaccuuaaggcuuuauacu

SEQ ID NO: 1069158 - RNA, 19 nt, Artificial Sequence
  Description of Artificial Sequence: Synthetic oligonucleotide
  Sense strand starting at position 1527 of SEQ ID NO: 915294
aguguuuaaugaucaggua

SEQ ID NO: 1069159 - RNA, 19 nt, Artificial Sequence
  Description of Artificial Sequence: Synthetic oligonucleotide
  Antisense strand to SEQ ID NO: 1069158
uaccugaucauuaaacacu

SEQ ID NO: 1069160 - RNA, 19 nt, Artificial Sequence
  Description of Artificial Sequence: Synthetic oligonucleotide
  Sense strand starting at position 1528 of SEQ ID NO: 915294
guguuuaaugaucagguag

SEQ ID NO: 1069161 - RNA, 19 nt, Artificial Sequence
  Description of Artificial Sequence: Synthetic oligonucleotide
  Antisense strand to SEQ ID NO: 1069160
cuaccugaucauuaaacac

SEQ ID NO: 1069162 - RNA, 19 nt, Artificial Sequence
  Description of Artificial Sequence: Synthetic oligonucleotide
  Sense strand starting at position 1713 of SEQ ID NO: 915294
cccugcaaucaguaguaca

SEQ ID NO: 1069163 - RNA, 19 nt, Artificial Sequence
  Description of Artificial Sequence: Synthetic oligonucleotide
  Antisense strand to SEQ ID NO: 1069162
uguacuacugauugcaggg

SEQ ID NO: 1069164 - RNA, 19 nt, Artificial Sequence
  Description of Artificial Sequence: Synthetic oligonucleotide
  Sense strand starting at position 1750 of SEQ ID NO: 915294
uguuauauaugaucucucu

SEQ ID NO: 1069165 - RNA, 19 nt, Artificial Sequence
  Description of Artificial Sequence: Synthetic oligonucleotide
  Antisense strand to SEQ ID NO: 1069164
agagagaucauauauaaca

SEQ ID NO: 1069166 - RNA, 19 nt, Artificial Sequence
  Description of Artificial Sequence: Synthetic oligonucleotide
  Sense strand starting at position 1813 of SEQ ID NO: 915294
ggagcaugugagugagacu

SEQ ID NO: 1069167 - RNA, 19 nt, Artificial Sequence
  Description of Artificial Sequence: Synthetic oligonucleotide
  Antisense strand to SEQ ID NO: 1069166
agucucacucacaugcucc

SEQ ID NO: 1069168 - RNA, 19 nt, Artificial Sequence
  Description of Artificial Sequence: Synthetic oligonucleotide
  Sense strand starting at position 1814 of SEQ ID NO: 915294
gagcaugugagugagacuu

SEQ ID NO: 1069169 - RNA, 19 nt, Artificial Sequence
  Description of Artificial Sequence: Synthetic oligonucleotide
  Antisense strand to SEQ ID NO: 1069168
aagucucacucacaugcuc

SEQ ID NO: 1069170 - RNA, 19 nt, Artificial Sequence
  Description of Artificial Sequence: Synthetic oligonucleotide
  Sense strand starting at position 1986 of SEQ ID NO: 915294
ugcugagugagguauugga

SEQ ID NO: 1069171 - RNA, 19 nt, Artificial Sequence
  Description of Artificial Sequence: Synthetic oligonucleotide
  Antisense strand to SEQ ID NO: 1069170
uccaauaccucacucagca

SEQ ID NO: 1069172 - RNA, 19 nt, Artificial Sequence
  Description of Artificial Sequence: Synthetic oligonucleotide
  Sense strand starting at position 2015 of SEQ ID NO: 915294
acuagcuugcuuuauaaag

SEQ ID NO: 1069173 - RNA, 19 nt, Artificial Sequence
  Description of Artificial Sequence: Synthetic oligonucleotide
  Antisense strand to SEQ ID NO: 1069172
cuuuauaaagcaagcuagu

SEQ ID NO: 1069174 - RNA, 19 nt, Artificial Sequence
  Description of Artificial Sequence: Synthetic oligonucleotide
  Sense strand starting at position 2024 of SEQ ID NO: 915294
cuuuauaaagcuuagaugu

SEQ ID NO: 1069175 - RNA, 19 nt, Artificial Sequence
  Description of Artificial Sequence: Synthetic oligonucleotide
  Antisense strand to SEQ ID NO: 1069174
acaucuaagcuuuauaaag

SEQ ID NO: 1069176 - RNA, 19 nt, Artificial Sequence
  Description of Artificial Sequence: Synthetic oligonucleotide
  Sense strand starting at position 3021 of SEQ ID NO: 915294
guuggaauuucuuagaaac

SEQ ID NO: 1069177 - RNA, 19 nt, Artificial Sequence
  Description of Artificial Sequence: Synthetic oligonucleotide
  Antisense strand to SEQ ID NO: 1069176
guuucuaagaaauuccaac

SEQ ID NO: 1069178 - RNA, 19 nt, Artificial Sequence
  Description of Artificial Sequence: Synthetic oligonucleotide
  Sense strand starting at position 3023 of SEQ ID NO: 915294
uggaauuucuuagaaacuu

SEQ ID NO: 1069179 - RNA, 19 nt, Artificial Sequence
  Description of Artificial Sequence: Synthetic oligonucleotide
  Antisense strand to SEQ ID NO: 1069178
aaguuucuaagaaauucca

SEQ ID NO: 1069180 - RNA, 19 nt, Artificial Sequence
  Description of Artificial Sequence: Synthetic oligonucleotide
  Sense strand starting at position 3117 of SEQ ID NO: 915294
ugaggaagcucuuuggaac

SEQ ID NO: 1069181 - RNA, 19 nt, Artificial Sequence
  Description of Artificial Sequence: Synthetic oligonucleotide
  Antisense strand to SEQ ID NO: 1069180
guuccaaagagcuuccuca

SEQ ID NO: 1069182 - RNA, 19 nt, Artificial Sequence
  Description of Artificial Sequence: Synthetic oligonucleotide
  Sense strand starting at position 3118 of SEQ ID NO: 915294
gaggaagcucuuuggaacu

SEQ ID NO: 1069183 - RNA, 19 nt, Artificial Sequence
  Description of Artificial Sequence: Synthetic oligonucleotide
  Antisense strand to SEQ ID NO: 1069182
aguuccaaagagcuuccuc

SEQ ID NO: 1069184 - RNA, 19 nt, Artificial Sequence
  Description of Artificial Sequence: Synthetic oligonucleotide
  Sense strand starting at position 3741 of SEQ ID NO: 915294
gaggaauuccaguggccua

SEQ ID NO: 1069185 - RNA, 19 nt, Artificial Sequence
  Description of Artificial Sequence: Synthetic oligonucleotide
  Antisense strand to SEQ ID NO: 1069184
uaggccacuggaauuccuc

SEQ ID NO: 1069186 - RNA, 19 nt, Artificial Sequence
  Description of Artificial Sequence: Synthetic oligonucleotide
  Sense strand starting at position 3742 of SEQ ID NO: 915294
aggaauuccaguggccuau

SEQ ID NO: 1069187 - RNA, 19 nt, Artificial Sequence
  Description of Artificial Sequence: Synthetic oligonucleotide
  Antisense strand to SEQ ID NO: 1069186
auaggccacuggaauuccu

SEQ ID NO: 1069188 - RNA, 19 nt, Artificial Sequence
  Description of Artificial Sequence: Synthetic oligonucleotide
  Sense strand starting at position 3763 of SEQ ID NO: 915294
aggaacuacuugcuagaua

SEQ ID NO: 1069189 - RNA, 19 nt, Artificial Sequence
  Description of Artificial Sequence: Synthetic oligonucleotide
  Antisense strand to SEQ ID NO: 1069188
uaucuagcaaguaguuccu

SEQ ID NO: 1069190 - RNA, 19 nt, Artificial Sequence
  Description of Artificial Sequence: Synthetic oligonucleotide
  Sense strand starting at position 3810 of SEQ ID NO: 915294
gcuguuauccaauaauagc

SEQ ID NO: 1069191 - RNA, 19 nt, Artificial Sequence
  Description of Artificial Sequence: Synthetic oligonucleotide
  Antisense strand to SEQ ID NO: 1069190
gcuauuauuggauaacagc

SEQ ID NO: 1069192 - RNA, 19 nt, Artificial Sequence
  Description of Artificial Sequence: Synthetic oligonucleotide
  Sense strand starting at position 3859 of SEQ ID NO: 915294
acagcucucggcuaauaau

SEQ ID NO: 1069193 - RNA, 19 nt, Artificial Sequence
  Description of Artificial Sequence: Synthetic oligonucleotide
  Antisense strand to SEQ ID NO: 1069192
auuauuagccgagagcugu

SEQ ID NO: 1069194 - RNA, 19 nt, Artificial Sequence
  Description of Artificial Sequence: Synthetic oligonucleotide
  Sense strand starting at position 197 of SEQ ID NO: 915295
acagcaguuccucaugcaa

SEQ ID NO: 1069195 - RNA, 19 nt, Artificial Sequence
  Description of Artificial Sequence: Synthetic oligonucleotide
  Antisense strand to SEQ ID NO: 1069194
uugcaugaggaacugcugu

SEQ ID NO: 1069196 - RNA, 19 nt, Artificial Sequence
  Description of Artificial Sequence: Synthetic oligonucleotide
  Sense strand starting at position 242 of SEQ ID NO: 915295
uuacaucacugguuggaau

SEQ ID NO: 1069197 - RNA, 19 nt, Artificial Sequence
  Description of Artificial Sequence: Synthetic oligonucleotide
  Antisense strand to SEQ ID NO: 1069196
auuccaaccagugauguaa

SEQ ID NO: 1069198 - RNA, 19 nt, Artificial Sequence
  Description of Artificial Sequence: Synthetic oligonucleotide
  Sense strand starting at position 243 of SEQ ID NO: 915295
uacaucacugguuggaaua

SEQ ID NO: 1069199 - RNA, 19 nt, Artificial Sequence
  Description of Artificial Sequence: Synthetic oligonucleotide
  Antisense strand to SEQ ID NO: 1069198
uauuccaaccagugaugua

SEQ ID NO: 1069200 - RNA, 19 nt, Artificial Sequence
  Description of Artificial Sequence: Synthetic oligonucleotide
  Sense strand starting at position 419 of SEQ ID NO: 915295
aggccuaaacucuagugau

SEQ ID NO: 1069201 - RNA, 19 nt, Artificial Sequence
  Description of Artificial Sequence: Synthetic oligonucleotide
  Antisense strand to SEQ ID NO: 1069200
aucacuagaguuuaggccu

SEQ ID NO: 1069202 - RNA, 19 nt, Artificial Sequence
  Description of Artificial Sequence: Synthetic oligonucleotide
  Sense strand starting at position 520 of SEQ ID NO: 915295
uccuacaaucagugugaac

SEQ ID NO: 1069203 - RNA, 19 nt, Artificial Sequence
  Description of Artificial Sequence: Synthetic oligonucleotide
  Antisense strand to SEQ ID NO: 1069202
guucacacugauuguagga

SEQ ID NO: 1069204 - RNA, 19 nt, Artificial Sequence
  Description of Artificial Sequence: Synthetic oligonucleotide
  Sense strand starting at position 522 of SEQ ID NO: 915295
cuacaaucagugugaacau

SEQ ID NO: 1069205 - RNA, 19 nt, Artificial Sequence
  Description of Artificial Sequence: Synthetic oligonucleotide
  Antisense strand to SEQ ID NO: 1069204
auguucacacugauuguag

SEQ ID NO: 1069206 - RNA, 19 nt, Artificial Sequence
  Description of Artificial Sequence: Synthetic oligonucleotide
  Sense strand starting at position 637 of SEQ ID NO: 915295
cauuguaaugcagggacaa

SEQ ID NO: 1069207 - RNA, 19 nt, Artificial Sequence
  Description of Artificial Sequence: Synthetic oligonucleotide
  Antisense strand to SEQ ID NO: 1069206
uugucccugcauuacaaug

SEQ ID NO: 1069208 - RNA, 19 nt, Artificial Sequence
  Description of Artificial Sequence: Synthetic oligonucleotide
  Sense strand starting at position 658 of SEQ ID NO: 915295
ccaacuauggcagagaguu

SEQ ID NO: 1069209 - RNA, 19 nt, Artificial Sequence
  Description of Artificial Sequence: Synthetic oligonucleotide
  Antisense strand to SEQ ID NO: 1069208
aacucucugccauaguugg

SEQ ID NO: 1069210 - RNA, 19 nt, Artificial Sequence
  Description of Artificial Sequence: Synthetic oligonucleotide
  Sense strand starting at position 673 of SEQ ID NO: 915295
aguugugaugaucaaagug

SEQ ID NO: 1069211 - RNA, 19 nt, Artificial Sequence
  Description of Artificial Sequence: Synthetic oligonucleotide
  Antisense strand to SEQ ID NO: 1069210
cacuuugaucaucacaacu

SEQ ID NO: 1069212 - RNA, 19 nt, Artificial Sequence
  Description of Artificial Sequence: Synthetic oligonucleotide
  Sense strand starting at position 813 of SEQ ID NO: 915295
ggucuuagaucauuccuau

SEQ ID NO: 1069213 - RNA, 19 nt, Artificial Sequence
  Description of Artificial Sequence: Synthetic oligonucleotide
  Antisense strand to SEQ ID NO: 1069212
auaggaaugaucuaagacc

SEQ ID NO: 1069214 - RNA, 19 nt, Artificial Sequence
  Description of Artificial Sequence: Synthetic oligonucleotide
  Sense strand starting at position 933 of SEQ ID NO: 915295
cccuguuuacaauggaaag

SEQ ID NO: 1069215 - RNA, 19 nt, Artificial Sequence
  Description of Artificial Sequence: Synthetic oligonucleotide
  Antisense strand to SEQ ID NO: 1069214
cuuuccauuguaaacaggg

SEQ ID NO: 1069216 - RNA, 19 nt, Artificial Sequence
  Description of Artificial Sequence: Synthetic oligonucleotide
  Sense strand starting at position 1149 of SEQ ID NO: 915295
cagaaaguuuacguccaga

SEQ ID NO: 1069217 - RNA, 19 nt, Artificial Sequence
  Description of Artificial Sequence: Synthetic oligonucleotide
  Antisense strand to SEQ ID NO: 1069216
ucuggacguaaacuuucug

SEQ ID NO: 1069218 - RNA, 19 nt, Artificial Sequence
  Description of Artificial Sequence: Synthetic oligonucleotide
  Sense strand starting at position 1152 of SEQ ID NO: 915295
aaaguuuacguccagagau

SEQ ID NO: 1069219 - RNA, 19 nt, Artificial Sequence
  Description of Artificial Sequence: Synthetic oligonucleotide
  Antisense strand to SEQ ID NO: 1069218
aucucuggacguaaacuuu

SEQ ID NO: 1069220 - RNA, 19 nt, Artificial Sequence
  Description of Artificial Sequence: Synthetic oligonucleotide
  Sense strand starting at position 1154 of SEQ ID NO: 915295
aguuuacguccagagauua

SEQ ID NO: 1069221 - RNA, 19 nt, Artificial Sequence
  Description of Artificial Sequence: Synthetic oligonucleotide
  Antisense strand to SEQ ID NO: 1069220
uaaucucuggacguaaacu

SEQ ID NO: 1069222 - RNA, 19 nt, Artificial Sequence
  Description of Artificial Sequence: Synthetic oligonucleotide
  Sense strand starting at position 1318 of SEQ ID NO: 915295
cggagcccucuuuaguaaa

SEQ ID NO: 1069223 - RNA, 19 nt, Artificial Sequence
  Description of Artificial Sequence: Synthetic oligonucleotide
  Antisense strand to SEQ ID NO: 1069222
uuuacuaaagagggcuccg

SEQ ID NO: 1069224 - RNA, 19 nt, Artificial Sequence
  Description of Artificial Sequence: Synthetic oligonucleotide
  Sense strand starting at position 1396 of SEQ ID NO: 915295
gugaaugggauguguguca

SEQ ID NO: 1069225 - RNA, 19 nt, Artificial Sequence
  Description of Artificial Sequence: Synthetic oligonucleotide
  Antisense strand to SEQ ID NO: 1069224
ugacacacaucccauucac

SEQ ID NO: 1069226 - RNA, 19 nt, Artificial Sequence
  Description of Artificial Sequence: Synthetic oligonucleotide
  Sense strand starting at position 1476 of SEQ ID NO: 915295
ugggaauucccgggugaca

SEQ ID NO: 1069227 - RNA, 19 nt, Artificial Sequence
  Description of Artificial Sequence: Synthetic oligonucleotide
  Antisense strand to SEQ ID NO: 1069226
ugucacccgggaauuccca

SEQ ID NO: 1069228 - RNA, 19 nt, Artificial Sequence
  Description of Artificial Sequence: Synthetic oligonucleotide
  Sense strand starting at position 1485 of SEQ ID NO: 915295
ccgggugacaccuacuuaa

SEQ ID NO: 1069229 - RNA, 19 nt, Artificial Sequence
  Description of Artificial Sequence: Synthetic oligonucleotide
  Antisense strand to SEQ ID NO: 1069228
uuaaguaggugucacccgg

SEQ ID NO: 1069230 - RNA, 19 nt, Artificial Sequence
  Description of Artificial Sequence: Synthetic oligonucleotide
  Sense strand starting at position 1488 of SEQ ID NO: 915295
ggugacaccuacuuaagaa

SEQ ID NO: 1069231 - RNA, 19 nt, Artificial Sequence
  Description of Artificial Sequence: Synthetic oligonucleotide
  Antisense strand to SEQ ID NO: 1069230
uucuuaaguaggugucacc

SEQ ID NO: 1069232 - RNA, 19 nt, Artificial Sequence
  Description of Artificial Sequence: Synthetic oligonucleotide
  Sense strand starting at position 2272 of SEQ ID NO: 915295
gugauugucacaggauaua

SEQ ID NO: 1069233 - RNA, 19 nt, Artificial Sequence
  Description of Artificial Sequence: Synthetic oligonucleotide
  Antisense strand to SEQ ID NO: 1069232
uauauccugugacaaucac

SEQ ID NO: 1069234 - RNA, 19 nt, Artificial Sequence
  Description of Artificial Sequence: Synthetic oligonucleotide
  Sense strand starting at position 2329 of SEQ ID NO: 915295
augagauucccgggcaguu

SEQ ID NO: 1069235 - RNA, 19 nt, Artificial Sequence
  Description of Artificial Sequence: Synthetic oligonucleotide
  Antisense strand to SEQ ID NO: 1069234
aacugcccgggaaucucau

SEQ ID NO: 1069236 - RNA, 19 nt, Artificial Sequence
  Description of Artificial Sequence: Synthetic oligonucleotide
  Sense strand starting at position 2512 of SEQ ID NO: 915295
cugugauuuauguggcuca

SEQ ID NO: 1069237 - RNA, 19 nt, Artificial Sequence
  Description of Artificial Sequence: Synthetic oligonucleotide
  Antisense strand to SEQ ID NO: 1069236
ugagccacauaaaucacag

SEQ ID NO: 1069238 - RNA, 19 nt, Artificial Sequence
  Description of Artificial Sequence: Synthetic oligonucleotide
  Sense strand starting at position 2582 of SEQ ID NO: 915295
cagguuccgggagguuuaa

SEQ ID NO: 1069239 - RNA, 19 nt, Artificial Sequence
  Description of Artificial Sequence: Synthetic oligonucleotide
  Antisense strand to SEQ ID NO: 1069238
uuaaaccucccggaaccug

SEQ ID NO: 1069240 - RNA, 19 nt, Artificial Sequence
  Description of Artificial Sequence: Synthetic oligonucleotide
  Sense strand starting at position 2595 of SEQ ID NO: 915295
guuuaacuagggugguauu

SEQ ID NO: 1069241 - RNA, 19 nt, Artificial Sequence
  Description of Artificial Sequence: Synthetic oligonucleotide
  Antisense strand to SEQ ID NO: 1069240
aauaccacccuaguuaaac

SEQ ID NO: 1069242 - RNA, 19 nt, Artificial Sequence
  Description of Artificial Sequence: Synthetic oligonucleotide
  Sense strand starting at position 2758 of SEQ ID NO: 915295
agaggaauguguccagcuu

SEQ ID NO: 1069243 - RNA, 19 nt, Artificial Sequence
  Description of Artificial Sequence: Synthetic oligonucleotide
  Antisense strand to SEQ ID NO: 1069242
aagcuggacacauuccucu

SEQ ID NO: 1069244 - RNA, 19 nt, Artificial Sequence
  Description of Artificial Sequence: Synthetic oligonucleotide
  Sense strand starting at position 2759 of SEQ ID NO: 915295
gaggaauguguccagcuua

SEQ ID NO: 1069245 - RNA, 19 nt, Artificial Sequence
  Description of Artificial Sequence: Synthetic oligonucleotide
  Antisense strand to SEQ ID NO: 1069244
uaagcuggacacauuccuc

SEQ ID NO: 1069246 - RNA, 19 nt, Artificial Sequence
  Description of Artificial Sequence: Synthetic oligonucleotide
  Sense strand starting at position 2948 of SEQ ID NO: 915295
cucggaauggcauacagua

SEQ ID NO: 1069247 - RNA, 19 nt, Artificial Sequence
  Description of Artificial Sequence: Synthetic oligonucleotide
  Antisense strand to SEQ ID NO: 1069246
uacuguaugccauuccgag

SEQ ID NO: 1069248 - RNA, 19 nt, Artificial Sequence
  Description of Artificial Sequence: Synthetic oligonucleotide
  Sense strand starting at position 2950 of SEQ ID NO: 915295
cggaauggcauacaguaaa

SEQ ID NO: 1069249 - RNA, 19 nt, Artificial Sequence
  Description of Artificial Sequence: Synthetic oligonucleotide
  Antisense strand to SEQ ID NO: 1069248
uuuacuguaugccauuccg

SEQ ID NO: 1069250 - RNA, 19 nt, Artificial Sequence
  Description of Artificial Sequence: Synthetic oligonucleotide
  Sense strand starting at position 2975 of SEQ ID NO: 915295
aaauguuagugugucugga

SEQ ID NO: 1069251 - RNA, 19 nt, Artificial Sequence
  Description of Artificial Sequence: Synthetic oligonucleotide
  Antisense strand to SEQ ID NO: 1069250
uccagacacacuaacauuu

SEQ ID NO: 1069252 - RNA, 19 nt, Artificial Sequence
  Description of Artificial Sequence: Synthetic oligonucleotide
  Sense strand starting at position 2988 of SEQ ID NO: 915295
ucuggaucaguuugaguau

SEQ ID NO: 1069253 - RNA, 19 nt, Artificial Sequence
  Description of Artificial Sequence: Synthetic oligonucleotide
  Antisense strand to SEQ ID NO: 1069252
auacucaaacugauccaga

SEQ ID NO: 1069254 - RNA, 19 nt, Artificial Sequence
  Description of Artificial Sequence: Synthetic oligonucleotide
  Sense strand starting at position 3013 of SEQ ID NO: 915295
cgcugaauuugugaagaaa

SEQ ID NO: 1069255 - RNA, 19 nt, Artificial Sequence
  Description of Artificial Sequence: Synthetic oligonucleotide
  Antisense strand to SEQ ID NO: 1069254
uuucuucacaaauucagcg

SEQ ID NO: 1069256 - RNA, 19 nt, Artificial Sequence
  Description of Artificial Sequence: Synthetic oligonucleotide
  Sense strand starting at position 3067 of SEQ ID NO: 915295
aggaaacuuugggcaacuu

SEQ ID NO: 1069257 - RNA, 19 nt, Artificial Sequence
  Description of Artificial Sequence: Synthetic oligonucleotide
  Antisense strand to SEQ ID NO: 1069256
aaguugcccaaaguuuccu

SEQ ID NO: 1069258 - RNA, 19 nt, Artificial Sequence
  Description of Artificial Sequence: Synthetic oligonucleotide
  Sense strand starting at position 3182 of SEQ ID NO: 915295
cucugcuaggcgcuuuaua

SEQ ID NO: 1069259 - RNA, 19 nt, Artificial Sequence
  Description of Artificial Sequence: Synthetic oligonucleotide
  Antisense strand to SEQ ID NO: 1069258
uauaaagcgccuagcagag

SEQ ID NO: 1069260 - RNA, 19 nt, Artificial Sequence
  Description of Artificial Sequence: Synthetic oligonucleotide
  Sense strand starting at position 3286 of SEQ ID NO: 915295
gaggauuagcgacauuguu

SEQ ID NO: 1069261 - RNA, 19 nt, Artificial Sequence
  Description of Artificial Sequence: Synthetic oligonucleotide
  Antisense strand to SEQ ID NO: 1069260
aacaaugucgcuaauccuc

SEQ ID NO: 1069262 - RNA, 19 nt, Artificial Sequence
  Description of Artificial Sequence: Synthetic oligonucleotide
  Sense strand starting at position 3317 of SEQ ID NO: 915295
cccaauggcaagugguaaa

SEQ ID NO: 1069263 - RNA, 19 nt, Artificial Sequence
  Description of Artificial Sequence: Synthetic oligonucleotide
  Antisense strand to SEQ ID NO: 1069262
uuuaccacuugccauuggg

SEQ ID NO: 1069264 - RNA, 19 nt, Artificial Sequence
  Description of Artificial Sequence: Synthetic oligonucleotide
  Sense strand starting at position 3340 of SEQ ID NO: 915295
gcagcugagauuugucuga

SEQ ID NO: 1069265 - RNA, 19 nt, Artificial Sequence
  Description of Artificial Sequence: Synthetic oligonucleotide
  Antisense strand to SEQ ID NO: 1069264
ucagacaaaucucagcugc

SEQ ID NO: 1069266 - RNA, 19 nt, Artificial Sequence
  Description of Artificial Sequence: Synthetic oligonucleotide
  Sense strand starting at position 3345 of SEQ ID NO: 915295
ugagauuugucugauuauu

SEQ ID NO: 1069267 - RNA, 19 nt, Artificial Sequence
  Description of Artificial Sequence: Synthetic oligonucleotide
  Antisense strand to SEQ ID NO: 1069266
aauaaucagacaaaucuca

SEQ ID NO: 1069268 - RNA, 19 nt, Artificial Sequence
  Description of Artificial Sequence: Synthetic oligonucleotide
  Sense strand starting at position 3377 of SEQ ID NO: 915295
cuuaaucacugugccagaa

SEQ ID NO: 1069269 - RNA, 19 nt, Artificial Sequence
  Description of Artificial Sequence: Synthetic oligonucleotide
  Antisense strand to SEQ ID NO: 1069268
uucuggcacagugauuaag

SEQ ID NO: 1069270 - RNA, 19 nt, Artificial Sequence
  Description of Artificial Sequence: Synthetic oligonucleotide
  Sense strand starting at position 3381 of SEQ ID NO: 915295
aucacugugccagaauaac

SEQ ID NO: 1069271 - RNA, 19 nt, Artificial Sequence
  Description of Artificial Sequence: Synthetic oligonucleotide
  Antisense strand to SEQ ID NO: 1069270
guuauucuggcacagugau

SEQ ID NO: 1069272 - RNA, 19 nt, Artificial Sequence
  Description of Artificial Sequence: Synthetic oligonucleotide
  Sense strand starting at position 3479 of SEQ ID NO: 915295
gcaugcauggaacauuaua

SEQ ID NO: 1069273 - RNA, 19 nt, Artificial Sequence
  Description of Artificial Sequence: Synthetic oligonucleotide
  Antisense strand to SEQ ID NO: 1069272
uauaauguuccaugcaugc

SEQ ID NO: 1069274 - RNA, 19 nt, Artificial Sequence
  Description of Artificial Sequence: Synthetic oligonucleotide
  Sense strand starting at position 12 of SEQ ID NO: 915296
ccaaguucgaguuaaacgu

SEQ ID NO: 1069275 - RNA, 19 nt, Artificial Sequence
  Description of Artificial Sequence: Synthetic oligonucleotide
  Antisense strand to SEQ ID NO: 1069274
acguuuaacucgaacuugg

SEQ ID NO: 1069276 - RNA, 19 nt, Artificial Sequence
  Description of Artificial Sequence: Synthetic oligonucleotide
  Sense strand starting at position 20 of SEQ ID NO: 915296
gaguuaaacguccagaaug

SEQ ID NO: 1069277 - RNA, 19 nt, Artificial Sequence
  Description of Artificial Sequence: Synthetic oligonucleotide
  Antisense strand to SEQ ID NO: 1069276
cauucuggacguuuaacuc

SEQ ID NO: 1069278 - RNA, 19 nt, Artificial Sequence
  Description of Artificial Sequence: Synthetic oligonucleotide
  Sense strand starting at position 118 of SEQ ID NO: 915296
cuagaaaucgcucaugaau

SEQ ID NO: 1069279 - RNA, 19 nt, Artificial Sequence
  Description of Artificial Sequence: Synthetic oligonucleotide
  Antisense strand to SEQ ID NO: 1069278
auucaugagcgauuucuag

SEQ ID NO: 1069280 - RNA, 19 nt, Artificial Sequence
  Description of Artificial Sequence: Synthetic oligonucleotide
  Sense strand starting at position 345 of SEQ ID NO: 915296
cgacuaauuagccgggaga

SEQ ID NO: 1069281 - RNA, 19 nt, Artificial Sequence
  Description of Artificial Sequence: Synthetic oligonucleotide
  Antisense strand to SEQ ID NO: 1069280
ucucccggcuaauuagucg

SEQ ID NO: 1069282 - RNA, 19 nt, Artificial Sequence
  Description of Artificial Sequence: Synthetic oligonucleotide
  Sense strand starting at position 346 of SEQ ID NO: 915296
gacuaauuagccgggagaa

SEQ ID NO: 1069283 - RNA, 19 nt, Artificial Sequence
  Description of Artificial Sequence: Synthetic oligonucleotide
  Antisense strand to SEQ ID NO: 1069282
uucucccggcuaauuaguc

SEQ ID NO: 1069284 - RNA, 19 nt, Artificial Sequence
  Description of Artificial Sequence: Synthetic oligonucleotide
  Sense strand starting at position 347 of SEQ ID NO: 915296
acuaauuagccgggagaag

SEQ ID NO: 1069285 - RNA, 19 nt, Artificial Sequence
  Description of Artificial Sequence: Synthetic oligonucleotide
  Antisense strand to SEQ ID NO: 1069284
cuucucccggcuaauuagu

SEQ ID NO: 1069286 - RNA, 19 nt, Artificial Sequence
  Description of Artificial Sequence: Synthetic oligonucleotide
  Sense strand starting at position 516 of SEQ ID NO: 915296
gagacuggaucagaggaaa

SEQ ID NO: 1069287 - RNA, 19 nt, Artificial Sequence
  Description of Artificial Sequence: Synthetic oligonucleotide
  Antisense strand to SEQ ID NO: 1069286
uuuccucugauccagucuc

SEQ ID NO: 1069288 - RNA, 19 nt, Artificial Sequence
  Description of Artificial Sequence: Synthetic oligonucleotide
  Sense strand starting at position 1417 of SEQ ID NO: 915296
gggagaccugucugaauau

SEQ ID NO: 1069289 - RNA, 19 nt, Artificial Sequence
  Description of Artificial Sequence: Synthetic oligonucleotide
  Antisense strand to SEQ ID NO: 1069288
auauucagacaggucuccc

SEQ ID NO: 1069290 - RNA, 19 nt, Artificial Sequence
  Description of Artificial Sequence: Synthetic oligonucleotide
  Sense strand starting at position 1418 of SEQ ID NO: 915296
ggagaccugucugaauauu

SEQ ID NO: 1069291 - RNA, 19 nt, Artificial Sequence
  Description of Artificial Sequence: Synthetic oligonucleotide
  Antisense strand to SEQ ID NO: 1069290
aauauucagacaggucucc

SEQ ID NO: 1069292 - RNA, 19 nt, Artificial Sequence
  Description of Artificial Sequence: Synthetic oligonucleotide
  Sense strand starting at position 1486 of SEQ ID NO: 915296
auccuuucugguugucaca

SEQ ID NO: 1069293 - RNA, 19 nt, Artificial Sequence
  Description of Artificial Sequence: Synthetic oligonucleotide
  Antisense strand to SEQ ID NO: 1069292
ugugacaaccagaaaggau

SEQ ID NO: 1069294 - RNA, 19 nt, Artificial Sequence
  Description of Artificial Sequence: Synthetic oligonucleotide
  Sense strand starting at position 1499 of SEQ ID NO: 915296
gucacagcuucugucaaga

SEQ ID NO: 1069295 - RNA, 19 nt, Artificial Sequence
  Description of Artificial Sequence: Synthetic oligonucleotide
  Antisense strand to SEQ ID NO: 1069294
ucuugacagaagcugugac

SEQ ID NO: 1069296 - RNA, 19 nt, Artificial Sequence
  Description of Artificial Sequence: Synthetic oligonucleotide
  Sense strand starting at position 1545 of SEQ ID NO: 915296
ugcuguuguugcuugaaga

SEQ ID NO: 1069297 - RNA, 19 nt, Artificial Sequence
  Description of Artificial Sequence: Synthetic oligonucleotide
  Antisense strand to SEQ ID NO: 1069296
ucuucaagcaacaacagca

SEQ ID NO: 1069298 - RNA, 19 nt, Artificial Sequence
  Description of Artificial Sequence: Synthetic oligonucleotide
  Sense strand starting at position 1546 of SEQ ID NO: 915296
gcuguuguugcuugaagac

SEQ ID NO: 1069299 - RNA, 19 nt, Artificial Sequence
  Description of Artificial Sequence: Synthetic oligonucleotide
  Antisense strand to SEQ ID NO: 1069298
gucuucaagcaacaacagc

SEQ ID NO: 1069300 - RNA, 19 nt, Artificial Sequence
  Description of Artificial Sequence: Synthetic oligonucleotide
  Sense strand starting at position 1563 of SEQ ID NO: 915296
accacaaugguuugaaaug

SEQ ID NO: 1069301 - RNA, 19 nt, Artificial Sequence
  Description of Artificial Sequence: Synthetic oligonucleotide
  Antisense strand to SEQ ID NO: 1069300
cauuucaaaccauuguggu

SEQ ID NO: 1069302 - RNA, 19 nt, Artificial Sequence
  Description of Artificial Sequence: Synthetic oligonucleotide
  Sense strand starting at position 1564 of SEQ ID NO: 915296
ccacaaugguuugaaauga

SEQ ID NO: 1069303 - RNA, 19 nt, Artificial Sequence
  Description of Artificial Sequence: Synthetic oligonucleotide
  Antisense strand to SEQ ID NO: 1069302
ucauuucaaaccauugugg

SEQ ID NO: 1069304 - RNA, 19 nt, Artificial Sequence
  Description of Artificial Sequence: Synthetic oligonucleotide
  Sense strand starting at position 1572 of SEQ ID NO: 915296
guuugaaaugacgguguuu

SEQ ID NO: 1069305 - RNA, 19 nt, Artificial Sequence
  Description of Artificial Sequence: Synthetic oligonucleotide
  Antisense strand to SEQ ID NO: 1069304
aaacaccgucauuucaaac

SEQ ID NO: 1069306 - RNA, 19 nt, Artificial Sequence
  Description of Artificial Sequence: Synthetic oligonucleotide
  Sense strand starting at position 1592 of SEQ ID NO: 915296
aaaggaguugcuggugaga

SEQ ID NO: 1069307 - RNA, 19 nt, Artificial Sequence
  Description of Artificial Sequence: Synthetic oligonucleotide
  Antisense strand to SEQ ID NO: 1069306
ucucaccagcaacuccuuu

SEQ ID NO: 1069308 - RNA, 19 nt, Artificial Sequence
  Description of Artificial Sequence: Synthetic oligonucleotide
  Sense strand starting at position 1629 of SEQ ID NO: 915296
gcuggguuggugugugaga

SEQ ID NO: 1069309 - RNA, 19 nt, Artificial Sequence
  Description of Artificial Sequence: Synthetic oligonucleotide
  Antisense strand to SEQ ID NO: 1069308
ucucacacaccaacccagc

SEQ ID NO: 1069310 - RNA, 19 nt, Artificial Sequence
  Description of Artificial Sequence: Synthetic oligonucleotide
  Sense strand starting at position 1651 of SEQ ID NO: 915296
auucucagauuccugggaa

SEQ ID NO: 1069311 - RNA, 19 nt, Artificial Sequence
  Description of Artificial Sequence: Synthetic oligonucleotide
  Antisense strand to SEQ ID NO: 1069310
uucccaggaaucugagaau

SEQ ID NO: 1069312 - RNA, 19 nt, Artificial Sequence
  Description of Artificial Sequence: Synthetic oligonucleotide
  Sense strand starting at position 1655 of SEQ ID NO: 915296
ucagauuccugggaaggag

SEQ ID NO: 1069313 - RNA, 19 nt, Artificial Sequence
  Description of Artificial Sequence: Synthetic oligonucleotide
  Antisense strand to SEQ ID NO: 1069312
cuccuucccaggaaucuga

SEQ ID NO: 1069314 - RNA, 19 nt, Artificial Sequence
  Description of Artificial Sequence: Synthetic oligonucleotide
  Sense strand starting at position 1706 of SEQ ID NO: 915296
gcuggagagugagagauaa

SEQ ID NO: 1069315 - RNA, 19 nt, Artificial Sequence
  Description of Artificial Sequence: Synthetic oligonucleotide
  Antisense strand to SEQ ID NO: 1069314
uuaucucucacucuccagc

SEQ ID NO: 1069316 - RNA, 19 nt, Artificial Sequence
  Description of Artificial Sequence: Synthetic oligonucleotide
  Sense strand starting at position 1759 of SEQ ID NO: 915296
caccuaugcugauugguga

SEQ ID NO: 1069317 - RNA, 19 nt, Artificial Sequence
  Description of Artificial Sequence: Synthetic oligonucleotide
  Antisense strand to SEQ ID NO: 1069316
ucaccaaucagcauaggug

SEQ ID NO: 1069318 - RNA, 19 nt, Artificial Sequence
  Description of Artificial Sequence: Synthetic oligonucleotide
  Sense strand starting at position 1767 of SEQ ID NO: 915296
cugauuggugauggcucaa

SEQ ID NO: 1069319 - RNA, 19 nt, Artificial Sequence
  Description of Artificial Sequence: Synthetic oligonucleotide
  Antisense strand to SEQ ID NO: 1069318
uugagccaucaccaaucag

SEQ ID NO: 1069320 - RNA, 19 nt, Artificial Sequence
  Description of Artificial Sequence: Synthetic oligonucleotide
  Sense strand starting at position 2066 of SEQ ID NO: 915296
gcaauugguccguuuguuu

SEQ ID NO: 1069321 - RNA, 19 nt, Artificial Sequence
  Description of Artificial Sequence: Synthetic oligonucleotide
  Antisense strand to SEQ ID NO: 1069320
aaacaaacggaccaauugc

SEQ ID NO: 1069322 - RNA, 19 nt, Artificial Sequence
  Description of Artificial Sequence: Synthetic oligonucleotide
  Sense strand starting at position 2069 of SEQ ID NO: 915296
auugguccguuuguuugaa

SEQ ID NO: 1069323 - RNA, 19 nt, Artificial Sequence
  Description of Artificial Sequence: Synthetic oligonucleotide
  Antisense strand to SEQ ID NO: 1069322
uucaaacaaacggaccaau

SEQ ID NO: 1069324 - RNA, 19 nt, Artificial Sequence
  Description of Artificial Sequence: Synthetic oligonucleotide
  Sense strand starting at position 2070 of SEQ ID NO: 915296
uugguccguuuguuugaau

SEQ ID NO: 1069325 - RNA, 19 nt, Artificial Sequence
  Description of Artificial Sequence: Synthetic oligonucleotide
  Antisense strand to SEQ ID NO: 1069324
auucaaacaaacggaccaa

SEQ ID NO: 1069326 - RNA, 19 nt, Artificial Sequence
  Description of Artificial Sequence: Synthetic oligonucleotide
  Sense strand starting at position 2071 of SEQ ID NO: 915296
ugguccguuuguuugaaua

SEQ ID NO: 1069327 - RNA, 19 nt, Artificial Sequence
  Description of Artificial Sequence: Synthetic oligonucleotide
  Antisense strand to SEQ ID NO: 1069326
uauucaaacaaacggacca

SEQ ID NO: 1069328 - RNA, 19 nt, Artificial Sequence
  Description of Artificial Sequence: Synthetic oligonucleotide
  Sense strand starting at position 2245 of SEQ ID NO: 915296
aagugaagguuucuggguu

SEQ ID NO: 1069329 - RNA, 19 nt, Artificial Sequence
  Description of Artificial Sequence: Synthetic oligonucleotide
  Antisense strand to SEQ ID NO: 1069328
aacccagaaaccuucacuu

SEQ ID NO: 1069330 - RNA, 19 nt, Artificial Sequence
  Description of Artificial Sequence: Synthetic oligonucleotide
  Sense strand starting at position 2731 of SEQ ID NO: 915296
gccacuuacuuuguguaca

SEQ ID NO: 1069331 - RNA, 19 nt, Artificial Sequence
  Description of Artificial Sequence: Synthetic oligonucleotide
  Antisense strand to SEQ ID NO: 1069330
uguacacaaaguaaguggc

SEQ ID NO: 1069332 - RNA, 19 nt, Artificial Sequence
  Description of Artificial Sequence: Synthetic oligonucleotide
  Sense strand starting at position 2746 of SEQ ID NO: 915296
uacagaggguucuugugaa

SEQ ID NO: 1069333 - RNA, 19 nt, Artificial Sequence
  Description of Artificial Sequence: Synthetic oligonucleotide
  Antisense strand to SEQ ID NO: 1069332
uucacaagaacccucugua

SEQ ID NO: 1069334 - RNA, 19 nt, Artificial Sequence
  Description of Artificial Sequence: Synthetic oligonucleotide
  Sense strand starting at position 2769 of SEQ ID NO: 915296
ccugaagaguccucaccaa

SEQ ID NO: 1069335 - RNA, 19 nt, Artificial Sequence
  Description of Artificial Sequence: Synthetic oligonucleotide
  Antisense strand to SEQ ID NO: 1069334
uuggugaggacucuucagg

SEQ ID NO: 1069336 - RNA, 19 nt, Artificial Sequence
  Description of Artificial Sequence: Synthetic oligonucleotide
  Sense strand starting at position 2917 of SEQ ID NO: 915296
gaccaaugcugggagggau

SEQ ID NO: 1069337 - RNA, 19 nt, Artificial Sequence
  Description of Artificial Sequence: Synthetic oligonucleotide
  Antisense strand to SEQ ID NO: 1069336
aucccucccagcauugguc

SEQ ID NO: 1069338 - RNA, 19 nt, Artificial Sequence
  Description of Artificial Sequence: Synthetic oligonucleotide
  Sense strand starting at position 2994 of SEQ ID NO: 915296
uggcgaugucgguauguca

SEQ ID NO: 1069339 - RNA, 19 nt, Artificial Sequence
  Description of Artificial Sequence: Synthetic oligonucleotide
  Antisense strand to SEQ ID NO: 1069338
ugacauaccgacaucgcca

SEQ ID NO: 1069340 - RNA, 19 nt, Artificial Sequence
  Description of Artificial Sequence: Synthetic oligonucleotide
  Sense strand starting at position 3191 of SEQ ID NO: 915296
uguugaaugccgcacgauu

SEQ ID NO: 1069341 - RNA, 19 nt, Artificial Sequence
  Description of Artificial Sequence: Synthetic oligonucleotide
  Antisense strand to SEQ ID NO: 1069340
aaucgugcggcauucaaca

SEQ ID NO: 1069342 - RNA, 19 nt, Artificial Sequence
  Description of Artificial Sequence: Synthetic oligonucleotide
  Sense strand starting at position 3442 of SEQ ID NO: 915296
acgcuagacucuucuugac

SEQ ID NO: 1069343 - RNA, 19 nt, Artificial Sequence
  Description of Artificial Sequence: Synthetic oligonucleotide
  Antisense strand to SEQ ID NO: 1069342
gucaagaagagucuagcgu

SEQ ID NO: 1069344 - RNA, 19 nt, Artificial Sequence
  Description of Artificial Sequence: Synthetic oligonucleotide
  Sense strand starting at position 3444 of SEQ ID NO: 915296
gcuagacucuucuugacuu

SEQ ID NO: 1069345 - RNA, 19 nt, Artificial Sequence
  Description of Artificial Sequence: Synthetic oligonucleotide
  Antisense strand to SEQ ID NO: 1069344
aagucaagaagagucuagc

SEQ ID NO: 1069346 - RNA, 19 nt, Artificial Sequence
  Description of Artificial Sequence: Synthetic oligonucleotide
  Sense strand starting at position 3479 of SEQ ID NO: 915296
gucagagcucaucaauaaa

SEQ ID NO: 1069347 - RNA, 19 nt, Artificial Sequence
  Description of Artificial Sequence: Synthetic oligonucleotide
  Antisense strand to SEQ ID NO: 1069346
uuuauugaugagcucugac

SEQ ID NO: 1069348 - RNA, 19 nt, Artificial Sequence
  Description of Artificial Sequence: Synthetic oligonucleotide
  Sense strand starting at position 3925 of SEQ ID NO: 915296
gcgaaagucggcuuucucu

SEQ ID NO: 1069349 - RNA, 19 nt, Artificial Sequence
  Description of Artificial Sequence: Synthetic oligonucleotide
  Antisense strand to SEQ ID NO: 1069348
agagaaagccgacuuucgc

SEQ ID NO: 1069350 - RNA, 19 nt, Artificial Sequence
  Description of Artificial Sequence: Synthetic oligonucleotide
  Sense strand starting at position 3960 of SEQ ID NO: 915296
uuuccaagcgagcauuaaa

SEQ ID NO: 1069351 - RNA, 19 nt, Artificial Sequence
  Description of Artificial Sequence: Synthetic oligonucleotide
  Antisense strand to SEQ ID NO: 1069350
uuuaaugcucgcuuggaaa

SEQ ID NO: 1069352 - RNA, 19 nt, Artificial Sequence
  Description of Artificial Sequence: Synthetic oligonucleotide
  Sense strand starting at position 3963 of SEQ ID NO: 915296
ccaagcgagcauuaaagaa

SEQ ID NO: 1069353 - RNA, 19 nt, Artificial Sequence
  Description of Artificial Sequence: Synthetic oligonucleotide
  Antisense strand to SEQ ID NO: 1069352
uucuuuaaugcucgcuugg

SEQ ID NO: 1069354 - RNA, 19 nt, Artificial Sequence
  Description of Artificial Sequence: Synthetic oligonucleotide
  Sense strand starting at position 312 of SEQ ID NO: 915297
ucugaauaguaauuccagu

SEQ ID NO: 1069355 - RNA, 19 nt, Artificial Sequence
  Description of Artificial Sequence: Synthetic oligonucleotide
  Antisense strand to SEQ ID NO: 1069354
acuggaauuacuauucaga

SEQ ID NO: 1069356 - RNA, 19 nt, Artificial Sequence
  Description of Artificial Sequence: Synthetic oligonucleotide
  Sense strand starting at position 343 of SEQ ID NO: 915297
augagagggucugaggaaa

SEQ ID NO: 1069357 - RNA, 19 nt, Artificial Sequence
  Description of Artificial Sequence: Synthetic oligonucleotide
  Antisense strand to SEQ ID NO: 1069356
uuuccucagacccucucau

SEQ ID NO: 1069358 - RNA, 19 nt, Artificial Sequence
  Description of Artificial Sequence: Synthetic oligonucleotide
  Sense strand starting at position 463 of SEQ ID NO: 915297
ucuggucagagguaauuau

SEQ ID NO: 1069359 - RNA, 19 nt, Artificial Sequence
  Description of Artificial Sequence: Synthetic oligonucleotide
  Antisense strand to SEQ ID NO: 1069358
auaauuaccucugaccaga

SEQ ID NO: 1069360 - RNA, 19 nt, Artificial Sequence
  Description of Artificial Sequence: Synthetic oligonucleotide
  Sense strand starting at position 467 of SEQ ID NO: 915297
gucagagguaauuauguca

SEQ ID NO: 1069361 - RNA, 19 nt, Artificial Sequence
  Description of Artificial Sequence: Synthetic oligonucleotide
  Antisense strand to SEQ ID NO: 1069360
ugacauaauuaccucugac

SEQ ID NO: 1069362 - RNA, 19 nt, Artificial Sequence
  Description of Artificial Sequence: Synthetic oligonucleotide
  Sense strand starting at position 556 of SEQ ID NO: 915297
cgaggauggcuggguuuga

SEQ ID NO: 1069363 - RNA, 19 nt, Artificial Sequence
  Description of Artificial Sequence: Synthetic oligonucleotide
  Antisense strand to SEQ ID NO: 1069362
ucaaacccagccauccucg

SEQ ID NO: 1069364 - RNA, 19 nt, Artificial Sequence
  Description of Artificial Sequence: Synthetic oligonucleotide
  Sense strand starting at position 557 of SEQ ID NO: 915297
gaggauggcuggguuugau

SEQ ID NO: 1069365 - RNA, 19 nt, Artificial Sequence
  Description of Artificial Sequence: Synthetic oligonucleotide
  Antisense strand to SEQ ID NO: 1069364
aucaaacccagccauccuc

SEQ ID NO: 1069366 - RNA, 19 nt, Artificial Sequence
  Description of Artificial Sequence: Synthetic oligonucleotide
  Sense strand starting at position 991 of SEQ ID NO: 915297
accacaaguuagucuaagu

SEQ ID NO: 1069367 - RNA, 19 nt, Artificial Sequence
  Description of Artificial Sequence: Synthetic oligonucleotide
  Antisense strand to SEQ ID NO: 1069366
acuuagacuaacuuguggu

SEQ ID NO: 1069368 - RNA, 19 nt, Artificial Sequence
  Description of Artificial Sequence: Synthetic oligonucleotide
  Sense strand starting at position 1184 of SEQ ID NO: 915297
ccgcguucuagcucaguga

SEQ ID NO: 1069369 - RNA, 19 nt, Artificial Sequence
  Description of Artificial Sequence: Synthetic oligonucleotide
  Antisense strand to SEQ ID NO: 1069368
ucacugagcuagaacgcgg

SEQ ID NO: 1069370 - RNA, 19 nt, Artificial Sequence
  Description of Artificial Sequence: Synthetic oligonucleotide
  Sense strand starting at position 1187 of SEQ ID NO: 915297
cguucuagcucagugagaa

SEQ ID NO: 1069371 - RNA, 19 nt, Artificial Sequence
  Description of Artificial Sequence: Synthetic oligonucleotide
  Antisense strand to SEQ ID NO: 1069370
uucucacugagcuagaacg

SEQ ID NO: 1069372 - RNA, 19 nt, Artificial Sequence
  Description of Artificial Sequence: Synthetic oligonucleotide
  Sense strand starting at position 1188 of SEQ ID NO: 915297
guucuagcucagugagaau

SEQ ID NO: 1069373 - RNA, 19 nt, Artificial Sequence
  Description of Artificial Sequence: Synthetic oligonucleotide
  Antisense strand to SEQ ID NO: 1069372
auucucacugagcuagaac

SEQ ID NO: 1069374 - RNA, 19 nt, Artificial Sequence
  Description of Artificial Sequence: Synthetic oligonucleotide
  Sense strand starting at position 1195 of SEQ ID NO: 915297
cucagugagaaucgcuaau

SEQ ID NO: 1069375 - RNA, 19 nt, Artificial Sequence
  Description of Artificial Sequence: Synthetic oligonucleotide
  Antisense strand to SEQ ID NO: 1069374
auuagcgauucucacugag

SEQ ID NO: 1069376 - RNA, 19 nt, Artificial Sequence
  Description of Artificial Sequence: Synthetic oligonucleotide
  Sense strand starting at position 1197 of SEQ ID NO: 915297
cagugagaaucgcuaauua

SEQ ID NO: 1069377 - RNA, 19 nt, Artificial Sequence
  Description of Artificial Sequence: Synthetic oligonucleotide
  Antisense strand to SEQ ID NO: 1069376
uaauuagcgauucucacug

SEQ ID NO: 1069378 - RNA, 19 nt, Artificial Sequence
  Description of Artificial Sequence: Synthetic oligonucleotide
  Sense strand starting at position 1201 of SEQ ID NO: 915297
gagaaucgcuaauuauuag

SEQ ID NO: 1069379 - RNA, 19 nt, Artificial Sequence
  Description of Artificial Sequence: Synthetic oligonucleotide
  Antisense strand to SEQ ID NO: 1069378
cuaauaauuagcgauucuc

SEQ ID NO: 1069380 - RNA, 19 nt, Artificial Sequence
  Description of Artificial Sequence: Synthetic oligonucleotide
  Sense strand starting at position 1212 of SEQ ID NO: 915297
auuauuaggucuuccgaag

SEQ ID NO: 1069381 - RNA, 19 nt, Artificial Sequence
  Description of Artificial Sequence: Synthetic oligonucleotide
  Antisense strand to SEQ ID NO: 1069380
cuucggaagaccuaauaau

SEQ ID NO: 1069382 - RNA, 19 nt, Artificial Sequence
  Description of Artificial Sequence: Synthetic oligonucleotide
  Sense strand starting at position 1226 of SEQ ID NO: 915297
cgaagugaagcucaaauca

SEQ ID NO: 1069383 - RNA, 19 nt, Artificial Sequence
  Description of Artificial Sequence: Synthetic oligonucleotide
  Antisense strand to SEQ ID NO: 1069382
ugauuugagcuucacuucg

SEQ ID NO: 1069384 - RNA, 19 nt, Artificial Sequence
  Description of Artificial Sequence: Synthetic oligonucleotide
  Sense strand starting at position 1300 of SEQ ID NO: 915297
cgcgucuuucugagaaacg

SEQ ID NO: 1069385 - RNA, 19 nt, Artificial Sequence
  Description of Artificial Sequence: Synthetic oligonucleotide
  Antisense strand to SEQ ID NO: 1069384
cguuucucagaaagacgcg

SEQ ID NO: 1069386 - RNA, 19 nt, Artificial Sequence
  Description of Artificial Sequence: Synthetic oligonucleotide
  Sense strand starting at position 1599 of SEQ ID NO: 915297
cacucuuaggaguggaaca

SEQ ID NO: 1069387 - RNA, 19 nt, Artificial Sequence
  Description of Artificial Sequence: Synthetic oligonucleotide
  Antisense strand to SEQ ID NO: 1069386
uguuccacuccuaagagug

SEQ ID NO: 1069388 - RNA, 19 nt, Artificial Sequence
  Description of Artificial Sequence: Synthetic oligonucleotide
  Sense strand starting at position 1600 of SEQ ID NO: 915297
acucuuaggaguggaacau

SEQ ID NO: 1069389 - RNA, 19 nt, Artificial Sequence
  Description of Artificial Sequence: Synthetic oligonucleotide
  Antisense strand to SEQ ID NO: 1069388
auguuccacuccuaagagu

SEQ ID NO: 1069390 - RNA, 19 nt, Artificial Sequence
  Description of Artificial Sequence: Synthetic oligonucleotide
  Sense strand starting at position 2071 of SEQ ID NO: 915297
acgucauggcggcuagagu

SEQ ID NO: 1069391 - RNA, 19 nt, Artificial Sequence
  Description of Artificial Sequence: Synthetic oligonucleotide
  Antisense strand to SEQ ID NO: 1069390
acucuagccgccaugacgu

SEQ ID NO: 1069392 - RNA, 19 nt, Artificial Sequence
  Description of Artificial Sequence: Synthetic oligonucleotide
  Sense strand starting at position 2342 of SEQ ID NO: 915297
cagcuaccucucuggguaa

SEQ ID NO: 1069393 - RNA, 19 nt, Artificial Sequence
  Description of Artificial Sequence: Synthetic oligonucleotide
  Antisense strand to SEQ ID NO: 1069392
uuacccagagagguagcug

SEQ ID NO: 1069394 - RNA, 19 nt, Artificial Sequence
  Description of Artificial Sequence: Synthetic oligonucleotide
  Sense strand starting at position 2345 of SEQ ID NO: 915297
cuaccucucuggguaauca

SEQ ID NO: 1069395 - RNA, 19 nt, Artificial Sequence
  Description of Artificial Sequence: Synthetic oligonucleotide
  Antisense strand to SEQ ID NO: 1069394
ugauuacccagagagguag

SEQ ID NO: 1069396 - RNA, 19 nt, Artificial Sequence
  Description of Artificial Sequence: Synthetic oligonucleotide
  Sense strand starting at position 2462 of SEQ ID NO: 915297
ggaggaguucgaggcucga

SEQ ID NO: 1069397 - RNA, 19 nt, Artificial Sequence
  Description of Artificial Sequence: Synthetic oligonucleotide
  Antisense strand to SEQ ID NO: 1069396
ucgagccucgaacuccucc

SEQ ID NO: 1069398 - RNA, 19 nt, Artificial Sequence
  Description of Artificial Sequence: Synthetic oligonucleotide
  Sense strand starting at position 2468 of SEQ ID NO: 915297
guucgaggcucgaugagua

SEQ ID NO: 1069399 - RNA, 19 nt, Artificial Sequence
  Description of Artificial Sequence: Synthetic oligonucleotide
  Antisense strand to SEQ ID NO: 1069398
uacucaucgagccucgaac

SEQ ID NO: 1069400 - RNA, 19 nt, Artificial Sequence
  Description of Artificial Sequence: Synthetic oligonucleotide
  Sense strand starting at position 2684 of SEQ ID NO: 915297
aaauguaggugauuguauu

SEQ ID NO: 1069401 - RNA, 19 nt, Artificial Sequence
  Description of Artificial Sequence: Synthetic oligonucleotide
  Antisense strand to SEQ ID NO: 1069400
aauacaaucaccuacauuu

SEQ ID NO: 1069402 - RNA, 19 nt, Artificial Sequence
  Description of Artificial Sequence: Synthetic oligonucleotide
  Sense strand starting at position 2698 of SEQ ID NO: 915297
guauuuaucuuugacuuug

SEQ ID NO: 1069403 - RNA, 19 nt, Artificial Sequence
  Description of Artificial Sequence: Synthetic oligonucleotide
  Antisense strand to SEQ ID NO: 1069402
caaagucaaagauaaauac

SEQ ID NO: 1069404 - RNA, 19 nt, Artificial Sequence
  Description of Artificial Sequence: Synthetic oligonucleotide
  Sense strand starting at position 2721 of SEQ ID NO: 915297
aacuguugacuuugugacu

SEQ ID NO: 1069405 - RNA, 19 nt, Artificial Sequence
  Description of Artificial Sequence: Synthetic oligonucleotide
  Antisense strand to SEQ ID NO: 1069404
agucacaaagucaacaguu

SEQ ID NO: 1069406 - RNA, 19 nt, Artificial Sequence
  Description of Artificial Sequence: Synthetic oligonucleotide
  Sense strand starting at position 2722 of SEQ ID NO: 915297
acuguugacuuugugacuu

SEQ ID NO: 1069407 - RNA, 19 nt, Artificial Sequence
  Description of Artificial Sequence: Synthetic oligonucleotide
  Antisense strand to SEQ ID NO: 1069406
aagucacaaagucaacagu

SEQ ID NO: 1069408 - RNA, 19 nt, Artificial Sequence
  Description of Artificial Sequence: Synthetic oligonucleotide
  Sense strand starting at position 2890 of SEQ ID NO: 915297
gcuaucuuggaauggagau

SEQ ID NO: 1069409 - RNA, 19 nt, Artificial Sequence
  Description of Artificial Sequence: Synthetic oligonucleotide
  Antisense strand to SEQ ID NO: 1069408
aucuccauuccaagauagc

SEQ ID NO: 1069410 - RNA, 19 nt, Artificial Sequence
  Description of Artificial Sequence: Synthetic oligonucleotide
  Sense strand starting at position 2906 of SEQ ID NO: 915297
gauuuagacccucguuguc

SEQ ID NO: 1069411 - RNA, 19 nt, Artificial Sequence
  Description of Artificial Sequence: Synthetic oligonucleotide
  Antisense strand to SEQ ID NO: 1069410
gacaacgagggucuaaauc

SEQ ID NO: 1069412 - RNA, 19 nt, Artificial Sequence
  Description of Artificial Sequence: Synthetic oligonucleotide
  Sense strand starting at position 3042 of SEQ ID NO: 915297
aggaguuugcgggagagga

SEQ ID NO: 1069413 - RNA, 19 nt, Artificial Sequence
  Description of Artificial Sequence: Synthetic oligonucleotide
  Antisense strand to SEQ ID NO: 1069412
uccucucccgcaaacuccu

SEQ ID NO: 1069414 - RNA, 19 nt, Artificial Sequence
  Description of Artificial Sequence: Synthetic oligonucleotide
  Sense strand starting at position 3480 of SEQ ID NO: 915297
gggagcuuuggcugagaag

SEQ ID NO: 1069415 - RNA, 19 nt, Artificial Sequence
  Description of Artificial Sequence: Synthetic oligonucleotide
  Antisense strand to SEQ ID NO: 1069414
cuucucagccaaagcuccc

SEQ ID NO: 1069416 - RNA, 19 nt, Artificial Sequence
  Description of Artificial Sequence: Synthetic oligonucleotide
  Sense strand starting at position 3481 of SEQ ID NO: 915297
ggagcuuuggcugagaagu

SEQ ID NO: 1069417 - RNA, 19 nt, Artificial Sequence
  Description of Artificial Sequence: Synthetic oligonucleotide
  Antisense strand to SEQ ID NO: 1069416
acuucucagccaaagcucc

SEQ ID NO: 1069418 - RNA, 19 nt, Artificial Sequence
  Description of Artificial Sequence: Synthetic oligonucleotide
  Sense strand starting at position 3492 of SEQ ID NO: 915297
ugagaaguuuccgcaggau

SEQ ID NO: 1069419 - RNA, 19 nt, Artificial Sequence
  Description of Artificial Sequence: Synthetic oligonucleotide
  Antisense strand to SEQ ID NO: 1069418
auccugcggaaacuucuca

SEQ ID NO: 1069420 - RNA, 19 nt, Artificial Sequence
  Description of Artificial Sequence: Synthetic oligonucleotide
  Sense strand starting at position 3495 of SEQ ID NO: 915297
gaaguuuccgcaggauguu

SEQ ID NO: 1069421 - RNA, 19 nt, Artificial Sequence
  Description of Artificial Sequence: Synthetic oligonucleotide
  Antisense strand to SEQ ID NO: 1069420
aacauccugcggaaacuuc

SEQ ID NO: 1069422 - RNA, 19 nt, Artificial Sequence
  Description of Artificial Sequence: Synthetic oligonucleotide
  Sense strand starting at position 3564 of SEQ ID NO: 915297
cugggcauccuguguuaag

SEQ ID NO: 1069423 - RNA, 19 nt, Artificial Sequence
  Description of Artificial Sequence: Synthetic oligonucleotide
  Antisense strand to SEQ ID NO: 1069422
cuuaacacaggaugcccag

SEQ ID NO: 1069424 - RNA, 19 nt, Artificial Sequence
  Description of Artificial Sequence: Synthetic oligonucleotide
  Sense strand starting at position 3677 of SEQ ID NO: 915297
agaggcauuuguucugguu

SEQ ID NO: 1069425 - RNA, 19 nt, Artificial Sequence
  Description of Artificial Sequence: Synthetic oligonucleotide
  Antisense strand to SEQ ID NO: 1069424
aaccagaacaaaugccucu

SEQ ID NO: 1069426 - RNA, 19 nt, Artificial Sequence
  Description of Artificial Sequence: Synthetic oligonucleotide
  Sense strand starting at position 3710 of SEQ ID NO: 915297
ggccaucuccagugaccua

SEQ ID NO: 1069427 - RNA, 19 nt, Artificial Sequence
  Description of Artificial Sequence: Synthetic oligonucleotide
  Antisense strand to SEQ ID NO: 1069426
uaggucacuggagauggcc

SEQ ID NO: 1069428 - RNA, 19 nt, Artificial Sequence
  Description of Artificial Sequence: Synthetic oligonucleotide
  Sense strand starting at position 3721 of SEQ ID NO: 915297
gugaccuaguuucuuggua

SEQ ID NO: 1069429 - RNA, 19 nt, Artificial Sequence
  Description of Artificial Sequence: Synthetic oligonucleotide
  Antisense strand to SEQ ID NO: 1069428
uaccaagaaacuaggucac

SEQ ID NO: 1069430 - RNA, 19 nt, Artificial Sequence
  Description of Artificial Sequence: Synthetic oligonucleotide
  Sense strand starting at position 3722 of SEQ ID NO: 915297
ugaccuaguuucuugguaa

SEQ ID NO: 1069431 - RNA, 19 nt, Artificial Sequence
  Description of Artificial Sequence: Synthetic oligonucleotide
  Antisense strand to SEQ ID NO: 1069430
uuaccaagaaacuagguca

SEQ ID NO: 1069432 - RNA, 19 nt, Artificial Sequence
  Description of Artificial Sequence: Synthetic oligonucleotide
  Sense strand starting at position 3780 of SEQ ID NO: 915297
cucagauguccugaggucu

SEQ ID NO: 1069433 - RNA, 19 nt, Artificial Sequence
  Description of Artificial Sequence: Synthetic oligonucleotide
  Antisense strand to SEQ ID NO: 1069432
agaccucaggacaucugag

SEQ ID NO: 1069434 - RNA, 19 nt, Artificial Sequence
  Description of Artificial Sequence: Synthetic oligonucleotide
  Sense strand starting at position 587 of SEQ ID NO: 915298
gggagaccugucugaauau

SEQ ID NO: 1069435 - RNA, 19 nt, Artificial Sequence
  Description of Artificial Sequence: Synthetic oligonucleotide
  Antisense strand to SEQ ID NO: 1069434
auauucagacaggucuccc

SEQ ID NO: 1069436 - RNA, 19 nt, Artificial Sequence
  Description of Artificial Sequence: Synthetic oligonucleotide
  Sense strand starting at position 656 of SEQ ID NO: 915298
auccuuucugguugucaca

SEQ ID NO: 1069437 - RNA, 19 nt, Artificial Sequence
  Description of Artificial Sequence: Synthetic oligonucleotide
  Antisense strand to SEQ ID NO: 1069436
ugugacaaccagaaaggau

SEQ ID NO: 1069438 - RNA, 19 nt, Artificial Sequence
  Description of Artificial Sequence: Synthetic oligonucleotide
  Sense strand starting at position 669 of SEQ ID NO: 915298
gucacagcuucugucaaga

SEQ ID NO: 1069439 - RNA, 19 nt, Artificial Sequence
  Description of Artificial Sequence: Synthetic oligonucleotide
  Antisense strand to SEQ ID NO: 1069438
ucuugacagaagcugugac

SEQ ID NO: 1069440 - RNA, 19 nt, Artificial Sequence
  Description of Artificial Sequence: Synthetic oligonucleotide
  Sense strand starting at position 733 of SEQ ID NO: 915298
accacaaugguuugaaaug

SEQ ID NO: 1069441 - RNA, 19 nt, Artificial Sequence
  Description of Artificial Sequence: Synthetic oligonucleotide
  Antisense strand to SEQ ID NO: 1069440
cauuucaaaccauuguggu

SEQ ID NO: 1069442 - RNA, 19 nt, Artificial Sequence
  Description of Artificial Sequence: Synthetic oligonucleotide
  Sense strand starting at position 734 of SEQ ID NO: 915298
ccacaaugguuugaaauga

SEQ ID NO: 1069443 - RNA, 19 nt, Artificial Sequence
  Description of Artificial Sequence: Synthetic oligonucleotide
  Antisense strand to SEQ ID NO: 1069442
ucauuucaaaccauugugg

SEQ ID NO: 1069444 - RNA, 19 nt, Artificial Sequence
  Description of Artificial Sequence: Synthetic oligonucleotide
  Sense strand starting at position 742 of SEQ ID NO: 915298
guuugaaaugacgguguuu

SEQ ID NO: 1069445 - RNA, 19 nt, Artificial Sequence
  Description of Artificial Sequence: Synthetic oligonucleotide
  Antisense strand to SEQ ID NO: 1069444
aaacaccgucauuucaaac

SEQ ID NO: 1069446 - RNA, 19 nt, Artificial Sequence
  Description of Artificial Sequence: Synthetic oligonucleotide
  Sense strand starting at position 762 of SEQ ID NO: 915298
aaaggaguugcuggugaga

SEQ ID NO: 1069447 - RNA, 19 nt, Artificial Sequence
  Description of Artificial Sequence: Synthetic oligonucleotide
  Antisense strand to SEQ ID NO: 1069446
ucucaccagcaacuccuuu

SEQ ID NO: 1069448 - RNA, 19 nt, Artificial Sequence
  Description of Artificial Sequence: Synthetic oligonucleotide
  Sense strand starting at position 821 of SEQ ID NO: 915298
auucucagauuccugggaa

SEQ ID NO: 1069449 - RNA, 19 nt, Artificial Sequence
  Description of Artificial Sequence: Synthetic oligonucleotide
  Antisense strand to SEQ ID NO: 1069448
uucccaggaaucugagaau

SEQ ID NO: 1069450 - RNA, 19 nt, Artificial Sequence
  Description of Artificial Sequence: Synthetic oligonucleotide
  Sense strand starting at position 825 of SEQ ID NO: 915298
ucagauuccugggaaggag

SEQ ID NO: 1069451 - RNA, 19 nt, Artificial Sequence
  Description of Artificial Sequence: Synthetic oligonucleotide
  Antisense strand to SEQ ID NO: 1069450
cuccuucccaggaaucuga

SEQ ID NO: 1069452 - RNA, 19 nt, Artificial Sequence
  Description of Artificial Sequence: Synthetic oligonucleotide
  Sense strand starting at position 876 of SEQ ID NO: 915298
gcuggagagugagagauaa

SEQ ID NO: 1069453 - RNA, 19 nt, Artificial Sequence
  Description of Artificial Sequence: Synthetic oligonucleotide
  Antisense strand to SEQ ID NO: 1069452
uuaucucucacucuccagc

SEQ ID NO: 1069454 - RNA, 19 nt, Artificial Sequence
  Description of Artificial Sequence: Synthetic oligonucleotide
  Sense strand starting at position 929 of SEQ ID NO: 915298
caccuaugcugauugguga

SEQ ID NO: 1069455 - RNA, 19 nt, Artificial Sequence
  Description of Artificial Sequence: Synthetic oligonucleotide
  Antisense strand to SEQ ID NO: 1069454
ucaccaaucagcauaggug

SEQ ID NO: 1069456 - RNA, 19 nt, Artificial Sequence
  Description of Artificial Sequence: Synthetic oligonucleotide
  Sense strand starting at position 937 of SEQ ID NO: 915298
cugauuggugauggcucaa

SEQ ID NO: 1069457 - RNA, 19 nt, Artificial Sequence
  Description of Artificial Sequence: Synthetic oligonucleotide
  Antisense strand to SEQ ID NO: 1069456
uugagccaucaccaaucag

SEQ ID NO: 1069458 - RNA, 19 nt, Artificial Sequence
  Description of Artificial Sequence: Synthetic oligonucleotide
  Sense strand starting at position 1236 of SEQ ID NO: 915298
gcaauugguccguuuguuu

SEQ ID NO: 1069459 - RNA, 19 nt, Artificial Sequence
  Description of Artificial Sequence: Synthetic oligonucleotide
  Antisense strand to SEQ ID NO: 1069458
aaacaaacggaccaauugc

SEQ ID NO: 1069460 - RNA, 19 nt, Artificial Sequence
  Description of Artificial Sequence: Synthetic oligonucleotide
  Sense strand starting at position 1415 of SEQ ID NO: 915298
aagugaagguuucuggguu

SEQ ID NO: 1069461 - RNA, 19 nt, Artificial Sequence
  Description of Artificial Sequence: Synthetic oligonucleotide
  Antisense strand to SEQ ID NO: 1069460
aacccagaaaccuucacuu

SEQ ID NO: 1069462 - RNA, 19 nt, Artificial Sequence
  Description of Artificial Sequence: Synthetic oligonucleotide
  Sense strand starting at position 1901 of SEQ ID NO: 915298
gccacuuacuuuguguaca

SEQ ID NO: 1069463 - RNA, 19 nt, Artificial Sequence
  Description of Artificial Sequence: Synthetic oligonucleotide
  Antisense strand to SEQ ID NO: 1069462
uguacacaaaguaaguggc

SEQ ID NO: 1069464 - RNA, 19 nt, Artificial Sequence
  Description of Artificial Sequence: Synthetic oligonucleotide
  Sense strand starting at position 1916 of SEQ ID NO: 915298
uacagaggguucuugugaa

SEQ ID NO: 1069465 - RNA, 19 nt, Artificial Sequence
  Description of Artificial Sequence: Synthetic oligonucleotide
  Antisense strand to SEQ ID NO: 1069464
uucacaagaacccucugua

SEQ ID NO: 1069466 - RNA, 19 nt, Artificial Sequence
  Description of Artificial Sequence: Synthetic oligonucleotide
  Sense strand starting at position 1939 of SEQ ID NO: 915298
ccugaagaguccucaccaa

SEQ ID NO: 1069467 - RNA, 19 nt, Artificial Sequence
  Description of Artificial Sequence: Synthetic oligonucleotide
  Antisense strand to SEQ ID NO: 1069466
uuggugaggacucuucagg

SEQ ID NO: 1069468 - RNA, 19 nt, Artificial Sequence
  Description of Artificial Sequence: Synthetic oligonucleotide
  Sense strand starting at position 2612 of SEQ ID NO: 915298
acgcuagacucuucuugac

SEQ ID NO: 1069469 - RNA, 19 nt, Artificial Sequence
  Description of Artificial Sequence: Synthetic oligonucleotide
  Antisense strand to SEQ ID NO: 1069468
gucaagaagagucuagcgu

SEQ ID NO: 1069470 - RNA, 19 nt, Artificial Sequence
  Description of Artificial Sequence: Synthetic oligonucleotide
  Sense strand starting at position 2614 of SEQ ID NO: 915298
gcuagacucuucuugacuu

SEQ ID NO: 1069471 - RNA, 19 nt, Artificial Sequence
  Description of Artificial Sequence: Synthetic oligonucleotide
  Antisense strand to SEQ ID NO: 1069470
aagucaagaagagucuagc

SEQ ID NO: 1069472 - RNA, 19 nt, Artificial Sequence
  Description of Artificial Sequence: Synthetic oligonucleotide
  Sense strand starting at position 2649 of SEQ ID NO: 915298
gucagagcucaucaauaaa

SEQ ID NO: 1069473 - RNA, 19 nt, Artificial Sequence
  Description of Artificial Sequence: Synthetic oligonucleotide
  Antisense strand to SEQ ID NO: 1069472
uuuauugaugagcucugac

SEQ ID NO: 1069474 - RNA, 19 nt, Artificial Sequence
  Description of Artificial Sequence: Synthetic oligonucleotide
  Sense strand starting at position 3095 of SEQ ID NO: 915298
gcgaaagucggcuuucucu

SEQ ID NO: 1069475 - RNA, 19 nt, Artificial Sequence
  Description of Artificial Sequence: Synthetic oligonucleotide
  Antisense strand to SEQ ID NO: 1069474
agagaaagccgacuuucgc

SEQ ID NO: 1069476 - RNA, 19 nt, Artificial Sequence
  Description of Artificial Sequence: Synthetic oligonucleotide
  Sense strand starting at position 3130 of SEQ ID NO: 915298
uuuccaagcgagcauuaaa

SEQ ID NO: 1069477 - RNA, 19 nt, Artificial Sequence
  Description of Artificial Sequence: Synthetic oligonucleotide
  Antisense strand to SEQ ID NO: 1069476
uuuaaugcucgcuuggaaa

SEQ ID NO: 1069478 - RNA, 19 nt, Artificial Sequence
  Description of Artificial Sequence: Synthetic oligonucleotide
  Sense strand starting at position 3133 of SEQ ID NO: 915298
ccaagcgagcauuaaagaa

SEQ ID NO: 1069479 - RNA, 19 nt, Artificial Sequence
  Description of Artificial Sequence: Synthetic oligonucleotide
  Antisense strand to SEQ ID NO: 1069478
uucuuuaaugcucgcuugg

SEQ ID NO: 1069480 - RNA, 19 nt, Artificial Sequence
  Description of Artificial Sequence: Synthetic oligonucleotide
  Sense strand starting at position 3216 of SEQ ID NO: 915298
ggaagugauucuguccgaa

SEQ ID NO: 1069481 - RNA, 19 nt, Artificial Sequence
  Description of Artificial Sequence: Synthetic oligonucleotide
  Antisense strand to SEQ ID NO: 1069480
uucggacagaaucacuucc

SEQ ID NO: 1069482 - RNA, 19 nt, Artificial Sequence
  Description of Artificial Sequence: Synthetic oligonucleotide
  Sense strand starting at position 3218 of SEQ ID NO: 915298
aagugauucuguccgaacu

SEQ ID NO: 1069483 - RNA, 19 nt, Artificial Sequence
  Description of Artificial Sequence: Synthetic oligonucleotide
  Antisense strand to SEQ ID NO: 1069482
aguucggacagaaucacuu

SEQ ID NO: 1069484 - RNA, 19 nt, Artificial Sequence
  Description of Artificial Sequence: Synthetic oligonucleotide
  Sense strand starting at position 3219 of SEQ ID NO: 915298
agugauucuguccgaacug

SEQ ID NO: 1069485 - RNA, 19 nt, Artificial Sequence
  Description of Artificial Sequence: Synthetic oligonucleotide
  Antisense strand to SEQ ID NO: 1069484
caguucggacagaaucacu

SEQ ID NO: 1069486 - RNA, 19 nt, Artificial Sequence
  Description of Artificial Sequence: Synthetic oligonucleotide
  Sense strand starting at position 3234 of SEQ ID NO: 915298
acuggaggcgaguaucauu

SEQ ID NO: 1069487 - RNA, 19 nt, Artificial Sequence
  Description of Artificial Sequence: Synthetic oligonucleotide
  Antisense strand to SEQ ID NO: 1069486
aaugauacucgccuccagu

SEQ ID NO: 1069488 - RNA, 19 nt, Artificial Sequence
  Description of Artificial Sequence: Synthetic oligonucleotide
  Sense strand starting at position 3296 of SEQ ID NO: 915298
uaagcuuugccucggaaag

SEQ ID NO: 1069489 - RNA, 19 nt, Artificial Sequence
  Description of Artificial Sequence: Synthetic oligonucleotide
  Antisense strand to SEQ ID NO: 1069488
cuuuccgaggcaaagcuua

SEQ ID NO: 1069490 - RNA, 19 nt, Artificial Sequence
  Description of Artificial Sequence: Synthetic oligonucleotide
  Sense strand starting at position 3297 of SEQ ID NO: 915298
aagcuuugccucggaaaga

SEQ ID NO: 1069491 - RNA, 19 nt, Artificial Sequence
  Description of Artificial Sequence: Synthetic oligonucleotide
  Antisense strand to SEQ ID NO: 1069490
ucuuuccgaggcaaagcuu

SEQ ID NO: 1069492 - RNA, 19 nt, Artificial Sequence
  Description of Artificial Sequence: Synthetic oligonucleotide
  Sense strand starting at position 3319 of SEQ ID NO: 915298
agccguaaucuuguugcua

SEQ ID NO: 1069493 - RNA, 19 nt, Artificial Sequence
  Description of Artificial Sequence: Synthetic oligonucleotide
  Antisense strand to SEQ ID NO: 1069492
uagcaacaagauuacggcu

SEQ ID NO: 1069494 - RNA, 19 nt, Artificial Sequence
  Description of Artificial Sequence: Synthetic oligonucleotide
  Sense strand starting at position 3349 of SEQ ID NO: 915298
ggcacuggcucuuugaauc

SEQ ID NO: 1069495 - RNA, 19 nt, Artificial Sequence
  Description of Artificial Sequence: Synthetic oligonucleotide
  Antisense strand to SEQ ID NO: 1069494
gauucaaagagccagugcc

SEQ ID NO: 1069496 - RNA, 19 nt, Artificial Sequence
  Description of Artificial Sequence: Synthetic oligonucleotide
  Sense strand starting at position 3491 of SEQ ID NO: 915298
gggaaagacuccuggaaac

SEQ ID NO: 1069497 - RNA, 19 nt, Artificial Sequence
  Description of Artificial Sequence: Synthetic oligonucleotide
  Antisense strand to SEQ ID NO: 1069496
guuuccaggagucuuuccc

SEQ ID NO: 1069498 - RNA, 19 nt, Artificial Sequence
  Description of Artificial Sequence: Synthetic oligonucleotide
  Sense strand starting at position 3504 of SEQ ID NO: 915298
ggaaacuccuccgcacaaa

SEQ ID NO: 1069499 - RNA, 19 nt, Artificial Sequence
  Description of Artificial Sequence: Synthetic oligonucleotide
  Antisense strand to SEQ ID NO: 1069498
uuugugcggaggaguuucc

SEQ ID NO: 1069500 - RNA, 19 nt, Artificial Sequence
  Description of Artificial Sequence: Synthetic oligonucleotide
  Sense strand starting at position 3543 of SEQ ID NO: 915298
gcugcuucccaugugucaa

SEQ ID NO: 1069501 - RNA, 19 nt, Artificial Sequence
  Description of Artificial Sequence: Synthetic oligonucleotide
  Antisense strand to SEQ ID NO: 1069500
uugacacaugggaagcagc

SEQ ID NO: 1069502 - RNA, 19 nt, Artificial Sequence
  Description of Artificial Sequence: Synthetic oligonucleotide
  Sense strand starting at position 3545 of SEQ ID NO: 915298
ugcuucccaugugucaaua

SEQ ID NO: 1069503 - RNA, 19 nt, Artificial Sequence
  Description of Artificial Sequence: Synthetic oligonucleotide
  Antisense strand to SEQ ID NO: 1069502
uauugacacaugggaagca

SEQ ID NO: 1069504 - RNA, 19 nt, Artificial Sequence
  Description of Artificial Sequence: Synthetic oligonucleotide
  Sense strand starting at position 3585 of SEQ ID NO: 915298
ccagaaugaggccgaguuu

SEQ ID NO: 1069505 - RNA, 19 nt, Artificial Sequence
  Description of Artificial Sequence: Synthetic oligonucleotide
  Antisense strand to SEQ ID NO: 1069504
aaacucggccucauucugg

SEQ ID NO: 1069506 - RNA, 19 nt, Artificial Sequence
  Description of Artificial Sequence: Synthetic oligonucleotide
  Sense strand starting at position 3629 of SEQ ID NO: 915298
gagugagauuuccucguuc

SEQ ID NO: 1069507 - RNA, 19 nt, Artificial Sequence
  Description of Artificial Sequence: Synthetic oligonucleotide
  Antisense strand to SEQ ID NO: 1069506
gaacgaggaaaucucacuc

SEQ ID NO: 1069508 - RNA, 19 nt, Artificial Sequence
  Description of Artificial Sequence: Synthetic oligonucleotide
  Sense strand starting at position 3631 of SEQ ID NO: 915298
gugagauuuccucguucuc

SEQ ID NO: 1069509 - RNA, 19 nt, Artificial Sequence
  Description of Artificial Sequence: Synthetic oligonucleotide
  Antisense strand to SEQ ID NO: 1069508
gagaacgaggaaaucucac

SEQ ID NO: 1069510 - RNA, 19 nt, Artificial Sequence
  Description of Artificial Sequence: Synthetic oligonucleotide
  Sense strand starting at position 3633 of SEQ ID NO: 915298
gagauuuccucguucucuc

SEQ ID NO: 1069511 - RNA, 19 nt, Artificial Sequence
  Description of Artificial Sequence: Synthetic oligonucleotide
  Antisense strand to SEQ ID NO: 1069510
gagagaacgaggaaaucuc

SEQ ID NO: 1069512 - RNA, 19 nt, Artificial Sequence
  Description of Artificial Sequence: Synthetic oligonucleotide
  Sense strand starting at position 3781 of SEQ ID NO: 915298
uugccagagguguguacaa

SEQ ID NO: 1069513 - RNA, 19 nt, Artificial Sequence
  Description of Artificial Sequence: Synthetic oligonucleotide
  Antisense strand to SEQ ID NO: 1069512
uuguacacaccucuggcaa

SEQ ID NO: 1069514 - RNA, 19 nt, Artificial Sequence
  Description of Artificial Sequence: Synthetic oligonucleotide
  Sense strand starting at position 92 of SEQ ID NO: 915299
ugcaaaggucacuggcuau

SEQ ID NO: 1069515 - RNA, 19 nt, Artificial Sequence
  Description of Artificial Sequence: Synthetic oligonucleotide
  Antisense strand to SEQ ID NO: 1069514
auagccagugaccuuugca

SEQ ID NO: 1069516 - RNA, 19 nt, Artificial Sequence
  Description of Artificial Sequence: Synthetic oligonucleotide
  Sense strand starting at position 95 of SEQ ID NO: 915299
aaaggucacuggcuauaaa

SEQ ID NO: 1069517 - RNA, 19 nt, Artificial Sequence
  Description of Artificial Sequence: Synthetic oligonucleotide
  Antisense strand to SEQ ID NO: 1069516
uuuauagccagugaccuuu

SEQ ID NO: 1069518 - RNA, 19 nt, Artificial Sequence
  Description of Artificial Sequence: Synthetic oligonucleotide
  Sense strand starting at position 223 of SEQ ID NO: 915299
ccaaguucgaguuaaacgu

SEQ ID NO: 1069519 - RNA, 19 nt, Artificial Sequence
  Description of Artificial Sequence: Synthetic oligonucleotide
  Antisense strand to SEQ ID NO: 1069518
acguuuaacucgaacuugg

SEQ ID NO: 1069520 - RNA, 19 nt, Artificial Sequence
  Description of Artificial Sequence: Synthetic oligonucleotide
  Sense strand starting at position 231 of SEQ ID NO: 915299
gaguuaaacguccagaaug

SEQ ID NO: 1069521 - RNA, 19 nt, Artificial Sequence
  Description of Artificial Sequence: Synthetic oligonucleotide
  Antisense strand to SEQ ID NO: 1069520
cauucuggacguuuaacuc

SEQ ID NO: 1069522 - RNA, 19 nt, Artificial Sequence
  Description of Artificial Sequence: Synthetic oligonucleotide
  Sense strand starting at position 329 of SEQ ID NO: 915299
cuagaaaucgcucaugaau

SEQ ID NO: 1069523 - RNA, 19 nt, Artificial Sequence
  Description of Artificial Sequence: Synthetic oligonucleotide
  Antisense strand to SEQ ID NO: 1069522
auucaugagcgauuucuag

SEQ ID NO: 1069524 - RNA, 19 nt, Artificial Sequence
  Description of Artificial Sequence: Synthetic oligonucleotide
  Sense strand starting at position 556 of SEQ ID NO: 915299
cgacuaauuagccgggaga

SEQ ID NO: 1069525 - RNA, 19 nt, Artificial Sequence
  Description of Artificial Sequence: Synthetic oligonucleotide
  Antisense strand to SEQ ID NO: 1069524
ucucccggcuaauuagucg

SEQ ID NO: 1069526 - RNA, 19 nt, Artificial Sequence
  Description of Artificial Sequence: Synthetic oligonucleotide
  Sense strand starting at position 557 of SEQ ID NO: 915299
gacuaauuagccgggagaa

SEQ ID NO: 1069527 - RNA, 19 nt, Artificial Sequence
  Description of Artificial Sequence: Synthetic oligonucleotide
  Antisense strand to SEQ ID NO: 1069526
uucucccggcuaauuaguc

SEQ ID NO: 1069528 - RNA, 19 nt, Artificial Sequence
  Description of Artificial Sequence: Synthetic oligonucleotide
  Sense strand starting at position 558 of SEQ ID NO: 915299
acuaauuagccgggagaag

SEQ ID NO: 1069529 - RNA, 19 nt, Artificial Sequence
  Description of Artificial Sequence: Synthetic oligonucleotide
  Antisense strand to SEQ ID NO: 1069528
cuucucccggcuaauuagu

SEQ ID NO: 1069530 - RNA, 19 nt, Artificial Sequence
  Description of Artificial Sequence: Synthetic oligonucleotide
  Sense strand starting at position 727 of SEQ ID NO: 915299
gagacuggaucagaggaaa

SEQ ID NO: 1069531 - RNA, 19 nt, Artificial Sequence
  Description of Artificial Sequence: Synthetic oligonucleotide
  Antisense strand to SEQ ID NO: 1069530
uuuccucugauccagucuc

SEQ ID NO: 1069532 - RNA, 19 nt, Artificial Sequence
  Description of Artificial Sequence: Synthetic oligonucleotide
  Sense strand starting at position 1628 of SEQ ID NO: 915299
gggagaccugucugaauau

SEQ ID NO: 1069533 - RNA, 19 nt, Artificial Sequence
  Description of Artificial Sequence: Synthetic oligonucleotide
  Antisense strand to SEQ ID NO: 1069532
auauucagacaggucuccc

SEQ ID NO: 1069534 - RNA, 19 nt, Artificial Sequence
  Description of Artificial Sequence: Synthetic oligonucleotide
  Sense strand starting at position 1629 of SEQ ID NO: 915299
ggagaccugucugaauauu

SEQ ID NO: 1069535 - RNA, 19 nt, Artificial Sequence
  Description of Artificial Sequence: Synthetic oligonucleotide
  Antisense strand to SEQ ID NO: 1069534
aauauucagacaggucucc

SEQ ID NO: 1069536 - RNA, 19 nt, Artificial Sequence
  Description of Artificial Sequence: Synthetic oligonucleotide
  Sense strand starting at position 1697 of SEQ ID NO: 915299
auccuuucugguugucaca

SEQ ID NO: 1069537 - RNA, 19 nt, Artificial Sequence
  Description of Artificial Sequence: Synthetic oligonucleotide
  Antisense strand to SEQ ID NO: 1069536
ugugacaaccagaaaggau

SEQ ID NO: 1069538 - RNA, 19 nt, Artificial Sequence
  Description of Artificial Sequence: Synthetic oligonucleotide
  Sense strand starting at position 1710 of SEQ ID NO: 915299
gucacagcuucugucaaga

SEQ ID NO: 1069539 - RNA, 19 nt, Artificial Sequence
  Description of Artificial Sequence: Synthetic oligonucleotide
  Antisense strand to SEQ ID NO: 1069538
ucuugacagaagcugugac

SEQ ID NO: 1069540 - RNA, 19 nt, Artificial Sequence
  Description of Artificial Sequence: Synthetic oligonucleotide
  Sense strand starting at position 1756 of SEQ ID NO: 915299
ugcuguuguugcuugaaga

SEQ ID NO: 1069541 - RNA, 19 nt, Artificial Sequence
  Description of Artificial Sequence: Synthetic oligonucleotide
  Antisense strand to SEQ ID NO: 1069540
ucuucaagcaacaacagca

SEQ ID NO: 1069542 - RNA, 19 nt, Artificial Sequence
  Description of Artificial Sequence: Synthetic oligonucleotide
  Sense strand starting at position 1757 of SEQ ID NO: 915299
gcuguuguugcuugaagac

SEQ ID NO: 1069543 - RNA, 19 nt, Artificial Sequence
  Description of Artificial Sequence: Synthetic oligonucleotide
  Antisense strand to SEQ ID NO: 1069542
gucuucaagcaacaacagc

SEQ ID NO: 1069544 - RNA, 19 nt, Artificial Sequence
  Description of Artificial Sequence: Synthetic oligonucleotide
  Sense strand starting at position 1774 of SEQ ID NO: 915299
accacaaugguuugaaaug

SEQ ID NO: 1069545 - RNA, 19 nt, Artificial Sequence
  Description of Artificial Sequence: Synthetic oligonucleotide
  Antisense strand to SEQ ID NO: 1069544
cauuucaaaccauuguggu

SEQ ID NO: 1069546 - RNA, 19 nt, Artificial Sequence
  Description of Artificial Sequence: Synthetic oligonucleotide
  Sense strand starting at position 1775 of SEQ ID NO: 915299
ccacaaugguuugaaauga

SEQ ID NO: 1069547 - RNA, 19 nt, Artificial Sequence
  Description of Artificial Sequence: Synthetic oligonucleotide
  Antisense strand to SEQ ID NO: 1069546
ucauuucaaaccauugugg

SEQ ID NO: 1069548 - RNA, 19 nt, Artificial Sequence
  Description of Artificial Sequence: Synthetic oligonucleotide
  Sense strand starting at position 1783 of SEQ ID NO: 915299
guuugaaaugacgguguuu

SEQ ID NO: 1069549 - RNA, 19 nt, Artificial Sequence
  Description of Artificial Sequence: Synthetic oligonucleotide
  Antisense strand to SEQ ID NO: 1069548
aaacaccgucauuucaaac

SEQ ID NO: 1069550 - RNA, 19 nt, Artificial Sequence
  Description of Artificial Sequence: Synthetic oligonucleotide
  Sense strand starting at position 1803 of SEQ ID NO: 915299
aaaggaguugcuggugaga

SEQ ID NO: 1069551 - RNA, 19 nt, Artificial Sequence
  Description of Artificial Sequence: Synthetic oligonucleotide
  Antisense strand to SEQ ID NO: 1069550
ucucaccagcaacuccuuu

SEQ ID NO: 1069552 - RNA, 19 nt, Artificial Sequence
  Description of Artificial Sequence: Synthetic oligonucleotide
  Sense strand starting at position 1840 of SEQ ID NO: 915299
gcuggguuggugugugaga

SEQ ID NO: 1069553 - RNA, 19 nt, Artificial Sequence
  Description of Artificial Sequence: Synthetic oligonucleotide
  Antisense strand to SEQ ID NO: 1069552
ucucacacaccaacccagc

SEQ ID NO: 1069554 - RNA, 19 nt, Artificial Sequence
  Description of Artificial Sequence: Synthetic oligonucleotide
  Sense strand starting at position 1862 of SEQ ID NO: 915299
auucucagauuccugggaa

SEQ ID NO: 1069555 - RNA, 19 nt, Artificial Sequence
  Description of Artificial Sequence: Synthetic oligonucleotide
  Antisense strand to SEQ ID NO: 1069554
uucccaggaaucugagaau

SEQ ID NO: 1069556 - RNA, 19 nt, Artificial Sequence
  Description of Artificial Sequence: Synthetic oligonucleotide
  Sense strand starting at position 1866 of SEQ ID NO: 915299
ucagauuccugggaaggag

SEQ ID NO: 1069557 - RNA, 19 nt, Artificial Sequence
  Description of Artificial Sequence: Synthetic oligonucleotide
  Antisense strand to SEQ ID NO: 1069556
cuccuucccaggaaucuga

SEQ ID NO: 1069558 - RNA, 19 nt, Artificial Sequence
  Description of Artificial Sequence: Synthetic oligonucleotide
  Sense strand starting at position 1917 of SEQ ID NO: 915299
gcuggagagugagagauaa

SEQ ID NO: 1069559 - RNA, 19 nt, Artificial Sequence
  Description of Artificial Sequence: Synthetic oligonucleotide
  Antisense strand to SEQ ID NO: 1069558
uuaucucucacucuccagc

SEQ ID NO: 1069560 - RNA, 19 nt, Artificial Sequence
  Description of Artificial Sequence: Synthetic oligonucleotide
  Sense strand starting at position 1970 of SEQ ID NO: 915299
caccuaugcugauugguga

SEQ ID NO: 1069561 - RNA, 19 nt, Artificial Sequence
  Description of Artificial Sequence: Synthetic oligonucleotide
  Antisense strand to SEQ ID NO: 1069560
ucaccaaucagcauaggug

SEQ ID NO: 1069562 - RNA, 19 nt, Artificial Sequence
  Description of Artificial Sequence: Synthetic oligonucleotide
  Sense strand starting at position 1978 of SEQ ID NO: 915299
cugauuggugauggcucaa

SEQ ID NO: 1069563 - RNA, 19 nt, Artificial Sequence
  Description of Artificial Sequence: Synthetic oligonucleotide
  Antisense strand to SEQ ID NO: 1069562
uugagccaucaccaaucag

SEQ ID NO: 1069564 - RNA, 19 nt, Artificial Sequence
  Description of Artificial Sequence: Synthetic oligonucleotide
  Sense strand starting at position 2277 of SEQ ID NO: 915299
gcaauugguccguuuguuu

SEQ ID NO: 1069565 - RNA, 19 nt, Artificial Sequence
  Description of Artificial Sequence: Synthetic oligonucleotide
  Antisense strand to SEQ ID NO: 1069564
aaacaaacggaccaauugc

SEQ ID NO: 1069566 - RNA, 19 nt, Artificial Sequence
  Description of Artificial Sequence: Synthetic oligonucleotide
  Sense strand starting at position 2280 of SEQ ID NO: 915299
auugguccguuuguuugaa

SEQ ID NO: 1069567 - RNA, 19 nt, Artificial Sequence
  Description of Artificial Sequence: Synthetic oligonucleotide
  Antisense strand to SEQ ID NO: 1069566
uucaaacaaacggaccaau

SEQ ID NO: 1069568 - RNA, 19 nt, Artificial Sequence
  Description of Artificial Sequence: Synthetic oligonucleotide
  Sense strand starting at position 2281 of SEQ ID NO: 915299
uugguccguuuguuugaau

SEQ ID NO: 1069569 - RNA, 19 nt, Artificial Sequence
  Description of Artificial Sequence: Synthetic oligonucleotide
  Antisense strand to SEQ ID NO: 1069568
auucaaacaaacggaccaa

SEQ ID NO: 1069570 - RNA, 19 nt, Artificial Sequence
  Description of Artificial Sequence: Synthetic oligonucleotide
  Sense strand starting at position 2282 of SEQ ID NO: 915299
ugguccguuuguuugaaua

SEQ ID NO: 1069571 - RNA, 19 nt, Artificial Sequence
  Description of Artificial Sequence: Synthetic oligonucleotide
  Antisense strand to SEQ ID NO: 1069570
uauucaaacaaacggacca

SEQ ID NO: 1069572 - RNA, 19 nt, Artificial Sequence
  Description of Artificial Sequence: Synthetic oligonucleotide
  Sense strand starting at position 2456 of SEQ ID NO: 915299
aagugaagguuucuggguu

SEQ ID NO: 1069573 - RNA, 19 nt, Artificial Sequence
  Description of Artificial Sequence: Synthetic oligonucleotide
  Antisense strand to SEQ ID NO: 1069572
aacccagaaaccuucacuu

SEQ ID NO: 1069574 - RNA, 19 nt, Artificial Sequence
  Description of Artificial Sequence: Synthetic oligonucleotide
  Sense strand starting at position 2942 of SEQ ID NO: 915299
gccacuuacuuuguguaca

SEQ ID NO: 1069575 - RNA, 19 nt, Artificial Sequence
  Description of Artificial Sequence: Synthetic oligonucleotide
  Antisense strand to SEQ ID NO: 1069574
uguacacaaaguaaguggc

SEQ ID NO: 1069576 - RNA, 19 nt, Artificial Sequence
  Description of Artificial Sequence: Synthetic oligonucleotide
  Sense strand starting at position 2957 of SEQ ID NO: 915299
uacagaggguucuugugaa

SEQ ID NO: 1069577 - RNA, 19 nt, Artificial Sequence
  Description of Artificial Sequence: Synthetic oligonucleotide
  Antisense strand to SEQ ID NO: 1069576
uucacaagaacccucugua

SEQ ID NO: 1069578 - RNA, 19 nt, Artificial Sequence
  Description of Artificial Sequence: Synthetic oligonucleotide
  Sense strand starting at position 2980 of SEQ ID NO: 915299
ccugaagaguccucaccaa

SEQ ID NO: 1069579 - RNA, 19 nt, Artificial Sequence
  Description of Artificial Sequence: Synthetic oligonucleotide
  Antisense strand to SEQ ID NO: 1069578
uuggugaggacucuucagg

SEQ ID NO: 1069580 - RNA, 19 nt, Artificial Sequence
  Description of Artificial Sequence: Synthetic oligonucleotide
  Sense strand starting at position 3128 of SEQ ID NO: 915299
gaccaaugcugggagggau

SEQ ID NO: 1069581 - RNA, 19 nt, Artificial Sequence
  Description of Artificial Sequence: Synthetic oligonucleotide
  Antisense strand to SEQ ID NO: 1069580
aucccucccagcauugguc

SEQ ID NO: 1069582 - RNA, 19 nt, Artificial Sequence
  Description of Artificial Sequence: Synthetic oligonucleotide
  Sense strand starting at position 3205 of SEQ ID NO: 915299
uggcgaugucgguauguca

SEQ ID NO: 1069583 - RNA, 19 nt, Artificial Sequence
  Description of Artificial Sequence: Synthetic oligonucleotide
  Antisense strand to SEQ ID NO: 1069582
ugacauaccgacaucgcca

SEQ ID NO: 1069584 - RNA, 19 nt, Artificial Sequence
  Description of Artificial Sequence: Synthetic oligonucleotide
  Sense strand starting at position 3402 of SEQ ID NO: 915299
uguugaaugccgcacgauu

SEQ ID NO: 1069585 - RNA, 19 nt, Artificial Sequence
  Description of Artificial Sequence: Synthetic oligonucleotide
  Antisense strand to SEQ ID NO: 1069584
aaucgugcggcauucaaca

SEQ ID NO: 1069586 - RNA, 19 nt, Artificial Sequence
  Description of Artificial Sequence: Synthetic oligonucleotide
  Sense strand starting at position 3653 of SEQ ID NO: 915299
acgcuagacucuucuugac

SEQ ID NO: 1069587 - RNA, 19 nt, Artificial Sequence
  Description of Artificial Sequence: Synthetic oligonucleotide
  Antisense strand to SEQ ID NO: 1069586
gucaagaagagucuagcgu

SEQ ID NO: 1069588 - RNA, 19 nt, Artificial Sequence
  Description of Artificial Sequence: Synthetic oligonucleotide
  Sense strand starting at position 3655 of SEQ ID NO: 915299
gcuagacucuucuugacuu

SEQ ID NO: 1069589 - RNA, 19 nt, Artificial Sequence
  Description of Artificial Sequence: Synthetic oligonucleotide
  Antisense strand to SEQ ID NO: 1069588
aagucaagaagagucuagc

SEQ ID NO: 1069590 - RNA, 19 nt, Artificial Sequence
  Description of Artificial Sequence: Synthetic oligonucleotide
  Sense strand starting at position 3663 of SEQ ID NO: 915299
cuucuugacuuagggaaag

SEQ ID NO: 1069591 - RNA, 19 nt, Artificial Sequence
  Description of Artificial Sequence: Synthetic oligonucleotide
  Antisense strand to SEQ ID NO: 1069590
cuuucccuaagucaagaag

SEQ ID NO: 1069592 - RNA, 19 nt, Artificial Sequence
  Description of Artificial Sequence: Synthetic oligonucleotide
  Sense strand starting at position 3690 of SEQ ID NO: 915299
gucagagcucaucaauaaa

SEQ ID NO: 1069593 - RNA, 19 nt, Artificial Sequence
  Description of Artificial Sequence: Synthetic oligonucleotide
  Antisense strand to SEQ ID NO: 1069592
uuuauugaugagcucugac

SEQ ID NO: 1069594 - RNA, 19 nt, Artificial Sequence
  Description of Artificial Sequence: Synthetic oligonucleotide
  Sense strand starting at position 396 of SEQ ID NO: 915300
ugugguuugcugugauuua

SEQ ID NO: 1069595 - RNA, 19 nt, Artificial Sequence
  Description of Artificial Sequence: Synthetic oligonucleotide
  Antisense strand to SEQ ID NO: 1069594
uaaaucacagcaaaccaca

SEQ ID NO: 1069596 - RNA, 19 nt, Artificial Sequence
  Description of Artificial Sequence: Synthetic oligonucleotide
  Sense strand starting at position 407 of SEQ ID NO: 915300
gugauuuacuggccucuac

SEQ ID NO: 1069597 - RNA, 19 nt, Artificial Sequence
  Description of Artificial Sequence: Synthetic oligonucleotide
  Antisense strand to SEQ ID NO: 1069596
guagaggccaguaaaucac

SEQ ID NO: 1069598 - RNA, 19 nt, Artificial Sequence
  Description of Artificial Sequence: Synthetic oligonucleotide
  Sense strand starting at position 701 of SEQ ID NO: 915300
gagaaaugcugagcacauc

SEQ ID NO: 1069599 - RNA, 19 nt, Artificial Sequence
  Description of Artificial Sequence: Synthetic oligonucleotide
  Antisense strand to SEQ ID NO: 1069598
gaugugcucagcauuucuc

SEQ ID NO: 1069600 - RNA, 19 nt, Artificial Sequence
  Description of Artificial Sequence: Synthetic oligonucleotide
  Sense strand starting at position 727 of SEQ ID NO: 915300
agcacaaguguuugcauca

SEQ ID NO: 1069601 - RNA, 19 nt, Artificial Sequence
  Description of Artificial Sequence: Synthetic oligonucleotide
  Antisense strand to SEQ ID NO: 1069600
ugaugcaaacacuugugcu

SEQ ID NO: 1069602 - RNA, 19 nt, Artificial Sequence
  Description of Artificial Sequence: Synthetic oligonucleotide
  Sense strand starting at position 838 of SEQ ID NO: 915300
ggagguucugguugucauc

SEQ ID NO: 1069603 - RNA, 19 nt, Artificial Sequence
  Description of Artificial Sequence: Synthetic oligonucleotide
  Antisense strand to SEQ ID NO: 1069602
gaugacaaccagaaccucc

SEQ ID NO: 1069604 - RNA, 19 nt, Artificial Sequence
  Description of Artificial Sequence: Synthetic oligonucleotide
  Sense strand starting at position 847 of SEQ ID NO: 915300
gguugucaucagcaagugu

SEQ ID NO: 1069605 - RNA, 19 nt, Artificial Sequence
  Description of Artificial Sequence: Synthetic oligonucleotide
  Antisense strand to SEQ ID NO: 1069604
acacuugcugaugacaacc

SEQ ID NO: 1069606 - RNA, 19 nt, Artificial Sequence
  Description of Artificial Sequence: Synthetic oligonucleotide
  Sense strand starting at position 1473 of SEQ ID NO: 915300
aaggaaagcccucgccuua

SEQ ID NO: 1069607 - RNA, 19 nt, Artificial Sequence
  Description of Artificial Sequence: Synthetic oligonucleotide
  Antisense strand to SEQ ID NO: 1069606
uaaggcgagggcuuuccuu

SEQ ID NO: 1069608 - RNA, 19 nt, Artificial Sequence
  Description of Artificial Sequence: Synthetic oligonucleotide
  Sense strand starting at position 2565 of SEQ ID NO: 915300
guuacaugacuauguccuu

SEQ ID NO: 1069609 - RNA, 19 nt, Artificial Sequence
  Description of Artificial Sequence: Synthetic oligonucleotide
  Antisense strand to SEQ ID NO: 1069608
aaggacauagucauguaac

SEQ ID NO: 1069610 - RNA, 19 nt, Artificial Sequence
  Description of Artificial Sequence: Synthetic oligonucleotide
  Sense strand starting at position 2666 of SEQ ID NO: 915300
uugucaucugcagagcgaa

SEQ ID NO: 1069611 - RNA, 19 nt, Artificial Sequence
  Description of Artificial Sequence: Synthetic oligonucleotide
  Antisense strand to SEQ ID NO: 1069610
uucgcucugcagaugacaa

SEQ ID NO: 1069612 - RNA, 19 nt, Artificial Sequence
  Description of Artificial Sequence: Synthetic oligonucleotide
  Sense strand starting at position 2706 of SEQ ID NO: 915300
uuggaagccuuguuugaga

SEQ ID NO: 1069613 - RNA, 19 nt, Artificial Sequence
  Description of Artificial Sequence: Synthetic oligonucleotide
  Antisense strand to SEQ ID NO: 1069612
ucucaaacaaggcuuccaa

SEQ ID NO: 1069614 - RNA, 19 nt, Artificial Sequence
  Description of Artificial Sequence: Synthetic oligonucleotide
  Sense strand starting at position 2708 of SEQ ID NO: 915300
ggaagccuuguuugagaca

SEQ ID NO: 1069615 - RNA, 19 nt, Artificial Sequence
  Description of Artificial Sequence: Synthetic oligonucleotide
  Antisense strand to SEQ ID NO: 1069614
ugucucaaacaaggcuucc

SEQ ID NO: 1069616 - RNA, 19 nt, Artificial Sequence
  Description of Artificial Sequence: Synthetic oligonucleotide
  Sense strand starting at position 2768 of SEQ ID NO: 915300
agcuuugacaaguggaaca

SEQ ID NO: 1069617 - RNA, 19 nt, Artificial Sequence
  Description of Artificial Sequence: Synthetic oligonucleotide
  Antisense strand to SEQ ID NO: 1069616
uguuccacuugucaaagcu

SEQ ID NO: 1069618 - RNA, 19 nt, Artificial Sequence
  Description of Artificial Sequence: Synthetic oligonucleotide
  Sense strand starting at position 2795 of SEQ ID NO: 915300
aggcauaagucucugucau

SEQ ID NO: 1069619 - RNA, 19 nt, Artificial Sequence
  Description of Artificial Sequence: Synthetic oligonucleotide
  Antisense strand to SEQ ID NO: 1069618
augacagagacuuaugccu

SEQ ID NO: 1069620 - RNA, 19 nt, Artificial Sequence
  Description of Artificial Sequence: Synthetic oligonucleotide
  Sense strand starting at position 2796 of SEQ ID NO: 915300
ggcauaagucucugucauc

SEQ ID NO: 1069621 - RNA, 19 nt, Artificial Sequence
  Description of Artificial Sequence: Synthetic oligonucleotide
  Antisense strand to SEQ ID NO: 1069620
gaugacagagacuuaugcc

SEQ ID NO: 1069622 - RNA, 19 nt, Artificial Sequence
  Description of Artificial Sequence: Synthetic oligonucleotide
  Sense strand starting at position 2803 of SEQ ID NO: 915300
gucucugucaucgaggcuu

SEQ ID NO: 1069623 - RNA, 19 nt, Artificial Sequence
  Description of Artificial Sequence: Synthetic oligonucleotide
  Antisense strand to SEQ ID NO: 1069622
aagccucgaugacagagac

SEQ ID NO: 1069624 - RNA, 19 nt, Artificial Sequence
  Description of Artificial Sequence: Synthetic oligonucleotide
  Sense strand starting at position 2809 of SEQ ID NO: 915300
gucaucgaggcuuauuaau

SEQ ID NO: 1069625 - RNA, 19 nt, Artificial Sequence
  Description of Artificial Sequence: Synthetic oligonucleotide
  Antisense strand to SEQ ID NO: 1069624
auuaauaagccucgaugac

SEQ ID NO: 1069626 - RNA, 19 nt, Artificial Sequence
  Description of Artificial Sequence: Synthetic oligonucleotide
  Sense strand starting at position 2815 of SEQ ID NO: 915300
gaggcuuauuaauccaguu

SEQ ID NO: 1069627 - RNA, 19 nt, Artificial Sequence
  Description of Artificial Sequence: Synthetic oligonucleotide
  Antisense strand to SEQ ID NO: 1069626
aacuggauuaauaagccuc

SEQ ID NO: 1069628 - RNA, 19 nt, Artificial Sequence
  Description of Artificial Sequence: Synthetic oligonucleotide
  Sense strand starting at position 2865 of SEQ ID NO: 915300
agacacauccgugguuguu

SEQ ID NO: 1069629 - RNA, 19 nt, Artificial Sequence
  Description of Artificial Sequence: Synthetic oligonucleotide
  Antisense strand to SEQ ID NO: 1069628
aacaaccacggaugugucu

SEQ ID NO: 1069630 - RNA, 19 nt, Artificial Sequence
  Description of Artificial Sequence: Synthetic oligonucleotide
  Sense strand starting at position 2971 of SEQ ID NO: 915300
aggcgauuaggacaauagu

SEQ ID NO: 1069631 - RNA, 19 nt, Artificial Sequence
  Description of Artificial Sequence: Synthetic oligonucleotide
  Antisense strand to SEQ ID NO: 1069630
acuauuguccuaaucgccu

SEQ ID NO: 1069632 - RNA, 19 nt, Artificial Sequence
  Description of Artificial Sequence: Synthetic oligonucleotide
  Sense strand starting at position 2977 of SEQ ID NO: 915300
uuaggacaauaguuacauu

SEQ ID NO: 1069633 - RNA, 19 nt, Artificial Sequence
  Description of Artificial Sequence: Synthetic oligonucleotide
  Antisense strand to SEQ ID NO: 1069632
aauguaacuauuguccuaa

SEQ ID NO: 1069634 - RNA, 19 nt, Artificial Sequence
  Description of Artificial Sequence: Synthetic oligonucleotide
  Sense strand starting at position 2988 of SEQ ID NO: 915300
guuacauuccuaugggacu

SEQ ID NO: 1069635 - RNA, 19 nt, Artificial Sequence
  Description of Artificial Sequence: Synthetic oligonucleotide
  Antisense strand to SEQ ID NO: 1069634
agucccauaggaauguaac

SEQ ID NO: 1069636 - RNA, 19 nt, Artificial Sequence
  Description of Artificial Sequence: Synthetic oligonucleotide
  Sense strand starting at position 3007 of SEQ ID NO: 915300
uuagcuaaugcccgguaaa

SEQ ID NO: 1069637 - RNA, 19 nt, Artificial Sequence
  Description of Artificial Sequence: Synthetic oligonucleotide
  Antisense strand to SEQ ID NO: 1069636
uuuaccgggcauuagcuaa

SEQ ID NO: 1069638 - RNA, 19 nt, Artificial Sequence
  Description of Artificial Sequence: Synthetic oligonucleotide
  Sense strand starting at position 3008 of SEQ ID NO: 915300
uagcuaaugcccgguaaau

SEQ ID NO: 1069639 - RNA, 19 nt, Artificial Sequence
  Description of Artificial Sequence: Synthetic oligonucleotide
  Antisense strand to SEQ ID NO: 1069638
auuuaccgggcauuagcua

SEQ ID NO: 1069640 - RNA, 19 nt, Artificial Sequence
  Description of Artificial Sequence: Synthetic oligonucleotide
  Sense strand starting at position 3010 of SEQ ID NO: 915300
gcuaaugcccgguaaaucu

SEQ ID NO: 1069641 - RNA, 19 nt, Artificial Sequence
  Description of Artificial Sequence: Synthetic oligonucleotide
  Antisense strand to SEQ ID NO: 1069640
agauuuaccgggcauuagc

SEQ ID NO: 1069642 - RNA, 19 nt, Artificial Sequence
  Description of Artificial Sequence: Synthetic oligonucleotide
  Sense strand starting at position 3018 of SEQ ID NO: 915300
ccgguaaaucuacguaaga

SEQ ID NO: 1069643 - RNA, 19 nt, Artificial Sequence
  Description of Artificial Sequence: Synthetic oligonucleotide
  Antisense strand to SEQ ID NO: 1069642
ucuuacguagauuuaccgg

SEQ ID NO: 1069644 - RNA, 19 nt, Artificial Sequence
  Description of Artificial Sequence: Synthetic oligonucleotide
  Sense strand starting at position 3019 of SEQ ID NO: 915300
cgguaaaucuacguaagau

SEQ ID NO: 1069645 - RNA, 19 nt, Artificial Sequence
  Description of Artificial Sequence: Synthetic oligonucleotide
  Antisense strand to SEQ ID NO: 1069644
aucuuacguagauuuaccg

SEQ ID NO: 1069646 - RNA, 19 nt, Artificial Sequence
  Description of Artificial Sequence: Synthetic oligonucleotide
  Sense strand starting at position 3020 of SEQ ID NO: 915300
gguaaaucuacguaagaug

SEQ ID NO: 1069647 - RNA, 19 nt, Artificial Sequence
  Description of Artificial Sequence: Synthetic oligonucleotide
  Antisense strand to SEQ ID NO: 1069646
caucuuacguagauuuacc

SEQ ID NO: 1069648 - RNA, 19 nt, Artificial Sequence
  Description of Artificial Sequence: Synthetic oligonucleotide
  Sense strand starting at position 3039 of SEQ ID NO: 915300
agaugaaugucugaagaga

SEQ ID NO: 1069649 - RNA, 19 nt, Artificial Sequence
  Description of Artificial Sequence: Synthetic oligonucleotide
  Antisense strand to SEQ ID NO: 1069648
ucucuucagacauucaucu

SEQ ID NO: 1069650 - RNA, 19 nt, Artificial Sequence
  Description of Artificial Sequence: Synthetic oligonucleotide
  Sense strand starting at position 3071 of SEQ ID NO: 915300
ggaagagucaguuaugcag

SEQ ID NO: 1069651 - RNA, 19 nt, Artificial Sequence
  Description of Artificial Sequence: Synthetic oligonucleotide
  Antisense strand to SEQ ID NO: 1069650
cugcauaacugacucuucc

SEQ ID NO: 1069652 - RNA, 19 nt, Artificial Sequence
  Description of Artificial Sequence: Synthetic oligonucleotide
  Sense strand starting at position 3075 of SEQ ID NO: 915300
gagucaguuaugcagaugu

SEQ ID NO: 1069653 - RNA, 19 nt, Artificial Sequence
  Description of Artificial Sequence: Synthetic oligonucleotide
  Antisense strand to SEQ ID NO: 1069652
acaucugcauaacugacuc

SEQ ID NO: 1069654 - RNA, 19 nt, Artificial Sequence
  Description of Artificial Sequence: Synthetic oligonucleotide
  Sense strand starting at position 3077 of SEQ ID NO: 915300
gucaguuaugcagaugucu

SEQ ID NO: 1069655 - RNA, 19 nt, Artificial Sequence
  Description of Artificial Sequence: Synthetic oligonucleotide
  Antisense strand to SEQ ID NO: 1069654
agacaucugcauaacugac

SEQ ID NO: 1069656 - RNA, 19 nt, Artificial Sequence
  Description of Artificial Sequence: Synthetic oligonucleotide
  Sense strand starting at position 3088 of SEQ ID NO: 915300
agaugucucugaguaggua

SEQ ID NO: 1069657 - RNA, 19 nt, Artificial Sequence
  Description of Artificial Sequence: Synthetic oligonucleotide
  Antisense strand to SEQ ID NO: 1069656
uaccuacucagagacaucu

SEQ ID NO: 1069658 - RNA, 19 nt, Artificial Sequence
  Description of Artificial Sequence: Synthetic oligonucleotide
  Sense strand starting at position 3116 of SEQ ID NO: 915300
uuguucugcaccugggaaa

SEQ ID NO: 1069659 - RNA, 19 nt, Artificial Sequence
  Description of Artificial Sequence: Synthetic oligonucleotide
  Antisense strand to SEQ ID NO: 1069658
uuucccaggugcagaacaa

SEQ ID NO: 1069660 - RNA, 19 nt, Artificial Sequence
  Description of Artificial Sequence: Synthetic oligonucleotide
  Sense strand starting at position 3146 of SEQ ID NO: 915300
augacauucuuauugugga

SEQ ID NO: 1069661 - RNA, 19 nt, Artificial Sequence
  Description of Artificial Sequence: Synthetic oligonucleotide
  Antisense strand to SEQ ID NO: 1069660
uccacaauaagaaugucau

SEQ ID NO: 1069662 - RNA, 19 nt, Artificial Sequence
  Description of Artificial Sequence: Synthetic oligonucleotide
  Sense strand starting at position 3185 of SEQ ID NO: 915300
gauuguagaccugaagcua

SEQ ID NO: 1069663 - RNA, 19 nt, Artificial Sequence
  Description of Artificial Sequence: Synthetic oligonucleotide
  Antisense strand to SEQ ID NO: 1069662
uagcuucaggucuacaauc

SEQ ID NO: 1069664 - RNA, 19 nt, Artificial Sequence
  Description of Artificial Sequence: Synthetic oligonucleotide
  Sense strand starting at position 3206 of SEQ ID NO: 915300
auugaccuguccuuguuua

SEQ ID NO: 1069665 - RNA, 19 nt, Artificial Sequence
  Description of Artificial Sequence: Synthetic oligonucleotide
  Antisense strand to SEQ ID NO: 1069664
uaaacaaggacaggucaau

SEQ ID NO: 1069666 - RNA, 19 nt, Artificial Sequence
  Description of Artificial Sequence: Synthetic oligonucleotide
  Sense strand starting at position 3238 of SEQ ID NO: 915300
agaauuuacuugugaauga

SEQ ID NO: 1069667 - RNA, 19 nt, Artificial Sequence
  Description of Artificial Sequence: Synthetic oligonucleotide
  Antisense strand to SEQ ID NO: 1069666
ucauucacaaguaaauucu

SEQ ID NO: 1069668 - RNA, 19 nt, Artificial Sequence
  Description of Artificial Sequence: Synthetic oligonucleotide
  Sense strand starting at position 3239 of SEQ ID NO: 915300
gaauuuacuugugaaugau

SEQ ID NO: 1069669 - RNA, 19 nt, Artificial Sequence
  Description of Artificial Sequence: Synthetic oligonucleotide
  Antisense strand to SEQ ID NO: 1069668
aucauucacaaguaaauuc

SEQ ID NO: 1069670 - RNA, 19 nt, Artificial Sequence
  Description of Artificial Sequence: Synthetic oligonucleotide
  Sense strand starting at position 3274 of SEQ ID NO: 915300
ucccaaaugccugagguuu

SEQ ID NO: 1069671 - RNA, 19 nt, Artificial Sequence
  Description of Artificial Sequence: Synthetic oligonucleotide
  Antisense strand to SEQ ID NO: 1069670
aaaccucaggcauuuggga

SEQ ID NO: 1069672 - RNA, 19 nt, Artificial Sequence
  Description of Artificial Sequence: Synthetic oligonucleotide
  Sense strand starting at position 3294 of SEQ ID NO: 915300
uaccuuuccguguggauau

SEQ ID NO: 1069673 - RNA, 19 nt, Artificial Sequence
  Description of Artificial Sequence: Synthetic oligonucleotide
  Antisense strand to SEQ ID NO: 1069672
auauccacacggaaaggua

SEQ ID NO: 1069674 - RNA, 19 nt, Artificial Sequence
  Description of Artificial Sequence: Synthetic oligonucleotide
  Sense strand starting at position 14 of SEQ ID NO: 915301
cucaccugcuuuccugaga

SEQ ID NO: 1069675 - RNA, 19 nt, Artificial Sequence
  Description of Artificial Sequence: Synthetic oligonucleotide
  Antisense strand to SEQ ID NO: 1069674
ucucaggaaagcaggugag

SEQ ID NO: 1069676 - RNA, 19 nt, Artificial Sequence
  Description of Artificial Sequence: Synthetic oligonucleotide
  Sense strand starting at position 15 of SEQ ID NO: 915301
ucaccugcuuuccugagaa

SEQ ID NO: 1069677 - RNA, 19 nt, Artificial Sequence
  Description of Artificial Sequence: Synthetic oligonucleotide
  Antisense strand to SEQ ID NO: 1069676
uucucaggaaagcagguga

SEQ ID NO: 1069678 - RNA, 19 nt, Artificial Sequence
  Description of Artificial Sequence: Synthetic oligonucleotide
  Sense strand starting at position 17 of SEQ ID NO: 915301
accugcuuuccugagaaga

SEQ ID NO: 1069679 - RNA, 19 nt, Artificial Sequence
  Description of Artificial Sequence: Synthetic oligonucleotide
  Antisense strand to SEQ ID NO: 1069678
ucuucucaggaaagcaggu

SEQ ID NO: 1069680 - RNA, 19 nt, Artificial Sequence
  Description of Artificial Sequence: Synthetic oligonucleotide
  Sense strand starting at position 300 of SEQ ID NO: 915301
gguuuaagggaacgauaug

SEQ ID NO: 1069681 - RNA, 19 nt, Artificial Sequence
  Description of Artificial Sequence: Synthetic oligonucleotide
  Antisense strand to SEQ ID NO: 1069680
cauaucguucccuuaaacc

SEQ ID NO: 1069682 - RNA, 19 nt, Artificial Sequence
  Description of Artificial Sequence: Synthetic oligonucleotide
  Sense strand starting at position 386 of SEQ ID NO: 915301
ggcacugucggucaucaga

SEQ ID NO: 1069683 - RNA, 19 nt, Artificial Sequence
  Description of Artificial Sequence: Synthetic oligonucleotide
  Antisense strand to SEQ ID NO: 1069682
ucugaugaccgacagugcc

SEQ ID NO: 1069684 - RNA, 19 nt, Artificial Sequence
  Description of Artificial Sequence: Synthetic oligonucleotide
  Sense strand starting at position 388 of SEQ ID NO: 915301
cacugucggucaucagaga

SEQ ID NO: 1069685 - RNA, 19 nt, Artificial Sequence
  Description of Artificial Sequence: Synthetic oligonucleotide
  Antisense strand to SEQ ID NO: 1069684
ucucugaugaccgacagug

SEQ ID NO: 1069686 - RNA, 19 nt, Artificial Sequence
  Description of Artificial Sequence: Synthetic oligonucleotide
  Sense strand starting at position 407 of SEQ ID NO: 915301
gaaaguugugcaggagaga

SEQ ID NO: 1069687 - RNA, 19 nt, Artificial Sequence
  Description of Artificial Sequence: Synthetic oligonucleotide
  Antisense strand to SEQ ID NO: 1069686
ucucuccugcacaacuuuc

SEQ ID NO: 1069688 - RNA, 19 nt, Artificial Sequence
  Description of Artificial Sequence: Synthetic oligonucleotide
  Sense strand starting at position 496 of SEQ ID NO: 915301
gauccauccugaucgguaa

SEQ ID NO: 1069689 - RNA, 19 nt, Artificial Sequence
  Description of Artificial Sequence: Synthetic oligonucleotide
  Antisense strand to SEQ ID NO: 1069688
uuaccgaucaggauggauc

SEQ ID NO: 1069690 - RNA, 19 nt, Artificial Sequence
  Description of Artificial Sequence: Synthetic oligonucleotide
  Sense strand starting at position 499 of SEQ ID NO: 915301
ccauccugaucgguaagua

SEQ ID NO: 1069691 - RNA, 19 nt, Artificial Sequence
  Description of Artificial Sequence: Synthetic oligonucleotide
  Antisense strand to SEQ ID NO: 1069690
uacuuaccgaucaggaugg

SEQ ID NO: 1069692 - RNA, 19 nt, Artificial Sequence
  Description of Artificial Sequence: Synthetic oligonucleotide
  Sense strand starting at position 500 of SEQ ID NO: 915301
cauccugaucgguaaguac

SEQ ID NO: 1069693 - RNA, 19 nt, Artificial Sequence
  Description of Artificial Sequence: Synthetic oligonucleotide
  Antisense strand to SEQ ID NO: 1069692
guacuuaccgaucaggaug

SEQ ID NO: 1069694 - RNA, 19 nt, Artificial Sequence
  Description of Artificial Sequence: Synthetic oligonucleotide
  Sense strand starting at position 559 of SEQ ID NO: 915301
cucggugucacagagaaag

SEQ ID NO: 1069695 - RNA, 19 nt, Artificial Sequence
  Description of Artificial Sequence: Synthetic oligonucleotide
  Antisense strand to SEQ ID NO: 1069694
cuuucucugugacaccgag

SEQ ID NO: 1069696 - RNA, 19 nt, Artificial Sequence
  Description of Artificial Sequence: Synthetic oligonucleotide
  Sense strand starting at position 647 of SEQ ID NO: 915301
gggagaaaggcauguucuu

SEQ ID NO: 1069697 - RNA, 19 nt, Artificial Sequence
  Description of Artificial Sequence: Synthetic oligonucleotide
  Antisense strand to SEQ ID NO: 1069696
aagaacaugccuuucuccc

SEQ ID NO: 1069698 - RNA, 19 nt, Artificial Sequence
  Description of Artificial Sequence: Synthetic oligonucleotide
  Sense strand starting at position 704 of SEQ ID NO: 915301
gggaaauagagcugaagca

SEQ ID NO: 1069699 - RNA, 19 nt, Artificial Sequence
  Description of Artificial Sequence: Synthetic oligonucleotide
  Antisense strand to SEQ ID NO: 1069698
ugcuucagcucuauuuccc

SEQ ID NO: 1069700 - RNA, 19 nt, Artificial Sequence
  Description of Artificial Sequence: Synthetic oligonucleotide
  Sense strand starting at position 817 of SEQ ID NO: 915301
cuuggauuguuaucccaug

SEQ ID NO: 1069701 - RNA, 19 nt, Artificial Sequence
  Description of Artificial Sequence: Synthetic oligonucleotide
  Antisense strand to SEQ ID NO: 1069700
caugggauaacaauccaag

SEQ ID NO: 1069702 - RNA, 19 nt, Artificial Sequence
  Description of Artificial Sequence: Synthetic oligonucleotide
  Sense strand starting at position 854 of SEQ ID NO: 915301
cccguuugcaguuaaagaa

SEQ ID NO: 1069703 - RNA, 19 nt, Artificial Sequence
  Description of Artificial Sequence: Synthetic oligonucleotide
  Antisense strand to SEQ ID NO: 1069702
uucuuuaacugcaaacggg

SEQ ID NO: 1069704 - RNA, 19 nt, Artificial Sequence
  Description of Artificial Sequence: Synthetic oligonucleotide
  Sense strand starting at position 883 of SEQ ID NO: 915301
uuuggaaccugaucaguuu

SEQ ID NO: 1069705 - RNA, 19 nt, Artificial Sequence
  Description of Artificial Sequence: Synthetic oligonucleotide
  Antisense strand to SEQ ID NO: 1069704
aaacugaucagguuccaaa

SEQ ID NO: 1069706 - RNA, 19 nt, Artificial Sequence
  Description of Artificial Sequence: Synthetic oligonucleotide
  Sense strand starting at position 1049 of SEQ ID NO: 915301
ggaggucucacauguugaa

SEQ ID NO: 1069707 - RNA, 19 nt, Artificial Sequence
  Description of Artificial Sequence: Synthetic oligonucleotide
  Antisense strand to SEQ ID NO: 1069706
uucaacaugugagaccucc

SEQ ID NO: 1069708 - RNA, 19 nt, Artificial Sequence
  Description of Artificial Sequence: Synthetic oligonucleotide
  Sense strand starting at position 1053 of SEQ ID NO: 915301
gucucacauguugaacaga

SEQ ID NO: 1069709 - RNA, 19 nt, Artificial Sequence
  Description of Artificial Sequence: Synthetic oligonucleotide
  Antisense strand to SEQ ID NO: 1069708
ucuguucaacaugugagac

SEQ ID NO: 1069710 - RNA, 19 nt, Artificial Sequence
  Description of Artificial Sequence: Synthetic oligonucleotide
  Sense strand starting at position 1749 of SEQ ID NO: 915301
cccacagcucuugagaaau

SEQ ID NO: 1069711 - RNA, 19 nt, Artificial Sequence
  Description of Artificial Sequence: Synthetic oligonucleotide
  Antisense strand to SEQ ID NO: 1069710
auuucucaagagcuguggg

SEQ ID NO: 1069712 - RNA, 19 nt, Artificial Sequence
  Description of Artificial Sequence: Synthetic oligonucleotide
  Sense strand starting at position 1790 of SEQ ID NO: 915301
gauuccuguucucuaagga

SEQ ID NO: 1069713 - RNA, 19 nt, Artificial Sequence
  Description of Artificial Sequence: Synthetic oligonucleotide
  Antisense strand to SEQ ID NO: 1069712
uccuuagagaacaggaauc

SEQ ID NO: 1069714 - RNA, 19 nt, Artificial Sequence
  Description of Artificial Sequence: Synthetic oligonucleotide
  Sense strand starting at position 1921 of SEQ ID NO: 915301
ccuagaggccucugaaagu

SEQ ID NO: 1069715 - RNA, 19 nt, Artificial Sequence
  Description of Artificial Sequence: Synthetic oligonucleotide
  Antisense strand to SEQ ID NO: 1069714
acuuucagaggccucuagg

SEQ ID NO: 1069716 - RNA, 19 nt, Artificial Sequence
  Description of Artificial Sequence: Synthetic oligonucleotide
  Sense strand starting at position 2021 of SEQ ID NO: 915301
gccugcugccuguuuauaa

SEQ ID NO: 1069717 - RNA, 19 nt, Artificial Sequence
  Description of Artificial Sequence: Synthetic oligonucleotide
  Antisense strand to SEQ ID NO: 1069716
uuauaaacaggcagcaggc

SEQ ID NO: 1069718 - RNA, 19 nt, Artificial Sequence
  Description of Artificial Sequence: Synthetic oligonucleotide
  Sense strand starting at position 2035 of SEQ ID NO: 915301
uauaauugauguucuaggu

SEQ ID NO: 1069719 - RNA, 19 nt, Artificial Sequence
  Description of Artificial Sequence: Synthetic oligonucleotide
  Antisense strand to SEQ ID NO: 1069718
accuagaacaucaauuaua

SEQ ID NO: 1069720 - RNA, 19 nt, Artificial Sequence
  Description of Artificial Sequence: Synthetic oligonucleotide
  Sense strand starting at position 2039 of SEQ ID NO: 915301
auugauguucuagguuaau

SEQ ID NO: 1069721 - RNA, 19 nt, Artificial Sequence
  Description of Artificial Sequence: Synthetic oligonucleotide
  Antisense strand to SEQ ID NO: 1069720
auuaaccuagaacaucaau

SEQ ID NO: 1069722 - RNA, 19 nt, Artificial Sequence
  Description of Artificial Sequence: Synthetic oligonucleotide
  Sense strand starting at position 2063 of SEQ ID NO: 915301
gucaaugacuuuccagaac

SEQ ID NO: 1069723 - RNA, 19 nt, Artificial Sequence
  Description of Artificial Sequence: Synthetic oligonucleotide
  Antisense strand to SEQ ID NO: 1069722
guucuggaaagucauugac

SEQ ID NO: 1069724 - RNA, 19 nt, Artificial Sequence
  Description of Artificial Sequence: Synthetic oligonucleotide
  Sense strand starting at position 2234 of SEQ ID NO: 915301
acaaguucugguggaaaga

SEQ ID NO: 1069725 - RNA, 19 nt, Artificial Sequence
  Description of Artificial Sequence: Synthetic oligonucleotide
  Antisense strand to SEQ ID NO: 1069724
ucuuuccaccagaacuugu

SEQ ID NO: 1069726 - RNA, 19 nt, Artificial Sequence
  Description of Artificial Sequence: Synthetic oligonucleotide
  Sense strand starting at position 2333 of SEQ ID NO: 915301
gggcaucuggccuaaggaa

SEQ ID NO: 1069727 - RNA, 19 nt, Artificial Sequence
  Description of Artificial Sequence: Synthetic oligonucleotide
  Antisense strand to SEQ ID NO: 1069726
uuccuuaggccagaugccc

SEQ ID NO: 1069728 - RNA, 19 nt, Artificial Sequence
  Description of Artificial Sequence: Synthetic oligonucleotide
  Sense strand starting at position 2514 of SEQ ID NO: 915301
auguuaccuggugauuagu

SEQ ID NO: 1069729 - RNA, 19 nt, Artificial Sequence
  Description of Artificial Sequence: Synthetic oligonucleotide
  Antisense strand to SEQ ID NO: 1069728
acuaaucaccagguaacau

SEQ ID NO: 1069730 - RNA, 19 nt, Artificial Sequence
  Description of Artificial Sequence: Synthetic oligonucleotide
  Sense strand starting at position 2524 of SEQ ID NO: 915301
gugauuagugugagcuggu

SEQ ID NO: 1069731 - RNA, 19 nt, Artificial Sequence
  Description of Artificial Sequence: Synthetic oligonucleotide
  Antisense strand to SEQ ID NO: 1069730
accagcucacacuaaucac

SEQ ID NO: 1069732 - RNA, 19 nt, Artificial Sequence
  Description of Artificial Sequence: Synthetic oligonucleotide
  Sense strand starting at position 2752 of SEQ ID NO: 915301
ucaauagcucacuguuaga

SEQ ID NO: 1069733 - RNA, 19 nt, Artificial Sequence
  Description of Artificial Sequence: Synthetic oligonucleotide
  Antisense strand to SEQ ID NO: 1069732
ucuaacagugagcuauuga

SEQ ID NO: 1069734 - RNA, 19 nt, Artificial Sequence
  Description of Artificial Sequence: Synthetic oligonucleotide
  Sense strand starting at position 2948 of SEQ ID NO: 915301
gagaacacgcguuaacuga

SEQ ID NO: 1069735 - RNA, 19 nt, Artificial Sequence
  Description of Artificial Sequence: Synthetic oligonucleotide
  Antisense strand to SEQ ID NO: 1069734
ucaguuaacgcguguucuc

SEQ ID NO: 1069736 - RNA, 19 nt, Artificial Sequence
  Description of Artificial Sequence: Synthetic oligonucleotide
  Sense strand starting at position 3125 of SEQ ID NO: 915301
gugagcucagaaugagacu

SEQ ID NO: 1069737 - RNA, 19 nt, Artificial Sequence
  Description of Artificial Sequence: Synthetic oligonucleotide
  Antisense strand to SEQ ID NO: 1069736
agucucauucugagcucac

SEQ ID NO: 1069738 - RNA, 19 nt, Artificial Sequence
  Description of Artificial Sequence: Synthetic oligonucleotide
  Sense strand starting at position 3152 of SEQ ID NO: 915301
gggcccuaucugggaauaa

SEQ ID NO: 1069739 - RNA, 19 nt, Artificial Sequence
  Description of Artificial Sequence: Synthetic oligonucleotide
  Antisense strand to SEQ ID NO: 1069738
uuauucccagauagggccc

SEQ ID NO: 1069740 - RNA, 19 nt, Artificial Sequence
  Description of Artificial Sequence: Synthetic oligonucleotide
  Sense strand starting at position 3340 of SEQ ID NO: 915301
cguacucgccuugagauuu

SEQ ID NO: 1069741 - RNA, 19 nt, Artificial Sequence
  Description of Artificial Sequence: Synthetic oligonucleotide
  Antisense strand to SEQ ID NO: 1069740
aaaucucaaggcgaguacg

SEQ ID NO: 1069742 - RNA, 19 nt, Artificial Sequence
  Description of Artificial Sequence: Synthetic oligonucleotide
  Sense strand starting at position 3399 of SEQ ID NO: 915301
gaggaaguaucugcaugga

SEQ ID NO: 1069743 - RNA, 19 nt, Artificial Sequence
  Description of Artificial Sequence: Synthetic oligonucleotide
  Antisense strand to SEQ ID NO: 1069742
uccaugcagauacuuccuc

SEQ ID NO: 1069744 - RNA, 19 nt, Artificial Sequence
  Description of Artificial Sequence: Synthetic oligonucleotide
  Sense strand starting at position 3472 of SEQ ID NO: 915301
aggucauacucgucaugga

SEQ ID NO: 1069745 - RNA, 19 nt, Artificial Sequence
  Description of Artificial Sequence: Synthetic oligonucleotide
  Antisense strand to SEQ ID NO: 1069744
uccaugacgaguaugaccu

SEQ ID NO: 1069746 - RNA, 19 nt, Artificial Sequence
  Description of Artificial Sequence: Synthetic oligonucleotide
  Sense strand starting at position 3541 of SEQ ID NO: 915301
aggacaugaucuucggaac

SEQ ID NO: 1069747 - RNA, 19 nt, Artificial Sequence
  Description of Artificial Sequence: Synthetic oligonucleotide
  Antisense strand to SEQ ID NO: 1069746
guuccgaagaucauguccu

SEQ ID NO: 1069748 - RNA, 19 nt, Artificial Sequence
  Description of Artificial Sequence: Synthetic oligonucleotide
  Sense strand starting at position 3542 of SEQ ID NO: 915301
ggacaugaucuucggaaca

SEQ ID NO: 1069749 - RNA, 19 nt, Artificial Sequence
  Description of Artificial Sequence: Synthetic oligonucleotide
  Antisense strand to SEQ ID NO: 1069748
uguuccgaagaucaugucc

SEQ ID NO: 1069750 - RNA, 19 nt, Artificial Sequence
  Description of Artificial Sequence: Synthetic oligonucleotide
  Sense strand starting at position 3585 of SEQ ID NO: 915301
agagaagcugccugagagu

SEQ ID NO: 1069751 - RNA, 19 nt, Artificial Sequence
  Description of Artificial Sequence: Synthetic oligonucleotide
  Antisense strand to SEQ ID NO: 1069750
acucucaggcagcuucucu

SEQ ID NO: 1069752 - RNA, 19 nt, Artificial Sequence
  Description of Artificial Sequence: Synthetic oligonucleotide
  Sense strand starting at position 3861 of SEQ ID NO: 915301
ugcugaacuagugauggga

SEQ ID NO: 1069753 - RNA, 19 nt, Artificial Sequence
  Description of Artificial Sequence: Synthetic oligonucleotide
  Antisense strand to SEQ ID NO: 1069752
ucccaucacuaguucagca

SEQ ID NO: 1069754 - RNA, 19 nt, Artificial Sequence
  Description of Artificial Sequence: Synthetic oligonucleotide
  Sense strand starting at position 45 of SEQ ID NO: 915302
ccugaaaccguguaucuug

SEQ ID NO: 1069755 - RNA, 19 nt, Artificial Sequence
  Description of Artificial Sequence: Synthetic oligonucleotide
  Antisense strand to SEQ ID NO: 1069754
caagauacacgguuucagg

SEQ ID NO: 1069756 - RNA, 19 nt, Artificial Sequence
  Description of Artificial Sequence: Synthetic oligonucleotide
  Sense strand starting at position 56 of SEQ ID NO: 915302
guaucuugugaagagguuu

SEQ ID NO: 1069757 - RNA, 19 nt, Artificial Sequence
  Description of Artificial Sequence: Synthetic oligonucleotide
  Antisense strand to SEQ ID NO: 1069756
aaaccucuucacaagauac

SEQ ID NO: 1069758 - RNA, 19 nt, Artificial Sequence
  Description of Artificial Sequence: Synthetic oligonucleotide
  Sense strand starting at position 276 of SEQ ID NO: 915302
uuauuagagucagaccacu

SEQ ID NO: 1069759 - RNA, 19 nt, Artificial Sequence
  Description of Artificial Sequence: Synthetic oligonucleotide
  Antisense strand to SEQ ID NO: 1069758
aguggucugacucuaauaa

SEQ ID NO: 1069760 - RNA, 19 nt, Artificial Sequence
  Description of Artificial Sequence: Synthetic oligonucleotide
  Sense strand starting at position 345 of SEQ ID NO: 915302
uuguuaaaguggccuuuaa

SEQ ID NO: 1069761 - RNA, 19 nt, Artificial Sequence
  Description of Artificial Sequence: Synthetic oligonucleotide
  Antisense strand to SEQ ID NO: 1069760
uuaaaggccacuuuaacaa

SEQ ID NO: 1069762 - RNA, 19 nt, Artificial Sequence
  Description of Artificial Sequence: Synthetic oligonucleotide
  Sense strand starting at position 383 of SEQ ID NO: 915302
aaaggaggcucauccugau

SEQ ID NO: 1069763 - RNA, 19 nt, Artificial Sequence
  Description of Artificial Sequence: Synthetic oligonucleotide
  Antisense strand to SEQ ID NO: 1069762
aucaggaugagccuccuuu

SEQ ID NO: 1069764 - RNA, 19 nt, Artificial Sequence
  Description of Artificial Sequence: Synthetic oligonucleotide
  Sense strand starting at position 386 of SEQ ID NO: 915302
ggaggcucauccugauaau

SEQ ID NO: 1069765 - RNA, 19 nt, Artificial Sequence
  Description of Artificial Sequence: Synthetic oligonucleotide
  Antisense strand to SEQ ID NO: 1069764
auuaucaggaugagccucc

SEQ ID NO: 1069766 - RNA, 19 nt, Artificial Sequence
  Description of Artificial Sequence: Synthetic oligonucleotide
  Sense strand starting at position 427 of SEQ ID NO: 915302
aaacuaaaccgugaguaca

SEQ ID NO: 1069767 - RNA, 19 nt, Artificial Sequence
  Description of Artificial Sequence: Synthetic oligonucleotide
  Antisense strand to SEQ ID NO: 1069766
uguacucacgguuuaguuu

SEQ ID NO: 1069768 - RNA, 19 nt, Artificial Sequence
  Description of Artificial Sequence: Synthetic oligonucleotide
  Sense strand starting at position 722 of SEQ ID NO: 915302
ccaccuacagguuggauaa

SEQ ID NO: 1069769 - RNA, 19 nt, Artificial Sequence
  Description of Artificial Sequence: Synthetic oligonucleotide
  Antisense strand to SEQ ID NO: 1069768
uuauccaaccuguaggugg

SEQ ID NO: 1069770 - RNA, 19 nt, Artificial Sequence
  Description of Artificial Sequence: Synthetic oligonucleotide
  Sense strand starting at position 1094 of SEQ ID NO: 915302
ucccacuucccagggaauu

SEQ ID NO: 1069771 - RNA, 19 nt, Artificial Sequence
  Description of Artificial Sequence: Synthetic oligonucleotide
  Antisense strand to SEQ ID NO: 1069770
aauucccugggaaguggga

SEQ ID NO: 1069772 - RNA, 19 nt, Artificial Sequence
  Description of Artificial Sequence: Synthetic oligonucleotide
  Sense strand starting at position 1095 of SEQ ID NO: 915302
cccacuucccagggaauua

SEQ ID NO: 1069773 - RNA, 19 nt, Artificial Sequence
  Description of Artificial Sequence: Synthetic oligonucleotide
  Antisense strand to SEQ ID NO: 1069772
uaauucccugggaaguggg

SEQ ID NO: 1069774 - RNA, 19 nt, Artificial Sequence
  Description of Artificial Sequence: Synthetic oligonucleotide
  Sense strand starting at position 1118 of SEQ ID NO: 915302
ggcuuauguuaacucuuac

SEQ ID NO: 1069775 - RNA, 19 nt, Artificial Sequence
  Description of Artificial Sequence: Synthetic oligonucleotide
  Antisense strand to SEQ ID NO: 1069774
guaagaguuaacauaagcc

SEQ ID NO: 1069776 - RNA, 19 nt, Artificial Sequence
  Description of Artificial Sequence: Synthetic oligonucleotide
  Sense strand starting at position 1399 of SEQ ID NO: 915302
ggaugaggcugacacuaaa

SEQ ID NO: 1069777 - RNA, 19 nt, Artificial Sequence
  Description of Artificial Sequence: Synthetic oligonucleotide
  Antisense strand to SEQ ID NO: 1069776
uuuagugucagccucaucc

SEQ ID NO: 1069778 - RNA, 19 nt, Artificial Sequence
  Description of Artificial Sequence: Synthetic oligonucleotide
  Sense strand starting at position 1420 of SEQ ID NO: 915302
cagggaguauuagaaguaa

SEQ ID NO: 1069779 - RNA, 19 nt, Artificial Sequence
  Description of Artificial Sequence: Synthetic oligonucleotide
  Antisense strand to SEQ ID NO: 1069778
uuacuucuaauacucccug

SEQ ID NO: 1069780 - RNA, 19 nt, Artificial Sequence
  Description of Artificial Sequence: Synthetic oligonucleotide
  Sense strand starting at position 2116 of SEQ ID NO: 915302
ggacuuucgcaacaucuac

SEQ ID NO: 1069781 - RNA, 19 nt, Artificial Sequence
  Description of Artificial Sequence: Synthetic oligonucleotide
  Antisense strand to SEQ ID NO: 1069780
guagauguugcgaaagucc

SEQ ID NO: 1069782 - RNA, 19 nt, Artificial Sequence
  Description of Artificial Sequence: Synthetic oligonucleotide
  Sense strand starting at position 2185 of SEQ ID NO: 915302
agggacuguucggucauuu

SEQ ID NO: 1069783 - RNA, 19 nt, Artificial Sequence
  Description of Artificial Sequence: Synthetic oligonucleotide
  Antisense strand to SEQ ID NO: 1069782
aaaugaccgaacagucccu

SEQ ID NO: 1069784 - RNA, 19 nt, Artificial Sequence
  Description of Artificial Sequence: Synthetic oligonucleotide
  Sense strand starting at position 2189 of SEQ ID NO: 915302
acuguucggucauuuguua

SEQ ID NO: 1069785 - RNA, 19 nt, Artificial Sequence
  Description of Artificial Sequence: Synthetic oligonucleotide
  Antisense strand to SEQ ID NO: 1069784
uaacaaaugaccgaacagu

SEQ ID NO: 1069786 - RNA, 19 nt, Artificial Sequence
  Description of Artificial Sequence: Synthetic oligonucleotide
  Sense strand starting at position 2193 of SEQ ID NO: 915302
uucggucauuuguuaccau

SEQ ID NO: 1069787 - RNA, 19 nt, Artificial Sequence
  Description of Artificial Sequence: Synthetic oligonucleotide
  Antisense strand to SEQ ID NO: 1069786
augguaacaaaugaccgaa

SEQ ID NO: 1069788 - RNA, 19 nt, Artificial Sequence
  Description of Artificial Sequence: Synthetic oligonucleotide
  Sense strand starting at position 2194 of SEQ ID NO: 915302
ucggucauuuguuaccaua

SEQ ID NO: 1069789 - RNA, 19 nt, Artificial Sequence
  Description of Artificial Sequence: Synthetic oligonucleotide
  Antisense strand to SEQ ID NO: 1069788
uaugguaacaaaugaccga

SEQ ID NO: 1069790 - RNA, 19 nt, Artificial Sequence
  Description of Artificial Sequence: Synthetic oligonucleotide
  Sense strand starting at position 2197 of SEQ ID NO: 915302
gucauuuguuaccauaaca

SEQ ID NO: 1069791 - RNA, 19 nt, Artificial Sequence
  Description of Artificial Sequence: Synthetic oligonucleotide
  Antisense strand to SEQ ID NO: 1069790
uguuaugguaacaaaugac

SEQ ID NO: 1069792 - RNA, 19 nt, Artificial Sequence
  Description of Artificial Sequence: Synthetic oligonucleotide
  Sense strand starting at position 2560 of SEQ ID NO: 915302
uggagaguuucuuccagca

SEQ ID NO: 1069793 - RNA, 19 nt, Artificial Sequence
  Description of Artificial Sequence: Synthetic oligonucleotide
  Antisense strand to SEQ ID NO: 1069792
ugcuggaagaaacucucca

SEQ ID NO: 1069794 - RNA, 19 nt, Artificial Sequence
  Description of Artificial Sequence: Synthetic oligonucleotide
  Sense strand starting at position 2610 of SEQ ID NO: 915302
gcgagcuugccugacuuga

SEQ ID NO: 1069795 - RNA, 19 nt, Artificial Sequence
  Description of Artificial Sequence: Synthetic oligonucleotide
  Antisense strand to SEQ ID NO: 1069794
ucaagucaggcaagcucgc

SEQ ID NO: 1069796 - RNA, 19 nt, Artificial Sequence
  Description of Artificial Sequence: Synthetic oligonucleotide
  Sense strand starting at position 2612 of SEQ ID NO: 915302
gagcuugccugacuugaau

SEQ ID NO: 1069797 - RNA, 19 nt, Artificial Sequence
  Description of Artificial Sequence: Synthetic oligonucleotide
  Antisense strand to SEQ ID NO: 1069796
auucaagucaggcaagcuc

SEQ ID NO: 1069798 - RNA, 19 nt, Artificial Sequence
  Description of Artificial Sequence: Synthetic oligonucleotide
  Sense strand starting at position 2651 of SEQ ID NO: 915302
uuuagagauuaagugugaa

SEQ ID NO: 1069799 - RNA, 19 nt, Artificial Sequence
  Description of Artificial Sequence: Synthetic oligonucleotide
  Antisense strand to SEQ ID NO: 1069798
uucacacuuaaucucuaaa

SEQ ID NO: 1069800 - RNA, 19 nt, Artificial Sequence
  Description of Artificial Sequence: Synthetic oligonucleotide
  Sense strand starting at position 2714 of SEQ ID NO: 915302
cuaugagcucuaggaagag

SEQ ID NO: 1069801 - RNA, 19 nt, Artificial Sequence
  Description of Artificial Sequence: Synthetic oligonucleotide
  Antisense strand to SEQ ID NO: 1069800
cucuuccuagagcucauag

SEQ ID NO: 1069802 - RNA, 19 nt, Artificial Sequence
  Description of Artificial Sequence: Synthetic oligonucleotide
  Sense strand starting at position 2752 of SEQ ID NO: 915302
ccagcuggaccguaauauc

SEQ ID NO: 1069803 - RNA, 19 nt, Artificial Sequence
  Description of Artificial Sequence: Synthetic oligonucleotide
  Antisense strand to SEQ ID NO: 1069802
gauauuacgguccagcugg

SEQ ID NO: 1069804 - RNA, 19 nt, Artificial Sequence
  Description of Artificial Sequence: Synthetic oligonucleotide
  Sense strand starting at position 2760 of SEQ ID NO: 915302
accguaauaucuccacugu

SEQ ID NO: 1069805 - RNA, 19 nt, Artificial Sequence
  Description of Artificial Sequence: Synthetic oligonucleotide
  Antisense strand to SEQ ID NO: 1069804
acaguggagauauuacggu

SEQ ID NO: 1069806 - RNA, 19 nt, Artificial Sequence
  Description of Artificial Sequence: Synthetic oligonucleotide
  Sense strand starting at position 2761 of SEQ ID NO: 915302
ccguaauaucuccacugug

SEQ ID NO: 1069807 - RNA, 19 nt, Artificial Sequence
  Description of Artificial Sequence: Synthetic oligonucleotide
  Antisense strand to SEQ ID NO: 1069806
cacaguggagauauuacgg

SEQ ID NO: 1069808 - RNA, 19 nt, Artificial Sequence
  Description of Artificial Sequence: Synthetic oligonucleotide
  Sense strand starting at position 2873 of SEQ ID NO: 915302
gucuucccagguuggaaau

SEQ ID NO: 1069809 - RNA, 19 nt, Artificial Sequence
  Description of Artificial Sequence: Synthetic oligonucleotide
  Antisense strand to SEQ ID NO: 1069808
auuuccaaccugggaagac

SEQ ID NO: 1069810 - RNA, 19 nt, Artificial Sequence
  Description of Artificial Sequence: Synthetic oligonucleotide
  Sense strand starting at position 2885 of SEQ ID NO: 915302
uggaaaugaugcucguaaa

SEQ ID NO: 1069811 - RNA, 19 nt, Artificial Sequence
  Description of Artificial Sequence: Synthetic oligonucleotide
  Antisense strand to SEQ ID NO: 1069810
uuuacgagcaucauuucca

SEQ ID NO: 1069812 - RNA, 19 nt, Artificial Sequence
  Description of Artificial Sequence: Synthetic oligonucleotide
  Sense strand starting at position 3360 of SEQ ID NO: 915302
cuaggcauuugagagauaa

SEQ ID NO: 1069813 - RNA, 19 nt, Artificial Sequence
  Description of Artificial Sequence: Synthetic oligonucleotide
  Antisense strand to SEQ ID NO: 1069812
uuaucucucaaaugccuag

SEQ ID NO: 1069814 - RNA, 19 nt, Artificial Sequence
  Description of Artificial Sequence: Synthetic oligonucleotide
  Sense strand starting at position 3654 of SEQ ID NO: 915302
gcaucuuuauuguugucua

SEQ ID NO: 1069815 - RNA, 19 nt, Artificial Sequence
  Description of Artificial Sequence: Synthetic oligonucleotide
  Antisense strand to SEQ ID NO: 1069814
uagacaacaauaaagaugc

SEQ ID NO: 1069816 - RNA, 19 nt, Artificial Sequence
  Description of Artificial Sequence: Synthetic oligonucleotide
  Sense strand starting at position 3658 of SEQ ID NO: 915302
cuuuauuguugucuaauug

SEQ ID NO: 1069817 - RNA, 19 nt, Artificial Sequence
  Description of Artificial Sequence: Synthetic oligonucleotide
  Antisense strand to SEQ ID NO: 1069816
caauuagacaacaauaaag

SEQ ID NO: 1069818 - RNA, 19 nt, Artificial Sequence
  Description of Artificial Sequence: Synthetic oligonucleotide
  Sense strand starting at position 3662 of SEQ ID NO: 915302
auuguugucuaauugaaac

SEQ ID NO: 1069819 - RNA, 19 nt, Artificial Sequence
  Description of Artificial Sequence: Synthetic oligonucleotide
  Antisense strand to SEQ ID NO: 1069818
guuucaauuagacaacaau

SEQ ID NO: 1069820 - RNA, 19 nt, Artificial Sequence
  Description of Artificial Sequence: Synthetic oligonucleotide
  Sense strand starting at position 3690 of SEQ ID NO: 915302
ugcauaaagugugcugcaa

SEQ ID NO: 1069821 - RNA, 19 nt, Artificial Sequence
  Description of Artificial Sequence: Synthetic oligonucleotide
  Antisense strand to SEQ ID NO: 1069820
uugcagcacacuuuaugca

SEQ ID NO: 1069822 - RNA, 19 nt, Artificial Sequence
  Description of Artificial Sequence: Synthetic oligonucleotide
  Sense strand starting at position 3694 of SEQ ID NO: 915302
uaaagugugcugcaaaggu

SEQ ID NO: 1069823 - RNA, 19 nt, Artificial Sequence
  Description of Artificial Sequence: Synthetic oligonucleotide
  Antisense strand to SEQ ID NO: 1069822
accuuugcagcacacuuua

SEQ ID NO: 1069824 - RNA, 19 nt, Artificial Sequence
  Description of Artificial Sequence: Synthetic oligonucleotide
  Sense strand starting at position 3805 of SEQ ID NO: 915302
auuugaagcuaagaaguau

SEQ ID NO: 1069825 - RNA, 19 nt, Artificial Sequence
  Description of Artificial Sequence: Synthetic oligonucleotide
  Antisense strand to SEQ ID NO: 1069824
auacuucuuagcuucaaau

SEQ ID NO: 1069826 - RNA, 19 nt, Artificial Sequence
  Description of Artificial Sequence: Synthetic oligonucleotide
  Sense strand starting at position 3859 of SEQ ID NO: 915302
acuauuguuaguggugcua

SEQ ID NO: 1069827 - RNA, 19 nt, Artificial Sequence
  Description of Artificial Sequence: Synthetic oligonucleotide
  Antisense strand to SEQ ID NO: 1069826
uagcaccacuaacaauagu

SEQ ID NO: 1069828 - RNA, 19 nt, Artificial Sequence
  Description of Artificial Sequence: Synthetic oligonucleotide
  Sense strand starting at position 3870 of SEQ ID NO: 915302
uggugcuauuuagauauac

SEQ ID NO: 1069829 - RNA, 19 nt, Artificial Sequence
  Description of Artificial Sequence: Synthetic oligonucleotide
  Antisense strand to SEQ ID NO: 1069828
guauaucuaaauagcacca

SEQ ID NO: 1069830 - RNA, 19 nt, Artificial Sequence
  Description of Artificial Sequence: Synthetic oligonucleotide
  Sense strand starting at position 3901 of SEQ ID NO: 915302
acuaauaacguccaaaggu

SEQ ID NO: 1069831 - RNA, 19 nt, Artificial Sequence
  Description of Artificial Sequence: Synthetic oligonucleotide
  Antisense strand to SEQ ID NO: 1069830
accuuuggacguuauuagu

SEQ ID NO: 1069832 - RNA, 19 nt, Artificial Sequence
  Description of Artificial Sequence: Synthetic oligonucleotide
  Sense strand starting at position 3947 of SEQ ID NO: 915302
gugaaauaguccucuguuc

SEQ ID NO: 1069833 - RNA, 19 nt, Artificial Sequence
  Description of Artificial Sequence: Synthetic oligonucleotide
  Antisense strand to SEQ ID NO: 1069832
gaacagaggacuauuucac

SEQ ID NO: 1069834 - RNA, 19 nt, Artificial Sequence
  Description of Artificial Sequence: Synthetic oligonucleotide
  Sense strand starting at position 430 of SEQ ID NO: 915303
gugguuaagggaggucuua

SEQ ID NO: 1069835 - RNA, 19 nt, Artificial Sequence
  Description of Artificial Sequence: Synthetic oligonucleotide
  Antisense strand to SEQ ID NO: 1069834
uaagaccucccuuaaccac

SEQ ID NO: 1069836 - RNA, 19 nt, Artificial Sequence
  Description of Artificial Sequence: Synthetic oligonucleotide
  Sense strand starting at position 442 of SEQ ID NO: 915303
ggucuuaugcccuguacuu

SEQ ID NO: 1069837 - RNA, 19 nt, Artificial Sequence
  Description of Artificial Sequence: Synthetic oligonucleotide
  Antisense strand to SEQ ID NO: 1069836
aaguacagggcauaagacc

SEQ ID NO: 1069838 - RNA, 19 nt, Artificial Sequence
  Description of Artificial Sequence: Synthetic oligonucleotide
  Sense strand starting at position 452 of SEQ ID NO: 915303
ccuguacuuucccugagag

SEQ ID NO: 1069839 - RNA, 19 nt, Artificial Sequence
  Description of Artificial Sequence: Synthetic oligonucleotide
  Antisense strand to SEQ ID NO: 1069838
cucucagggaaaguacagg

SEQ ID NO: 1069840 - RNA, 19 nt, Artificial Sequence
  Description of Artificial Sequence: Synthetic oligonucleotide
  Sense strand starting at position 453 of SEQ ID NO: 915303
cuguacuuucccugagagc

SEQ ID NO: 1069841 - RNA, 19 nt, Artificial Sequence
  Description of Artificial Sequence: Synthetic oligonucleotide
  Antisense strand to SEQ ID NO: 1069840
gcucucagggaaaguacag

SEQ ID NO: 1069842 - RNA, 19 nt, Artificial Sequence
  Description of Artificial Sequence: Synthetic oligonucleotide
  Sense strand starting at position 694 of SEQ ID NO: 915303
ccuugaugucugcaaccau

SEQ ID NO: 1069843 - RNA, 19 nt, Artificial Sequence
  Description of Artificial Sequence: Synthetic oligonucleotide
  Antisense strand to SEQ ID NO: 1069842
augguugcagacaucaagg

SEQ ID NO: 1069844 - RNA, 19 nt, Artificial Sequence
  Description of Artificial Sequence: Synthetic oligonucleotide
  Sense strand starting at position 834 of SEQ ID NO: 915303
gcagcagcuccugaguaga

SEQ ID NO: 1069845 - RNA, 19 nt, Artificial Sequence
  Description of Artificial Sequence: Synthetic oligonucleotide
  Antisense strand to SEQ ID NO: 1069844
ucuacucaggagcugcugc

SEQ ID NO: 1069846 - RNA, 19 nt, Artificial Sequence
  Description of Artificial Sequence: Synthetic oligonucleotide
  Sense strand starting at position 1159 of SEQ ID NO: 915303
uuuacaauuccagggcuaa

SEQ ID NO: 1069847 - RNA, 19 nt, Artificial Sequence
  Description of Artificial Sequence: Synthetic oligonucleotide
  Antisense strand to SEQ ID NO: 1069846
uuagcccuggaauuguaaa

SEQ ID NO: 1069848 - RNA, 19 nt, Artificial Sequence
  Description of Artificial Sequence: Synthetic oligonucleotide
  Sense strand starting at position 1160 of SEQ ID NO: 915303
uuacaauuccagggcuaac

SEQ ID NO: 1069849 - RNA, 19 nt, Artificial Sequence
  Description of Artificial Sequence: Synthetic oligonucleotide
  Antisense strand to SEQ ID NO: 1069848
guuagcccuggaauuguaa

SEQ ID NO: 1069850 - RNA, 19 nt, Artificial Sequence
  Description of Artificial Sequence: Synthetic oligonucleotide
  Sense strand starting at position 1616 of SEQ ID NO: 915303
guacacagaccucgacaaa

SEQ ID NO: 1069851 - RNA, 19 nt, Artificial Sequence
  Description of Artificial Sequence: Synthetic oligonucleotide
  Antisense strand to SEQ ID NO: 1069850
uuugucgaggucuguguac

SEQ ID NO: 1069852 - RNA, 19 nt, Artificial Sequence
  Description of Artificial Sequence: Synthetic oligonucleotide
  Sense strand starting at position 1629 of SEQ ID NO: 915303
gacaaagggcucuguauuc

SEQ ID NO: 1069853 - RNA, 19 nt, Artificial Sequence
  Description of Artificial Sequence: Synthetic oligonucleotide
  Antisense strand to SEQ ID NO: 1069852
gaauacagagcccuuuguc

SEQ ID NO: 1069854 - RNA, 19 nt, Artificial Sequence
  Description of Artificial Sequence: Synthetic oligonucleotide
  Sense strand starting at position 1646 of SEQ ID NO: 915303
ucugcuuagcuggaugaga

SEQ ID NO: 1069855 - RNA, 19 nt, Artificial Sequence
  Description of Artificial Sequence: Synthetic oligonucleotide
  Antisense strand to SEQ ID NO: 1069854
ucucauccagcuaagcaga

SEQ ID NO: 1069856 - RNA, 19 nt, Artificial Sequence
  Description of Artificial Sequence: Synthetic oligonucleotide
  Sense strand starting at position 1648 of SEQ ID NO: 915303
ugcuuagcuggaugagauu

SEQ ID NO: 1069857 - RNA, 19 nt, Artificial Sequence
  Description of Artificial Sequence: Synthetic oligonucleotide
  Antisense strand to SEQ ID NO: 1069856
aaucucauccagcuaagca

SEQ ID NO: 1069858 - RNA, 19 nt, Artificial Sequence
  Description of Artificial Sequence: Synthetic oligonucleotide
  Sense strand starting at position 1654 of SEQ ID NO: 915303
gcuggaugagauuaagugu

SEQ ID NO: 1069859 - RNA, 19 nt, Artificial Sequence
  Description of Artificial Sequence: Synthetic oligonucleotide
  Antisense strand to SEQ ID NO: 1069858
acacuuaaucucauccagc

SEQ ID NO: 1069860 - RNA, 19 nt, Artificial Sequence
  Description of Artificial Sequence: Synthetic oligonucleotide
  Sense strand starting at position 1660 of SEQ ID NO: 915303
ugagauuaaguguaggguu

SEQ ID NO: 1069861 - RNA, 19 nt, Artificial Sequence
  Description of Artificial Sequence: Synthetic oligonucleotide
  Antisense strand to SEQ ID NO: 1069860
aacccuacacuuaaucuca

SEQ ID NO: 1069862 - RNA, 19 nt, Artificial Sequence
  Description of Artificial Sequence: Synthetic oligonucleotide
  Sense strand starting at position 1662 of SEQ ID NO: 915303
agauuaaguguaggguuca

SEQ ID NO: 1069863 - RNA, 19 nt, Artificial Sequence
  Description of Artificial Sequence: Synthetic oligonucleotide
  Antisense strand to SEQ ID NO: 1069862
ugaacccuacacuuaaucu

SEQ ID NO: 1069864 - RNA, 19 nt, Artificial Sequence
  Description of Artificial Sequence: Synthetic oligonucleotide
  Sense strand starting at position 2182 of SEQ ID NO: 915303
gggacagucaguggugcaa

SEQ ID NO: 1069865 - RNA, 19 nt, Artificial Sequence
  Description of Artificial Sequence: Synthetic oligonucleotide
  Antisense strand to SEQ ID NO: 1069864
uugcaccacugacuguccc

SEQ ID NO: 1069866 - RNA, 19 nt, Artificial Sequence
  Description of Artificial Sequence: Synthetic oligonucleotide
  Sense strand starting at position 2248 of SEQ ID NO: 915303
ccacuccuggcccagaauu

SEQ ID NO: 1069867 - RNA, 19 nt, Artificial Sequence
  Description of Artificial Sequence: Synthetic oligonucleotide
  Antisense strand to SEQ ID NO: 1069866
aauucugggccaggagugg

SEQ ID NO: 1069868 - RNA, 19 nt, Artificial Sequence
  Description of Artificial Sequence: Synthetic oligonucleotide
  Sense strand starting at position 2646 of SEQ ID NO: 915303
cgcagacuccaggacuaaa

SEQ ID NO: 1069869 - RNA, 19 nt, Artificial Sequence
  Description of Artificial Sequence: Synthetic oligonucleotide
  Antisense strand to SEQ ID NO: 1069868
uuuaguccuggagucugcg

SEQ ID NO: 1069870 - RNA, 19 nt, Artificial Sequence
  Description of Artificial Sequence: Synthetic oligonucleotide
  Sense strand starting at position 2748 of SEQ ID NO: 915303
gagacaguugaguagccau

SEQ ID NO: 1069871 - RNA, 19 nt, Artificial Sequence
  Description of Artificial Sequence: Synthetic oligonucleotide
  Antisense strand to SEQ ID NO: 1069870
auggcuacucaacugucuc

SEQ ID NO: 1069872 - RNA, 19 nt, Artificial Sequence
  Description of Artificial Sequence: Synthetic oligonucleotide
  Sense strand starting at position 2755 of SEQ ID NO: 915303
uugaguagccauuggguaa

SEQ ID NO: 1069873 - RNA, 19 nt, Artificial Sequence
  Description of Artificial Sequence: Synthetic oligonucleotide
  Antisense strand to SEQ ID NO: 1069872
uuacccaauggcuacucaa

SEQ ID NO: 1069874 - RNA, 19 nt, Artificial Sequence
  Description of Artificial Sequence: Synthetic oligonucleotide
  Sense strand starting at position 2846 of SEQ ID NO: 915303
ccuaguagcagcgagaguu

SEQ ID NO: 1069875 - RNA, 19 nt, Artificial Sequence
  Description of Artificial Sequence: Synthetic oligonucleotide
  Antisense strand to SEQ ID NO: 1069874
aacucucgcugcuacuagg

SEQ ID NO: 1069876 - RNA, 19 nt, Artificial Sequence
  Description of Artificial Sequence: Synthetic oligonucleotide
  Sense strand starting at position 2859 of SEQ ID NO: 915303
agaguucugcacuaccgaa

SEQ ID NO: 1069877 - RNA, 19 nt, Artificial Sequence
  Description of Artificial Sequence: Synthetic oligonucleotide
  Antisense strand to SEQ ID NO: 1069876
uucgguagugcagaacucu

SEQ ID NO: 1069878 - RNA, 19 nt, Artificial Sequence
  Description of Artificial Sequence: Synthetic oligonucleotide
  Sense strand starting at position 2948 of SEQ ID NO: 915303
cgucuacuuccgggucaga

SEQ ID NO: 1069879 - RNA, 19 nt, Artificial Sequence
  Description of Artificial Sequence: Synthetic oligonucleotide
  Antisense strand to SEQ ID NO: 1069878
ucugacccggaaguagacg

SEQ ID NO: 1069880 - RNA, 19 nt, Artificial Sequence
  Description of Artificial Sequence: Synthetic oligonucleotide
  Sense strand starting at position 2986 of SEQ ID NO: 915303
agaacaaccuuccguaaca

SEQ ID NO: 1069881 - RNA, 19 nt, Artificial Sequence
  Description of Artificial Sequence: Synthetic oligonucleotide
  Antisense strand to SEQ ID NO: 1069880
uguuacggaagguuguucu

SEQ ID NO: 1069882 - RNA, 19 nt, Artificial Sequence
  Description of Artificial Sequence: Synthetic oligonucleotide
  Sense strand starting at position 3021 of SEQ ID NO: 915303
auaggauagcgucgucuuu

SEQ ID NO: 1069883 - RNA, 19 nt, Artificial Sequence
  Description of Artificial Sequence: Synthetic oligonucleotide
  Antisense strand to SEQ ID NO: 1069882
aaagacgacgcuauccuau

SEQ ID NO: 1069884 - RNA, 19 nt, Artificial Sequence
  Description of Artificial Sequence: Synthetic oligonucleotide
  Sense strand starting at position 3025 of SEQ ID NO: 915303
gauagcgucgucuuucuua

SEQ ID NO: 1069885 - RNA, 19 nt, Artificial Sequence
  Description of Artificial Sequence: Synthetic oligonucleotide
  Antisense strand to SEQ ID NO: 1069884
uaagaaagacgacgcuauc

SEQ ID NO: 1069886 - RNA, 19 nt, Artificial Sequence
  Description of Artificial Sequence: Synthetic oligonucleotide
  Sense strand starting at position 3027 of SEQ ID NO: 915303
uagcgucgucuuucuuaaa

SEQ ID NO: 1069887 - RNA, 19 nt, Artificial Sequence
  Description of Artificial Sequence: Synthetic oligonucleotide
  Antisense strand to SEQ ID NO: 1069886
uuuaagaaagacgacgcua

SEQ ID NO: 1069888 - RNA, 19 nt, Artificial Sequence
  Description of Artificial Sequence: Synthetic oligonucleotide
  Sense strand starting at position 3095 of SEQ ID NO: 915303
cgacucagcuauucugaau

SEQ ID NO: 1069889 - RNA, 19 nt, Artificial Sequence
  Description of Artificial Sequence: Synthetic oligonucleotide
  Antisense strand to SEQ ID NO: 1069888
auucagaauagcugagucg

SEQ ID NO: 1069890 - RNA, 19 nt, Artificial Sequence
  Description of Artificial Sequence: Synthetic oligonucleotide
  Sense strand starting at position 3112 of SEQ ID NO: 915303
auccaauccugggcaaagu

SEQ ID NO: 1069891 - RNA, 19 nt, Artificial Sequence
  Description of Artificial Sequence: Synthetic oligonucleotide
  Antisense strand to SEQ ID NO: 1069890
acuuugcccaggauuggau

SEQ ID NO: 1069892 - RNA, 19 nt, Artificial Sequence
  Description of Artificial Sequence: Synthetic oligonucleotide
  Sense strand starting at position 3121 of SEQ ID NO: 915303
ugggcaaaguucuggacaa

SEQ ID NO: 1069893 - RNA, 19 nt, Artificial Sequence
  Description of Artificial Sequence: Synthetic oligonucleotide
  Antisense strand to SEQ ID NO: 1069892
uuguccagaacuuugccca

SEQ ID NO: 1069894 - RNA, 19 nt, Artificial Sequence
  Description of Artificial Sequence: Synthetic oligonucleotide
  Sense strand starting at position 3122 of SEQ ID NO: 915303
gggcaaaguucuggacaag

SEQ ID NO: 1069895 - RNA, 19 nt, Artificial Sequence
  Description of Artificial Sequence: Synthetic oligonucleotide
  Antisense strand to SEQ ID NO: 1069894
cuuguccagaacuuugccc

SEQ ID NO: 1069896 - RNA, 19 nt, Artificial Sequence
  Description of Artificial Sequence: Synthetic oligonucleotide
  Sense strand starting at position 3123 of SEQ ID NO: 915303
ggcaaaguucuggacaagu

SEQ ID NO: 1069897 - RNA, 19 nt, Artificial Sequence
  Description of Artificial Sequence: Synthetic oligonucleotide
  Antisense strand to SEQ ID NO: 1069896
acuuguccagaacuuugcc

SEQ ID NO: 1069898 - RNA, 19 nt, Artificial Sequence
  Description of Artificial Sequence: Synthetic oligonucleotide
  Sense strand starting at position 3125 of SEQ ID NO: 915303
caaaguucuggacaagucu

SEQ ID NO: 1069899 - RNA, 19 nt, Artificial Sequence
  Description of Artificial Sequence: Synthetic oligonucleotide
  Antisense strand to SEQ ID NO: 1069898
agacuuguccagaacuuug

SEQ ID NO: 1069900 - RNA, 19 nt, Artificial Sequence
  Description of Artificial Sequence: Synthetic oligonucleotide
  Sense strand starting at position 3181 of SEQ ID NO: 915303
gauuguuucccaggugagg

SEQ ID NO: 1069901 - RNA, 19 nt, Artificial Sequence
  Description of Artificial Sequence: Synthetic oligonucleotide
  Antisense strand to SEQ ID NO: 1069900
ccucaccugggaaacaauc

SEQ ID NO: 1069902 - RNA, 19 nt, Artificial Sequence
  Description of Artificial Sequence: Synthetic oligonucleotide
  Sense strand starting at position 3302 of SEQ ID NO: 915303
agagcuuucucguccucau

SEQ ID NO: 1069903 - RNA, 19 nt, Artificial Sequence
  Description of Artificial Sequence: Synthetic oligonucleotide
  Antisense strand to SEQ ID NO: 1069902
augaggacgagaaagcucu

SEQ ID NO: 1069904 - RNA, 19 nt, Artificial Sequence
  Description of Artificial Sequence: Synthetic oligonucleotide
  Sense strand starting at position 3305 of SEQ ID NO: 915303
gcuuucucguccucauauc

SEQ ID NO: 1069905 - RNA, 19 nt, Artificial Sequence
  Description of Artificial Sequence: Synthetic oligonucleotide
  Antisense strand to SEQ ID NO: 1069904
gauaugaggacgagaaagc

SEQ ID NO: 1069906 - RNA, 19 nt, Artificial Sequence
  Description of Artificial Sequence: Synthetic oligonucleotide
  Sense strand starting at position 3313 of SEQ ID NO: 915303
guccucauaucauauauga

SEQ ID NO: 1069907 - RNA, 19 nt, Artificial Sequence
  Description of Artificial Sequence: Synthetic oligonucleotide
  Antisense strand to SEQ ID NO: 1069906
ucauauaugauaugaggac

SEQ ID NO: 1069908 - RNA, 19 nt, Artificial Sequence
  Description of Artificial Sequence: Synthetic oligonucleotide
  Sense strand starting at position 3715 of SEQ ID NO: 915303
ucccaagugugguucugua

SEQ ID NO: 1069909 - RNA, 19 nt, Artificial Sequence
  Description of Artificial Sequence: Synthetic oligonucleotide
  Antisense strand to SEQ ID NO: 1069908
uacagaaccacacuuggga

SEQ ID NO: 1069910 - RNA, 19 nt, Artificial Sequence
  Description of Artificial Sequence: Synthetic oligonucleotide
  Sense strand starting at position 3777 of SEQ ID NO: 915303
ggcccauccuuagcagaga

SEQ ID NO: 1069911 - RNA, 19 nt, Artificial Sequence
  Description of Artificial Sequence: Synthetic oligonucleotide
  Antisense strand to SEQ ID NO: 1069910
ucucugcuaaggaugggcc

SEQ ID NO: 1069912 - RNA, 19 nt, Artificial Sequence
  Description of Artificial Sequence: Synthetic oligonucleotide
  Sense strand starting at position 3970 of SEQ ID NO: 915303
gcgucaucugaugcuguuu

SEQ ID NO: 1069913 - RNA, 19 nt, Artificial Sequence
  Description of Artificial Sequence: Synthetic oligonucleotide
  Antisense strand to SEQ ID NO: 1069912
aaacagcaucagaugacgc

SEQ ID NO: 1069914 - RNA, 19 nt, Artificial Sequence
  Description of Artificial Sequence: Synthetic oligonucleotide
  Sense strand starting at position 210 of SEQ ID NO: 915304
cuugaaagaguagguaaua

SEQ ID NO: 1069915 - RNA, 19 nt, Artificial Sequence
  Description of Artificial Sequence: Synthetic oligonucleotide
  Antisense strand to SEQ ID NO: 1069914
uauuaccuacucuuucaag

SEQ ID NO: 1069916 - RNA, 19 nt, Artificial Sequence
  Description of Artificial Sequence: Synthetic oligonucleotide
  Sense strand starting at position 233 of SEQ ID NO: 915304
ccuagaaguccagguggua

SEQ ID NO: 1069917 - RNA, 19 nt, Artificial Sequence
  Description of Artificial Sequence: Synthetic oligonucleotide
  Antisense strand to SEQ ID NO: 1069916
uaccaccuggacuucuagg

SEQ ID NO: 1069918 - RNA, 19 nt, Artificial Sequence
  Description of Artificial Sequence: Synthetic oligonucleotide
  Sense strand starting at position 249 of SEQ ID NO: 915304
guagcuaacuucuugauuu

SEQ ID NO: 1069919 - RNA, 19 nt, Artificial Sequence
  Description of Artificial Sequence: Synthetic oligonucleotide
  Antisense strand to SEQ ID NO: 1069918
aaaucaagaaguuagcuac

SEQ ID NO: 1069920 - RNA, 19 nt, Artificial Sequence
  Description of Artificial Sequence: Synthetic oligonucleotide
  Sense strand starting at position 387 of SEQ ID NO: 915304
gagaacgaaugaugagaga

SEQ ID NO: 1069921 - RNA, 19 nt, Artificial Sequence
  Description of Artificial Sequence: Synthetic oligonucleotide
  Antisense strand to SEQ ID NO: 1069920
ucucucaucauucguucuc

SEQ ID NO: 1069922 - RNA, 19 nt, Artificial Sequence
  Description of Artificial Sequence: Synthetic oligonucleotide
  Sense strand starting at position 587 of SEQ ID NO: 915304
aggacauguguguaccuau

SEQ ID NO: 1069923 - RNA, 19 nt, Artificial Sequence
  Description of Artificial Sequence: Synthetic oligonucleotide
  Antisense strand to SEQ ID NO: 1069922
auagguacacacauguccu

SEQ ID NO: 1069924 - RNA, 19 nt, Artificial Sequence
  Description of Artificial Sequence: Synthetic oligonucleotide
  Sense strand starting at position 659 of SEQ ID NO: 915304
agggcuuaguacucagaua

SEQ ID NO: 1069925 - RNA, 19 nt, Artificial Sequence
  Description of Artificial Sequence: Synthetic oligonucleotide
  Antisense strand to SEQ ID NO: 1069924
uaucugaguacuaagcccu

SEQ ID NO: 1069926 - RNA, 19 nt, Artificial Sequence
  Description of Artificial Sequence: Synthetic oligonucleotide
  Sense strand starting at position 660 of SEQ ID NO: 915304
gggcuuaguacucagauac

SEQ ID NO: 1069927 - RNA, 19 nt, Artificial Sequence
  Description of Artificial Sequence: Synthetic oligonucleotide
  Antisense strand to SEQ ID NO: 1069926
guaucugaguacuaagccc

SEQ ID NO: 1069928 - RNA, 19 nt, Artificial Sequence
  Description of Artificial Sequence: Synthetic oligonucleotide
  Sense strand starting at position 728 of SEQ ID NO: 915304
cugaaaggcuuccuggaaa

SEQ ID NO: 1069929 - RNA, 19 nt, Artificial Sequence
  Description of Artificial Sequence: Synthetic oligonucleotide
  Antisense strand to SEQ ID NO: 1069928
uuuccaggaagccuuucag

SEQ ID NO: 1069930 - RNA, 19 nt, Artificial Sequence
  Description of Artificial Sequence: Synthetic oligonucleotide
  Sense strand starting at position 875 of SEQ ID NO: 915304
ccaagauauuuaggugucu

SEQ ID NO: 1069931 - RNA, 19 nt, Artificial Sequence
  Description of Artificial Sequence: Synthetic oligonucleotide
  Antisense strand to SEQ ID NO: 1069930
agacaccuaaauaucuugg

SEQ ID NO: 1069932 - RNA, 19 nt, Artificial Sequence
  Description of Artificial Sequence: Synthetic oligonucleotide
  Sense strand starting at position 1030 of SEQ ID NO: 915304
gcuccuucugucuacuagu

SEQ ID NO: 1069933 - RNA, 19 nt, Artificial Sequence
  Description of Artificial Sequence: Synthetic oligonucleotide
  Antisense strand to SEQ ID NO: 1069932
acuaguagacagaaggagc

SEQ ID NO: 1069934 - RNA, 19 nt, Artificial Sequence
  Description of Artificial Sequence: Synthetic oligonucleotide
  Sense strand starting at position 1151 of SEQ ID NO: 915304
gcucuuaauugacaaggaa

SEQ ID NO: 1069935 - RNA, 19 nt, Artificial Sequence
  Description of Artificial Sequence: Synthetic oligonucleotide
  Antisense strand to SEQ ID NO: 1069934
uuccuugucaauuaagagc

SEQ ID NO: 1069936 - RNA, 19 nt, Artificial Sequence
  Description of Artificial Sequence: Synthetic oligonucleotide
  Sense strand starting at position 1869 of SEQ ID NO: 915304
cccgacugucccuguaauc

SEQ ID NO: 1069937 - RNA, 19 nt, Artificial Sequence
  Description of Artificial Sequence: Synthetic oligonucleotide
  Antisense strand to SEQ ID NO: 1069936
gauuacagggacagucggg

SEQ ID NO: 1069938 - RNA, 19 nt, Artificial Sequence
  Description of Artificial Sequence: Synthetic oligonucleotide
  Sense strand starting at position 2738 of SEQ ID NO: 915304
gauguuugcaccugaggga

SEQ ID NO: 1069939 - RNA, 19 nt, Artificial Sequence
  Description of Artificial Sequence: Synthetic oligonucleotide
  Antisense strand to SEQ ID NO: 1069938
ucccucaggugcaaacauc

SEQ ID NO: 1069940 - RNA, 19 nt, Artificial Sequence
  Description of Artificial Sequence: Synthetic oligonucleotide
  Sense strand starting at position 2795 of SEQ ID NO: 915304
uuuguauaaugagggaaac

SEQ ID NO: 1069941 - RNA, 19 nt, Artificial Sequence
  Description of Artificial Sequence: Synthetic oligonucleotide
  Antisense strand to SEQ ID NO: 1069940
guuucccucauuauacaaa

SEQ ID NO: 1069942 - RNA, 19 nt, Artificial Sequence
  Description of Artificial Sequence: Synthetic oligonucleotide
  Sense strand starting at position 3011 of SEQ ID NO: 915304
guuugcucugcggcauaaa

SEQ ID NO: 1069943 - RNA, 19 nt, Artificial Sequence
  Description of Artificial Sequence: Synthetic oligonucleotide
  Antisense strand to SEQ ID NO: 1069942
uuuaugccgcagagcaaac

SEQ ID NO: 1069944 - RNA, 19 nt, Artificial Sequence
  Description of Artificial Sequence: Synthetic oligonucleotide
  Sense strand starting at position 3070 of SEQ ID NO: 915304
ucccuuacuuguguuacca

SEQ ID NO: 1069945 - RNA, 19 nt, Artificial Sequence
  Description of Artificial Sequence: Synthetic oligonucleotide
  Antisense strand to SEQ ID NO: 1069944
ugguaacacaaguaaggga

SEQ ID NO: 1069946 - RNA, 19 nt, Artificial Sequence
  Description of Artificial Sequence: Synthetic oligonucleotide
  Sense strand starting at position 3074 of SEQ ID NO: 915304
uuacuuguguuaccauguu

SEQ ID NO: 1069947 - RNA, 19 nt, Artificial Sequence
  Description of Artificial Sequence: Synthetic oligonucleotide
  Antisense strand to SEQ ID NO: 1069946
aacaugguaacacaaguaa

SEQ ID NO: 1069948 - RNA, 19 nt, Artificial Sequence
  Description of Artificial Sequence: Synthetic oligonucleotide
  Sense strand starting at position 3151 of SEQ ID NO: 915304
cucugaagagucuguucuu

SEQ ID NO: 1069949 - RNA, 19 nt, Artificial Sequence
  Description of Artificial Sequence: Synthetic oligonucleotide
  Antisense strand to SEQ ID NO: 1069948
aagaacagacucuucagag

SEQ ID NO: 1069950 - RNA, 19 nt, Artificial Sequence
  Description of Artificial Sequence: Synthetic oligonucleotide
  Sense strand starting at position 3152 of SEQ ID NO: 915304
ucugaagagucuguucuuu

SEQ ID NO: 1069951 - RNA, 19 nt, Artificial Sequence
  Description of Artificial Sequence: Synthetic oligonucleotide
  Antisense strand to SEQ ID NO: 1069950
aaagaacagacucuucaga

SEQ ID NO: 1069952 - RNA, 19 nt, Artificial Sequence
  Description of Artificial Sequence: Synthetic oligonucleotide
  Sense strand starting at position 3157 of SEQ ID NO: 915304
agagucuguucuuugcuca

SEQ ID NO: 1069953 - RNA, 19 nt, Artificial Sequence
  Description of Artificial Sequence: Synthetic oligonucleotide
  Antisense strand to SEQ ID NO: 1069952
ugagcaaagaacagacucu

SEQ ID NO: 1069954 - RNA, 19 nt, Artificial Sequence
  Description of Artificial Sequence: Synthetic oligonucleotide
  Sense strand starting at position 3161 of SEQ ID NO: 915304
ucuguucuuugcucaguua

SEQ ID NO: 1069955 - RNA, 19 nt, Artificial Sequence
  Description of Artificial Sequence: Synthetic oligonucleotide
  Antisense strand to SEQ ID NO: 1069954
uaacugagcaaagaacaga

SEQ ID NO: 1069956 - RNA, 19 nt, Artificial Sequence
  Description of Artificial Sequence: Synthetic oligonucleotide
  Sense strand starting at position 3164 of SEQ ID NO: 915304
guucuuugcucaguuagug

SEQ ID NO: 1069957 - RNA, 19 nt, Artificial Sequence
  Description of Artificial Sequence: Synthetic oligonucleotide
  Antisense strand to SEQ ID NO: 1069956
cacuaacugagcaaagaac

SEQ ID NO: 1069958 - RNA, 19 nt, Artificial Sequence
  Description of Artificial Sequence: Synthetic oligonucleotide
  Sense strand starting at position 3237 of SEQ ID NO: 915304
uggauugcccaguauugca

SEQ ID NO: 1069959 - RNA, 19 nt, Artificial Sequence
  Description of Artificial Sequence: Synthetic oligonucleotide
  Antisense strand to SEQ ID NO: 1069958
ugcaauacugggcaaucca

SEQ ID NO: 1069960 - RNA, 19 nt, Artificial Sequence
  Description of Artificial Sequence: Synthetic oligonucleotide
  Sense strand starting at position 3245 of SEQ ID NO: 915304
ccaguauugcauuacuugu

SEQ ID NO: 1069961 - RNA, 19 nt, Artificial Sequence
  Description of Artificial Sequence: Synthetic oligonucleotide
  Antisense strand to SEQ ID NO: 1069960
acaaguaaugcaauacugg

SEQ ID NO: 1069962 - RNA, 19 nt, Artificial Sequence
  Description of Artificial Sequence: Synthetic oligonucleotide
  Sense strand starting at position 3251 of SEQ ID NO: 915304
uugcauuacuuguugacuu

SEQ ID NO: 1069963 - RNA, 19 nt, Artificial Sequence
  Description of Artificial Sequence: Synthetic oligonucleotide
  Antisense strand to SEQ ID NO: 1069962
aagucaacaaguaaugcaa

SEQ ID NO: 1069964 - RNA, 19 nt, Artificial Sequence
  Description of Artificial Sequence: Synthetic oligonucleotide
  Sense strand starting at position 3294 of SEQ ID NO: 915304
cccuuaaauuaauggagaa

SEQ ID NO: 1069965 - RNA, 19 nt, Artificial Sequence
  Description of Artificial Sequence: Synthetic oligonucleotide
  Antisense strand to SEQ ID NO: 1069964
uucuccauuaauuuaaggg

SEQ ID NO: 1069966 - RNA, 19 nt, Artificial Sequence
  Description of Artificial Sequence: Synthetic oligonucleotide
  Sense strand starting at position 3304 of SEQ ID NO: 915304
aauggagaaugcuuugaau

SEQ ID NO: 1069967 - RNA, 19 nt, Artificial Sequence
  Description of Artificial Sequence: Synthetic oligonucleotide
  Antisense strand to SEQ ID NO: 1069966
auucaaagcauucuccauu

SEQ ID NO: 1069968 - RNA, 19 nt, Artificial Sequence
  Description of Artificial Sequence: Synthetic oligonucleotide
  Sense strand starting at position 3306 of SEQ ID NO: 915304
uggagaaugcuuugaaugu

SEQ ID NO: 1069969 - RNA, 19 nt, Artificial Sequence
  Description of Artificial Sequence: Synthetic oligonucleotide
  Antisense strand to SEQ ID NO: 1069968
acauucaaagcauucucca

SEQ ID NO: 1069970 - RNA, 19 nt, Artificial Sequence
  Description of Artificial Sequence: Synthetic oligonucleotide
  Sense strand starting at position 3359 of SEQ ID NO: 915304
gauugauacuaggccgaaa

SEQ ID NO: 1069971 - RNA, 19 nt, Artificial Sequence
  Description of Artificial Sequence: Synthetic oligonucleotide
  Antisense strand to SEQ ID NO: 1069970
uuucggccuaguaucaauc

SEQ ID NO: 1069972 - RNA, 19 nt, Artificial Sequence
  Description of Artificial Sequence: Synthetic oligonucleotide
  Sense strand starting at position 3430 of SEQ ID NO: 915304
ggaagauccuggcagacua

SEQ ID NO: 1069973 - RNA, 19 nt, Artificial Sequence
  Description of Artificial Sequence: Synthetic oligonucleotide
  Antisense strand to SEQ ID NO: 1069972
uagucugccaggaucuucc

SEQ ID NO: 1069974 - RNA, 19 nt, Artificial Sequence
  Description of Artificial Sequence: Synthetic oligonucleotide
  Sense strand starting at position 3449 of SEQ ID NO: 915304
agauguauuguuugaaaug

SEQ ID NO: 1069975 - RNA, 19 nt, Artificial Sequence
  Description of Artificial Sequence: Synthetic oligonucleotide
  Antisense strand to SEQ ID NO: 1069974
cauuucaaacaauacaucu

SEQ ID NO: 1069976 - RNA, 19 nt, Artificial Sequence
  Description of Artificial Sequence: Synthetic oligonucleotide
  Sense strand starting at position 3450 of SEQ ID NO: 915304
gauguauuguuugaaauga

SEQ ID NO: 1069977 - RNA, 19 nt, Artificial Sequence
  Description of Artificial Sequence: Synthetic oligonucleotide
  Antisense strand to SEQ ID NO: 1069976
ucauuucaaacaauacauc

SEQ ID NO: 1069978 - RNA, 19 nt, Artificial Sequence
  Description of Artificial Sequence: Synthetic oligonucleotide
  Sense strand starting at position 3650 of SEQ ID NO: 915304
agcucuguuguguggacau

SEQ ID NO: 1069979 - RNA, 19 nt, Artificial Sequence
  Description of Artificial Sequence: Synthetic oligonucleotide
  Antisense strand to SEQ ID NO: 1069978
auguccacacaacagagcu

SEQ ID NO: 1069980 - RNA, 19 nt, Artificial Sequence
  Description of Artificial Sequence: Synthetic oligonucleotide
  Sense strand starting at position 3704 of SEQ ID NO: 915304
ggaaacuuguagccuguaa

SEQ ID NO: 1069981 - RNA, 19 nt, Artificial Sequence
  Description of Artificial Sequence: Synthetic oligonucleotide
  Antisense strand to SEQ ID NO: 1069980
uuacaggcuacaaguuucc

SEQ ID NO: 1069982 - RNA, 19 nt, Artificial Sequence
  Description of Artificial Sequence: Synthetic oligonucleotide
  Sense strand starting at position 3715 of SEQ ID NO: 915304
gccuguaauuuguuucuga

SEQ ID NO: 1069983 - RNA, 19 nt, Artificial Sequence
  Description of Artificial Sequence: Synthetic oligonucleotide
  Antisense strand to SEQ ID NO: 1069982
ucagaaacaaauuacaggc

SEQ ID NO: 1069984 - RNA, 19 nt, Artificial Sequence
  Description of Artificial Sequence: Synthetic oligonucleotide
  Sense strand starting at position 3862 of SEQ ID NO: 915304
guggacuccugacugggaa

SEQ ID NO: 1069985 - RNA, 19 nt, Artificial Sequence
  Description of Artificial Sequence: Synthetic oligonucleotide
  Antisense strand to SEQ ID NO: 1069984
uucccagucaggaguccac

SEQ ID NO: 1069986 - RNA, 19 nt, Artificial Sequence
  Description of Artificial Sequence: Synthetic oligonucleotide
  Sense strand starting at position 3866 of SEQ ID NO: 915304
acuccugacugggaagauu

SEQ ID NO: 1069987 - RNA, 19 nt, Artificial Sequence
  Description of Artificial Sequence: Synthetic oligonucleotide
  Antisense strand to SEQ ID NO: 1069986
aaucuucccagucaggagu

SEQ ID NO: 1069988 - RNA, 19 nt, Artificial Sequence
  Description of Artificial Sequence: Synthetic oligonucleotide
  Sense strand starting at position 3971 of SEQ ID NO: 915304
acaggacugucugaucuau

SEQ ID NO: 1069989 - RNA, 19 nt, Artificial Sequence
  Description of Artificial Sequence: Synthetic oligonucleotide
  Antisense strand to SEQ ID NO: 1069988
auagaucagacaguccugu

SEQ ID NO: 1069990 - RNA, 19 nt, Artificial Sequence
  Description of Artificial Sequence: Synthetic oligonucleotide
  Sense strand starting at position 3973 of SEQ ID NO: 915304
aggacugucugaucuaucu

SEQ ID NO: 1069991 - RNA, 19 nt, Artificial Sequence
  Description of Artificial Sequence: Synthetic oligonucleotide
  Antisense strand to SEQ ID NO: 1069990
agauagaucagacaguccu

SEQ ID NO: 1069992 - RNA, 19 nt, Artificial Sequence
  Description of Artificial Sequence: Synthetic oligonucleotide
  Sense strand starting at position 3980 of SEQ ID NO: 915304
ucugaucuaucuuuguauu

SEQ ID NO: 1069993 - RNA, 19 nt, Artificial Sequence
  Description of Artificial Sequence: Synthetic oligonucleotide
  Antisense strand to SEQ ID NO: 1069992
aauacaaagauagaucaga

SEQ ID NO: 1069994 - RNA, 19 nt, Artificial Sequence
  Description of Artificial Sequence: Synthetic oligonucleotide
  Sense strand starting at position 26 of SEQ ID NO: 915305
gccucauccuagugcuaac

SEQ ID NO: 1069995 - RNA, 19 nt, Artificial Sequence
  Description of Artificial Sequence: Synthetic oligonucleotide
  Antisense strand to SEQ ID NO: 1069994
guuagcacuaggaugaggc

SEQ ID NO: 1069996 - RNA, 19 nt, Artificial Sequence
  Description of Artificial Sequence: Synthetic oligonucleotide
  Sense strand starting at position 29 of SEQ ID NO: 915305
ucauccuagugcuaacaga

SEQ ID NO: 1069997 - RNA, 19 nt, Artificial Sequence
  Description of Artificial Sequence: Synthetic oligonucleotide
  Antisense strand to SEQ ID NO: 1069996
ucuguuagcacuaggauga

SEQ ID NO: 1069998 - RNA, 19 nt, Artificial Sequence
  Description of Artificial Sequence: Synthetic oligonucleotide
  Sense strand starting at position 53 of SEQ ID NO: 915305
gagagaccuuucugaaagg

SEQ ID NO: 1069999 - RNA, 19 nt, Artificial Sequence
  Description of Artificial Sequence: Synthetic oligonucleotide
  Antisense strand to SEQ ID NO: 1069998
ccuuucagaaaggucucuc

SEQ ID NO: 1070000 - RNA, 19 nt, Artificial Sequence
  Description of Artificial Sequence: Synthetic oligonucleotide
  Sense strand starting at position 81 of SEQ ID NO: 915305
gugugagggucacagaguu

SEQ ID NO: 1070001 - RNA, 19 nt, Artificial Sequence
  Description of Artificial Sequence: Synthetic oligonucleotide
  Antisense strand to SEQ ID NO: 1070000
aacucugugacccucacac

SEQ ID NO: 1070002 - RNA, 19 nt, Artificial Sequence
  Description of Artificial Sequence: Synthetic oligonucleotide
  Sense strand starting at position 218 of SEQ ID NO: 915305
ucacaaggguucugggauu

SEQ ID NO: 1070003 - RNA, 19 nt, Artificial Sequence
  Description of Artificial Sequence: Synthetic oligonucleotide
  Antisense strand to SEQ ID NO: 1070002
aaucccagaacccuuguga

SEQ ID NO: 1070004 - RNA, 19 nt, Artificial Sequence
  Description of Artificial Sequence: Synthetic oligonucleotide
  Sense strand starting at position 398 of SEQ ID NO: 915305
acaaguuuauuccaaagua

SEQ ID NO: 1070005 - RNA, 19 nt, Artificial Sequence
  Description of Artificial Sequence: Synthetic oligonucleotide
  Antisense strand to SEQ ID NO: 1070004
uacuuuggaauaaacuugu

SEQ ID NO: 1070006 - RNA, 19 nt, Artificial Sequence
  Description of Artificial Sequence: Synthetic oligonucleotide
  Sense strand starting at position 420 of SEQ ID NO: 915305
ugagcuguaucucucuaca

SEQ ID NO: 1070007 - RNA, 19 nt, Artificial Sequence
  Description of Artificial Sequence: Synthetic oligonucleotide
  Antisense strand to SEQ ID NO: 1070006
uguagagagauacagcuca

SEQ ID NO: 1070008 - RNA, 19 nt, Artificial Sequence
  Description of Artificial Sequence: Synthetic oligonucleotide
  Sense strand starting at position 422 of SEQ ID NO: 915305
agcuguaucucucuacauu

SEQ ID NO: 1070009 - RNA, 19 nt, Artificial Sequence
  Description of Artificial Sequence: Synthetic oligonucleotide
  Antisense strand to SEQ ID NO: 1070008
aauguagagagauacagcu

SEQ ID NO: 1070010 - RNA, 19 nt, Artificial Sequence
  Description of Artificial Sequence: Synthetic oligonucleotide
  Sense strand starting at position 833 of SEQ ID NO: 915305
auguccacuuaucgaggaa

SEQ ID NO: 1070011 - RNA, 19 nt, Artificial Sequence
  Description of Artificial Sequence: Synthetic oligonucleotide
  Antisense strand to SEQ ID NO: 1070010
uuccucgauaaguggacau

SEQ ID NO: 1070012 - RNA, 19 nt, Artificial Sequence
  Description of Artificial Sequence: Synthetic oligonucleotide
  Sense strand starting at position 834 of SEQ ID NO: 915305
uguccacuuaucgaggaaa

SEQ ID NO: 1070013 - RNA, 19 nt, Artificial Sequence
  Description of Artificial Sequence: Synthetic oligonucleotide
  Antisense strand to SEQ ID NO: 1070012
uuuccucgauaaguggaca

SEQ ID NO: 1070014 - RNA, 19 nt, Artificial Sequence
  Description of Artificial Sequence: Synthetic oligonucleotide
  Sense strand starting at position 982 of SEQ ID NO: 915305
ccuaccugcucuggaaaca

SEQ ID NO: 1070015 - RNA, 19 nt, Artificial Sequence
  Description of Artificial Sequence: Synthetic oligonucleotide
  Antisense strand to SEQ ID NO: 1070014
uguuuccagagcagguagg

SEQ ID NO: 1070016 - RNA, 19 nt, Artificial Sequence
  Description of Artificial Sequence: Synthetic oligonucleotide
  Sense strand starting at position 983 of SEQ ID NO: 915305
cuaccugcucuggaaacaa

SEQ ID NO: 1070017 - RNA, 19 nt, Artificial Sequence
  Description of Artificial Sequence: Synthetic oligonucleotide
  Antisense strand to SEQ ID NO: 1070016
uuguuuccagagcagguag

SEQ ID NO: 1070018 - RNA, 19 nt, Artificial Sequence
  Description of Artificial Sequence: Synthetic oligonucleotide
  Sense strand starting at position 2533 of SEQ ID NO: 915305
gagugucacuuccugagau

SEQ ID NO: 1070019 - RNA, 19 nt, Artificial Sequence
  Description of Artificial Sequence: Synthetic oligonucleotide
  Antisense strand to SEQ ID NO: 1070018
aucucaggaagugacacuc

SEQ ID NO: 1070020 - RNA, 19 nt, Artificial Sequence
  Description of Artificial Sequence: Synthetic oligonucleotide
  Sense strand starting at position 2534 of SEQ ID NO: 915305
agugucacuuccugagaug

SEQ ID NO: 1070021 - RNA, 19 nt, Artificial Sequence
  Description of Artificial Sequence: Synthetic oligonucleotide
  Antisense strand to SEQ ID NO: 1070020
caucucaggaagugacacu

SEQ ID NO: 1070022 - RNA, 19 nt, Artificial Sequence
  Description of Artificial Sequence: Synthetic oligonucleotide
  Sense strand starting at position 2569 of SEQ ID NO: 915305
gcuggcuuuggugaggaga

SEQ ID NO: 1070023 - RNA, 19 nt, Artificial Sequence
  Description of Artificial Sequence: Synthetic oligonucleotide
  Antisense strand to SEQ ID NO: 1070022
ucuccucaccaaagccagc

SEQ ID NO: 1070024 - RNA, 19 nt, Artificial Sequence
  Description of Artificial Sequence: Synthetic oligonucleotide
  Sense strand starting at position 2571 of SEQ ID NO: 915305
uggcuuuggugaggagaau

SEQ ID NO: 1070025 - RNA, 19 nt, Artificial Sequence
  Description of Artificial Sequence: Synthetic oligonucleotide
  Antisense strand to SEQ ID NO: 1070024
auucuccucaccaaagcca

SEQ ID NO: 1070026 - RNA, 19 nt, Artificial Sequence
  Description of Artificial Sequence: Synthetic oligonucleotide
  Sense strand starting at position 2572 of SEQ ID NO: 915305
ggcuuuggugaggagaauu

SEQ ID NO: 1070027 - RNA, 19 nt, Artificial Sequence
  Description of Artificial Sequence: Synthetic oligonucleotide
  Antisense strand to SEQ ID NO: 1070026
aauucuccucaccaaagcc

SEQ ID NO: 1070028 - RNA, 19 nt, Artificial Sequence
  Description of Artificial Sequence: Synthetic oligonucleotide
  Sense strand starting at position 3108 of SEQ ID NO: 915305
ugaggaauucuguggguca

SEQ ID NO: 1070029 - RNA, 19 nt, Artificial Sequence
  Description of Artificial Sequence: Synthetic oligonucleotide
  Antisense strand to SEQ ID NO: 1070028
ugacccacagaauuccuca

SEQ ID NO: 1070030 - RNA, 19 nt, Artificial Sequence
  Description of Artificial Sequence: Synthetic oligonucleotide
  Sense strand starting at position 3109 of SEQ ID NO: 915305
gaggaauucugugggucac

SEQ ID NO: 1070031 - RNA, 19 nt, Artificial Sequence
  Description of Artificial Sequence: Synthetic oligonucleotide
  Antisense strand to SEQ ID NO: 1070030
gugacccacagaauuccuc

SEQ ID NO: 1070032 - RNA, 19 nt, Artificial Sequence
  Description of Artificial Sequence: Synthetic oligonucleotide
  Sense strand starting at position 3110 of SEQ ID NO: 915305
aggaauucugugggucaca

SEQ ID NO: 1070033 - RNA, 19 nt, Artificial Sequence
  Description of Artificial Sequence: Synthetic oligonucleotide
  Antisense strand to SEQ ID NO: 1070032
ugugacccacagaauuccu

SEQ ID NO: 1070034 - RNA, 19 nt, Artificial Sequence
  Description of Artificial Sequence: Synthetic oligonucleotide
  Sense strand starting at position 3622 of SEQ ID NO: 915305
gugaguguccaguguuagg

SEQ ID NO: 1070035 - RNA, 19 nt, Artificial Sequence
  Description of Artificial Sequence: Synthetic oligonucleotide
  Antisense strand to SEQ ID NO: 1070034
ccuaacacuggacacucac

SEQ ID NO: 1070036 - RNA, 19 nt, Artificial Sequence
  Description of Artificial Sequence: Synthetic oligonucleotide
  Sense strand starting at position 3719 of SEQ ID NO: 915305
uggagagcuuucuggaucu

SEQ ID NO: 1070037 - RNA, 19 nt, Artificial Sequence
  Description of Artificial Sequence: Synthetic oligonucleotide
  Antisense strand to SEQ ID NO: 1070036
agauccagaaagcucucca

SEQ ID NO: 1070038 - RNA, 19 nt, Artificial Sequence
  Description of Artificial Sequence: Synthetic oligonucleotide
  Sense strand starting at position 87 of SEQ ID NO: 915306
gcacucagguccuaauaga

SEQ ID NO: 1070039 - RNA, 19 nt, Artificial Sequence
  Description of Artificial Sequence: Synthetic oligonucleotide
  Antisense strand to SEQ ID NO: 1070038
ucuauuaggaccugagugc

SEQ ID NO: 1070040 - RNA, 19 nt, Artificial Sequence
  Description of Artificial Sequence: Synthetic oligonucleotide
  Sense strand starting at position 310 of SEQ ID NO: 915306
gcaagcugucccuacaaca

SEQ ID NO: 1070041 - RNA, 19 nt, Artificial Sequence
  Description of Artificial Sequence: Synthetic oligonucleotide
  Antisense strand to SEQ ID NO: 1070040
uguuguagggacagcuugc

SEQ ID NO: 1070042 - RNA, 19 nt, Artificial Sequence
  Description of Artificial Sequence: Synthetic oligonucleotide
  Sense strand starting at position 667 of SEQ ID NO: 915306
gcaguuuacucuucccuau

SEQ ID NO: 1070043 - RNA, 19 nt, Artificial Sequence
  Description of Artificial Sequence: Synthetic oligonucleotide
  Antisense strand to SEQ ID NO: 1070042
auagggaagaguaaacugc

SEQ ID NO: 1070044 - RNA, 19 nt, Artificial Sequence
  Description of Artificial Sequence: Synthetic oligonucleotide
  Sense strand starting at position 1164 of SEQ ID NO: 915306
cgaggaaagacucggagau

SEQ ID NO: 1070045 - RNA, 19 nt, Artificial Sequence
  Description of Artificial Sequence: Synthetic oligonucleotide
  Antisense strand to SEQ ID NO: 1070044
aucuccgagucuuuccucg

SEQ ID NO: 1070046 - RNA, 19 nt, Artificial Sequence
  Description of Artificial Sequence: Synthetic oligonucleotide
  Sense strand starting at position 1166 of SEQ ID NO: 915306
aggaaagacucggagaucu

SEQ ID NO: 1070047 - RNA, 19 nt, Artificial Sequence
  Description of Artificial Sequence: Synthetic oligonucleotide
  Antisense strand to SEQ ID NO: 1070046
agaucuccgagucuuuccu

SEQ ID NO: 1070048 - RNA, 19 nt, Artificial Sequence
  Description of Artificial Sequence: Synthetic oligonucleotide
  Sense strand starting at position 1292 of SEQ ID NO: 915306
gacugaaguccagauguuu

SEQ ID NO: 1070049 - RNA, 19 nt, Artificial Sequence
  Description of Artificial Sequence: Synthetic oligonucleotide
  Antisense strand to SEQ ID NO: 1070048
aaacaucuggacuucaguc

SEQ ID NO: 1070050 - RNA, 19 nt, Artificial Sequence
  Description of Artificial Sequence: Synthetic oligonucleotide
  Sense strand starting at position 1300 of SEQ ID NO: 915306
uccagauguuuggguggga

SEQ ID NO: 1070051 - RNA, 19 nt, Artificial Sequence
  Description of Artificial Sequence: Synthetic oligonucleotide
  Antisense strand to SEQ ID NO: 1070050
ucccacccaaacaucugga

SEQ ID NO: 1070052 - RNA, 19 nt, Artificial Sequence
  Description of Artificial Sequence: Synthetic oligonucleotide
  Sense strand starting at position 1301 of SEQ ID NO: 915306
ccagauguuugggugggaa

SEQ ID NO: 1070053 - RNA, 19 nt, Artificial Sequence
  Description of Artificial Sequence: Synthetic oligonucleotide
  Antisense strand to SEQ ID NO: 1070052
uucccacccaaacaucugg

SEQ ID NO: 1070054 - RNA, 19 nt, Artificial Sequence
  Description of Artificial Sequence: Synthetic oligonucleotide
  Sense strand starting at position 1303 of SEQ ID NO: 915306
agauguuugggugggaauc

SEQ ID NO: 1070055 - RNA, 19 nt, Artificial Sequence
  Description of Artificial Sequence: Synthetic oligonucleotide
  Antisense strand to SEQ ID NO: 1070054
gauucccacccaaacaucu

SEQ ID NO: 1070056 - RNA, 19 nt, Artificial Sequence
  Description of Artificial Sequence: Synthetic oligonucleotide
  Sense strand starting at position 1304 of SEQ ID NO: 915306
gauguuugggugggaaucu

SEQ ID NO: 1070057 - RNA, 19 nt, Artificial Sequence
  Description of Artificial Sequence: Synthetic oligonucleotide
  Antisense strand to SEQ ID NO: 1070056
agauucccacccaaacauc

SEQ ID NO: 1070058 - RNA, 19 nt, Artificial Sequence
  Description of Artificial Sequence: Synthetic oligonucleotide
  Sense strand starting at position 1333 of SEQ ID NO: 915306
ccaguugaggcuuggaaug

SEQ ID NO: 1070059 - RNA, 19 nt, Artificial Sequence
  Description of Artificial Sequence: Synthetic oligonucleotide
  Antisense strand to SEQ ID NO: 1070058
cauuccaagccucaacugg

SEQ ID NO: 1070060 - RNA, 19 nt, Artificial Sequence
  Description of Artificial Sequence: Synthetic oligonucleotide
  Sense strand starting at position 1440 of SEQ ID NO: 915306
ccacauauauggugaaggu

SEQ ID NO: 1070061 - RNA, 19 nt, Artificial Sequence
  Description of Artificial Sequence: Synthetic oligonucleotide
  Antisense strand to SEQ ID NO: 1070060
accuucaccauauaugugg

SEQ ID NO: 1070062 - RNA, 19 nt, Artificial Sequence
  Description of Artificial Sequence: Synthetic oligonucleotide
  Sense strand starting at position 1832 of SEQ ID NO: 915306
gcucguccggcuugaggaa

SEQ ID NO: 1070063 - RNA, 19 nt, Artificial Sequence
  Description of Artificial Sequence: Synthetic oligonucleotide
  Antisense strand to SEQ ID NO: 1070062
uuccucaagccggacgagc

SEQ ID NO: 1070064 - RNA, 19 nt, Artificial Sequence
  Description of Artificial Sequence: Synthetic oligonucleotide
  Sense strand starting at position 2269 of SEQ ID NO: 915306
gucugaucgcacccuguuu

SEQ ID NO: 1070065 - RNA, 19 nt, Artificial Sequence
  Description of Artificial Sequence: Synthetic oligonucleotide
  Antisense strand to SEQ ID NO: 1070064
aaacagggugcgaucagac

SEQ ID NO: 1070066 - RNA, 19 nt, Artificial Sequence
  Description of Artificial Sequence: Synthetic oligonucleotide
  Sense strand starting at position 2442 of SEQ ID NO: 915306
gggaagucgggagaauguu

SEQ ID NO: 1070067 - RNA, 19 nt, Artificial Sequence
  Description of Artificial Sequence: Synthetic oligonucleotide
  Antisense strand to SEQ ID NO: 1070066
aacauucucccgacuuccc

SEQ ID NO: 1070068 - RNA, 19 nt, Artificial Sequence
  Description of Artificial Sequence: Synthetic oligonucleotide
  Sense strand starting at position 2458 of SEQ ID NO: 915306
guuggaggucgcugugaga

SEQ ID NO: 1070069 - RNA, 19 nt, Artificial Sequence
  Description of Artificial Sequence: Synthetic oligonucleotide
  Antisense strand to SEQ ID NO: 1070068
ucucacagcgaccuccaac

SEQ ID NO: 1070070 - RNA, 19 nt, Artificial Sequence
  Description of Artificial Sequence: Synthetic oligonucleotide
  Sense strand starting at position 2863 of SEQ ID NO: 915306
gccucugcuuggcaugaaa

SEQ ID NO: 1070071 - RNA, 19 nt, Artificial Sequence
  Description of Artificial Sequence: Synthetic oligonucleotide
  Antisense strand to SEQ ID NO: 1070070
uuucaugccaagcagaggc

SEQ ID NO: 1070072 - RNA, 19 nt, Artificial Sequence
  Description of Artificial Sequence: Synthetic oligonucleotide
  Sense strand starting at position 3272 of SEQ ID NO: 915306
uugagucauugugcccauu

SEQ ID NO: 1070073 - RNA, 19 nt, Artificial Sequence
  Description of Artificial Sequence: Synthetic oligonucleotide
  Antisense strand to SEQ ID NO: 1070072
aaugggcacaaugacucaa

SEQ ID NO: 1070074 - RNA, 19 nt, Artificial Sequence
  Description of Artificial Sequence: Synthetic oligonucleotide
  Sense strand starting at position 3282 of SEQ ID NO: 915306
gugcccauuccuggacaca

SEQ ID NO: 1070075 - RNA, 19 nt, Artificial Sequence
  Description of Artificial Sequence: Synthetic oligonucleotide
  Antisense strand to SEQ ID NO: 1070074
uguguccaggaaugggcac

SEQ ID NO: 1070076 - RNA, 19 nt, Artificial Sequence
  Description of Artificial Sequence: Synthetic oligonucleotide
  Sense strand starting at position 3313 of SEQ ID NO: 915306
ggcacauagccuuggcaga

SEQ ID NO: 1070077 - RNA, 19 nt, Artificial Sequence
  Description of Artificial Sequence: Synthetic oligonucleotide
  Antisense strand to SEQ ID NO: 1070076
ucugccaaggcuaugugcc

SEQ ID NO: 1070078 - RNA, 19 nt, Artificial Sequence
  Description of Artificial Sequence: Synthetic oligonucleotide
  Sense strand starting at position 3385 of SEQ ID NO: 915306
accuuucuuucugaggcau

SEQ ID NO: 1070079 - RNA, 19 nt, Artificial Sequence
  Description of Artificial Sequence: Synthetic oligonucleotide
  Antisense strand to SEQ ID NO: 1070078
augccucagaaagaaaggu

SEQ ID NO: 1070080 - RNA, 19 nt, Artificial Sequence
  Description of Artificial Sequence: Synthetic oligonucleotide
  Sense strand starting at position 3699 of SEQ ID NO: 915306
gagggcuucccugguuacu

SEQ ID NO: 1070081 - RNA, 19 nt, Artificial Sequence
  Description of Artificial Sequence: Synthetic oligonucleotide
  Antisense strand to SEQ ID NO: 1070080
aguaaccagggaagcccuc

SEQ ID NO: 1070082 - RNA, 19 nt, Artificial Sequence
  Description of Artificial Sequence: Synthetic oligonucleotide
  Sense strand starting at position 3744 of SEQ ID NO: 915306
uugugucuuuccugggagu

SEQ ID NO: 1070083 - RNA, 19 nt, Artificial Sequence
  Description of Artificial Sequence: Synthetic oligonucleotide
  Antisense strand to SEQ ID NO: 1070082
acucccaggaaagacacaa

SEQ ID NO: 1070084 - RNA, 19 nt, Artificial Sequence
  Description of Artificial Sequence: Synthetic oligonucleotide
  Sense strand starting at position 3746 of SEQ ID NO: 915306
gugucuuuccugggaguca

SEQ ID NO: 1070085 - RNA, 19 nt, Artificial Sequence
  Description of Artificial Sequence: Synthetic oligonucleotide
  Antisense strand to SEQ ID NO: 1070084
ugacucccaggaaagacac

SEQ ID NO: 1070086 - RNA, 19 nt, Artificial Sequence
  Description of Artificial Sequence: Synthetic oligonucleotide
  Sense strand starting at position 3781 of SEQ ID NO: 915306
agagguguagaguaaguga

SEQ ID NO: 1070087 - RNA, 19 nt, Artificial Sequence
  Description of Artificial Sequence: Synthetic oligonucleotide
  Antisense strand to SEQ ID NO: 1070086
ucacuuacucuacaccucu

SEQ ID NO: 1070088 - RNA, 19 nt, Artificial Sequence
  Description of Artificial Sequence: Synthetic oligonucleotide
  Sense strand starting at position 3784 of SEQ ID NO: 915306
gguguagaguaagugaucu

SEQ ID NO: 1070089 - RNA, 19 nt, Artificial Sequence
  Description of Artificial Sequence: Synthetic oligonucleotide
  Antisense strand to SEQ ID NO: 1070088
agaucacuuacucuacacc

SEQ ID NO: 1070090 - RNA, 19 nt, Artificial Sequence
  Description of Artificial Sequence: Synthetic oligonucleotide
  Sense strand starting at position 3790 of SEQ ID NO: 915306
gaguaagugaucugggcca

SEQ ID NO: 1070091 - RNA, 19 nt, Artificial Sequence
  Description of Artificial Sequence: Synthetic oligonucleotide
  Antisense strand to SEQ ID NO: 1070090
uggcccagaucacuuacuc

SEQ ID NO: 1070092 - RNA, 19 nt, Artificial Sequence
  Description of Artificial Sequence: Synthetic oligonucleotide
  Sense strand starting at position 3792 of SEQ ID NO: 915306
guaagugaucugggccaag

SEQ ID NO: 1070093 - RNA, 19 nt, Artificial Sequence
  Description of Artificial Sequence: Synthetic oligonucleotide
  Antisense strand to SEQ ID NO: 1070092
cuuggcccagaucacuuac

SEQ ID NO: 1070094 - RNA, 19 nt, Artificial Sequence
  Description of Artificial Sequence: Synthetic oligonucleotide
  Sense strand starting at position 3883 of SEQ ID NO: 915306
ugggcuaagauguguaaag

SEQ ID NO: 1070095 - RNA, 19 nt, Artificial Sequence
  Description of Artificial Sequence: Synthetic oligonucleotide
  Antisense strand to SEQ ID NO: 1070094
cuuuacacaucuuagccca

SEQ ID NO: 1070096 - RNA, 19 nt, Artificial Sequence
  Description of Artificial Sequence: Synthetic oligonucleotide
  Sense strand starting at position 3885 of SEQ ID NO: 915306
ggcuaagauguguaaaggu

SEQ ID NO: 1070097 - RNA, 19 nt, Artificial Sequence
  Description of Artificial Sequence: Synthetic oligonucleotide
  Antisense strand to SEQ ID NO: 1070096
accuuuacacaucuuagcc

SEQ ID NO: 1070098 - RNA, 19 nt, Artificial Sequence
  Description of Artificial Sequence: Synthetic oligonucleotide
  Sense strand starting at position 265 of SEQ ID NO: 915307
acugcaaugucauucuaga

SEQ ID NO: 1070099 - RNA, 19 nt, Artificial Sequence
  Description of Artificial Sequence: Synthetic oligonucleotide
  Antisense strand to SEQ ID NO: 1070098
ucuagaaugacauugcagu

SEQ ID NO: 1070100 - RNA, 19 nt, Artificial Sequence
  Description of Artificial Sequence: Synthetic oligonucleotide
  Sense strand starting at position 336 of SEQ ID NO: 915307
ggcuuaacucaguaugucu

SEQ ID NO: 1070101 - RNA, 19 nt, Artificial Sequence
  Description of Artificial Sequence: Synthetic oligonucleotide
  Antisense strand to SEQ ID NO: 1070100
agacauacugaguuaagcc

SEQ ID NO: 1070102 - RNA, 19 nt, Artificial Sequence
  Description of Artificial Sequence: Synthetic oligonucleotide
  Sense strand starting at position 434 of SEQ ID NO: 915307
gcucaauggagguggagaa

SEQ ID NO: 1070103 - RNA, 19 nt, Artificial Sequence
  Description of Artificial Sequence: Synthetic oligonucleotide
  Antisense strand to SEQ ID NO: 1070102
uucuccaccuccauugagc

SEQ ID NO: 1070104 - RNA, 19 nt, Artificial Sequence
  Description of Artificial Sequence: Synthetic oligonucleotide
  Sense strand starting at position 457 of SEQ ID NO: 915307
gggcuauccuucucuccau

SEQ ID NO: 1070105 - RNA, 19 nt, Artificial Sequence
  Description of Artificial Sequence: Synthetic oligonucleotide
  Antisense strand to SEQ ID NO: 1070104
auggagagaaggauagccc

SEQ ID NO: 1070106 - RNA, 19 nt, Artificial Sequence
  Description of Artificial Sequence: Synthetic oligonucleotide
  Sense strand starting at position 569 of SEQ ID NO: 915307
ucuggagacaugugauauu

SEQ ID NO: 1070107 - RNA, 19 nt, Artificial Sequence
  Description of Artificial Sequence: Synthetic oligonucleotide
  Antisense strand to SEQ ID NO: 1070106
aauaucacaugucuccaga

SEQ ID NO: 1070108 - RNA, 19 nt, Artificial Sequence
  Description of Artificial Sequence: Synthetic oligonucleotide
  Sense strand starting at position 580 of SEQ ID NO: 915307
gugauauuacagcacagcu

SEQ ID NO: 1070109 - RNA, 19 nt, Artificial Sequence
  Description of Artificial Sequence: Synthetic oligonucleotide
  Antisense strand to SEQ ID NO: 1070108
agcugugcuguaauaucac

SEQ ID NO: 1070110 - RNA, 19 nt, Artificial Sequence
  Description of Artificial Sequence: Synthetic oligonucleotide
  Sense strand starting at position 588 of SEQ ID NO: 915307
acagcacagcucuauggua

SEQ ID NO: 1070111 - RNA, 19 nt, Artificial Sequence
  Description of Artificial Sequence: Synthetic oligonucleotide
  Antisense strand to SEQ ID NO: 1070110
uaccauagagcugugcugu

SEQ ID NO: 1070112 - RNA, 19 nt, Artificial Sequence
  Description of Artificial Sequence: Synthetic oligonucleotide
  Sense strand starting at position 590 of SEQ ID NO: 915307
agcacagcucuaugguaua

SEQ ID NO: 1070113 - RNA, 19 nt, Artificial Sequence
  Description of Artificial Sequence: Synthetic oligonucleotide
  Antisense strand to SEQ ID NO: 1070112
uauaccauagagcugugcu

SEQ ID NO: 1070114 - RNA, 19 nt, Artificial Sequence
  Description of Artificial Sequence: Synthetic oligonucleotide
  Sense strand starting at position 1118 of SEQ ID NO: 915307
acuuuaguuguccacaucu

SEQ ID NO: 1070115 - RNA, 19 nt, Artificial Sequence
  Description of Artificial Sequence: Synthetic oligonucleotide
  Antisense strand to SEQ ID NO: 1070114
agauguggacaacuaaagu

SEQ ID NO: 1070116 - RNA, 19 nt, Artificial Sequence
  Description of Artificial Sequence: Synthetic oligonucleotide
  Sense strand starting at position 1145 of SEQ ID NO: 915307
ugccaucuggaacaguaau

SEQ ID NO: 1070117 - RNA, 19 nt, Artificial Sequence
  Description of Artificial Sequence: Synthetic oligonucleotide
  Antisense strand to SEQ ID NO: 1070116
auuacuguuccagauggca

SEQ ID NO: 1070118 - RNA, 19 nt, Artificial Sequence
  Description of Artificial Sequence: Synthetic oligonucleotide
  Sense strand starting at position 1225 of SEQ ID NO: 915307
gcugaauaccugugggcaa

SEQ ID NO: 1070119 - RNA, 19 nt, Artificial Sequence
  Description of Artificial Sequence: Synthetic oligonucleotide
  Antisense strand to SEQ ID NO: 1070118
uugcccacagguauucagc

SEQ ID NO: 1070120 - RNA, 19 nt, Artificial Sequence
  Description of Artificial Sequence: Synthetic oligonucleotide
  Sense strand starting at position 1319 of SEQ ID NO: 915307
ugagaucacagguguggaa

SEQ ID NO: 1070121 - RNA, 19 nt, Artificial Sequence
  Description of Artificial Sequence: Synthetic oligonucleotide
  Antisense strand to SEQ ID NO: 1070120
uuccacaccugugaucuca

SEQ ID NO: 1070122 - RNA, 19 nt, Artificial Sequence
  Description of Artificial Sequence: Synthetic oligonucleotide
  Sense strand starting at position 1333 of SEQ ID NO: 915307
uggaaacagugcucaggaa

SEQ ID NO: 1070123 - RNA, 19 nt, Artificial Sequence
  Description of Artificial Sequence: Synthetic oligonucleotide
  Antisense strand to SEQ ID NO: 1070122
uuccugagcacuguuucca

SEQ ID NO: 1070124 - RNA, 19 nt, Artificial Sequence
  Description of Artificial Sequence: Synthetic oligonucleotide
  Sense strand starting at position 1353 of SEQ ID NO: 915307
cuguaaacuucugugugaa

SEQ ID NO: 1070125 - RNA, 19 nt, Artificial Sequence
  Description of Artificial Sequence: Synthetic oligonucleotide
  Antisense strand to SEQ ID NO: 1070124
uucacacagaaguuuacag

SEQ ID NO: 1070126 - RNA, 19 nt, Artificial Sequence
  Description of Artificial Sequence: Synthetic oligonucleotide
  Sense strand starting at position 1354 of SEQ ID NO: 915307
uguaaacuucugugugaac

SEQ ID NO: 1070127 - RNA, 19 nt, Artificial Sequence
  Description of Artificial Sequence: Synthetic oligonucleotide
  Antisense strand to SEQ ID NO: 1070126
guucacacagaaguuuaca

SEQ ID NO: 1070128 - RNA, 19 nt, Artificial Sequence
  Description of Artificial Sequence: Synthetic oligonucleotide
  Sense strand starting at position 1355 of SEQ ID NO: 915307
guaaacuucugugugaaca

SEQ ID NO: 1070129 - RNA, 19 nt, Artificial Sequence
  Description of Artificial Sequence: Synthetic oligonucleotide
  Antisense strand to SEQ ID NO: 1070128
uguucacacagaaguuuac

SEQ ID NO: 1070130 - RNA, 19 nt, Artificial Sequence
  Description of Artificial Sequence: Synthetic oligonucleotide
  Sense strand starting at position 1383 of SEQ ID NO: 915307
ucguaauuauggcuuaaua

SEQ ID NO: 1070131 - RNA, 19 nt, Artificial Sequence
  Description of Artificial Sequence: Synthetic oligonucleotide
  Antisense strand to SEQ ID NO: 1070130
uauuaagccauaauuacga

SEQ ID NO: 1070132 - RNA, 19 nt, Artificial Sequence
  Description of Artificial Sequence: Synthetic oligonucleotide
  Sense strand starting at position 1385 of SEQ ID NO: 915307
guaauuauggcuuaauacu

SEQ ID NO: 1070133 - RNA, 19 nt, Artificial Sequence
  Description of Artificial Sequence: Synthetic oligonucleotide
  Antisense strand to SEQ ID NO: 1070132
aguauuaagccauaauuac

SEQ ID NO: 1070134 - RNA, 19 nt, Artificial Sequence
  Description of Artificial Sequence: Synthetic oligonucleotide
  Sense strand starting at position 1735 of SEQ ID NO: 915307
uggccacacuucucugaga

SEQ ID NO: 1070135 - RNA, 19 nt, Artificial Sequence
  Description of Artificial Sequence: Synthetic oligonucleotide
  Antisense strand to SEQ ID NO: 1070134
ucucagagaaguguggcca

SEQ ID NO: 1070136 - RNA, 19 nt, Artificial Sequence
  Description of Artificial Sequence: Synthetic oligonucleotide
  Sense strand starting at position 1736 of SEQ ID NO: 915307
ggccacacuucucugagaa

SEQ ID NO: 1070137 - RNA, 19 nt, Artificial Sequence
  Description of Artificial Sequence: Synthetic oligonucleotide
  Antisense strand to SEQ ID NO: 1070136
uucucagagaaguguggcc

SEQ ID NO: 1070138 - RNA, 19 nt, Artificial Sequence
  Description of Artificial Sequence: Synthetic oligonucleotide
  Sense strand starting at position 1737 of SEQ ID NO: 915307
gccacacuucucugagaaa

SEQ ID NO: 1070139 - RNA, 19 nt, Artificial Sequence
  Description of Artificial Sequence: Synthetic oligonucleotide
  Antisense strand to SEQ ID NO: 1070138
uuucucagagaaguguggc

SEQ ID NO: 1070140 - RNA, 19 nt, Artificial Sequence
  Description of Artificial Sequence: Synthetic oligonucleotide
  Sense strand starting at position 1885 of SEQ ID NO: 915307
cccgcuaaaucuuucugaa

SEQ ID NO: 1070141 - RNA, 19 nt, Artificial Sequence
  Description of Artificial Sequence: Synthetic oligonucleotide
  Antisense strand to SEQ ID NO: 1070140
uucagaaagauuuagcggg

SEQ ID NO: 1070142 - RNA, 19 nt, Artificial Sequence
  Description of Artificial Sequence: Synthetic oligonucleotide
  Sense strand starting at position 1887 of SEQ ID NO: 915307
cgcuaaaucuuucugaaag

SEQ ID NO: 1070143 - RNA, 19 nt, Artificial Sequence
  Description of Artificial Sequence: Synthetic oligonucleotide
  Antisense strand to SEQ ID NO: 1070142
cuuucagaaagauuuagcg

SEQ ID NO: 1070144 - RNA, 19 nt, Artificial Sequence
  Description of Artificial Sequence: Synthetic oligonucleotide
  Sense strand starting at position 1913 of SEQ ID NO: 915307
gaucgugggugguucauaa

SEQ ID NO: 1070145 - RNA, 19 nt, Artificial Sequence
  Description of Artificial Sequence: Synthetic oligonucleotide
  Antisense strand to SEQ ID NO: 1070144
uuaugaaccacccacgauc

SEQ ID NO: 1070146 - RNA, 19 nt, Artificial Sequence
  Description of Artificial Sequence: Synthetic oligonucleotide
  Sense strand starting at position 1926 of SEQ ID NO: 915307
ucauaaugacaguagcuaa

SEQ ID NO: 1070147 - RNA, 19 nt, Artificial Sequence
  Description of Artificial Sequence: Synthetic oligonucleotide
  Antisense strand to SEQ ID NO: 1070146
uuagcuacugucauuauga

SEQ ID NO: 1070148 - RNA, 19 nt, Artificial Sequence
  Description of Artificial Sequence: Synthetic oligonucleotide
  Sense strand starting at position 2096 of SEQ ID NO: 915307
agaguaacaguacaucuuu

SEQ ID NO: 1070149 - RNA, 19 nt, Artificial Sequence
  Description of Artificial Sequence: Synthetic oligonucleotide
  Antisense strand to SEQ ID NO: 1070148
aaagauguacuguuacucu

SEQ ID NO: 1070150 - RNA, 19 nt, Artificial Sequence
  Description of Artificial Sequence: Synthetic oligonucleotide
  Sense strand starting at position 2393 of SEQ ID NO: 915307
ggccuuucccagggagcaa

SEQ ID NO: 1070151 - RNA, 19 nt, Artificial Sequence
  Description of Artificial Sequence: Synthetic oligonucleotide
  Antisense strand to SEQ ID NO: 1070150
uugcucccugggaaaggcc

SEQ ID NO: 1070152 - RNA, 19 nt, Artificial Sequence
  Description of Artificial Sequence: Synthetic oligonucleotide
  Sense strand starting at position 2525 of SEQ ID NO: 915307
acaauccugugucucagaa

SEQ ID NO: 1070153 - RNA, 19 nt, Artificial Sequence
  Description of Artificial Sequence: Synthetic oligonucleotide
  Antisense strand to SEQ ID NO: 1070152
uucugagacacaggauugu

SEQ ID NO: 1070154 - RNA, 19 nt, Artificial Sequence
  Description of Artificial Sequence: Synthetic oligonucleotide
  Sense strand starting at position 2609 of SEQ ID NO: 915307
guaggaggccggcauaaua

SEQ ID NO: 1070155 - RNA, 19 nt, Artificial Sequence
  Description of Artificial Sequence: Synthetic oligonucleotide
  Antisense strand to SEQ ID NO: 1070154
uauuaugccggccuccuac

SEQ ID NO: 1070156 - RNA, 19 nt, Artificial Sequence
  Description of Artificial Sequence: Synthetic oligonucleotide
  Sense strand starting at position 2631 of SEQ ID NO: 915307
ggugauggcucauuucuuc

SEQ ID NO: 1070157 - RNA, 19 nt, Artificial Sequence
  Description of Artificial Sequence: Synthetic oligonucleotide
  Antisense strand to SEQ ID NO: 1070156
gaagaaaugagccaucacc

SEQ ID NO: 1070158 - RNA, 19 nt, Artificial Sequence
  Description of Artificial Sequence: Synthetic oligonucleotide
  Sense strand starting at position 2672 of SEQ ID NO: 915307
gccagcugauuugcauauu

SEQ ID NO: 1070159 - RNA, 19 nt, Artificial Sequence
  Description of Artificial Sequence: Synthetic oligonucleotide
  Antisense strand to SEQ ID NO: 1070158
aauaugcaaaucagcuggc

SEQ ID NO: 1070160 - RNA, 19 nt, Artificial Sequence
  Description of Artificial Sequence: Synthetic oligonucleotide
  Sense strand starting at position 2675 of SEQ ID NO: 915307
agcugauuugcauauugcu

SEQ ID NO: 1070161 - RNA, 19 nt, Artificial Sequence
  Description of Artificial Sequence: Synthetic oligonucleotide
  Antisense strand to SEQ ID NO: 1070160
agcaauaugcaaaucagcu

SEQ ID NO: 1070162 - RNA, 19 nt, Artificial Sequence
  Description of Artificial Sequence: Synthetic oligonucleotide
  Sense strand starting at position 2683 of SEQ ID NO: 915307
ugcauauugcuuuguauuu

SEQ ID NO: 1070163 - RNA, 19 nt, Artificial Sequence
  Description of Artificial Sequence: Synthetic oligonucleotide
  Antisense strand to SEQ ID NO: 1070162
aaauacaaagcaauaugca

SEQ ID NO: 1070164 - RNA, 19 nt, Artificial Sequence
  Description of Artificial Sequence: Synthetic oligonucleotide
  Sense strand starting at position 2908 of SEQ ID NO: 915307
ggaagaaagugcuuccuac

SEQ ID NO: 1070165 - RNA, 19 nt, Artificial Sequence
  Description of Artificial Sequence: Synthetic oligonucleotide
  Antisense strand to SEQ ID NO: 1070164
guaggaagcacuuucuucc

SEQ ID NO: 1070166 - RNA, 19 nt, Artificial Sequence
  Description of Artificial Sequence: Synthetic oligonucleotide
  Sense strand starting at position 3114 of SEQ ID NO: 915307
ugaaguggcucuuccuuau

SEQ ID NO: 1070167 - RNA, 19 nt, Artificial Sequence
  Description of Artificial Sequence: Synthetic oligonucleotide
  Antisense strand to SEQ ID NO: 1070166
auaaggaagagccacuuca

SEQ ID NO: 1070168 - RNA, 19 nt, Artificial Sequence
  Description of Artificial Sequence: Synthetic oligonucleotide
  Sense strand starting at position 3343 of SEQ ID NO: 915307
cucacucaccuaugggaga

SEQ ID NO: 1070169 - RNA, 19 nt, Artificial Sequence
  Description of Artificial Sequence: Synthetic oligonucleotide
  Antisense strand to SEQ ID NO: 1070168
ucucccauaggugagugag

SEQ ID NO: 1070170 - RNA, 19 nt, Artificial Sequence
  Description of Artificial Sequence: Synthetic oligonucleotide
  Sense strand starting at position 3469 of SEQ ID NO: 915307
ucugcauugguaggaaguu

SEQ ID NO: 1070171 - RNA, 19 nt, Artificial Sequence
  Description of Artificial Sequence: Synthetic oligonucleotide
  Antisense strand to SEQ ID NO: 1070170
aacuuccuaccaaugcaga

SEQ ID NO: 1070172 - RNA, 19 nt, Artificial Sequence
  Description of Artificial Sequence: Synthetic oligonucleotide
  Sense strand starting at position 3633 of SEQ ID NO: 915307
uugccacuccuggaucauu

SEQ ID NO: 1070173 - RNA, 19 nt, Artificial Sequence
  Description of Artificial Sequence: Synthetic oligonucleotide
  Antisense strand to SEQ ID NO: 1070172
aaugauccaggaguggcaa

SEQ ID NO: 1070174 - RNA, 19 nt, Artificial Sequence
  Description of Artificial Sequence: Synthetic oligonucleotide
  Sense strand starting at position 3857 of SEQ ID NO: 915307
gggcaaguuguagagagua

SEQ ID NO: 1070175 - RNA, 19 nt, Artificial Sequence
  Description of Artificial Sequence: Synthetic oligonucleotide
  Antisense strand to SEQ ID NO: 1070174
uacucucuacaacuugccc

SEQ ID NO: 1070176 - RNA, 19 nt, Artificial Sequence
  Description of Artificial Sequence: Synthetic oligonucleotide
  Sense strand starting at position 3859 of SEQ ID NO: 915307
gcaaguuguagagaguacu

SEQ ID NO: 1070177 - RNA, 19 nt, Artificial Sequence
  Description of Artificial Sequence: Synthetic oligonucleotide
  Antisense strand to SEQ ID NO: 1070176
aguacucucuacaacuugc

SEQ ID NO: 1070178 - RNA, 19 nt, Artificial Sequence
  Description of Artificial Sequence: Synthetic oligonucleotide
  Sense strand starting at position 125 of SEQ ID NO: 915308
aguccuggaucuuaaaguu

SEQ ID NO: 1070179 - RNA, 19 nt, Artificial Sequence
  Description of Artificial Sequence: Synthetic oligonucleotide
  Antisense strand to SEQ ID NO: 1070178
aacuuuaagauccaggacu

SEQ ID NO: 1070180 - RNA, 19 nt, Artificial Sequence
  Description of Artificial Sequence: Synthetic oligonucleotide
  Sense strand starting at position 398 of SEQ ID NO: 915308
guucaaagaggcggucaua

SEQ ID NO: 1070181 - RNA, 19 nt, Artificial Sequence
  Description of Artificial Sequence: Synthetic oligonucleotide
  Antisense strand to SEQ ID NO: 1070180
uaugaccgccucuuugaac

SEQ ID NO: 1070182 - RNA, 19 nt, Artificial Sequence
  Description of Artificial Sequence: Synthetic oligonucleotide
  Sense strand starting at position 401 of SEQ ID NO: 915308
caaagaggcggucauacau

SEQ ID NO: 1070183 - RNA, 19 nt, Artificial Sequence
  Description of Artificial Sequence: Synthetic oligonucleotide
  Antisense strand to SEQ ID NO: 1070182
auguaugaccgccucuuug

SEQ ID NO: 1070184 - RNA, 19 nt, Artificial Sequence
  Description of Artificial Sequence: Synthetic oligonucleotide
  Sense strand starting at position 459 of SEQ ID NO: 915308
ccagcuguauccucaauug

SEQ ID NO: 1070185 - RNA, 19 nt, Artificial Sequence
  Description of Artificial Sequence: Synthetic oligonucleotide
  Antisense strand to SEQ ID NO: 1070184
caauugaggauacagcugg

SEQ ID NO: 1070186 - RNA, 19 nt, Artificial Sequence
  Description of Artificial Sequence: Synthetic oligonucleotide
  Sense strand starting at position 807 of SEQ ID NO: 915308
ucagacacaugcgaauaaa

SEQ ID NO: 1070187 - RNA, 19 nt, Artificial Sequence
  Description of Artificial Sequence: Synthetic oligonucleotide
  Antisense strand to SEQ ID NO: 1070186
uuuauucgcaugugucuga

SEQ ID NO: 1070188 - RNA, 19 nt, Artificial Sequence
  Description of Artificial Sequence: Synthetic oligonucleotide
  Sense strand starting at position 856 of SEQ ID NO: 915308
cugacaggcugcuuuacau

SEQ ID NO: 1070189 - RNA, 19 nt, Artificial Sequence
  Description of Artificial Sequence: Synthetic oligonucleotide
  Antisense strand to SEQ ID NO: 1070188
auguaaagcagccugucag

SEQ ID NO: 1070190 - RNA, 19 nt, Artificial Sequence
  Description of Artificial Sequence: Synthetic oligonucleotide
  Sense strand starting at position 1177 of SEQ ID NO: 915308
ggugguuaccucuaacccu

SEQ ID NO: 1070191 - RNA, 19 nt, Artificial Sequence
  Description of Artificial Sequence: Synthetic oligonucleotide
  Antisense strand to SEQ ID NO: 1070190
aggguuagagguaaccacc

SEQ ID NO: 1070192 - RNA, 19 nt, Artificial Sequence
  Description of Artificial Sequence: Synthetic oligonucleotide
  Sense strand starting at position 1374 of SEQ ID NO: 915308
acccucagcccuugaagaa

SEQ ID NO: 1070193 - RNA, 19 nt, Artificial Sequence
  Description of Artificial Sequence: Synthetic oligonucleotide
  Antisense strand to SEQ ID NO: 1070192
uucuucaagggcugagggu

SEQ ID NO: 1070194 - RNA, 19 nt, Artificial Sequence
  Description of Artificial Sequence: Synthetic oligonucleotide
  Sense strand starting at position 1484 of SEQ ID NO: 915308
ccucauucugcucagaggu

SEQ ID NO: 1070195 - RNA, 19 nt, Artificial Sequence
  Description of Artificial Sequence: Synthetic oligonucleotide
  Antisense strand to SEQ ID NO: 1070194
accucugagcagaaugagg

SEQ ID NO: 1070196 - RNA, 19 nt, Artificial Sequence
  Description of Artificial Sequence: Synthetic oligonucleotide
  Sense strand starting at position 1486 of SEQ ID NO: 915308
ucauucugcucagagguaa

SEQ ID NO: 1070197 - RNA, 19 nt, Artificial Sequence
  Description of Artificial Sequence: Synthetic oligonucleotide
  Antisense strand to SEQ ID NO: 1070196
uuaccucugagcagaauga

SEQ ID NO: 1070198 - RNA, 19 nt, Artificial Sequence
  Description of Artificial Sequence: Synthetic oligonucleotide
  Sense strand starting at position 1985 of SEQ ID NO: 915308
caggucugauaaugcagaa

SEQ ID NO: 1070199 - RNA, 19 nt, Artificial Sequence
  Description of Artificial Sequence: Synthetic oligonucleotide
  Antisense strand to SEQ ID NO: 1070198
uucugcauuaucagaccug

SEQ ID NO: 1070200 - RNA, 19 nt, Artificial Sequence
  Description of Artificial Sequence: Synthetic oligonucleotide
  Sense strand starting at position 2118 of SEQ ID NO: 915308
cagagagacugagagauaa

SEQ ID NO: 1070201 - RNA, 19 nt, Artificial Sequence
  Description of Artificial Sequence: Synthetic oligonucleotide
  Antisense strand to SEQ ID NO: 1070200
uuaucucucagucucucug

SEQ ID NO: 1070202 - RNA, 19 nt, Artificial Sequence
  Description of Artificial Sequence: Synthetic oligonucleotide
  Sense strand starting at position 2192 of SEQ ID NO: 915308
gagccuuagcgagaucaag

SEQ ID NO: 1070203 - RNA, 19 nt, Artificial Sequence
  Description of Artificial Sequence: Synthetic oligonucleotide
  Antisense strand to SEQ ID NO: 1070202
cuugaucucgcuaaggcuc

SEQ ID NO: 1070204 - RNA, 19 nt, Artificial Sequence
  Description of Artificial Sequence: Synthetic oligonucleotide
  Sense strand starting at position 2200 of SEQ ID NO: 915308
gcgagaucaagauggaagu

SEQ ID NO: 1070205 - RNA, 19 nt, Artificial Sequence
  Description of Artificial Sequence: Synthetic oligonucleotide
  Antisense strand to SEQ ID NO: 1070204
acuuccaucuugaucucgc

SEQ ID NO: 1070206 - RNA, 19 nt, Artificial Sequence
  Description of Artificial Sequence: Synthetic oligonucleotide
  Sense strand starting at position 2472 of SEQ ID NO: 915308
ugcccucaagucugagaga

SEQ ID NO: 1070207 - RNA, 19 nt, Artificial Sequence
  Description of Artificial Sequence: Synthetic oligonucleotide
  Antisense strand to SEQ ID NO: 1070206
ucucucagacuugagggca

SEQ ID NO: 1070208 - RNA, 19 nt, Artificial Sequence
  Description of Artificial Sequence: Synthetic oligonucleotide
  Sense strand starting at position 2473 of SEQ ID NO: 915308
gcccucaagucugagagau

SEQ ID NO: 1070209 - RNA, 19 nt, Artificial Sequence
  Description of Artificial Sequence: Synthetic oligonucleotide
  Antisense strand to SEQ ID NO: 1070208
aucucucagacuugagggc

SEQ ID NO: 1070210 - RNA, 19 nt, Artificial Sequence
  Description of Artificial Sequence: Synthetic oligonucleotide
  Sense strand starting at position 2475 of SEQ ID NO: 915308
ccucaagucugagagauca

SEQ ID NO: 1070211 - RNA, 19 nt, Artificial Sequence
  Description of Artificial Sequence: Synthetic oligonucleotide
  Antisense strand to SEQ ID NO: 1070210
ugaucucucagacuugagg

SEQ ID NO: 1070212 - RNA, 19 nt, Artificial Sequence
  Description of Artificial Sequence: Synthetic oligonucleotide
  Sense strand starting at position 2540 of SEQ ID NO: 915308
cgguguguaucaucuccua

SEQ ID NO: 1070213 - RNA, 19 nt, Artificial Sequence
  Description of Artificial Sequence: Synthetic oligonucleotide
  Antisense strand to SEQ ID NO: 1070212
uaggagaugauacacaccg

SEQ ID NO: 1070214 - RNA, 19 nt, Artificial Sequence
  Description of Artificial Sequence: Synthetic oligonucleotide
  Sense strand starting at position 2622 of SEQ ID NO: 915308
gacucagagccuugucaca

SEQ ID NO: 1070215 - RNA, 19 nt, Artificial Sequence
  Description of Artificial Sequence: Synthetic oligonucleotide
  Antisense strand to SEQ ID NO: 1070214
ugugacaaggcucugaguc

SEQ ID NO: 1070216 - RNA, 19 nt, Artificial Sequence
  Description of Artificial Sequence: Synthetic oligonucleotide
  Sense strand starting at position 2678 of SEQ ID NO: 915308
ggagcugaugcgugagcau

SEQ ID NO: 1070217 - RNA, 19 nt, Artificial Sequence
  Description of Artificial Sequence: Synthetic oligonucleotide
  Antisense strand to SEQ ID NO: 1070216
augcucacgcaucagcucc

SEQ ID NO: 1070218 - RNA, 19 nt, Artificial Sequence
  Description of Artificial Sequence: Synthetic oligonucleotide
  Sense strand starting at position 2698 of SEQ ID NO: 915308
gacuucuaccaggaucugu

SEQ ID NO: 1070219 - RNA, 19 nt, Artificial Sequence
  Description of Artificial Sequence: Synthetic oligonucleotide
  Antisense strand to SEQ ID NO: 1070218
acagauccugguagaaguc

SEQ ID NO: 1070220 - RNA, 19 nt, Artificial Sequence
  Description of Artificial Sequence: Synthetic oligonucleotide
  Sense strand starting at position 2746 of SEQ ID NO: 915308
ggccuucgcugcucacaga

SEQ ID NO: 1070221 - RNA, 19 nt, Artificial Sequence
  Description of Artificial Sequence: Synthetic oligonucleotide
  Antisense strand to SEQ ID NO: 1070220
ucugugagcagcgaaggcc

SEQ ID NO: 1070222 - RNA, 19 nt, Artificial Sequence
  Description of Artificial Sequence: Synthetic oligonucleotide
  Sense strand starting at position 2831 of SEQ ID NO: 915308
gcuauaaccuagugaaaua

SEQ ID NO: 1070223 - RNA, 19 nt, Artificial Sequence
  Description of Artificial Sequence: Synthetic oligonucleotide
  Antisense strand to SEQ ID NO: 1070222
uauuucacuagguuauagc

SEQ ID NO: 1070224 - RNA, 19 nt, Artificial Sequence
  Description of Artificial Sequence: Synthetic oligonucleotide
  Sense strand starting at position 2895 of SEQ ID NO: 915308
gcuacuauuguaugcagga

SEQ ID NO: 1070225 - RNA, 19 nt, Artificial Sequence
  Description of Artificial Sequence: Synthetic oligonucleotide
  Antisense strand to SEQ ID NO: 1070224
uccugcauacaauaguagc

SEQ ID NO: 1070226 - RNA, 19 nt, Artificial Sequence
  Description of Artificial Sequence: Synthetic oligonucleotide
  Sense strand starting at position 3002 of SEQ ID NO: 915308
gagcucauggcucacacua

SEQ ID NO: 1070227 - RNA, 19 nt, Artificial Sequence
  Description of Artificial Sequence: Synthetic oligonucleotide
  Antisense strand to SEQ ID NO: 1070226
uagugugagccaugagcuc

SEQ ID NO: 1070228 - RNA, 19 nt, Artificial Sequence
  Description of Artificial Sequence: Synthetic oligonucleotide
  Sense strand starting at position 3153 of SEQ ID NO: 915308
gcaagcauuucuggaagag

SEQ ID NO: 1070229 - RNA, 19 nt, Artificial Sequence
  Description of Artificial Sequence: Synthetic oligonucleotide
  Antisense strand to SEQ ID NO: 1070228
cucuuccagaaaugcuugc

SEQ ID NO: 1070230 - RNA, 19 nt, Artificial Sequence
  Description of Artificial Sequence: Synthetic oligonucleotide
  Sense strand starting at position 3202 of SEQ ID NO: 915308
gaggguauauuccagggua

SEQ ID NO: 1070231 - RNA, 19 nt, Artificial Sequence
  Description of Artificial Sequence: Synthetic oligonucleotide
  Antisense strand to SEQ ID NO: 1070230
uacccuggaauauacccuc

SEQ ID NO: 1070232 - RNA, 19 nt, Artificial Sequence
  Description of Artificial Sequence: Synthetic oligonucleotide
  Sense strand starting at position 3204 of SEQ ID NO: 915308
ggguauauuccaggguaga

SEQ ID NO: 1070233 - RNA, 19 nt, Artificial Sequence
  Description of Artificial Sequence: Synthetic oligonucleotide
  Antisense strand to SEQ ID NO: 1070232
ucuacccuggaauauaccc

SEQ ID NO: 1070234 - RNA, 19 nt, Artificial Sequence
  Description of Artificial Sequence: Synthetic oligonucleotide
  Sense strand starting at position 3205 of SEQ ID NO: 915308
gguauauuccaggguagag

SEQ ID NO: 1070235 - RNA, 19 nt, Artificial Sequence
  Description of Artificial Sequence: Synthetic oligonucleotide
  Antisense strand to SEQ ID NO: 1070234
cucuacccuggaauauacc

SEQ ID NO: 1070236 - RNA, 19 nt, Artificial Sequence
  Description of Artificial Sequence: Synthetic oligonucleotide
  Sense strand starting at position 3306 of SEQ ID NO: 915308
cagagaagucccugaggcu

SEQ ID NO: 1070237 - RNA, 19 nt, Artificial Sequence
  Description of Artificial Sequence: Synthetic oligonucleotide
  Antisense strand to SEQ ID NO: 1070236
agccucagggacuucucug

SEQ ID NO: 1070238 - RNA, 19 nt, Artificial Sequence
  Description of Artificial Sequence: Synthetic oligonucleotide
  Sense strand starting at position 3313 of SEQ ID NO: 915308
gucccugaggcugaauaga

SEQ ID NO: 1070239 - RNA, 19 nt, Artificial Sequence
  Description of Artificial Sequence: Synthetic oligonucleotide
  Antisense strand to SEQ ID NO: 1070238
ucuauucagccucagggac

SEQ ID NO: 1070240 - RNA, 19 nt, Artificial Sequence
  Description of Artificial Sequence: Synthetic oligonucleotide
  Sense strand starting at position 3381 of SEQ ID NO: 915308
gucagaaaugacugagcuu

SEQ ID NO: 1070241 - RNA, 19 nt, Artificial Sequence
  Description of Artificial Sequence: Synthetic oligonucleotide
  Antisense strand to SEQ ID NO: 1070240
aagcucagucauuucugac

SEQ ID NO: 1070242 - RNA, 19 nt, Artificial Sequence
  Description of Artificial Sequence: Synthetic oligonucleotide
  Sense strand starting at position 3390 of SEQ ID NO: 915308
gacugagcuuguguagaug

SEQ ID NO: 1070243 - RNA, 19 nt, Artificial Sequence
  Description of Artificial Sequence: Synthetic oligonucleotide
  Antisense strand to SEQ ID NO: 1070242
caucuacacaagcucaguc

SEQ ID NO: 1070244 - RNA, 19 nt, Artificial Sequence
  Description of Artificial Sequence: Synthetic oligonucleotide
  Sense strand starting at position 3429 of SEQ ID NO: 915308
gcagaaagcaguugucuug

SEQ ID NO: 1070245 - RNA, 19 nt, Artificial Sequence
  Description of Artificial Sequence: Synthetic oligonucleotide
  Antisense strand to SEQ ID NO: 1070244
caagacaacugcuuucugc

SEQ ID NO: 1070246 - RNA, 19 nt, Artificial Sequence
  Description of Artificial Sequence: Synthetic oligonucleotide
  Sense strand starting at position 3441 of SEQ ID NO: 915308
ugucuuguggccugggaag

SEQ ID NO: 1070247 - RNA, 19 nt, Artificial Sequence
  Description of Artificial Sequence: Synthetic oligonucleotide
  Antisense strand to SEQ ID NO: 1070246
cuucccaggccacaagaca

SEQ ID NO: 1070248 - RNA, 19 nt, Artificial Sequence
  Description of Artificial Sequence: Synthetic oligonucleotide
  Sense strand starting at position 3453 of SEQ ID NO: 915308
ugggaagugucaggaaaga

SEQ ID NO: 1070249 - RNA, 19 nt, Artificial Sequence
  Description of Artificial Sequence: Synthetic oligonucleotide
  Antisense strand to SEQ ID NO: 1070248
ucuuuccugacacuuccca

SEQ ID NO: 1070250 - RNA, 19 nt, Artificial Sequence
  Description of Artificial Sequence: Synthetic oligonucleotide
  Sense strand starting at position 3570 of SEQ ID NO: 915308
ggcccaggcugguuguaaa

SEQ ID NO: 1070251 - RNA, 19 nt, Artificial Sequence
  Description of Artificial Sequence: Synthetic oligonucleotide
  Antisense strand to SEQ ID NO: 1070250
uuuacaaccagccugggcc

SEQ ID NO: 1070252 - RNA, 19 nt, Artificial Sequence
  Description of Artificial Sequence: Synthetic oligonucleotide
  Sense strand starting at position 3784 of SEQ ID NO: 915308
gcaagaagcugagucagaa

SEQ ID NO: 1070253 - RNA, 19 nt, Artificial Sequence
  Description of Artificial Sequence: Synthetic oligonucleotide
  Antisense strand to SEQ ID NO: 1070252
uucugacucagcuucuugc

SEQ ID NO: 1070254 - RNA, 19 nt, Artificial Sequence
  Description of Artificial Sequence: Synthetic oligonucleotide
  Sense strand starting at position 3788 of SEQ ID NO: 915308
gaagcugagucagaagagu

SEQ ID NO: 1070255 - RNA, 19 nt, Artificial Sequence
  Description of Artificial Sequence: Synthetic oligonucleotide
  Antisense strand to SEQ ID NO: 1070254
acucuucugacucagcuuc

SEQ ID NO: 1070256 - RNA, 19 nt, Artificial Sequence
  Description of Artificial Sequence: Synthetic oligonucleotide
  Sense strand starting at position 3920 of SEQ ID NO: 915308
ucagaaaucuccugggaau

SEQ ID NO: 1070257 - RNA, 19 nt, Artificial Sequence
  Description of Artificial Sequence: Synthetic oligonucleotide
  Antisense strand to SEQ ID NO: 1070256
auucccaggagauuucuga

SEQ ID NO: 1070258 - RNA, 19 nt, Artificial Sequence
  Description of Artificial Sequence: Synthetic oligonucleotide
  Sense strand starting at position 221 of SEQ ID NO: 915309
auagauguauccucucauu

SEQ ID NO: 1070259 - RNA, 19 nt, Artificial Sequence
  Description of Artificial Sequence: Synthetic oligonucleotide
  Antisense strand to SEQ ID NO: 1070258
aaugagaggauacaucuau

SEQ ID NO: 1070260 - RNA, 19 nt, Artificial Sequence
  Description of Artificial Sequence: Synthetic oligonucleotide
  Sense strand starting at position 238 of SEQ ID NO: 915309
uucuaaaggcuguauguua

SEQ ID NO: 1070261 - RNA, 19 nt, Artificial Sequence
  Description of Artificial Sequence: Synthetic oligonucleotide
  Antisense strand to SEQ ID NO: 1070260
uaacauacagccuuuagaa

SEQ ID NO: 1070262 - RNA, 19 nt, Artificial Sequence
  Description of Artificial Sequence: Synthetic oligonucleotide
  Sense strand starting at position 260 of SEQ ID NO: 915309
uuggguaggcaucauuaua

SEQ ID NO: 1070263 - RNA, 19 nt, Artificial Sequence
  Description of Artificial Sequence: Synthetic oligonucleotide
  Antisense strand to SEQ ID NO: 1070262
uauaaugaugccuacccaa

SEQ ID NO: 1070264 - RNA, 19 nt, Artificial Sequence
  Description of Artificial Sequence: Synthetic oligonucleotide
  Sense strand starting at position 286 of SEQ ID NO: 915309
acagauaaauggcaccaaa

SEQ ID NO: 1070265 - RNA, 19 nt, Artificial Sequence
  Description of Artificial Sequence: Synthetic oligonucleotide
  Antisense strand to SEQ ID NO: 1070264
uuuggugccauuuaucugu

SEQ ID NO: 1070266 - RNA, 19 nt, Artificial Sequence
  Description of Artificial Sequence: Synthetic oligonucleotide
  Sense strand starting at position 575 of SEQ ID NO: 915309
guuaacaugcuuugaaaua

SEQ ID NO: 1070267 - RNA, 19 nt, Artificial Sequence
  Description of Artificial Sequence: Synthetic oligonucleotide
  Antisense strand to SEQ ID NO: 1070266
uauuucaaagcauguuaac

SEQ ID NO: 1070268 - RNA, 19 nt, Artificial Sequence
  Description of Artificial Sequence: Synthetic oligonucleotide
  Sense strand starting at position 667 of SEQ ID NO: 915309
auaccuguucucuggaaau

SEQ ID NO: 1070269 - RNA, 19 nt, Artificial Sequence
  Description of Artificial Sequence: Synthetic oligonucleotide
  Antisense strand to SEQ ID NO: 1070268
auuuccagagaacagguau

SEQ ID NO: 1070270 - RNA, 19 nt, Artificial Sequence
  Description of Artificial Sequence: Synthetic oligonucleotide
  Sense strand starting at position 2253 of SEQ ID NO: 915309
gcagguucucuuugagggu

SEQ ID NO: 1070271 - RNA, 19 nt, Artificial Sequence
  Description of Artificial Sequence: Synthetic oligonucleotide
  Antisense strand to SEQ ID NO: 1070270
acccucaaagagaaccugc

SEQ ID NO: 1070272 - RNA, 19 nt, Artificial Sequence
  Description of Artificial Sequence: Synthetic oligonucleotide
  Sense strand starting at position 2257 of SEQ ID NO: 915309
guucucuuugaggguaagu

SEQ ID NO: 1070273 - RNA, 19 nt, Artificial Sequence
  Description of Artificial Sequence: Synthetic oligonucleotide
  Antisense strand to SEQ ID NO: 1070272
acuuacccucaaagagaac

SEQ ID NO: 1070274 - RNA, 19 nt, Artificial Sequence
  Description of Artificial Sequence: Synthetic oligonucleotide
  Sense strand starting at position 2259 of SEQ ID NO: 915309
ucucuuugaggguaaguca

SEQ ID NO: 1070275 - RNA, 19 nt, Artificial Sequence
  Description of Artificial Sequence: Synthetic oligonucleotide
  Antisense strand to SEQ ID NO: 1070274
ugacuuacccucaaagaga

SEQ ID NO: 1070276 - RNA, 19 nt, Artificial Sequence
  Description of Artificial Sequence: Synthetic oligonucleotide
  Sense strand starting at position 2288 of SEQ ID NO: 915309
gccagaaucccacagguca

SEQ ID NO: 1070277 - RNA, 19 nt, Artificial Sequence
  Description of Artificial Sequence: Synthetic oligonucleotide
  Antisense strand to SEQ ID NO: 1070276
ugaccugugggauucuggc

SEQ ID NO: 1070278 - RNA, 19 nt, Artificial Sequence
  Description of Artificial Sequence: Synthetic oligonucleotide
  Sense strand starting at position 2432 of SEQ ID NO: 915309
ucagacugugaccaguuua

SEQ ID NO: 1070279 - RNA, 19 nt, Artificial Sequence
  Description of Artificial Sequence: Synthetic oligonucleotide
  Antisense strand to SEQ ID NO: 1070278
uaaacuggucacagucuga

SEQ ID NO: 1070280 - RNA, 19 nt, Artificial Sequence
  Description of Artificial Sequence: Synthetic oligonucleotide
  Sense strand starting at position 2619 of SEQ ID NO: 915309
cguucuugaguguugcuca

SEQ ID NO: 1070281 - RNA, 19 nt, Artificial Sequence
  Description of Artificial Sequence: Synthetic oligonucleotide
  Antisense strand to SEQ ID NO: 1070280
ugagcaacacucaagaacg

SEQ ID NO: 1070282 - RNA, 19 nt, Artificial Sequence
  Description of Artificial Sequence: Synthetic oligonucleotide
  Sense strand starting at position 2622 of SEQ ID NO: 915309
ucuugaguguugcucaaga

SEQ ID NO: 1070283 - RNA, 19 nt, Artificial Sequence
  Description of Artificial Sequence: Synthetic oligonucleotide
  Antisense strand to SEQ ID NO: 1070282
ucuugagcaacacucaaga

SEQ ID NO: 1070284 - RNA, 19 nt, Artificial Sequence
  Description of Artificial Sequence: Synthetic oligonucleotide
  Sense strand starting at position 2624 of SEQ ID NO: 915309
uugaguguugcucaagaac

SEQ ID NO: 1070285 - RNA, 19 nt, Artificial Sequence
  Description of Artificial Sequence: Synthetic oligonucleotide
  Antisense strand to SEQ ID NO: 1070284
guucuugagcaacacucaa

SEQ ID NO: 1070286 - RNA, 19 nt, Artificial Sequence
  Description of Artificial Sequence: Synthetic oligonucleotide
  Sense strand starting at position 2627 of SEQ ID NO: 915309
aguguugcucaagaaccau

SEQ ID NO: 1070287 - RNA, 19 nt, Artificial Sequence
  Description of Artificial Sequence: Synthetic oligonucleotide
  Antisense strand to SEQ ID NO: 1070286
augguucuugagcaacacu

SEQ ID NO: 1070288 - RNA, 19 nt, Artificial Sequence
  Description of Artificial Sequence: Synthetic oligonucleotide
  Sense strand starting at position 2681 of SEQ ID NO: 915309
uuuguacccuugucauaca

SEQ ID NO: 1070289 - RNA, 19 nt, Artificial Sequence
  Description of Artificial Sequence: Synthetic oligonucleotide
  Antisense strand to SEQ ID NO: 1070288
uguaugacaaggguacaaa

SEQ ID NO: 1070290 - RNA, 19 nt, Artificial Sequence
  Description of Artificial Sequence: Synthetic oligonucleotide
  Sense strand starting at position 2750 of SEQ ID NO: 915309
gucgcaauuggucuuugca

SEQ ID NO: 1070291 - RNA, 19 nt, Artificial Sequence
  Description of Artificial Sequence: Synthetic oligonucleotide
  Antisense strand to SEQ ID NO: 1070290
ugcaaagaccaauugcgac

SEQ ID NO: 1070292 - RNA, 19 nt, Artificial Sequence
  Description of Artificial Sequence: Synthetic oligonucleotide
  Sense strand starting at position 2753 of SEQ ID NO: 915309
gcaauuggucuuugcaaau

SEQ ID NO: 1070293 - RNA, 19 nt, Artificial Sequence
  Description of Artificial Sequence: Synthetic oligonucleotide
  Antisense strand to SEQ ID NO: 1070292
auuugcaaagaccaauugc

SEQ ID NO: 1070294 - RNA, 19 nt, Artificial Sequence
  Description of Artificial Sequence: Synthetic oligonucleotide
  Sense strand starting at position 2886 of SEQ ID NO: 915309
agaugcuaucugugaagua

SEQ ID NO: 1070295 - RNA, 19 nt, Artificial Sequence
  Description of Artificial Sequence: Synthetic oligonucleotide
  Antisense strand to SEQ ID NO: 1070294
uacuucacagauagcaucu

SEQ ID NO: 1070296 - RNA, 19 nt, Artificial Sequence
  Description of Artificial Sequence: Synthetic oligonucleotide
  Sense strand starting at position 2895 of SEQ ID NO: 915309
cugugaaguacuggugaaa

SEQ ID NO: 1070297 - RNA, 19 nt, Artificial Sequence
  Description of Artificial Sequence: Synthetic oligonucleotide
  Antisense strand to SEQ ID NO: 1070296
uuucaccaguacuucacag

SEQ ID NO: 1070298 - RNA, 19 nt, Artificial Sequence
  Description of Artificial Sequence: Synthetic oligonucleotide
  Sense strand starting at position 2972 of SEQ ID NO: 915309
aagggacugcucuggaauc

SEQ ID NO: 1070299 - RNA, 19 nt, Artificial Sequence
  Description of Artificial Sequence: Synthetic oligonucleotide
  Antisense strand to SEQ ID NO: 1070298
gauuccagagcagucccuu

SEQ ID NO: 1070300 - RNA, 19 nt, Artificial Sequence
  Description of Artificial Sequence: Synthetic oligonucleotide
  Sense strand starting at position 2974 of SEQ ID NO: 915309
gggacugcucuggaaucua

SEQ ID NO: 1070301 - RNA, 19 nt, Artificial Sequence
  Description of Artificial Sequence: Synthetic oligonucleotide
  Antisense strand to SEQ ID NO: 1070300
uagauuccagagcaguccc

SEQ ID NO: 1070302 - RNA, 19 nt, Artificial Sequence
  Description of Artificial Sequence: Synthetic oligonucleotide
  Sense strand starting at position 3006 of SEQ ID NO: 915309
gccuuagagagugaacugu

SEQ ID NO: 1070303 - RNA, 19 nt, Artificial Sequence
  Description of Artificial Sequence: Synthetic oligonucleotide
  Antisense strand to SEQ ID NO: 1070302
acaguucacucucuaaggc

SEQ ID NO: 1070304 - RNA, 19 nt, Artificial Sequence
  Description of Artificial Sequence: Synthetic oligonucleotide
  Sense strand starting at position 3010 of SEQ ID NO: 915309
uagagagugaacuguguuu

SEQ ID NO: 1070305 - RNA, 19 nt, Artificial Sequence
  Description of Artificial Sequence: Synthetic oligonucleotide
  Antisense strand to SEQ ID NO: 1070304
aaacacaguucacucucua

SEQ ID NO: 1070306 - RNA, 19 nt, Artificial Sequence
  Description of Artificial Sequence: Synthetic oligonucleotide
  Sense strand starting at position 3110 of SEQ ID NO: 915309
gaaaccuuacuguguggua

SEQ ID NO: 1070307 - RNA, 19 nt, Artificial Sequence
  Description of Artificial Sequence: Synthetic oligonucleotide
  Antisense strand to SEQ ID NO: 1070306
uaccacacaguaagguuuc

SEQ ID NO: 1070308 - RNA, 19 nt, Artificial Sequence
  Description of Artificial Sequence: Synthetic oligonucleotide
  Sense strand starting at position 3111 of SEQ ID NO: 915309
aaaccuuacugugugguaa

SEQ ID NO: 1070309 - RNA, 19 nt, Artificial Sequence
  Description of Artificial Sequence: Synthetic oligonucleotide
  Antisense strand to SEQ ID NO: 1070308
uuaccacacaguaagguuu

SEQ ID NO: 1070310 - RNA, 19 nt, Artificial Sequence
  Description of Artificial Sequence: Synthetic oligonucleotide
  Sense strand starting at position 3112 of SEQ ID NO: 915309
aaccuuacugugugguaaa

SEQ ID NO: 1070311 - RNA, 19 nt, Artificial Sequence
  Description of Artificial Sequence: Synthetic oligonucleotide
  Antisense strand to SEQ ID NO: 1070310
uuuaccacacaguaagguu

SEQ ID NO: 1070312 - RNA, 19 nt, Artificial Sequence
  Description of Artificial Sequence: Synthetic oligonucleotide
  Sense strand starting at position 3198 of SEQ ID NO: 915309
uucguauauggucauaguu

SEQ ID NO: 1070313 - RNA, 19 nt, Artificial Sequence
  Description of Artificial Sequence: Synthetic oligonucleotide
  Antisense strand to SEQ ID NO: 1070312
aacuaugaccauauacgaa

SEQ ID NO: 1070314 - RNA, 19 nt, Artificial Sequence
  Description of Artificial Sequence: Synthetic oligonucleotide
  Sense strand starting at position 3237 of SEQ ID NO: 915309
cuaagaaauuagcacaaga

SEQ ID NO: 1070315 - RNA, 19 nt, Artificial Sequence
  Description of Artificial Sequence: Synthetic oligonucleotide
  Antisense strand to SEQ ID NO: 1070314
ucuugugcuaauuucuuag

SEQ ID NO: 1070316 - RNA, 19 nt, Artificial Sequence
  Description of Artificial Sequence: Synthetic oligonucleotide
  Sense strand starting at position 3420 of SEQ ID NO: 915309
uuauaugaugugcauagaa

SEQ ID NO: 1070317 - RNA, 19 nt, Artificial Sequence
  Description of Artificial Sequence: Synthetic oligonucleotide
  Antisense strand to SEQ ID NO: 1070316
uucuaugcacaucauauaa

SEQ ID NO: 1070318 - RNA, 19 nt, Artificial Sequence
  Description of Artificial Sequence: Synthetic oligonucleotide
  Sense strand starting at position 3422 of SEQ ID NO: 915309
auaugaugugcauagaacu

SEQ ID NO: 1070319 - RNA, 19 nt, Artificial Sequence
  Description of Artificial Sequence: Synthetic oligonucleotide
  Antisense strand to SEQ ID NO: 1070318
aguucuaugcacaucauau

SEQ ID NO: 1070320 - RNA, 19 nt, Artificial Sequence
  Description of Artificial Sequence: Synthetic oligonucleotide
  Sense strand starting at position 3515 of SEQ ID NO: 915309
gcaccagcauuauugaaau

SEQ ID NO: 1070321 - RNA, 19 nt, Artificial Sequence
  Description of Artificial Sequence: Synthetic oligonucleotide
  Antisense strand to SEQ ID NO: 1070320
auuucaauaaugcuggugc

SEQ ID NO: 1070322 - RNA, 19 nt, Artificial Sequence
  Description of Artificial Sequence: Synthetic oligonucleotide
  Sense strand starting at position 3528 of SEQ ID NO: 915309
ugaaauucccguuauaaau

SEQ ID NO: 1070323 - RNA, 19 nt, Artificial Sequence
  Description of Artificial Sequence: Synthetic oligonucleotide
  Antisense strand to SEQ ID NO: 1070322
auuuauaacgggaauuuca

SEQ ID NO: 1070324 - RNA, 19 nt, Artificial Sequence
  Description of Artificial Sequence: Synthetic oligonucleotide
  Sense strand starting at position 3633 of SEQ ID NO: 915309
ggcauuuaaucugaaguua

SEQ ID NO: 1070325 - RNA, 19 nt, Artificial Sequence
  Description of Artificial Sequence: Synthetic oligonucleotide
  Antisense strand to SEQ ID NO: 1070324
uaacuucagauuaaaugcc

SEQ ID NO: 1070326 - RNA, 19 nt, Artificial Sequence
  Description of Artificial Sequence: Synthetic oligonucleotide
  Sense strand starting at position 3661 of SEQ ID NO: 915309
guaggauuggcacgugauc

SEQ ID NO: 1070327 - RNA, 19 nt, Artificial Sequence
  Description of Artificial Sequence: Synthetic oligonucleotide
  Antisense strand to SEQ ID NO: 1070326
gaucacgugccaauccuac

SEQ ID NO: 1070328 - RNA, 19 nt, Artificial Sequence
  Description of Artificial Sequence: Synthetic oligonucleotide
  Sense strand starting at position 3663 of SEQ ID NO: 915309
aggauuggcacgugaucau

SEQ ID NO: 1070329 - RNA, 19 nt, Artificial Sequence
  Description of Artificial Sequence: Synthetic oligonucleotide
  Antisense strand to SEQ ID NO: 1070328
augaucacgugccaauccu

SEQ ID NO: 1070330 - RNA, 19 nt, Artificial Sequence
  Description of Artificial Sequence: Synthetic oligonucleotide
  Sense strand starting at position 3672 of SEQ ID NO: 915309
acgugaucauggaaacggu

SEQ ID NO: 1070331 - RNA, 19 nt, Artificial Sequence
  Description of Artificial Sequence: Synthetic oligonucleotide
  Antisense strand to SEQ ID NO: 1070330
accguuuccaugaucacgu

SEQ ID NO: 1070332 - RNA, 19 nt, Artificial Sequence
  Description of Artificial Sequence: Synthetic oligonucleotide
  Sense strand starting at position 3900 of SEQ ID NO: 915309
ucagguugccaauaauaua

SEQ ID NO: 1070333 - RNA, 19 nt, Artificial Sequence
  Description of Artificial Sequence: Synthetic oligonucleotide
  Antisense strand to SEQ ID NO: 1070332
uauauuauuggcaaccuga

SEQ ID NO: 1070334 - RNA, 19 nt, Artificial Sequence
  Description of Artificial Sequence: Synthetic oligonucleotide
  Sense strand starting at position 3972 of SEQ ID NO: 915309
accaaagucucaguguuga

SEQ ID NO: 1070335 - RNA, 19 nt, Artificial Sequence
  Description of Artificial Sequence: Synthetic oligonucleotide
  Antisense strand to SEQ ID NO: 1070334
ucaacacugagacuuuggu

SEQ ID NO: 1070336 - RNA, 19 nt, Artificial Sequence
  Description of Artificial Sequence: Synthetic oligonucleotide
  Sense strand starting at position 3977 of SEQ ID NO: 915309
agucucaguguugacaagu

SEQ ID NO: 1070337 - RNA, 19 nt, Artificial Sequence
  Description of Artificial Sequence: Synthetic oligonucleotide
  Antisense strand to SEQ ID NO: 1070336
acuugucaacacugagacu

SEQ ID NO: 1070338 - RNA, 19 nt, Artificial Sequence
  Description of Artificial Sequence: Synthetic oligonucleotide
  Sense strand starting at position 76 of SEQ ID NO: 915310
aagaucugucccuagugga

SEQ ID NO: 1070339 - RNA, 19 nt, Artificial Sequence
  Description of Artificial Sequence: Synthetic oligonucleotide
  Antisense strand to SEQ ID NO: 1070338
uccacuagggacagaucuu

SEQ ID NO: 1070340 - RNA, 19 nt, Artificial Sequence
  Description of Artificial Sequence: Synthetic oligonucleotide
  Sense strand starting at position 137 of SEQ ID NO: 915310
gggccuaauccuuaagugu

SEQ ID NO: 1070341 - RNA, 19 nt, Artificial Sequence
  Description of Artificial Sequence: Synthetic oligonucleotide
  Antisense strand to SEQ ID NO: 1070340
acacuuaaggauuaggccc

SEQ ID NO: 1070342 - RNA, 19 nt, Artificial Sequence
  Description of Artificial Sequence: Synthetic oligonucleotide
  Sense strand starting at position 308 of SEQ ID NO: 915310
ugacgaguacacugauauc

SEQ ID NO: 1070343 - RNA, 19 nt, Artificial Sequence
  Description of Artificial Sequence: Synthetic oligonucleotide
  Antisense strand to SEQ ID NO: 1070342
gauaucaguguacucguca

SEQ ID NO: 1070344 - RNA, 19 nt, Artificial Sequence
  Description of Artificial Sequence: Synthetic oligonucleotide
  Sense strand starting at position 314 of SEQ ID NO: 915310
guacacugauauccauagu

SEQ ID NO: 1070345 - RNA, 19 nt, Artificial Sequence
  Description of Artificial Sequence: Synthetic oligonucleotide
  Antisense strand to SEQ ID NO: 1070344
acuauggauaucaguguac

SEQ ID NO: 1070346 - RNA, 19 nt, Artificial Sequence
  Description of Artificial Sequence: Synthetic oligonucleotide
  Sense strand starting at position 331 of SEQ ID NO: 915310
gucuacucaucaucagaua

SEQ ID NO: 1070347 - RNA, 19 nt, Artificial Sequence
  Description of Artificial Sequence: Synthetic oligonucleotide
  Antisense strand to SEQ ID NO: 1070346
uaucugaugaugaguagac

SEQ ID NO: 1070348 - RNA, 19 nt, Artificial Sequence
  Description of Artificial Sequence: Synthetic oligonucleotide
  Sense strand starting at position 422 of SEQ ID NO: 915310
gaaagaaacugauaagaug

SEQ ID NO: 1070349 - RNA, 19 nt, Artificial Sequence
  Description of Artificial Sequence: Synthetic oligonucleotide
  Antisense strand to SEQ ID NO: 1070348
caucuuaucaguuucuuuc

SEQ ID NO: 1070350 - RNA, 19 nt, Artificial Sequence
  Description of Artificial Sequence: Synthetic oligonucleotide
  Sense strand starting at position 437 of SEQ ID NO: 915310
gauggcuaauaggaauuua

SEQ ID NO: 1070351 - RNA, 19 nt, Artificial Sequence
  Description of Artificial Sequence: Synthetic oligonucleotide
  Antisense strand to SEQ ID NO: 1070350
uaaauuccuauuagccauc

SEQ ID NO: 1070352 - RNA, 19 nt, Artificial Sequence
  Description of Artificial Sequence: Synthetic oligonucleotide
  Sense strand starting at position 485 of SEQ ID NO: 915310
cugugaagccaucaacaau

SEQ ID NO: 1070353 - RNA, 19 nt, Artificial Sequence
  Description of Artificial Sequence: Synthetic oligonucleotide
  Antisense strand to SEQ ID NO: 1070352
auuguugauggcuucacag

SEQ ID NO: 1070354 - RNA, 19 nt, Artificial Sequence
  Description of Artificial Sequence: Synthetic oligonucleotide
  Sense strand starting at position 496 of SEQ ID NO: 915310
ucaacaauugcuugauggu

SEQ ID NO: 1070355 - RNA, 19 nt, Artificial Sequence
  Description of Artificial Sequence: Synthetic oligonucleotide
  Antisense strand to SEQ ID NO: 1070354
accaucaagcaauuguuga

SEQ ID NO: 1070356 - RNA, 19 nt, Artificial Sequence
  Description of Artificial Sequence: Synthetic oligonucleotide
  Sense strand starting at position 509 of SEQ ID NO: 915310
gauggucuccuugggagau

SEQ ID NO: 1070357 - RNA, 19 nt, Artificial Sequence
  Description of Artificial Sequence: Synthetic oligonucleotide
  Antisense strand to SEQ ID NO: 1070356
aucucccaaggagaccauc

SEQ ID NO: 1070358 - RNA, 19 nt, Artificial Sequence
  Description of Artificial Sequence: Synthetic oligonucleotide
  Sense strand starting at position 515 of SEQ ID NO: 915310
cuccuugggagauguguua

SEQ ID NO: 1070359 - RNA, 19 nt, Artificial Sequence
  Description of Artificial Sequence: Synthetic oligonucleotide
  Antisense strand to SEQ ID NO: 1070358
uaacacaucucccaaggag

SEQ ID NO: 1070360 - RNA, 19 nt, Artificial Sequence
  Description of Artificial Sequence: Synthetic oligonucleotide
  Sense strand starting at position 637 of SEQ ID NO: 915310
gggaacaucagcuacaguu

SEQ ID NO: 1070361 - RNA, 19 nt, Artificial Sequence
  Description of Artificial Sequence: Synthetic oligonucleotide
  Antisense strand to SEQ ID NO: 1070360
aacuguagcugauguuccc

SEQ ID NO: 1070362 - RNA, 19 nt, Artificial Sequence
  Description of Artificial Sequence: Synthetic oligonucleotide
  Sense strand starting at position 714 of SEQ ID NO: 915310
ccagguguccucuagagua

SEQ ID NO: 1070363 - RNA, 19 nt, Artificial Sequence
  Description of Artificial Sequence: Synthetic oligonucleotide
  Antisense strand to SEQ ID NO: 1070362
uacucuagaggacaccugg

SEQ ID NO: 1070364 - RNA, 19 nt, Artificial Sequence
  Description of Artificial Sequence: Synthetic oligonucleotide
  Sense strand starting at position 716 of SEQ ID NO: 915310
agguguccucuagaguaaa

SEQ ID NO: 1070365 - RNA, 19 nt, Artificial Sequence
  Description of Artificial Sequence: Synthetic oligonucleotide
  Antisense strand to SEQ ID NO: 1070364
uuuacucuagaggacaccu

SEQ ID NO: 1070366 - RNA, 19 nt, Artificial Sequence
  Description of Artificial Sequence: Synthetic oligonucleotide
  Sense strand starting at position 851 of SEQ ID NO: 915310
cccugugguacugaugaaa

SEQ ID NO: 1070367 - RNA, 19 nt, Artificial Sequence
  Description of Artificial Sequence: Synthetic oligonucleotide
  Antisense strand to SEQ ID NO: 1070366
uuucaucaguaccacaggg

SEQ ID NO: 1070368 - RNA, 19 nt, Artificial Sequence
  Description of Artificial Sequence: Synthetic oligonucleotide
  Sense strand starting at position 998 of SEQ ID NO: 915310
gucacuguuccagauauaa

SEQ ID NO: 1070369 - RNA, 19 nt, Artificial Sequence
  Description of Artificial Sequence: Synthetic oligonucleotide
  Antisense strand to SEQ ID NO: 1070368
uuauaucuggaacagugac

SEQ ID NO: 1070370 - RNA, 19 nt, Artificial Sequence
  Description of Artificial Sequence: Synthetic oligonucleotide
  Sense strand starting at position 1090 of SEQ ID NO: 915310
acgucuaucacccagggaa

SEQ ID NO: 1070371 - RNA, 19 nt, Artificial Sequence
  Description of Artificial Sequence: Synthetic oligonucleotide
  Antisense strand to SEQ ID NO: 1070370
uucccugggugauagacgu

SEQ ID NO: 1070372 - RNA, 19 nt, Artificial Sequence
  Description of Artificial Sequence: Synthetic oligonucleotide
  Sense strand starting at position 1092 of SEQ ID NO: 915310
gucuaucacccagggaaag

SEQ ID NO: 1070373 - RNA, 19 nt, Artificial Sequence
  Description of Artificial Sequence: Synthetic oligonucleotide
  Antisense strand to SEQ ID NO: 1070372
cuuucccugggugauagac

SEQ ID NO: 1070374 - RNA, 19 nt, Artificial Sequence
  Description of Artificial Sequence: Synthetic oligonucleotide
  Sense strand starting at position 1149 of SEQ ID NO: 915310
aaagguugagucugaccaa

SEQ ID NO: 1070375 - RNA, 19 nt, Artificial Sequence
  Description of Artificial Sequence: Synthetic oligonucleotide
  Antisense strand to SEQ ID NO: 1070374
uuggucagacucaaccuuu

SEQ ID NO: 1070376 - RNA, 19 nt, Artificial Sequence
  Description of Artificial Sequence: Synthetic oligonucleotide
  Sense strand starting at position 1584 of SEQ ID NO: 915310
aaaguuugcgcagauuaga

SEQ ID NO: 1070377 - RNA, 19 nt, Artificial Sequence
  Description of Artificial Sequence: Synthetic oligonucleotide
  Antisense strand to SEQ ID NO: 1070376
ucuaaucugcgcaaacuuu

SEQ ID NO: 1070378 - RNA, 19 nt, Artificial Sequence
  Description of Artificial Sequence: Synthetic oligonucleotide
  Sense strand starting at position 1827 of SEQ ID NO: 915310
uggugcugagcugauaaau

SEQ ID NO: 1070379 - RNA, 19 nt, Artificial Sequence
  Description of Artificial Sequence: Synthetic oligonucleotide
  Antisense strand to SEQ ID NO: 1070378
auuuaucagcucagcacca

SEQ ID NO: 1070380 - RNA, 19 nt, Artificial Sequence
  Description of Artificial Sequence: Synthetic oligonucleotide
  Sense strand starting at position 2199 of SEQ ID NO: 915310
guagaaucccagcacuucu

SEQ ID NO: 1070381 - RNA, 19 nt, Artificial Sequence
  Description of Artificial Sequence: Synthetic oligonucleotide
  Antisense strand to SEQ ID NO: 1070380
agaagugcugggauucuac

SEQ ID NO: 1070382 - RNA, 19 nt, Artificial Sequence
  Description of Artificial Sequence: Synthetic oligonucleotide
  Sense strand starting at position 2327 of SEQ ID NO: 915310
augagacucuacuuaguua

SEQ ID NO: 1070383 - RNA, 19 nt, Artificial Sequence
  Description of Artificial Sequence: Synthetic oligonucleotide
  Antisense strand to SEQ ID NO: 1070382
uaacuaaguagagucucau

SEQ ID NO: 1070384 - RNA, 19 nt, Artificial Sequence
  Description of Artificial Sequence: Synthetic oligonucleotide
  Sense strand starting at position 2424 of SEQ ID NO: 915310
ugaccuuugggugagucaa

SEQ ID NO: 1070385 - RNA, 19 nt, Artificial Sequence
  Description of Artificial Sequence: Synthetic oligonucleotide
  Antisense strand to SEQ ID NO: 1070384
uugacucacccaaagguca

SEQ ID NO: 1070386 - RNA, 19 nt, Artificial Sequence
  Description of Artificial Sequence: Synthetic oligonucleotide
  Sense strand starting at position 2488 of SEQ ID NO: 915310
agagaaagcuacucuugag

SEQ ID NO: 1070387 - RNA, 19 nt, Artificial Sequence
  Description of Artificial Sequence: Synthetic oligonucleotide
  Antisense strand to SEQ ID NO: 1070386
cucaagaguagcuuucucu

SEQ ID NO: 1070388 - RNA, 19 nt, Artificial Sequence
  Description of Artificial Sequence: Synthetic oligonucleotide
  Sense strand starting at position 2577 of SEQ ID NO: 915310
cgcgaacuccaggaugagu

SEQ ID NO: 1070389 - RNA, 19 nt, Artificial Sequence
  Description of Artificial Sequence: Synthetic oligonucleotide
  Antisense strand to SEQ ID NO: 1070388
acucauccuggaguucgcg

SEQ ID NO: 1070390 - RNA, 19 nt, Artificial Sequence
  Description of Artificial Sequence: Synthetic oligonucleotide
  Sense strand starting at position 2895 of SEQ ID NO: 915310
uugggauucucccuacucu

SEQ ID NO: 1070391 - RNA, 19 nt, Artificial Sequence
  Description of Artificial Sequence: Synthetic oligonucleotide
  Antisense strand to SEQ ID NO: 1070390
agaguagggagaaucccaa

SEQ ID NO: 1070392 - RNA, 19 nt, Artificial Sequence
  Description of Artificial Sequence: Synthetic oligonucleotide
  Sense strand starting at position 3049 of SEQ ID NO: 915310
aucaucugaucuuucgaaa

SEQ ID NO: 1070393 - RNA, 19 nt, Artificial Sequence
  Description of Artificial Sequence: Synthetic oligonucleotide
  Antisense strand to SEQ ID NO: 1070392
uuucgaaagaucagaugau

SEQ ID NO: 1070394 - RNA, 19 nt, Artificial Sequence
  Description of Artificial Sequence: Synthetic oligonucleotide
  Sense strand starting at position 3098 of SEQ ID NO: 915310
uguuaauuuguaugguugu

SEQ ID NO: 1070395 - RNA, 19 nt, Artificial Sequence
  Description of Artificial Sequence: Synthetic oligonucleotide
  Antisense strand to SEQ ID NO: 1070394
acaaccauacaaauuaaca

SEQ ID NO: 1070396 - RNA, 19 nt, Artificial Sequence
  Description of Artificial Sequence: Synthetic oligonucleotide
  Sense strand starting at position 3108 of SEQ ID NO: 915310
uaugguuguggugagaaug

SEQ ID NO: 1070397 - RNA, 19 nt, Artificial Sequence
  Description of Artificial Sequence: Synthetic oligonucleotide
  Antisense strand to SEQ ID NO: 1070396
cauucucaccacaaccaua

SEQ ID NO: 1070398 - RNA, 19 nt, Artificial Sequence
  Description of Artificial Sequence: Synthetic oligonucleotide
  Sense strand starting at position 3259 of SEQ ID NO: 915310
gaaagucuggcauauggua

SEQ ID NO: 1070399 - RNA, 19 nt, Artificial Sequence
  Description of Artificial Sequence: Synthetic oligonucleotide
  Antisense strand to SEQ ID NO: 1070398
uaccauaugccagacuuuc

SEQ ID NO: 1070400 - RNA, 19 nt, Artificial Sequence
  Description of Artificial Sequence: Synthetic oligonucleotide
  Sense strand starting at position 3267 of SEQ ID NO: 915310
ggcauaugguaagugauau

SEQ ID NO: 1070401 - RNA, 19 nt, Artificial Sequence
  Description of Artificial Sequence: Synthetic oligonucleotide
  Antisense strand to SEQ ID NO: 1070400
auaucacuuaccauaugcc

SEQ ID NO: 1070402 - RNA, 19 nt, Artificial Sequence
  Description of Artificial Sequence: Synthetic oligonucleotide
  Sense strand starting at position 3295 of SEQ ID NO: 915310
gggaacuuuaaguggcuga

SEQ ID NO: 1070403 - RNA, 19 nt, Artificial Sequence
  Description of Artificial Sequence: Synthetic oligonucleotide
  Antisense strand to SEQ ID NO: 1070402
ucagccacuuaaaguuccc

SEQ ID NO: 1070404 - RNA, 19 nt, Artificial Sequence
  Description of Artificial Sequence: Synthetic oligonucleotide
  Sense strand starting at position 3298 of SEQ ID NO: 915310
aacuuuaaguggcugagaa

SEQ ID NO: 1070405 - RNA, 19 nt, Artificial Sequence
  Description of Artificial Sequence: Synthetic oligonucleotide
  Antisense strand to SEQ ID NO: 1070404
uucucagccacuuaaaguu

SEQ ID NO: 1070406 - RNA, 19 nt, Artificial Sequence
  Description of Artificial Sequence: Synthetic oligonucleotide
  Sense strand starting at position 3299 of SEQ ID NO: 915310
acuuuaaguggcugagaag

SEQ ID NO: 1070407 - RNA, 19 nt, Artificial Sequence
  Description of Artificial Sequence: Synthetic oligonucleotide
  Antisense strand to SEQ ID NO: 1070406
cuucucagccacuuaaagu

SEQ ID NO: 1070408 - RNA, 19 nt, Artificial Sequence
  Description of Artificial Sequence: Synthetic oligonucleotide
  Sense strand starting at position 3401 of SEQ ID NO: 915310
gucaaagaucaacauguuu

SEQ ID NO: 1070409 - RNA, 19 nt, Artificial Sequence
  Description of Artificial Sequence: Synthetic oligonucleotide
  Antisense strand to SEQ ID NO: 1070408
aaacauguugaucuuugac

SEQ ID NO: 1070410 - RNA, 19 nt, Artificial Sequence
  Description of Artificial Sequence: Synthetic oligonucleotide
  Sense strand starting at position 3465 of SEQ ID NO: 915310
agguuugugggccaugaaa

SEQ ID NO: 1070411 - RNA, 19 nt, Artificial Sequence
  Description of Artificial Sequence: Synthetic oligonucleotide
  Antisense strand to SEQ ID NO: 1070410
uuucauggcccacaaaccu

SEQ ID NO: 1070412 - RNA, 19 nt, Artificial Sequence
  Description of Artificial Sequence: Synthetic oligonucleotide
  Sense strand starting at position 3841 of SEQ ID NO: 915310
ucucuuugaguuuacauua

SEQ ID NO: 1070413 - RNA, 19 nt, Artificial Sequence
  Description of Artificial Sequence: Synthetic oligonucleotide
  Antisense strand to SEQ ID NO: 1070412
uaauguaaacucaaagaga

SEQ ID NO: 1070414 - RNA, 19 nt, Artificial Sequence
  Description of Artificial Sequence: Synthetic oligonucleotide
  Sense strand starting at position 3973 of SEQ ID NO: 915310
uuuagaagugguuggaaau

SEQ ID NO: 1070415 - RNA, 19 nt, Artificial Sequence
  Description of Artificial Sequence: Synthetic oligonucleotide
  Antisense strand to SEQ ID NO: 1070414
auuuccaaccacuucuaaa

SEQ ID NO: 1070416 - RNA, 19 nt, Artificial Sequence
  Description of Artificial Sequence: Synthetic oligonucleotide
  Sense strand starting at position 3974 of SEQ ID NO: 915310
uuagaagugguuggaaaug

SEQ ID NO: 1070417 - RNA, 19 nt, Artificial Sequence
  Description of Artificial Sequence: Synthetic oligonucleotide
  Antisense strand to SEQ ID NO: 1070416
cauuuccaaccacuucuaa

SEQ ID NO: 1070418 - RNA, 19 nt, Artificial Sequence
  Description of Artificial Sequence: Synthetic oligonucleotide
  Sense strand starting at position 9 of SEQ ID NO: 915311
uacagagagucuguaacau

SEQ ID NO: 1070419 - RNA, 19 nt, Artificial Sequence
  Description of Artificial Sequence: Synthetic oligonucleotide
  Antisense strand to SEQ ID NO: 1070418
auguuacagacucucugua

SEQ ID NO: 1070420 - RNA, 19 nt, Artificial Sequence
  Description of Artificial Sequence: Synthetic oligonucleotide
  Sense strand starting at position 70 of SEQ ID NO: 915311
agagcacucuuccuagauu

SEQ ID NO: 1070421 - RNA, 19 nt, Artificial Sequence
  Description of Artificial Sequence: Synthetic oligonucleotide
  Antisense strand to SEQ ID NO: 1070420
aaucuaggaagagugcucu

SEQ ID NO: 1070422 - RNA, 19 nt, Artificial Sequence
  Description of Artificial Sequence: Synthetic oligonucleotide
  Sense strand starting at position 315 of SEQ ID NO: 915311
gcaccucugcuccaaggaa

SEQ ID NO: 1070423 - RNA, 19 nt, Artificial Sequence
  Description of Artificial Sequence: Synthetic oligonucleotide
  Antisense strand to SEQ ID NO: 1070422
uuccuuggagcagaggugc

SEQ ID NO: 1070424 - RNA, 19 nt, Artificial Sequence
  Description of Artificial Sequence: Synthetic oligonucleotide
  Sense strand starting at position 322 of SEQ ID NO: 915311
ugcuccaaggaauauguua

SEQ ID NO: 1070425 - RNA, 19 nt, Artificial Sequence
  Description of Artificial Sequence: Synthetic oligonucleotide
  Antisense strand to SEQ ID NO: 1070424
uaacauauuccuuggagca

SEQ ID NO: 1070426 - RNA, 19 nt, Artificial Sequence
  Description of Artificial Sequence: Synthetic oligonucleotide
  Sense strand starting at position 414 of SEQ ID NO: 915311
accauaugacuuuguguga

SEQ ID NO: 1070427 - RNA, 19 nt, Artificial Sequence
  Description of Artificial Sequence: Synthetic oligonucleotide
  Antisense strand to SEQ ID NO: 1070426
ucacacaaagucauauggu

SEQ ID NO: 1070428 - RNA, 19 nt, Artificial Sequence
  Description of Artificial Sequence: Synthetic oligonucleotide
  Sense strand starting at position 415 of SEQ ID NO: 915311
ccauaugacuuugugugau

SEQ ID NO: 1070429 - RNA, 19 nt, Artificial Sequence
  Description of Artificial Sequence: Synthetic oligonucleotide
  Antisense strand to SEQ ID NO: 1070428
aucacacaaagucauaugg

SEQ ID NO: 1070430 - RNA, 19 nt, Artificial Sequence
  Description of Artificial Sequence: Synthetic oligonucleotide
  Sense strand starting at position 468 of SEQ ID NO: 915311
gaaggcaacgucuacuaga

SEQ ID NO: 1070431 - RNA, 19 nt, Artificial Sequence
  Description of Artificial Sequence: Synthetic oligonucleotide
  Antisense strand to SEQ ID NO: 1070430
ucuaguagacguugccuuc

SEQ ID NO: 1070432 - RNA, 19 nt, Artificial Sequence
  Description of Artificial Sequence: Synthetic oligonucleotide
  Sense strand starting at position 523 of SEQ ID NO: 915311
gaacgaugauuggcaggua

SEQ ID NO: 1070433 - RNA, 19 nt, Artificial Sequence
  Description of Artificial Sequence: Synthetic oligonucleotide
  Antisense strand to SEQ ID NO: 1070432
uaccugccaaucaucguuc

SEQ ID NO: 1070434 - RNA, 19 nt, Artificial Sequence
  Description of Artificial Sequence: Synthetic oligonucleotide
  Sense strand starting at position 526 of SEQ ID NO: 915311
cgaugauuggcagguaaua

SEQ ID NO: 1070435 - RNA, 19 nt, Artificial Sequence
  Description of Artificial Sequence: Synthetic oligonucleotide
  Antisense strand to SEQ ID NO: 1070434
uauuaccugccaaucaucg

SEQ ID NO: 1070436 - RNA, 19 nt, Artificial Sequence
  Description of Artificial Sequence: Synthetic oligonucleotide
  Sense strand starting at position 536 of SEQ ID NO: 915311
cagguaauacgucacacua

SEQ ID NO: 1070437 - RNA, 19 nt, Artificial Sequence
  Description of Artificial Sequence: Synthetic oligonucleotide
  Antisense strand to SEQ ID NO: 1070436
uagugugacguauuaccug

SEQ ID NO: 1070438 - RNA, 19 nt, Artificial Sequence
  Description of Artificial Sequence: Synthetic oligonucleotide
  Sense strand starting at position 645 of SEQ ID NO: 915311
uguuaaauacugcaagaau

SEQ ID NO: 1070439 - RNA, 19 nt, Artificial Sequence
  Description of Artificial Sequence: Synthetic oligonucleotide
  Antisense strand to SEQ ID NO: 1070438
auucuugcaguauuuaaca

SEQ ID NO: 1070440 - RNA, 19 nt, Artificial Sequence
  Description of Artificial Sequence: Synthetic oligonucleotide
  Sense strand starting at position 663 of SEQ ID NO: 915311
uuguguuaacugcaucaau

SEQ ID NO: 1070441 - RNA, 19 nt, Artificial Sequence
  Description of Artificial Sequence: Synthetic oligonucleotide
  Antisense strand to SEQ ID NO: 1070440
auugaugcaguuaacacaa

SEQ ID NO: 1070442 - RNA, 19 nt, Artificial Sequence
  Description of Artificial Sequence: Synthetic oligonucleotide
  Sense strand starting at position 754 of SEQ ID NO: 915311
gcgaauauuugcuugaaac

SEQ ID NO: 1070443 - RNA, 19 nt, Artificial Sequence
  Description of Artificial Sequence: Synthetic oligonucleotide
  Antisense strand to SEQ ID NO: 1070442
guuucaagcaaauauucgc

SEQ ID NO: 1070444 - RNA, 19 nt, Artificial Sequence
  Description of Artificial Sequence: Synthetic oligonucleotide
  Sense strand starting at position 765 of SEQ ID NO: 915311
cuugaaacauucuccugga

SEQ ID NO: 1070445 - RNA, 19 nt, Artificial Sequence
  Description of Artificial Sequence: Synthetic oligonucleotide
  Antisense strand to SEQ ID NO: 1070444
uccaggagaauguuucaag

SEQ ID NO: 1070446 - RNA, 19 nt, Artificial Sequence
  Description of Artificial Sequence: Synthetic oligonucleotide
  Sense strand starting at position 794 of SEQ ID NO: 915311
ucgugaugccguaggaauu

SEQ ID NO: 1070447 - RNA, 19 nt, Artificial Sequence
  Description of Artificial Sequence: Synthetic oligonucleotide
  Antisense strand to SEQ ID NO: 1070446
aauuccuacggcaucacga

SEQ ID NO: 1070448 - RNA, 19 nt, Artificial Sequence
  Description of Artificial Sequence: Synthetic oligonucleotide
  Sense strand starting at position 795 of SEQ ID NO: 915311
cgugaugccguaggaauuu

SEQ ID NO: 1070449 - RNA, 19 nt, Artificial Sequence
  Description of Artificial Sequence: Synthetic oligonucleotide
  Antisense strand to SEQ ID NO: 1070448
aaauuccuacggcaucacg

SEQ ID NO: 1070450 - RNA, 19 nt, Artificial Sequence
  Description of Artificial Sequence: Synthetic oligonucleotide
  Sense strand starting at position 821 of SEQ ID NO: 915311
uaagucuuccacgagucau

SEQ ID NO: 1070451 - RNA, 19 nt, Artificial Sequence
  Description of Artificial Sequence: Synthetic oligonucleotide
  Antisense strand to SEQ ID NO: 1070450
augacucguggaagacuua

SEQ ID NO: 1070452 - RNA, 19 nt, Artificial Sequence
  Description of Artificial Sequence: Synthetic oligonucleotide
  Sense strand starting at position 854 of SEQ ID NO: 915311
cucgacuggccucaaugaa

SEQ ID NO: 1070453 - RNA, 19 nt, Artificial Sequence
  Description of Artificial Sequence: Synthetic oligonucleotide
  Antisense strand to SEQ ID NO: 1070452
uucauugaggccagucgag

SEQ ID NO: 1070454 - RNA, 19 nt, Artificial Sequence
  Description of Artificial Sequence: Synthetic oligonucleotide
  Sense strand starting at position 2183 of SEQ ID NO: 915311
gugaccucaccggguauuu

SEQ ID NO: 1070455 - RNA, 19 nt, Artificial Sequence
  Description of Artificial Sequence: Synthetic oligonucleotide
  Antisense strand to SEQ ID NO: 1070454
aaauacccggugaggucac

SEQ ID NO: 1070456 - RNA, 19 nt, Artificial Sequence
  Description of Artificial Sequence: Synthetic oligonucleotide
  Sense strand starting at position 2192 of SEQ ID NO: 915311
ccggguauuuaucaggaag

SEQ ID NO: 1070457 - RNA, 19 nt, Artificial Sequence
  Description of Artificial Sequence: Synthetic oligonucleotide
  Antisense strand to SEQ ID NO: 1070456
cuuccugauaaauacccgg

SEQ ID NO: 1070458 - RNA, 19 nt, Artificial Sequence
  Description of Artificial Sequence: Synthetic oligonucleotide
  Sense strand starting at position 2369 of SEQ ID NO: 915311
agcgcuuugccuuugagca

SEQ ID NO: 1070459 - RNA, 19 nt, Artificial Sequence
  Description of Artificial Sequence: Synthetic oligonucleotide
  Antisense strand to SEQ ID NO: 1070458
ugcucaaaggcaaagcgcu

SEQ ID NO: 1070460 - RNA, 19 nt, Artificial Sequence
  Description of Artificial Sequence: Synthetic oligonucleotide
  Sense strand starting at position 2399 of SEQ ID NO: 915311
ccuaucuccguuuagauga

SEQ ID NO: 1070461 - RNA, 19 nt, Artificial Sequence
  Description of Artificial Sequence: Synthetic oligonucleotide
  Antisense strand to SEQ ID NO: 1070460
ucaucuaaacggagauagg

SEQ ID NO: 1070462 - RNA, 19 nt, Artificial Sequence
  Description of Artificial Sequence: Synthetic oligonucleotide
  Sense strand starting at position 2404 of SEQ ID NO: 915311
cuccguuuagaugaauugu

SEQ ID NO: 1070463 - RNA, 19 nt, Artificial Sequence
  Description of Artificial Sequence: Synthetic oligonucleotide
  Antisense strand to SEQ ID NO: 1070462
acaauucaucuaaacggag

SEQ ID NO: 1070464 - RNA, 19 nt, Artificial Sequence
  Description of Artificial Sequence: Synthetic oligonucleotide
  Sense strand starting at position 2415 of SEQ ID NO: 915311
ugaauugugggaugaucau

SEQ ID NO: 1070465 - RNA, 19 nt, Artificial Sequence
  Description of Artificial Sequence: Synthetic oligonucleotide
  Antisense strand to SEQ ID NO: 1070464
augaucaucccacaauuca

SEQ ID NO: 1070466 - RNA, 19 nt, Artificial Sequence
  Description of Artificial Sequence: Synthetic oligonucleotide
  Sense strand starting at position 2427 of SEQ ID NO: 915311
ugaucaugggaacgauucu

SEQ ID NO: 1070467 - RNA, 19 nt, Artificial Sequence
  Description of Artificial Sequence: Synthetic oligonucleotide
  Antisense strand to SEQ ID NO: 1070466
agaaucguucccaugauca

SEQ ID NO: 1070468 - RNA, 19 nt, Artificial Sequence
  Description of Artificial Sequence: Synthetic oligonucleotide
  Sense strand starting at position 2433 of SEQ ID NO: 915311
ugggaacgauucuuccuua

SEQ ID NO: 1070469 - RNA, 19 nt, Artificial Sequence
  Description of Artificial Sequence: Synthetic oligonucleotide
  Antisense strand to SEQ ID NO: 1070468
uaaggaagaaucguuccca

SEQ ID NO: 1070470 - RNA, 19 nt, Artificial Sequence
  Description of Artificial Sequence: Synthetic oligonucleotide
  Sense strand starting at position 2434 of SEQ ID NO: 915311
gggaacgauucuuccuuaa

SEQ ID NO: 1070471 - RNA, 19 nt, Artificial Sequence
  Description of Artificial Sequence: Synthetic oligonucleotide
  Antisense strand to SEQ ID NO: 1070470
uuaaggaagaaucguuccc

SEQ ID NO: 1070472 - RNA, 19 nt, Artificial Sequence
  Description of Artificial Sequence: Synthetic oligonucleotide
  Sense strand starting at position 2453 of SEQ ID NO: 915311
gccgaagucaaagggaaau

SEQ ID NO: 1070473 - RNA, 19 nt, Artificial Sequence
  Description of Artificial Sequence: Synthetic oligonucleotide
  Antisense strand to SEQ ID NO: 1070472
auuucccuuugacuucggc

SEQ ID NO: 1070474 - RNA, 19 nt, Artificial Sequence
  Description of Artificial Sequence: Synthetic oligonucleotide
  Sense strand starting at position 2533 of SEQ ID NO: 915311
cuucuacacgcucagagau

SEQ ID NO: 1070475 - RNA, 19 nt, Artificial Sequence
  Description of Artificial Sequence: Synthetic oligonucleotide
  Antisense strand to SEQ ID NO: 1070474
aucucugagcguguagaag

SEQ ID NO: 1070476 - RNA, 19 nt, Artificial Sequence
  Description of Artificial Sequence: Synthetic oligonucleotide
  Sense strand starting at position 2692 of SEQ ID NO: 915311
ucuauaucuuucuuagggu

SEQ ID NO: 1070477 - RNA, 19 nt, Artificial Sequence
  Description of Artificial Sequence: Synthetic oligonucleotide
  Antisense strand to SEQ ID NO: 1070476
acccuaagaaagauauaga

SEQ ID NO: 1070478 - RNA, 19 nt, Artificial Sequence
  Description of Artificial Sequence: Synthetic oligonucleotide
  Sense strand starting at position 2827 of SEQ ID NO: 915311
uagaaugcugcauaggcaa

SEQ ID NO: 1070479 - RNA, 19 nt, Artificial Sequence
  Description of Artificial Sequence: Synthetic oligonucleotide
  Antisense strand to SEQ ID NO: 1070478
uugccuaugcagcauucua

SEQ ID NO: 1070480 - RNA, 19 nt, Artificial Sequence
  Description of Artificial Sequence: Synthetic oligonucleotide
  Sense strand starting at position 2951 of SEQ ID NO: 915311
aguguaaugucaucagaau

SEQ ID NO: 1070481 - RNA, 19 nt, Artificial Sequence
  Description of Artificial Sequence: Synthetic oligonucleotide
  Antisense strand to SEQ ID NO: 1070480
auucugaugacauuacacu

SEQ ID NO: 1070482 - RNA, 19 nt, Artificial Sequence
  Description of Artificial Sequence: Synthetic oligonucleotide
  Sense strand starting at position 2957 of SEQ ID NO: 915311
augucaucagaaugagcau

SEQ ID NO: 1070483 - RNA, 19 nt, Artificial Sequence
  Description of Artificial Sequence: Synthetic oligonucleotide
  Antisense strand to SEQ ID NO: 1070482
augcucauucugaugacau

SEQ ID NO: 1070484 - RNA, 19 nt, Artificial Sequence
  Description of Artificial Sequence: Synthetic oligonucleotide
  Sense strand starting at position 2985 of SEQ ID NO: 915311
ccuuaagggacccgagaau

SEQ ID NO: 1070485 - RNA, 19 nt, Artificial Sequence
  Description of Artificial Sequence: Synthetic oligonucleotide
  Antisense strand to SEQ ID NO: 1070484
auucucgggucccuuaagg

SEQ ID NO: 1070486 - RNA, 19 nt, Artificial Sequence
  Description of Artificial Sequence: Synthetic oligonucleotide
  Sense strand starting at position 3326 of SEQ ID NO: 915311
ucucgaacucguuaucuca

SEQ ID NO: 1070487 - RNA, 19 nt, Artificial Sequence
  Description of Artificial Sequence: Synthetic oligonucleotide
  Antisense strand to SEQ ID NO: 1070486
ugagauaacgaguucgaga

SEQ ID NO: 1070488 - RNA, 19 nt, Artificial Sequence
  Description of Artificial Sequence: Synthetic oligonucleotide
  Sense strand starting at position 3731 of SEQ ID NO: 915311
ucucuuuggccuuaaggaa

SEQ ID NO: 1070489 - RNA, 19 nt, Artificial Sequence
  Description of Artificial Sequence: Synthetic oligonucleotide
  Antisense strand to SEQ ID NO: 1070488
uuccuuaaggccaaagaga

SEQ ID NO: 1070490 - RNA, 19 nt, Artificial Sequence
  Description of Artificial Sequence: Synthetic oligonucleotide
  Sense strand starting at position 3784 of SEQ ID NO: 915311
aauauuuagugagcgccua

SEQ ID NO: 1070491 - RNA, 19 nt, Artificial Sequence
  Description of Artificial Sequence: Synthetic oligonucleotide
  Antisense strand to SEQ ID NO: 1070490
uaggcgcucacuaaauauu

SEQ ID NO: 1070492 - RNA, 19 nt, Artificial Sequence
  Description of Artificial Sequence: Synthetic oligonucleotide
  Sense strand starting at position 3899 of SEQ ID NO: 915311
agacaaagaugguaugaca

SEQ ID NO: 1070493 - RNA, 19 nt, Artificial Sequence
  Description of Artificial Sequence: Synthetic oligonucleotide
  Antisense strand to SEQ ID NO: 1070492
ugucauaccaucuuugucu

SEQ ID NO: 1070494 - RNA, 19 nt, Artificial Sequence
  Description of Artificial Sequence: Synthetic oligonucleotide
  Sense strand starting at position 3956 of SEQ ID NO: 915311
gggaaaguucaagguaguu

SEQ ID NO: 1070495 - RNA, 19 nt, Artificial Sequence
  Description of Artificial Sequence: Synthetic oligonucleotide
  Antisense strand to SEQ ID NO: 1070494
aacuaccuugaacuuuccc

SEQ ID NO: 1070496 - RNA, 19 nt, Artificial Sequence
  Description of Artificial Sequence: Synthetic oligonucleotide
  Sense strand starting at position 3969 of SEQ ID NO: 915311
guaguuuaggaguauacac

SEQ ID NO: 1070497 - RNA, 19 nt, Artificial Sequence
  Description of Artificial Sequence: Synthetic oligonucleotide
  Antisense strand to SEQ ID NO: 1070496
guguauacuccuaaacuac

SEQ ID NO: 1070498 - RNA, 19 nt, Artificial Sequence
  Description of Artificial Sequence: Synthetic oligonucleotide
  Sense strand starting at position 722 of SEQ ID NO: 915312
uucucuuucugaggugcua

SEQ ID NO: 1070499 - RNA, 19 nt, Artificial Sequence
  Description of Artificial Sequence: Synthetic oligonucleotide
  Antisense strand to SEQ ID NO: 1070498
uagcaccucagaaagagaa

SEQ ID NO: 1070500 - RNA, 19 nt, Artificial Sequence
  Description of Artificial Sequence: Synthetic oligonucleotide
  Sense strand starting at position 1176 of SEQ ID NO: 915312
aaccaaggcuguuaucaga

SEQ ID NO: 1070501 - RNA, 19 nt, Artificial Sequence
  Description of Artificial Sequence: Synthetic oligonucleotide
  Antisense strand to SEQ ID NO: 1070500
ucugauaacagccuugguu

SEQ ID NO: 1070502 - RNA, 19 nt, Artificial Sequence
  Description of Artificial Sequence: Synthetic oligonucleotide
  Sense strand starting at position 1183 of SEQ ID NO: 915312
gcuguuaucagagggagac

SEQ ID NO: 1070503 - RNA, 19 nt, Artificial Sequence
  Description of Artificial Sequence: Synthetic oligonucleotide
  Antisense strand to SEQ ID NO: 1070502
gucucccucugauaacagc

SEQ ID NO: 1070504 - RNA, 19 nt, Artificial Sequence
  Description of Artificial Sequence: Synthetic oligonucleotide
  Sense strand starting at position 1201 of SEQ ID NO: 915312
ccgagugagugguuaccaa

SEQ ID NO: 1070505 - RNA, 19 nt, Artificial Sequence
  Description of Artificial Sequence: Synthetic oligonucleotide
  Antisense strand to SEQ ID NO: 1070504
uugguaaccacucacucgg

SEQ ID NO: 1070506 - RNA, 19 nt, Artificial Sequence
  Description of Artificial Sequence: Synthetic oligonucleotide
  Sense strand starting at position 1208 of SEQ ID NO: 915312
agugguuaccaaggagauc

SEQ ID NO: 1070507 - RNA, 19 nt, Artificial Sequence
  Description of Artificial Sequence: Synthetic oligonucleotide
  Antisense strand to SEQ ID NO: 1070506
gaucuccuugguaaccacu

SEQ ID NO: 1070508 - RNA, 19 nt, Artificial Sequence
  Description of Artificial Sequence: Synthetic oligonucleotide
  Sense strand starting at position 1453 of SEQ ID NO: 915312
cuucgcugccuccaauuau

SEQ ID NO: 1070509 - RNA, 19 nt, Artificial Sequence
  Description of Artificial Sequence: Synthetic oligonucleotide
  Antisense strand to SEQ ID NO: 1070508
auaauuggaggcagcgaag

SEQ ID NO: 1070510 - RNA, 19 nt, Artificial Sequence
  Description of Artificial Sequence: Synthetic oligonucleotide
  Sense strand starting at position 1495 of SEQ ID NO: 915312
guggcacuuacagaguuaa

SEQ ID NO: 1070511 - RNA, 19 nt, Artificial Sequence
  Description of Artificial Sequence: Synthetic oligonucleotide
  Antisense strand to SEQ ID NO: 1070510
uuaacucuguaagugccac

SEQ ID NO: 1070512 - RNA, 19 nt, Artificial Sequence
  Description of Artificial Sequence: Synthetic oligonucleotide
  Sense strand starting at position 1527 of SEQ ID NO: 915312
ugcagaucuacugggcaaa

SEQ ID NO: 1070513 - RNA, 19 nt, Artificial Sequence
  Description of Artificial Sequence: Synthetic oligonucleotide
  Antisense strand to SEQ ID NO: 1070512
uuugcccaguagaucugca

SEQ ID NO: 1070514 - RNA, 19 nt, Artificial Sequence
  Description of Artificial Sequence: Synthetic oligonucleotide
  Sense strand starting at position 1529 of SEQ ID NO: 915312
cagaucuacugggcaaaga

SEQ ID NO: 1070515 - RNA, 19 nt, Artificial Sequence
  Description of Artificial Sequence: Synthetic oligonucleotide
  Antisense strand to SEQ ID NO: 1070514
ucuuugcccaguagaucug

SEQ ID NO: 1070516 - RNA, 19 nt, Artificial Sequence
  Description of Artificial Sequence: Synthetic oligonucleotide
  Sense strand starting at position 1559 of SEQ ID NO: 915312
ggaggagagucacauucuu

SEQ ID NO: 1070517 - RNA, 19 nt, Artificial Sequence
  Description of Artificial Sequence: Synthetic oligonucleotide
  Antisense strand to SEQ ID NO: 1070516
aagaaugugacucuccucc

SEQ ID NO: 1070518 - RNA, 19 nt, Artificial Sequence
  Description of Artificial Sequence: Synthetic oligonucleotide
  Sense strand starting at position 1589 of SEQ ID NO: 915312
ugccucuuccauuggcaua

SEQ ID NO: 1070519 - RNA, 19 nt, Artificial Sequence
  Description of Artificial Sequence: Synthetic oligonucleotide
  Antisense strand to SEQ ID NO: 1070518
uaugccaauggaagaggca

SEQ ID NO: 1070520 - RNA, 19 nt, Artificial Sequence
  Description of Artificial Sequence: Synthetic oligonucleotide
  Sense strand starting at position 1734 of SEQ ID NO: 915312
ccaaguccuuggcacauaa

SEQ ID NO: 1070521 - RNA, 19 nt, Artificial Sequence
  Description of Artificial Sequence: Synthetic oligonucleotide
  Antisense strand to SEQ ID NO: 1070520
uuaugugccaaggacuugg

SEQ ID NO: 1070522 - RNA, 19 nt, Artificial Sequence
  Description of Artificial Sequence: Synthetic oligonucleotide
  Sense strand starting at position 1745 of SEQ ID NO: 915312
gcacauaaaucugagcaua

SEQ ID NO: 1070523 - RNA, 19 nt, Artificial Sequence
  Description of Artificial Sequence: Synthetic oligonucleotide
  Antisense strand to SEQ ID NO: 1070522
uaugcucagauuuaugugc

SEQ ID NO: 1070524 - RNA, 19 nt, Artificial Sequence
  Description of Artificial Sequence: Synthetic oligonucleotide
  Sense strand starting at position 1925 of SEQ ID NO: 915312
gaggauuucuccuggccuc

SEQ ID NO: 1070525 - RNA, 19 nt, Artificial Sequence
  Description of Artificial Sequence: Synthetic oligonucleotide
  Antisense strand to SEQ ID NO: 1070524
gaggccaggagaaauccuc

SEQ ID NO: 1070526 - RNA, 19 nt, Artificial Sequence
  Description of Artificial Sequence: Synthetic oligonucleotide
  Sense strand starting at position 2413 of SEQ ID NO: 915312
cgcugagagucuuauccuc

SEQ ID NO: 1070527 - RNA, 19 nt, Artificial Sequence
  Description of Artificial Sequence: Synthetic oligonucleotide
  Antisense strand to SEQ ID NO: 1070526
gaggauaagacucucagcg

SEQ ID NO: 1070528 - RNA, 19 nt, Artificial Sequence
  Description of Artificial Sequence: Synthetic oligonucleotide
  Sense strand starting at position 2418 of SEQ ID NO: 915312
agagucuuauccucuggaa

SEQ ID NO: 1070529 - RNA, 19 nt, Artificial Sequence
  Description of Artificial Sequence: Synthetic oligonucleotide
  Antisense strand to SEQ ID NO: 1070528
uuccagaggauaagacucu

SEQ ID NO: 1070530 - RNA, 19 nt, Artificial Sequence
  Description of Artificial Sequence: Synthetic oligonucleotide
  Sense strand starting at position 2443 of SEQ ID NO: 915312
guggguuccuccugaaucu

SEQ ID NO: 1070531 - RNA, 19 nt, Artificial Sequence
  Description of Artificial Sequence: Synthetic oligonucleotide
  Antisense strand to SEQ ID NO: 1070530
agauucaggaggaacccac

SEQ ID NO: 1070532 - RNA, 19 nt, Artificial Sequence
  Description of Artificial Sequence: Synthetic oligonucleotide
  Sense strand starting at position 2444 of SEQ ID NO: 915312
uggguuccuccugaaucua

SEQ ID NO: 1070533 - RNA, 19 nt, Artificial Sequence
  Description of Artificial Sequence: Synthetic oligonucleotide
  Antisense strand to SEQ ID NO: 1070532
uagauucaggaggaaccca

SEQ ID NO: 1070534 - RNA, 19 nt, Artificial Sequence
  Description of Artificial Sequence: Synthetic oligonucleotide
  Sense strand starting at position 2490 of SEQ ID NO: 915312
cccugaaucugacccaguu

SEQ ID NO: 1070535 - RNA, 19 nt, Artificial Sequence
  Description of Artificial Sequence: Synthetic oligonucleotide
  Antisense strand to SEQ ID NO: 1070534
aacugggucagauucaggg

SEQ ID NO: 1070536 - RNA, 19 nt, Artificial Sequence
  Description of Artificial Sequence: Synthetic oligonucleotide
  Sense strand starting at position 2529 of SEQ ID NO: 915312
gcagauugcuggucacuaa

SEQ ID NO: 1070537 - RNA, 19 nt, Artificial Sequence
  Description of Artificial Sequence: Synthetic oligonucleotide
  Antisense strand to SEQ ID NO: 1070536
uuagugaccagcaaucugc

SEQ ID NO: 1070538 - RNA, 19 nt, Artificial Sequence
  Description of Artificial Sequence: Synthetic oligonucleotide
  Sense strand starting at position 2530 of SEQ ID NO: 915312
cagauugcuggucacuaac

SEQ ID NO: 1070539 - RNA, 19 nt, Artificial Sequence
  Description of Artificial Sequence: Synthetic oligonucleotide
  Antisense strand to SEQ ID NO: 1070538
guuagugaccagcaaucug

SEQ ID NO: 1070540 - RNA, 19 nt, Artificial Sequence
  Description of Artificial Sequence: Synthetic oligonucleotide
  Sense strand starting at position 2578 of SEQ ID NO: 915312
gugauaauucuauggccca

SEQ ID NO: 1070541 - RNA, 19 nt, Artificial Sequence
  Description of Artificial Sequence: Synthetic oligonucleotide
  Antisense strand to SEQ ID NO: 1070540
ugggccauagaauuaucac

SEQ ID NO: 1070542 - RNA, 19 nt, Artificial Sequence
  Description of Artificial Sequence: Synthetic oligonucleotide
  Sense strand starting at position 2579 of SEQ ID NO: 915312
ugauaauucuauggcccau

SEQ ID NO: 1070543 - RNA, 19 nt, Artificial Sequence
  Description of Artificial Sequence: Synthetic oligonucleotide
  Antisense strand to SEQ ID NO: 1070542
augggccauagaauuauca

SEQ ID NO: 1070544 - RNA, 19 nt, Artificial Sequence
  Description of Artificial Sequence: Synthetic oligonucleotide
  Sense strand starting at position 2648 of SEQ ID NO: 915312
ccauaacucccucguguca

SEQ ID NO: 1070545 - RNA, 19 nt, Artificial Sequence
  Description of Artificial Sequence: Synthetic oligonucleotide
  Antisense strand to SEQ ID NO: 1070544
ugacacgagggaguuaugg

SEQ ID NO: 1070546 - RNA, 19 nt, Artificial Sequence
  Description of Artificial Sequence: Synthetic oligonucleotide
  Sense strand starting at position 3087 of SEQ ID NO: 915312
gaggucuauccaugucggu

SEQ ID NO: 1070547 - RNA, 19 nt, Artificial Sequence
  Description of Artificial Sequence: Synthetic oligonucleotide
  Antisense strand to SEQ ID NO: 1070546
accgacauggauagaccuc

SEQ ID NO: 1070548 - RNA, 19 nt, Artificial Sequence
  Description of Artificial Sequence: Synthetic oligonucleotide
  Sense strand starting at position 3235 of SEQ ID NO: 915312
uuauuagcagcgugagacu

SEQ ID NO: 1070549 - RNA, 19 nt, Artificial Sequence
  Description of Artificial Sequence: Synthetic oligonucleotide
  Antisense strand to SEQ ID NO: 1070548
agucucacgcugcuaauaa

SEQ ID NO: 1070550 - RNA, 19 nt, Artificial Sequence
  Description of Artificial Sequence: Synthetic oligonucleotide
  Sense strand starting at position 3351 of SEQ ID NO: 915312
cuugcaauagaucaugguu

SEQ ID NO: 1070551 - RNA, 19 nt, Artificial Sequence
  Description of Artificial Sequence: Synthetic oligonucleotide
  Antisense strand to SEQ ID NO: 1070550
aaccaugaucuauugcaag

SEQ ID NO: 1070552 - RNA, 19 nt, Artificial Sequence
  Description of Artificial Sequence: Synthetic oligonucleotide
  Sense strand starting at position 3354 of SEQ ID NO: 915312
gcaauagaucaugguuggu

SEQ ID NO: 1070553 - RNA, 19 nt, Artificial Sequence
  Description of Artificial Sequence: Synthetic oligonucleotide
  Antisense strand to SEQ ID NO: 1070552
accaaccaugaucuauugc

SEQ ID NO: 1070554 - RNA, 19 nt, Artificial Sequence
  Description of Artificial Sequence: Synthetic oligonucleotide
  Sense strand starting at position 3359 of SEQ ID NO: 915312
agaucaugguugguaguuu

SEQ ID NO: 1070555 - RNA, 19 nt, Artificial Sequence
  Description of Artificial Sequence: Synthetic oligonucleotide
  Antisense strand to SEQ ID NO: 1070554
aaacuaccaaccaugaucu

SEQ ID NO: 1070556 - RNA, 19 nt, Artificial Sequence
  Description of Artificial Sequence: Synthetic oligonucleotide
  Sense strand starting at position 3360 of SEQ ID NO: 915312
gaucaugguugguaguuua

SEQ ID NO: 1070557 - RNA, 19 nt, Artificial Sequence
  Description of Artificial Sequence: Synthetic oligonucleotide
  Antisense strand to SEQ ID NO: 1070556
uaaacuaccaaccaugauc

SEQ ID NO: 1070558 - RNA, 19 nt, Artificial Sequence
  Description of Artificial Sequence: Synthetic oligonucleotide
  Sense strand starting at position 3368 of SEQ ID NO: 915312
uugguaguuuaaccagaaa

SEQ ID NO: 1070559 - RNA, 19 nt, Artificial Sequence
  Description of Artificial Sequence: Synthetic oligonucleotide
  Antisense strand to SEQ ID NO: 1070558
uuucugguuaaacuaccaa

SEQ ID NO: 1070560 - RNA, 19 nt, Artificial Sequence
  Description of Artificial Sequence: Synthetic oligonucleotide
  Sense strand starting at position 24 of SEQ ID NO: 915313
cucacagcaucuuugugaa

SEQ ID NO: 1070561 - RNA, 19 nt, Artificial Sequence
  Description of Artificial Sequence: Synthetic oligonucleotide
  Antisense strand to SEQ ID NO: 1070560
uucacaaagaugcugugag

SEQ ID NO: 1070562 - RNA, 19 nt, Artificial Sequence
  Description of Artificial Sequence: Synthetic oligonucleotide
  Sense strand starting at position 34 of SEQ ID NO: 915313
cuuugugaagauugaaaug

SEQ ID NO: 1070563 - RNA, 19 nt, Artificial Sequence
  Description of Artificial Sequence: Synthetic oligonucleotide
  Antisense strand to SEQ ID NO: 1070562
cauuucaaucuucacaaag

SEQ ID NO: 1070564 - RNA, 19 nt, Artificial Sequence
  Description of Artificial Sequence: Synthetic oligonucleotide
  Sense strand starting at position 91 of SEQ ID NO: 915313
cccagaacacucgauaugu

SEQ ID NO: 1070565 - RNA, 19 nt, Artificial Sequence
  Description of Artificial Sequence: Synthetic oligonucleotide
  Antisense strand to SEQ ID NO: 1070564
acauaucgaguguucuggg

SEQ ID NO: 1070566 - RNA, 19 nt, Artificial Sequence
  Description of Artificial Sequence: Synthetic oligonucleotide
  Sense strand starting at position 108 of SEQ ID NO: 915313
gugcuaggcgcuguucuau

SEQ ID NO: 1070567 - RNA, 19 nt, Artificial Sequence
  Description of Artificial Sequence: Synthetic oligonucleotide
  Antisense strand to SEQ ID NO: 1070566
auagaacagcgccuagcac

SEQ ID NO: 1070568 - RNA, 19 nt, Artificial Sequence
  Description of Artificial Sequence: Synthetic oligonucleotide
  Sense strand starting at position 346 of SEQ ID NO: 915313
uuucucaucugaucaggaa

SEQ ID NO: 1070569 - RNA, 19 nt, Artificial Sequence
  Description of Artificial Sequence: Synthetic oligonucleotide
  Antisense strand to SEQ ID NO: 1070568
uuccugaucagaugagaaa

SEQ ID NO: 1070570 - RNA, 19 nt, Artificial Sequence
  Description of Artificial Sequence: Synthetic oligonucleotide
  Sense strand starting at position 362 of SEQ ID NO: 915313
gaaguugggugguuagagu

SEQ ID NO: 1070571 - RNA, 19 nt, Artificial Sequence
  Description of Artificial Sequence: Synthetic oligonucleotide
  Antisense strand to SEQ ID NO: 1070570
acucuaaccacccaacuuc

SEQ ID NO: 1070572 - RNA, 19 nt, Artificial Sequence
  Description of Artificial Sequence: Synthetic oligonucleotide
  Sense strand starting at position 369 of SEQ ID NO: 915313
ggugguuagaguugucaca

SEQ ID NO: 1070573 - RNA, 19 nt, Artificial Sequence
  Description of Artificial Sequence: Synthetic oligonucleotide
  Antisense strand to SEQ ID NO: 1070572
ugugacaacucuaaccacc

SEQ ID NO: 1070574 - RNA, 19 nt, Artificial Sequence
  Description of Artificial Sequence: Synthetic oligonucleotide
  Sense strand starting at position 382 of SEQ ID NO: 915313
gucacaguacuuugugaaa

SEQ ID NO: 1070575 - RNA, 19 nt, Artificial Sequence
  Description of Artificial Sequence: Synthetic oligonucleotide
  Antisense strand to SEQ ID NO: 1070574
uuucacaaaguacugugac

SEQ ID NO: 1070576 - RNA, 19 nt, Artificial Sequence
  Description of Artificial Sequence: Synthetic oligonucleotide
  Sense strand starting at position 423 of SEQ ID NO: 915313
uaugaauugagguggguuu

SEQ ID NO: 1070577 - RNA, 19 nt, Artificial Sequence
  Description of Artificial Sequence: Synthetic oligonucleotide
  Antisense strand to SEQ ID NO: 1070576
aaacccaccucaauucaua

SEQ ID NO: 1070578 - RNA, 19 nt, Artificial Sequence
  Description of Artificial Sequence: Synthetic oligonucleotide
  Sense strand starting at position 731 of SEQ ID NO: 915313
gcaccauucugggcagagu

SEQ ID NO: 1070579 - RNA, 19 nt, Artificial Sequence
  Description of Artificial Sequence: Synthetic oligonucleotide
  Antisense strand to SEQ ID NO: 1070578
acucugcccagaauggugc

SEQ ID NO: 1070580 - RNA, 19 nt, Artificial Sequence
  Description of Artificial Sequence: Synthetic oligonucleotide
  Sense strand starting at position 1131 of SEQ ID NO: 915313
ucugacagguucuuugaau

SEQ ID NO: 1070581 - RNA, 19 nt, Artificial Sequence
  Description of Artificial Sequence: Synthetic oligonucleotide
  Antisense strand to SEQ ID NO: 1070580
auucaaagaaccugucaga

SEQ ID NO: 1070582 - RNA, 19 nt, Artificial Sequence
  Description of Artificial Sequence: Synthetic oligonucleotide
  Sense strand starting at position 1132 of SEQ ID NO: 915313
cugacagguucuuugaauc

SEQ ID NO: 1070583 - RNA, 19 nt, Artificial Sequence
  Description of Artificial Sequence: Synthetic oligonucleotide
  Antisense strand to SEQ ID NO: 1070582
gauucaaagaaccugucag

SEQ ID NO: 1070584 - RNA, 19 nt, Artificial Sequence
  Description of Artificial Sequence: Synthetic oligonucleotide
  Sense strand starting at position 2668 of SEQ ID NO: 915313
gggcuugcgagagaucuau

SEQ ID NO: 1070585 - RNA, 19 nt, Artificial Sequence
  Description of Artificial Sequence: Synthetic oligonucleotide
  Antisense strand to SEQ ID NO: 1070584
auagaucucucgcaagccc

SEQ ID NO: 1070586 - RNA, 19 nt, Artificial Sequence
  Description of Artificial Sequence: Synthetic oligonucleotide
  Sense strand starting at position 2672 of SEQ ID NO: 915313
uugcgagagaucuaucagu

SEQ ID NO: 1070587 - RNA, 19 nt, Artificial Sequence
  Description of Artificial Sequence: Synthetic oligonucleotide
  Antisense strand to SEQ ID NO: 1070586
acugauagaucucucgcaa

SEQ ID NO: 1070588 - RNA, 19 nt, Artificial Sequence
  Description of Artificial Sequence: Synthetic oligonucleotide
  Sense strand starting at position 2680 of SEQ ID NO: 915313
gaucuaucagucuacguua

SEQ ID NO: 1070589 - RNA, 19 nt, Artificial Sequence
  Description of Artificial Sequence: Synthetic oligonucleotide
  Antisense strand to SEQ ID NO: 1070588
uaacguagacugauagauc

SEQ ID NO: 1070590 - RNA, 19 nt, Artificial Sequence
  Description of Artificial Sequence: Synthetic oligonucleotide
  Sense strand starting at position 2710 of SEQ ID NO: 915313
cugugcuuugagcaaauua

SEQ ID NO: 1070591 - RNA, 19 nt, Artificial Sequence
  Description of Artificial Sequence: Synthetic oligonucleotide
  Antisense strand to SEQ ID NO: 1070590
uaauuugcucaaagcacag

SEQ ID NO: 1070592 - RNA, 19 nt, Artificial Sequence
  Description of Artificial Sequence: Synthetic oligonucleotide
  Sense strand starting at position 2737 of SEQ ID NO: 915313
acuuuaauccugggaggca

SEQ ID NO: 1070593 - RNA, 19 nt, Artificial Sequence
  Description of Artificial Sequence: Synthetic oligonucleotide
  Antisense strand to SEQ ID NO: 1070592
ugccucccaggauuaaagu

SEQ ID NO: 1070594 - RNA, 19 nt, Artificial Sequence
  Description of Artificial Sequence: Synthetic oligonucleotide
  Sense strand starting at position 2757 of SEQ ID NO: 915313
gcacgauaguugcccauuu

SEQ ID NO: 1070595 - RNA, 19 nt, Artificial Sequence
  Description of Artificial Sequence: Synthetic oligonucleotide
  Antisense strand to SEQ ID NO: 1070594
aaaugggcaacuaucgugc

SEQ ID NO: 1070596 - RNA, 19 nt, Artificial Sequence
  Description of Artificial Sequence: Synthetic oligonucleotide
  Sense strand starting at position 2840 of SEQ ID NO: 915313
gagagaaucucagcuguau

SEQ ID NO: 1070597 - RNA, 19 nt, Artificial Sequence
  Description of Artificial Sequence: Synthetic oligonucleotide
  Antisense strand to SEQ ID NO: 1070596
auacagcugagauucucuc

SEQ ID NO: 1070598 - RNA, 19 nt, Artificial Sequence
  Description of Artificial Sequence: Synthetic oligonucleotide
  Sense strand starting at position 2844 of SEQ ID NO: 915313
gaaucucagcuguaugagu

SEQ ID NO: 1070599 - RNA, 19 nt, Artificial Sequence
  Description of Artificial Sequence: Synthetic oligonucleotide
  Antisense strand to SEQ ID NO: 1070598
acucauacagcugagauuc

SEQ ID NO: 1070600 - RNA, 19 nt, Artificial Sequence
  Description of Artificial Sequence: Synthetic oligonucleotide
  Sense strand starting at position 2894 of SEQ ID NO: 915313
ugucguucugacuagggau

SEQ ID NO: 1070601 - RNA, 19 nt, Artificial Sequence
  Description of Artificial Sequence: Synthetic oligonucleotide
  Antisense strand to SEQ ID NO: 1070600
aucccuagucagaacgaca

SEQ ID NO: 1070602 - RNA, 19 nt, Artificial Sequence
  Description of Artificial Sequence: Synthetic oligonucleotide
  Sense strand starting at position 2932 of SEQ ID NO: 915313
agagaaaccuugucugcau

SEQ ID NO: 1070603 - RNA, 19 nt, Artificial Sequence
  Description of Artificial Sequence: Synthetic oligonucleotide
  Antisense strand to SEQ ID NO: 1070602
augcagacaagguuucucu

SEQ ID NO: 1070604 - RNA, 19 nt, Artificial Sequence
  Description of Artificial Sequence: Synthetic oligonucleotide
  Sense strand starting at position 2933 of SEQ ID NO: 915313
gagaaaccuugucugcauc

SEQ ID NO: 1070605 - RNA, 19 nt, Artificial Sequence
  Description of Artificial Sequence: Synthetic oligonucleotide
  Antisense strand to SEQ ID NO: 1070604
gaugcagacaagguuucuc

SEQ ID NO: 1070606 - RNA, 19 nt, Artificial Sequence
  Description of Artificial Sequence: Synthetic oligonucleotide
  Sense strand starting at position 2934 of SEQ ID NO: 915313
agaaaccuugucugcauca

SEQ ID NO: 1070607 - RNA, 19 nt, Artificial Sequence
  Description of Artificial Sequence: Synthetic oligonucleotide
  Antisense strand to SEQ ID NO: 1070606
ugaugcagacaagguuucu

SEQ ID NO: 1070608 - RNA, 19 nt, Artificial Sequence
  Description of Artificial Sequence: Synthetic oligonucleotide
  Sense strand starting at position 2939 of SEQ ID NO: 915313
ccuugucugcaucagguaa

SEQ ID NO: 1070609 - RNA, 19 nt, Artificial Sequence
  Description of Artificial Sequence: Synthetic oligonucleotide
  Antisense strand to SEQ ID NO: 1070608
uuaccugaugcagacaagg

SEQ ID NO: 1070610 - RNA, 19 nt, Artificial Sequence
  Description of Artificial Sequence: Synthetic oligonucleotide
  Sense strand starting at position 2952 of SEQ ID NO: 915313
agguaaggucccuauugcu

SEQ ID NO: 1070611 - RNA, 19 nt, Artificial Sequence
  Description of Artificial Sequence: Synthetic oligonucleotide
  Antisense strand to SEQ ID NO: 1070610
agcaauagggaccuuaccu

SEQ ID NO: 1070612 - RNA, 19 nt, Artificial Sequence
  Description of Artificial Sequence: Synthetic oligonucleotide
  Sense strand starting at position 2959 of SEQ ID NO: 915313
gucccuauugcucaguacu

SEQ ID NO: 1070613 - RNA, 19 nt, Artificial Sequence
  Description of Artificial Sequence: Synthetic oligonucleotide
  Antisense strand to SEQ ID NO: 1070612
aguacugagcaauagggac

SEQ ID NO: 1070614 - RNA, 19 nt, Artificial Sequence
  Description of Artificial Sequence: Synthetic oligonucleotide
  Sense strand starting at position 2975 of SEQ ID NO: 915313
acucuuggucuggaacuau

SEQ ID NO: 1070615 - RNA, 19 nt, Artificial Sequence
  Description of Artificial Sequence: Synthetic oligonucleotide
  Antisense strand to SEQ ID NO: 1070614
auaguuccagaccaagagu

SEQ ID NO: 1070616 - RNA, 19 nt, Artificial Sequence
  Description of Artificial Sequence: Synthetic oligonucleotide
  Sense strand starting at position 2989 of SEQ ID NO: 915313
acuauaaaggcuggauuau

SEQ ID NO: 1070617 - RNA, 19 nt, Artificial Sequence
  Description of Artificial Sequence: Synthetic oligonucleotide
  Antisense strand to SEQ ID NO: 1070616
auaauccagccuuuauagu

SEQ ID NO: 1070618 - RNA, 19 nt, Artificial Sequence
  Description of Artificial Sequence: Synthetic oligonucleotide
  Sense strand starting at position 2998 of SEQ ID NO: 915313
gcuggauuauaguuccaga

SEQ ID NO: 1070619 - RNA, 19 nt, Artificial Sequence
  Description of Artificial Sequence: Synthetic oligonucleotide
  Antisense strand to SEQ ID NO: 1070618
ucuggaacuauaauccagc

SEQ ID NO: 1070620 - RNA, 19 nt, Artificial Sequence
  Description of Artificial Sequence: Synthetic oligonucleotide
  Sense strand starting at position 3014 of SEQ ID NO: 915313
agaucaagucuuuggucuu

SEQ ID NO: 1070621 - RNA, 19 nt, Artificial Sequence
  Description of Artificial Sequence: Synthetic oligonucleotide
  Antisense strand to SEQ ID NO: 1070620
aagaccaaagacuugaucu

SEQ ID NO: 1070622 - RNA, 19 nt, Artificial Sequence
  Description of Artificial Sequence: Synthetic oligonucleotide
  Sense strand starting at position 3105 of SEQ ID NO: 915313
uuaugaaggaugcauguuu

SEQ ID NO: 1070623 - RNA, 19 nt, Artificial Sequence
  Description of Artificial Sequence: Synthetic oligonucleotide
  Antisense strand to SEQ ID NO: 1070622
aaacaugcauccuucauaa

SEQ ID NO: 1070624 - RNA, 19 nt, Artificial Sequence
  Description of Artificial Sequence: Synthetic oligonucleotide
  Sense strand starting at position 3118 of SEQ ID NO: 915313
auguuuaguuugccuaaac

SEQ ID NO: 1070625 - RNA, 19 nt, Artificial Sequence
  Description of Artificial Sequence: Synthetic oligonucleotide
  Antisense strand to SEQ ID NO: 1070624
guuuaggcaaacuaaacau

SEQ ID NO: 1070626 - RNA, 19 nt, Artificial Sequence
  Description of Artificial Sequence: Synthetic oligonucleotide
  Sense strand starting at position 3119 of SEQ ID NO: 915313
uguuuaguuugccuaaaca

SEQ ID NO: 1070627 - RNA, 19 nt, Artificial Sequence
  Description of Artificial Sequence: Synthetic oligonucleotide
  Antisense strand to SEQ ID NO: 1070626
uguuuaggcaaacuaaaca

SEQ ID NO: 1070628 - RNA, 19 nt, Artificial Sequence
  Description of Artificial Sequence: Synthetic oligonucleotide
  Sense strand starting at position 3353 of SEQ ID NO: 915313
gacacucguuagucacaga

SEQ ID NO: 1070629 - RNA, 19 nt, Artificial Sequence
  Description of Artificial Sequence: Synthetic oligonucleotide
  Antisense strand to SEQ ID NO: 1070628
ucugugacuaacgaguguc

SEQ ID NO: 1070630 - RNA, 19 nt, Artificial Sequence
  Description of Artificial Sequence: Synthetic oligonucleotide
  Sense strand starting at position 3358 of SEQ ID NO: 915313
ucguuagucacagagaauc

SEQ ID NO: 1070631 - RNA, 19 nt, Artificial Sequence
  Description of Artificial Sequence: Synthetic oligonucleotide
  Antisense strand to SEQ ID NO: 1070630
gauucucugugacuaacga

SEQ ID NO: 1070632 - RNA, 19 nt, Artificial Sequence
  Description of Artificial Sequence: Synthetic oligonucleotide
  Sense strand starting at position 3369 of SEQ ID NO: 915313
agagaaucucccugcgaga

SEQ ID NO: 1070633 - RNA, 19 nt, Artificial Sequence
  Description of Artificial Sequence: Synthetic oligonucleotide
  Antisense strand to SEQ ID NO: 1070632
ucucgcagggagauucucu

SEQ ID NO: 1070634 - RNA, 19 nt, Artificial Sequence
  Description of Artificial Sequence: Synthetic oligonucleotide
  Sense strand starting at position 3371 of SEQ ID NO: 915313
agaaucucccugcgagacu

SEQ ID NO: 1070635 - RNA, 19 nt, Artificial Sequence
  Description of Artificial Sequence: Synthetic oligonucleotide
  Antisense strand to SEQ ID NO: 1070634
agucucgcagggagauucu

SEQ ID NO: 1070636 - RNA, 19 nt, Artificial Sequence
  Description of Artificial Sequence: Synthetic oligonucleotide
  Sense strand starting at position 3458 of SEQ ID NO: 915313
gauagcugcccucacugau

SEQ ID NO: 1070637 - RNA, 19 nt, Artificial Sequence
  Description of Artificial Sequence: Synthetic oligonucleotide
  Antisense strand to SEQ ID NO: 1070636
aucagugagggcagcuauc

SEQ ID NO: 1070638 - RNA, 19 nt, Artificial Sequence
  Description of Artificial Sequence: Synthetic oligonucleotide
  Sense strand starting at position 3574 of SEQ ID NO: 915313
gcagguccucagugaauau

SEQ ID NO: 1070639 - RNA, 19 nt, Artificial Sequence
  Description of Artificial Sequence: Synthetic oligonucleotide
  Antisense strand to SEQ ID NO: 1070638
auauucacugaggaccugc

SEQ ID NO: 1070640 - RNA, 19 nt, Artificial Sequence
  Description of Artificial Sequence: Synthetic oligonucleotide
  Sense strand starting at position 193 of SEQ ID NO: 915314
gcaccauucugggcagagu

SEQ ID NO: 1070641 - RNA, 19 nt, Artificial Sequence
  Description of Artificial Sequence: Synthetic oligonucleotide
  Antisense strand to SEQ ID NO: 1070640
acucugcccagaauggugc

SEQ ID NO: 1070642 - RNA, 19 nt, Artificial Sequence
  Description of Artificial Sequence: Synthetic oligonucleotide
  Sense strand starting at position 593 of SEQ ID NO: 915314
ucugacagguucuuugaau

SEQ ID NO: 1070643 - RNA, 19 nt, Artificial Sequence
  Description of Artificial Sequence: Synthetic oligonucleotide
  Antisense strand to SEQ ID NO: 1070642
auucaaagaaccugucaga

SEQ ID NO: 1070644 - RNA, 19 nt, Artificial Sequence
  Description of Artificial Sequence: Synthetic oligonucleotide
  Sense strand starting at position 594 of SEQ ID NO: 915314
cugacagguucuuugaauc

SEQ ID NO: 1070645 - RNA, 19 nt, Artificial Sequence
  Description of Artificial Sequence: Synthetic oligonucleotide
  Antisense strand to SEQ ID NO: 1070644
gauucaaagaaccugucag

SEQ ID NO: 1070646 - RNA, 19 nt, Artificial Sequence
  Description of Artificial Sequence: Synthetic oligonucleotide
  Sense strand starting at position 2130 of SEQ ID NO: 915314
gggcuugcgagagaucuau

SEQ ID NO: 1070647 - RNA, 19 nt, Artificial Sequence
  Description of Artificial Sequence: Synthetic oligonucleotide
  Antisense strand to SEQ ID NO: 1070646
auagaucucucgcaagccc

SEQ ID NO: 1070648 - RNA, 19 nt, Artificial Sequence
  Description of Artificial Sequence: Synthetic oligonucleotide
  Sense strand starting at position 2134 of SEQ ID NO: 915314
uugcgagagaucuaucagu

SEQ ID NO: 1070649 - RNA, 19 nt, Artificial Sequence
  Description of Artificial Sequence: Synthetic oligonucleotide
  Antisense strand to SEQ ID NO: 1070648
acugauagaucucucgcaa

SEQ ID NO: 1070650 - RNA, 19 nt, Artificial Sequence
  Description of Artificial Sequence: Synthetic oligonucleotide
  Sense strand starting at position 2142 of SEQ ID NO: 915314
gaucuaucagucuacguua

SEQ ID NO: 1070651 - RNA, 19 nt, Artificial Sequence
  Description of Artificial Sequence: Synthetic oligonucleotide
  Antisense strand to SEQ ID NO: 1070650
uaacguagacugauagauc

SEQ ID NO: 1070652 - RNA, 19 nt, Artificial Sequence
  Description of Artificial Sequence: Synthetic oligonucleotide
  Sense strand starting at position 2172 of SEQ ID NO: 915314
cugugcuuugagcaaauua

SEQ ID NO: 1070653 - RNA, 19 nt, Artificial Sequence
  Description of Artificial Sequence: Synthetic oligonucleotide
  Antisense strand to SEQ ID NO: 1070652
uaauuugcucaaagcacag

SEQ ID NO: 1070654 - RNA, 19 nt, Artificial Sequence
  Description of Artificial Sequence: Synthetic oligonucleotide
  Sense strand starting at position 2199 of SEQ ID NO: 915314
acuuuaauccugggaggca

SEQ ID NO: 1070655 - RNA, 19 nt, Artificial Sequence
  Description of Artificial Sequence: Synthetic oligonucleotide
  Antisense strand to SEQ ID NO: 1070654
ugccucccaggauuaaagu

SEQ ID NO: 1070656 - RNA, 19 nt, Artificial Sequence
  Description of Artificial Sequence: Synthetic oligonucleotide
  Sense strand starting at position 2219 of SEQ ID NO: 915314
gcacgauaguugcccauuu

SEQ ID NO: 1070657 - RNA, 19 nt, Artificial Sequence
  Description of Artificial Sequence: Synthetic oligonucleotide
  Antisense strand to SEQ ID NO: 1070656
aaaugggcaacuaucgugc

SEQ ID NO: 1070658 - RNA, 19 nt, Artificial Sequence
  Description of Artificial Sequence: Synthetic oligonucleotide
  Sense strand starting at position 2263 of SEQ ID NO: 915314
aagugacuugcuuguugua

SEQ ID NO: 1070659 - RNA, 19 nt, Artificial Sequence
  Description of Artificial Sequence: Synthetic oligonucleotide
  Antisense strand to SEQ ID NO: 1070658
uacaacaagcaagucacuu

SEQ ID NO: 1070660 - RNA, 19 nt, Artificial Sequence
  Description of Artificial Sequence: Synthetic oligonucleotide
  Sense strand starting at position 2275 of SEQ ID NO: 915314
uguuguaguuugcuagaaa

SEQ ID NO: 1070661 - RNA, 19 nt, Artificial Sequence
  Description of Artificial Sequence: Synthetic oligonucleotide
  Antisense strand to SEQ ID NO: 1070660
uuucuagcaaacuacaaca

SEQ ID NO: 1070662 - RNA, 19 nt, Artificial Sequence
  Description of Artificial Sequence: Synthetic oligonucleotide
  Sense strand starting at position 2302 of SEQ ID NO: 915314
gagagaaucucagcuguau

SEQ ID NO: 1070663 - RNA, 19 nt, Artificial Sequence
  Description of Artificial Sequence: Synthetic oligonucleotide
  Antisense strand to SEQ ID NO: 1070662
auacagcugagauucucuc

SEQ ID NO: 1070664 - RNA, 19 nt, Artificial Sequence
  Description of Artificial Sequence: Synthetic oligonucleotide
  Sense strand starting at position 2306 of SEQ ID NO: 915314
gaaucucagcuguaugagu

SEQ ID NO: 1070665 - RNA, 19 nt, Artificial Sequence
  Description of Artificial Sequence: Synthetic oligonucleotide
  Antisense strand to SEQ ID NO: 1070664
acucauacagcugagauuc

SEQ ID NO: 1070666 - RNA, 19 nt, Artificial Sequence
  Description of Artificial Sequence: Synthetic oligonucleotide
  Sense strand starting at position 2315 of SEQ ID NO: 915314
cuguaugaguggcuucagu

SEQ ID NO: 1070667 - RNA, 19 nt, Artificial Sequence
  Description of Artificial Sequence: Synthetic oligonucleotide
  Antisense strand to SEQ ID NO: 1070666
acugaagccacucauacag

SEQ ID NO: 1070668 - RNA, 19 nt, Artificial Sequence
  Description of Artificial Sequence: Synthetic oligonucleotide
  Sense strand starting at position 2356 of SEQ ID NO: 915314
ugucguucugacuagggau

SEQ ID NO: 1070669 - RNA, 19 nt, Artificial Sequence
  Description of Artificial Sequence: Synthetic oligonucleotide
  Antisense strand to SEQ ID NO: 1070668
aucccuagucagaacgaca

SEQ ID NO: 1070670 - RNA, 19 nt, Artificial Sequence
  Description of Artificial Sequence: Synthetic oligonucleotide
  Sense strand starting at position 2394 of SEQ ID NO: 915314
agagaaaccuugucugcau

SEQ ID NO: 1070671 - RNA, 19 nt, Artificial Sequence
  Description of Artificial Sequence: Synthetic oligonucleotide
  Antisense strand to SEQ ID NO: 1070670
augcagacaagguuucucu

SEQ ID NO: 1070672 - RNA, 19 nt, Artificial Sequence
  Description of Artificial Sequence: Synthetic oligonucleotide
  Sense strand starting at position 2395 of SEQ ID NO: 915314
gagaaaccuugucugcauc

SEQ ID NO: 1070673 - RNA, 19 nt, Artificial Sequence
  Description of Artificial Sequence: Synthetic oligonucleotide
  Antisense strand to SEQ ID NO: 1070672
gaugcagacaagguuucuc

SEQ ID NO: 1070674 - RNA, 19 nt, Artificial Sequence
  Description of Artificial Sequence: Synthetic oligonucleotide
  Sense strand starting at position 2396 of SEQ ID NO: 915314
agaaaccuugucugcauca

SEQ ID NO: 1070675 - RNA, 19 nt, Artificial Sequence
  Description of Artificial Sequence: Synthetic oligonucleotide
  Antisense strand to SEQ ID NO: 1070674
ugaugcagacaagguuucu

SEQ ID NO: 1070676 - RNA, 19 nt, Artificial Sequence
  Description of Artificial Sequence: Synthetic oligonucleotide
  Sense strand starting at position 2401 of SEQ ID NO: 915314
ccuugucugcaucagguaa

SEQ ID NO: 1070677 - RNA, 19 nt, Artificial Sequence
  Description of Artificial Sequence: Synthetic oligonucleotide
  Antisense strand to SEQ ID NO: 1070676
uuaccugaugcagacaagg

SEQ ID NO: 1070678 - RNA, 19 nt, Artificial Sequence
  Description of Artificial Sequence: Synthetic oligonucleotide
  Sense strand starting at position 2414 of SEQ ID NO: 915314
agguaaggucccuauugcu

SEQ ID NO: 1070679 - RNA, 19 nt, Artificial Sequence
  Description of Artificial Sequence: Synthetic oligonucleotide
  Antisense strand to SEQ ID NO: 1070678
agcaauagggaccuuaccu

SEQ ID NO: 1070680 - RNA, 19 nt, Artificial Sequence
  Description of Artificial Sequence: Synthetic oligonucleotide
  Sense strand starting at position 2421 of SEQ ID NO: 915314
gucccuauugcucaguacu

SEQ ID NO: 1070681 - RNA, 19 nt, Artificial Sequence
  Description of Artificial Sequence: Synthetic oligonucleotide
  Antisense strand to SEQ ID NO: 1070680
aguacugagcaauagggac

SEQ ID NO: 1070682 - RNA, 19 nt, Artificial Sequence
  Description of Artificial Sequence: Synthetic oligonucleotide
  Sense strand starting at position 2437 of SEQ ID NO: 915314
acucuuggucuggaacuau

SEQ ID NO: 1070683 - RNA, 19 nt, Artificial Sequence
  Description of Artificial Sequence: Synthetic oligonucleotide
  Antisense strand to SEQ ID NO: 1070682
auaguuccagaccaagagu

SEQ ID NO: 1070684 - RNA, 19 nt, Artificial Sequence
  Description of Artificial Sequence: Synthetic oligonucleotide
  Sense strand starting at position 2451 of SEQ ID NO: 915314
acuauaaaggcuggauuau

SEQ ID NO: 1070685 - RNA, 19 nt, Artificial Sequence
  Description of Artificial Sequence: Synthetic oligonucleotide
  Antisense strand to SEQ ID NO: 1070684
auaauccagccuuuauagu

SEQ ID NO: 1070686 - RNA, 19 nt, Artificial Sequence
  Description of Artificial Sequence: Synthetic oligonucleotide
  Sense strand starting at position 2460 of SEQ ID NO: 915314
gcuggauuauaguuccaga

SEQ ID NO: 1070687 - RNA, 19 nt, Artificial Sequence
  Description of Artificial Sequence: Synthetic oligonucleotide
  Antisense strand to SEQ ID NO: 1070686
ucuggaacuauaauccagc

SEQ ID NO: 1070688 - RNA, 19 nt, Artificial Sequence
  Description of Artificial Sequence: Synthetic oligonucleotide
  Sense strand starting at position 2463 of SEQ ID NO: 915314
ggauuauaguuccagauca

SEQ ID NO: 1070689 - RNA, 19 nt, Artificial Sequence
  Description of Artificial Sequence: Synthetic oligonucleotide
  Antisense strand to SEQ ID NO: 1070688
ugaucuggaacuauaaucc

SEQ ID NO: 1070690 - RNA, 19 nt, Artificial Sequence
  Description of Artificial Sequence: Synthetic oligonucleotide
  Sense strand starting at position 2476 of SEQ ID NO: 915314
agaucaagucuuuggucuu

SEQ ID NO: 1070691 - RNA, 19 nt, Artificial Sequence
  Description of Artificial Sequence: Synthetic oligonucleotide
  Antisense strand to SEQ ID NO: 1070690
aagaccaaagacuugaucu

SEQ ID NO: 1070692 - RNA, 19 nt, Artificial Sequence
  Description of Artificial Sequence: Synthetic oligonucleotide
  Sense strand starting at position 2567 of SEQ ID NO: 915314
uuaugaaggaugcauguuu

SEQ ID NO: 1070693 - RNA, 19 nt, Artificial Sequence
  Description of Artificial Sequence: Synthetic oligonucleotide
  Antisense strand to SEQ ID NO: 1070692
aaacaugcauccuucauaa

SEQ ID NO: 1070694 - RNA, 19 nt, Artificial Sequence
  Description of Artificial Sequence: Synthetic oligonucleotide
  Sense strand starting at position 2580 of SEQ ID NO: 915314
auguuuaguuugccuaaac

SEQ ID NO: 1070695 - RNA, 19 nt, Artificial Sequence
  Description of Artificial Sequence: Synthetic oligonucleotide
  Antisense strand to SEQ ID NO: 1070694
guuuaggcaaacuaaacau

SEQ ID NO: 1070696 - RNA, 19 nt, Artificial Sequence
  Description of Artificial Sequence: Synthetic oligonucleotide
  Sense strand starting at position 2581 of SEQ ID NO: 915314
uguuuaguuugccuaaaca

SEQ ID NO: 1070697 - RNA, 19 nt, Artificial Sequence
  Description of Artificial Sequence: Synthetic oligonucleotide
  Antisense strand to SEQ ID NO: 1070696
uguuuaggcaaacuaaaca

SEQ ID NO: 1070698 - RNA, 19 nt, Artificial Sequence
  Description of Artificial Sequence: Synthetic oligonucleotide
  Sense strand starting at position 2815 of SEQ ID NO: 915314
gacacucguuagucacaga

SEQ ID NO: 1070699 - RNA, 19 nt, Artificial Sequence
  Description of Artificial Sequence: Synthetic oligonucleotide
  Antisense strand to SEQ ID NO: 1070698
ucugugacuaacgaguguc

SEQ ID NO: 1070700 - RNA, 19 nt, Artificial Sequence
  Description of Artificial Sequence: Synthetic oligonucleotide
  Sense strand starting at position 2820 of SEQ ID NO: 915314
ucguuagucacagagaauc

SEQ ID NO: 1070701 - RNA, 19 nt, Artificial Sequence
  Description of Artificial Sequence: Synthetic oligonucleotide
  Antisense strand to SEQ ID NO: 1070700
gauucucugugacuaacga

SEQ ID NO: 1070702 - RNA, 19 nt, Artificial Sequence
  Description of Artificial Sequence: Synthetic oligonucleotide
  Sense strand starting at position 2831 of SEQ ID NO: 915314
agagaaucucccugcgaga

SEQ ID NO: 1070703 - RNA, 19 nt, Artificial Sequence
  Description of Artificial Sequence: Synthetic oligonucleotide
  Antisense strand to SEQ ID NO: 1070702
ucucgcagggagauucucu

SEQ ID NO: 1070704 - RNA, 19 nt, Artificial Sequence
  Description of Artificial Sequence: Synthetic oligonucleotide
  Sense strand starting at position 2833 of SEQ ID NO: 915314
agaaucucccugcgagacu

SEQ ID NO: 1070705 - RNA, 19 nt, Artificial Sequence
  Description of Artificial Sequence: Synthetic oligonucleotide
  Antisense strand to SEQ ID NO: 1070704
agucucgcagggagauucu

SEQ ID NO: 1070706 - RNA, 19 nt, Artificial Sequence
  Description of Artificial Sequence: Synthetic oligonucleotide
  Sense strand starting at position 2920 of SEQ ID NO: 915314
gauagcugcccucacugau

SEQ ID NO: 1070707 - RNA, 19 nt, Artificial Sequence
  Description of Artificial Sequence: Synthetic oligonucleotide
  Antisense strand to SEQ ID NO: 1070706
aucagugagggcagcuauc

SEQ ID NO: 1070708 - RNA, 19 nt, Artificial Sequence
  Description of Artificial Sequence: Synthetic oligonucleotide
  Sense strand starting at position 3036 of SEQ ID NO: 915314
gcagguccucagugaauau

SEQ ID NO: 1070709 - RNA, 19 nt, Artificial Sequence
  Description of Artificial Sequence: Synthetic oligonucleotide
  Antisense strand to SEQ ID NO: 1070708
auauucacugaggaccugc

SEQ ID NO: 1070710 - RNA, 19 nt, Artificial Sequence
  Description of Artificial Sequence: Synthetic oligonucleotide
  Sense strand starting at position 3412 of SEQ ID NO: 915314
cuuggcuucuggcucuaaa

SEQ ID NO: 1070711 - RNA, 19 nt, Artificial Sequence
  Description of Artificial Sequence: Synthetic oligonucleotide
  Antisense strand to SEQ ID NO: 1070710
uuuagagccagaagccaag

SEQ ID NO: 1070712 - RNA, 19 nt, Artificial Sequence
  Description of Artificial Sequence: Synthetic oligonucleotide
  Sense strand starting at position 3499 of SEQ ID NO: 915314
ugggaauaauaaugauacu

SEQ ID NO: 1070713 - RNA, 19 nt, Artificial Sequence
  Description of Artificial Sequence: Synthetic oligonucleotide
  Antisense strand to SEQ ID NO: 1070712
aguaucauuauuauuccca

SEQ ID NO: 1070714 - RNA, 19 nt, Artificial Sequence
  Description of Artificial Sequence: Synthetic oligonucleotide
  Sense strand starting at position 3515 of SEQ ID NO: 915314
acuuguggugaauaggauu

SEQ ID NO: 1070715 - RNA, 19 nt, Artificial Sequence
  Description of Artificial Sequence: Synthetic oligonucleotide
  Antisense strand to SEQ ID NO: 1070714
aauccuauucaccacaagu

SEQ ID NO: 1070716 - RNA, 19 nt, Artificial Sequence
  Description of Artificial Sequence: Synthetic oligonucleotide
  Sense strand starting at position 3533 of SEQ ID NO: 915314
uuugcaguauugcuuugaa

SEQ ID NO: 1070717 - RNA, 19 nt, Artificial Sequence
  Description of Artificial Sequence: Synthetic oligonucleotide
  Antisense strand to SEQ ID NO: 1070716
uucaaagcaauacugcaaa

SEQ ID NO: 1070718 - RNA, 19 nt, Artificial Sequence
  Description of Artificial Sequence: Synthetic oligonucleotide
  Sense strand starting at position 3536 of SEQ ID NO: 915314
gcaguauugcuuugaaauu

SEQ ID NO: 1070719 - RNA, 19 nt, Artificial Sequence
  Description of Artificial Sequence: Synthetic oligonucleotide
  Antisense strand to SEQ ID NO: 1070718
aauuucaaagcaauacugc

SEQ ID NO: 1070720 - RNA, 19 nt, Artificial Sequence
  Description of Artificial Sequence: Synthetic oligonucleotide
  Sense strand starting at position 12 of SEQ ID NO: 915315
ccaugagacaugugcugca

SEQ ID NO: 1070721 - RNA, 19 nt, Artificial Sequence
  Description of Artificial Sequence: Synthetic oligonucleotide
  Antisense strand to SEQ ID NO: 1070720
ugcagcacaugucucaugg

SEQ ID NO: 1070722 - RNA, 19 nt, Artificial Sequence
  Description of Artificial Sequence: Synthetic oligonucleotide
  Sense strand starting at position 78 of SEQ ID NO: 915315
cacccuguucuuggcagaa

SEQ ID NO: 1070723 - RNA, 19 nt, Artificial Sequence
  Description of Artificial Sequence: Synthetic oligonucleotide
  Antisense strand to SEQ ID NO: 1070722
uucugccaagaacagggug

SEQ ID NO: 1070724 - RNA, 19 nt, Artificial Sequence
  Description of Artificial Sequence: Synthetic oligonucleotide
  Sense strand starting at position 82 of SEQ ID NO: 915315
cuguucuuggcagaauucu

SEQ ID NO: 1070725 - RNA, 19 nt, Artificial Sequence
  Description of Artificial Sequence: Synthetic oligonucleotide
  Antisense strand to SEQ ID NO: 1070724
agaauucugccaagaacag

SEQ ID NO: 1070726 - RNA, 19 nt, Artificial Sequence
  Description of Artificial Sequence: Synthetic oligonucleotide
  Sense strand starting at position 91 of SEQ ID NO: 915315
gcagaauucucaccacagg

SEQ ID NO: 1070727 - RNA, 19 nt, Artificial Sequence
  Description of Artificial Sequence: Synthetic oligonucleotide
  Antisense strand to SEQ ID NO: 1070726
ccuguggugagaauucugc

SEQ ID NO: 1070728 - RNA, 19 nt, Artificial Sequence
  Description of Artificial Sequence: Synthetic oligonucleotide
  Sense strand starting at position 133 of SEQ ID NO: 915315
guaggaucccgucauugag

SEQ ID NO: 1070729 - RNA, 19 nt, Artificial Sequence
  Description of Artificial Sequence: Synthetic oligonucleotide
  Antisense strand to SEQ ID NO: 1070728
cucaaugacgggauccuac

SEQ ID NO: 1070730 - RNA, 19 nt, Artificial Sequence
  Description of Artificial Sequence: Synthetic oligonucleotide
  Sense strand starting at position 160 of SEQ ID NO: 915315
gcagguuagaggcagagua

SEQ ID NO: 1070731 - RNA, 19 nt, Artificial Sequence
  Description of Artificial Sequence: Synthetic oligonucleotide
  Antisense strand to SEQ ID NO: 1070730
uacucugccucuaaccugc

SEQ ID NO: 1070732 - RNA, 19 nt, Artificial Sequence
  Description of Artificial Sequence: Synthetic oligonucleotide
  Sense strand starting at position 265 of SEQ ID NO: 915315
gucacaugcucugcucaga

SEQ ID NO: 1070733 - RNA, 19 nt, Artificial Sequence
  Description of Artificial Sequence: Synthetic oligonucleotide
  Antisense strand to SEQ ID NO: 1070732
ucugagcagagcaugugac

SEQ ID NO: 1070734 - RNA, 19 nt, Artificial Sequence
  Description of Artificial Sequence: Synthetic oligonucleotide
  Sense strand starting at position 387 of SEQ ID NO: 915315
gggucaaucucagugacaa

SEQ ID NO: 1070735 - RNA, 19 nt, Artificial Sequence
  Description of Artificial Sequence: Synthetic oligonucleotide
  Antisense strand to SEQ ID NO: 1070734
uugucacugagauugaccc

SEQ ID NO: 1070736 - RNA, 19 nt, Artificial Sequence
  Description of Artificial Sequence: Synthetic oligonucleotide
  Sense strand starting at position 388 of SEQ ID NO: 915315
ggucaaucucagugacaag

SEQ ID NO: 1070737 - RNA, 19 nt, Artificial Sequence
  Description of Artificial Sequence: Synthetic oligonucleotide
  Antisense strand to SEQ ID NO: 1070736
cuugucacugagauugacc

SEQ ID NO: 1070738 - RNA, 19 nt, Artificial Sequence
  Description of Artificial Sequence: Synthetic oligonucleotide
  Sense strand starting at position 421 of SEQ ID NO: 915315
gcuggauggcacuggucau

SEQ ID NO: 1070739 - RNA, 19 nt, Artificial Sequence
  Description of Artificial Sequence: Synthetic oligonucleotide
  Antisense strand to SEQ ID NO: 1070738
augaccagugccauccagc

SEQ ID NO: 1070740 - RNA, 19 nt, Artificial Sequence
  Description of Artificial Sequence: Synthetic oligonucleotide
  Sense strand starting at position 891 of SEQ ID NO: 915315
acagcagucacugggcaaa

SEQ ID NO: 1070741 - RNA, 19 nt, Artificial Sequence
  Description of Artificial Sequence: Synthetic oligonucleotide
  Antisense strand to SEQ ID NO: 1070740
uuugcccagugacugcugu

SEQ ID NO: 1070742 - RNA, 19 nt, Artificial Sequence
  Description of Artificial Sequence: Synthetic oligonucleotide
  Sense strand starting at position 920 of SEQ ID NO: 915315
guaguuacaaucugggaau

SEQ ID NO: 1070743 - RNA, 19 nt, Artificial Sequence
  Description of Artificial Sequence: Synthetic oligonucleotide
  Antisense strand to SEQ ID NO: 1070742
auucccagauuguaacuac

SEQ ID NO: 1070744 - RNA, 19 nt, Artificial Sequence
  Description of Artificial Sequence: Synthetic oligonucleotide
  Sense strand starting at position 923 of SEQ ID NO: 915315
guuacaaucugggaauccu

SEQ ID NO: 1070745 - RNA, 19 nt, Artificial Sequence
  Description of Artificial Sequence: Synthetic oligonucleotide
  Antisense strand to SEQ ID NO: 1070744
aggauucccagauuguaac

SEQ ID NO: 1070746 - RNA, 19 nt, Artificial Sequence
  Description of Artificial Sequence: Synthetic oligonucleotide
  Sense strand starting at position 939 of SEQ ID NO: 915315
ccuggaaucugggagaucu

SEQ ID NO: 1070747 - RNA, 19 nt, Artificial Sequence
  Description of Artificial Sequence: Synthetic oligonucleotide
  Antisense strand to SEQ ID NO: 1070746
agaucucccagauuccagg

SEQ ID NO: 1070748 - RNA, 19 nt, Artificial Sequence
  Description of Artificial Sequence: Synthetic oligonucleotide
  Sense strand starting at position 983 of SEQ ID NO: 915315
aucagugacuguucucuaa

SEQ ID NO: 1070749 - RNA, 19 nt, Artificial Sequence
  Description of Artificial Sequence: Synthetic oligonucleotide
  Antisense strand to SEQ ID NO: 1070748
uuagagaacagucacugau

SEQ ID NO: 1070750 - RNA, 19 nt, Artificial Sequence
  Description of Artificial Sequence: Synthetic oligonucleotide
  Sense strand starting at position 986 of SEQ ID NO: 915315
agugacuguucucuaaccu

SEQ ID NO: 1070751 - RNA, 19 nt, Artificial Sequence
  Description of Artificial Sequence: Synthetic oligonucleotide
  Antisense strand to SEQ ID NO: 1070750
agguuagagaacagucacu

SEQ ID NO: 1070752 - RNA, 19 nt, Artificial Sequence
  Description of Artificial Sequence: Synthetic oligonucleotide
  Sense strand starting at position 987 of SEQ ID NO: 915315
gugacuguucucuaaccuc

SEQ ID NO: 1070753 - RNA, 19 nt, Artificial Sequence
  Description of Artificial Sequence: Synthetic oligonucleotide
  Antisense strand to SEQ ID NO: 1070752
gagguuagagaacagucac

SEQ ID NO: 1070754 - RNA, 19 nt, Artificial Sequence
  Description of Artificial Sequence: Synthetic oligonucleotide
  Sense strand starting at position 1008 of SEQ ID NO: 915315
ugagcuucuuccuuaaaug

SEQ ID NO: 1070755 - RNA, 19 nt, Artificial Sequence
  Description of Artificial Sequence: Synthetic oligonucleotide
  Antisense strand to SEQ ID NO: 1070754
cauuuaaggaagaagcuca

SEQ ID NO: 1070756 - RNA, 19 nt, Artificial Sequence
  Description of Artificial Sequence: Synthetic oligonucleotide
  Sense strand starting at position 1116 of SEQ ID NO: 915315
aguagugaauacucagaua

SEQ ID NO: 1070757 - RNA, 19 nt, Artificial Sequence
  Description of Artificial Sequence: Synthetic oligonucleotide
  Antisense strand to SEQ ID NO: 1070756
uaucugaguauucacuacu

SEQ ID NO: 1070758 - RNA, 19 nt, Artificial Sequence
  Description of Artificial Sequence: Synthetic oligonucleotide
  Sense strand starting at position 1119 of SEQ ID NO: 915315
agugaauacucagauaagg

SEQ ID NO: 1070759 - RNA, 19 nt, Artificial Sequence
  Description of Artificial Sequence: Synthetic oligonucleotide
  Antisense strand to SEQ ID NO: 1070758
ccuuaucugaguauucacu

SEQ ID NO: 1070760 - RNA, 19 nt, Artificial Sequence
  Description of Artificial Sequence: Synthetic oligonucleotide
  Sense strand starting at position 1400 of SEQ ID NO: 915315
gugagcaucugccucacau

SEQ ID NO: 1070761 - RNA, 19 nt, Artificial Sequence
  Description of Artificial Sequence: Synthetic oligonucleotide
  Antisense strand to SEQ ID NO: 1070760
augugaggcagaugcucac

SEQ ID NO: 1070762 - RNA, 19 nt, Artificial Sequence
  Description of Artificial Sequence: Synthetic oligonucleotide
  Sense strand starting at position 2022 of SEQ ID NO: 915315
cgcaguuaaagcuccggua

SEQ ID NO: 1070763 - RNA, 19 nt, Artificial Sequence
  Description of Artificial Sequence: Synthetic oligonucleotide
  Antisense strand to SEQ ID NO: 1070762
uaccggagcuuuaacugcg

SEQ ID NO: 1070764 - RNA, 19 nt, Artificial Sequence
  Description of Artificial Sequence: Synthetic oligonucleotide
  Sense strand starting at position 2024 of SEQ ID NO: 915315
caguuaaagcuccgguaaa

SEQ ID NO: 1070765 - RNA, 19 nt, Artificial Sequence
  Description of Artificial Sequence: Synthetic oligonucleotide
  Antisense strand to SEQ ID NO: 1070764
uuuaccggagcuuuaacug

SEQ ID NO: 1070766 - RNA, 19 nt, Artificial Sequence
  Description of Artificial Sequence: Synthetic oligonucleotide
  Sense strand starting at position 2093 of SEQ ID NO: 915315
gagucuuuccaauggaacg

SEQ ID NO: 1070767 - RNA, 19 nt, Artificial Sequence
  Description of Artificial Sequence: Synthetic oligonucleotide
  Antisense strand to SEQ ID NO: 1070766
cguuccauuggaaagacuc

SEQ ID NO: 1070768 - RNA, 19 nt, Artificial Sequence
  Description of Artificial Sequence: Synthetic oligonucleotide
  Sense strand starting at position 2152 of SEQ ID NO: 915315
agagauagcgggugcuuga

SEQ ID NO: 1070769 - RNA, 19 nt, Artificial Sequence
  Description of Artificial Sequence: Synthetic oligonucleotide
  Antisense strand to SEQ ID NO: 1070768
ucaagcacccgcuaucucu

SEQ ID NO: 1070770 - RNA, 19 nt, Artificial Sequence
  Description of Artificial Sequence: Synthetic oligonucleotide
  Sense strand starting at position 2267 of SEQ ID NO: 915315
ccguuuccucaacaaaggu

SEQ ID NO: 1070771 - RNA, 19 nt, Artificial Sequence
  Description of Artificial Sequence: Synthetic oligonucleotide
  Antisense strand to SEQ ID NO: 1070770
accuuuguugaggaaacgg

SEQ ID NO: 1070772 - RNA, 19 nt, Artificial Sequence
  Description of Artificial Sequence: Synthetic oligonucleotide
  Sense strand starting at position 2321 of SEQ ID NO: 915315
ccucuagugccgucucgau

SEQ ID NO: 1070773 - RNA, 19 nt, Artificial Sequence
  Description of Artificial Sequence: Synthetic oligonucleotide
  Antisense strand to SEQ ID NO: 1070772
aucgagacggcacuagagg

SEQ ID NO: 1070774 - RNA, 19 nt, Artificial Sequence
  Description of Artificial Sequence: Synthetic oligonucleotide
  Sense strand starting at position 2502 of SEQ ID NO: 915315
cucggauuucccgaucugu

SEQ ID NO: 1070775 - RNA, 19 nt, Artificial Sequence
  Description of Artificial Sequence: Synthetic oligonucleotide
  Antisense strand to SEQ ID NO: 1070774
acagaucgggaaauccgag

SEQ ID NO: 1070776 - RNA, 19 nt, Artificial Sequence
  Description of Artificial Sequence: Synthetic oligonucleotide
  Sense strand starting at position 2537 of SEQ ID NO: 915315
agacuugauccuugaacuc

SEQ ID NO: 1070777 - RNA, 19 nt, Artificial Sequence
  Description of Artificial Sequence: Synthetic oligonucleotide
  Antisense strand to SEQ ID NO: 1070776
gaguucaaggaucaagucu

SEQ ID NO: 1070778 - RNA, 19 nt, Artificial Sequence
  Description of Artificial Sequence: Synthetic oligonucleotide
  Sense strand starting at position 2636 of SEQ ID NO: 915315
ggaguaucuucccaaacca

SEQ ID NO: 1070779 - RNA, 19 nt, Artificial Sequence
  Description of Artificial Sequence: Synthetic oligonucleotide
  Antisense strand to SEQ ID NO: 1070778
ugguuugggaagauacucc

SEQ ID NO: 1070780 - RNA, 19 nt, Artificial Sequence
  Description of Artificial Sequence: Synthetic oligonucleotide
  Sense strand starting at position 2811 of SEQ ID NO: 915315
augguacccugagaauagu

SEQ ID NO: 1070781 - RNA, 19 nt, Artificial Sequence
  Description of Artificial Sequence: Synthetic oligonucleotide
  Antisense strand to SEQ ID NO: 1070780
acuauucucaggguaccau

SEQ ID NO: 1070782 - RNA, 19 nt, Artificial Sequence
  Description of Artificial Sequence: Synthetic oligonucleotide
  Sense strand starting at position 2817 of SEQ ID NO: 915315
cccugagaauaguaauaca

SEQ ID NO: 1070783 - RNA, 19 nt, Artificial Sequence
  Description of Artificial Sequence: Synthetic oligonucleotide
  Antisense strand to SEQ ID NO: 1070782
uguauuacuauucucaggg

SEQ ID NO: 1070784 - RNA, 19 nt, Artificial Sequence
  Description of Artificial Sequence: Synthetic oligonucleotide
  Sense strand starting at position 3164 of SEQ ID NO: 915315
ggcaaaggucuuggagaac

SEQ ID NO: 1070785 - RNA, 19 nt, Artificial Sequence
  Description of Artificial Sequence: Synthetic oligonucleotide
  Antisense strand to SEQ ID NO: 1070784
guucuccaagaccuuugcc

SEQ ID NO: 1070786 - RNA, 19 nt, Artificial Sequence
  Description of Artificial Sequence: Synthetic oligonucleotide
  Sense strand starting at position 3198 of SEQ ID NO: 915315
gggcaucgucgacaucauu

SEQ ID NO: 1070787 - RNA, 19 nt, Artificial Sequence
  Description of Artificial Sequence: Synthetic oligonucleotide
  Antisense strand to SEQ ID NO: 1070786
aaugaugucgacgaugccc

SEQ ID NO: 1070788 - RNA, 19 nt, Artificial Sequence
  Description of Artificial Sequence: Synthetic oligonucleotide
  Sense strand starting at position 3435 of SEQ ID NO: 915315
ugaggcuccuuggucauaa

SEQ ID NO: 1070789 - RNA, 19 nt, Artificial Sequence
  Description of Artificial Sequence: Synthetic oligonucleotide
  Antisense strand to SEQ ID NO: 1070788
uuaugaccaaggagccuca

SEQ ID NO: 1070790 - RNA, 19 nt, Artificial Sequence
  Description of Artificial Sequence: Synthetic oligonucleotide
  Sense strand starting at position 3456 of SEQ ID NO: 915315
ccaguuagcaacugggauu

SEQ ID NO: 1070791 - RNA, 19 nt, Artificial Sequence
  Description of Artificial Sequence: Synthetic oligonucleotide
  Antisense strand to SEQ ID NO: 1070790
aaucccaguugcuaacugg

SEQ ID NO: 1070792 - RNA, 19 nt, Artificial Sequence
  Description of Artificial Sequence: Synthetic oligonucleotide
  Sense strand starting at position 3855 of SEQ ID NO: 915315
gcaccaacaccuuagugaa

SEQ ID NO: 1070793 - RNA, 19 nt, Artificial Sequence
  Description of Artificial Sequence: Synthetic oligonucleotide
  Antisense strand to SEQ ID NO: 1070792
uucacuaagguguuggugc

SEQ ID NO: 1070794 - RNA, 19 nt, Artificial Sequence
  Description of Artificial Sequence: Synthetic oligonucleotide
  Sense strand starting at position 3869 of SEQ ID NO: 915315
gugaacuuguuccucaaac

SEQ ID NO: 1070795 - RNA, 19 nt, Artificial Sequence
  Description of Artificial Sequence: Synthetic oligonucleotide
  Antisense strand to SEQ ID NO: 1070794
guuugaggaacaaguucac

SEQ ID NO: 1070796 - RNA, 19 nt, Artificial Sequence
  Description of Artificial Sequence: Synthetic oligonucleotide
  Sense strand starting at position 3943 of SEQ ID NO: 915315
gagagaauuugagguucuu

SEQ ID NO: 1070797 - RNA, 19 nt, Artificial Sequence
  Description of Artificial Sequence: Synthetic oligonucleotide
  Antisense strand to SEQ ID NO: 1070796
aagaaccucaaauucucuc

SEQ ID NO: 1070798 - RNA, 19 nt, Artificial Sequence
  Description of Artificial Sequence: Synthetic oligonucleotide
  Sense strand starting at position 3983 of SEQ ID NO: 915315
uccugauucugagagcaag

SEQ ID NO: 1070799 - RNA, 19 nt, Artificial Sequence
  Description of Artificial Sequence: Synthetic oligonucleotide
  Antisense strand to SEQ ID NO: 1070798
cuugcucucagaaucagga

SEQ ID NO: 1070800 - RNA, 19 nt, Artificial Sequence
  Description of Artificial Sequence: Synthetic oligonucleotide
  Sense strand starting at position 42 of SEQ ID NO: 915316
uugucaugguccucaucau

SEQ ID NO: 1070801 - RNA, 19 nt, Artificial Sequence
  Description of Artificial Sequence: Synthetic oligonucleotide
  Antisense strand to SEQ ID NO: 1070800
augaugaggaccaugacaa

SEQ ID NO: 1070802 - RNA, 19 nt, Artificial Sequence
  Description of Artificial Sequence: Synthetic oligonucleotide
  Sense strand starting at position 43 of SEQ ID NO: 915316
ugucaugguccucaucauu

SEQ ID NO: 1070803 - RNA, 19 nt, Artificial Sequence
  Description of Artificial Sequence: Synthetic oligonucleotide
  Antisense strand to SEQ ID NO: 1070802
aaugaugaggaccaugaca

SEQ ID NO: 1070804 - RNA, 19 nt, Artificial Sequence
  Description of Artificial Sequence: Synthetic oligonucleotide
  Sense strand starting at position 49 of SEQ ID NO: 915316
gguccucaucauuaucuga

SEQ ID NO: 1070805 - RNA, 19 nt, Artificial Sequence
  Description of Artificial Sequence: Synthetic oligonucleotide
  Antisense strand to SEQ ID NO: 1070804
ucagauaaugaugaggacc

SEQ ID NO: 1070806 - RNA, 19 nt, Artificial Sequence
  Description of Artificial Sequence: Synthetic oligonucleotide
  Sense strand starting at position 64 of SEQ ID NO: 915316
cugaaauucucuuacaugg

SEQ ID NO: 1070807 - RNA, 19 nt, Artificial Sequence
  Description of Artificial Sequence: Synthetic oligonucleotide
  Antisense strand to SEQ ID NO: 1070806
ccauguaagagaauuucag

SEQ ID NO: 1070808 - RNA, 19 nt, Artificial Sequence
  Description of Artificial Sequence: Synthetic oligonucleotide
  Sense strand starting at position 71 of SEQ ID NO: 915316
ucucuuacaugguuguuua

SEQ ID NO: 1070809 - RNA, 19 nt, Artificial Sequence
  Description of Artificial Sequence: Synthetic oligonucleotide
  Antisense strand to SEQ ID NO: 1070808
uaaacaaccauguaagaga

SEQ ID NO: 1070810 - RNA, 19 nt, Artificial Sequence
  Description of Artificial Sequence: Synthetic oligonucleotide
  Sense strand starting at position 72 of SEQ ID NO: 915316
cucuuacaugguuguuuau

SEQ ID NO: 1070811 - RNA, 19 nt, Artificial Sequence
  Description of Artificial Sequence: Synthetic oligonucleotide
  Antisense strand to SEQ ID NO: 1070810
auaaacaaccauguaagag

SEQ ID NO: 1070812 - RNA, 19 nt, Artificial Sequence
  Description of Artificial Sequence: Synthetic oligonucleotide
  Sense strand starting at position 78 of SEQ ID NO: 915316
caugguuguuuauuuguca

SEQ ID NO: 1070813 - RNA, 19 nt, Artificial Sequence
  Description of Artificial Sequence: Synthetic oligonucleotide
  Antisense strand to SEQ ID NO: 1070812
ugacaaauaaacaaccaug

SEQ ID NO: 1070814 - RNA, 19 nt, Artificial Sequence
  Description of Artificial Sequence: Synthetic oligonucleotide
  Sense strand starting at position 79 of SEQ ID NO: 915316
augguuguuuauuugucau

SEQ ID NO: 1070815 - RNA, 19 nt, Artificial Sequence
  Description of Artificial Sequence: Synthetic oligonucleotide
  Antisense strand to SEQ ID NO: 1070814
augacaaauaaacaaccau

SEQ ID NO: 1070816 - RNA, 19 nt, Artificial Sequence
  Description of Artificial Sequence: Synthetic oligonucleotide
  Sense strand starting at position 525 of SEQ ID NO: 915316
caggguguuugcuaucgga

SEQ ID NO: 1070817 - RNA, 19 nt, Artificial Sequence
  Description of Artificial Sequence: Synthetic oligonucleotide
  Antisense strand to SEQ ID NO: 1070816
uccgauagcaaacacccug

SEQ ID NO: 1070818 - RNA, 19 nt, Artificial Sequence
  Description of Artificial Sequence: Synthetic oligonucleotide
  Sense strand starting at position 528 of SEQ ID NO: 915316
gguguuugcuaucggaucu

SEQ ID NO: 1070819 - RNA, 19 nt, Artificial Sequence
  Description of Artificial Sequence: Synthetic oligonucleotide
  Antisense strand to SEQ ID NO: 1070818
agauccgauagcaaacacc

SEQ ID NO: 1070820 - RNA, 19 nt, Artificial Sequence
  Description of Artificial Sequence: Synthetic oligonucleotide
  Sense strand starting at position 535 of SEQ ID NO: 915316
gcuaucggaucucaaauaa

SEQ ID NO: 1070821 - RNA, 19 nt, Artificial Sequence
  Description of Artificial Sequence: Synthetic oligonucleotide
  Antisense strand to SEQ ID NO: 1070820
uuauuugagauccgauagc

SEQ ID NO: 1070822 - RNA, 19 nt, Artificial Sequence
  Description of Artificial Sequence: Synthetic oligonucleotide
  Sense strand starting at position 550 of SEQ ID NO: 915316
auaauaaagucagggugau

SEQ ID NO: 1070823 - RNA, 19 nt, Artificial Sequence
  Description of Artificial Sequence: Synthetic oligonucleotide
  Antisense strand to SEQ ID NO: 1070822
aucacccugacuuuauuau

SEQ ID NO: 1070824 - RNA, 19 nt, Artificial Sequence
  Description of Artificial Sequence: Synthetic oligonucleotide
  Sense strand starting at position 551 of SEQ ID NO: 915316
uaauaaagucagggugauc

SEQ ID NO: 1070825 - RNA, 19 nt, Artificial Sequence
  Description of Artificial Sequence: Synthetic oligonucleotide
  Antisense strand to SEQ ID NO: 1070824
gaucacccugacuuuauua

SEQ ID NO: 1070826 - RNA, 19 nt, Artificial Sequence
  Description of Artificial Sequence: Synthetic oligonucleotide
  Sense strand starting at position 554 of SEQ ID NO: 915316
uaaagucagggugaucuuu

SEQ ID NO: 1070827 - RNA, 19 nt, Artificial Sequence
  Description of Artificial Sequence: Synthetic oligonucleotide
  Antisense strand to SEQ ID NO: 1070826
aaagaucacccugacuuua

SEQ ID NO: 1070828 - RNA, 19 nt, Artificial Sequence
  Description of Artificial Sequence: Synthetic oligonucleotide
  Sense strand starting at position 768 of SEQ ID NO: 915316
cggaguucugucuuguugu

SEQ ID NO: 1070829 - RNA, 19 nt, Artificial Sequence
  Description of Artificial Sequence: Synthetic oligonucleotide
  Antisense strand to SEQ ID NO: 1070828
acaacaagacagaacuccg

SEQ ID NO: 1070830 - RNA, 19 nt, Artificial Sequence
  Description of Artificial Sequence: Synthetic oligonucleotide
  Sense strand starting at position 769 of SEQ ID NO: 915316
ggaguucugucuuguuguc

SEQ ID NO: 1070831 - RNA, 19 nt, Artificial Sequence
  Description of Artificial Sequence: Synthetic oligonucleotide
  Antisense strand to SEQ ID NO: 1070830
gacaacaagacagaacucc

SEQ ID NO: 1070832 - RNA, 19 nt, Artificial Sequence
  Description of Artificial Sequence: Synthetic oligonucleotide
  Sense strand starting at position 775 of SEQ ID NO: 915316
cugucuuguugucuuggaa

SEQ ID NO: 1070833 - RNA, 19 nt, Artificial Sequence
  Description of Artificial Sequence: Synthetic oligonucleotide
  Antisense strand to SEQ ID NO: 1070832
uuccaagacaacaagacag

SEQ ID NO: 1070834 - RNA, 19 nt, Artificial Sequence
  Description of Artificial Sequence: Synthetic oligonucleotide
  Sense strand starting at position 778 of SEQ ID NO: 915316
ucuuguugucuuggaaacu

SEQ ID NO: 1070835 - RNA, 19 nt, Artificial Sequence
  Description of Artificial Sequence: Synthetic oligonucleotide
  Antisense strand to SEQ ID NO: 1070834
aguuuccaagacaacaaga

SEQ ID NO: 1070836 - RNA, 19 nt, Artificial Sequence
  Description of Artificial Sequence: Synthetic oligonucleotide
  Sense strand starting at position 779 of SEQ ID NO: 915316
cuuguugucuuggaaacug

SEQ ID NO: 1070837 - RNA, 19 nt, Artificial Sequence
  Description of Artificial Sequence: Synthetic oligonucleotide
  Antisense strand to SEQ ID NO: 1070836
caguuuccaagacaacaag

SEQ ID NO: 1070838 - RNA, 19 nt, Artificial Sequence
  Description of Artificial Sequence: Synthetic oligonucleotide
  Sense strand starting at position 2085 of SEQ ID NO: 915316
uaagauuguggcugcccua

SEQ ID NO: 1070839 - RNA, 19 nt, Artificial Sequence
  Description of Artificial Sequence: Synthetic oligonucleotide
  Antisense strand to SEQ ID NO: 1070838
uagggcagccacaaucuua

SEQ ID NO: 1070840 - RNA, 19 nt, Artificial Sequence
  Description of Artificial Sequence: Synthetic oligonucleotide
  Sense strand starting at position 2129 of SEQ ID NO: 915316
ugaggcacuuuccacuaua

SEQ ID NO: 1070841 - RNA, 19 nt, Artificial Sequence
  Description of Artificial Sequence: Synthetic oligonucleotide
  Antisense strand to SEQ ID NO: 1070840
uauaguggaaagugccuca

SEQ ID NO: 1070842 - RNA, 19 nt, Artificial Sequence
  Description of Artificial Sequence: Synthetic oligonucleotide
  Sense strand starting at position 2274 of SEQ ID NO: 915316
agcaaugaccuggaagcuu

SEQ ID NO: 1070843 - RNA, 19 nt, Artificial Sequence
  Description of Artificial Sequence: Synthetic oligonucleotide
  Antisense strand to SEQ ID NO: 1070842
aagcuuccaggucauugcu

SEQ ID NO: 1070844 - RNA, 19 nt, Artificial Sequence
  Description of Artificial Sequence: Synthetic oligonucleotide
  Sense strand starting at position 2282 of SEQ ID NO: 915316
ccuggaagcuuauuuguuu

SEQ ID NO: 1070845 - RNA, 19 nt, Artificial Sequence
  Description of Artificial Sequence: Synthetic oligonucleotide
  Antisense strand to SEQ ID NO: 1070844
aaacaaauaagcuuccagg

SEQ ID NO: 1070846 - RNA, 19 nt, Artificial Sequence
  Description of Artificial Sequence: Synthetic oligonucleotide
  Sense strand starting at position 2398 of SEQ ID NO: 915316
uccuuacuuuccugacgga

SEQ ID NO: 1070847 - RNA, 19 nt, Artificial Sequence
  Description of Artificial Sequence: Synthetic oligonucleotide
  Antisense strand to SEQ ID NO: 1070846
uccgucaggaaaguaagga

SEQ ID NO: 1070848 - RNA, 19 nt, Artificial Sequence
  Description of Artificial Sequence: Synthetic oligonucleotide
  Sense strand starting at position 2401 of SEQ ID NO: 915316
uuacuuuccugacggaguu

SEQ ID NO: 1070849 - RNA, 19 nt, Artificial Sequence
  Description of Artificial Sequence: Synthetic oligonucleotide
  Antisense strand to SEQ ID NO: 1070848
aacuccgucaggaaaguaa

SEQ ID NO: 1070850 - RNA, 19 nt, Artificial Sequence
  Description of Artificial Sequence: Synthetic oligonucleotide
  Sense strand starting at position 3565 of SEQ ID NO: 915316
agcauucugugucuagaga

SEQ ID NO: 1070851 - RNA, 19 nt, Artificial Sequence
  Description of Artificial Sequence: Synthetic oligonucleotide
  Antisense strand to SEQ ID NO: 1070850
ucucuagacacagaaugcu

SEQ ID NO: 1070852 - RNA, 19 nt, Artificial Sequence
  Description of Artificial Sequence: Synthetic oligonucleotide
  Sense strand starting at position 3566 of SEQ ID NO: 915316
gcauucugugucuagagaa

SEQ ID NO: 1070853 - RNA, 19 nt, Artificial Sequence
  Description of Artificial Sequence: Synthetic oligonucleotide
  Antisense strand to SEQ ID NO: 1070852
uucucuagacacagaaugc

SEQ ID NO: 1070854 - RNA, 19 nt, Artificial Sequence
  Description of Artificial Sequence: Synthetic oligonucleotide
  Sense strand starting at position 3675 of SEQ ID NO: 915316
guguguggcgccaaauaag

SEQ ID NO: 1070855 - RNA, 19 nt, Artificial Sequence
  Description of Artificial Sequence: Synthetic oligonucleotide
  Antisense strand to SEQ ID NO: 1070854
cuuauuuggcgccacacac

SEQ ID NO: 1070856 - RNA, 19 nt, Artificial Sequence
  Description of Artificial Sequence: Synthetic oligonucleotide
  Sense strand starting at position 2576 of SEQ ID NO: 915318
agcugagcauuucgacaaa

SEQ ID NO: 1070857 - RNA, 19 nt, Artificial Sequence
  Description of Artificial Sequence: Synthetic oligonucleotide
  Antisense strand to SEQ ID NO: 1070856
uuugucgaaaugcucagcu

SEQ ID NO: 1070858 - RNA, 19 nt, Artificial Sequence
  Description of Artificial Sequence: Synthetic oligonucleotide
  Sense strand starting at position 193 of SEQ ID NO: 915319
cccagauggcuuuaaacuc

SEQ ID NO: 1070859 - RNA, 19 nt, Artificial Sequence
  Description of Artificial Sequence: Synthetic oligonucleotide
  Antisense strand to SEQ ID NO: 1070858
gaguuuaaagccaucuggg

SEQ ID NO: 1070860 - RNA, 19 nt, Artificial Sequence
  Description of Artificial Sequence: Synthetic oligonucleotide
  Sense strand starting at position 264 of SEQ ID NO: 915319
ggaguagugguggagguuu

SEQ ID NO: 1070861 - RNA, 19 nt, Artificial Sequence
  Description of Artificial Sequence: Synthetic oligonucleotide
  Antisense strand to SEQ ID NO: 1070860
aaaccuccaccacuacucc

SEQ ID NO: 1070862 - RNA, 19 nt, Artificial Sequence
  Description of Artificial Sequence: Synthetic oligonucleotide
  Sense strand starting at position 561 of SEQ ID NO: 915319
gccaguauacgcuuugcuu

SEQ ID NO: 1070863 - RNA, 19 nt, Artificial Sequence
  Description of Artificial Sequence: Synthetic oligonucleotide
  Antisense strand to SEQ ID NO: 1070862
aagcaaagcguauacuggc

SEQ ID NO: 1070864 - RNA, 19 nt, Artificial Sequence
  Description of Artificial Sequence: Synthetic oligonucleotide
  Sense strand starting at position 562 of SEQ ID NO: 915319
ccaguauacgcuuugcuuu

SEQ ID NO: 1070865 - RNA, 19 nt, Artificial Sequence
  Description of Artificial Sequence: Synthetic oligonucleotide
  Antisense strand to SEQ ID NO: 1070864
aaagcaaagcguauacugg

SEQ ID NO: 1070866 - RNA, 19 nt, Artificial Sequence
  Description of Artificial Sequence: Synthetic oligonucleotide
  Sense strand starting at position 599 of SEQ ID NO: 915319
augagacucucagucacua

SEQ ID NO: 1070867 - RNA, 19 nt, Artificial Sequence
  Description of Artificial Sequence: Synthetic oligonucleotide
  Antisense strand to SEQ ID NO: 1070866
uagugacugagagucucau

SEQ ID NO: 1070868 - RNA, 19 nt, Artificial Sequence
  Description of Artificial Sequence: Synthetic oligonucleotide
  Sense strand starting at position 620 of SEQ ID NO: 915319
caggucuaguuucuagaaa

SEQ ID NO: 1070869 - RNA, 19 nt, Artificial Sequence
  Description of Artificial Sequence: Synthetic oligonucleotide
  Antisense strand to SEQ ID NO: 1070868
uuucuagaaacuagaccug

SEQ ID NO: 1070870 - RNA, 19 nt, Artificial Sequence
  Description of Artificial Sequence: Synthetic oligonucleotide
  Sense strand starting at position 730 of SEQ ID NO: 915319
gaggguaaauaauaggaua

SEQ ID NO: 1070871 - RNA, 19 nt, Artificial Sequence
  Description of Artificial Sequence: Synthetic oligonucleotide
  Antisense strand to SEQ ID NO: 1070870
uauccuauuauuuacccuc

SEQ ID NO: 1070872 - RNA, 19 nt, Artificial Sequence
  Description of Artificial Sequence: Synthetic oligonucleotide
  Sense strand starting at position 800 of SEQ ID NO: 915319
ugugaaagcuuggcaaaug

SEQ ID NO: 1070873 - RNA, 19 nt, Artificial Sequence
  Description of Artificial Sequence: Synthetic oligonucleotide
  Antisense strand to SEQ ID NO: 1070872
cauuugccaagcuuucaca

SEQ ID NO: 1070874 - RNA, 19 nt, Artificial Sequence
  Description of Artificial Sequence: Synthetic oligonucleotide
  Sense strand starting at position 812 of SEQ ID NO: 915319
gcaaauguaucacugagaa

SEQ ID NO: 1070875 - RNA, 19 nt, Artificial Sequence
  Description of Artificial Sequence: Synthetic oligonucleotide
  Antisense strand to SEQ ID NO: 1070874
uucucagugauacauuugc

SEQ ID NO: 1070876 - RNA, 19 nt, Artificial Sequence
  Description of Artificial Sequence: Synthetic oligonucleotide
  Sense strand starting at position 847 of SEQ ID NO: 915319
auacccguccuuuaagaau

SEQ ID NO: 1070877 - RNA, 19 nt, Artificial Sequence
  Description of Artificial Sequence: Synthetic oligonucleotide
  Antisense strand to SEQ ID NO: 1070876
auucuuaaaggacggguau

SEQ ID NO: 1070878 - RNA, 19 nt, Artificial Sequence
  Description of Artificial Sequence: Synthetic oligonucleotide
  Sense strand starting at position 1658 of SEQ ID NO: 915319
agaauagggucaggauuua

SEQ ID NO: 1070879 - RNA, 19 nt, Artificial Sequence
  Description of Artificial Sequence: Synthetic oligonucleotide
  Antisense strand to SEQ ID NO: 1070878
uaaauccugacccuauucu

SEQ ID NO: 1070880 - RNA, 19 nt, Artificial Sequence
  Description of Artificial Sequence: Synthetic oligonucleotide
  Sense strand starting at position 1683 of SEQ ID NO: 915319
ugaagaagccucgggcaaa

SEQ ID NO: 1070881 - RNA, 19 nt, Artificial Sequence
  Description of Artificial Sequence: Synthetic oligonucleotide
  Antisense strand to SEQ ID NO: 1070880
uuugcccgaggcuucuuca

SEQ ID NO: 1070882 - RNA, 19 nt, Artificial Sequence
  Description of Artificial Sequence: Synthetic oligonucleotide
  Sense strand starting at position 1694 of SEQ ID NO: 915319
cgggcaaacucuuuggaca

SEQ ID NO: 1070883 - RNA, 19 nt, Artificial Sequence
  Description of Artificial Sequence: Synthetic oligonucleotide
  Antisense strand to SEQ ID NO: 1070882
uguccaaagaguuugcccg

SEQ ID NO: 1070884 - RNA, 19 nt, Artificial Sequence
  Description of Artificial Sequence: Synthetic oligonucleotide
  Sense strand starting at position 1695 of SEQ ID NO: 915319
gggcaaacucuuuggacag

SEQ ID NO: 1070885 - RNA, 19 nt, Artificial Sequence
  Description of Artificial Sequence: Synthetic oligonucleotide
  Antisense strand to SEQ ID NO: 1070884
cuguccaaagaguuugccc

SEQ ID NO: 1070886 - RNA, 19 nt, Artificial Sequence
  Description of Artificial Sequence: Synthetic oligonucleotide
  Sense strand starting at position 2540 of SEQ ID NO: 915319
caccuucuggccugagaga

SEQ ID NO: 1070887 - RNA, 19 nt, Artificial Sequence
  Description of Artificial Sequence: Synthetic oligonucleotide
  Antisense strand to SEQ ID NO: 1070886
ucucucaggccagaaggug

SEQ ID NO: 1070888 - RNA, 19 nt, Artificial Sequence
  Description of Artificial Sequence: Synthetic oligonucleotide
  Sense strand starting at position 2824 of SEQ ID NO: 915319
uuggcuucuccauaaggga

SEQ ID NO: 1070889 - RNA, 19 nt, Artificial Sequence
  Description of Artificial Sequence: Synthetic oligonucleotide
  Antisense strand to SEQ ID NO: 1070888
ucccuuauggagaagccaa

SEQ ID NO: 1070890 - RNA, 19 nt, Artificial Sequence
  Description of Artificial Sequence: Synthetic oligonucleotide
  Sense strand starting at position 2893 of SEQ ID NO: 915319
gauaauaucugagaauagg

SEQ ID NO: 1070891 - RNA, 19 nt, Artificial Sequence
  Description of Artificial Sequence: Synthetic oligonucleotide
  Antisense strand to SEQ ID NO: 1070890
ccuauucucagauauuauc

SEQ ID NO: 1070892 - RNA, 19 nt, Artificial Sequence
  Description of Artificial Sequence: Synthetic oligonucleotide
  Sense strand starting at position 2982 of SEQ ID NO: 915319
cagauugaguuucuggauu

SEQ ID NO: 1070893 - RNA, 19 nt, Artificial Sequence
  Description of Artificial Sequence: Synthetic oligonucleotide
  Antisense strand to SEQ ID NO: 1070892
aauccagaaacucaaucug

SEQ ID NO: 1070894 - RNA, 19 nt, Artificial Sequence
  Description of Artificial Sequence: Synthetic oligonucleotide
  Sense strand starting at position 2993 of SEQ ID NO: 915319
ucuggauuacuauagccau

SEQ ID NO: 1070895 - RNA, 19 nt, Artificial Sequence
  Description of Artificial Sequence: Synthetic oligonucleotide
  Antisense strand to SEQ ID NO: 1070894
auggcuauaguaauccaga

SEQ ID NO: 1070896 - RNA, 19 nt, Artificial Sequence
  Description of Artificial Sequence: Synthetic oligonucleotide
  Sense strand starting at position 2996 of SEQ ID NO: 915319
ggauuacuauagccauaag

SEQ ID NO: 1070897 - RNA, 19 nt, Artificial Sequence
  Description of Artificial Sequence: Synthetic oligonucleotide
  Antisense strand to SEQ ID NO: 1070896
cuuauggcuauaguaaucc

SEQ ID NO: 1070898 - RNA, 19 nt, Artificial Sequence
  Description of Artificial Sequence: Synthetic oligonucleotide
  Sense strand starting at position 3083 of SEQ ID NO: 915319
cggaguaacaggcaggauu

SEQ ID NO: 1070899 - RNA, 19 nt, Artificial Sequence
  Description of Artificial Sequence: Synthetic oligonucleotide
  Antisense strand to SEQ ID NO: 1070898
aauccugccuguuacuccg

SEQ ID NO: 1070900 - RNA, 19 nt, Artificial Sequence
  Description of Artificial Sequence: Synthetic oligonucleotide
  Sense strand starting at position 3096 of SEQ ID NO: 915319
aggauuagccaaugccaga

SEQ ID NO: 1070901 - RNA, 19 nt, Artificial Sequence
  Description of Artificial Sequence: Synthetic oligonucleotide
  Antisense strand to SEQ ID NO: 1070900
ucuggcauuggcuaauccu

SEQ ID NO: 1070902 - RNA, 19 nt, Artificial Sequence
  Description of Artificial Sequence: Synthetic oligonucleotide
  Sense strand starting at position 3292 of SEQ ID NO: 915319
ggaagcuucguuaguggua

SEQ ID NO: 1070903 - RNA, 19 nt, Artificial Sequence
  Description of Artificial Sequence: Synthetic oligonucleotide
  Antisense strand to SEQ ID NO: 1070902
uaccacuaacgaagcuucc

SEQ ID NO: 1070904 - RNA, 19 nt, Artificial Sequence
  Description of Artificial Sequence: Synthetic oligonucleotide
  Sense strand starting at position 3365 of SEQ ID NO: 915319
uuguuauguaucggaaaca

SEQ ID NO: 1070905 - RNA, 19 nt, Artificial Sequence
  Description of Artificial Sequence: Synthetic oligonucleotide
  Antisense strand to SEQ ID NO: 1070904
uguuuccgauacauaacaa

SEQ ID NO: 1070906 - RNA, 19 nt, Artificial Sequence
  Description of Artificial Sequence: Synthetic oligonucleotide
  Sense strand starting at position 3375 of SEQ ID NO: 915319
ucggaaacaaaucgguaaa

SEQ ID NO: 1070907 - RNA, 19 nt, Artificial Sequence
  Description of Artificial Sequence: Synthetic oligonucleotide
  Antisense strand to SEQ ID NO: 1070906
uuuaccgauuuguuuccga

SEQ ID NO: 1070908 - RNA, 19 nt, Artificial Sequence
  Description of Artificial Sequence: Synthetic oligonucleotide
  Sense strand starting at position 3456 of SEQ ID NO: 915319
cucggagucaguuagggau

SEQ ID NO: 1070909 - RNA, 19 nt, Artificial Sequence
  Description of Artificial Sequence: Synthetic oligonucleotide
  Antisense strand to SEQ ID NO: 1070908
aucccuaacugacuccgag

SEQ ID NO: 1070910 - RNA, 19 nt, Artificial Sequence
  Description of Artificial Sequence: Synthetic oligonucleotide
  Sense strand starting at position 3469 of SEQ ID NO: 915319
agggauuuauaacaguacu

SEQ ID NO: 1070911 - RNA, 19 nt, Artificial Sequence
  Description of Artificial Sequence: Synthetic oligonucleotide
  Antisense strand to SEQ ID NO: 1070910
aguacuguuauaaaucccu

SEQ ID NO: 1070912 - RNA, 19 nt, Artificial Sequence
  Description of Artificial Sequence: Synthetic oligonucleotide
  Sense strand starting at position 3500 of SEQ ID NO: 915319
aggaaauauugauaagacu

SEQ ID NO: 1070913 - RNA, 19 nt, Artificial Sequence
  Description of Artificial Sequence: Synthetic oligonucleotide
  Antisense strand to SEQ ID NO: 1070912
agucuuaucaauauuuccu

SEQ ID NO: 1070914 - RNA, 19 nt, Artificial Sequence
  Description of Artificial Sequence: Synthetic oligonucleotide
  Sense strand starting at position 3530 of SEQ ID NO: 915319
guaggaguccguuuguagu

SEQ ID NO: 1070915 - RNA, 19 nt, Artificial Sequence
  Description of Artificial Sequence: Synthetic oligonucleotide
  Antisense strand to SEQ ID NO: 1070914
acuacaaacggacuccuac

SEQ ID NO: 1070916 - RNA, 19 nt, Artificial Sequence
  Description of Artificial Sequence: Synthetic oligonucleotide
  Sense strand starting at position 3680 of SEQ ID NO: 915319
cagugaucauucccuguga

SEQ ID NO: 1070917 - RNA, 19 nt, Artificial Sequence
  Description of Artificial Sequence: Synthetic oligonucleotide
  Antisense strand to SEQ ID NO: 1070916
ucacagggaaugaucacug

SEQ ID NO: 1070918 - RNA, 19 nt, Artificial Sequence
  Description of Artificial Sequence: Synthetic oligonucleotide
  Sense strand starting at position 3722 of SEQ ID NO: 915319
acucgaguuaacuggguua

SEQ ID NO: 1070919 - RNA, 19 nt, Artificial Sequence
  Description of Artificial Sequence: Synthetic oligonucleotide
  Antisense strand to SEQ ID NO: 1070918
uaacccaguuaacucgagu

SEQ ID NO: 1070920 - RNA, 19 nt, Artificial Sequence
  Description of Artificial Sequence: Synthetic oligonucleotide
  Sense strand starting at position 3724 of SEQ ID NO: 915319
ucgaguuaacuggguuaca

SEQ ID NO: 1070921 - RNA, 19 nt, Artificial Sequence
  Description of Artificial Sequence: Synthetic oligonucleotide
  Antisense strand to SEQ ID NO: 1070920
uguaacccaguuaacucga

SEQ ID NO: 1070922 - RNA, 19 nt, Artificial Sequence
  Description of Artificial Sequence: Synthetic oligonucleotide
  Sense strand starting at position 3725 of SEQ ID NO: 915319
cgaguuaacuggguuacag

SEQ ID NO: 1070923 - RNA, 19 nt, Artificial Sequence
  Description of Artificial Sequence: Synthetic oligonucleotide
  Antisense strand to SEQ ID NO: 1070922
cuguaacccaguuaacucg

SEQ ID NO: 1070924 - RNA, 19 nt, Artificial Sequence
  Description of Artificial Sequence: Synthetic oligonucleotide
  Sense strand starting at position 3727 of SEQ ID NO: 915319
aguuaacuggguuacagua

SEQ ID NO: 1070925 - RNA, 19 nt, Artificial Sequence
  Description of Artificial Sequence: Synthetic oligonucleotide
  Antisense strand to SEQ ID NO: 1070924
uacuguaacccaguuaacu

SEQ ID NO: 1070926 - RNA, 19 nt, Artificial Sequence
  Description of Artificial Sequence: Synthetic oligonucleotide
  Sense strand starting at position 3878 of SEQ ID NO: 915319
acacuugguucuguacaca

SEQ ID NO: 1070927 - RNA, 19 nt, Artificial Sequence
  Description of Artificial Sequence: Synthetic oligonucleotide
  Antisense strand to SEQ ID NO: 1070926
uguguacagaaccaagugu

SEQ ID NO: 1070928 - RNA, 19 nt, Artificial Sequence
  Description of Artificial Sequence: Synthetic oligonucleotide
  Sense strand starting at position 3888 of SEQ ID NO: 915319
cuguacacaucaguaagau

SEQ ID NO: 1070929 - RNA, 19 nt, Artificial Sequence
  Description of Artificial Sequence: Synthetic oligonucleotide
  Antisense strand to SEQ ID NO: 1070928
aucuuacugauguguacag

SEQ ID NO: 1070930 - RNA, 19 nt, Artificial Sequence
  Description of Artificial Sequence: Synthetic oligonucleotide
  Sense strand starting at position 3889 of SEQ ID NO: 915319
uguacacaucaguaagauu

SEQ ID NO: 1070931 - RNA, 19 nt, Artificial Sequence
  Description of Artificial Sequence: Synthetic oligonucleotide
  Antisense strand to SEQ ID NO: 1070930
aaucuuacugauguguaca

SEQ ID NO: 1070932 - RNA, 19 nt, Artificial Sequence
  Description of Artificial Sequence: Synthetic oligonucleotide
  Sense strand starting at position 3897 of SEQ ID NO: 915319
ucaguaagauuguuacuuu

SEQ ID NO: 1070933 - RNA, 19 nt, Artificial Sequence
  Description of Artificial Sequence: Synthetic oligonucleotide
  Antisense strand to SEQ ID NO: 1070932
aaaguaacaaucuuacuga

SEQ ID NO: 1070934 - RNA, 19 nt, Artificial Sequence
  Description of Artificial Sequence: Synthetic oligonucleotide
  Sense strand starting at position 3913 of SEQ ID NO: 915319
uuuguucuuguauagauga

SEQ ID NO: 1070935 - RNA, 19 nt, Artificial Sequence
  Description of Artificial Sequence: Synthetic oligonucleotide
  Antisense strand to SEQ ID NO: 1070934
ucaucuauacaagaacaaa

SEQ ID NO: 1070936 - RNA, 19 nt, Artificial Sequence
  Description of Artificial Sequence: Synthetic oligonucleotide
  Sense strand starting at position 3963 of SEQ ID NO: 915319
agagaaccguagucuaaau

SEQ ID NO: 1070937 - RNA, 19 nt, Artificial Sequence
  Description of Artificial Sequence: Synthetic oligonucleotide
  Antisense strand to SEQ ID NO: 1070936
auuuagacuacgguucucu

SEQ ID NO: 1070938 - RNA, 19 nt, Artificial Sequence
  Description of Artificial Sequence: Synthetic oligonucleotide
  Sense strand starting at position 98 of SEQ ID NO: 915320
cccagauggcuuuaaacuc

SEQ ID NO: 1070939 - RNA, 19 nt, Artificial Sequence
  Description of Artificial Sequence: Synthetic oligonucleotide
  Antisense strand to SEQ ID NO: 1070938
gaguuuaaagccaucuggg

SEQ ID NO: 1070940 - RNA, 19 nt, Artificial Sequence
  Description of Artificial Sequence: Synthetic oligonucleotide
  Sense strand starting at position 169 of SEQ ID NO: 915320
ggaguagugguggagguuu

SEQ ID NO: 1070941 - RNA, 19 nt, Artificial Sequence
  Description of Artificial Sequence: Synthetic oligonucleotide
  Antisense strand to SEQ ID NO: 1070940
aaaccuccaccacuacucc

SEQ ID NO: 1070942 - RNA, 19 nt, Artificial Sequence
  Description of Artificial Sequence: Synthetic oligonucleotide
  Sense strand starting at position 466 of SEQ ID NO: 915320
gccaguauacgcuuugcuu

SEQ ID NO: 1070943 - RNA, 19 nt, Artificial Sequence
  Description of Artificial Sequence: Synthetic oligonucleotide
  Antisense strand to SEQ ID NO: 1070942
aagcaaagcguauacuggc

SEQ ID NO: 1070944 - RNA, 19 nt, Artificial Sequence
  Description of Artificial Sequence: Synthetic oligonucleotide
  Sense strand starting at position 467 of SEQ ID NO: 915320
ccaguauacgcuuugcuuu

SEQ ID NO: 1070945 - RNA, 19 nt, Artificial Sequence
  Description of Artificial Sequence: Synthetic oligonucleotide
  Antisense strand to SEQ ID NO: 1070944
aaagcaaagcguauacugg

SEQ ID NO: 1070946 - RNA, 19 nt, Artificial Sequence
  Description of Artificial Sequence: Synthetic oligonucleotide
  Sense strand starting at position 504 of SEQ ID NO: 915320
augagacucucagucacua

SEQ ID NO: 1070947 - RNA, 19 nt, Artificial Sequence
  Description of Artificial Sequence: Synthetic oligonucleotide
  Antisense strand to SEQ ID NO: 1070946
uagugacugagagucucau

SEQ ID NO: 1070948 - RNA, 19 nt, Artificial Sequence
  Description of Artificial Sequence: Synthetic oligonucleotide
  Sense strand starting at position 525 of SEQ ID NO: 915320
caggucuaguuucuagaaa

SEQ ID NO: 1070949 - RNA, 19 nt, Artificial Sequence
  Description of Artificial Sequence: Synthetic oligonucleotide
  Antisense strand to SEQ ID NO: 1070948
uuucuagaaacuagaccug

SEQ ID NO: 1070950 - RNA, 19 nt, Artificial Sequence
  Description of Artificial Sequence: Synthetic oligonucleotide
  Sense strand starting at position 635 of SEQ ID NO: 915320
gaggguaaauaauaggaua

SEQ ID NO: 1070951 - RNA, 19 nt, Artificial Sequence
  Description of Artificial Sequence: Synthetic oligonucleotide
  Antisense strand to SEQ ID NO: 1070950
uauccuauuauuuacccuc

SEQ ID NO: 1070952 - RNA, 19 nt, Artificial Sequence
  Description of Artificial Sequence: Synthetic oligonucleotide
  Sense strand starting at position 705 of SEQ ID NO: 915320
ugugaaagcuuggcaaaug

SEQ ID NO: 1070953 - RNA, 19 nt, Artificial Sequence
  Description of Artificial Sequence: Synthetic oligonucleotide
  Antisense strand to SEQ ID NO: 1070952
cauuugccaagcuuucaca

SEQ ID NO: 1070954 - RNA, 19 nt, Artificial Sequence
  Description of Artificial Sequence: Synthetic oligonucleotide
  Sense strand starting at position 717 of SEQ ID NO: 915320
gcaaauguaucacugagaa

SEQ ID NO: 1070955 - RNA, 19 nt, Artificial Sequence
  Description of Artificial Sequence: Synthetic oligonucleotide
  Antisense strand to SEQ ID NO: 1070954
uucucagugauacauuugc

SEQ ID NO: 1070956 - RNA, 19 nt, Artificial Sequence
  Description of Artificial Sequence: Synthetic oligonucleotide
  Sense strand starting at position 752 of SEQ ID NO: 915320
auacccguccuuuaagaau

SEQ ID NO: 1070957 - RNA, 19 nt, Artificial Sequence
  Description of Artificial Sequence: Synthetic oligonucleotide
  Antisense strand to SEQ ID NO: 1070956
auucuuaaaggacggguau

SEQ ID NO: 1070958 - RNA, 19 nt, Artificial Sequence
  Description of Artificial Sequence: Synthetic oligonucleotide
  Sense strand starting at position 1563 of SEQ ID NO: 915320
agaauagggucaggauuua

SEQ ID NO: 1070959 - RNA, 19 nt, Artificial Sequence
  Description of Artificial Sequence: Synthetic oligonucleotide
  Antisense strand to SEQ ID NO: 1070958
uaaauccugacccuauucu

SEQ ID NO: 1070960 - RNA, 19 nt, Artificial Sequence
  Description of Artificial Sequence: Synthetic oligonucleotide
  Sense strand starting at position 1588 of SEQ ID NO: 915320
ugaagaagccucgggcaaa

SEQ ID NO: 1070961 - RNA, 19 nt, Artificial Sequence
  Description of Artificial Sequence: Synthetic oligonucleotide
  Antisense strand to SEQ ID NO: 1070960
uuugcccgaggcuucuuca

SEQ ID NO: 1070962 - RNA, 19 nt, Artificial Sequence
  Description of Artificial Sequence: Synthetic oligonucleotide
  Sense strand starting at position 1599 of SEQ ID NO: 915320
cgggcaaacucuuuggaca

SEQ ID NO: 1070963 - RNA, 19 nt, Artificial Sequence
  Description of Artificial Sequence: Synthetic oligonucleotide
  Antisense strand to SEQ ID NO: 1070962
uguccaaagaguuugcccg

SEQ ID NO: 1070964 - RNA, 19 nt, Artificial Sequence
  Description of Artificial Sequence: Synthetic oligonucleotide
  Sense strand starting at position 1600 of SEQ ID NO: 915320
gggcaaacucuuuggacag

SEQ ID NO: 1070965 - RNA, 19 nt, Artificial Sequence
  Description of Artificial Sequence: Synthetic oligonucleotide
  Antisense strand to SEQ ID NO: 1070964
cuguccaaagaguuugccc

SEQ ID NO: 1070966 - RNA, 19 nt, Artificial Sequence
  Description of Artificial Sequence: Synthetic oligonucleotide
  Sense strand starting at position 2445 of SEQ ID NO: 915320
caccuucuggccugagaga

SEQ ID NO: 1070967 - RNA, 19 nt, Artificial Sequence
  Description of Artificial Sequence: Synthetic oligonucleotide
  Antisense strand to SEQ ID NO: 1070966
ucucucaggccagaaggug

SEQ ID NO: 1070968 - RNA, 19 nt, Artificial Sequence
  Description of Artificial Sequence: Synthetic oligonucleotide
  Sense strand starting at position 2729 of SEQ ID NO: 915320
uuggcuucuccauaaggga

SEQ ID NO: 1070969 - RNA, 19 nt, Artificial Sequence
  Description of Artificial Sequence: Synthetic oligonucleotide
  Antisense strand to SEQ ID NO: 1070968
ucccuuauggagaagccaa

SEQ ID NO: 1070970 - RNA, 19 nt, Artificial Sequence
  Description of Artificial Sequence: Synthetic oligonucleotide
  Sense strand starting at position 2798 of SEQ ID NO: 915320
gauaauaucugagaauagg

SEQ ID NO: 1070971 - RNA, 19 nt, Artificial Sequence
  Description of Artificial Sequence: Synthetic oligonucleotide
  Antisense strand to SEQ ID NO: 1070970
ccuauucucagauauuauc

SEQ ID NO: 1070972 - RNA, 19 nt, Artificial Sequence
  Description of Artificial Sequence: Synthetic oligonucleotide
  Sense strand starting at position 2887 of SEQ ID NO: 915320
cagauugaguuucuggauu

SEQ ID NO: 1070973 - RNA, 19 nt, Artificial Sequence
  Description of Artificial Sequence: Synthetic oligonucleotide
  Antisense strand to SEQ ID NO: 1070972
aauccagaaacucaaucug

SEQ ID NO: 1070974 - RNA, 19 nt, Artificial Sequence
  Description of Artificial Sequence: Synthetic oligonucleotide
  Sense strand starting at position 2898 of SEQ ID NO: 915320
ucuggauuacuauagccau

SEQ ID NO: 1070975 - RNA, 19 nt, Artificial Sequence
  Description of Artificial Sequence: Synthetic oligonucleotide
  Antisense strand to SEQ ID NO: 1070974
auggcuauaguaauccaga

SEQ ID NO: 1070976 - RNA, 19 nt, Artificial Sequence
  Description of Artificial Sequence: Synthetic oligonucleotide
  Sense strand starting at position 2901 of SEQ ID NO: 915320
ggauuacuauagccauaag

SEQ ID NO: 1070977 - RNA, 19 nt, Artificial Sequence
  Description of Artificial Sequence: Synthetic oligonucleotide
  Antisense strand to SEQ ID NO: 1070976
cuuauggcuauaguaaucc

SEQ ID NO: 1070978 - RNA, 19 nt, Artificial Sequence
  Description of Artificial Sequence: Synthetic oligonucleotide
  Sense strand starting at position 2988 of SEQ ID NO: 915320
cggaguaacaggcaggauu

SEQ ID NO: 1070979 - RNA, 19 nt, Artificial Sequence
  Description of Artificial Sequence: Synthetic oligonucleotide
  Antisense strand to SEQ ID NO: 1070978
aauccugccuguuacuccg

SEQ ID NO: 1070980 - RNA, 19 nt, Artificial Sequence
  Description of Artificial Sequence: Synthetic oligonucleotide
  Sense strand starting at position 3001 of SEQ ID NO: 915320
aggauuagccaaugccaga

SEQ ID NO: 1070981 - RNA, 19 nt, Artificial Sequence
  Description of Artificial Sequence: Synthetic oligonucleotide
  Antisense strand to SEQ ID NO: 1070980
ucuggcauuggcuaauccu

SEQ ID NO: 1070982 - RNA, 19 nt, Artificial Sequence
  Description of Artificial Sequence: Synthetic oligonucleotide
  Sense strand starting at position 3197 of SEQ ID NO: 915320
ggaagcuucguuaguggua

SEQ ID NO: 1070983 - RNA, 19 nt, Artificial Sequence
  Description of Artificial Sequence: Synthetic oligonucleotide
  Antisense strand to SEQ ID NO: 1070982
uaccacuaacgaagcuucc

SEQ ID NO: 1070984 - RNA, 19 nt, Artificial Sequence
  Description of Artificial Sequence: Synthetic oligonucleotide
  Sense strand starting at position 3270 of SEQ ID NO: 915320
uuguuauguaucggaaaca

SEQ ID NO: 1070985 - RNA, 19 nt, Artificial Sequence
  Description of Artificial Sequence: Synthetic oligonucleotide
  Antisense strand to SEQ ID NO: 1070984
uguuuccgauacauaacaa

SEQ ID NO: 1070986 - RNA, 19 nt, Artificial Sequence
  Description of Artificial Sequence: Synthetic oligonucleotide
  Sense strand starting at position 3280 of SEQ ID NO: 915320
ucggaaacaaaucgguaaa

SEQ ID NO: 1070987 - RNA, 19 nt, Artificial Sequence
  Description of Artificial Sequence: Synthetic oligonucleotide
  Antisense strand to SEQ ID NO: 1070986
uuuaccgauuuguuuccga

SEQ ID NO: 1070988 - RNA, 19 nt, Artificial Sequence
  Description of Artificial Sequence: Synthetic oligonucleotide
  Sense strand starting at position 3361 of SEQ ID NO: 915320
cucggagucaguuagggau

SEQ ID NO: 1070989 - RNA, 19 nt, Artificial Sequence
  Description of Artificial Sequence: Synthetic oligonucleotide
  Antisense strand to SEQ ID NO: 1070988
aucccuaacugacuccgag

SEQ ID NO: 1070990 - RNA, 19 nt, Artificial Sequence
  Description of Artificial Sequence: Synthetic oligonucleotide
  Sense strand starting at position 3374 of SEQ ID NO: 915320
agggauuuauaacaguacu

SEQ ID NO: 1070991 - RNA, 19 nt, Artificial Sequence
  Description of Artificial Sequence: Synthetic oligonucleotide
  Antisense strand to SEQ ID NO: 1070990
aguacuguuauaaaucccu

SEQ ID NO: 1070992 - RNA, 19 nt, Artificial Sequence
  Description of Artificial Sequence: Synthetic oligonucleotide
  Sense strand starting at position 3405 of SEQ ID NO: 915320
aggaaauauugauaagacu

SEQ ID NO: 1070993 - RNA, 19 nt, Artificial Sequence
  Description of Artificial Sequence: Synthetic oligonucleotide
  Antisense strand to SEQ ID NO: 1070992
agucuuaucaauauuuccu

SEQ ID NO: 1070994 - RNA, 19 nt, Artificial Sequence
  Description of Artificial Sequence: Synthetic oligonucleotide
  Sense strand starting at position 3435 of SEQ ID NO: 915320
guaggaguccguuuguagu

SEQ ID NO: 1070995 - RNA, 19 nt, Artificial Sequence
  Description of Artificial Sequence: Synthetic oligonucleotide
  Antisense strand to SEQ ID NO: 1070994
acuacaaacggacuccuac

SEQ ID NO: 1070996 - RNA, 19 nt, Artificial Sequence
  Description of Artificial Sequence: Synthetic oligonucleotide
  Sense strand starting at position 3585 of SEQ ID NO: 915320
cagugaucauucccuguga

SEQ ID NO: 1070997 - RNA, 19 nt, Artificial Sequence
  Description of Artificial Sequence: Synthetic oligonucleotide
  Antisense strand to SEQ ID NO: 1070996
ucacagggaaugaucacug

SEQ ID NO: 1070998 - RNA, 19 nt, Artificial Sequence
  Description of Artificial Sequence: Synthetic oligonucleotide
  Sense strand starting at position 3627 of SEQ ID NO: 915320
acucgaguuaacuggguua

SEQ ID NO: 1070999 - RNA, 19 nt, Artificial Sequence
  Description of Artificial Sequence: Synthetic oligonucleotide
  Antisense strand to SEQ ID NO: 1070998
uaacccaguuaacucgagu

SEQ ID NO: 1071000 - RNA, 19 nt, Artificial Sequence
  Description of Artificial Sequence: Synthetic oligonucleotide
  Sense strand starting at position 3629 of SEQ ID NO: 915320
ucgaguuaacuggguuaca

SEQ ID NO: 1071001 - RNA, 19 nt, Artificial Sequence
  Description of Artificial Sequence: Synthetic oligonucleotide
  Antisense strand to SEQ ID NO: 1071000
uguaacccaguuaacucga

SEQ ID NO: 1071002 - RNA, 19 nt, Artificial Sequence
  Description of Artificial Sequence: Synthetic oligonucleotide
  Sense strand starting at position 3630 of SEQ ID NO: 915320
cgaguuaacuggguuacag

SEQ ID NO: 1071003 - RNA, 19 nt, Artificial Sequence
  Description of Artificial Sequence: Synthetic oligonucleotide
  Antisense strand to SEQ ID NO: 1071002
cuguaacccaguuaacucg

SEQ ID NO: 1071004 - RNA, 19 nt, Artificial Sequence
  Description of Artificial Sequence: Synthetic oligonucleotide
  Sense strand starting at position 3632 of SEQ ID NO: 915320
aguuaacuggguuacagua

SEQ ID NO: 1071005 - RNA, 19 nt, Artificial Sequence
  Description of Artificial Sequence: Synthetic oligonucleotide
  Antisense strand to SEQ ID NO: 1071004
uacuguaacccaguuaacu

SEQ ID NO: 1071006 - RNA, 19 nt, Artificial Sequence
  Description of Artificial Sequence: Synthetic oligonucleotide
  Sense strand starting at position 3783 of SEQ ID NO: 915320
acacuugguucuguacaca

SEQ ID NO: 1071007 - RNA, 19 nt, Artificial Sequence
  Description of Artificial Sequence: Synthetic oligonucleotide
  Antisense strand to SEQ ID NO: 1071006
uguguacagaaccaagugu

SEQ ID NO: 1071008 - RNA, 19 nt, Artificial Sequence
  Description of Artificial Sequence: Synthetic oligonucleotide
  Sense strand starting at position 3793 of SEQ ID NO: 915320
cuguacacaucaguaagau

SEQ ID NO: 1071009 - RNA, 19 nt, Artificial Sequence
  Description of Artificial Sequence: Synthetic oligonucleotide
  Antisense strand to SEQ ID NO: 1071008
aucuuacugauguguacag

SEQ ID NO: 1071010 - RNA, 19 nt, Artificial Sequence
  Description of Artificial Sequence: Synthetic oligonucleotide
  Sense strand starting at position 3794 of SEQ ID NO: 915320
uguacacaucaguaagauu

SEQ ID NO: 1071011 - RNA, 19 nt, Artificial Sequence
  Description of Artificial Sequence: Synthetic oligonucleotide
  Antisense strand to SEQ ID NO: 1071010
aaucuuacugauguguaca

SEQ ID NO: 1071012 - RNA, 19 nt, Artificial Sequence
  Description of Artificial Sequence: Synthetic oligonucleotide
  Sense strand starting at position 3802 of SEQ ID NO: 915320
ucaguaagauuguuacuuu

SEQ ID NO: 1071013 - RNA, 19 nt, Artificial Sequence
  Description of Artificial Sequence: Synthetic oligonucleotide
  Antisense strand to SEQ ID NO: 1071012
aaaguaacaaucuuacuga

SEQ ID NO: 1071014 - RNA, 19 nt, Artificial Sequence
  Description of Artificial Sequence: Synthetic oligonucleotide
  Sense strand starting at position 3818 of SEQ ID NO: 915320
uuuguucuuguauagauga

SEQ ID NO: 1071015 - RNA, 19 nt, Artificial Sequence
  Description of Artificial Sequence: Synthetic oligonucleotide
  Antisense strand to SEQ ID NO: 1071014
ucaucuauacaagaacaaa

SEQ ID NO: 1071016 - RNA, 19 nt, Artificial Sequence
  Description of Artificial Sequence: Synthetic oligonucleotide
  Sense strand starting at position 3868 of SEQ ID NO: 915320
agagaaccguagucuaaau

SEQ ID NO: 1071017 - RNA, 19 nt, Artificial Sequence
  Description of Artificial Sequence: Synthetic oligonucleotide
  Antisense strand to SEQ ID NO: 1071016
auuuagacuacgguucucu

SEQ ID NO: 1071018 - RNA, 19 nt, Artificial Sequence
  Description of Artificial Sequence: Synthetic oligonucleotide
  Sense strand starting at position 6 of SEQ ID NO: 915321
gcucaaagaccuugucaaa

SEQ ID NO: 1071019 - RNA, 19 nt, Artificial Sequence
  Description of Artificial Sequence: Synthetic oligonucleotide
  Antisense strand to SEQ ID NO: 1071018
uuugacaaggucuuugagc

SEQ ID NO: 1071020 - RNA, 19 nt, Artificial Sequence
  Description of Artificial Sequence: Synthetic oligonucleotide
  Sense strand starting at position 199 of SEQ ID NO: 915321
gcuccaauugcucaaguuc

SEQ ID NO: 1071021 - RNA, 19 nt, Artificial Sequence
  Description of Artificial Sequence: Synthetic oligonucleotide
  Antisense strand to SEQ ID NO: 1071020
gaacuugagcaauuggagc

SEQ ID NO: 1071022 - RNA, 19 nt, Artificial Sequence
  Description of Artificial Sequence: Synthetic oligonucleotide
  Sense strand starting at position 298 of SEQ ID NO: 915321
ccuggaucaucccuaaaug

SEQ ID NO: 1071023 - RNA, 19 nt, Artificial Sequence
  Description of Artificial Sequence: Synthetic oligonucleotide
  Antisense strand to SEQ ID NO: 1071022
cauuuagggaugauccagg

SEQ ID NO: 1071024 - RNA, 19 nt, Artificial Sequence
  Description of Artificial Sequence: Synthetic oligonucleotide
  Sense strand starting at position 505 of SEQ ID NO: 915321
ugcccaaaucaggaguuga

SEQ ID NO: 1071025 - RNA, 19 nt, Artificial Sequence
  Description of Artificial Sequence: Synthetic oligonucleotide
  Antisense strand to SEQ ID NO: 1071024
ucaacuccugauuugggca

SEQ ID NO: 1071026 - RNA, 19 nt, Artificial Sequence
  Description of Artificial Sequence: Synthetic oligonucleotide
  Sense strand starting at position 518 of SEQ ID NO: 915321
aguugaugaggagguucaa

SEQ ID NO: 1071027 - RNA, 19 nt, Artificial Sequence
  Description of Artificial Sequence: Synthetic oligonucleotide
  Antisense strand to SEQ ID NO: 1071026
uugaaccuccucaucaacu

SEQ ID NO: 1071028 - RNA, 19 nt, Artificial Sequence
  Description of Artificial Sequence: Synthetic oligonucleotide
  Sense strand starting at position 547 of SEQ ID NO: 915321
auuccaauucuuggaggua

SEQ ID NO: 1071029 - RNA, 19 nt, Artificial Sequence
  Description of Artificial Sequence: Synthetic oligonucleotide
  Antisense strand to SEQ ID NO: 1071028
uaccuccaagaauuggaau

SEQ ID NO: 1071030 - RNA, 19 nt, Artificial Sequence
  Description of Artificial Sequence: Synthetic oligonucleotide
  Sense strand starting at position 617 of SEQ ID NO: 915321
cuagaucuguuuccacagu

SEQ ID NO: 1071031 - RNA, 19 nt, Artificial Sequence
  Description of Artificial Sequence: Synthetic oligonucleotide
  Antisense strand to SEQ ID NO: 1071030
acuguggaaacagaucuag

SEQ ID NO: 1071032 - RNA, 19 nt, Artificial Sequence
  Description of Artificial Sequence: Synthetic oligonucleotide
  Sense strand starting at position 633 of SEQ ID NO: 915321
aguucugcaacaugggaau

SEQ ID NO: 1071033 - RNA, 19 nt, Artificial Sequence
  Description of Artificial Sequence: Synthetic oligonucleotide
  Antisense strand to SEQ ID NO: 1071032
auucccauguugcagaacu

SEQ ID NO: 1071034 - RNA, 19 nt, Artificial Sequence
  Description of Artificial Sequence: Synthetic oligonucleotide
  Sense strand starting at position 644 of SEQ ID NO: 915321
augggaaucacaugguuua

SEQ ID NO: 1071035 - RNA, 19 nt, Artificial Sequence
  Description of Artificial Sequence: Synthetic oligonucleotide
  Antisense strand to SEQ ID NO: 1071034
uaaaccaugugauucccau

SEQ ID NO: 1071036 - RNA, 19 nt, Artificial Sequence
  Description of Artificial Sequence: Synthetic oligonucleotide
  Sense strand starting at position 647 of SEQ ID NO: 915321
ggaaucacaugguuuagau

SEQ ID NO: 1071037 - RNA, 19 nt, Artificial Sequence
  Description of Artificial Sequence: Synthetic oligonucleotide
  Antisense strand to SEQ ID NO: 1071036
aucuaaaccaugugauucc

SEQ ID NO: 1071038 - RNA, 19 nt, Artificial Sequence
  Description of Artificial Sequence: Synthetic oligonucleotide
  Sense strand starting at position 656 of SEQ ID NO: 915321
ugguuuagauuaccucuaa

SEQ ID NO: 1071039 - RNA, 19 nt, Artificial Sequence
  Description of Artificial Sequence: Synthetic oligonucleotide
  Antisense strand to SEQ ID NO: 1071038
uuagagguaaucuaaacca

SEQ ID NO: 1071040 - RNA, 19 nt, Artificial Sequence
  Description of Artificial Sequence: Synthetic oligonucleotide
  Sense strand starting at position 657 of SEQ ID NO: 915321
gguuuagauuaccucuaag

SEQ ID NO: 1071041 - RNA, 19 nt, Artificial Sequence
  Description of Artificial Sequence: Synthetic oligonucleotide
  Antisense strand to SEQ ID NO: 1071040
cuuagagguaaucuaaacc

SEQ ID NO: 1071042 - RNA, 19 nt, Artificial Sequence
  Description of Artificial Sequence: Synthetic oligonucleotide
  Sense strand starting at position 660 of SEQ ID NO: 915321
uuagauuaccucuaagguc

SEQ ID NO: 1071043 - RNA, 19 nt, Artificial Sequence
  Description of Artificial Sequence: Synthetic oligonucleotide
  Antisense strand to SEQ ID NO: 1071042
gaccuuagagguaaucuaa

SEQ ID NO: 1071044 - RNA, 19 nt, Artificial Sequence
  Description of Artificial Sequence: Synthetic oligonucleotide
  Sense strand starting at position 764 of SEQ ID NO: 915321
agguacuacuuagcugaaa

SEQ ID NO: 1071045 - RNA, 19 nt, Artificial Sequence
  Description of Artificial Sequence: Synthetic oligonucleotide
  Antisense strand to SEQ ID NO: 1071044
uuucagcuaaguaguaccu

SEQ ID NO: 1071046 - RNA, 19 nt, Artificial Sequence
  Description of Artificial Sequence: Synthetic oligonucleotide
  Sense strand starting at position 807 of SEQ ID NO: 915321
gcuccaaagucccuagaga

SEQ ID NO: 1071047 - RNA, 19 nt, Artificial Sequence
  Description of Artificial Sequence: Synthetic oligonucleotide
  Antisense strand to SEQ ID NO: 1071046
ucucuagggacuuuggagc

SEQ ID NO: 1071048 - RNA, 19 nt, Artificial Sequence
  Description of Artificial Sequence: Synthetic oligonucleotide
  Sense strand starting at position 884 of SEQ ID NO: 915321
ccugcucuguacuugauau

SEQ ID NO: 1071049 - RNA, 19 nt, Artificial Sequence
  Description of Artificial Sequence: Synthetic oligonucleotide
  Antisense strand to SEQ ID NO: 1071048
auaucaaguacagagcagg

SEQ ID NO: 1071050 - RNA, 19 nt, Artificial Sequence
  Description of Artificial Sequence: Synthetic oligonucleotide
  Sense strand starting at position 897 of SEQ ID NO: 915321
ugauauacauugucucuuu

SEQ ID NO: 1071051 - RNA, 19 nt, Artificial Sequence
  Description of Artificial Sequence: Synthetic oligonucleotide
  Antisense strand to SEQ ID NO: 1071050
aaagagacaauguauauca

SEQ ID NO: 1071052 - RNA, 19 nt, Artificial Sequence
  Description of Artificial Sequence: Synthetic oligonucleotide
  Sense strand starting at position 923 of SEQ ID NO: 915321
accauaauucuaugaggua

SEQ ID NO: 1071053 - RNA, 19 nt, Artificial Sequence
  Description of Artificial Sequence: Synthetic oligonucleotide
  Antisense strand to SEQ ID NO: 1071052
uaccucauagaauuauggu

SEQ ID NO: 1071054 - RNA, 19 nt, Artificial Sequence
  Description of Artificial Sequence: Synthetic oligonucleotide
  Sense strand starting at position 944 of SEQ ID NO: 915321
ugcuacagccuguauauuu

SEQ ID NO: 1071055 - RNA, 19 nt, Artificial Sequence
  Description of Artificial Sequence: Synthetic oligonucleotide
  Antisense strand to SEQ ID NO: 1071054
aaauauacaggcuguagca

SEQ ID NO: 1071056 - RNA, 19 nt, Artificial Sequence
  Description of Artificial Sequence: Synthetic oligonucleotide
  Sense strand starting at position 1208 of SEQ ID NO: 915321
gcagcaguuccugggaaac

SEQ ID NO: 1071057 - RNA, 19 nt, Artificial Sequence
  Description of Artificial Sequence: Synthetic oligonucleotide
  Antisense strand to SEQ ID NO: 1071056
guuucccaggaacugcugc

SEQ ID NO: 1071058 - RNA, 19 nt, Artificial Sequence
  Description of Artificial Sequence: Synthetic oligonucleotide
  Sense strand starting at position 1611 of SEQ ID NO: 915321
acuaauuucggcugcguga

SEQ ID NO: 1071059 - RNA, 19 nt, Artificial Sequence
  Description of Artificial Sequence: Synthetic oligonucleotide
  Antisense strand to SEQ ID NO: 1071058
ucacgcagccgaaauuagu

SEQ ID NO: 1071060 - RNA, 19 nt, Artificial Sequence
  Description of Artificial Sequence: Synthetic oligonucleotide
  Sense strand starting at position 1636 of SEQ ID NO: 915321
ccggaagagcucuggauac

SEQ ID NO: 1071061 - RNA, 19 nt, Artificial Sequence
  Description of Artificial Sequence: Synthetic oligonucleotide
  Antisense strand to SEQ ID NO: 1071060
guauccagagcucuuccgg

SEQ ID NO: 1071062 - RNA, 19 nt, Artificial Sequence
  Description of Artificial Sequence: Synthetic oligonucleotide
  Sense strand starting at position 1650 of SEQ ID NO: 915321
gauaccugaguuugagcau

SEQ ID NO: 1071063 - RNA, 19 nt, Artificial Sequence
  Description of Artificial Sequence: Synthetic oligonucleotide
  Antisense strand to SEQ ID NO: 1071062
augcucaaacucagguauc

SEQ ID NO: 1071064 - RNA, 19 nt, Artificial Sequence
  Description of Artificial Sequence: Synthetic oligonucleotide
  Sense strand starting at position 1653 of SEQ ID NO: 915321
accugaguuugagcauguu

SEQ ID NO: 1071065 - RNA, 19 nt, Artificial Sequence
  Description of Artificial Sequence: Synthetic oligonucleotide
  Antisense strand to SEQ ID NO: 1071064
aacaugcucaaacucaggu

SEQ ID NO: 1071066 - RNA, 19 nt, Artificial Sequence
  Description of Artificial Sequence: Synthetic oligonucleotide
  Sense strand starting at position 1656 of SEQ ID NO: 915321
ugaguuugagcauguugga

SEQ ID NO: 1071067 - RNA, 19 nt, Artificial Sequence
  Description of Artificial Sequence: Synthetic oligonucleotide
  Antisense strand to SEQ ID NO: 1071066
uccaacaugcucaaacuca

SEQ ID NO: 1071068 - RNA, 19 nt, Artificial Sequence
  Description of Artificial Sequence: Synthetic oligonucleotide
  Sense strand starting at position 3262 of SEQ ID NO: 915321
gccaguagauacuauuuaa

SEQ ID NO: 1071069 - RNA, 19 nt, Artificial Sequence
  Description of Artificial Sequence: Synthetic oligonucleotide
  Antisense strand to SEQ ID NO: 1071068
uuaaauaguaucuacuggc

SEQ ID NO: 1071070 - RNA, 19 nt, Artificial Sequence
  Description of Artificial Sequence: Synthetic oligonucleotide
  Sense strand starting at position 3357 of SEQ ID NO: 915321
caagucugguaccugagau

SEQ ID NO: 1071071 - RNA, 19 nt, Artificial Sequence
  Description of Artificial Sequence: Synthetic oligonucleotide
  Antisense strand to SEQ ID NO: 1071070
aucucagguaccagacuug

SEQ ID NO: 1071072 - RNA, 19 nt, Artificial Sequence
  Description of Artificial Sequence: Synthetic oligonucleotide
  Sense strand starting at position 3422 of SEQ ID NO: 915321
ugauuaauuugccagagcu

SEQ ID NO: 1071073 - RNA, 19 nt, Artificial Sequence
  Description of Artificial Sequence: Synthetic oligonucleotide
  Antisense strand to SEQ ID NO: 1071072
agcucuggcaaauuaauca

SEQ ID NO: 1071074 - RNA, 19 nt, Artificial Sequence
  Description of Artificial Sequence: Synthetic oligonucleotide
  Sense strand starting at position 3555 of SEQ ID NO: 915321
uccgaagucuggagaaggu

SEQ ID NO: 1071075 - RNA, 19 nt, Artificial Sequence
  Description of Artificial Sequence: Synthetic oligonucleotide
  Antisense strand to SEQ ID NO: 1071074
accuucuccagacuucgga

SEQ ID NO: 1071076 - RNA, 19 nt, Artificial Sequence
  Description of Artificial Sequence: Synthetic oligonucleotide
  Sense strand starting at position 3581 of SEQ ID NO: 915321
cagagugucuuguucuaaa

SEQ ID NO: 1071077 - RNA, 19 nt, Artificial Sequence
  Description of Artificial Sequence: Synthetic oligonucleotide
  Antisense strand to SEQ ID NO: 1071076
uuuagaacaagacacucug

SEQ ID NO: 1071078 - RNA, 19 nt, Artificial Sequence
  Description of Artificial Sequence: Synthetic oligonucleotide
  Sense strand starting at position 3739 of SEQ ID NO: 915321
augucauccucuuugucua

SEQ ID NO: 1071079 - RNA, 19 nt, Artificial Sequence
  Description of Artificial Sequence: Synthetic oligonucleotide
  Antisense strand to SEQ ID NO: 1071078
uagacaaagaggaugacau

SEQ ID NO: 1071080 - RNA, 19 nt, Artificial Sequence
  Description of Artificial Sequence: Synthetic oligonucleotide
  Sense strand starting at position 3769 of SEQ ID NO: 915321
gggugucugcuccuggcua

SEQ ID NO: 1071081 - RNA, 19 nt, Artificial Sequence
  Description of Artificial Sequence: Synthetic oligonucleotide
  Antisense strand to SEQ ID NO: 1071080
uagccaggagcagacaccc

SEQ ID NO: 1071082 - RNA, 19 nt, Artificial Sequence
  Description of Artificial Sequence: Synthetic oligonucleotide
  Sense strand starting at position 3782 of SEQ ID NO: 915321
uggcuauuguucccuaucu

SEQ ID NO: 1071083 - RNA, 19 nt, Artificial Sequence
  Description of Artificial Sequence: Synthetic oligonucleotide
  Antisense strand to SEQ ID NO: 1071082
agauagggaacaauagcca

SEQ ID NO: 1071084 - RNA, 19 nt, Artificial Sequence
  Description of Artificial Sequence: Synthetic oligonucleotide
  Sense strand starting at position 3783 of SEQ ID NO: 915321
ggcuauuguucccuaucuu

SEQ ID NO: 1071085 - RNA, 19 nt, Artificial Sequence
  Description of Artificial Sequence: Synthetic oligonucleotide
  Antisense strand to SEQ ID NO: 1071084
aagauagggaacaauagcc

SEQ ID NO: 1071086 - RNA, 19 nt, Artificial Sequence
  Description of Artificial Sequence: Synthetic oligonucleotide
  Sense strand starting at position 3784 of SEQ ID NO: 915321
gcuauuguucccuaucuug

SEQ ID NO: 1071087 - RNA, 19 nt, Artificial Sequence
  Description of Artificial Sequence: Synthetic oligonucleotide
  Antisense strand to SEQ ID NO: 1071086
caagauagggaacaauagc

SEQ ID NO: 1071088 - RNA, 19 nt, Artificial Sequence
  Description of Artificial Sequence: Synthetic oligonucleotide
  Sense strand starting at position 3920 of SEQ ID NO: 915321
uuaauucucuggugauuug

SEQ ID NO: 1071089 - RNA, 19 nt, Artificial Sequence
  Description of Artificial Sequence: Synthetic oligonucleotide
  Antisense strand to SEQ ID NO: 1071088
caaaucaccagagaauuaa

SEQ ID NO: 1071090 - RNA, 19 nt, Artificial Sequence
  Description of Artificial Sequence: Synthetic oligonucleotide
  Sense strand starting at position 3927 of SEQ ID NO: 915321
ucuggugauuugggaaaua

SEQ ID NO: 1071091 - RNA, 19 nt, Artificial Sequence
  Description of Artificial Sequence: Synthetic oligonucleotide
  Antisense strand to SEQ ID NO: 1071090
uauuucccaaaucaccaga

SEQ ID NO: 1071092 - RNA, 19 nt, Artificial Sequence
  Description of Artificial Sequence: Synthetic oligonucleotide
  Sense strand starting at position 3936 of SEQ ID NO: 915321
uugggaaauaugggcaauu

SEQ ID NO: 1071093 - RNA, 19 nt, Artificial Sequence
  Description of Artificial Sequence: Synthetic oligonucleotide
  Antisense strand to SEQ ID NO: 1071092
aauugcccauauuucccaa

SEQ ID NO: 1071094 - RNA, 19 nt, Artificial Sequence
  Description of Artificial Sequence: Synthetic oligonucleotide
  Sense strand starting at position 3945 of SEQ ID NO: 915321
augggcaauucuccauaua

SEQ ID NO: 1071095 - RNA, 19 nt, Artificial Sequence
  Description of Artificial Sequence: Synthetic oligonucleotide
  Antisense strand to SEQ ID NO: 1071094
uauauggagaauugcccau

SEQ ID NO: 1071096 - RNA, 19 nt, Artificial Sequence
  Description of Artificial Sequence: Synthetic oligonucleotide
  Sense strand starting at position 3946 of SEQ ID NO: 915321
ugggcaauucuccauauag

SEQ ID NO: 1071097 - RNA, 19 nt, Artificial Sequence
  Description of Artificial Sequence: Synthetic oligonucleotide
  Antisense strand to SEQ ID NO: 1071096
cuauauggagaauugccca

SEQ ID NO: 1071098 - RNA, 19 nt, Artificial Sequence
  Description of Artificial Sequence: Synthetic oligonucleotide
  Sense strand starting at position 151 of SEQ ID NO: 915322
gcaggaaucugcucaggau

SEQ ID NO: 1071099 - RNA, 19 nt, Artificial Sequence
  Description of Artificial Sequence: Synthetic oligonucleotide
  Antisense strand to SEQ ID NO: 1071098
auccugagcagauuccugc

SEQ ID NO: 1071100 - RNA, 19 nt, Artificial Sequence
  Description of Artificial Sequence: Synthetic oligonucleotide
  Sense strand starting at position 200 of SEQ ID NO: 915322
cgaagaguuacacacugca

SEQ ID NO: 1071101 - RNA, 19 nt, Artificial Sequence
  Description of Artificial Sequence: Synthetic oligonucleotide
  Antisense strand to SEQ ID NO: 1071100
ugcaguguguaacucuucg

SEQ ID NO: 1071102 - RNA, 19 nt, Artificial Sequence
  Description of Artificial Sequence: Synthetic oligonucleotide
  Sense strand starting at position 248 of SEQ ID NO: 915322
ugugucugaacuugagaaa

SEQ ID NO: 1071103 - RNA, 19 nt, Artificial Sequence
  Description of Artificial Sequence: Synthetic oligonucleotide
  Antisense strand to SEQ ID NO: 1071102
uuucucaaguucagacaca

SEQ ID NO: 1071104 - RNA, 19 nt, Artificial Sequence
  Description of Artificial Sequence: Synthetic oligonucleotide
  Sense strand starting at position 251 of SEQ ID NO: 915322
gucugaacuugagaaaggu

SEQ ID NO: 1071105 - RNA, 19 nt, Artificial Sequence
  Description of Artificial Sequence: Synthetic oligonucleotide
  Antisense strand to SEQ ID NO: 1071104
accuuucucaaguucagac

SEQ ID NO: 1071106 - RNA, 19 nt, Artificial Sequence
  Description of Artificial Sequence: Synthetic oligonucleotide
  Sense strand starting at position 520 of SEQ ID NO: 915322
auacccuucugggcucaaa

SEQ ID NO: 1071107 - RNA, 19 nt, Artificial Sequence
  Description of Artificial Sequence: Synthetic oligonucleotide
  Antisense strand to SEQ ID NO: 1071106
uuugagcccagaaggguau

SEQ ID NO: 1071108 - RNA, 19 nt, Artificial Sequence
  Description of Artificial Sequence: Synthetic oligonucleotide
  Sense strand starting at position 532 of SEQ ID NO: 915322
gcucaaagaccuugucaaa

SEQ ID NO: 1071109 - RNA, 19 nt, Artificial Sequence
  Description of Artificial Sequence: Synthetic oligonucleotide
  Antisense strand to SEQ ID NO: 1071108
uuugacaaggucuuugagc

SEQ ID NO: 1071110 - RNA, 19 nt, Artificial Sequence
  Description of Artificial Sequence: Synthetic oligonucleotide
  Sense strand starting at position 725 of SEQ ID NO: 915322
gcuccaauugcucaaguuc

SEQ ID NO: 1071111 - RNA, 19 nt, Artificial Sequence
  Description of Artificial Sequence: Synthetic oligonucleotide
  Antisense strand to SEQ ID NO: 1071110
gaacuugagcaauuggagc

SEQ ID NO: 1071112 - RNA, 19 nt, Artificial Sequence
  Description of Artificial Sequence: Synthetic oligonucleotide
  Sense strand starting at position 824 of SEQ ID NO: 915322
ccuggaucaucccuaaaug

SEQ ID NO: 1071113 - RNA, 19 nt, Artificial Sequence
  Description of Artificial Sequence: Synthetic oligonucleotide
  Antisense strand to SEQ ID NO: 1071112
cauuuagggaugauccagg

SEQ ID NO: 1071114 - RNA, 19 nt, Artificial Sequence
  Description of Artificial Sequence: Synthetic oligonucleotide
  Sense strand starting at position 1031 of SEQ ID NO: 915322
ugcccaaaucaggaguuga

SEQ ID NO: 1071115 - RNA, 19 nt, Artificial Sequence
  Description of Artificial Sequence: Synthetic oligonucleotide
  Antisense strand to SEQ ID NO: 1071114
ucaacuccugauuugggca

SEQ ID NO: 1071116 - RNA, 19 nt, Artificial Sequence
  Description of Artificial Sequence: Synthetic oligonucleotide
  Sense strand starting at position 1044 of SEQ ID NO: 915322
aguugaugaggagguucaa

SEQ ID NO: 1071117 - RNA, 19 nt, Artificial Sequence
  Description of Artificial Sequence: Synthetic oligonucleotide
  Antisense strand to SEQ ID NO: 1071116
uugaaccuccucaucaacu

SEQ ID NO: 1071118 - RNA, 19 nt, Artificial Sequence
  Description of Artificial Sequence: Synthetic oligonucleotide
  Sense strand starting at position 1073 of SEQ ID NO: 915322
auuccaauucuuggaggua

SEQ ID NO: 1071119 - RNA, 19 nt, Artificial Sequence
  Description of Artificial Sequence: Synthetic oligonucleotide
  Antisense strand to SEQ ID NO: 1071118
uaccuccaagaauuggaau

SEQ ID NO: 1071120 - RNA, 19 nt, Artificial Sequence
  Description of Artificial Sequence: Synthetic oligonucleotide
  Sense strand starting at position 1074 of SEQ ID NO: 915322
uuccaauucuuggagguau

SEQ ID NO: 1071121 - RNA, 19 nt, Artificial Sequence
  Description of Artificial Sequence: Synthetic oligonucleotide
  Antisense strand to SEQ ID NO: 1071120
auaccuccaagaauuggaa

SEQ ID NO: 1071122 - RNA, 19 nt, Artificial Sequence
  Description of Artificial Sequence: Synthetic oligonucleotide
  Sense strand starting at position 1143 of SEQ ID NO: 915322
cuagaucuguuuccacagu

SEQ ID NO: 1071123 - RNA, 19 nt, Artificial Sequence
  Description of Artificial Sequence: Synthetic oligonucleotide
  Antisense strand to SEQ ID NO: 1071122
acuguggaaacagaucuag

SEQ ID NO: 1071124 - RNA, 19 nt, Artificial Sequence
  Description of Artificial Sequence: Synthetic oligonucleotide
  Sense strand starting at position 1159 of SEQ ID NO: 915322
aguucugcaacaugggaau

SEQ ID NO: 1071125 - RNA, 19 nt, Artificial Sequence
  Description of Artificial Sequence: Synthetic oligonucleotide
  Antisense strand to SEQ ID NO: 1071124
auucccauguugcagaacu

SEQ ID NO: 1071126 - RNA, 19 nt, Artificial Sequence
  Description of Artificial Sequence: Synthetic oligonucleotide
  Sense strand starting at position 1170 of SEQ ID NO: 915322
augggaaucacaugguuua

SEQ ID NO: 1071127 - RNA, 19 nt, Artificial Sequence
  Description of Artificial Sequence: Synthetic oligonucleotide
  Antisense strand to SEQ ID NO: 1071126
uaaaccaugugauucccau

SEQ ID NO: 1071128 - RNA, 19 nt, Artificial Sequence
  Description of Artificial Sequence: Synthetic oligonucleotide
  Sense strand starting at position 1173 of SEQ ID NO: 915322
ggaaucacaugguuuagau

SEQ ID NO: 1071129 - RNA, 19 nt, Artificial Sequence
  Description of Artificial Sequence: Synthetic oligonucleotide
  Antisense strand to SEQ ID NO: 1071128
aucuaaaccaugugauucc

SEQ ID NO: 1071130 - RNA, 19 nt, Artificial Sequence
  Description of Artificial Sequence: Synthetic oligonucleotide
  Sense strand starting at position 1182 of SEQ ID NO: 915322
ugguuuagauuaccucuaa

SEQ ID NO: 1071131 - RNA, 19 nt, Artificial Sequence
  Description of Artificial Sequence: Synthetic oligonucleotide
  Antisense strand to SEQ ID NO: 1071130
uuagagguaaucuaaacca

SEQ ID NO: 1071132 - RNA, 19 nt, Artificial Sequence
  Description of Artificial Sequence: Synthetic oligonucleotide
  Sense strand starting at position 1183 of SEQ ID NO: 915322
gguuuagauuaccucuaag

SEQ ID NO: 1071133 - RNA, 19 nt, Artificial Sequence
  Description of Artificial Sequence: Synthetic oligonucleotide
  Antisense strand to SEQ ID NO: 1071132
cuuagagguaaucuaaacc

SEQ ID NO: 1071134 - RNA, 19 nt, Artificial Sequence
  Description of Artificial Sequence: Synthetic oligonucleotide
  Sense strand starting at position 1186 of SEQ ID NO: 915322
uuagauuaccucuaagguc

SEQ ID NO: 1071135 - RNA, 19 nt, Artificial Sequence
  Description of Artificial Sequence: Synthetic oligonucleotide
  Antisense strand to SEQ ID NO: 1071134
gaccuuagagguaaucuaa

SEQ ID NO: 1071136 - RNA, 19 nt, Artificial Sequence
  Description of Artificial Sequence: Synthetic oligonucleotide
  Sense strand starting at position 1266 of SEQ ID NO: 915322
ugcagauaguucuacauuc

SEQ ID NO: 1071137 - RNA, 19 nt, Artificial Sequence
  Description of Artificial Sequence: Synthetic oligonucleotide
  Antisense strand to SEQ ID NO: 1071136
gaauguagaacuaucugca

SEQ ID NO: 1071138 - RNA, 19 nt, Artificial Sequence
  Description of Artificial Sequence: Synthetic oligonucleotide
  Sense strand starting at position 1290 of SEQ ID NO: 915322
agguacuacuuagcugaaa

SEQ ID NO: 1071139 - RNA, 19 nt, Artificial Sequence
  Description of Artificial Sequence: Synthetic oligonucleotide
  Antisense strand to SEQ ID NO: 1071138
uuucagcuaaguaguaccu

SEQ ID NO: 1071140 - RNA, 19 nt, Artificial Sequence
  Description of Artificial Sequence: Synthetic oligonucleotide
  Sense strand starting at position 1333 of SEQ ID NO: 915322
gcuccaaagucccuagaga

SEQ ID NO: 1071141 - RNA, 19 nt, Artificial Sequence
  Description of Artificial Sequence: Synthetic oligonucleotide
  Antisense strand to SEQ ID NO: 1071140
ucucuagggacuuuggagc

SEQ ID NO: 1071142 - RNA, 19 nt, Artificial Sequence
  Description of Artificial Sequence: Synthetic oligonucleotide
  Sense strand starting at position 1410 of SEQ ID NO: 915322
ccugcucuguacuugauau

SEQ ID NO: 1071143 - RNA, 19 nt, Artificial Sequence
  Description of Artificial Sequence: Synthetic oligonucleotide
  Antisense strand to SEQ ID NO: 1071142
auaucaaguacagagcagg

SEQ ID NO: 1071144 - RNA, 19 nt, Artificial Sequence
  Description of Artificial Sequence: Synthetic oligonucleotide
  Sense strand starting at position 1414 of SEQ ID NO: 915322
cucuguacuugauauacau

SEQ ID NO: 1071145 - RNA, 19 nt, Artificial Sequence
  Description of Artificial Sequence: Synthetic oligonucleotide
  Antisense strand to SEQ ID NO: 1071144
auguauaucaaguacagag

SEQ ID NO: 1071146 - RNA, 19 nt, Artificial Sequence
  Description of Artificial Sequence: Synthetic oligonucleotide
  Sense strand starting at position 1423 of SEQ ID NO: 915322
ugauauacauugucucuuu

SEQ ID NO: 1071147 - RNA, 19 nt, Artificial Sequence
  Description of Artificial Sequence: Synthetic oligonucleotide
  Antisense strand to SEQ ID NO: 1071146
aaagagacaauguauauca

SEQ ID NO: 1071148 - RNA, 19 nt, Artificial Sequence
  Description of Artificial Sequence: Synthetic oligonucleotide
  Sense strand starting at position 1449 of SEQ ID NO: 915322
accauaauucuaugaggua

SEQ ID NO: 1071149 - RNA, 19 nt, Artificial Sequence
  Description of Artificial Sequence: Synthetic oligonucleotide
  Antisense strand to SEQ ID NO: 1071148
uaccucauagaauuauggu

SEQ ID NO: 1071150 - RNA, 19 nt, Artificial Sequence
  Description of Artificial Sequence: Synthetic oligonucleotide
  Sense strand starting at position 1450 of SEQ ID NO: 915322
ccauaauucuaugagguag

SEQ ID NO: 1071151 - RNA, 19 nt, Artificial Sequence
  Description of Artificial Sequence: Synthetic oligonucleotide
  Antisense strand to SEQ ID NO: 1071150
cuaccucauagaauuaugg

SEQ ID NO: 1071152 - RNA, 19 nt, Artificial Sequence
  Description of Artificial Sequence: Synthetic oligonucleotide
  Sense strand starting at position 1468 of SEQ ID NO: 915322
ggugcuacagccuguauau

SEQ ID NO: 1071153 - RNA, 19 nt, Artificial Sequence
  Description of Artificial Sequence: Synthetic oligonucleotide
  Antisense strand to SEQ ID NO: 1071152
auauacaggcuguagcacc

SEQ ID NO: 1071154 - RNA, 19 nt, Artificial Sequence
  Description of Artificial Sequence: Synthetic oligonucleotide
  Sense strand starting at position 1470 of SEQ ID NO: 915322
ugcuacagccuguauauuu

SEQ ID NO: 1071155 - RNA, 19 nt, Artificial Sequence
  Description of Artificial Sequence: Synthetic oligonucleotide
  Antisense strand to SEQ ID NO: 1071154
aaauauacaggcuguagca

SEQ ID NO: 1071156 - RNA, 19 nt, Artificial Sequence
  Description of Artificial Sequence: Synthetic oligonucleotide
  Sense strand starting at position 1734 of SEQ ID NO: 915322
gcagcaguuccugggaaac

SEQ ID NO: 1071157 - RNA, 19 nt, Artificial Sequence
  Description of Artificial Sequence: Synthetic oligonucleotide
  Antisense strand to SEQ ID NO: 1071156
guuucccaggaacugcugc

SEQ ID NO: 1071158 - RNA, 19 nt, Artificial Sequence
  Description of Artificial Sequence: Synthetic oligonucleotide
  Sense strand starting at position 2137 of SEQ ID NO: 915322
acuaauuucggcugcguga

SEQ ID NO: 1071159 - RNA, 19 nt, Artificial Sequence
  Description of Artificial Sequence: Synthetic oligonucleotide
  Antisense strand to SEQ ID NO: 1071158
ucacgcagccgaaauuagu

SEQ ID NO: 1071160 - RNA, 19 nt, Artificial Sequence
  Description of Artificial Sequence: Synthetic oligonucleotide
  Sense strand starting at position 2162 of SEQ ID NO: 915322
ccggaagagcucuggauac

SEQ ID NO: 1071161 - RNA, 19 nt, Artificial Sequence
  Description of Artificial Sequence: Synthetic oligonucleotide
  Antisense strand to SEQ ID NO: 1071160
guauccagagcucuuccgg

SEQ ID NO: 1071162 - RNA, 19 nt, Artificial Sequence
  Description of Artificial Sequence: Synthetic oligonucleotide
  Sense strand starting at position 2176 of SEQ ID NO: 915322
gauaccugaguuugagcau

SEQ ID NO: 1071163 - RNA, 19 nt, Artificial Sequence
  Description of Artificial Sequence: Synthetic oligonucleotide
  Antisense strand to SEQ ID NO: 1071162
augcucaaacucagguauc

SEQ ID NO: 1071164 - RNA, 19 nt, Artificial Sequence
  Description of Artificial Sequence: Synthetic oligonucleotide
  Sense strand starting at position 2179 of SEQ ID NO: 915322
accugaguuugagcauguu

SEQ ID NO: 1071165 - RNA, 19 nt, Artificial Sequence
  Description of Artificial Sequence: Synthetic oligonucleotide
  Antisense strand to SEQ ID NO: 1071164
aacaugcucaaacucaggu

SEQ ID NO: 1071166 - RNA, 19 nt, Artificial Sequence
  Description of Artificial Sequence: Synthetic oligonucleotide
  Sense strand starting at position 2182 of SEQ ID NO: 915322
ugaguuugagcauguugga

SEQ ID NO: 1071167 - RNA, 19 nt, Artificial Sequence
  Description of Artificial Sequence: Synthetic oligonucleotide
  Antisense strand to SEQ ID NO: 1071166
uccaacaugcucaaacuca

SEQ ID NO: 1071168 - RNA, 19 nt, Artificial Sequence
  Description of Artificial Sequence: Synthetic oligonucleotide
  Sense strand starting at position 2236 of SEQ ID NO: 915322
ccaucuaccuguugaaaga

SEQ ID NO: 1071169 - RNA, 19 nt, Artificial Sequence
  Description of Artificial Sequence: Synthetic oligonucleotide
  Antisense strand to SEQ ID NO: 1071168
ucuuucaacagguagaugg

SEQ ID NO: 1071170 - RNA, 19 nt, Artificial Sequence
  Description of Artificial Sequence: Synthetic oligonucleotide
  Sense strand starting at position 3788 of SEQ ID NO: 915322
gccaguagauacuauuuaa

SEQ ID NO: 1071171 - RNA, 19 nt, Artificial Sequence
  Description of Artificial Sequence: Synthetic oligonucleotide
  Antisense strand to SEQ ID NO: 1071170
uuaaauaguaucuacuggc

SEQ ID NO: 1071172 - RNA, 19 nt, Artificial Sequence
  Description of Artificial Sequence: Synthetic oligonucleotide
  Sense strand starting at position 3883 of SEQ ID NO: 915322
caagucugguaccugagau

SEQ ID NO: 1071173 - RNA, 19 nt, Artificial Sequence
  Description of Artificial Sequence: Synthetic oligonucleotide
  Antisense strand to SEQ ID NO: 1071172
aucucagguaccagacuug

SEQ ID NO: 1071174 - RNA, 19 nt, Artificial Sequence
  Description of Artificial Sequence: Synthetic oligonucleotide
  Sense strand starting at position 3936 of SEQ ID NO: 915322
cuuagcauuuguugauuaa

SEQ ID NO: 1071175 - RNA, 19 nt, Artificial Sequence
  Description of Artificial Sequence: Synthetic oligonucleotide
  Antisense strand to SEQ ID NO: 1071174
uuaaucaacaaaugcuaag

SEQ ID NO: 1071176 - RNA, 19 nt, Artificial Sequence
  Description of Artificial Sequence: Synthetic oligonucleotide
  Sense strand starting at position 3948 of SEQ ID NO: 915322
ugauuaauuugccagagcu

SEQ ID NO: 1071177 - RNA, 19 nt, Artificial Sequence
  Description of Artificial Sequence: Synthetic oligonucleotide
  Antisense strand to SEQ ID NO: 1071176
agcucuggcaaauuaauca

SEQ ID NO: 1071178 - RNA, 19 nt, Artificial Sequence
  Description of Artificial Sequence: Synthetic oligonucleotide
  Sense strand starting at position 330 of SEQ ID NO: 915323
ccaggugaucuauaagcac

SEQ ID NO: 1071179 - RNA, 19 nt, Artificial Sequence
  Description of Artificial Sequence: Synthetic oligonucleotide
  Antisense strand to SEQ ID NO: 1071178
gugcuuauagaucaccugg

SEQ ID NO: 1071180 - RNA, 19 nt, Artificial Sequence
  Description of Artificial Sequence: Synthetic oligonucleotide
  Sense strand starting at position 333 of SEQ ID NO: 915323
ggugaucuauaagcacauu

SEQ ID NO: 1071181 - RNA, 19 nt, Artificial Sequence
  Description of Artificial Sequence: Synthetic oligonucleotide
  Antisense strand to SEQ ID NO: 1071180
aaugugcuuauagaucacc

SEQ ID NO: 1071182 - RNA, 19 nt, Artificial Sequence
  Description of Artificial Sequence: Synthetic oligonucleotide
  Sense strand starting at position 353 of SEQ ID NO: 915323
agguuugagaagcauuagu

SEQ ID NO: 1071183 - RNA, 19 nt, Artificial Sequence
  Description of Artificial Sequence: Synthetic oligonucleotide
  Antisense strand to SEQ ID NO: 1071182
acuaaugcuucucaaaccu

SEQ ID NO: 1071184 - RNA, 19 nt, Artificial Sequence
  Description of Artificial Sequence: Synthetic oligonucleotide
  Sense strand starting at position 358 of SEQ ID NO: 915323
ugagaagcauuaguuuaga

SEQ ID NO: 1071185 - RNA, 19 nt, Artificial Sequence
  Description of Artificial Sequence: Synthetic oligonucleotide
  Antisense strand to SEQ ID NO: 1071184
ucuaaacuaaugcuucuca

SEQ ID NO: 1071186 - RNA, 19 nt, Artificial Sequence
  Description of Artificial Sequence: Synthetic oligonucleotide
  Sense strand starting at position 384 of SEQ ID NO: 915323
ggaagaauuauucguccaa

SEQ ID NO: 1071187 - RNA, 19 nt, Artificial Sequence
  Description of Artificial Sequence: Synthetic oligonucleotide
  Antisense strand to SEQ ID NO: 1071186
uuggacgaauaauucuucc

SEQ ID NO: 1071188 - RNA, 19 nt, Artificial Sequence
  Description of Artificial Sequence: Synthetic oligonucleotide
  Sense strand starting at position 424 of SEQ ID NO: 915323
ccaaauaccucauuguagu

SEQ ID NO: 1071189 - RNA, 19 nt, Artificial Sequence
  Description of Artificial Sequence: Synthetic oligonucleotide
  Antisense strand to SEQ ID NO: 1071188
acuacaaugagguauuugg

SEQ ID NO: 1071190 - RNA, 19 nt, Artificial Sequence
  Description of Artificial Sequence: Synthetic oligonucleotide
  Sense strand starting at position 448 of SEQ ID NO: 915323
auuuguuggucuuccucau

SEQ ID NO: 1071191 - RNA, 19 nt, Artificial Sequence
  Description of Artificial Sequence: Synthetic oligonucleotide
  Antisense strand to SEQ ID NO: 1071190
augaggaagaccaacaaau

SEQ ID NO: 1071192 - RNA, 19 nt, Artificial Sequence
  Description of Artificial Sequence: Synthetic oligonucleotide
  Sense strand starting at position 858 of SEQ ID NO: 915323
gcccgcacgagguuuaauu

SEQ ID NO: 1071193 - RNA, 19 nt, Artificial Sequence
  Description of Artificial Sequence: Synthetic oligonucleotide
  Antisense strand to SEQ ID NO: 1071192
aauuaaaccucgugcgggc

SEQ ID NO: 1071194 - RNA, 19 nt, Artificial Sequence
  Description of Artificial Sequence: Synthetic oligonucleotide
  Sense strand starting at position 918 of SEQ ID NO: 915323
gguguugguagagaaguaa

SEQ ID NO: 1071195 - RNA, 19 nt, Artificial Sequence
  Description of Artificial Sequence: Synthetic oligonucleotide
  Antisense strand to SEQ ID NO: 1071194
uuacuucucuaccaacacc

SEQ ID NO: 1071196 - RNA, 19 nt, Artificial Sequence
  Description of Artificial Sequence: Synthetic oligonucleotide
  Sense strand starting at position 957 of SEQ ID NO: 915323
cuguauuaagaguaccaca

SEQ ID NO: 1071197 - RNA, 19 nt, Artificial Sequence
  Description of Artificial Sequence: Synthetic oligonucleotide
  Antisense strand to SEQ ID NO: 1071196
ugugguacucuuaauacag

SEQ ID NO: 1071198 - RNA, 19 nt, Artificial Sequence
  Description of Artificial Sequence: Synthetic oligonucleotide
  Sense strand starting at position 1209 of SEQ ID NO: 915323
ucagguauguggagaagga

SEQ ID NO: 1071199 - RNA, 19 nt, Artificial Sequence
  Description of Artificial Sequence: Synthetic oligonucleotide
  Antisense strand to SEQ ID NO: 1071198
uccuucuccacauaccuga

SEQ ID NO: 1071200 - RNA, 19 nt, Artificial Sequence
  Description of Artificial Sequence: Synthetic oligonucleotide
  Sense strand starting at position 1244 of SEQ ID NO: 915323
gggaaaggaaaucguuguu

SEQ ID NO: 1071201 - RNA, 19 nt, Artificial Sequence
  Description of Artificial Sequence: Synthetic oligonucleotide
  Antisense strand to SEQ ID NO: 1071200
aacaacgauuuccuuuccc

SEQ ID NO: 1071202 - RNA, 19 nt, Artificial Sequence
  Description of Artificial Sequence: Synthetic oligonucleotide
  Sense strand starting at position 1247 of SEQ ID NO: 915323
aaaggaaaucguuguuuag

SEQ ID NO: 1071203 - RNA, 19 nt, Artificial Sequence
  Description of Artificial Sequence: Synthetic oligonucleotide
  Antisense strand to SEQ ID NO: 1071202
cuaaacaacgauuuccuuu

SEQ ID NO: 1071204 - RNA, 19 nt, Artificial Sequence
  Description of Artificial Sequence: Synthetic oligonucleotide
  Sense strand starting at position 1251 of SEQ ID NO: 915323
gaaaucguuguuuagggua

SEQ ID NO: 1071205 - RNA, 19 nt, Artificial Sequence
  Description of Artificial Sequence: Synthetic oligonucleotide
  Antisense strand to SEQ ID NO: 1071204
uacccuaaacaacgauuuc

SEQ ID NO: 1071206 - RNA, 19 nt, Artificial Sequence
  Description of Artificial Sequence: Synthetic oligonucleotide
  Sense strand starting at position 1258 of SEQ ID NO: 915323
uuguuuaggguauaacuua

SEQ ID NO: 1071207 - RNA, 19 nt, Artificial Sequence
  Description of Artificial Sequence: Synthetic oligonucleotide
  Antisense strand to SEQ ID NO: 1071206
uaaguuauacccuaaacaa

SEQ ID NO: 1071208 - RNA, 19 nt, Artificial Sequence
  Description of Artificial Sequence: Synthetic oligonucleotide
  Sense strand starting at position 1369 of SEQ ID NO: 915323
aauugagagcacugcagaa

SEQ ID NO: 1071209 - RNA, 19 nt, Artificial Sequence
  Description of Artificial Sequence: Synthetic oligonucleotide
  Antisense strand to SEQ ID NO: 1071208
uucugcagugcucucaauu

SEQ ID NO: 1071210 - RNA, 19 nt, Artificial Sequence
  Description of Artificial Sequence: Synthetic oligonucleotide
  Sense strand starting at position 2457 of SEQ ID NO: 915323
aaagaucuaccucgaggua

SEQ ID NO: 1071211 - RNA, 19 nt, Artificial Sequence
  Description of Artificial Sequence: Synthetic oligonucleotide
  Antisense strand to SEQ ID NO: 1071210
uaccucgagguagaucuuu

SEQ ID NO: 1071212 - RNA, 19 nt, Artificial Sequence
  Description of Artificial Sequence: Synthetic oligonucleotide
  Sense strand starting at position 2470 of SEQ ID NO: 915323
gagguaguucccuacagac

SEQ ID NO: 1071213 - RNA, 19 nt, Artificial Sequence
  Description of Artificial Sequence: Synthetic oligonucleotide
  Antisense strand to SEQ ID NO: 1071212
gucuguagggaacuaccuc

SEQ ID NO: 1071214 - RNA, 19 nt, Artificial Sequence
  Description of Artificial Sequence: Synthetic oligonucleotide
  Sense strand starting at position 2522 of SEQ ID NO: 915323
uggcccuggcauuaaauua

SEQ ID NO: 1071215 - RNA, 19 nt, Artificial Sequence
  Description of Artificial Sequence: Synthetic oligonucleotide
  Antisense strand to SEQ ID NO: 1071214
uaauuuaaugccagggcca

SEQ ID NO: 1071216 - RNA, 19 nt, Artificial Sequence
  Description of Artificial Sequence: Synthetic oligonucleotide
  Sense strand starting at position 2591 of SEQ ID NO: 915323
gcaguuuacgaaucgcguu

SEQ ID NO: 1071217 - RNA, 19 nt, Artificial Sequence
  Description of Artificial Sequence: Synthetic oligonucleotide
  Antisense strand to SEQ ID NO: 1071216
aacgcgauucguaaacugc

SEQ ID NO: 1071218 - RNA, 19 nt, Artificial Sequence
  Description of Artificial Sequence: Synthetic oligonucleotide
  Sense strand starting at position 2596 of SEQ ID NO: 915323
uuacgaaucgcguucuauc

SEQ ID NO: 1071219 - RNA, 19 nt, Artificial Sequence
  Description of Artificial Sequence: Synthetic oligonucleotide
  Antisense strand to SEQ ID NO: 1071218
gauagaacgcgauucguaa

SEQ ID NO: 1071220 - RNA, 19 nt, Artificial Sequence
  Description of Artificial Sequence: Synthetic oligonucleotide
  Sense strand starting at position 2615 of SEQ ID NO: 915323
gccucaaucccucaguaag

SEQ ID NO: 1071221 - RNA, 19 nt, Artificial Sequence
  Description of Artificial Sequence: Synthetic oligonucleotide
  Antisense strand to SEQ ID NO: 1071220
cuuacugagggauugaggc

SEQ ID NO: 1071222 - RNA, 19 nt, Artificial Sequence
  Description of Artificial Sequence: Synthetic oligonucleotide
  Sense strand starting at position 2618 of SEQ ID NO: 915323
ucaaucccucaguaaggua

SEQ ID NO: 1071223 - RNA, 19 nt, Artificial Sequence
  Description of Artificial Sequence: Synthetic oligonucleotide
  Antisense strand to SEQ ID NO: 1071222
uaccuuacugagggauuga

SEQ ID NO: 1071224 - RNA, 19 nt, Artificial Sequence
  Description of Artificial Sequence: Synthetic oligonucleotide
  Sense strand starting at position 2712 of SEQ ID NO: 915323
guucgugagcggucaaacu

SEQ ID NO: 1071225 - RNA, 19 nt, Artificial Sequence
  Description of Artificial Sequence: Synthetic oligonucleotide
  Antisense strand to SEQ ID NO: 1071224
aguuugaccgcucacgaac

SEQ ID NO: 1071226 - RNA, 19 nt, Artificial Sequence
  Description of Artificial Sequence: Synthetic oligonucleotide
  Sense strand starting at position 2884 of SEQ ID NO: 915323
uauaguaaacuaggaggua

SEQ ID NO: 1071227 - RNA, 19 nt, Artificial Sequence
  Description of Artificial Sequence: Synthetic oligonucleotide
  Antisense strand to SEQ ID NO: 1071226
uaccuccuaguuuacuaua

SEQ ID NO: 1071228 - RNA, 19 nt, Artificial Sequence
  Description of Artificial Sequence: Synthetic oligonucleotide
  Sense strand starting at position 2934 of SEQ ID NO: 915323
gaaguuguugagggaagau

SEQ ID NO: 1071229 - RNA, 19 nt, Artificial Sequence
  Description of Artificial Sequence: Synthetic oligonucleotide
  Antisense strand to SEQ ID NO: 1071228
aucuucccucaacaacuuc

SEQ ID NO: 1071230 - RNA, 19 nt, Artificial Sequence
  Description of Artificial Sequence: Synthetic oligonucleotide
  Sense strand starting at position 2944 of SEQ ID NO: 915323
agggaagauggucggcauu

SEQ ID NO: 1071231 - RNA, 19 nt, Artificial Sequence
  Description of Artificial Sequence: Synthetic oligonucleotide
  Antisense strand to SEQ ID NO: 1071230
aaugccgaccaucuucccu

SEQ ID NO: 1071232 - RNA, 19 nt, Artificial Sequence
  Description of Artificial Sequence: Synthetic oligonucleotide
  Sense strand starting at position 3005 of SEQ ID NO: 915323
agcaaugguaaugggaaua

SEQ ID NO: 1071233 - RNA, 19 nt, Artificial Sequence
  Description of Artificial Sequence: Synthetic oligonucleotide
  Antisense strand to SEQ ID NO: 1071232
uauucccauuaccauugcu

SEQ ID NO: 1071234 - RNA, 19 nt, Artificial Sequence
  Description of Artificial Sequence: Synthetic oligonucleotide
  Sense strand starting at position 3091 of SEQ ID NO: 915323
auggaaagcucaccuaagu

SEQ ID NO: 1071235 - RNA, 19 nt, Artificial Sequence
  Description of Artificial Sequence: Synthetic oligonucleotide
  Antisense strand to SEQ ID NO: 1071234
acuuaggugagcuuuccau

SEQ ID NO: 1071236 - RNA, 19 nt, Artificial Sequence
  Description of Artificial Sequence: Synthetic oligonucleotide
  Sense strand starting at position 3105 of SEQ ID NO: 915323
uaaguugaggucugggaaa

SEQ ID NO: 1071237 - RNA, 19 nt, Artificial Sequence
  Description of Artificial Sequence: Synthetic oligonucleotide
  Antisense strand to SEQ ID NO: 1071236
uuucccagaccucaacuua

SEQ ID NO: 1071238 - RNA, 19 nt, Artificial Sequence
  Description of Artificial Sequence: Synthetic oligonucleotide
  Sense strand starting at position 3107 of SEQ ID NO: 915323
aguugaggucugggaaaug

SEQ ID NO: 1071239 - RNA, 19 nt, Artificial Sequence
  Description of Artificial Sequence: Synthetic oligonucleotide
  Antisense strand to SEQ ID NO: 1071238
cauuucccagaccucaacu

SEQ ID NO: 1071240 - RNA, 19 nt, Artificial Sequence
  Description of Artificial Sequence: Synthetic oligonucleotide
  Sense strand starting at position 3182 of SEQ ID NO: 915323
uucuuagaauggcuaugau

SEQ ID NO: 1071241 - RNA, 19 nt, Artificial Sequence
  Description of Artificial Sequence: Synthetic oligonucleotide
  Antisense strand to SEQ ID NO: 1071240
aucauagccauucuaagaa

SEQ ID NO: 1071242 - RNA, 19 nt, Artificial Sequence
  Description of Artificial Sequence: Synthetic oligonucleotide
  Sense strand starting at position 3204 of SEQ ID NO: 915323
gggcaaguacauuacaacu

SEQ ID NO: 1071243 - RNA, 19 nt, Artificial Sequence
  Description of Artificial Sequence: Synthetic oligonucleotide
  Antisense strand to SEQ ID NO: 1071242
aguuguaauguacuugccc

SEQ ID NO: 1071244 - RNA, 19 nt, Artificial Sequence
  Description of Artificial Sequence: Synthetic oligonucleotide
  Sense strand starting at position 3267 of SEQ ID NO: 915323
acaucauggcuguacagua

SEQ ID NO: 1071245 - RNA, 19 nt, Artificial Sequence
  Description of Artificial Sequence: Synthetic oligonucleotide
  Antisense strand to SEQ ID NO: 1071244
uacuguacagccaugaugu

SEQ ID NO: 1071246 - RNA, 19 nt, Artificial Sequence
  Description of Artificial Sequence: Synthetic oligonucleotide
  Sense strand starting at position 3537 of SEQ ID NO: 915323
ucacguguccuggagagaa

SEQ ID NO: 1071247 - RNA, 19 nt, Artificial Sequence
  Description of Artificial Sequence: Synthetic oligonucleotide
  Antisense strand to SEQ ID NO: 1071246
uucucuccaggacacguga

SEQ ID NO: 1071248 - RNA, 19 nt, Artificial Sequence
  Description of Artificial Sequence: Synthetic oligonucleotide
  Sense strand starting at position 3539 of SEQ ID NO: 915323
acguguccuggagagaaau

SEQ ID NO: 1071249 - RNA, 19 nt, Artificial Sequence
  Description of Artificial Sequence: Synthetic oligonucleotide
  Antisense strand to SEQ ID NO: 1071248
auuucucuccaggacacgu

SEQ ID NO: 1071250 - RNA, 19 nt, Artificial Sequence
  Description of Artificial Sequence: Synthetic oligonucleotide
  Sense strand starting at position 3758 of SEQ ID NO: 915323
uuacaucugagguggucaa

SEQ ID NO: 1071251 - RNA, 19 nt, Artificial Sequence
  Description of Artificial Sequence: Synthetic oligonucleotide
  Antisense strand to SEQ ID NO: 1071250
uugaccaccucagauguaa

SEQ ID NO: 1071252 - RNA, 19 nt, Artificial Sequence
  Description of Artificial Sequence: Synthetic oligonucleotide
  Sense strand starting at position 3759 of SEQ ID NO: 915323
uacaucugagguggucaau

SEQ ID NO: 1071253 - RNA, 19 nt, Artificial Sequence
  Description of Artificial Sequence: Synthetic oligonucleotide
  Antisense strand to SEQ ID NO: 1071252
auugaccaccucagaugua

SEQ ID NO: 1071254 - RNA, 19 nt, Artificial Sequence
  Description of Artificial Sequence: Synthetic oligonucleotide
  Sense strand starting at position 3881 of SEQ ID NO: 915323
cucauaucucccuaggagu

SEQ ID NO: 1071255 - RNA, 19 nt, Artificial Sequence
  Description of Artificial Sequence: Synthetic oligonucleotide
  Antisense strand to SEQ ID NO: 1071254
acuccuagggagauaugag

SEQ ID NO: 1071256 - RNA, 19 nt, Artificial Sequence
  Description of Artificial Sequence: Synthetic oligonucleotide
  Sense strand starting at position 3892 of SEQ ID NO: 915323
cuaggaguuuguuuaaauu

SEQ ID NO: 1071257 - RNA, 19 nt, Artificial Sequence
  Description of Artificial Sequence: Synthetic oligonucleotide
  Antisense strand to SEQ ID NO: 1071256
aauuuaaacaaacuccuag

SEQ ID NO: 1071258 - RNA, 19 nt, Artificial Sequence
  Description of Artificial Sequence: Synthetic oligonucleotide
  Sense strand starting at position 114 of SEQ ID NO: 915324
gcuggaagucgcuauagag

SEQ ID NO: 1071259 - RNA, 19 nt, Artificial Sequence
  Description of Artificial Sequence: Synthetic oligonucleotide
  Antisense strand to SEQ ID NO: 1071258
cucuauagcgacuuccagc

SEQ ID NO: 1071260 - RNA, 19 nt, Artificial Sequence
  Description of Artificial Sequence: Synthetic oligonucleotide
  Sense strand starting at position 308 of SEQ ID NO: 915324
gccaauaaggcgugauuga

SEQ ID NO: 1071261 - RNA, 19 nt, Artificial Sequence
  Description of Artificial Sequence: Synthetic oligonucleotide
  Antisense strand to SEQ ID NO: 1071260
ucaaucacgccuuauuggc

SEQ ID NO: 1071262 - RNA, 19 nt, Artificial Sequence
  Description of Artificial Sequence: Synthetic oligonucleotide
  Sense strand starting at position 309 of SEQ ID NO: 915324
ccaauaaggcgugauugag

SEQ ID NO: 1071263 - RNA, 19 nt, Artificial Sequence
  Description of Artificial Sequence: Synthetic oligonucleotide
  Antisense strand to SEQ ID NO: 1071262
cucaaucacgccuuauugg

SEQ ID NO: 1071264 - RNA, 19 nt, Artificial Sequence
  Description of Artificial Sequence: Synthetic oligonucleotide
  Sense strand starting at position 729 of SEQ ID NO: 915324
cggagcugucuccaaccuu

SEQ ID NO: 1071265 - RNA, 19 nt, Artificial Sequence
  Description of Artificial Sequence: Synthetic oligonucleotide
  Antisense strand to SEQ ID NO: 1071264
aagguuggagacagcuccg

SEQ ID NO: 1071266 - RNA, 19 nt, Artificial Sequence
  Description of Artificial Sequence: Synthetic oligonucleotide
  Sense strand starting at position 1100 of SEQ ID NO: 915324
auagguauggccgaaacuu

SEQ ID NO: 1071267 - RNA, 19 nt, Artificial Sequence
  Description of Artificial Sequence: Synthetic oligonucleotide
  Antisense strand to SEQ ID NO: 1071266
aaguuucggccauaccuau

SEQ ID NO: 1071268 - RNA, 19 nt, Artificial Sequence
  Description of Artificial Sequence: Synthetic oligonucleotide
  Sense strand starting at position 2065 of SEQ ID NO: 915324
cccaauuaccgguaggauc

SEQ ID NO: 1071269 - RNA, 19 nt, Artificial Sequence
  Description of Artificial Sequence: Synthetic oligonucleotide
  Antisense strand to SEQ ID NO: 1071268
gauccuaccgguaauuggg

SEQ ID NO: 1071270 - RNA, 19 nt, Artificial Sequence
  Description of Artificial Sequence: Synthetic oligonucleotide
  Sense strand starting at position 2072 of SEQ ID NO: 915324
accgguaggaucugaaacu

SEQ ID NO: 1071271 - RNA, 19 nt, Artificial Sequence
  Description of Artificial Sequence: Synthetic oligonucleotide
  Antisense strand to SEQ ID NO: 1071270
aguuucagauccuaccggu

SEQ ID NO: 1071272 - RNA, 19 nt, Artificial Sequence
  Description of Artificial Sequence: Synthetic oligonucleotide
  Sense strand starting at position 2134 of SEQ ID NO: 915324
auagcagguucuuugggau

SEQ ID NO: 1071273 - RNA, 19 nt, Artificial Sequence
  Description of Artificial Sequence: Synthetic oligonucleotide
  Antisense strand to SEQ ID NO: 1071272
aucccaaagaaccugcuau

SEQ ID NO: 1071274 - RNA, 19 nt, Artificial Sequence
  Description of Artificial Sequence: Synthetic oligonucleotide
  Sense strand starting at position 2199 of SEQ ID NO: 915324
ugcccuaucuaauuggaaa

SEQ ID NO: 1071275 - RNA, 19 nt, Artificial Sequence
  Description of Artificial Sequence: Synthetic oligonucleotide
  Antisense strand to SEQ ID NO: 1071274
uuuccaauuagauagggca

SEQ ID NO: 1071276 - RNA, 19 nt, Artificial Sequence
  Description of Artificial Sequence: Synthetic oligonucleotide
  Sense strand starting at position 2219 of SEQ ID NO: 915324
augaauagauucuaucaga

SEQ ID NO: 1071277 - RNA, 19 nt, Artificial Sequence
  Description of Artificial Sequence: Synthetic oligonucleotide
  Antisense strand to SEQ ID NO: 1071276
ucugauagaaucuauucau

SEQ ID NO: 1071278 - RNA, 19 nt, Artificial Sequence
  Description of Artificial Sequence: Synthetic oligonucleotide
  Sense strand starting at position 2396 of SEQ ID NO: 915324
caaguuucuccugcugcga

SEQ ID NO: 1071279 - RNA, 19 nt, Artificial Sequence
  Description of Artificial Sequence: Synthetic oligonucleotide
  Antisense strand to SEQ ID NO: 1071278
ucgcagcaggagaaacuug

SEQ ID NO: 1071280 - RNA, 19 nt, Artificial Sequence
  Description of Artificial Sequence: Synthetic oligonucleotide
  Sense strand starting at position 2477 of SEQ ID NO: 915324
gguaacaccucuguaucua

SEQ ID NO: 1071281 - RNA, 19 nt, Artificial Sequence
  Description of Artificial Sequence: Synthetic oligonucleotide
  Antisense strand to SEQ ID NO: 1071280
uagauacagagguguuacc

SEQ ID NO: 1071282 - RNA, 19 nt, Artificial Sequence
  Description of Artificial Sequence: Synthetic oligonucleotide
  Sense strand starting at position 2478 of SEQ ID NO: 915324
guaacaccucuguaucuau

SEQ ID NO: 1071283 - RNA, 19 nt, Artificial Sequence
  Description of Artificial Sequence: Synthetic oligonucleotide
  Antisense strand to SEQ ID NO: 1071282
auagauacagagguguuac

SEQ ID NO: 1071284 - RNA, 19 nt, Artificial Sequence
  Description of Artificial Sequence: Synthetic oligonucleotide
  Sense strand starting at position 2481 of SEQ ID NO: 915324
acaccucuguaucuaugau

SEQ ID NO: 1071285 - RNA, 19 nt, Artificial Sequence
  Description of Artificial Sequence: Synthetic oligonucleotide
  Antisense strand to SEQ ID NO: 1071284
aucauagauacagaggugu

SEQ ID NO: 1071286 - RNA, 19 nt, Artificial Sequence
  Description of Artificial Sequence: Synthetic oligonucleotide
  Sense strand starting at position 2488 of SEQ ID NO: 915324
uguaucuaugauggaaguu

SEQ ID NO: 1071287 - RNA, 19 nt, Artificial Sequence
  Description of Artificial Sequence: Synthetic oligonucleotide
  Antisense strand to SEQ ID NO: 1071286
aacuuccaucauagauaca

SEQ ID NO: 1071288 - RNA, 19 nt, Artificial Sequence
  Description of Artificial Sequence: Synthetic oligonucleotide
  Sense strand starting at position 2489 of SEQ ID NO: 915324
guaucuaugauggaaguuu

SEQ ID NO: 1071289 - RNA, 19 nt, Artificial Sequence
  Description of Artificial Sequence: Synthetic oligonucleotide
  Antisense strand to SEQ ID NO: 1071288
aaacuuccaucauagauac

SEQ ID NO: 1071290 - RNA, 19 nt, Artificial Sequence
  Description of Artificial Sequence: Synthetic oligonucleotide
  Sense strand starting at position 2526 of SEQ ID NO: 915324
uucgauuugucuuaaggaa

SEQ ID NO: 1071291 - RNA, 19 nt, Artificial Sequence
  Description of Artificial Sequence: Synthetic oligonucleotide
  Antisense strand to SEQ ID NO: 1071290
uuccuuaagacaaaucgaa

SEQ ID NO: 1071292 - RNA, 19 nt, Artificial Sequence
  Description of Artificial Sequence: Synthetic oligonucleotide
  Sense strand starting at position 2538 of SEQ ID NO: 915324
uaaggaauguguuccaauu

SEQ ID NO: 1071293 - RNA, 19 nt, Artificial Sequence
  Description of Artificial Sequence: Synthetic oligonucleotide
  Antisense strand to SEQ ID NO: 1071292
aauuggaacacauuccuua

SEQ ID NO: 1071294 - RNA, 19 nt, Artificial Sequence
  Description of Artificial Sequence: Synthetic oligonucleotide
  Sense strand starting at position 2574 of SEQ ID NO: 915324
uaaggaaaguuuccuuuag

SEQ ID NO: 1071295 - RNA, 19 nt, Artificial Sequence
  Description of Artificial Sequence: Synthetic oligonucleotide
  Antisense strand to SEQ ID NO: 1071294
cuaaaggaaacuuuccuua

SEQ ID NO: 1071296 - RNA, 19 nt, Artificial Sequence
  Description of Artificial Sequence: Synthetic oligonucleotide
  Sense strand starting at position 2576 of SEQ ID NO: 915324
aggaaaguuuccuuuagcu

SEQ ID NO: 1071297 - RNA, 19 nt, Artificial Sequence
  Description of Artificial Sequence: Synthetic oligonucleotide
  Antisense strand to SEQ ID NO: 1071296
agcuaaaggaaacuuuccu

SEQ ID NO: 1071298 - RNA, 19 nt, Artificial Sequence
  Description of Artificial Sequence: Synthetic oligonucleotide
  Sense strand starting at position 2630 of SEQ ID NO: 915324
aguagagauguugaacagu

SEQ ID NO: 1071299 - RNA, 19 nt, Artificial Sequence
  Description of Artificial Sequence: Synthetic oligonucleotide
  Antisense strand to SEQ ID NO: 1071298
acuguucaacaucucuacu

SEQ ID NO: 1071300 - RNA, 19 nt, Artificial Sequence
  Description of Artificial Sequence: Synthetic oligonucleotide
  Sense strand starting at position 2680 of SEQ ID NO: 915324
aguaauuaucuuugagcuu

SEQ ID NO: 1071301 - RNA, 19 nt, Artificial Sequence
  Description of Artificial Sequence: Synthetic oligonucleotide
  Antisense strand to SEQ ID NO: 1071300
aagcucaaagauaauuacu

SEQ ID NO: 1071302 - RNA, 19 nt, Artificial Sequence
  Description of Artificial Sequence: Synthetic oligonucleotide
  Sense strand starting at position 2742 of SEQ ID NO: 915324
ggaagaauauugcaauaua

SEQ ID NO: 1071303 - RNA, 19 nt, Artificial Sequence
  Description of Artificial Sequence: Synthetic oligonucleotide
  Antisense strand to SEQ ID NO: 1071302
uauauugcaauauucuucc

SEQ ID NO: 1071304 - RNA, 19 nt, Artificial Sequence
  Description of Artificial Sequence: Synthetic oligonucleotide
  Sense strand starting at position 3004 of SEQ ID NO: 915324
gggcuauaugagugagaaa

SEQ ID NO: 1071305 - RNA, 19 nt, Artificial Sequence
  Description of Artificial Sequence: Synthetic oligonucleotide
  Antisense strand to SEQ ID NO: 1071304
uuucucacucauauagccc

SEQ ID NO: 1071306 - RNA, 19 nt, Artificial Sequence
  Description of Artificial Sequence: Synthetic oligonucleotide
  Sense strand starting at position 3007 of SEQ ID NO: 915324
cuauaugagugagaaacaa

SEQ ID NO: 1071307 - RNA, 19 nt, Artificial Sequence
  Description of Artificial Sequence: Synthetic oligonucleotide
  Antisense strand to SEQ ID NO: 1071306
uuguuucucacucauauag

SEQ ID NO: 1071308 - RNA, 19 nt, Artificial Sequence
  Description of Artificial Sequence: Synthetic oligonucleotide
  Sense strand starting at position 3030 of SEQ ID NO: 915324
uuaucauguuagguuacua

SEQ ID NO: 1071309 - RNA, 19 nt, Artificial Sequence
  Description of Artificial Sequence: Synthetic oligonucleotide
  Antisense strand to SEQ ID NO: 1071308
uaguaaccuaacaugauaa

SEQ ID NO: 1071310 - RNA, 19 nt, Artificial Sequence
  Description of Artificial Sequence: Synthetic oligonucleotide
  Sense strand starting at position 3055 of SEQ ID NO: 915324
ggaguugguuguucuagua

SEQ ID NO: 1071311 - RNA, 19 nt, Artificial Sequence
  Description of Artificial Sequence: Synthetic oligonucleotide
  Antisense strand to SEQ ID NO: 1071310
uacuagaacaaccaacucc

SEQ ID NO: 1071312 - RNA, 19 nt, Artificial Sequence
  Description of Artificial Sequence: Synthetic oligonucleotide
  Sense strand starting at position 3071 of SEQ ID NO: 915324
guaaauaguuuacucugau

SEQ ID NO: 1071313 - RNA, 19 nt, Artificial Sequence
  Description of Artificial Sequence: Synthetic oligonucleotide
  Antisense strand to SEQ ID NO: 1071312
aucagaguaaacuauuuac

SEQ ID NO: 1071314 - RNA, 19 nt, Artificial Sequence
  Description of Artificial Sequence: Synthetic oligonucleotide
  Sense strand starting at position 3102 of SEQ ID NO: 915324
uguggaaguuaggcagaua

SEQ ID NO: 1071315 - RNA, 19 nt, Artificial Sequence
  Description of Artificial Sequence: Synthetic oligonucleotide
  Antisense strand to SEQ ID NO: 1071314
uaucugccuaacuuccaca

SEQ ID NO: 1071316 - RNA, 19 nt, Artificial Sequence
  Description of Artificial Sequence: Synthetic oligonucleotide
  Sense strand starting at position 3130 of SEQ ID NO: 915324
uaaagagaauucugggaag

SEQ ID NO: 1071317 - RNA, 19 nt, Artificial Sequence
  Description of Artificial Sequence: Synthetic oligonucleotide
  Antisense strand to SEQ ID NO: 1071316
cuucccagaauucucuuua

SEQ ID NO: 1071318 - RNA, 19 nt, Artificial Sequence
  Description of Artificial Sequence: Synthetic oligonucleotide
  Sense strand starting at position 3242 of SEQ ID NO: 915324
acagaaguauaugagacua

SEQ ID NO: 1071319 - RNA, 19 nt, Artificial Sequence
  Description of Artificial Sequence: Synthetic oligonucleotide
  Antisense strand to SEQ ID NO: 1071318
uagucucauauacuucugu

SEQ ID NO: 1071320 - RNA, 19 nt, Artificial Sequence
  Description of Artificial Sequence: Synthetic oligonucleotide
  Sense strand starting at position 3244 of SEQ ID NO: 915324
agaaguauaugagacuaga

SEQ ID NO: 1071321 - RNA, 19 nt, Artificial Sequence
  Description of Artificial Sequence: Synthetic oligonucleotide
  Antisense strand to SEQ ID NO: 1071320
ucuagucucauauacuucu

SEQ ID NO: 1071322 - RNA, 19 nt, Artificial Sequence
  Description of Artificial Sequence: Synthetic oligonucleotide
  Sense strand starting at position 3352 of SEQ ID NO: 915324
guguaauuccaguaucaua

SEQ ID NO: 1071323 - RNA, 19 nt, Artificial Sequence
  Description of Artificial Sequence: Synthetic oligonucleotide
  Antisense strand to SEQ ID NO: 1071322
uaugauacuggaauuacac

SEQ ID NO: 1071324 - RNA, 19 nt, Artificial Sequence
  Description of Artificial Sequence: Synthetic oligonucleotide
  Sense strand starting at position 3443 of SEQ ID NO: 915324
uuguaacaugaguaugacu

SEQ ID NO: 1071325 - RNA, 19 nt, Artificial Sequence
  Description of Artificial Sequence: Synthetic oligonucleotide
  Antisense strand to SEQ ID NO: 1071324
agucauacucauguuacaa

SEQ ID NO: 1071326 - RNA, 19 nt, Artificial Sequence
  Description of Artificial Sequence: Synthetic oligonucleotide
  Sense strand starting at position 3445 of SEQ ID NO: 915324
guaacaugaguaugacucu

SEQ ID NO: 1071327 - RNA, 19 nt, Artificial Sequence
  Description of Artificial Sequence: Synthetic oligonucleotide
  Antisense strand to SEQ ID NO: 1071326
agagucauacucauguuac

SEQ ID NO: 1071328 - RNA, 19 nt, Artificial Sequence
  Description of Artificial Sequence: Synthetic oligonucleotide
  Sense strand starting at position 3537 of SEQ ID NO: 915324
guaccugugauuuggcuau

SEQ ID NO: 1071329 - RNA, 19 nt, Artificial Sequence
  Description of Artificial Sequence: Synthetic oligonucleotide
  Antisense strand to SEQ ID NO: 1071328
auagccaaaucacagguac

SEQ ID NO: 1071330 - RNA, 19 nt, Artificial Sequence
  Description of Artificial Sequence: Synthetic oligonucleotide
  Sense strand starting at position 3668 of SEQ ID NO: 915324
cucuaucaguuguuggaca

SEQ ID NO: 1071331 - RNA, 19 nt, Artificial Sequence
  Description of Artificial Sequence: Synthetic oligonucleotide
  Antisense strand to SEQ ID NO: 1071330
uguccaacaacugauagag

SEQ ID NO: 1071332 - RNA, 19 nt, Artificial Sequence
  Description of Artificial Sequence: Synthetic oligonucleotide
  Sense strand starting at position 3670 of SEQ ID NO: 915324
cuaucaguuguuggacauu

SEQ ID NO: 1071333 - RNA, 19 nt, Artificial Sequence
  Description of Artificial Sequence: Synthetic oligonucleotide
  Antisense strand to SEQ ID NO: 1071332
aauguccaacaacugauag

SEQ ID NO: 1071334 - RNA, 19 nt, Artificial Sequence
  Description of Artificial Sequence: Synthetic oligonucleotide
  Sense strand starting at position 3826 of SEQ ID NO: 915324
agguguggucuuuggagua

SEQ ID NO: 1071335 - RNA, 19 nt, Artificial Sequence
  Description of Artificial Sequence: Synthetic oligonucleotide
  Antisense strand to SEQ ID NO: 1071334
uacuccaaagaccacaccu

SEQ ID NO: 1071336 - RNA, 19 nt, Artificial Sequence
  Description of Artificial Sequence: Synthetic oligonucleotide
  Sense strand starting at position 3840 of SEQ ID NO: 915324
gaguaacugccagacuaug

SEQ ID NO: 1071337 - RNA, 19 nt, Artificial Sequence
  Description of Artificial Sequence: Synthetic oligonucleotide
  Antisense strand to SEQ ID NO: 1071336
cauagucuggcaguuacuc

SEQ ID NO: 1071338 - RNA, 19 nt, Artificial Sequence
  Description of Artificial Sequence: Synthetic oligonucleotide
  Sense strand starting at position 369 of SEQ ID NO: 915325
accucagguaguugagaua

SEQ ID NO: 1071339 - RNA, 19 nt, Artificial Sequence
  Description of Artificial Sequence: Synthetic oligonucleotide
  Antisense strand to SEQ ID NO: 1071338
uaucucaacuaccugaggu

SEQ ID NO: 1071340 - RNA, 19 nt, Artificial Sequence
  Description of Artificial Sequence: Synthetic oligonucleotide
  Sense strand starting at position 864 of SEQ ID NO: 915325
gcuggaagucgcuauagag

SEQ ID NO: 1071341 - RNA, 19 nt, Artificial Sequence
  Description of Artificial Sequence: Synthetic oligonucleotide
  Antisense strand to SEQ ID NO: 1071340
cucuauagcgacuuccagc

SEQ ID NO: 1071342 - RNA, 19 nt, Artificial Sequence
  Description of Artificial Sequence: Synthetic oligonucleotide
  Sense strand starting at position 1056 of SEQ ID NO: 915325
cugccaauaaggcgugauu

SEQ ID NO: 1071343 - RNA, 19 nt, Artificial Sequence
  Description of Artificial Sequence: Synthetic oligonucleotide
  Antisense strand to SEQ ID NO: 1071342
aaucacgccuuauuggcag

SEQ ID NO: 1071344 - RNA, 19 nt, Artificial Sequence
  Description of Artificial Sequence: Synthetic oligonucleotide
  Sense strand starting at position 1058 of SEQ ID NO: 915325
gccaauaaggcgugauuga

SEQ ID NO: 1071345 - RNA, 19 nt, Artificial Sequence
  Description of Artificial Sequence: Synthetic oligonucleotide
  Antisense strand to SEQ ID NO: 1071344
ucaaucacgccuuauuggc

SEQ ID NO: 1071346 - RNA, 19 nt, Artificial Sequence
  Description of Artificial Sequence: Synthetic oligonucleotide
  Sense strand starting at position 1059 of SEQ ID NO: 915325
ccaauaaggcgugauugag

SEQ ID NO: 1071347 - RNA, 19 nt, Artificial Sequence
  Description of Artificial Sequence: Synthetic oligonucleotide
  Antisense strand to SEQ ID NO: 1071346
cucaaucacgccuuauugg

SEQ ID NO: 1071348 - RNA, 19 nt, Artificial Sequence
  Description of Artificial Sequence: Synthetic oligonucleotide
  Sense strand starting at position 1479 of SEQ ID NO: 915325
cggagcugucuccaaccuu

SEQ ID NO: 1071349 - RNA, 19 nt, Artificial Sequence
  Description of Artificial Sequence: Synthetic oligonucleotide
  Antisense strand to SEQ ID NO: 1071348
aagguuggagacagcuccg

SEQ ID NO: 1071350 - RNA, 19 nt, Artificial Sequence
  Description of Artificial Sequence: Synthetic oligonucleotide
  Sense strand starting at position 1550 of SEQ ID NO: 915325
gccgguggaucuucgggaa

SEQ ID NO: 1071351 - RNA, 19 nt, Artificial Sequence
  Description of Artificial Sequence: Synthetic oligonucleotide
  Antisense strand to SEQ ID NO: 1071350
uucccgaagauccaccggc

SEQ ID NO: 1071352 - RNA, 19 nt, Artificial Sequence
  Description of Artificial Sequence: Synthetic oligonucleotide
  Sense strand starting at position 1850 of SEQ ID NO: 915325
auagguauggccgaaacuu

SEQ ID NO: 1071353 - RNA, 19 nt, Artificial Sequence
  Description of Artificial Sequence: Synthetic oligonucleotide
  Antisense strand to SEQ ID NO: 1071352
aaguuucggccauaccuau

SEQ ID NO: 1071354 - RNA, 19 nt, Artificial Sequence
  Description of Artificial Sequence: Synthetic oligonucleotide
  Sense strand starting at position 2815 of SEQ ID NO: 915325
cccaauuaccgguaggauc

SEQ ID NO: 1071355 - RNA, 19 nt, Artificial Sequence
  Description of Artificial Sequence: Synthetic oligonucleotide
  Antisense strand to SEQ ID NO: 1071354
gauccuaccgguaauuggg

SEQ ID NO: 1071356 - RNA, 19 nt, Artificial Sequence
  Description of Artificial Sequence: Synthetic oligonucleotide
  Sense strand starting at position 2822 of SEQ ID NO: 915325
accgguaggaucugaaacu

SEQ ID NO: 1071357 - RNA, 19 nt, Artificial Sequence
  Description of Artificial Sequence: Synthetic oligonucleotide
  Antisense strand to SEQ ID NO: 1071356
aguuucagauccuaccggu

SEQ ID NO: 1071358 - RNA, 19 nt, Artificial Sequence
  Description of Artificial Sequence: Synthetic oligonucleotide
  Sense strand starting at position 2861 of SEQ ID NO: 915325
cguuauucugaaugcuacu

SEQ ID NO: 1071359 - RNA, 19 nt, Artificial Sequence
  Description of Artificial Sequence: Synthetic oligonucleotide
  Antisense strand to SEQ ID NO: 1071358
aguagcauucagaauaacg

SEQ ID NO: 1071360 - RNA, 19 nt, Artificial Sequence
  Description of Artificial Sequence: Synthetic oligonucleotide
  Sense strand starting at position 2884 of SEQ ID NO: 915325
auagcagguucuuugggau

SEQ ID NO: 1071361 - RNA, 19 nt, Artificial Sequence
  Description of Artificial Sequence: Synthetic oligonucleotide
  Antisense strand to SEQ ID NO: 1071360
aucccaaagaaccugcuau

SEQ ID NO: 1071362 - RNA, 19 nt, Artificial Sequence
  Description of Artificial Sequence: Synthetic oligonucleotide
  Sense strand starting at position 2949 of SEQ ID NO: 915325
ugcccuaucuaauuggaaa

SEQ ID NO: 1071363 - RNA, 19 nt, Artificial Sequence
  Description of Artificial Sequence: Synthetic oligonucleotide
  Antisense strand to SEQ ID NO: 1071362
uuuccaauuagauagggca

SEQ ID NO: 1071364 - RNA, 19 nt, Artificial Sequence
  Description of Artificial Sequence: Synthetic oligonucleotide
  Sense strand starting at position 2969 of SEQ ID NO: 915325
augaauagauucuaucaga

SEQ ID NO: 1071365 - RNA, 19 nt, Artificial Sequence
  Description of Artificial Sequence: Synthetic oligonucleotide
  Antisense strand to SEQ ID NO: 1071364
ucugauagaaucuauucau

SEQ ID NO: 1071366 - RNA, 19 nt, Artificial Sequence
  Description of Artificial Sequence: Synthetic oligonucleotide
  Sense strand starting at position 2974 of SEQ ID NO: 915325
uagauucuaucagaaguag

SEQ ID NO: 1071367 - RNA, 19 nt, Artificial Sequence
  Description of Artificial Sequence: Synthetic oligonucleotide
  Antisense strand to SEQ ID NO: 1071366
cuacuucugauagaaucua

SEQ ID NO: 1071368 - RNA, 19 nt, Artificial Sequence
  Description of Artificial Sequence: Synthetic oligonucleotide
  Sense strand starting at position 3146 of SEQ ID NO: 915325
caaguuucuccugcugcga

SEQ ID NO: 1071369 - RNA, 19 nt, Artificial Sequence
  Description of Artificial Sequence: Synthetic oligonucleotide
  Antisense strand to SEQ ID NO: 1071368
ucgcagcaggagaaacuug

SEQ ID NO: 1071370 - RNA, 19 nt, Artificial Sequence
  Description of Artificial Sequence: Synthetic oligonucleotide
  Sense strand starting at position 3186 of SEQ ID NO: 915325
gaguauccucagcgugaca

SEQ ID NO: 1071371 - RNA, 19 nt, Artificial Sequence
  Description of Artificial Sequence: Synthetic oligonucleotide
  Antisense strand to SEQ ID NO: 1071370
ugucacgcugaggauacuc

SEQ ID NO: 1071372 - RNA, 19 nt, Artificial Sequence
  Description of Artificial Sequence: Synthetic oligonucleotide
  Sense strand starting at position 3188 of SEQ ID NO: 915325
guauccucagcgugacaaa

SEQ ID NO: 1071373 - RNA, 19 nt, Artificial Sequence
  Description of Artificial Sequence: Synthetic oligonucleotide
  Antisense strand to SEQ ID NO: 1071372
uuugucacgcugaggauac

SEQ ID NO: 1071374 - RNA, 19 nt, Artificial Sequence
  Description of Artificial Sequence: Synthetic oligonucleotide
  Sense strand starting at position 3227 of SEQ ID NO: 915325
gguaacaccucuguaucua

SEQ ID NO: 1071375 - RNA, 19 nt, Artificial Sequence
  Description of Artificial Sequence: Synthetic oligonucleotide
  Antisense strand to SEQ ID NO: 1071374
uagauacagagguguuacc

SEQ ID NO: 1071376 - RNA, 19 nt, Artificial Sequence
  Description of Artificial Sequence: Synthetic oligonucleotide
  Sense strand starting at position 3228 of SEQ ID NO: 915325
guaacaccucuguaucuau

SEQ ID NO: 1071377 - RNA, 19 nt, Artificial Sequence
  Description of Artificial Sequence: Synthetic oligonucleotide
  Antisense strand to SEQ ID NO: 1071376
auagauacagagguguuac

SEQ ID NO: 1071378 - RNA, 19 nt, Artificial Sequence
  Description of Artificial Sequence: Synthetic oligonucleotide
  Sense strand starting at position 3231 of SEQ ID NO: 915325
acaccucuguaucuaugau

SEQ ID NO: 1071379 - RNA, 19 nt, Artificial Sequence
  Description of Artificial Sequence: Synthetic oligonucleotide
  Antisense strand to SEQ ID NO: 1071378
aucauagauacagaggugu

SEQ ID NO: 1071380 - RNA, 19 nt, Artificial Sequence
  Description of Artificial Sequence: Synthetic oligonucleotide
  Sense strand starting at position 3238 of SEQ ID NO: 915325
uguaucuaugauggaaguu

SEQ ID NO: 1071381 - RNA, 19 nt, Artificial Sequence
  Description of Artificial Sequence: Synthetic oligonucleotide
  Antisense strand to SEQ ID NO: 1071380
aacuuccaucauagauaca

SEQ ID NO: 1071382 - RNA, 19 nt, Artificial Sequence
  Description of Artificial Sequence: Synthetic oligonucleotide
  Sense strand starting at position 3239 of SEQ ID NO: 915325
guaucuaugauggaaguuu

SEQ ID NO: 1071383 - RNA, 19 nt, Artificial Sequence
  Description of Artificial Sequence: Synthetic oligonucleotide
  Antisense strand to SEQ ID NO: 1071382
aaacuuccaucauagauac

SEQ ID NO: 1071384 - RNA, 19 nt, Artificial Sequence
  Description of Artificial Sequence: Synthetic oligonucleotide
  Sense strand starting at position 3276 of SEQ ID NO: 915325
uucgauuugucuuaaggaa

SEQ ID NO: 1071385 - RNA, 19 nt, Artificial Sequence
  Description of Artificial Sequence: Synthetic oligonucleotide
  Antisense strand to SEQ ID NO: 1071384
uuccuuaagacaaaucgaa

SEQ ID NO: 1071386 - RNA, 19 nt, Artificial Sequence
  Description of Artificial Sequence: Synthetic oligonucleotide
  Sense strand starting at position 3288 of SEQ ID NO: 915325
uaaggaauguguuccaauu

SEQ ID NO: 1071387 - RNA, 19 nt, Artificial Sequence
  Description of Artificial Sequence: Synthetic oligonucleotide
  Antisense strand to SEQ ID NO: 1071386
aauuggaacacauuccuua

SEQ ID NO: 1071388 - RNA, 19 nt, Artificial Sequence
  Description of Artificial Sequence: Synthetic oligonucleotide
  Sense strand starting at position 3324 of SEQ ID NO: 915325
uaaggaaaguuuccuuuag

SEQ ID NO: 1071389 - RNA, 19 nt, Artificial Sequence
  Description of Artificial Sequence: Synthetic oligonucleotide
  Antisense strand to SEQ ID NO: 1071388
cuaaaggaaacuuuccuua

SEQ ID NO: 1071390 - RNA, 19 nt, Artificial Sequence
  Description of Artificial Sequence: Synthetic oligonucleotide
  Sense strand starting at position 3326 of SEQ ID NO: 915325
aggaaaguuuccuuuagcu

SEQ ID NO: 1071391 - RNA, 19 nt, Artificial Sequence
  Description of Artificial Sequence: Synthetic oligonucleotide
  Antisense strand to SEQ ID NO: 1071390
agcuaaaggaaacuuuccu

SEQ ID NO: 1071392 - RNA, 19 nt, Artificial Sequence
  Description of Artificial Sequence: Synthetic oligonucleotide
  Sense strand starting at position 3346 of SEQ ID NO: 915325
cagcuuauacagugugcua

SEQ ID NO: 1071393 - RNA, 19 nt, Artificial Sequence
  Description of Artificial Sequence: Synthetic oligonucleotide
  Antisense strand to SEQ ID NO: 1071392
uagcacacuguauaagcug

SEQ ID NO: 1071394 - RNA, 19 nt, Artificial Sequence
  Description of Artificial Sequence: Synthetic oligonucleotide
  Sense strand starting at position 3380 of SEQ ID NO: 915325
aguagagauguugaacagu

SEQ ID NO: 1071395 - RNA, 19 nt, Artificial Sequence
  Description of Artificial Sequence: Synthetic oligonucleotide
  Antisense strand to SEQ ID NO: 1071394
acuguucaacaucucuacu

SEQ ID NO: 1071396 - RNA, 19 nt, Artificial Sequence
  Description of Artificial Sequence: Synthetic oligonucleotide
  Sense strand starting at position 3430 of SEQ ID NO: 915325
aguaauuaucuuugagcuu

SEQ ID NO: 1071397 - RNA, 19 nt, Artificial Sequence
  Description of Artificial Sequence: Synthetic oligonucleotide
  Antisense strand to SEQ ID NO: 1071396
aagcucaaagauaauuacu

SEQ ID NO: 1071398 - RNA, 19 nt, Artificial Sequence
  Description of Artificial Sequence: Synthetic oligonucleotide
  Sense strand starting at position 3492 of SEQ ID NO: 915325
ggaagaauauugcaauaua

SEQ ID NO: 1071399 - RNA, 19 nt, Artificial Sequence
  Description of Artificial Sequence: Synthetic oligonucleotide
  Antisense strand to SEQ ID NO: 1071398
uauauugcaauauucuucc

SEQ ID NO: 1071400 - RNA, 19 nt, Artificial Sequence
  Description of Artificial Sequence: Synthetic oligonucleotide
  Sense strand starting at position 3754 of SEQ ID NO: 915325
gggcuauaugagugagaaa

SEQ ID NO: 1071401 - RNA, 19 nt, Artificial Sequence
  Description of Artificial Sequence: Synthetic oligonucleotide
  Antisense strand to SEQ ID NO: 1071400
uuucucacucauauagccc

SEQ ID NO: 1071402 - RNA, 19 nt, Artificial Sequence
  Description of Artificial Sequence: Synthetic oligonucleotide
  Sense strand starting at position 3757 of SEQ ID NO: 915325
cuauaugagugagaaacaa

SEQ ID NO: 1071403 - RNA, 19 nt, Artificial Sequence
  Description of Artificial Sequence: Synthetic oligonucleotide
  Antisense strand to SEQ ID NO: 1071402
uuguuucucacucauauag

SEQ ID NO: 1071404 - RNA, 19 nt, Artificial Sequence
  Description of Artificial Sequence: Synthetic oligonucleotide
  Sense strand starting at position 3780 of SEQ ID NO: 915325
uuaucauguuagguuacua

SEQ ID NO: 1071405 - RNA, 19 nt, Artificial Sequence
  Description of Artificial Sequence: Synthetic oligonucleotide
  Antisense strand to SEQ ID NO: 1071404
uaguaaccuaacaugauaa

SEQ ID NO: 1071406 - RNA, 19 nt, Artificial Sequence
  Description of Artificial Sequence: Synthetic oligonucleotide
  Sense strand starting at position 3802 of SEQ ID NO: 915325
uuuggaguugguuguucua

SEQ ID NO: 1071407 - RNA, 19 nt, Artificial Sequence
  Description of Artificial Sequence: Synthetic oligonucleotide
  Antisense strand to SEQ ID NO: 1071406
uagaacaaccaacuccaaa

SEQ ID NO: 1071408 - RNA, 19 nt, Artificial Sequence
  Description of Artificial Sequence: Synthetic oligonucleotide
  Sense strand starting at position 3804 of SEQ ID NO: 915325
uggaguugguuguucuagu

SEQ ID NO: 1071409 - RNA, 19 nt, Artificial Sequence
  Description of Artificial Sequence: Synthetic oligonucleotide
  Antisense strand to SEQ ID NO: 1071408
acuagaacaaccaacucca

SEQ ID NO: 1071410 - RNA, 19 nt, Artificial Sequence
  Description of Artificial Sequence: Synthetic oligonucleotide
  Sense strand starting at position 3805 of SEQ ID NO: 915325
ggaguugguuguucuagua

SEQ ID NO: 1071411 - RNA, 19 nt, Artificial Sequence
  Description of Artificial Sequence: Synthetic oligonucleotide
  Antisense strand to SEQ ID NO: 1071410
uacuagaacaaccaacucc

SEQ ID NO: 1071412 - RNA, 19 nt, Artificial Sequence
  Description of Artificial Sequence: Synthetic oligonucleotide
  Sense strand starting at position 3821 of SEQ ID NO: 915325
guaaauaguuuacucugau

SEQ ID NO: 1071413 - RNA, 19 nt, Artificial Sequence
  Description of Artificial Sequence: Synthetic oligonucleotide
  Antisense strand to SEQ ID NO: 1071412
aucagaguaaacuauuuac

SEQ ID NO: 1071414 - RNA, 19 nt, Artificial Sequence
  Description of Artificial Sequence: Synthetic oligonucleotide
  Sense strand starting at position 3852 of SEQ ID NO: 915325
uguggaaguuaggcagaua

SEQ ID NO: 1071415 - RNA, 19 nt, Artificial Sequence
  Description of Artificial Sequence: Synthetic oligonucleotide
  Antisense strand to SEQ ID NO: 1071414
uaucugccuaacuuccaca

SEQ ID NO: 1071416 - RNA, 19 nt, Artificial Sequence
  Description of Artificial Sequence: Synthetic oligonucleotide
  Sense strand starting at position 3880 of SEQ ID NO: 915325
uaaagagaauucugggaag

SEQ ID NO: 1071417 - RNA, 19 nt, Artificial Sequence
  Description of Artificial Sequence: Synthetic oligonucleotide
  Antisense strand to SEQ ID NO: 1071416
cuucccagaauucucuuua

SEQ ID NO: 1071418 - RNA, 19 nt, Artificial Sequence
  Description of Artificial Sequence: Synthetic oligonucleotide
  Sense strand starting at position 200 of SEQ ID NO: 915326
gcuggaagucgcuauagag

SEQ ID NO: 1071419 - RNA, 19 nt, Artificial Sequence
  Description of Artificial Sequence: Synthetic oligonucleotide
  Antisense strand to SEQ ID NO: 1071418
cucuauagcgacuuccagc

SEQ ID NO: 1071420 - RNA, 19 nt, Artificial Sequence
  Description of Artificial Sequence: Synthetic oligonucleotide
  Sense strand starting at position 394 of SEQ ID NO: 915326
gccaauaaggcgugauuga

SEQ ID NO: 1071421 - RNA, 19 nt, Artificial Sequence
  Description of Artificial Sequence: Synthetic oligonucleotide
  Antisense strand to SEQ ID NO: 1071420
ucaaucacgccuuauuggc

SEQ ID NO: 1071422 - RNA, 19 nt, Artificial Sequence
  Description of Artificial Sequence: Synthetic oligonucleotide
  Sense strand starting at position 395 of SEQ ID NO: 915326
ccaauaaggcgugauugag

SEQ ID NO: 1071423 - RNA, 19 nt, Artificial Sequence
  Description of Artificial Sequence: Synthetic oligonucleotide
  Antisense strand to SEQ ID NO: 1071422
cucaaucacgccuuauugg

SEQ ID NO: 1071424 - RNA, 19 nt, Artificial Sequence
  Description of Artificial Sequence: Synthetic oligonucleotide
  Sense strand starting at position 815 of SEQ ID NO: 915326
cggagcugucuccaaccuu

SEQ ID NO: 1071425 - RNA, 19 nt, Artificial Sequence
  Description of Artificial Sequence: Synthetic oligonucleotide
  Antisense strand to SEQ ID NO: 1071424
aagguuggagacagcuccg

SEQ ID NO: 1071426 - RNA, 19 nt, Artificial Sequence
  Description of Artificial Sequence: Synthetic oligonucleotide
  Sense strand starting at position 1186 of SEQ ID NO: 915326
auagguauggccgaaacuu

SEQ ID NO: 1071427 - RNA, 19 nt, Artificial Sequence
  Description of Artificial Sequence: Synthetic oligonucleotide
  Antisense strand to SEQ ID NO: 1071426
aaguuucggccauaccuau

SEQ ID NO: 1071428 - RNA, 19 nt, Artificial Sequence
  Description of Artificial Sequence: Synthetic oligonucleotide
  Sense strand starting at position 2151 of SEQ ID NO: 915326
cccaauuaccgguaggauc

SEQ ID NO: 1071429 - RNA, 19 nt, Artificial Sequence
  Description of Artificial Sequence: Synthetic oligonucleotide
  Antisense strand to SEQ ID NO: 1071428
gauccuaccgguaauuggg

SEQ ID NO: 1071430 - RNA, 19 nt, Artificial Sequence
  Description of Artificial Sequence: Synthetic oligonucleotide
  Sense strand starting at position 2158 of SEQ ID NO: 915326
accgguaggaucugaaacu

SEQ ID NO: 1071431 - RNA, 19 nt, Artificial Sequence
  Description of Artificial Sequence: Synthetic oligonucleotide
  Antisense strand to SEQ ID NO: 1071430
aguuucagauccuaccggu

SEQ ID NO: 1071432 - RNA, 19 nt, Artificial Sequence
  Description of Artificial Sequence: Synthetic oligonucleotide
  Sense strand starting at position 2220 of SEQ ID NO: 915326
auagcagguucuuugggau

SEQ ID NO: 1071433 - RNA, 19 nt, Artificial Sequence
  Description of Artificial Sequence: Synthetic oligonucleotide
  Antisense strand to SEQ ID NO: 1071432
aucccaaagaaccugcuau

SEQ ID NO: 1071434 - RNA, 19 nt, Artificial Sequence
  Description of Artificial Sequence: Synthetic oligonucleotide
  Sense strand starting at position 2285 of SEQ ID NO: 915326
ugcccuaucuaauuggaaa

SEQ ID NO: 1071435 - RNA, 19 nt, Artificial Sequence
  Description of Artificial Sequence: Synthetic oligonucleotide
  Antisense strand to SEQ ID NO: 1071434
uuuccaauuagauagggca

SEQ ID NO: 1071436 - RNA, 19 nt, Artificial Sequence
  Description of Artificial Sequence: Synthetic oligonucleotide
  Sense strand starting at position 2305 of SEQ ID NO: 915326
augaauagauucuaucaga

SEQ ID NO: 1071437 - RNA, 19 nt, Artificial Sequence
  Description of Artificial Sequence: Synthetic oligonucleotide
  Antisense strand to SEQ ID NO: 1071436
ucugauagaaucuauucau

SEQ ID NO: 1071438 - RNA, 19 nt, Artificial Sequence
  Description of Artificial Sequence: Synthetic oligonucleotide
  Sense strand starting at position 2482 of SEQ ID NO: 915326
caaguuucuccugcugcga

SEQ ID NO: 1071439 - RNA, 19 nt, Artificial Sequence
  Description of Artificial Sequence: Synthetic oligonucleotide
  Antisense strand to SEQ ID NO: 1071438
ucgcagcaggagaaacuug

SEQ ID NO: 1071440 - RNA, 19 nt, Artificial Sequence
  Description of Artificial Sequence: Synthetic oligonucleotide
  Sense strand starting at position 2563 of SEQ ID NO: 915326
gguaacaccucuguaucua

SEQ ID NO: 1071441 - RNA, 19 nt, Artificial Sequence
  Description of Artificial Sequence: Synthetic oligonucleotide
  Antisense strand to SEQ ID NO: 1071440
uagauacagagguguuacc

SEQ ID NO: 1071442 - RNA, 19 nt, Artificial Sequence
  Description of Artificial Sequence: Synthetic oligonucleotide
  Sense strand starting at position 2564 of SEQ ID NO: 915326
guaacaccucuguaucuau

SEQ ID NO: 1071443 - RNA, 19 nt, Artificial Sequence
  Description of Artificial Sequence: Synthetic oligonucleotide
  Antisense strand to SEQ ID NO: 1071442
auagauacagagguguuac

SEQ ID NO: 1071444 - RNA, 19 nt, Artificial Sequence
  Description of Artificial Sequence: Synthetic oligonucleotide
  Sense strand starting at position 2567 of SEQ ID NO: 915326
acaccucuguaucuaugau

SEQ ID NO: 1071445 - RNA, 19 nt, Artificial Sequence
  Description of Artificial Sequence: Synthetic oligonucleotide
  Antisense strand to SEQ ID NO: 1071444
aucauagauacagaggugu

SEQ ID NO: 1071446 - RNA, 19 nt, Artificial Sequence
  Description of Artificial Sequence: Synthetic oligonucleotide
  Sense strand starting at position 2574 of SEQ ID NO: 915326
uguaucuaugauggaaguu

SEQ ID NO: 1071447 - RNA, 19 nt, Artificial Sequence
  Description of Artificial Sequence: Synthetic oligonucleotide
  Antisense strand to SEQ ID NO: 1071446
aacuuccaucauagauaca

SEQ ID NO: 1071448 - RNA, 19 nt, Artificial Sequence
  Description of Artificial Sequence: Synthetic oligonucleotide
  Sense strand starting at position 2575 of SEQ ID NO: 915326
guaucuaugauggaaguuu

SEQ ID NO: 1071449 - RNA, 19 nt, Artificial Sequence
  Description of Artificial Sequence: Synthetic oligonucleotide
  Antisense strand to SEQ ID NO: 1071448
aaacuuccaucauagauac

SEQ ID NO: 1071450 - RNA, 19 nt, Artificial Sequence
  Description of Artificial Sequence: Synthetic oligonucleotide
  Sense strand starting at position 2612 of SEQ ID NO: 915326
uucgauuugucuuaaggaa

SEQ ID NO: 1071451 - RNA, 19 nt, Artificial Sequence
  Description of Artificial Sequence: Synthetic oligonucleotide
  Antisense strand to SEQ ID NO: 1071450
uuccuuaagacaaaucgaa

SEQ ID NO: 1071452 - RNA, 19 nt, Artificial Sequence
  Description of Artificial Sequence: Synthetic oligonucleotide
  Sense strand starting at position 2624 of SEQ ID NO: 915326
uaaggaauguguuccaauu

SEQ ID NO: 1071453 - RNA, 19 nt, Artificial Sequence
  Description of Artificial Sequence: Synthetic oligonucleotide
  Antisense strand to SEQ ID NO: 1071452
aauuggaacacauuccuua

SEQ ID NO: 1071454 - RNA, 19 nt, Artificial Sequence
  Description of Artificial Sequence: Synthetic oligonucleotide
  Sense strand starting at position 2660 of SEQ ID NO: 915326
uaaggaaaguuuccuuuag

SEQ ID NO: 1071455 - RNA, 19 nt, Artificial Sequence
  Description of Artificial Sequence: Synthetic oligonucleotide
  Antisense strand to SEQ ID NO: 1071454
cuaaaggaaacuuuccuua

SEQ ID NO: 1071456 - RNA, 19 nt, Artificial Sequence
  Description of Artificial Sequence: Synthetic oligonucleotide
  Sense strand starting at position 2662 of SEQ ID NO: 915326
aggaaaguuuccuuuagcu

SEQ ID NO: 1071457 - RNA, 19 nt, Artificial Sequence
  Description of Artificial Sequence: Synthetic oligonucleotide
  Antisense strand to SEQ ID NO: 1071456
agcuaaaggaaacuuuccu

SEQ ID NO: 1071458 - RNA, 19 nt, Artificial Sequence
  Description of Artificial Sequence: Synthetic oligonucleotide
  Sense strand starting at position 2716 of SEQ ID NO: 915326
aguagagauguugaacagu

SEQ ID NO: 1071459 - RNA, 19 nt, Artificial Sequence
  Description of Artificial Sequence: Synthetic oligonucleotide
  Antisense strand to SEQ ID NO: 1071458
acuguucaacaucucuacu

SEQ ID NO: 1071460 - RNA, 19 nt, Artificial Sequence
  Description of Artificial Sequence: Synthetic oligonucleotide
  Sense strand starting at position 2766 of SEQ ID NO: 915326
aguaauuaucuuugagcuu

SEQ ID NO: 1071461 - RNA, 19 nt, Artificial Sequence
  Description of Artificial Sequence: Synthetic oligonucleotide
  Antisense strand to SEQ ID NO: 1071460
aagcucaaagauaauuacu

SEQ ID NO: 1071462 - RNA, 19 nt, Artificial Sequence
  Description of Artificial Sequence: Synthetic oligonucleotide
  Sense strand starting at position 2828 of SEQ ID NO: 915326
ggaagaauauugcaauaua

SEQ ID NO: 1071463 - RNA, 19 nt, Artificial Sequence
  Description of Artificial Sequence: Synthetic oligonucleotide
  Antisense strand to SEQ ID NO: 1071462
uauauugcaauauucuucc

SEQ ID NO: 1071464 - RNA, 19 nt, Artificial Sequence
  Description of Artificial Sequence: Synthetic oligonucleotide
  Sense strand starting at position 3090 of SEQ ID NO: 915326
gggcuauaugagugagaaa

SEQ ID NO: 1071465 - RNA, 19 nt, Artificial Sequence
  Description of Artificial Sequence: Synthetic oligonucleotide
  Antisense strand to SEQ ID NO: 1071464
uuucucacucauauagccc

SEQ ID NO: 1071466 - RNA, 19 nt, Artificial Sequence
  Description of Artificial Sequence: Synthetic oligonucleotide
  Sense strand starting at position 3093 of SEQ ID NO: 915326
cuauaugagugagaaacaa

SEQ ID NO: 1071467 - RNA, 19 nt, Artificial Sequence
  Description of Artificial Sequence: Synthetic oligonucleotide
  Antisense strand to SEQ ID NO: 1071466
uuguuucucacucauauag

SEQ ID NO: 1071468 - RNA, 19 nt, Artificial Sequence
  Description of Artificial Sequence: Synthetic oligonucleotide
  Sense strand starting at position 3116 of SEQ ID NO: 915326
uuaucauguuagguuacua

SEQ ID NO: 1071469 - RNA, 19 nt, Artificial Sequence
  Description of Artificial Sequence: Synthetic oligonucleotide
  Antisense strand to SEQ ID NO: 1071468
uaguaaccuaacaugauaa

SEQ ID NO: 1071470 - RNA, 19 nt, Artificial Sequence
  Description of Artificial Sequence: Synthetic oligonucleotide
  Sense strand starting at position 3141 of SEQ ID NO: 915326
ggaguugguuguucuagua

SEQ ID NO: 1071471 - RNA, 19 nt, Artificial Sequence
  Description of Artificial Sequence: Synthetic oligonucleotide
  Antisense strand to SEQ ID NO: 1071470
uacuagaacaaccaacucc

SEQ ID NO: 1071472 - RNA, 19 nt, Artificial Sequence
  Description of Artificial Sequence: Synthetic oligonucleotide
  Sense strand starting at position 3157 of SEQ ID NO: 915326
guaaauaguuuacucugau

SEQ ID NO: 1071473 - RNA, 19 nt, Artificial Sequence
  Description of Artificial Sequence: Synthetic oligonucleotide
  Antisense strand to SEQ ID NO: 1071472
aucagaguaaacuauuuac

SEQ ID NO: 1071474 - RNA, 19 nt, Artificial Sequence
  Description of Artificial Sequence: Synthetic oligonucleotide
  Sense strand starting at position 3188 of SEQ ID NO: 915326
uguggaaguuaggcagaua

SEQ ID NO: 1071475 - RNA, 19 nt, Artificial Sequence
  Description of Artificial Sequence: Synthetic oligonucleotide
  Antisense strand to SEQ ID NO: 1071474
uaucugccuaacuuccaca

SEQ ID NO: 1071476 - RNA, 19 nt, Artificial Sequence
  Description of Artificial Sequence: Synthetic oligonucleotide
  Sense strand starting at position 3216 of SEQ ID NO: 915326
uaaagagaauucugggaag

SEQ ID NO: 1071477 - RNA, 19 nt, Artificial Sequence
  Description of Artificial Sequence: Synthetic oligonucleotide
  Antisense strand to SEQ ID NO: 1071476
cuucccagaauucucuuua

SEQ ID NO: 1071478 - RNA, 19 nt, Artificial Sequence
  Description of Artificial Sequence: Synthetic oligonucleotide
  Sense strand starting at position 3328 of SEQ ID NO: 915326
acagaaguauaugagacua

SEQ ID NO: 1071479 - RNA, 19 nt, Artificial Sequence
  Description of Artificial Sequence: Synthetic oligonucleotide
  Antisense strand to SEQ ID NO: 1071478
uagucucauauacuucugu

SEQ ID NO: 1071480 - RNA, 19 nt, Artificial Sequence
  Description of Artificial Sequence: Synthetic oligonucleotide
  Sense strand starting at position 3330 of SEQ ID NO: 915326
agaaguauaugagacuaga

SEQ ID NO: 1071481 - RNA, 19 nt, Artificial Sequence
  Description of Artificial Sequence: Synthetic oligonucleotide
  Antisense strand to SEQ ID NO: 1071480
ucuagucucauauacuucu

SEQ ID NO: 1071482 - RNA, 19 nt, Artificial Sequence
  Description of Artificial Sequence: Synthetic oligonucleotide
  Sense strand starting at position 3438 of SEQ ID NO: 915326
guguaauuccaguaucaua

SEQ ID NO: 1071483 - RNA, 19 nt, Artificial Sequence
  Description of Artificial Sequence: Synthetic oligonucleotide
  Antisense strand to SEQ ID NO: 1071482
uaugauacuggaauuacac

SEQ ID NO: 1071484 - RNA, 19 nt, Artificial Sequence
  Description of Artificial Sequence: Synthetic oligonucleotide
  Sense strand starting at position 3529 of SEQ ID NO: 915326
uuguaacaugaguaugacu

SEQ ID NO: 1071485 - RNA, 19 nt, Artificial Sequence
  Description of Artificial Sequence: Synthetic oligonucleotide
  Antisense strand to SEQ ID NO: 1071484
agucauacucauguuacaa

SEQ ID NO: 1071486 - RNA, 19 nt, Artificial Sequence
  Description of Artificial Sequence: Synthetic oligonucleotide
  Sense strand starting at position 3531 of SEQ ID NO: 915326
guaacaugaguaugacucu

SEQ ID NO: 1071487 - RNA, 19 nt, Artificial Sequence
  Description of Artificial Sequence: Synthetic oligonucleotide
  Antisense strand to SEQ ID NO: 1071486
agagucauacucauguuac

SEQ ID NO: 1071488 - RNA, 19 nt, Artificial Sequence
  Description of Artificial Sequence: Synthetic oligonucleotide
  Sense strand starting at position 3623 of SEQ ID NO: 915326
guaccugugauuuggcuau

SEQ ID NO: 1071489 - RNA, 19 nt, Artificial Sequence
  Description of Artificial Sequence: Synthetic oligonucleotide
  Antisense strand to SEQ ID NO: 1071488
auagccaaaucacagguac

SEQ ID NO: 1071490 - RNA, 19 nt, Artificial Sequence
  Description of Artificial Sequence: Synthetic oligonucleotide
  Sense strand starting at position 3754 of SEQ ID NO: 915326
cucuaucaguuguuggaca

SEQ ID NO: 1071491 - RNA, 19 nt, Artificial Sequence
  Description of Artificial Sequence: Synthetic oligonucleotide
  Antisense strand to SEQ ID NO: 1071490
uguccaacaacugauagag

SEQ ID NO: 1071492 - RNA, 19 nt, Artificial Sequence
  Description of Artificial Sequence: Synthetic oligonucleotide
  Sense strand starting at position 3756 of SEQ ID NO: 915326
cuaucaguuguuggacauu

SEQ ID NO: 1071493 - RNA, 19 nt, Artificial Sequence
  Description of Artificial Sequence: Synthetic oligonucleotide
  Antisense strand to SEQ ID NO: 1071492
aauguccaacaacugauag

SEQ ID NO: 1071494 - RNA, 19 nt, Artificial Sequence
  Description of Artificial Sequence: Synthetic oligonucleotide
  Sense strand starting at position 3912 of SEQ ID NO: 915326
agguguggucuuuggagua

SEQ ID NO: 1071495 - RNA, 19 nt, Artificial Sequence
  Description of Artificial Sequence: Synthetic oligonucleotide
  Antisense strand to SEQ ID NO: 1071494
uacuccaaagaccacaccu

SEQ ID NO: 1071496 - RNA, 19 nt, Artificial Sequence
  Description of Artificial Sequence: Synthetic oligonucleotide
  Sense strand starting at position 3926 of SEQ ID NO: 915326
gaguaacugccagacuaug

SEQ ID NO: 1071497 - RNA, 19 nt, Artificial Sequence
  Description of Artificial Sequence: Synthetic oligonucleotide
  Antisense strand to SEQ ID NO: 1071496
cauagucuggcaguuacuc

SEQ ID NO: 1071498 - RNA, 19 nt, Artificial Sequence
  Description of Artificial Sequence: Synthetic oligonucleotide
  Sense strand starting at position 49 of SEQ ID NO: 915327
ggaauaugaugacaccaga

SEQ ID NO: 1071499 - RNA, 19 nt, Artificial Sequence
  Description of Artificial Sequence: Synthetic oligonucleotide
  Antisense strand to SEQ ID NO: 1071498
ucuggugucaucauauucc

SEQ ID NO: 1071500 - RNA, 19 nt, Artificial Sequence
  Description of Artificial Sequence: Synthetic oligonucleotide
  Sense strand starting at position 236 of SEQ ID NO: 915327
gcccaaucucgauaccaac

SEQ ID NO: 1071501 - RNA, 19 nt, Artificial Sequence
  Description of Artificial Sequence: Synthetic oligonucleotide
  Antisense strand to SEQ ID NO: 1071500
guugguaucgagauugggc

SEQ ID NO: 1071502 - RNA, 19 nt, Artificial Sequence
  Description of Artificial Sequence: Synthetic oligonucleotide
  Sense strand starting at position 375 of SEQ ID NO: 915327
acgagaaguguugggaacu

SEQ ID NO: 1071503 - RNA, 19 nt, Artificial Sequence
  Description of Artificial Sequence: Synthetic oligonucleotide
  Antisense strand to SEQ ID NO: 1071502
aguucccaacacuucucgu

SEQ ID NO: 1071504 - RNA, 19 nt, Artificial Sequence
  Description of Artificial Sequence: Synthetic oligonucleotide
  Sense strand starting at position 597 of SEQ ID NO: 915327
caggcagacucuccggaau

SEQ ID NO: 1071505 - RNA, 19 nt, Artificial Sequence
  Description of Artificial Sequence: Synthetic oligonucleotide
  Antisense strand to SEQ ID NO: 1071504
auuccggagagucugccug

SEQ ID NO: 1071506 - RNA, 19 nt, Artificial Sequence
  Description of Artificial Sequence: Synthetic oligonucleotide
  Sense strand starting at position 600 of SEQ ID NO: 915327
gcagacucuccggaauaac

SEQ ID NO: 1071507 - RNA, 19 nt, Artificial Sequence
  Description of Artificial Sequence: Synthetic oligonucleotide
  Antisense strand to SEQ ID NO: 1071506
guuauuccggagagucugc

SEQ ID NO: 1071508 - RNA, 19 nt, Artificial Sequence
  Description of Artificial Sequence: Synthetic oligonucleotide
  Sense strand starting at position 1071 of SEQ ID NO: 915327
uuccgaggcugcucauaaa

SEQ ID NO: 1071509 - RNA, 19 nt, Artificial Sequence
  Description of Artificial Sequence: Synthetic oligonucleotide
  Antisense strand to SEQ ID NO: 1071508
uuuaugagcagccucggaa

SEQ ID NO: 1071510 - RNA, 19 nt, Artificial Sequence
  Description of Artificial Sequence: Synthetic oligonucleotide
  Sense strand starting at position 1216 of SEQ ID NO: 915327
ggaaguuauugcucaaauc

SEQ ID NO: 1071511 - RNA, 19 nt, Artificial Sequence
  Description of Artificial Sequence: Synthetic oligonucleotide
  Antisense strand to SEQ ID NO: 1071510
gauuugagcaauaacuucc

SEQ ID NO: 1071512 - RNA, 19 nt, Artificial Sequence
  Description of Artificial Sequence: Synthetic oligonucleotide
  Sense strand starting at position 1666 of SEQ ID NO: 915327
uagauauuaguguguuaag

SEQ ID NO: 1071513 - RNA, 19 nt, Artificial Sequence
  Description of Artificial Sequence: Synthetic oligonucleotide
  Antisense strand to SEQ ID NO: 1071512
cuuaacacacuaauaucua

SEQ ID NO: 1071514 - RNA, 19 nt, Artificial Sequence
  Description of Artificial Sequence: Synthetic oligonucleotide
  Sense strand starting at position 1667 of SEQ ID NO: 915327
agauauuaguguguuaaga

SEQ ID NO: 1071515 - RNA, 19 nt, Artificial Sequence
  Description of Artificial Sequence: Synthetic oligonucleotide
  Antisense strand to SEQ ID NO: 1071514
ucuuaacacacuaauaucu

SEQ ID NO: 1071516 - RNA, 19 nt, Artificial Sequence
  Description of Artificial Sequence: Synthetic oligonucleotide
  Sense strand starting at position 1675 of SEQ ID NO: 915327
guguguuaagaugguaggu

SEQ ID NO: 1071517 - RNA, 19 nt, Artificial Sequence
  Description of Artificial Sequence: Synthetic oligonucleotide
  Antisense strand to SEQ ID NO: 1071516
accuaccaucuuaacacac

SEQ ID NO: 1071518 - RNA, 19 nt, Artificial Sequence
  Description of Artificial Sequence: Synthetic oligonucleotide
  Sense strand starting at position 2451 of SEQ ID NO: 915327
gcacccauugccuagggaa

SEQ ID NO: 1071519 - RNA, 19 nt, Artificial Sequence
  Description of Artificial Sequence: Synthetic oligonucleotide
  Antisense strand to SEQ ID NO: 1071518
uucccuaggcaaugggugc

SEQ ID NO: 1071520 - RNA, 19 nt, Artificial Sequence
  Description of Artificial Sequence: Synthetic oligonucleotide
  Sense strand starting at position 2478 of SEQ ID NO: 915327
gauguaaagugagugaaac

SEQ ID NO: 1071521 - RNA, 19 nt, Artificial Sequence
  Description of Artificial Sequence: Synthetic oligonucleotide
  Antisense strand to SEQ ID NO: 1071520
guuucacucacuuuacauc

SEQ ID NO: 1071522 - RNA, 19 nt, Artificial Sequence
  Description of Artificial Sequence: Synthetic oligonucleotide
  Sense strand starting at position 2479 of SEQ ID NO: 915327
auguaaagugagugaaacu

SEQ ID NO: 1071523 - RNA, 19 nt, Artificial Sequence
  Description of Artificial Sequence: Synthetic oligonucleotide
  Antisense strand to SEQ ID NO: 1071522
aguuucacucacuuuacau

SEQ ID NO: 1071524 - RNA, 19 nt, Artificial Sequence
  Description of Artificial Sequence: Synthetic oligonucleotide
  Sense strand starting at position 2495 of SEQ ID NO: 915327
acuaaacuagagugaagua

SEQ ID NO: 1071525 - RNA, 19 nt, Artificial Sequence
  Description of Artificial Sequence: Synthetic oligonucleotide
  Antisense strand to SEQ ID NO: 1071524
uacuucacucuaguuuagu

SEQ ID NO: 1071526 - RNA, 19 nt, Artificial Sequence
  Description of Artificial Sequence: Synthetic oligonucleotide
  Sense strand starting at position 2845 of SEQ ID NO: 915327
gagcgugguccaggcaaca

SEQ ID NO: 1071527 - RNA, 19 nt, Artificial Sequence
  Description of Artificial Sequence: Synthetic oligonucleotide
  Antisense strand to SEQ ID NO: 1071526
uguugccuggaccacgcuc

SEQ ID NO: 1071528 - RNA, 19 nt, Artificial Sequence
  Description of Artificial Sequence: Synthetic oligonucleotide
  Sense strand starting at position 3141 of SEQ ID NO: 915327
cagggcaaucacugggaau

SEQ ID NO: 1071529 - RNA, 19 nt, Artificial Sequence
  Description of Artificial Sequence: Synthetic oligonucleotide
  Antisense strand to SEQ ID NO: 1071528
auucccagugauugcccug

SEQ ID NO: 1071530 - RNA, 19 nt, Artificial Sequence
  Description of Artificial Sequence: Synthetic oligonucleotide
  Sense strand starting at position 3142 of SEQ ID NO: 915327
agggcaaucacugggaauc

SEQ ID NO: 1071531 - RNA, 19 nt, Artificial Sequence
  Description of Artificial Sequence: Synthetic oligonucleotide
  Antisense strand to SEQ ID NO: 1071530
gauucccagugauugcccu

SEQ ID NO: 1071532 - RNA, 19 nt, Artificial Sequence
  Description of Artificial Sequence: Synthetic oligonucleotide
  Sense strand starting at position 3152 of SEQ ID NO: 915327
cugggaaucggccacguau

SEQ ID NO: 1071533 - RNA, 19 nt, Artificial Sequence
  Description of Artificial Sequence: Synthetic oligonucleotide
  Antisense strand to SEQ ID NO: 1071532
auacguggccgauucccag

SEQ ID NO: 1071534 - RNA, 19 nt, Artificial Sequence
  Description of Artificial Sequence: Synthetic oligonucleotide
  Sense strand starting at position 3154 of SEQ ID NO: 915327
gggaaucggccacguauaa

SEQ ID NO: 1071535 - RNA, 19 nt, Artificial Sequence
  Description of Artificial Sequence: Synthetic oligonucleotide
  Antisense strand to SEQ ID NO: 1071534
uuauacguggccgauuccc

SEQ ID NO: 1071536 - RNA, 19 nt, Artificial Sequence
  Description of Artificial Sequence: Synthetic oligonucleotide
  Sense strand starting at position 3165 of SEQ ID NO: 915327
acguauaauccggcgguuu

SEQ ID NO: 1071537 - RNA, 19 nt, Artificial Sequence
  Description of Artificial Sequence: Synthetic oligonucleotide
  Antisense strand to SEQ ID NO: 1071536
aaaccgccggauuauacgu

SEQ ID NO: 1071538 - RNA, 19 nt, Artificial Sequence
  Description of Artificial Sequence: Synthetic oligonucleotide
  Sense strand starting at position 3394 of SEQ ID NO: 915327
auggauguauuaccggauu

SEQ ID NO: 1071539 - RNA, 19 nt, Artificial Sequence
  Description of Artificial Sequence: Synthetic oligonucleotide
  Antisense strand to SEQ ID NO: 1071538
aauccgguaauacauccau

SEQ ID NO: 1071540 - RNA, 19 nt, Artificial Sequence
  Description of Artificial Sequence: Synthetic oligonucleotide
  Sense strand starting at position 3396 of SEQ ID NO: 915327
ggauguauuaccggauucu

SEQ ID NO: 1071541 - RNA, 19 nt, Artificial Sequence
  Description of Artificial Sequence: Synthetic oligonucleotide
  Antisense strand to SEQ ID NO: 1071540
agaauccgguaauacaucc

SEQ ID NO: 1071542 - RNA, 19 nt, Artificial Sequence
  Description of Artificial Sequence: Synthetic oligonucleotide
  Sense strand starting at position 3397 of SEQ ID NO: 915327
gauguauuaccggauucua

SEQ ID NO: 1071543 - RNA, 19 nt, Artificial Sequence
  Description of Artificial Sequence: Synthetic oligonucleotide
  Antisense strand to SEQ ID NO: 1071542
uagaauccgguaauacauc

SEQ ID NO: 1071544 - RNA, 19 nt, Artificial Sequence
  Description of Artificial Sequence: Synthetic oligonucleotide
  Sense strand starting at position 3472 of SEQ ID NO: 915327
ccuacuggacagugauauu

SEQ ID NO: 1071545 - RNA, 19 nt, Artificial Sequence
  Description of Artificial Sequence: Synthetic oligonucleotide
  Antisense strand to SEQ ID NO: 1071544
aauaucacuguccaguagg

SEQ ID NO: 1071546 - RNA, 19 nt, Artificial Sequence
  Description of Artificial Sequence: Synthetic oligonucleotide
  Sense strand starting at position 3475 of SEQ ID NO: 915327
acuggacagugauauuauc

SEQ ID NO: 1071547 - RNA, 19 nt, Artificial Sequence
  Description of Artificial Sequence: Synthetic oligonucleotide
  Antisense strand to SEQ ID NO: 1071546
gauaauaucacuguccagu

SEQ ID NO: 1071548 - RNA, 19 nt, Artificial Sequence
  Description of Artificial Sequence: Synthetic oligonucleotide
  Sense strand starting at position 3489 of SEQ ID NO: 915327
uuaucugaucugugcagca

SEQ ID NO: 1071549 - RNA, 19 nt, Artificial Sequence
  Description of Artificial Sequence: Synthetic oligonucleotide
  Antisense strand to SEQ ID NO: 1071548
ugcugcacagaucagauaa

SEQ ID NO: 1071550 - RNA, 19 nt, Artificial Sequence
  Description of Artificial Sequence: Synthetic oligonucleotide
  Sense strand starting at position 3527 of SEQ ID NO: 915327
uuggccuucgaauguuaaa

SEQ ID NO: 1071551 - RNA, 19 nt, Artificial Sequence
  Description of Artificial Sequence: Synthetic oligonucleotide
  Antisense strand to SEQ ID NO: 1071550
uuuaacauucgaaggccaa

SEQ ID NO: 1071552 - RNA, 19 nt, Artificial Sequence
  Description of Artificial Sequence: Synthetic oligonucleotide
  Sense strand starting at position 3647 of SEQ ID NO: 915327
ggcauugauuagccaugca

SEQ ID NO: 1071553 - RNA, 19 nt, Artificial Sequence
  Description of Artificial Sequence: Synthetic oligonucleotide
  Antisense strand to SEQ ID NO: 1071552
ugcauggcuaaucaaugcc

SEQ ID NO: 1071554 - RNA, 19 nt, Artificial Sequence
  Description of Artificial Sequence: Synthetic oligonucleotide
  Sense strand starting at position 3650 of SEQ ID NO: 915327
auugauuagccaugcaacu

SEQ ID NO: 1071555 - RNA, 19 nt, Artificial Sequence
  Description of Artificial Sequence: Synthetic oligonucleotide
  Antisense strand to SEQ ID NO: 1071554
aguugcauggcuaaucaau

SEQ ID NO: 1071556 - RNA, 19 nt, Artificial Sequence
  Description of Artificial Sequence: Synthetic oligonucleotide
  Sense strand starting at position 3667 of SEQ ID NO: 915327
cucccauaggcaugaaauc

SEQ ID NO: 1071557 - RNA, 19 nt, Artificial Sequence
  Description of Artificial Sequence: Synthetic oligonucleotide
  Antisense strand to SEQ ID NO: 1071556
gauuucaugccuaugggag

SEQ ID NO: 1071558 - RNA, 19 nt, Artificial Sequence
  Description of Artificial Sequence: Synthetic oligonucleotide
  Sense strand starting at position 3741 of SEQ ID NO: 915327
gagucauucgcagaaccag

SEQ ID NO: 1071559 - RNA, 19 nt, Artificial Sequence
  Description of Artificial Sequence: Synthetic oligonucleotide
  Antisense strand to SEQ ID NO: 1071558
cugguucugcgaaugacuc

SEQ ID NO: 1071560 - RNA, 19 nt, Artificial Sequence
  Description of Artificial Sequence: Synthetic oligonucleotide
  Sense strand starting at position 3758 of SEQ ID NO: 915327
agaaauagccuuggacuuu

SEQ ID NO: 1071561 - RNA, 19 nt, Artificial Sequence
  Description of Artificial Sequence: Synthetic oligonucleotide
  Antisense strand to SEQ ID NO: 1071560
aaaguccaaggcuauuucu

SEQ ID NO: 1071562 - RNA, 19 nt, Artificial Sequence
  Description of Artificial Sequence: Synthetic oligonucleotide
  Sense strand starting at position 3770 of SEQ ID NO: 915327
ggacuuuacuagucacauc

SEQ ID NO: 1071563 - RNA, 19 nt, Artificial Sequence
  Description of Artificial Sequence: Synthetic oligonucleotide
  Antisense strand to SEQ ID NO: 1071562
gaugugacuaguaaagucc

SEQ ID NO: 1071564 - RNA, 19 nt, Artificial Sequence
  Description of Artificial Sequence: Synthetic oligonucleotide
  Sense strand starting at position 3808 of SEQ ID NO: 915327
ucuauuaccuuguuaugua

SEQ ID NO: 1071565 - RNA, 19 nt, Artificial Sequence
  Description of Artificial Sequence: Synthetic oligonucleotide
  Antisense strand to SEQ ID NO: 1071564
uacauaacaagguaauaga

SEQ ID NO: 1071566 - RNA, 19 nt, Artificial Sequence
  Description of Artificial Sequence: Synthetic oligonucleotide
  Sense strand starting at position 3839 of SEQ ID NO: 915327
gugcuuugagaucauugga

SEQ ID NO: 1071567 - RNA, 19 nt, Artificial Sequence
  Description of Artificial Sequence: Synthetic oligonucleotide
  Antisense strand to SEQ ID NO: 1071566
uccaaugaucucaaagcac

SEQ ID NO: 1071568 - RNA, 19 nt, Artificial Sequence
  Description of Artificial Sequence: Synthetic oligonucleotide
  Sense strand starting at position 3842 of SEQ ID NO: 915327
cuuugagaucauuggauau

SEQ ID NO: 1071569 - RNA, 19 nt, Artificial Sequence
  Description of Artificial Sequence: Synthetic oligonucleotide
  Antisense strand to SEQ ID NO: 1071568
auauccaaugaucucaaag

SEQ ID NO: 1071570 - RNA, 19 nt, Artificial Sequence
  Description of Artificial Sequence: Synthetic oligonucleotide
  Sense strand starting at position 3844 of SEQ ID NO: 915327
uugagaucauuggauauga

SEQ ID NO: 1071571 - RNA, 19 nt, Artificial Sequence
  Description of Artificial Sequence: Synthetic oligonucleotide
  Antisense strand to SEQ ID NO: 1071570
ucauauccaaugaucucaa

SEQ ID NO: 1071572 - RNA, 19 nt, Artificial Sequence
  Description of Artificial Sequence: Synthetic oligonucleotide
  Sense strand starting at position 3873 of SEQ ID NO: 915327
uuacuuucgugaccugcaa

SEQ ID NO: 1071573 - RNA, 19 nt, Artificial Sequence
  Description of Artificial Sequence: Synthetic oligonucleotide
  Antisense strand to SEQ ID NO: 1071572
uugcaggucacgaaaguaa

SEQ ID NO: 1071574 - RNA, 19 nt, Artificial Sequence
  Description of Artificial Sequence: Synthetic oligonucleotide
  Sense strand starting at position 3967 of SEQ ID NO: 915327
gguacauguguaggccauu

SEQ ID NO: 1071575 - RNA, 19 nt, Artificial Sequence
  Description of Artificial Sequence: Synthetic oligonucleotide
  Antisense strand to SEQ ID NO: 1071574
aauggccuacacauguacc

SEQ ID NO: 1071576 - RNA, 19 nt, Artificial Sequence
  Description of Artificial Sequence: Synthetic oligonucleotide
  Sense strand starting at position 3982 of SEQ ID NO: 915327
cauuuaguagucugagcuu

SEQ ID NO: 1071577 - RNA, 19 nt, Artificial Sequence
  Description of Artificial Sequence: Synthetic oligonucleotide
  Antisense strand to SEQ ID NO: 1071576
aagcucagacuacuaaaug

SEQ ID NO: 1071578 - RNA, 19 nt, Artificial Sequence
  Description of Artificial Sequence: Synthetic oligonucleotide
  Sense strand starting at position 11 of SEQ ID NO: 915328
acaaauugcguucgggaga

SEQ ID NO: 1071579 - RNA, 19 nt, Artificial Sequence
  Description of Artificial Sequence: Synthetic oligonucleotide
  Antisense strand to SEQ ID NO: 1071578
ucucccgaacgcaauuugu

SEQ ID NO: 1071580 - RNA, 19 nt, Artificial Sequence
  Description of Artificial Sequence: Synthetic oligonucleotide
  Sense strand starting at position 12 of SEQ ID NO: 915328
caaauugcguucgggagaa

SEQ ID NO: 1071581 - RNA, 19 nt, Artificial Sequence
  Description of Artificial Sequence: Synthetic oligonucleotide
  Antisense strand to SEQ ID NO: 1071580
uucucccgaacgcaauuug

SEQ ID NO: 1071582 - RNA, 19 nt, Artificial Sequence
  Description of Artificial Sequence: Synthetic oligonucleotide
  Sense strand starting at position 16 of SEQ ID NO: 915328
uugcguucgggagaaacuu

SEQ ID NO: 1071583 - RNA, 19 nt, Artificial Sequence
  Description of Artificial Sequence: Synthetic oligonucleotide
  Antisense strand to SEQ ID NO: 1071582
aaguuucucccgaacgcaa

SEQ ID NO: 1071584 - RNA, 19 nt, Artificial Sequence
  Description of Artificial Sequence: Synthetic oligonucleotide
  Sense strand starting at position 24 of SEQ ID NO: 915328
gggagaaacuuccuugcag

SEQ ID NO: 1071585 - RNA, 19 nt, Artificial Sequence
  Description of Artificial Sequence: Synthetic oligonucleotide
  Antisense strand to SEQ ID NO: 1071584
cugcaaggaaguuucuccc

SEQ ID NO: 1071586 - RNA, 19 nt, Artificial Sequence
  Description of Artificial Sequence: Synthetic oligonucleotide
  Sense strand starting at position 43 of SEQ ID NO: 915328
gcaauaguuucuucuggac

SEQ ID NO: 1071587 - RNA, 19 nt, Artificial Sequence
  Description of Artificial Sequence: Synthetic oligonucleotide
  Antisense strand to SEQ ID NO: 1071586
guccagaagaaacuauugc

SEQ ID NO: 1071588 - RNA, 19 nt, Artificial Sequence
  Description of Artificial Sequence: Synthetic oligonucleotide
  Sense strand starting at position 157 of SEQ ID NO: 915328
aacagagauuaggguccaa

SEQ ID NO: 1071589 - RNA, 19 nt, Artificial Sequence
  Description of Artificial Sequence: Synthetic oligonucleotide
  Antisense strand to SEQ ID NO: 1071588
uuggacccuaaucucuguu

SEQ ID NO: 1071590 - RNA, 19 nt, Artificial Sequence
  Description of Artificial Sequence: Synthetic oligonucleotide
  Sense strand starting at position 168 of SEQ ID NO: 915328
ggguccaauucugguacuu

SEQ ID NO: 1071591 - RNA, 19 nt, Artificial Sequence
  Description of Artificial Sequence: Synthetic oligonucleotide
  Antisense strand to SEQ ID NO: 1071590
aaguaccagaauuggaccc

SEQ ID NO: 1071592 - RNA, 19 nt, Artificial Sequence
  Description of Artificial Sequence: Synthetic oligonucleotide
  Sense strand starting at position 170 of SEQ ID NO: 915328
guccaauucugguacuucu

SEQ ID NO: 1071593 - RNA, 19 nt, Artificial Sequence
  Description of Artificial Sequence: Synthetic oligonucleotide
  Antisense strand to SEQ ID NO: 1071592
agaaguaccagaauuggac

SEQ ID NO: 1071594 - RNA, 19 nt, Artificial Sequence
  Description of Artificial Sequence: Synthetic oligonucleotide
  Sense strand starting at position 216 of SEQ ID NO: 915328
ccacgaagguuccagaaau

SEQ ID NO: 1071595 - RNA, 19 nt, Artificial Sequence
  Description of Artificial Sequence: Synthetic oligonucleotide
  Antisense strand to SEQ ID NO: 1071594
auuucuggaaccuucgugg

SEQ ID NO: 1071596 - RNA, 19 nt, Artificial Sequence
  Description of Artificial Sequence: Synthetic oligonucleotide
  Sense strand starting at position 402 of SEQ ID NO: 915328
guggucagcuaucucagaa

SEQ ID NO: 1071597 - RNA, 19 nt, Artificial Sequence
  Description of Artificial Sequence: Synthetic oligonucleotide
  Antisense strand to SEQ ID NO: 1071596
uucugagauagcugaccac

SEQ ID NO: 1071598 - RNA, 19 nt, Artificial Sequence
  Description of Artificial Sequence: Synthetic oligonucleotide
  Sense strand starting at position 406 of SEQ ID NO: 915328
ucagcuaucucagaaagag

SEQ ID NO: 1071599 - RNA, 19 nt, Artificial Sequence
  Description of Artificial Sequence: Synthetic oligonucleotide
  Antisense strand to SEQ ID NO: 1071598
cucuuucugagauagcuga

SEQ ID NO: 1071600 - RNA, 19 nt, Artificial Sequence
  Description of Artificial Sequence: Synthetic oligonucleotide
  Sense strand starting at position 628 of SEQ ID NO: 915328
gggauuccuucuggucuga

SEQ ID NO: 1071601 - RNA, 19 nt, Artificial Sequence
  Description of Artificial Sequence: Synthetic oligonucleotide
  Antisense strand to SEQ ID NO: 1071600
ucagaccagaaggaauccc

SEQ ID NO: 1071602 - RNA, 19 nt, Artificial Sequence
  Description of Artificial Sequence: Synthetic oligonucleotide
  Sense strand starting at position 630 of SEQ ID NO: 915328
gauuccuucuggucugacu

SEQ ID NO: 1071603 - RNA, 19 nt, Artificial Sequence
  Description of Artificial Sequence: Synthetic oligonucleotide
  Antisense strand to SEQ ID NO: 1071602
agucagaccagaaggaauc

SEQ ID NO: 1071604 - RNA, 19 nt, Artificial Sequence
  Description of Artificial Sequence: Synthetic oligonucleotide
  Sense strand starting at position 654 of SEQ ID NO: 915328
ggugguuugugggcaggaa

SEQ ID NO: 1071605 - RNA, 19 nt, Artificial Sequence
  Description of Artificial Sequence: Synthetic oligonucleotide
  Antisense strand to SEQ ID NO: 1071604
uuccugcccacaaaccacc

SEQ ID NO: 1071606 - RNA, 19 nt, Artificial Sequence
  Description of Artificial Sequence: Synthetic oligonucleotide
  Sense strand starting at position 1731 of SEQ ID NO: 915328
uggugaaguacacguacuu

SEQ ID NO: 1071607 - RNA, 19 nt, Artificial Sequence
  Description of Artificial Sequence: Synthetic oligonucleotide
  Antisense strand to SEQ ID NO: 1071606
aaguacguguacuucacca

SEQ ID NO: 1071608 - RNA, 19 nt, Artificial Sequence
  Description of Artificial Sequence: Synthetic oligonucleotide
  Sense strand starting at position 1859 of SEQ ID NO: 915328
ccgcgcuucuucuuccaua

SEQ ID NO: 1071609 - RNA, 19 nt, Artificial Sequence
  Description of Artificial Sequence: Synthetic oligonucleotide
  Antisense strand to SEQ ID NO: 1071608
uauggaagaagaagcgcgg

SEQ ID NO: 1071610 - RNA, 19 nt, Artificial Sequence
  Description of Artificial Sequence: Synthetic oligonucleotide
  Sense strand starting at position 2675 of SEQ ID NO: 915328
acaguaaccuuugcuggau

SEQ ID NO: 1071611 - RNA, 19 nt, Artificial Sequence
  Description of Artificial Sequence: Synthetic oligonucleotide
  Antisense strand to SEQ ID NO: 1071610
auccagcaaagguuacugu

SEQ ID NO: 1071612 - RNA, 19 nt, Artificial Sequence
  Description of Artificial Sequence: Synthetic oligonucleotide
  Sense strand starting at position 2676 of SEQ ID NO: 915328
caguaaccuuugcuggauu

SEQ ID NO: 1071613 - RNA, 19 nt, Artificial Sequence
  Description of Artificial Sequence: Synthetic oligonucleotide
  Antisense strand to SEQ ID NO: 1071612
aauccagcaaagguuacug

SEQ ID NO: 1071614 - RNA, 19 nt, Artificial Sequence
  Description of Artificial Sequence: Synthetic oligonucleotide
  Sense strand starting at position 2677 of SEQ ID NO: 915328
aguaaccuuugcuggauua

SEQ ID NO: 1071615 - RNA, 19 nt, Artificial Sequence
  Description of Artificial Sequence: Synthetic oligonucleotide
  Antisense strand to SEQ ID NO: 1071614
uaauccagcaaagguuacu

SEQ ID NO: 1071616 - RNA, 19 nt, Artificial Sequence
  Description of Artificial Sequence: Synthetic oligonucleotide
  Sense strand starting at position 2927 of SEQ ID NO: 915328
gcggcugagucaucgcuuu

SEQ ID NO: 1071617 - RNA, 19 nt, Artificial Sequence
  Description of Artificial Sequence: Synthetic oligonucleotide
  Antisense strand to SEQ ID NO: 1071616
aaagcgaugacucagccgc

SEQ ID NO: 1071618 - RNA, 19 nt, Artificial Sequence
  Description of Artificial Sequence: Synthetic oligonucleotide
  Sense strand starting at position 2933 of SEQ ID NO: 915328
gagucaucgcuuuccagcu

SEQ ID NO: 1071619 - RNA, 19 nt, Artificial Sequence
  Description of Artificial Sequence: Synthetic oligonucleotide
  Antisense strand to SEQ ID NO: 1071618
agcuggaaagcgaugacuc

SEQ ID NO: 1071620 - RNA, 19 nt, Artificial Sequence
  Description of Artificial Sequence: Synthetic oligonucleotide
  Sense strand starting at position 3163 of SEQ ID NO: 915328
gggucagaauuggccucaa

SEQ ID NO: 1071621 - RNA, 19 nt, Artificial Sequence
  Description of Artificial Sequence: Synthetic oligonucleotide
  Antisense strand to SEQ ID NO: 1071620
uugaggccaauucugaccc

SEQ ID NO: 1071622 - RNA, 19 nt, Artificial Sequence
  Description of Artificial Sequence: Synthetic oligonucleotide
  Sense strand starting at position 3308 of SEQ ID NO: 915328
ggucacuguaaaggauaaa

SEQ ID NO: 1071623 - RNA, 19 nt, Artificial Sequence
  Description of Artificial Sequence: Synthetic oligonucleotide
  Antisense strand to SEQ ID NO: 1071622
uuuauccuuuacagugacc

SEQ ID NO: 1071624 - RNA, 19 nt, Artificial Sequence
  Description of Artificial Sequence: Synthetic oligonucleotide
  Sense strand starting at position 3650 of SEQ ID NO: 915328
cgagcauuguuccggagag

SEQ ID NO: 1071625 - RNA, 19 nt, Artificial Sequence
  Description of Artificial Sequence: Synthetic oligonucleotide
  Antisense strand to SEQ ID NO: 1071624
cucuccggaacaaugcucg

SEQ ID NO: 1071626 - RNA, 19 nt, Artificial Sequence
  Description of Artificial Sequence: Synthetic oligonucleotide
  Sense strand starting at position 3651 of SEQ ID NO: 915328
gagcauuguuccggagagg

SEQ ID NO: 1071627 - RNA, 19 nt, Artificial Sequence
  Description of Artificial Sequence: Synthetic oligonucleotide
  Antisense strand to SEQ ID NO: 1071626
ccucuccggaacaaugcuc

SEQ ID NO: 1071628 - RNA, 19 nt, Artificial Sequence
  Description of Artificial Sequence: Synthetic oligonucleotide
  Sense strand starting at position 3793 of SEQ ID NO: 915328
ggcagagcgcucugucacu

SEQ ID NO: 1071629 - RNA, 19 nt, Artificial Sequence
  Description of Artificial Sequence: Synthetic oligonucleotide
  Antisense strand to SEQ ID NO: 1071628
agugacagagcgcucugcc

SEQ ID NO: 1071630 - RNA, 19 nt, Artificial Sequence
  Description of Artificial Sequence: Synthetic oligonucleotide
  Sense strand starting at position 3911 of SEQ ID NO: 915328
gacacucgugguugcuuaa

SEQ ID NO: 1071631 - RNA, 19 nt, Artificial Sequence
  Description of Artificial Sequence: Synthetic oligonucleotide
  Antisense strand to SEQ ID NO: 1071630
uuaagcaaccacgaguguc

SEQ ID NO: 1071632 - RNA, 19 nt, Artificial Sequence
  Description of Artificial Sequence: Synthetic oligonucleotide
  Sense strand starting at position 150 of SEQ ID NO: 915329
gugugugagcuggagugua

SEQ ID NO: 1071633 - RNA, 19 nt, Artificial Sequence
  Description of Artificial Sequence: Synthetic oligonucleotide
  Antisense strand to SEQ ID NO: 1071632
uacacuccagcucacacac

SEQ ID NO: 1071634 - RNA, 19 nt, Artificial Sequence
  Description of Artificial Sequence: Synthetic oligonucleotide
  Sense strand starting at position 311 of SEQ ID NO: 915329
gugagcugggcuguguauu

SEQ ID NO: 1071635 - RNA, 19 nt, Artificial Sequence
  Description of Artificial Sequence: Synthetic oligonucleotide
  Antisense strand to SEQ ID NO: 1071634
aauacacagcccagcucac

SEQ ID NO: 1071636 - RNA, 19 nt, Artificial Sequence
  Description of Artificial Sequence: Synthetic oligonucleotide
  Sense strand starting at position 769 of SEQ ID NO: 915329
cgcuuuccugugaggcgua

SEQ ID NO: 1071637 - RNA, 19 nt, Artificial Sequence
  Description of Artificial Sequence: Synthetic oligonucleotide
  Antisense strand to SEQ ID NO: 1071636
uacgccucacaggaaagcg

SEQ ID NO: 1071638 - RNA, 19 nt, Artificial Sequence
  Description of Artificial Sequence: Synthetic oligonucleotide
  Sense strand starting at position 1438 of SEQ ID NO: 915329
ggagacgucacaggagaua

SEQ ID NO: 1071639 - RNA, 19 nt, Artificial Sequence
  Description of Artificial Sequence: Synthetic oligonucleotide
  Antisense strand to SEQ ID NO: 1071638
uaucuccugugacgucucc

SEQ ID NO: 1071640 - RNA, 19 nt, Artificial Sequence
  Description of Artificial Sequence: Synthetic oligonucleotide
  Sense strand starting at position 1603 of SEQ ID NO: 915329
ggaucagaguuucuccaag

SEQ ID NO: 1071641 - RNA, 19 nt, Artificial Sequence
  Description of Artificial Sequence: Synthetic oligonucleotide
  Antisense strand to SEQ ID NO: 1071640
cuuggagaaacucugaucc

SEQ ID NO: 1071642 - RNA, 19 nt, Artificial Sequence
  Description of Artificial Sequence: Synthetic oligonucleotide
  Sense strand starting at position 1882 of SEQ ID NO: 915329
ggcgcucuuaccuagaggu

SEQ ID NO: 1071643 - RNA, 19 nt, Artificial Sequence
  Description of Artificial Sequence: Synthetic oligonucleotide
  Antisense strand to SEQ ID NO: 1071642
accucuagguaagagcgcc

SEQ ID NO: 1071644 - RNA, 19 nt, Artificial Sequence
  Description of Artificial Sequence: Synthetic oligonucleotide
  Sense strand starting at position 2554 of SEQ ID NO: 915329
agcuguaaaugacauugau

SEQ ID NO: 1071645 - RNA, 19 nt, Artificial Sequence
  Description of Artificial Sequence: Synthetic oligonucleotide
  Antisense strand to SEQ ID NO: 1071644
aucaaugucauuuacagcu

SEQ ID NO: 1071646 - RNA, 19 nt, Artificial Sequence
  Description of Artificial Sequence: Synthetic oligonucleotide
  Sense strand starting at position 2566 of SEQ ID NO: 915329
cauugauagccacgcacau

SEQ ID NO: 1071647 - RNA, 19 nt, Artificial Sequence
  Description of Artificial Sequence: Synthetic oligonucleotide
  Antisense strand to SEQ ID NO: 1071646
augugcguggcuaucaaug

SEQ ID NO: 1071648 - RNA, 19 nt, Artificial Sequence
  Description of Artificial Sequence: Synthetic oligonucleotide
  Sense strand starting at position 2616 of SEQ ID NO: 915329
caagaagacucguuaaagu

SEQ ID NO: 1071649 - RNA, 19 nt, Artificial Sequence
  Description of Artificial Sequence: Synthetic oligonucleotide
  Antisense strand to SEQ ID NO: 1071648
acuuuaacgagucuucuug

SEQ ID NO: 1071650 - RNA, 19 nt, Artificial Sequence
  Description of Artificial Sequence: Synthetic oligonucleotide
  Sense strand starting at position 2625 of SEQ ID NO: 915329
ucguuaaagugucaugcaa

SEQ ID NO: 1071651 - RNA, 19 nt, Artificial Sequence
  Description of Artificial Sequence: Synthetic oligonucleotide
  Antisense strand to SEQ ID NO: 1071650
uugcaugacacuuuaacga

SEQ ID NO: 1071652 - RNA, 19 nt, Artificial Sequence
  Description of Artificial Sequence: Synthetic oligonucleotide
  Sense strand starting at position 2627 of SEQ ID NO: 915329
guuaaagugucaugcaaac

SEQ ID NO: 1071653 - RNA, 19 nt, Artificial Sequence
  Description of Artificial Sequence: Synthetic oligonucleotide
  Antisense strand to SEQ ID NO: 1071652
guuugcaugacacuuuaac

SEQ ID NO: 1071654 - RNA, 19 nt, Artificial Sequence
  Description of Artificial Sequence: Synthetic oligonucleotide
  Sense strand starting at position 2712 of SEQ ID NO: 915329
ccgacagacuugcuggauu

SEQ ID NO: 1071655 - RNA, 19 nt, Artificial Sequence
  Description of Artificial Sequence: Synthetic oligonucleotide
  Antisense strand to SEQ ID NO: 1071654
aauccagcaagucugucgg

SEQ ID NO: 1071656 - RNA, 19 nt, Artificial Sequence
  Description of Artificial Sequence: Synthetic oligonucleotide
  Sense strand starting at position 2714 of SEQ ID NO: 915329
gacagacuugcuggauuac

SEQ ID NO: 1071657 - RNA, 19 nt, Artificial Sequence
  Description of Artificial Sequence: Synthetic oligonucleotide
  Antisense strand to SEQ ID NO: 1071656
guaauccagcaagucuguc

SEQ ID NO: 1071658 - RNA, 19 nt, Artificial Sequence
  Description of Artificial Sequence: Synthetic oligonucleotide
  Sense strand starting at position 2784 of SEQ ID NO: 915329
guaguaggagugggaguua

SEQ ID NO: 1071659 - RNA, 19 nt, Artificial Sequence
  Description of Artificial Sequence: Synthetic oligonucleotide
  Antisense strand to SEQ ID NO: 1071658
uaacucccacuccuacuac

SEQ ID NO: 1071660 - RNA, 19 nt, Artificial Sequence
  Description of Artificial Sequence: Synthetic oligonucleotide
  Sense strand starting at position 2845 of SEQ ID NO: 915329
caaauugagcuagguugaa

SEQ ID NO: 1071661 - RNA, 19 nt, Artificial Sequence
  Description of Artificial Sequence: Synthetic oligonucleotide
  Antisense strand to SEQ ID NO: 1071660
uucaaccuagcucaauuug

SEQ ID NO: 1071662 - RNA, 19 nt, Artificial Sequence
  Description of Artificial Sequence: Synthetic oligonucleotide
  Sense strand starting at position 3118 of SEQ ID NO: 915329
auggacaagugcuguucua

SEQ ID NO: 1071663 - RNA, 19 nt, Artificial Sequence
  Description of Artificial Sequence: Synthetic oligonucleotide
  Antisense strand to SEQ ID NO: 1071662
uagaacagcacuuguccau

SEQ ID NO: 1071664 - RNA, 19 nt, Artificial Sequence
  Description of Artificial Sequence: Synthetic oligonucleotide
  Sense strand starting at position 3197 of SEQ ID NO: 915329
acaggaaucucuggucacu

SEQ ID NO: 1071665 - RNA, 19 nt, Artificial Sequence
  Description of Artificial Sequence: Synthetic oligonucleotide
  Antisense strand to SEQ ID NO: 1071664
agugaccagagauuccugu

SEQ ID NO: 1071666 - RNA, 19 nt, Artificial Sequence
  Description of Artificial Sequence: Synthetic oligonucleotide
  Sense strand starting at position 3199 of SEQ ID NO: 915329
aggaaucucuggucacuca

SEQ ID NO: 1071667 - RNA, 19 nt, Artificial Sequence
  Description of Artificial Sequence: Synthetic oligonucleotide
  Antisense strand to SEQ ID NO: 1071666
ugagugaccagagauuccu

SEQ ID NO: 1071668 - RNA, 19 nt, Artificial Sequence
  Description of Artificial Sequence: Synthetic oligonucleotide
  Sense strand starting at position 3200 of SEQ ID NO: 915329
ggaaucucuggucacucau

SEQ ID NO: 1071669 - RNA, 19 nt, Artificial Sequence
  Description of Artificial Sequence: Synthetic oligonucleotide
  Antisense strand to SEQ ID NO: 1071668
augagugaccagagauucc

SEQ ID NO: 1071670 - RNA, 19 nt, Artificial Sequence
  Description of Artificial Sequence: Synthetic oligonucleotide
  Sense strand starting at position 3435 of SEQ ID NO: 915329
guuugaagucaugaaagua

SEQ ID NO: 1071671 - RNA, 19 nt, Artificial Sequence
  Description of Artificial Sequence: Synthetic oligonucleotide
  Antisense strand to SEQ ID NO: 1071670
uacuuucaugacuucaaac

SEQ ID NO: 1071672 - RNA, 19 nt, Artificial Sequence
  Description of Artificial Sequence: Synthetic oligonucleotide
  Sense strand starting at position 3443 of SEQ ID NO: 915329
ucaugaaaguaauucugau

SEQ ID NO: 1071673 - RNA, 19 nt, Artificial Sequence
  Description of Artificial Sequence: Synthetic oligonucleotide
  Antisense strand to SEQ ID NO: 1071672
aucagaauuacuuucauga

SEQ ID NO: 1071674 - RNA, 19 nt, Artificial Sequence
  Description of Artificial Sequence: Synthetic oligonucleotide
  Sense strand starting at position 3543 of SEQ ID NO: 915329
uguuguaucccaugugcca

SEQ ID NO: 1071675 - RNA, 19 nt, Artificial Sequence
  Description of Artificial Sequence: Synthetic oligonucleotide
  Antisense strand to SEQ ID NO: 1071674
uggcacaugggauacaaca

SEQ ID NO: 1071676 - RNA, 19 nt, Artificial Sequence
  Description of Artificial Sequence: Synthetic oligonucleotide
  Sense strand starting at position 3662 of SEQ ID NO: 915329
ggaggaauuucagggaaua

SEQ ID NO: 1071677 - RNA, 19 nt, Artificial Sequence
  Description of Artificial Sequence: Synthetic oligonucleotide
  Antisense strand to SEQ ID NO: 1071676
uauucccugaaauuccucc

SEQ ID NO: 1071678 - RNA, 19 nt, Artificial Sequence
  Description of Artificial Sequence: Synthetic oligonucleotide
  Sense strand starting at position 3766 of SEQ ID NO: 915329
accagcugacccuaugaua

SEQ ID NO: 1071679 - RNA, 19 nt, Artificial Sequence
  Description of Artificial Sequence: Synthetic oligonucleotide
  Antisense strand to SEQ ID NO: 1071678
uaucauagggucagcuggu

SEQ ID NO: 1071680 - RNA, 19 nt, Artificial Sequence
  Description of Artificial Sequence: Synthetic oligonucleotide
  Sense strand starting at position 3813 of SEQ ID NO: 915329
ugcugugucaggccucuau

SEQ ID NO: 1071681 - RNA, 19 nt, Artificial Sequence
  Description of Artificial Sequence: Synthetic oligonucleotide
  Antisense strand to SEQ ID NO: 1071680
auagaggccugacacagca

SEQ ID NO: 1071682 - RNA, 19 nt, Artificial Sequence
  Description of Artificial Sequence: Synthetic oligonucleotide
  Sense strand starting at position 3824 of SEQ ID NO: 915329
gccucuauguucccacagu

SEQ ID NO: 1071683 - RNA, 19 nt, Artificial Sequence
  Description of Artificial Sequence: Synthetic oligonucleotide
  Antisense strand to SEQ ID NO: 1071682
acugugggaacauagaggc

SEQ ID NO: 1071684 - RNA, 19 nt, Artificial Sequence
  Description of Artificial Sequence: Synthetic oligonucleotide
  Sense strand starting at position 3825 of SEQ ID NO: 915329
ccucuauguucccacaguu

SEQ ID NO: 1071685 - RNA, 19 nt, Artificial Sequence
  Description of Artificial Sequence: Synthetic oligonucleotide
  Antisense strand to SEQ ID NO: 1071684
aacugugggaacauagagg

SEQ ID NO: 1071686 - RNA, 19 nt, Artificial Sequence
  Description of Artificial Sequence: Synthetic oligonucleotide
  Sense strand starting at position 345 of SEQ ID NO: 915330
ggagacgucacaggagaua

SEQ ID NO: 1071687 - RNA, 19 nt, Artificial Sequence
  Description of Artificial Sequence: Synthetic oligonucleotide
  Antisense strand to SEQ ID NO: 1071686
uaucuccugugacgucucc

SEQ ID NO: 1071688 - RNA, 19 nt, Artificial Sequence
  Description of Artificial Sequence: Synthetic oligonucleotide
  Sense strand starting at position 510 of SEQ ID NO: 915330
ggaucagaguuucuccaag

SEQ ID NO: 1071689 - RNA, 19 nt, Artificial Sequence
  Description of Artificial Sequence: Synthetic oligonucleotide
  Antisense strand to SEQ ID NO: 1071688
cuuggagaaacucugaucc

SEQ ID NO: 1071690 - RNA, 19 nt, Artificial Sequence
  Description of Artificial Sequence: Synthetic oligonucleotide
  Sense strand starting at position 1473 of SEQ ID NO: 915330
cauugauagccacgcacau

SEQ ID NO: 1071691 - RNA, 19 nt, Artificial Sequence
  Description of Artificial Sequence: Synthetic oligonucleotide
  Antisense strand to SEQ ID NO: 1071690
augugcguggcuaucaaug

SEQ ID NO: 1071692 - RNA, 19 nt, Artificial Sequence
  Description of Artificial Sequence: Synthetic oligonucleotide
  Sense strand starting at position 1523 of SEQ ID NO: 915330
caagaagacucguuaaagu

SEQ ID NO: 1071693 - RNA, 19 nt, Artificial Sequence
  Description of Artificial Sequence: Synthetic oligonucleotide
  Antisense strand to SEQ ID NO: 1071692
acuuuaacgagucuucuug

SEQ ID NO: 1071694 - RNA, 19 nt, Artificial Sequence
  Description of Artificial Sequence: Synthetic oligonucleotide
  Sense strand starting at position 1619 of SEQ ID NO: 915330
ccgacagacuugcuggauu

SEQ ID NO: 1071695 - RNA, 19 nt, Artificial Sequence
  Description of Artificial Sequence: Synthetic oligonucleotide
  Antisense strand to SEQ ID NO: 1071694
aauccagcaagucugucgg

SEQ ID NO: 1071696 - RNA, 19 nt, Artificial Sequence
  Description of Artificial Sequence: Synthetic oligonucleotide
  Sense strand starting at position 1621 of SEQ ID NO: 915330
gacagacuugcuggauuac

SEQ ID NO: 1071697 - RNA, 19 nt, Artificial Sequence
  Description of Artificial Sequence: Synthetic oligonucleotide
  Antisense strand to SEQ ID NO: 1071696
guaauccagcaagucuguc

SEQ ID NO: 1071698 - RNA, 19 nt, Artificial Sequence
  Description of Artificial Sequence: Synthetic oligonucleotide
  Sense strand starting at position 1691 of SEQ ID NO: 915330
guaguaggagugggaguua

SEQ ID NO: 1071699 - RNA, 19 nt, Artificial Sequence
  Description of Artificial Sequence: Synthetic oligonucleotide
  Antisense strand to SEQ ID NO: 1071698
uaacucccacuccuacuac

SEQ ID NO: 1071700 - RNA, 19 nt, Artificial Sequence
  Description of Artificial Sequence: Synthetic oligonucleotide
  Sense strand starting at position 1752 of SEQ ID NO: 915330
caaauugagcuagguugaa

SEQ ID NO: 1071701 - RNA, 19 nt, Artificial Sequence
  Description of Artificial Sequence: Synthetic oligonucleotide
  Antisense strand to SEQ ID NO: 1071700
uucaaccuagcucaauuug

SEQ ID NO: 1071702 - RNA, 19 nt, Artificial Sequence
  Description of Artificial Sequence: Synthetic oligonucleotide
  Sense strand starting at position 2106 of SEQ ID NO: 915330
aggaaucucuggucacuca

SEQ ID NO: 1071703 - RNA, 19 nt, Artificial Sequence
  Description of Artificial Sequence: Synthetic oligonucleotide
  Antisense strand to SEQ ID NO: 1071702
ugagugaccagagauuccu

SEQ ID NO: 1071704 - RNA, 19 nt, Artificial Sequence
  Description of Artificial Sequence: Synthetic oligonucleotide
  Sense strand starting at position 2107 of SEQ ID NO: 915330
ggaaucucuggucacucau

SEQ ID NO: 1071705 - RNA, 19 nt, Artificial Sequence
  Description of Artificial Sequence: Synthetic oligonucleotide
  Antisense strand to SEQ ID NO: 1071704
augagugaccagagauucc

SEQ ID NO: 1071706 - RNA, 19 nt, Artificial Sequence
  Description of Artificial Sequence: Synthetic oligonucleotide
  Sense strand starting at position 2342 of SEQ ID NO: 915330
guuugaagucaugaaagua

SEQ ID NO: 1071707 - RNA, 19 nt, Artificial Sequence
  Description of Artificial Sequence: Synthetic oligonucleotide
  Antisense strand to SEQ ID NO: 1071706
uacuuucaugacuucaaac

SEQ ID NO: 1071708 - RNA, 19 nt, Artificial Sequence
  Description of Artificial Sequence: Synthetic oligonucleotide
  Sense strand starting at position 2350 of SEQ ID NO: 915330
ucaugaaaguaauucugau

SEQ ID NO: 1071709 - RNA, 19 nt, Artificial Sequence
  Description of Artificial Sequence: Synthetic oligonucleotide
  Antisense strand to SEQ ID NO: 1071708
aucagaauuacuuucauga

SEQ ID NO: 1071710 - RNA, 19 nt, Artificial Sequence
  Description of Artificial Sequence: Synthetic oligonucleotide
  Sense strand starting at position 2569 of SEQ ID NO: 915330
ggaggaauuucagggaaua

SEQ ID NO: 1071711 - RNA, 19 nt, Artificial Sequence
  Description of Artificial Sequence: Synthetic oligonucleotide
  Antisense strand to SEQ ID NO: 1071710
uauucccugaaauuccucc

SEQ ID NO: 1071712 - RNA, 19 nt, Artificial Sequence
  Description of Artificial Sequence: Synthetic oligonucleotide
  Sense strand starting at position 2673 of SEQ ID NO: 915330
accagcugacccuaugaua

SEQ ID NO: 1071713 - RNA, 19 nt, Artificial Sequence
  Description of Artificial Sequence: Synthetic oligonucleotide
  Antisense strand to SEQ ID NO: 1071712
uaucauagggucagcuggu

SEQ ID NO: 1071714 - RNA, 19 nt, Artificial Sequence
  Description of Artificial Sequence: Synthetic oligonucleotide
  Sense strand starting at position 2720 of SEQ ID NO: 915330
ugcugugucaggccucuau

SEQ ID NO: 1071715 - RNA, 19 nt, Artificial Sequence
  Description of Artificial Sequence: Synthetic oligonucleotide
  Antisense strand to SEQ ID NO: 1071714
auagaggccugacacagca

SEQ ID NO: 1071716 - RNA, 19 nt, Artificial Sequence
  Description of Artificial Sequence: Synthetic oligonucleotide
  Sense strand starting at position 3120 of SEQ ID NO: 915330
aggugauuauugcucauac

SEQ ID NO: 1071717 - RNA, 19 nt, Artificial Sequence
  Description of Artificial Sequence: Synthetic oligonucleotide
  Antisense strand to SEQ ID NO: 1071716
guaugagcaauaaucaccu

SEQ ID NO: 1071718 - RNA, 19 nt, Artificial Sequence
  Description of Artificial Sequence: Synthetic oligonucleotide
  Sense strand starting at position 3121 of SEQ ID NO: 915330
ggugauuauugcucauaca

SEQ ID NO: 1071719 - RNA, 19 nt, Artificial Sequence
  Description of Artificial Sequence: Synthetic oligonucleotide
  Antisense strand to SEQ ID NO: 1071718
uguaugagcaauaaucacc

SEQ ID NO: 1071720 - RNA, 19 nt, Artificial Sequence
  Description of Artificial Sequence: Synthetic oligonucleotide
  Sense strand starting at position 3122 of SEQ ID NO: 915330
gugauuauugcucauacag

SEQ ID NO: 1071721 - RNA, 19 nt, Artificial Sequence
  Description of Artificial Sequence: Synthetic oligonucleotide
  Antisense strand to SEQ ID NO: 1071720
cuguaugagcaauaaucac

SEQ ID NO: 1071722 - RNA, 19 nt, Artificial Sequence
  Description of Artificial Sequence: Synthetic oligonucleotide
  Sense strand starting at position 3140 of SEQ ID NO: 915330
gcaagcaauccuuguagau

SEQ ID NO: 1071723 - RNA, 19 nt, Artificial Sequence
  Description of Artificial Sequence: Synthetic oligonucleotide
  Antisense strand to SEQ ID NO: 1071722
aucuacaaggauugcuugc

SEQ ID NO: 1071724 - RNA, 19 nt, Artificial Sequence
  Description of Artificial Sequence: Synthetic oligonucleotide
  Sense strand starting at position 3336 of SEQ ID NO: 915330
ccaagcuaagugggaaauu

SEQ ID NO: 1071725 - RNA, 19 nt, Artificial Sequence
  Description of Artificial Sequence: Synthetic oligonucleotide
  Antisense strand to SEQ ID NO: 1071724
aauuucccacuuagcuugg

SEQ ID NO: 1071726 - RNA, 19 nt, Artificial Sequence
  Description of Artificial Sequence: Synthetic oligonucleotide
  Sense strand starting at position 3337 of SEQ ID NO: 915330
caagcuaagugggaaauuu

SEQ ID NO: 1071727 - RNA, 19 nt, Artificial Sequence
  Description of Artificial Sequence: Synthetic oligonucleotide
  Antisense strand to SEQ ID NO: 1071726
aaauuucccacuuagcuug

SEQ ID NO: 1071728 - RNA, 19 nt, Artificial Sequence
  Description of Artificial Sequence: Synthetic oligonucleotide
  Sense strand starting at position 3345 of SEQ ID NO: 915330
gugggaaauuuggguagga

SEQ ID NO: 1071729 - RNA, 19 nt, Artificial Sequence
  Description of Artificial Sequence: Synthetic oligonucleotide
  Antisense strand to SEQ ID NO: 1071728
uccuacccaaauuucccac

SEQ ID NO: 1071730 - RNA, 19 nt, Artificial Sequence
  Description of Artificial Sequence: Synthetic oligonucleotide
  Sense strand starting at position 3514 of SEQ ID NO: 915330
uguccugguuugguaauca

SEQ ID NO: 1071731 - RNA, 19 nt, Artificial Sequence
  Description of Artificial Sequence: Synthetic oligonucleotide
  Antisense strand to SEQ ID NO: 1071730
ugauuaccaaaccaggaca

SEQ ID NO: 1071732 - RNA, 19 nt, Artificial Sequence
  Description of Artificial Sequence: Synthetic oligonucleotide
  Sense strand starting at position 3518 of SEQ ID NO: 915330
cugguuugguaaucaaucu

SEQ ID NO: 1071733 - RNA, 19 nt, Artificial Sequence
  Description of Artificial Sequence: Synthetic oligonucleotide
  Antisense strand to SEQ ID NO: 1071732
agauugauuaccaaaccag

SEQ ID NO: 1071734 - RNA, 19 nt, Artificial Sequence
  Description of Artificial Sequence: Synthetic oligonucleotide
  Sense strand starting at position 3555 of SEQ ID NO: 915330
uagggaagcuuuccaguau

SEQ ID NO: 1071735 - RNA, 19 nt, Artificial Sequence
  Description of Artificial Sequence: Synthetic oligonucleotide
  Antisense strand to SEQ ID NO: 1071734
auacuggaaagcuucccua

SEQ ID NO: 1071736 - RNA, 19 nt, Artificial Sequence
  Description of Artificial Sequence: Synthetic oligonucleotide
  Sense strand starting at position 3559 of SEQ ID NO: 915330
gaagcuuuccaguauuggu

SEQ ID NO: 1071737 - RNA, 19 nt, Artificial Sequence
  Description of Artificial Sequence: Synthetic oligonucleotide
  Antisense strand to SEQ ID NO: 1071736
accaauacuggaaagcuuc

SEQ ID NO: 1071738 - RNA, 19 nt, Artificial Sequence
  Description of Artificial Sequence: Synthetic oligonucleotide
  Sense strand starting at position 3564 of SEQ ID NO: 915330
uuuccaguauugguuuaga

SEQ ID NO: 1071739 - RNA, 19 nt, Artificial Sequence
  Description of Artificial Sequence: Synthetic oligonucleotide
  Antisense strand to SEQ ID NO: 1071738
ucuaaaccaauacuggaaa

SEQ ID NO: 1071740 - RNA, 19 nt, Artificial Sequence
  Description of Artificial Sequence: Synthetic oligonucleotide
  Sense strand starting at position 3647 of SEQ ID NO: 915330
ggagaagugguccaagcuu

SEQ ID NO: 1071741 - RNA, 19 nt, Artificial Sequence
  Description of Artificial Sequence: Synthetic oligonucleotide
  Antisense strand to SEQ ID NO: 1071740
aagcuuggaccacuucucc

SEQ ID NO: 1071742 - RNA, 19 nt, Artificial Sequence
  Description of Artificial Sequence: Synthetic oligonucleotide
  Sense strand starting at position 3675 of SEQ ID NO: 915330
gccuaauagcuugacuugu

SEQ ID NO: 1071743 - RNA, 19 nt, Artificial Sequence
  Description of Artificial Sequence: Synthetic oligonucleotide
  Antisense strand to SEQ ID NO: 1071742
acaagucaagcuauuaggc

SEQ ID NO: 1071744 - RNA, 19 nt, Artificial Sequence
  Description of Artificial Sequence: Synthetic oligonucleotide
  Sense strand starting at position 3677 of SEQ ID NO: 915330
cuaauagcuugacuuguga

SEQ ID NO: 1071745 - RNA, 19 nt, Artificial Sequence
  Description of Artificial Sequence: Synthetic oligonucleotide
  Antisense strand to SEQ ID NO: 1071744
ucacaagucaagcuauuag

SEQ ID NO: 1071746 - RNA, 19 nt, Artificial Sequence
  Description of Artificial Sequence: Synthetic oligonucleotide
  Sense strand starting at position 3685 of SEQ ID NO: 915330
uugacuugugauugugaga

SEQ ID NO: 1071747 - RNA, 19 nt, Artificial Sequence
  Description of Artificial Sequence: Synthetic oligonucleotide
  Antisense strand to SEQ ID NO: 1071746
ucucacaaucacaagucaa

SEQ ID NO: 1071748 - RNA, 19 nt, Artificial Sequence
  Description of Artificial Sequence: Synthetic oligonucleotide
  Sense strand starting at position 3720 of SEQ ID NO: 915330
uuggaaagauagucuaauu

SEQ ID NO: 1071749 - RNA, 19 nt, Artificial Sequence
  Description of Artificial Sequence: Synthetic oligonucleotide
  Antisense strand to SEQ ID NO: 1071748
aauuagacuaucuuuccaa

SEQ ID NO: 1071750 - RNA, 19 nt, Artificial Sequence
  Description of Artificial Sequence: Synthetic oligonucleotide
  Sense strand starting at position 3746 of SEQ ID NO: 915330
aggccuaccuccguaucaa

SEQ ID NO: 1071751 - RNA, 19 nt, Artificial Sequence
  Description of Artificial Sequence: Synthetic oligonucleotide
  Antisense strand to SEQ ID NO: 1071750
uugauacggagguaggccu

SEQ ID NO: 1071752 - RNA, 19 nt, Artificial Sequence
  Description of Artificial Sequence: Synthetic oligonucleotide
  Sense strand starting at position 3747 of SEQ ID NO: 915330
ggccuaccuccguaucaau

SEQ ID NO: 1071753 - RNA, 19 nt, Artificial Sequence
  Description of Artificial Sequence: Synthetic oligonucleotide
  Antisense strand to SEQ ID NO: 1071752
auugauacggagguaggcc

SEQ ID NO: 1071754 - RNA, 19 nt, Artificial Sequence
  Description of Artificial Sequence: Synthetic oligonucleotide
  Sense strand starting at position 3854 of SEQ ID NO: 915330
acuuguggaucuucuagga

SEQ ID NO: 1071755 - RNA, 19 nt, Artificial Sequence
  Description of Artificial Sequence: Synthetic oligonucleotide
  Antisense strand to SEQ ID NO: 1071754
uccuagaagauccacaagu

SEQ ID NO: 1071756 - RNA, 19 nt, Artificial Sequence
  Description of Artificial Sequence: Synthetic oligonucleotide
  Sense strand starting at position 3858 of SEQ ID NO: 915330
guggaucuucuaggacaag

SEQ ID NO: 1071757 - RNA, 19 nt, Artificial Sequence
  Description of Artificial Sequence: Synthetic oligonucleotide
  Antisense strand to SEQ ID NO: 1071756
cuuguccuagaagauccac

SEQ ID NO: 1071758 - RNA, 19 nt, Artificial Sequence
  Description of Artificial Sequence: Synthetic oligonucleotide
  Sense strand starting at position 3895 of SEQ ID NO: 915330
guuguaauaagacagaugu

SEQ ID NO: 1071759 - RNA, 19 nt, Artificial Sequence
  Description of Artificial Sequence: Synthetic oligonucleotide
  Antisense strand to SEQ ID NO: 1071758
acaucugucuuauuacaac

SEQ ID NO: 1071760 - RNA, 19 nt, Artificial Sequence
  Description of Artificial Sequence: Synthetic oligonucleotide
  Sense strand starting at position 3905 of SEQ ID NO: 915330
gacagaugugcauagcaaa

SEQ ID NO: 1071761 - RNA, 19 nt, Artificial Sequence
  Description of Artificial Sequence: Synthetic oligonucleotide
  Antisense strand to SEQ ID NO: 1071760
uuugcuaugcacaucuguc

SEQ ID NO: 1071762 - RNA, 19 nt, Artificial Sequence
  Description of Artificial Sequence: Synthetic oligonucleotide
  Sense strand starting at position 3946 of SEQ ID NO: 915330
gcuugagauuccucuagag

SEQ ID NO: 1071763 - RNA, 19 nt, Artificial Sequence
  Description of Artificial Sequence: Synthetic oligonucleotide
  Antisense strand to SEQ ID NO: 1071762
cucuagaggaaucucaagc

SEQ ID NO: 1071764 - RNA, 19 nt, Artificial Sequence
  Description of Artificial Sequence: Synthetic oligonucleotide
  Sense strand starting at position 3950 of SEQ ID NO: 915330
gagauuccucuagagccua

SEQ ID NO: 1071765 - RNA, 19 nt, Artificial Sequence
  Description of Artificial Sequence: Synthetic oligonucleotide
  Antisense strand to SEQ ID NO: 1071764
uaggcucuagaggaaucuc

SEQ ID NO: 1071766 - RNA, 19 nt, Artificial Sequence
  Description of Artificial Sequence: Synthetic oligonucleotide
  Sense strand starting at position 14 of SEQ ID NO: 915331
uagguaguguuucugacag

SEQ ID NO: 1071767 - RNA, 19 nt, Artificial Sequence
  Description of Artificial Sequence: Synthetic oligonucleotide
  Antisense strand to SEQ ID NO: 1071766
cugucagaaacacuaccua

SEQ ID NO: 1071768 - RNA, 19 nt, Artificial Sequence
  Description of Artificial Sequence: Synthetic oligonucleotide
  Sense strand starting at position 47 of SEQ ID NO: 915331
gucuguaacccugguuuaa

SEQ ID NO: 1071769 - RNA, 19 nt, Artificial Sequence
  Description of Artificial Sequence: Synthetic oligonucleotide
  Antisense strand to SEQ ID NO: 1071768
uuaaaccaggguuacagac

SEQ ID NO: 1071770 - RNA, 19 nt, Artificial Sequence
  Description of Artificial Sequence: Synthetic oligonucleotide
  Sense strand starting at position 49 of SEQ ID NO: 915331
cuguaacccugguuuaagu

SEQ ID NO: 1071771 - RNA, 19 nt, Artificial Sequence
  Description of Artificial Sequence: Synthetic oligonucleotide
  Antisense strand to SEQ ID NO: 1071770
acuuaaaccaggguuacag

SEQ ID NO: 1071772 - RNA, 19 nt, Artificial Sequence
  Description of Artificial Sequence: Synthetic oligonucleotide
  Sense strand starting at position 156 of SEQ ID NO: 915331
auucuuaucuucgucaucu

SEQ ID NO: 1071773 - RNA, 19 nt, Artificial Sequence
  Description of Artificial Sequence: Synthetic oligonucleotide
  Antisense strand to SEQ ID NO: 1071772
agaugacgaagauaagaau

SEQ ID NO: 1071774 - RNA, 19 nt, Artificial Sequence
  Description of Artificial Sequence: Synthetic oligonucleotide
  Sense strand starting at position 160 of SEQ ID NO: 915331
uuaucuucgucaucucuau

SEQ ID NO: 1071775 - RNA, 19 nt, Artificial Sequence
  Description of Artificial Sequence: Synthetic oligonucleotide
  Antisense strand to SEQ ID NO: 1071774
auagagaugacgaagauaa

SEQ ID NO: 1071776 - RNA, 19 nt, Artificial Sequence
  Description of Artificial Sequence: Synthetic oligonucleotide
  Sense strand starting at position 164 of SEQ ID NO: 915331
cuucgucaucucuauuucu

SEQ ID NO: 1071777 - RNA, 19 nt, Artificial Sequence
  Description of Artificial Sequence: Synthetic oligonucleotide
  Antisense strand to SEQ ID NO: 1071776
agaaauagagaugacgaag

SEQ ID NO: 1071778 - RNA, 19 nt, Artificial Sequence
  Description of Artificial Sequence: Synthetic oligonucleotide
  Sense strand starting at position 422 of SEQ ID NO: 915331
guucucauuucucguaucu

SEQ ID NO: 1071779 - RNA, 19 nt, Artificial Sequence
  Description of Artificial Sequence: Synthetic oligonucleotide
  Antisense strand to SEQ ID NO: 1071778
agauacgagaaaugagaac

SEQ ID NO: 1071780 - RNA, 19 nt, Artificial Sequence
  Description of Artificial Sequence: Synthetic oligonucleotide
  Sense strand starting at position 424 of SEQ ID NO: 915331
ucucauuucucguaucucu

SEQ ID NO: 1071781 - RNA, 19 nt, Artificial Sequence
  Description of Artificial Sequence: Synthetic oligonucleotide
  Antisense strand to SEQ ID NO: 1071780
agagauacgagaaaugaga

SEQ ID NO: 1071782 - RNA, 19 nt, Artificial Sequence
  Description of Artificial Sequence: Synthetic oligonucleotide
  Sense strand starting at position 822 of SEQ ID NO: 915331
gcagucuucccaggaggga

SEQ ID NO: 1071783 - RNA, 19 nt, Artificial Sequence
  Description of Artificial Sequence: Synthetic oligonucleotide
  Antisense strand to SEQ ID NO: 1071782
ucccuccugggaagacugc

SEQ ID NO: 1071784 - RNA, 19 nt, Artificial Sequence
  Description of Artificial Sequence: Synthetic oligonucleotide
  Sense strand starting at position 871 of SEQ ID NO: 915331
acucuaaucagagggcuga

SEQ ID NO: 1071785 - RNA, 19 nt, Artificial Sequence
  Description of Artificial Sequence: Synthetic oligonucleotide
  Antisense strand to SEQ ID NO: 1071784
ucagcccucugauuagagu

SEQ ID NO: 1071786 - RNA, 19 nt, Artificial Sequence
  Description of Artificial Sequence: Synthetic oligonucleotide
  Sense strand starting at position 896 of SEQ ID NO: 915331
ugagaagcucagugagguu

SEQ ID NO: 1071787 - RNA, 19 nt, Artificial Sequence
  Description of Artificial Sequence: Synthetic oligonucleotide
  Antisense strand to SEQ ID NO: 1071786
aaccucacugagcuucuca

SEQ ID NO: 1071788 - RNA, 19 nt, Artificial Sequence
  Description of Artificial Sequence: Synthetic oligonucleotide
  Sense strand starting at position 961 of SEQ ID NO: 915331
gcugcuuccggguucuaca

SEQ ID NO: 1071789 - RNA, 19 nt, Artificial Sequence
  Description of Artificial Sequence: Synthetic oligonucleotide
  Antisense strand to SEQ ID NO: 1071788
uguagaacccggaagcagc

SEQ ID NO: 1071790 - RNA, 19 nt, Artificial Sequence
  Description of Artificial Sequence: Synthetic oligonucleotide
  Sense strand starting at position 980 of SEQ ID NO: 915331
gaacucuagcugggagagu

SEQ ID NO: 1071791 - RNA, 19 nt, Artificial Sequence
  Description of Artificial Sequence: Synthetic oligonucleotide
  Antisense strand to SEQ ID NO: 1071790
acucucccagcuagaguuc

SEQ ID NO: 1071792 - RNA, 19 nt, Artificial Sequence
  Description of Artificial Sequence: Synthetic oligonucleotide
  Sense strand starting at position 1010 of SEQ ID NO: 915331
gggaaauacaaguggcuua

SEQ ID NO: 1071793 - RNA, 19 nt, Artificial Sequence
  Description of Artificial Sequence: Synthetic oligonucleotide
  Antisense strand to SEQ ID NO: 1071792
uaagccacuuguauuuccc

SEQ ID NO: 1071794 - RNA, 19 nt, Artificial Sequence
  Description of Artificial Sequence: Synthetic oligonucleotide
  Sense strand starting at position 1011 of SEQ ID NO: 915331
ggaaauacaaguggcuuaa

SEQ ID NO: 1071795 - RNA, 19 nt, Artificial Sequence
  Description of Artificial Sequence: Synthetic oligonucleotide
  Antisense strand to SEQ ID NO: 1071794
uuaagccacuuguauuucc

SEQ ID NO: 1071796 - RNA, 19 nt, Artificial Sequence
  Description of Artificial Sequence: Synthetic oligonucleotide
  Sense strand starting at position 1286 of SEQ ID NO: 915331
gcgcuuguagagguuuagu

SEQ ID NO: 1071797 - RNA, 19 nt, Artificial Sequence
  Description of Artificial Sequence: Synthetic oligonucleotide
  Antisense strand to SEQ ID NO: 1071796
acuaaaccucuacaagcgc

SEQ ID NO: 1071798 - RNA, 19 nt, Artificial Sequence
  Description of Artificial Sequence: Synthetic oligonucleotide
  Sense strand starting at position 1295 of SEQ ID NO: 915331
gagguuuaguggucagucu

SEQ ID NO: 1071799 - RNA, 19 nt, Artificial Sequence
  Description of Artificial Sequence: Synthetic oligonucleotide
  Antisense strand to SEQ ID NO: 1071798
agacugaccacuaaaccuc

SEQ ID NO: 1071800 - RNA, 19 nt, Artificial Sequence
  Description of Artificial Sequence: Synthetic oligonucleotide
  Sense strand starting at position 1296 of SEQ ID NO: 915331
agguuuaguggucagucuu

SEQ ID NO: 1071801 - RNA, 19 nt, Artificial Sequence
  Description of Artificial Sequence: Synthetic oligonucleotide
  Antisense strand to SEQ ID NO: 1071800
aagacugaccacuaaaccu

SEQ ID NO: 1071802 - RNA, 19 nt, Artificial Sequence
  Description of Artificial Sequence: Synthetic oligonucleotide
  Sense strand starting at position 1441 of SEQ ID NO: 915331
ggcucauuccugcggagga

SEQ ID NO: 1071803 - RNA, 19 nt, Artificial Sequence
  Description of Artificial Sequence: Synthetic oligonucleotide
  Antisense strand to SEQ ID NO: 1071802
uccuccgcaggaaugagcc

SEQ ID NO: 1071804 - RNA, 19 nt, Artificial Sequence
  Description of Artificial Sequence: Synthetic oligonucleotide
  Sense strand starting at position 1443 of SEQ ID NO: 915331
cucauuccugcggaggaga

SEQ ID NO: 1071805 - RNA, 19 nt, Artificial Sequence
  Description of Artificial Sequence: Synthetic oligonucleotide
  Antisense strand to SEQ ID NO: 1071804
ucuccuccgcaggaaugag

SEQ ID NO: 1071806 - RNA, 19 nt, Artificial Sequence
  Description of Artificial Sequence: Synthetic oligonucleotide
  Sense strand starting at position 1454 of SEQ ID NO: 915331
ggaggagaaccucguauuc

SEQ ID NO: 1071807 - RNA, 19 nt, Artificial Sequence
  Description of Artificial Sequence: Synthetic oligonucleotide
  Antisense strand to SEQ ID NO: 1071806
gaauacgagguucuccucc

SEQ ID NO: 1071808 - RNA, 19 nt, Artificial Sequence
  Description of Artificial Sequence: Synthetic oligonucleotide
  Sense strand starting at position 1456 of SEQ ID NO: 915331
aggagaaccucguauucug

SEQ ID NO: 1071809 - RNA, 19 nt, Artificial Sequence
  Description of Artificial Sequence: Synthetic oligonucleotide
  Antisense strand to SEQ ID NO: 1071808
cagaauacgagguucuccu

SEQ ID NO: 1071810 - RNA, 19 nt, Artificial Sequence
  Description of Artificial Sequence: Synthetic oligonucleotide
  Sense strand starting at position 1563 of SEQ ID NO: 915331
agggauucugcaggaauug

SEQ ID NO: 1071811 - RNA, 19 nt, Artificial Sequence
  Description of Artificial Sequence: Synthetic oligonucleotide
  Antisense strand to SEQ ID NO: 1071810
caauuccugcagaaucccu

SEQ ID NO: 1071812 - RNA, 19 nt, Artificial Sequence
  Description of Artificial Sequence: Synthetic oligonucleotide
  Sense strand starting at position 1793 of SEQ ID NO: 915331
gcacgagucguacgaauug

SEQ ID NO: 1071813 - RNA, 19 nt, Artificial Sequence
  Description of Artificial Sequence: Synthetic oligonucleotide
  Antisense strand to SEQ ID NO: 1071812
caauucguacgacucgugc

SEQ ID NO: 1071814 - RNA, 19 nt, Artificial Sequence
  Description of Artificial Sequence: Synthetic oligonucleotide
  Sense strand starting at position 1798 of SEQ ID NO: 915331
agucguacgaauugaggua

SEQ ID NO: 1071815 - RNA, 19 nt, Artificial Sequence
  Description of Artificial Sequence: Synthetic oligonucleotide
  Antisense strand to SEQ ID NO: 1071814
uaccucaauucguacgacu

SEQ ID NO: 1071816 - RNA, 19 nt, Artificial Sequence
  Description of Artificial Sequence: Synthetic oligonucleotide
  Sense strand starting at position 1803 of SEQ ID NO: 915331
uacgaauugagguaggagu

SEQ ID NO: 1071817 - RNA, 19 nt, Artificial Sequence
  Description of Artificial Sequence: Synthetic oligonucleotide
  Antisense strand to SEQ ID NO: 1071816
acuccuaccucaauucgua

SEQ ID NO: 1071818 - RNA, 19 nt, Artificial Sequence
  Description of Artificial Sequence: Synthetic oligonucleotide
  Sense strand starting at position 2328 of SEQ ID NO: 915331
ggcgcucgugugaagaagu

SEQ ID NO: 1071819 - RNA, 19 nt, Artificial Sequence
  Description of Artificial Sequence: Synthetic oligonucleotide
  Antisense strand to SEQ ID NO: 1071818
acuucuucacacgagcgcc

SEQ ID NO: 1071820 - RNA, 19 nt, Artificial Sequence
  Description of Artificial Sequence: Synthetic oligonucleotide
  Sense strand starting at position 2357 of SEQ ID NO: 915331
cgcucugauaaccgaguua

SEQ ID NO: 1071821 - RNA, 19 nt, Artificial Sequence
  Description of Artificial Sequence: Synthetic oligonucleotide
  Antisense strand to SEQ ID NO: 1071820
uaacucgguuaucagagcg

SEQ ID NO: 1071822 - RNA, 19 nt, Artificial Sequence
  Description of Artificial Sequence: Synthetic oligonucleotide
  Sense strand starting at position 3197 of SEQ ID NO: 915331
ggaugcgauggaugucaga

SEQ ID NO: 1071823 - RNA, 19 nt, Artificial Sequence
  Description of Artificial Sequence: Synthetic oligonucleotide
  Antisense strand to SEQ ID NO: 1071822
ucugacauccaucgcaucc

SEQ ID NO: 1071824 - RNA, 19 nt, Artificial Sequence
  Description of Artificial Sequence: Synthetic oligonucleotide
  Sense strand starting at position 3229 of SEQ ID NO: 915331
ccgugaccucuuuauuguu

SEQ ID NO: 1071825 - RNA, 19 nt, Artificial Sequence
  Description of Artificial Sequence: Synthetic oligonucleotide
  Antisense strand to SEQ ID NO: 1071824
aacaauaaagaggucacgg

SEQ ID NO: 1071826 - RNA, 19 nt, Artificial Sequence
  Description of Artificial Sequence: Synthetic oligonucleotide
  Sense strand starting at position 3514 of SEQ ID NO: 915331
guccuagacccauggagaa

SEQ ID NO: 1071827 - RNA, 19 nt, Artificial Sequence
  Description of Artificial Sequence: Synthetic oligonucleotide
  Antisense strand to SEQ ID NO: 1071826
uucuccaugggucuaggac

SEQ ID NO: 1071828 - RNA, 19 nt, Artificial Sequence
  Description of Artificial Sequence: Synthetic oligonucleotide
  Sense strand starting at position 3536 of SEQ ID NO: 915331
gcgggaagggcgugucuuu

SEQ ID NO: 1071829 - RNA, 19 nt, Artificial Sequence
  Description of Artificial Sequence: Synthetic oligonucleotide
  Antisense strand to SEQ ID NO: 1071828
aaagacacgcccuucccgc

SEQ ID NO: 1071830 - RNA, 19 nt, Artificial Sequence
  Description of Artificial Sequence: Synthetic oligonucleotide
  Sense strand starting at position 3543 of SEQ ID NO: 915331
gggcgugucuuuguuucca

SEQ ID NO: 1071831 - RNA, 19 nt, Artificial Sequence
  Description of Artificial Sequence: Synthetic oligonucleotide
  Antisense strand to SEQ ID NO: 1071830
uggaaacaaagacacgccc

SEQ ID NO: 1071832 - RNA, 19 nt, Artificial Sequence
  Description of Artificial Sequence: Synthetic oligonucleotide
  Sense strand starting at position 3606 of SEQ ID NO: 915331
ccaaguuugucaggacaga

SEQ ID NO: 1071833 - RNA, 19 nt, Artificial Sequence
  Description of Artificial Sequence: Synthetic oligonucleotide
  Antisense strand to SEQ ID NO: 1071832
ucuguccugacaaacuugg

SEQ ID NO: 1071834 - RNA, 19 nt, Artificial Sequence
  Description of Artificial Sequence: Synthetic oligonucleotide
  Sense strand starting at position 3732 of SEQ ID NO: 915331
cuuugagguuucucaaauu

SEQ ID NO: 1071835 - RNA, 19 nt, Artificial Sequence
  Description of Artificial Sequence: Synthetic oligonucleotide
  Antisense strand to SEQ ID NO: 1071834
aauuugagaaaccucaaag

SEQ ID NO: 1071836 - RNA, 19 nt, Artificial Sequence
  Description of Artificial Sequence: Synthetic oligonucleotide
  Sense strand starting at position 3748 of SEQ ID NO: 915331
auuaccucuugucaaaugu

SEQ ID NO: 1071837 - RNA, 19 nt, Artificial Sequence
  Description of Artificial Sequence: Synthetic oligonucleotide
  Antisense strand to SEQ ID NO: 1071836
acauuugacaagagguaau

SEQ ID NO: 1071838 - RNA, 19 nt, Artificial Sequence
  Description of Artificial Sequence: Synthetic oligonucleotide
  Sense strand starting at position 3821 of SEQ ID NO: 915331
gcuauaguucugugguagu

SEQ ID NO: 1071839 - RNA, 19 nt, Artificial Sequence
  Description of Artificial Sequence: Synthetic oligonucleotide
  Antisense strand to SEQ ID NO: 1071838
acuaccacagaacuauagc

SEQ ID NO: 1071840 - RNA, 19 nt, Artificial Sequence
  Description of Artificial Sequence: Synthetic oligonucleotide
  Sense strand starting at position 3824 of SEQ ID NO: 915331
auaguucugugguaguaaa

SEQ ID NO: 1071841 - RNA, 19 nt, Artificial Sequence
  Description of Artificial Sequence: Synthetic oligonucleotide
  Antisense strand to SEQ ID NO: 1071840
uuuacuaccacagaacuau

SEQ ID NO: 1071842 - RNA, 19 nt, Artificial Sequence
  Description of Artificial Sequence: Synthetic oligonucleotide
  Sense strand starting at position 3963 of SEQ ID NO: 915331
cucuuucugucccuaugau

SEQ ID NO: 1071843 - RNA, 19 nt, Artificial Sequence
  Description of Artificial Sequence: Synthetic oligonucleotide
  Antisense strand to SEQ ID NO: 1071842
aucauagggacagaaagag

SEQ ID NO: 1071844 - RNA, 19 nt, Artificial Sequence
  Description of Artificial Sequence: Synthetic oligonucleotide
  Sense strand starting at position 3964 of SEQ ID NO: 915331
ucuuucugucccuaugauu

SEQ ID NO: 1071845 - RNA, 19 nt, Artificial Sequence
  Description of Artificial Sequence: Synthetic oligonucleotide
  Antisense strand to SEQ ID NO: 1071844
aaucauagggacagaaaga

SEQ ID NO: 1071846 - RNA, 19 nt, Artificial Sequence
  Description of Artificial Sequence: Synthetic oligonucleotide
  Sense strand starting at position 113 of SEQ ID NO: 915332
gaacguucagguuacguga

SEQ ID NO: 1071847 - RNA, 19 nt, Artificial Sequence
  Description of Artificial Sequence: Synthetic oligonucleotide
  Antisense strand to SEQ ID NO: 1071846
ucacguaaccugaacguuc

SEQ ID NO: 1071848 - RNA, 19 nt, Artificial Sequence
  Description of Artificial Sequence: Synthetic oligonucleotide
  Sense strand starting at position 280 of SEQ ID NO: 915332
uuaggaugcuggguuaaug

SEQ ID NO: 1071849 - RNA, 19 nt, Artificial Sequence
  Description of Artificial Sequence: Synthetic oligonucleotide
  Antisense strand to SEQ ID NO: 1071848
cauuaacccagcauccuaa

SEQ ID NO: 1071850 - RNA, 19 nt, Artificial Sequence
  Description of Artificial Sequence: Synthetic oligonucleotide
  Sense strand starting at position 401 of SEQ ID NO: 915332
ggaagccauuucugcagaa

SEQ ID NO: 1071851 - RNA, 19 nt, Artificial Sequence
  Description of Artificial Sequence: Synthetic oligonucleotide
  Antisense strand to SEQ ID NO: 1071850
uucugcagaaauggcuucc

SEQ ID NO: 1071852 - RNA, 19 nt, Artificial Sequence
  Description of Artificial Sequence: Synthetic oligonucleotide
  Sense strand starting at position 602 of SEQ ID NO: 915332
cccaacuguuacuaaggaa

SEQ ID NO: 1071853 - RNA, 19 nt, Artificial Sequence
  Description of Artificial Sequence: Synthetic oligonucleotide
  Antisense strand to SEQ ID NO: 1071852
uuccuuaguaacaguuggg

SEQ ID NO: 1071854 - RNA, 19 nt, Artificial Sequence
  Description of Artificial Sequence: Synthetic oligonucleotide
  Sense strand starting at position 767 of SEQ ID NO: 915332
ugcuguaucagcuaggaga

SEQ ID NO: 1071855 - RNA, 19 nt, Artificial Sequence
  Description of Artificial Sequence: Synthetic oligonucleotide
  Antisense strand to SEQ ID NO: 1071854
ucuccuagcugauacagca

SEQ ID NO: 1071856 - RNA, 19 nt, Artificial Sequence
  Description of Artificial Sequence: Synthetic oligonucleotide
  Sense strand starting at position 770 of SEQ ID NO: 915332
uguaucagcuaggagaacu

SEQ ID NO: 1071857 - RNA, 19 nt, Artificial Sequence
  Description of Artificial Sequence: Synthetic oligonucleotide
  Antisense strand to SEQ ID NO: 1071856
aguucuccuagcugauaca

SEQ ID NO: 1071858 - RNA, 19 nt, Artificial Sequence
  Description of Artificial Sequence: Synthetic oligonucleotide
  Sense strand starting at position 882 of SEQ ID NO: 915332
ccaggcuugucauggccau

SEQ ID NO: 1071859 - RNA, 19 nt, Artificial Sequence
  Description of Artificial Sequence: Synthetic oligonucleotide
  Antisense strand to SEQ ID NO: 1071858
auggccaugacaagccugg

SEQ ID NO: 1071860 - RNA, 19 nt, Artificial Sequence
  Description of Artificial Sequence: Synthetic oligonucleotide
  Sense strand starting at position 1076 of SEQ ID NO: 915332
cuguucugcuguugucgaa

SEQ ID NO: 1071861 - RNA, 19 nt, Artificial Sequence
  Description of Artificial Sequence: Synthetic oligonucleotide
  Antisense strand to SEQ ID NO: 1071860
uucgacaacagcagaacag

SEQ ID NO: 1071862 - RNA, 19 nt, Artificial Sequence
  Description of Artificial Sequence: Synthetic oligonucleotide
  Sense strand starting at position 1077 of SEQ ID NO: 915332
uguucugcuguugucgaaa

SEQ ID NO: 1071863 - RNA, 19 nt, Artificial Sequence
  Description of Artificial Sequence: Synthetic oligonucleotide
  Antisense strand to SEQ ID NO: 1071862
uuucgacaacagcagaaca

SEQ ID NO: 1071864 - RNA, 19 nt, Artificial Sequence
  Description of Artificial Sequence: Synthetic oligonucleotide
  Sense strand starting at position 1079 of SEQ ID NO: 915332
uucugcuguugucgaaaca

SEQ ID NO: 1071865 - RNA, 19 nt, Artificial Sequence
  Description of Artificial Sequence: Synthetic oligonucleotide
  Antisense strand to SEQ ID NO: 1071864
uguuucgacaacagcagaa

SEQ ID NO: 1071866 - RNA, 19 nt, Artificial Sequence
  Description of Artificial Sequence: Synthetic oligonucleotide
  Sense strand starting at position 1080 of SEQ ID NO: 915332
ucugcuguugucgaaacaa

SEQ ID NO: 1071867 - RNA, 19 nt, Artificial Sequence
  Description of Artificial Sequence: Synthetic oligonucleotide
  Antisense strand to SEQ ID NO: 1071866
uuguuucgacaacagcaga

SEQ ID NO: 1071868 - RNA, 19 nt, Artificial Sequence
  Description of Artificial Sequence: Synthetic oligonucleotide
  Sense strand starting at position 1104 of SEQ ID NO: 915332
gcacauaaacuccgaagaa

SEQ ID NO: 1071869 - RNA, 19 nt, Artificial Sequence
  Description of Artificial Sequence: Synthetic oligonucleotide
  Antisense strand to SEQ ID NO: 1071868
uucuucggaguuuaugugc

SEQ ID NO: 1071870 - RNA, 19 nt, Artificial Sequence
  Description of Artificial Sequence: Synthetic oligonucleotide
  Sense strand starting at position 1190 of SEQ ID NO: 915332
ggcgcuggccaguuacuua

SEQ ID NO: 1071871 - RNA, 19 nt, Artificial Sequence
  Description of Artificial Sequence: Synthetic oligonucleotide
  Antisense strand to SEQ ID NO: 1071870
uaaguaacuggccagcgcc

SEQ ID NO: 1071872 - RNA, 19 nt, Artificial Sequence
  Description of Artificial Sequence: Synthetic oligonucleotide
  Sense strand starting at position 1270 of SEQ ID NO: 915332
ucuugugaggacugcaaga

SEQ ID NO: 1071873 - RNA, 19 nt, Artificial Sequence
  Description of Artificial Sequence: Synthetic oligonucleotide
  Antisense strand to SEQ ID NO: 1071872
ucuugcaguccucacaaga

SEQ ID NO: 1071874 - RNA, 19 nt, Artificial Sequence
  Description of Artificial Sequence: Synthetic oligonucleotide
  Sense strand starting at position 1272 of SEQ ID NO: 915332
uugugaggacugcaagagu

SEQ ID NO: 1071875 - RNA, 19 nt, Artificial Sequence
  Description of Artificial Sequence: Synthetic oligonucleotide
  Antisense strand to SEQ ID NO: 1071874
acucuugcaguccucacaa

SEQ ID NO: 1071876 - RNA, 19 nt, Artificial Sequence
  Description of Artificial Sequence: Synthetic oligonucleotide
  Sense strand starting at position 2157 of SEQ ID NO: 915332
agaccaauauccuggaaga

SEQ ID NO: 1071877 - RNA, 19 nt, Artificial Sequence
  Description of Artificial Sequence: Synthetic oligonucleotide
  Antisense strand to SEQ ID NO: 1071876
ucuuccaggauauuggucu

SEQ ID NO: 1071878 - RNA, 19 nt, Artificial Sequence
  Description of Artificial Sequence: Synthetic oligonucleotide
  Sense strand starting at position 2172 of SEQ ID NO: 915332
aagagcucguacuguuuaa

SEQ ID NO: 1071879 - RNA, 19 nt, Artificial Sequence
  Description of Artificial Sequence: Synthetic oligonucleotide
  Antisense strand to SEQ ID NO: 1071878
uuaaacaguacgagcucuu

SEQ ID NO: 1071880 - RNA, 19 nt, Artificial Sequence
  Description of Artificial Sequence: Synthetic oligonucleotide
  Sense strand starting at position 2183 of SEQ ID NO: 915332
cuguuuaacccgcgaccau

SEQ ID NO: 1071881 - RNA, 19 nt, Artificial Sequence
  Description of Artificial Sequence: Synthetic oligonucleotide
  Antisense strand to SEQ ID NO: 1071880
auggucgcggguuaaacag

SEQ ID NO: 1071882 - RNA, 19 nt, Artificial Sequence
  Description of Artificial Sequence: Synthetic oligonucleotide
  Sense strand starting at position 2633 of SEQ ID NO: 915332
ccgcgcuccucugaacaaa

SEQ ID NO: 1071883 - RNA, 19 nt, Artificial Sequence
  Description of Artificial Sequence: Synthetic oligonucleotide
  Antisense strand to SEQ ID NO: 1071882
uuuguucagaggagcgcgg

SEQ ID NO: 1071884 - RNA, 19 nt, Artificial Sequence
  Description of Artificial Sequence: Synthetic oligonucleotide
  Sense strand starting at position 3188 of SEQ ID NO: 915332
uugugcacugcccaagaau

SEQ ID NO: 1071885 - RNA, 19 nt, Artificial Sequence
  Description of Artificial Sequence: Synthetic oligonucleotide
  Antisense strand to SEQ ID NO: 1071884
auucuugggcagugcacaa

SEQ ID NO: 1071886 - RNA, 19 nt, Artificial Sequence
  Description of Artificial Sequence: Synthetic oligonucleotide
  Sense strand starting at position 3197 of SEQ ID NO: 915332
gcccaagaaugcucacuga

SEQ ID NO: 1071887 - RNA, 19 nt, Artificial Sequence
  Description of Artificial Sequence: Synthetic oligonucleotide
  Antisense strand to SEQ ID NO: 1071886
ucagugagcauucuugggc

SEQ ID NO: 1071888 - RNA, 19 nt, Artificial Sequence
  Description of Artificial Sequence: Synthetic oligonucleotide
  Sense strand starting at position 3200 of SEQ ID NO: 915332
caagaaugcucacugagga

SEQ ID NO: 1071889 - RNA, 19 nt, Artificial Sequence
  Description of Artificial Sequence: Synthetic oligonucleotide
  Antisense strand to SEQ ID NO: 1071888
uccucagugagcauucuug

SEQ ID NO: 1071890 - RNA, 19 nt, Artificial Sequence
  Description of Artificial Sequence: Synthetic oligonucleotide
  Sense strand starting at position 3217 of SEQ ID NO: 915332
gagcguguucacgucucau

SEQ ID NO: 1071891 - RNA, 19 nt, Artificial Sequence
  Description of Artificial Sequence: Synthetic oligonucleotide
  Antisense strand to SEQ ID NO: 1071890
augagacgugaacacgcuc

SEQ ID NO: 1071892 - RNA, 19 nt, Artificial Sequence
  Description of Artificial Sequence: Synthetic oligonucleotide
  Sense strand starting at position 3235 of SEQ ID NO: 915332
ucgugggugucuguguuua

SEQ ID NO: 1071893 - RNA, 19 nt, Artificial Sequence
  Description of Artificial Sequence: Synthetic oligonucleotide
  Antisense strand to SEQ ID NO: 1071892
uaaacacagacacccacga

SEQ ID NO: 1071894 - RNA, 19 nt, Artificial Sequence
  Description of Artificial Sequence: Synthetic oligonucleotide
  Sense strand starting at position 3236 of SEQ ID NO: 915332
cgugggugucuguguuuau

SEQ ID NO: 1071895 - RNA, 19 nt, Artificial Sequence
  Description of Artificial Sequence: Synthetic oligonucleotide
  Antisense strand to SEQ ID NO: 1071894
auaaacacagacacccacg

SEQ ID NO: 1071896 - RNA, 19 nt, Artificial Sequence
  Description of Artificial Sequence: Synthetic oligonucleotide
  Sense strand starting at position 3237 of SEQ ID NO: 915332
gugggugucuguguuuauu

SEQ ID NO: 1071897 - RNA, 19 nt, Artificial Sequence
  Description of Artificial Sequence: Synthetic oligonucleotide
  Antisense strand to SEQ ID NO: 1071896
aauaaacacagacacccac

SEQ ID NO: 1071898 - RNA, 19 nt, Artificial Sequence
  Description of Artificial Sequence: Synthetic oligonucleotide
  Sense strand starting at position 3239 of SEQ ID NO: 915332
gggugucuguguuuauuau

SEQ ID NO: 1071899 - RNA, 19 nt, Artificial Sequence
  Description of Artificial Sequence: Synthetic oligonucleotide
  Antisense strand to SEQ ID NO: 1071898
auaauaaacacagacaccc

SEQ ID NO: 1071900 - RNA, 19 nt, Artificial Sequence
  Description of Artificial Sequence: Synthetic oligonucleotide
  Sense strand starting at position 3240 of SEQ ID NO: 915332
ggugucuguguuuauuaug

SEQ ID NO: 1071901 - RNA, 19 nt, Artificial Sequence
  Description of Artificial Sequence: Synthetic oligonucleotide
  Antisense strand to SEQ ID NO: 1071900
cauaauaaacacagacacc

SEQ ID NO: 1071902 - RNA, 19 nt, Artificial Sequence
  Description of Artificial Sequence: Synthetic oligonucleotide
  Sense strand starting at position 3243 of SEQ ID NO: 915332
gucuguguuuauuaugaca

SEQ ID NO: 1071903 - RNA, 19 nt, Artificial Sequence
  Description of Artificial Sequence: Synthetic oligonucleotide
  Antisense strand to SEQ ID NO: 1071902
ugucauaauaaacacagac

SEQ ID NO: 1071904 - RNA, 19 nt, Artificial Sequence
  Description of Artificial Sequence: Synthetic oligonucleotide
  Sense strand starting at position 3245 of SEQ ID NO: 915332
cuguguuuauuaugacaac

SEQ ID NO: 1071905 - RNA, 19 nt, Artificial Sequence
  Description of Artificial Sequence: Synthetic oligonucleotide
  Antisense strand to SEQ ID NO: 1071904
guugucauaauaaacacag

SEQ ID NO: 1071906 - RNA, 19 nt, Artificial Sequence
  Description of Artificial Sequence: Synthetic oligonucleotide
  Sense strand starting at position 3246 of SEQ ID NO: 915332
uguguuuauuaugacaacu

SEQ ID NO: 1071907 - RNA, 19 nt, Artificial Sequence
  Description of Artificial Sequence: Synthetic oligonucleotide
  Antisense strand to SEQ ID NO: 1071906
aguugucauaauaaacaca

SEQ ID NO: 1071908 - RNA, 19 nt, Artificial Sequence
  Description of Artificial Sequence: Synthetic oligonucleotide
  Sense strand starting at position 3394 of SEQ ID NO: 915332
gggaaugggacgugucaga

SEQ ID NO: 1071909 - RNA, 19 nt, Artificial Sequence
  Description of Artificial Sequence: Synthetic oligonucleotide
  Antisense strand to SEQ ID NO: 1071908
ucugacacgucccauuccc

SEQ ID NO: 1071910 - RNA, 19 nt, Artificial Sequence
  Description of Artificial Sequence: Synthetic oligonucleotide
  Sense strand starting at position 3401 of SEQ ID NO: 915332
ggacgugucagaggagaug

SEQ ID NO: 1071911 - RNA, 19 nt, Artificial Sequence
  Description of Artificial Sequence: Synthetic oligonucleotide
  Antisense strand to SEQ ID NO: 1071910
caucuccucugacacgucc

SEQ ID NO: 1071912 - RNA, 19 nt, Artificial Sequence
  Description of Artificial Sequence: Synthetic oligonucleotide
  Sense strand starting at position 3446 of SEQ ID NO: 915332
agagaacuaugugggaauc

SEQ ID NO: 1071913 - RNA, 19 nt, Artificial Sequence
  Description of Artificial Sequence: Synthetic oligonucleotide
  Antisense strand to SEQ ID NO: 1071912
gauucccacauaguucucu

SEQ ID NO: 1071914 - RNA, 19 nt, Artificial Sequence
  Description of Artificial Sequence: Synthetic oligonucleotide
  Sense strand starting at position 3513 of SEQ ID NO: 915332
cuugaagagguuuggaauc

SEQ ID NO: 1071915 - RNA, 19 nt, Artificial Sequence
  Description of Artificial Sequence: Synthetic oligonucleotide
  Antisense strand to SEQ ID NO: 1071914
gauuccaaaccucuucaag

SEQ ID NO: 1071916 - RNA, 19 nt, Artificial Sequence
  Description of Artificial Sequence: Synthetic oligonucleotide
  Sense strand starting at position 3709 of SEQ ID NO: 915332
gcuggaguuuggagaguga

SEQ ID NO: 1071917 - RNA, 19 nt, Artificial Sequence
  Description of Artificial Sequence: Synthetic oligonucleotide
  Antisense strand to SEQ ID NO: 1071916
ucacucuccaaacuccagc

SEQ ID NO: 1071918 - RNA, 19 nt, Artificial Sequence
  Description of Artificial Sequence: Synthetic oligonucleotide
  Sense strand starting at position 3768 of SEQ ID NO: 915332
caggucaauuugcugcaaa

SEQ ID NO: 1071919 - RNA, 19 nt, Artificial Sequence
  Description of Artificial Sequence: Synthetic oligonucleotide
  Antisense strand to SEQ ID NO: 1071918
uuugcagcaaauugaccug

SEQ ID NO: 1071920 - RNA, 19 nt, Artificial Sequence
  Description of Artificial Sequence: Synthetic oligonucleotide
  Sense strand starting at position 3769 of SEQ ID NO: 915332
aggucaauuugcugcaaag

SEQ ID NO: 1071921 - RNA, 19 nt, Artificial Sequence
  Description of Artificial Sequence: Synthetic oligonucleotide
  Antisense strand to SEQ ID NO: 1071920
cuuugcagcaaauugaccu

SEQ ID NO: 1071922 - RNA, 19 nt, Artificial Sequence
  Description of Artificial Sequence: Synthetic oligonucleotide
  Sense strand starting at position 3898 of SEQ ID NO: 915332
cagagauuguaauaaagac

SEQ ID NO: 1071923 - RNA, 19 nt, Artificial Sequence
  Description of Artificial Sequence: Synthetic oligonucleotide
  Antisense strand to SEQ ID NO: 1071922
gucuuuauuacaaucucug

SEQ ID NO: 1071924 - RNA, 19 nt, Artificial Sequence
  Description of Artificial Sequence: Synthetic oligonucleotide
  Sense strand starting at position 63 of SEQ ID NO: 915333
aucuacauuucguacauuu

SEQ ID NO: 1071925 - RNA, 19 nt, Artificial Sequence
  Description of Artificial Sequence: Synthetic oligonucleotide
  Antisense strand to SEQ ID NO: 1071924
aaauguacgaaauguagau

SEQ ID NO: 1071926 - RNA, 19 nt, Artificial Sequence
  Description of Artificial Sequence: Synthetic oligonucleotide
  Sense strand starting at position 133 of SEQ ID NO: 915333
gcuuccagacagugaauua

SEQ ID NO: 1071927 - RNA, 19 nt, Artificial Sequence
  Description of Artificial Sequence: Synthetic oligonucleotide
  Antisense strand to SEQ ID NO: 1071926
uaauucacugucuggaagc

SEQ ID NO: 1071928 - RNA, 19 nt, Artificial Sequence
  Description of Artificial Sequence: Synthetic oligonucleotide
  Sense strand starting at position 249 of SEQ ID NO: 915333
aagggaacuuacuuaucgu

SEQ ID NO: 1071929 - RNA, 19 nt, Artificial Sequence
  Description of Artificial Sequence: Synthetic oligonucleotide
  Antisense strand to SEQ ID NO: 1071928
acgauaaguaaguucccuu

SEQ ID NO: 1071930 - RNA, 19 nt, Artificial Sequence
  Description of Artificial Sequence: Synthetic oligonucleotide
  Sense strand starting at position 252 of SEQ ID NO: 915333
ggaacuuacuuaucgugac

SEQ ID NO: 1071931 - RNA, 19 nt, Artificial Sequence
  Description of Artificial Sequence: Synthetic oligonucleotide
  Antisense strand to SEQ ID NO: 1071930
gucacgauaaguaaguucc

SEQ ID NO: 1071932 - RNA, 19 nt, Artificial Sequence
  Description of Artificial Sequence: Synthetic oligonucleotide
  Sense strand starting at position 256 of SEQ ID NO: 915333
cuuacuuaucgugacuauu

SEQ ID NO: 1071933 - RNA, 19 nt, Artificial Sequence
  Description of Artificial Sequence: Synthetic oligonucleotide
  Antisense strand to SEQ ID NO: 1071932
aauagucacgauaaguaag

SEQ ID NO: 1071934 - RNA, 19 nt, Artificial Sequence
  Description of Artificial Sequence: Synthetic oligonucleotide
  Sense strand starting at position 265 of SEQ ID NO: 915333
cgugacuauugcccuauuu

SEQ ID NO: 1071935 - RNA, 19 nt, Artificial Sequence
  Description of Artificial Sequence: Synthetic oligonucleotide
  Antisense strand to SEQ ID NO: 1071934
aaauagggcaauagucacg

SEQ ID NO: 1071936 - RNA, 19 nt, Artificial Sequence
  Description of Artificial Sequence: Synthetic oligonucleotide
  Sense strand starting at position 309 of SEQ ID NO: 915333
cuccauuggcuugagugau

SEQ ID NO: 1071937 - RNA, 19 nt, Artificial Sequence
  Description of Artificial Sequence: Synthetic oligonucleotide
  Antisense strand to SEQ ID NO: 1071936
aucacucaagccaauggag

SEQ ID NO: 1071938 - RNA, 19 nt, Artificial Sequence
  Description of Artificial Sequence: Synthetic oligonucleotide
  Sense strand starting at position 313 of SEQ ID NO: 915333
auuggcuugagugauccaa

SEQ ID NO: 1071939 - RNA, 19 nt, Artificial Sequence
  Description of Artificial Sequence: Synthetic oligonucleotide
  Antisense strand to SEQ ID NO: 1071938
uuggaucacucaagccaau

SEQ ID NO: 1071940 - RNA, 19 nt, Artificial Sequence
  Description of Artificial Sequence: Synthetic oligonucleotide
  Sense strand starting at position 317 of SEQ ID NO: 915333
gcuugagugauccaaugag

SEQ ID NO: 1071941 - RNA, 19 nt, Artificial Sequence
  Description of Artificial Sequence: Synthetic oligonucleotide
  Antisense strand to SEQ ID NO: 1071940
cucauuggaucacucaagc

SEQ ID NO: 1071942 - RNA, 19 nt, Artificial Sequence
  Description of Artificial Sequence: Synthetic oligonucleotide
  Sense strand starting at position 372 of SEQ ID NO: 915333
gaggguauuacaggugacu

SEQ ID NO: 1071943 - RNA, 19 nt, Artificial Sequence
  Description of Artificial Sequence: Synthetic oligonucleotide
  Antisense strand to SEQ ID NO: 1071942
agucaccuguaauacccuc

SEQ ID NO: 1071944 - RNA, 19 nt, Artificial Sequence
  Description of Artificial Sequence: Synthetic oligonucleotide
  Sense strand starting at position 374 of SEQ ID NO: 915333
ggguauuacaggugacuuc

SEQ ID NO: 1071945 - RNA, 19 nt, Artificial Sequence
  Description of Artificial Sequence: Synthetic oligonucleotide
  Antisense strand to SEQ ID NO: 1071944
gaagucaccuguaauaccc

SEQ ID NO: 1071946 - RNA, 19 nt, Artificial Sequence
  Description of Artificial Sequence: Synthetic oligonucleotide
  Sense strand starting at position 383 of SEQ ID NO: 915333
aggugacuuccagguuaga

SEQ ID NO: 1071947 - RNA, 19 nt, Artificial Sequence
  Description of Artificial Sequence: Synthetic oligonucleotide
  Antisense strand to SEQ ID NO: 1071946
ucuaaccuggaagucaccu

SEQ ID NO: 1071948 - RNA, 19 nt, Artificial Sequence
  Description of Artificial Sequence: Synthetic oligonucleotide
  Sense strand starting at position 413 of SEQ ID NO: 915333
aggaguuagcucuacuaau

SEQ ID NO: 1071949 - RNA, 19 nt, Artificial Sequence
  Description of Artificial Sequence: Synthetic oligonucleotide
  Antisense strand to SEQ ID NO: 1071948
auuaguagagcuaacuccu

SEQ ID NO: 1071950 - RNA, 19 nt, Artificial Sequence
  Description of Artificial Sequence: Synthetic oligonucleotide
  Sense strand starting at position 458 of SEQ ID NO: 915333
uacuaugucguguaagaga

SEQ ID NO: 1071951 - RNA, 19 nt, Artificial Sequence
  Description of Artificial Sequence: Synthetic oligonucleotide
  Antisense strand to SEQ ID NO: 1071950
ucucuuacacgacauagua

SEQ ID NO: 1071952 - RNA, 19 nt, Artificial Sequence
  Description of Artificial Sequence: Synthetic oligonucleotide
  Sense strand starting at position 900 of SEQ ID NO: 915333
cggguaacuggguauggua

SEQ ID NO: 1071953 - RNA, 19 nt, Artificial Sequence
  Description of Artificial Sequence: Synthetic oligonucleotide
  Antisense strand to SEQ ID NO: 1071952
uaccauacccaguuacccg

SEQ ID NO: 1071954 - RNA, 19 nt, Artificial Sequence
  Description of Artificial Sequence: Synthetic oligonucleotide
  Sense strand starting at position 950 of SEQ ID NO: 915333
cuacuauagaggcgaugaa

SEQ ID NO: 1071955 - RNA, 19 nt, Artificial Sequence
  Description of Artificial Sequence: Synthetic oligonucleotide
  Antisense strand to SEQ ID NO: 1071954
uucaucgccucuauaguag

SEQ ID NO: 1071956 - RNA, 19 nt, Artificial Sequence
  Description of Artificial Sequence: Synthetic oligonucleotide
  Sense strand starting at position 1105 of SEQ ID NO: 915333
gaaccaggcguuuacugaa

SEQ ID NO: 1071957 - RNA, 19 nt, Artificial Sequence
  Description of Artificial Sequence: Synthetic oligonucleotide
  Antisense strand to SEQ ID NO: 1071956
uucaguaaacgccugguuc

SEQ ID NO: 1071958 - RNA, 19 nt, Artificial Sequence
  Description of Artificial Sequence: Synthetic oligonucleotide
  Sense strand starting at position 1381 of SEQ ID NO: 915333
gcaggugugauggaagcaa

SEQ ID NO: 1071959 - RNA, 19 nt, Artificial Sequence
  Description of Artificial Sequence: Synthetic oligonucleotide
  Antisense strand to SEQ ID NO: 1071958
uugcuuccaucacaccugc

SEQ ID NO: 1071960 - RNA, 19 nt, Artificial Sequence
  Description of Artificial Sequence: Synthetic oligonucleotide
  Sense strand starting at position 1461 of SEQ ID NO: 915333
gcaguagaagggugaaaga

SEQ ID NO: 1071961 - RNA, 19 nt, Artificial Sequence
  Description of Artificial Sequence: Synthetic oligonucleotide
  Antisense strand to SEQ ID NO: 1071960
ucuuucacccuucuacugc

SEQ ID NO: 1071962 - RNA, 19 nt, Artificial Sequence
  Description of Artificial Sequence: Synthetic oligonucleotide
  Sense strand starting at position 1589 of SEQ ID NO: 915333
ugggucguggccuugcaua

SEQ ID NO: 1071963 - RNA, 19 nt, Artificial Sequence
  Description of Artificial Sequence: Synthetic oligonucleotide
  Antisense strand to SEQ ID NO: 1071962
uaugcaaggccacgaccca

SEQ ID NO: 1071964 - RNA, 19 nt, Artificial Sequence
  Description of Artificial Sequence: Synthetic oligonucleotide
  Sense strand starting at position 2648 of SEQ ID NO: 915333
ccuugagaggcuuggaaau

SEQ ID NO: 1071965 - RNA, 19 nt, Artificial Sequence
  Description of Artificial Sequence: Synthetic oligonucleotide
  Antisense strand to SEQ ID NO: 1071964
auuuccaagccucucaagg

SEQ ID NO: 1071966 - RNA, 19 nt, Artificial Sequence
  Description of Artificial Sequence: Synthetic oligonucleotide
  Sense strand starting at position 2659 of SEQ ID NO: 915333
uuggaaaugucaccugguu

SEQ ID NO: 1071967 - RNA, 19 nt, Artificial Sequence
  Description of Artificial Sequence: Synthetic oligonucleotide
  Antisense strand to SEQ ID NO: 1071966
aaccaggugacauuuccaa

SEQ ID NO: 1071968 - RNA, 19 nt, Artificial Sequence
  Description of Artificial Sequence: Synthetic oligonucleotide
  Sense strand starting at position 2751 of SEQ ID NO: 915333
uucucuaggguguggaaua

SEQ ID NO: 1071969 - RNA, 19 nt, Artificial Sequence
  Description of Artificial Sequence: Synthetic oligonucleotide
  Antisense strand to SEQ ID NO: 1071968
uauuccacacccuagagaa

SEQ ID NO: 1071970 - RNA, 19 nt, Artificial Sequence
  Description of Artificial Sequence: Synthetic oligonucleotide
  Sense strand starting at position 2817 of SEQ ID NO: 915333
ggaugaugucaacagcgau

SEQ ID NO: 1071971 - RNA, 19 nt, Artificial Sequence
  Description of Artificial Sequence: Synthetic oligonucleotide
  Antisense strand to SEQ ID NO: 1071970
aucgcuguugacaucaucc

SEQ ID NO: 1071972 - RNA, 19 nt, Artificial Sequence
  Description of Artificial Sequence: Synthetic oligonucleotide
  Sense strand starting at position 2856 of SEQ ID NO: 915333
gacugcuguggugauuaaa

SEQ ID NO: 1071973 - RNA, 19 nt, Artificial Sequence
  Description of Artificial Sequence: Synthetic oligonucleotide
  Antisense strand to SEQ ID NO: 1071972
uuuaaucaccacagcaguc

SEQ ID NO: 1071974 - RNA, 19 nt, Artificial Sequence
  Description of Artificial Sequence: Synthetic oligonucleotide
  Sense strand starting at position 3006 of SEQ ID NO: 915333
gagccagauuuccauggaa

SEQ ID NO: 1071975 - RNA, 19 nt, Artificial Sequence
  Description of Artificial Sequence: Synthetic oligonucleotide
  Antisense strand to SEQ ID NO: 1071974
uuccauggaaaucuggcuc

SEQ ID NO: 1071976 - RNA, 19 nt, Artificial Sequence
  Description of Artificial Sequence: Synthetic oligonucleotide
  Sense strand starting at position 3019 of SEQ ID NO: 915333
auggaaagacguugacacu

SEQ ID NO: 1071977 - RNA, 19 nt, Artificial Sequence
  Description of Artificial Sequence: Synthetic oligonucleotide
  Antisense strand to SEQ ID NO: 1071976
agugucaacgucuuuccau

SEQ ID NO: 1071978 - RNA, 19 nt, Artificial Sequence
  Description of Artificial Sequence: Synthetic oligonucleotide
  Sense strand starting at position 3183 of SEQ ID NO: 915333
cuaaguuaccaugauaguc

SEQ ID NO: 1071979 - RNA, 19 nt, Artificial Sequence
  Description of Artificial Sequence: Synthetic oligonucleotide
  Antisense strand to SEQ ID NO: 1071978
gacuaucaugguaacuuag

SEQ ID NO: 1071980 - RNA, 19 nt, Artificial Sequence
  Description of Artificial Sequence: Synthetic oligonucleotide
  Sense strand starting at position 3407 of SEQ ID NO: 915333
cccacuauggcuggugaaa

SEQ ID NO: 1071981 - RNA, 19 nt, Artificial Sequence
  Description of Artificial Sequence: Synthetic oligonucleotide
  Antisense strand to SEQ ID NO: 1071980
uuucaccagccauaguggg

SEQ ID NO: 1071982 - RNA, 19 nt, Artificial Sequence
  Description of Artificial Sequence: Synthetic oligonucleotide
  Sense strand starting at position 3419 of SEQ ID NO: 915333
ggugaaauucugcagcaac

SEQ ID NO: 1071983 - RNA, 19 nt, Artificial Sequence
  Description of Artificial Sequence: Synthetic oligonucleotide
  Antisense strand to SEQ ID NO: 1071982
guugcugcagaauuucacc

SEQ ID NO: 1071984 - RNA, 19 nt, Artificial Sequence
  Description of Artificial Sequence: Synthetic oligonucleotide
  Sense strand starting at position 3439 of SEQ ID NO: 915333
ugcucuugccaagaacaca

SEQ ID NO: 1071985 - RNA, 19 nt, Artificial Sequence
  Description of Artificial Sequence: Synthetic oligonucleotide
  Antisense strand to SEQ ID NO: 1071984
uguguucuuggcaagagca

SEQ ID NO: 1071986 - RNA, 19 nt, Artificial Sequence
  Description of Artificial Sequence: Synthetic oligonucleotide
  Sense strand starting at position 3647 of SEQ ID NO: 915333
uggguuccacuguauaagu

SEQ ID NO: 1071987 - RNA, 19 nt, Artificial Sequence
  Description of Artificial Sequence: Synthetic oligonucleotide
  Antisense strand to SEQ ID NO: 1071986
acuuauacaguggaaccca

SEQ ID NO: 1071988 - RNA, 19 nt, Artificial Sequence
  Description of Artificial Sequence: Synthetic oligonucleotide
  Sense strand starting at position 3649 of SEQ ID NO: 915333
gguuccacuguauaaguua

SEQ ID NO: 1071989 - RNA, 19 nt, Artificial Sequence
  Description of Artificial Sequence: Synthetic oligonucleotide
  Antisense strand to SEQ ID NO: 1071988
uaacuuauacaguggaacc

SEQ ID NO: 1071990 - RNA, 19 nt, Artificial Sequence
  Description of Artificial Sequence: Synthetic oligonucleotide
  Sense strand starting at position 3716 of SEQ ID NO: 915333
acuaacauggucuagcuau

SEQ ID NO: 1071991 - RNA, 19 nt, Artificial Sequence
  Description of Artificial Sequence: Synthetic oligonucleotide
  Antisense strand to SEQ ID NO: 1071990
auagcuagaccauguuagu

SEQ ID NO: 1071992 - RNA, 19 nt, Artificial Sequence
  Description of Artificial Sequence: Synthetic oligonucleotide
  Sense strand starting at position 3770 of SEQ ID NO: 915333
agucauuccuaaguacaua

SEQ ID NO: 1071993 - RNA, 19 nt, Artificial Sequence
  Description of Artificial Sequence: Synthetic oligonucleotide
  Antisense strand to SEQ ID NO: 1071992
uauguacuuaggaaugacu

SEQ ID NO: 1071994 - RNA, 19 nt, Artificial Sequence
  Description of Artificial Sequence: Synthetic oligonucleotide
  Sense strand starting at position 3845 of SEQ ID NO: 915333
ugacaauaauuguugacau

SEQ ID NO: 1071995 - RNA, 19 nt, Artificial Sequence
  Description of Artificial Sequence: Synthetic oligonucleotide
  Antisense strand to SEQ ID NO: 1071994
augucaacaauuauuguca

SEQ ID NO: 1071996 - RNA, 19 nt, Artificial Sequence
  Description of Artificial Sequence: Synthetic oligonucleotide
  Sense strand starting at position 3847 of SEQ ID NO: 915333
acaauaauuguugacaugu

SEQ ID NO: 1071997 - RNA, 19 nt, Artificial Sequence
  Description of Artificial Sequence: Synthetic oligonucleotide
  Antisense strand to SEQ ID NO: 1071996
acaugucaacaauuauugu

SEQ ID NO: 1071998 - RNA, 19 nt, Artificial Sequence
  Description of Artificial Sequence: Synthetic oligonucleotide
  Sense strand starting at position 3855 of SEQ ID NO: 915333
uguugacauguuuacccua

SEQ ID NO: 1071999 - RNA, 19 nt, Artificial Sequence
  Description of Artificial Sequence: Synthetic oligonucleotide
  Antisense strand to SEQ ID NO: 1071998
uaggguaaacaugucaaca

SEQ ID NO: 1072000 - RNA, 19 nt, Artificial Sequence
  Description of Artificial Sequence: Synthetic oligonucleotide
  Sense strand starting at position 3858 of SEQ ID NO: 915333
ugacauguuuacccuauua

SEQ ID NO: 1072001 - RNA, 19 nt, Artificial Sequence
  Description of Artificial Sequence: Synthetic oligonucleotide
  Antisense strand to SEQ ID NO: 1072000
uaauaggguaaacauguca

SEQ ID NO: 1072002 - RNA, 19 nt, Artificial Sequence
  Description of Artificial Sequence: Synthetic oligonucleotide
  Sense strand starting at position 3977 of SEQ ID NO: 915333
gugguugugaacugaaaua

SEQ ID NO: 1072003 - RNA, 19 nt, Artificial Sequence
  Description of Artificial Sequence: Synthetic oligonucleotide
  Antisense strand to SEQ ID NO: 1072002
uauuucaguucacaaccac

SEQ ID NO: 1072004 - RNA, 19 nt, Artificial Sequence
  Description of Artificial Sequence: Synthetic oligonucleotide
  Sense strand starting at position 116 of SEQ ID NO: 915334
cggguaacuggguauggua

SEQ ID NO: 1072005 - RNA, 19 nt, Artificial Sequence
  Description of Artificial Sequence: Synthetic oligonucleotide
  Antisense strand to SEQ ID NO: 1072004
uaccauacccaguuacccg

SEQ ID NO: 1072006 - RNA, 19 nt, Artificial Sequence
  Description of Artificial Sequence: Synthetic oligonucleotide
  Sense strand starting at position 166 of SEQ ID NO: 915334
cuacuauagaggcgaugaa

SEQ ID NO: 1072007 - RNA, 19 nt, Artificial Sequence
  Description of Artificial Sequence: Synthetic oligonucleotide
  Antisense strand to SEQ ID NO: 1072006
uucaucgccucuauaguag

SEQ ID NO: 1072008 - RNA, 19 nt, Artificial Sequence
  Description of Artificial Sequence: Synthetic oligonucleotide
  Sense strand starting at position 321 of SEQ ID NO: 915334
gaaccaggcguuuacugaa

SEQ ID NO: 1072009 - RNA, 19 nt, Artificial Sequence
  Description of Artificial Sequence: Synthetic oligonucleotide
  Antisense strand to SEQ ID NO: 1072008
uucaguaaacgccugguuc

SEQ ID NO: 1072010 - RNA, 19 nt, Artificial Sequence
  Description of Artificial Sequence: Synthetic oligonucleotide
  Sense strand starting at position 479 of SEQ ID NO: 915334
caaguugguuggguaugau

SEQ ID NO: 1072011 - RNA, 19 nt, Artificial Sequence
  Description of Artificial Sequence: Synthetic oligonucleotide
  Antisense strand to SEQ ID NO: 1072010
aucauacccaaccaacuug

SEQ ID NO: 1072012 - RNA, 19 nt, Artificial Sequence
  Description of Artificial Sequence: Synthetic oligonucleotide
  Sense strand starting at position 597 of SEQ ID NO: 915334
gcaggugugauggaagcaa

SEQ ID NO: 1072013 - RNA, 19 nt, Artificial Sequence
  Description of Artificial Sequence: Synthetic oligonucleotide
  Antisense strand to SEQ ID NO: 1072012
uugcuuccaucacaccugc

SEQ ID NO: 1072014 - RNA, 19 nt, Artificial Sequence
  Description of Artificial Sequence: Synthetic oligonucleotide
  Sense strand starting at position 677 of SEQ ID NO: 915334
gcaguagaagggugaaaga

SEQ ID NO: 1072015 - RNA, 19 nt, Artificial Sequence
  Description of Artificial Sequence: Synthetic oligonucleotide
  Antisense strand to SEQ ID NO: 1072014
ucuuucacccuucuacugc

SEQ ID NO: 1072016 - RNA, 19 nt, Artificial Sequence
  Description of Artificial Sequence: Synthetic oligonucleotide
  Sense strand starting at position 805 of SEQ ID NO: 915334
ugggucguggccuugcaua

SEQ ID NO: 1072017 - RNA, 19 nt, Artificial Sequence
  Description of Artificial Sequence: Synthetic oligonucleotide
  Antisense strand to SEQ ID NO: 1072016
uaugcaaggccacgaccca

SEQ ID NO: 1072018 - RNA, 19 nt, Artificial Sequence
  Description of Artificial Sequence: Synthetic oligonucleotide
  Sense strand starting at position 1864 of SEQ ID NO: 915334
ccuugagaggcuuggaaau

SEQ ID NO: 1072019 - RNA, 19 nt, Artificial Sequence
  Description of Artificial Sequence: Synthetic oligonucleotide
  Antisense strand to SEQ ID NO: 1072018
auuuccaagccucucaagg

SEQ ID NO: 1072020 - RNA, 19 nt, Artificial Sequence
  Description of Artificial Sequence: Synthetic oligonucleotide
  Sense strand starting at position 1875 of SEQ ID NO: 915334
uuggaaaugucaccugguu

SEQ ID NO: 1072021 - RNA, 19 nt, Artificial Sequence
  Description of Artificial Sequence: Synthetic oligonucleotide
  Antisense strand to SEQ ID NO: 1072020
aaccaggugacauuuccaa

SEQ ID NO: 1072022 - RNA, 19 nt, Artificial Sequence
  Description of Artificial Sequence: Synthetic oligonucleotide
  Sense strand starting at position 1967 of SEQ ID NO: 915334
uucucuaggguguggaaua

SEQ ID NO: 1072023 - RNA, 19 nt, Artificial Sequence
  Description of Artificial Sequence: Synthetic oligonucleotide
  Antisense strand to SEQ ID NO: 1072022
uauuccacacccuagagaa

SEQ ID NO: 1072024 - RNA, 19 nt, Artificial Sequence
  Description of Artificial Sequence: Synthetic oligonucleotide
  Sense strand starting at position 2033 of SEQ ID NO: 915334
ggaugaugucaacagcgau

SEQ ID NO: 1072025 - RNA, 19 nt, Artificial Sequence
  Description of Artificial Sequence: Synthetic oligonucleotide
  Antisense strand to SEQ ID NO: 1072024
aucgcuguugacaucaucc

SEQ ID NO: 1072026 - RNA, 19 nt, Artificial Sequence
  Description of Artificial Sequence: Synthetic oligonucleotide
  Sense strand starting at position 2072 of SEQ ID NO: 915334
gacugcuguggugauuaaa

SEQ ID NO: 1072027 - RNA, 19 nt, Artificial Sequence
  Description of Artificial Sequence: Synthetic oligonucleotide
  Antisense strand to SEQ ID NO: 1072026
uuuaaucaccacagcaguc

SEQ ID NO: 1072028 - RNA, 19 nt, Artificial Sequence
  Description of Artificial Sequence: Synthetic oligonucleotide
  Sense strand starting at position 2222 of SEQ ID NO: 915334
gagccagauuuccauggaa

SEQ ID NO: 1072029 - RNA, 19 nt, Artificial Sequence
  Description of Artificial Sequence: Synthetic oligonucleotide
  Antisense strand to SEQ ID NO: 1072028
uuccauggaaaucuggcuc

SEQ ID NO: 1072030 - RNA, 19 nt, Artificial Sequence
  Description of Artificial Sequence: Synthetic oligonucleotide
  Sense strand starting at position 2235 of SEQ ID NO: 915334
auggaaagacguugacacu

SEQ ID NO: 1072031 - RNA, 19 nt, Artificial Sequence
  Description of Artificial Sequence: Synthetic oligonucleotide
  Antisense strand to SEQ ID NO: 1072030
agugucaacgucuuuccau

SEQ ID NO: 1072032 - RNA, 19 nt, Artificial Sequence
  Description of Artificial Sequence: Synthetic oligonucleotide
  Sense strand starting at position 2399 of SEQ ID NO: 915334
cuaaguuaccaugauaguc

SEQ ID NO: 1072033 - RNA, 19 nt, Artificial Sequence
  Description of Artificial Sequence: Synthetic oligonucleotide
  Antisense strand to SEQ ID NO: 1072032
gacuaucaugguaacuuag

SEQ ID NO: 1072034 - RNA, 19 nt, Artificial Sequence
  Description of Artificial Sequence: Synthetic oligonucleotide
  Sense strand starting at position 2457 of SEQ ID NO: 915334
cucagaaagucuguguaca

SEQ ID NO: 1072035 - RNA, 19 nt, Artificial Sequence
  Description of Artificial Sequence: Synthetic oligonucleotide
  Antisense strand to SEQ ID NO: 1072034
uguacacagacuuucugag

SEQ ID NO: 1072036 - RNA, 19 nt, Artificial Sequence
  Description of Artificial Sequence: Synthetic oligonucleotide
  Sense strand starting at position 2623 of SEQ ID NO: 915334
cccacuauggcuggugaaa

SEQ ID NO: 1072037 - RNA, 19 nt, Artificial Sequence
  Description of Artificial Sequence: Synthetic oligonucleotide
  Antisense strand to SEQ ID NO: 1072036
uuucaccagccauaguggg

SEQ ID NO: 1072038 - RNA, 19 nt, Artificial Sequence
  Description of Artificial Sequence: Synthetic oligonucleotide
  Sense strand starting at position 2635 of SEQ ID NO: 915334
ggugaaauucugcagcaac

SEQ ID NO: 1072039 - RNA, 19 nt, Artificial Sequence
  Description of Artificial Sequence: Synthetic oligonucleotide
  Antisense strand to SEQ ID NO: 1072038
guugcugcagaauuucacc

SEQ ID NO: 1072040 - RNA, 19 nt, Artificial Sequence
  Description of Artificial Sequence: Synthetic oligonucleotide
  Sense strand starting at position 2655 of SEQ ID NO: 915334
ugcucuugccaagaacaca

SEQ ID NO: 1072041 - RNA, 19 nt, Artificial Sequence
  Description of Artificial Sequence: Synthetic oligonucleotide
  Antisense strand to SEQ ID NO: 1072040
uguguucuuggcaagagca

SEQ ID NO: 1072042 - RNA, 19 nt, Artificial Sequence
  Description of Artificial Sequence: Synthetic oligonucleotide
  Sense strand starting at position 2863 of SEQ ID NO: 915334
uggguuccacuguauaagu

SEQ ID NO: 1072043 - RNA, 19 nt, Artificial Sequence
  Description of Artificial Sequence: Synthetic oligonucleotide
  Antisense strand to SEQ ID NO: 1072042
acuuauacaguggaaccca

SEQ ID NO: 1072044 - RNA, 19 nt, Artificial Sequence
  Description of Artificial Sequence: Synthetic oligonucleotide
  Sense strand starting at position 2865 of SEQ ID NO: 915334
gguuccacuguauaaguua

SEQ ID NO: 1072045 - RNA, 19 nt, Artificial Sequence
  Description of Artificial Sequence: Synthetic oligonucleotide
  Antisense strand to SEQ ID NO: 1072044
uaacuuauacaguggaacc

SEQ ID NO: 1072046 - RNA, 19 nt, Artificial Sequence
  Description of Artificial Sequence: Synthetic oligonucleotide
  Sense strand starting at position 2932 of SEQ ID NO: 915334
acuaacauggucuagcuau

SEQ ID NO: 1072047 - RNA, 19 nt, Artificial Sequence
  Description of Artificial Sequence: Synthetic oligonucleotide
  Antisense strand to SEQ ID NO: 1072046
auagcuagaccauguuagu

SEQ ID NO: 1072048 - RNA, 19 nt, Artificial Sequence
  Description of Artificial Sequence: Synthetic oligonucleotide
  Sense strand starting at position 2986 of SEQ ID NO: 915334
agucauuccuaaguacaua

SEQ ID NO: 1072049 - RNA, 19 nt, Artificial Sequence
  Description of Artificial Sequence: Synthetic oligonucleotide
  Antisense strand to SEQ ID NO: 1072048
uauguacuuaggaaugacu

SEQ ID NO: 1072050 - RNA, 19 nt, Artificial Sequence
  Description of Artificial Sequence: Synthetic oligonucleotide
  Sense strand starting at position 3061 of SEQ ID NO: 915334
ugacaauaauuguugacau

SEQ ID NO: 1072051 - RNA, 19 nt, Artificial Sequence
  Description of Artificial Sequence: Synthetic oligonucleotide
  Antisense strand to SEQ ID NO: 1072050
augucaacaauuauuguca

SEQ ID NO: 1072052 - RNA, 19 nt, Artificial Sequence
  Description of Artificial Sequence: Synthetic oligonucleotide
  Sense strand starting at position 3063 of SEQ ID NO: 915334
acaauaauuguugacaugu

SEQ ID NO: 1072053 - RNA, 19 nt, Artificial Sequence
  Description of Artificial Sequence: Synthetic oligonucleotide
  Antisense strand to SEQ ID NO: 1072052
acaugucaacaauuauugu

SEQ ID NO: 1072054 - RNA, 19 nt, Artificial Sequence
  Description of Artificial Sequence: Synthetic oligonucleotide
  Sense strand starting at position 3071 of SEQ ID NO: 915334
uguugacauguuuacccua

SEQ ID NO: 1072055 - RNA, 19 nt, Artificial Sequence
  Description of Artificial Sequence: Synthetic oligonucleotide
  Antisense strand to SEQ ID NO: 1072054
uaggguaaacaugucaaca

SEQ ID NO: 1072056 - RNA, 19 nt, Artificial Sequence
  Description of Artificial Sequence: Synthetic oligonucleotide
  Sense strand starting at position 3073 of SEQ ID NO: 915334
uugacauguuuacccuauu

SEQ ID NO: 1072057 - RNA, 19 nt, Artificial Sequence
  Description of Artificial Sequence: Synthetic oligonucleotide
  Antisense strand to SEQ ID NO: 1072056
aauaggguaaacaugucaa

SEQ ID NO: 1072058 - RNA, 19 nt, Artificial Sequence
  Description of Artificial Sequence: Synthetic oligonucleotide
  Sense strand starting at position 3074 of SEQ ID NO: 915334
ugacauguuuacccuauua

SEQ ID NO: 1072059 - RNA, 19 nt, Artificial Sequence
  Description of Artificial Sequence: Synthetic oligonucleotide
  Antisense strand to SEQ ID NO: 1072058
uaauaggguaaacauguca

SEQ ID NO: 1072060 - RNA, 19 nt, Artificial Sequence
  Description of Artificial Sequence: Synthetic oligonucleotide
  Sense strand starting at position 3193 of SEQ ID NO: 915334
gugguugugaacugaaaua

SEQ ID NO: 1072061 - RNA, 19 nt, Artificial Sequence
  Description of Artificial Sequence: Synthetic oligonucleotide
  Antisense strand to SEQ ID NO: 1072060
uauuucaguucacaaccac

SEQ ID NO: 1072062 - RNA, 19 nt, Artificial Sequence
  Description of Artificial Sequence: Synthetic oligonucleotide
  Sense strand starting at position 3241 of SEQ ID NO: 915334
uuguucuaaggguagacau

SEQ ID NO: 1072063 - RNA, 19 nt, Artificial Sequence
  Description of Artificial Sequence: Synthetic oligonucleotide
  Antisense strand to SEQ ID NO: 1072062
augucuacccuuagaacaa

SEQ ID NO: 1072064 - RNA, 19 nt, Artificial Sequence
  Description of Artificial Sequence: Synthetic oligonucleotide
  Sense strand starting at position 3254 of SEQ ID NO: 915334
agacauuacugaccuaugu

SEQ ID NO: 1072065 - RNA, 19 nt, Artificial Sequence
  Description of Artificial Sequence: Synthetic oligonucleotide
  Antisense strand to SEQ ID NO: 1072064
acauaggucaguaaugucu

SEQ ID NO: 1072066 - RNA, 19 nt, Artificial Sequence
  Description of Artificial Sequence: Synthetic oligonucleotide
  Sense strand starting at position 3432 of SEQ ID NO: 915334
cguuaauggccucaccaca

SEQ ID NO: 1072067 - RNA, 19 nt, Artificial Sequence
  Description of Artificial Sequence: Synthetic oligonucleotide
  Antisense strand to SEQ ID NO: 1072066
uguggugaggccauuaacg

SEQ ID NO: 1072068 - RNA, 19 nt, Artificial Sequence
  Description of Artificial Sequence: Synthetic oligonucleotide
  Sense strand starting at position 3595 of SEQ ID NO: 915334
ucuguuauacuagacuguu

SEQ ID NO: 1072069 - RNA, 19 nt, Artificial Sequence
  Description of Artificial Sequence: Synthetic oligonucleotide
  Antisense strand to SEQ ID NO: 1072068
aacagucuaguauaacaga

SEQ ID NO: 1072070 - RNA, 19 nt, Artificial Sequence
  Description of Artificial Sequence: Synthetic oligonucleotide
  Sense strand starting at position 3805 of SEQ ID NO: 915334
agaaguuucuaaguaugua

SEQ ID NO: 1072071 - RNA, 19 nt, Artificial Sequence
  Description of Artificial Sequence: Synthetic oligonucleotide
  Antisense strand to SEQ ID NO: 1072070
uacauacuuagaaacuucu

SEQ ID NO: 1072072 - RNA, 19 nt, Artificial Sequence
  Description of Artificial Sequence: Synthetic oligonucleotide
  Sense strand starting at position 3817 of SEQ ID NO: 915334
guauguaaauaaucaguga

SEQ ID NO: 1072073 - RNA, 19 nt, Artificial Sequence
  Description of Artificial Sequence: Synthetic oligonucleotide
  Antisense strand to SEQ ID NO: 1072072
ucacugauuauuuacauac

SEQ ID NO: 1072074 - RNA, 19 nt, Artificial Sequence
  Description of Artificial Sequence: Synthetic oligonucleotide
  Sense strand starting at position 3820 of SEQ ID NO: 915334
uguaaauaaucagugacca

SEQ ID NO: 1072075 - RNA, 19 nt, Artificial Sequence
  Description of Artificial Sequence: Synthetic oligonucleotide
  Antisense strand to SEQ ID NO: 1072074
uggucacugauuauuuaca

SEQ ID NO: 1072076 - RNA, 19 nt, Artificial Sequence
  Description of Artificial Sequence: Synthetic oligonucleotide
  Sense strand starting at position 3821 of SEQ ID NO: 915334
guaaauaaucagugaccau

SEQ ID NO: 1072077 - RNA, 19 nt, Artificial Sequence
  Description of Artificial Sequence: Synthetic oligonucleotide
  Antisense strand to SEQ ID NO: 1072076
auggucacugauuauuuac

SEQ ID NO: 1072078 - RNA, 19 nt, Artificial Sequence
  Description of Artificial Sequence: Synthetic oligonucleotide
  Sense strand starting at position 3825 of SEQ ID NO: 915334
auaaucagugaccauugua

SEQ ID NO: 1072079 - RNA, 19 nt, Artificial Sequence
  Description of Artificial Sequence: Synthetic oligonucleotide
  Antisense strand to SEQ ID NO: 1072078
uacaauggucacugauuau

SEQ ID NO: 1072080 - RNA, 19 nt, Artificial Sequence
  Description of Artificial Sequence: Synthetic oligonucleotide
  Sense strand starting at position 3843 of SEQ ID NO: 915334
agagguuuauguguaauug

SEQ ID NO: 1072081 - RNA, 19 nt, Artificial Sequence
  Description of Artificial Sequence: Synthetic oligonucleotide
  Antisense strand to SEQ ID NO: 1072080
caauuacacauaaaccucu

SEQ ID NO: 1072082 - RNA, 19 nt, Artificial Sequence
  Description of Artificial Sequence: Synthetic oligonucleotide
  Sense strand starting at position 3917 of SEQ ID NO: 915334
aggcauuacugaccuacuu

SEQ ID NO: 1072083 - RNA, 19 nt, Artificial Sequence
  Description of Artificial Sequence: Synthetic oligonucleotide
  Antisense strand to SEQ ID NO: 1072082
aaguaggucaguaaugccu

SEQ ID NO: 1072084 - RNA, 19 nt, Artificial Sequence
  Description of Artificial Sequence: Synthetic oligonucleotide
  Sense strand starting at position 4 of SEQ ID NO: 915335
gguagcguguccagcagau

SEQ ID NO: 1072085 - RNA, 19 nt, Artificial Sequence
  Description of Artificial Sequence: Synthetic oligonucleotide
  Antisense strand to SEQ ID NO: 1072084
aucugcuggacacgcuacc

SEQ ID NO: 1072086 - RNA, 19 nt, Artificial Sequence
  Description of Artificial Sequence: Synthetic oligonucleotide
  Sense strand starting at position 13 of SEQ ID NO: 915335
uccagcagauucugagaga

SEQ ID NO: 1072087 - RNA, 19 nt, Artificial Sequence
  Description of Artificial Sequence: Synthetic oligonucleotide
  Antisense strand to SEQ ID NO: 1072086
ucucucagaaucugcugga

SEQ ID NO: 1072088 - RNA, 19 nt, Artificial Sequence
  Description of Artificial Sequence: Synthetic oligonucleotide
  Sense strand starting at position 149 of SEQ ID NO: 915335
cagagaggcaguugugaga

SEQ ID NO: 1072089 - RNA, 19 nt, Artificial Sequence
  Description of Artificial Sequence: Synthetic oligonucleotide
  Antisense strand to SEQ ID NO: 1072088
ucucacaacugccucucug

SEQ ID NO: 1072090 - RNA, 19 nt, Artificial Sequence
  Description of Artificial Sequence: Synthetic oligonucleotide
  Sense strand starting at position 487 of SEQ ID NO: 915335
uggagaggugcccgcaaau

SEQ ID NO: 1072091 - RNA, 19 nt, Artificial Sequence
  Description of Artificial Sequence: Synthetic oligonucleotide
  Antisense strand to SEQ ID NO: 1072090
auuugcgggcaccucucca

SEQ ID NO: 1072092 - RNA, 19 nt, Artificial Sequence
  Description of Artificial Sequence: Synthetic oligonucleotide
  Sense strand starting at position 661 of SEQ ID NO: 915335
gguggugaucaccgaggau

SEQ ID NO: 1072093 - RNA, 19 nt, Artificial Sequence
  Description of Artificial Sequence: Synthetic oligonucleotide
  Antisense strand to SEQ ID NO: 1072092
auccucggugaucaccacc

SEQ ID NO: 1072094 - RNA, 19 nt, Artificial Sequence
  Description of Artificial Sequence: Synthetic oligonucleotide
  Sense strand starting at position 765 of SEQ ID NO: 915335
ggguuugccuuugagaaca

SEQ ID NO: 1072095 - RNA, 19 nt, Artificial Sequence
  Description of Artificial Sequence: Synthetic oligonucleotide
  Antisense strand to SEQ ID NO: 1072094
uguucucaaaggcaaaccc

SEQ ID NO: 1072096 - RNA, 19 nt, Artificial Sequence
  Description of Artificial Sequence: Synthetic oligonucleotide
  Sense strand starting at position 921 of SEQ ID NO: 915335
ucgugagugcucagacgca

SEQ ID NO: 1072097 - RNA, 19 nt, Artificial Sequence
  Description of Artificial Sequence: Synthetic oligonucleotide
  Antisense strand to SEQ ID NO: 1072096
ugcgucugagcacucacga

SEQ ID NO: 1072098 - RNA, 19 nt, Artificial Sequence
  Description of Artificial Sequence: Synthetic oligonucleotide
  Sense strand starting at position 926 of SEQ ID NO: 915335
agugcucagacgcaagaau

SEQ ID NO: 1072099 - RNA, 19 nt, Artificial Sequence
  Description of Artificial Sequence: Synthetic oligonucleotide
  Antisense strand to SEQ ID NO: 1072098
auucuugcgucugagcacu

SEQ ID NO: 1072100 - RNA, 19 nt, Artificial Sequence
  Description of Artificial Sequence: Synthetic oligonucleotide
  Sense strand starting at position 1067 of SEQ ID NO: 915335
guccgaauccucugaagca

SEQ ID NO: 1072101 - RNA, 19 nt, Artificial Sequence
  Description of Artificial Sequence: Synthetic oligonucleotide
  Antisense strand to SEQ ID NO: 1072100
ugcuucagaggauucggac

SEQ ID NO: 1072102 - RNA, 19 nt, Artificial Sequence
  Description of Artificial Sequence: Synthetic oligonucleotide
  Sense strand starting at position 1068 of SEQ ID NO: 915335
uccgaauccucugaagcau

SEQ ID NO: 1072103 - RNA, 19 nt, Artificial Sequence
  Description of Artificial Sequence: Synthetic oligonucleotide
  Antisense strand to SEQ ID NO: 1072102
augcuucagaggauucgga

SEQ ID NO: 1072104 - RNA, 19 nt, Artificial Sequence
  Description of Artificial Sequence: Synthetic oligonucleotide
  Sense strand starting at position 1478 of SEQ ID NO: 915335
caguccugguccuggaaau

SEQ ID NO: 1072105 - RNA, 19 nt, Artificial Sequence
  Description of Artificial Sequence: Synthetic oligonucleotide
  Antisense strand to SEQ ID NO: 1072104
auuuccaggaccaggacug

SEQ ID NO: 1072106 - RNA, 19 nt, Artificial Sequence
  Description of Artificial Sequence: Synthetic oligonucleotide
  Sense strand starting at position 1479 of SEQ ID NO: 915335
aguccugguccuggaaauc

SEQ ID NO: 1072107 - RNA, 19 nt, Artificial Sequence
  Description of Artificial Sequence: Synthetic oligonucleotide
  Antisense strand to SEQ ID NO: 1072106
gauuuccaggaccaggacu

SEQ ID NO: 1072108 - RNA, 19 nt, Artificial Sequence
  Description of Artificial Sequence: Synthetic oligonucleotide
  Sense strand starting at position 1541 of SEQ ID NO: 915335
cccaguccuggagaugagu

SEQ ID NO: 1072109 - RNA, 19 nt, Artificial Sequence
  Description of Artificial Sequence: Synthetic oligonucleotide
  Antisense strand to SEQ ID NO: 1072108
acucaucuccaggacuggg

SEQ ID NO: 1072110 - RNA, 19 nt, Artificial Sequence
  Description of Artificial Sequence: Synthetic oligonucleotide
  Sense strand starting at position 2381 of SEQ ID NO: 915335
gaacaauugcaguguccuu

SEQ ID NO: 1072111 - RNA, 19 nt, Artificial Sequence
  Description of Artificial Sequence: Synthetic oligonucleotide
  Antisense strand to SEQ ID NO: 1072110
aaggacacugcaauuguuc

SEQ ID NO: 1072112 - RNA, 19 nt, Artificial Sequence
  Description of Artificial Sequence: Synthetic oligonucleotide
  Sense strand starting at position 2386 of SEQ ID NO: 915335
auugcaguguccuuuccaa

SEQ ID NO: 1072113 - RNA, 19 nt, Artificial Sequence
  Description of Artificial Sequence: Synthetic oligonucleotide
  Antisense strand to SEQ ID NO: 1072112
uuggaaaggacacugcaau

SEQ ID NO: 1072114 - RNA, 19 nt, Artificial Sequence
  Description of Artificial Sequence: Synthetic oligonucleotide
  Sense strand starting at position 2965 of SEQ ID NO: 915335
cgggccugugcuuuauuca

SEQ ID NO: 1072115 - RNA, 19 nt, Artificial Sequence
  Description of Artificial Sequence: Synthetic oligonucleotide
  Antisense strand to SEQ ID NO: 1072114
ugaauaaagcacaggcccg

SEQ ID NO: 1072116 - RNA, 19 nt, Artificial Sequence
  Description of Artificial Sequence: Synthetic oligonucleotide
  Sense strand starting at position 3045 of SEQ ID NO: 915335
ugcuucuuuccugagguca

SEQ ID NO: 1072117 - RNA, 19 nt, Artificial Sequence
  Description of Artificial Sequence: Synthetic oligonucleotide
  Antisense strand to SEQ ID NO: 1072116
ugaccucaggaaagaagca

SEQ ID NO: 1072118 - RNA, 19 nt, Artificial Sequence
  Description of Artificial Sequence: Synthetic oligonucleotide
  Sense strand starting at position 3047 of SEQ ID NO: 915335
cuucuuuccugaggucaua

SEQ ID NO: 1072119 - RNA, 19 nt, Artificial Sequence
  Description of Artificial Sequence: Synthetic oligonucleotide
  Antisense strand to SEQ ID NO: 1072118
uaugaccucaggaaagaag

SEQ ID NO: 1072120 - RNA, 19 nt, Artificial Sequence
  Description of Artificial Sequence: Synthetic oligonucleotide
  Sense strand starting at position 3149 of SEQ ID NO: 915335
gguguuuagggagggaaca

SEQ ID NO: 1072121 - RNA, 19 nt, Artificial Sequence
  Description of Artificial Sequence: Synthetic oligonucleotide
  Antisense strand to SEQ ID NO: 1072120
uguucccucccuaaacacc

SEQ ID NO: 1072122 - RNA, 19 nt, Artificial Sequence
  Description of Artificial Sequence: Synthetic oligonucleotide
  Sense strand starting at position 3533 of SEQ ID NO: 915335
ccguguuaccuaggauguu

SEQ ID NO: 1072123 - RNA, 19 nt, Artificial Sequence
  Description of Artificial Sequence: Synthetic oligonucleotide
  Antisense strand to SEQ ID NO: 1072122
aacauccuagguaacacgg

SEQ ID NO: 1072124 - RNA, 19 nt, Artificial Sequence
  Description of Artificial Sequence: Synthetic oligonucleotide
  Sense strand starting at position 3539 of SEQ ID NO: 915335
uaccuaggauguucucgaa

SEQ ID NO: 1072125 - RNA, 19 nt, Artificial Sequence
  Description of Artificial Sequence: Synthetic oligonucleotide
  Antisense strand to SEQ ID NO: 1072124
uucgagaacauccuaggua

SEQ ID NO: 1072126 - RNA, 19 nt, Artificial Sequence
  Description of Artificial Sequence: Synthetic oligonucleotide
  Sense strand starting at position 3761 of SEQ ID NO: 915335
gugaaaccgugugucuauu

SEQ ID NO: 1072127 - RNA, 19 nt, Artificial Sequence
  Description of Artificial Sequence: Synthetic oligonucleotide
  Antisense strand to SEQ ID NO: 1072126
aauagacacacgguuucac

SEQ ID NO: 1072128 - RNA, 19 nt, Artificial Sequence
  Description of Artificial Sequence: Synthetic oligonucleotide
  Sense strand starting at position 3763 of SEQ ID NO: 915335
gaaaccgugugucuauuaa

SEQ ID NO: 1072129 - RNA, 19 nt, Artificial Sequence
  Description of Artificial Sequence: Synthetic oligonucleotide
  Antisense strand to SEQ ID NO: 1072128
uuaauagacacacgguuuc

SEQ ID NO: 1072130 - RNA, 19 nt, Artificial Sequence
  Description of Artificial Sequence: Synthetic oligonucleotide
  Sense strand starting at position 117 of SEQ ID NO: 915336
uuacccuaguacuuugaga

SEQ ID NO: 1072131 - RNA, 19 nt, Artificial Sequence
  Description of Artificial Sequence: Synthetic oligonucleotide
  Antisense strand to SEQ ID NO: 1072130
ucucaaaguacuaggguaa

SEQ ID NO: 1072132 - RNA, 19 nt, Artificial Sequence
  Description of Artificial Sequence: Synthetic oligonucleotide
  Sense strand starting at position 173 of SEQ ID NO: 915336
gagauuagccugugaaaca

SEQ ID NO: 1072133 - RNA, 19 nt, Artificial Sequence
  Description of Artificial Sequence: Synthetic oligonucleotide
  Antisense strand to SEQ ID NO: 1072132
uguuucacaggcuaaucuc

SEQ ID NO: 1072134 - RNA, 19 nt, Artificial Sequence
  Description of Artificial Sequence: Synthetic oligonucleotide
  Sense strand starting at position 740 of SEQ ID NO: 915336
agcaauaccuaaguguaaa

SEQ ID NO: 1072135 - RNA, 19 nt, Artificial Sequence
  Description of Artificial Sequence: Synthetic oligonucleotide
  Antisense strand to SEQ ID NO: 1072134
uuuacacuuagguauugcu

SEQ ID NO: 1072136 - RNA, 19 nt, Artificial Sequence
  Description of Artificial Sequence: Synthetic oligonucleotide
  Sense strand starting at position 766 of SEQ ID NO: 915336
cugguuauucugggaucau

SEQ ID NO: 1072137 - RNA, 19 nt, Artificial Sequence
  Description of Artificial Sequence: Synthetic oligonucleotide
  Antisense strand to SEQ ID NO: 1072136
augaucccagaauaaccag

SEQ ID NO: 1072138 - RNA, 19 nt, Artificial Sequence
  Description of Artificial Sequence: Synthetic oligonucleotide
  Sense strand starting at position 826 of SEQ ID NO: 915336
ccagaauccuggucuguag

SEQ ID NO: 1072139 - RNA, 19 nt, Artificial Sequence
  Description of Artificial Sequence: Synthetic oligonucleotide
  Antisense strand to SEQ ID NO: 1072138
cuacagaccaggauucugg

SEQ ID NO: 1072140 - RNA, 19 nt, Artificial Sequence
  Description of Artificial Sequence: Synthetic oligonucleotide
  Sense strand starting at position 830 of SEQ ID NO: 915336
aauccuggucuguagacaa

SEQ ID NO: 1072141 - RNA, 19 nt, Artificial Sequence
  Description of Artificial Sequence: Synthetic oligonucleotide
  Antisense strand to SEQ ID NO: 1072140
uugucuacagaccaggauu

SEQ ID NO: 1072142 - RNA, 19 nt, Artificial Sequence
  Description of Artificial Sequence: Synthetic oligonucleotide
  Sense strand starting at position 933 of SEQ ID NO: 915336
ugagcuagaucaucuagga

SEQ ID NO: 1072143 - RNA, 19 nt, Artificial Sequence
  Description of Artificial Sequence: Synthetic oligonucleotide
  Antisense strand to SEQ ID NO: 1072142
uccuagaugaucuagcuca

SEQ ID NO: 1072144 - RNA, 19 nt, Artificial Sequence
  Description of Artificial Sequence: Synthetic oligonucleotide
  Sense strand starting at position 937 of SEQ ID NO: 915336
cuagaucaucuaggagguu

SEQ ID NO: 1072145 - RNA, 19 nt, Artificial Sequence
  Description of Artificial Sequence: Synthetic oligonucleotide
  Antisense strand to SEQ ID NO: 1072144
aaccuccuagaugaucuag

SEQ ID NO: 1072146 - RNA, 19 nt, Artificial Sequence
  Description of Artificial Sequence: Synthetic oligonucleotide
  Sense strand starting at position 992 of SEQ ID NO: 915336
ggaugucuccaugacuuau

SEQ ID NO: 1072147 - RNA, 19 nt, Artificial Sequence
  Description of Artificial Sequence: Synthetic oligonucleotide
  Antisense strand to SEQ ID NO: 1072146
auaagucauggagacaucc

SEQ ID NO: 1072148 - RNA, 19 nt, Artificial Sequence
  Description of Artificial Sequence: Synthetic oligonucleotide
  Sense strand starting at position 1002 of SEQ ID NO: 915336
augacuuaugaguggugaa

SEQ ID NO: 1072149 - RNA, 19 nt, Artificial Sequence
  Description of Artificial Sequence: Synthetic oligonucleotide
  Antisense strand to SEQ ID NO: 1072148
uucaccacucauaagucau

SEQ ID NO: 1072150 - RNA, 19 nt, Artificial Sequence
  Description of Artificial Sequence: Synthetic oligonucleotide
  Sense strand starting at position 1003 of SEQ ID NO: 915336
ugacuuaugaguggugaau

SEQ ID NO: 1072151 - RNA, 19 nt, Artificial Sequence
  Description of Artificial Sequence: Synthetic oligonucleotide
  Antisense strand to SEQ ID NO: 1072150
auucaccacucauaaguca

SEQ ID NO: 1072152 - RNA, 19 nt, Artificial Sequence
  Description of Artificial Sequence: Synthetic oligonucleotide
  Sense strand starting at position 1347 of SEQ ID NO: 915336
cugaaauugccagaggugu

SEQ ID NO: 1072153 - RNA, 19 nt, Artificial Sequence
  Description of Artificial Sequence: Synthetic oligonucleotide
  Antisense strand to SEQ ID NO: 1072152
acaccucuggcaauuucag

SEQ ID NO: 1072154 - RNA, 19 nt, Artificial Sequence
  Description of Artificial Sequence: Synthetic oligonucleotide
  Sense strand starting at position 1395 of SEQ ID NO: 915336
cuuaauccucaguauaguu

SEQ ID NO: 1072155 - RNA, 19 nt, Artificial Sequence
  Description of Artificial Sequence: Synthetic oligonucleotide
  Antisense strand to SEQ ID NO: 1072154
aacuauacugaggauuaag

SEQ ID NO: 1072156 - RNA, 19 nt, Artificial Sequence
  Description of Artificial Sequence: Synthetic oligonucleotide
  Sense strand starting at position 1402 of SEQ ID NO: 915336
cucaguauaguuuaguauu

SEQ ID NO: 1072157 - RNA, 19 nt, Artificial Sequence
  Description of Artificial Sequence: Synthetic oligonucleotide
  Antisense strand to SEQ ID NO: 1072156
aauacuaaacuauacugag

SEQ ID NO: 1072158 - RNA, 19 nt, Artificial Sequence
  Description of Artificial Sequence: Synthetic oligonucleotide
  Sense strand starting at position 1428 of SEQ ID NO: 915336
auggacuugugagccagaa

SEQ ID NO: 1072159 - RNA, 19 nt, Artificial Sequence
  Description of Artificial Sequence: Synthetic oligonucleotide
  Antisense strand to SEQ ID NO: 1072158
uucuggcucacaaguccau

SEQ ID NO: 1072160 - RNA, 19 nt, Artificial Sequence
  Description of Artificial Sequence: Synthetic oligonucleotide
  Sense strand starting at position 1430 of SEQ ID NO: 915336
ggacuugugagccagaaug

SEQ ID NO: 1072161 - RNA, 19 nt, Artificial Sequence
  Description of Artificial Sequence: Synthetic oligonucleotide
  Antisense strand to SEQ ID NO: 1072160
cauucuggcucacaagucc

SEQ ID NO: 1072162 - RNA, 19 nt, Artificial Sequence
  Description of Artificial Sequence: Synthetic oligonucleotide
  Sense strand starting at position 1438 of SEQ ID NO: 915336
gagccagaaugccuagauu

SEQ ID NO: 1072163 - RNA, 19 nt, Artificial Sequence
  Description of Artificial Sequence: Synthetic oligonucleotide
  Antisense strand to SEQ ID NO: 1072162
aaucuaggcauucuggcuc

SEQ ID NO: 1072164 - RNA, 19 nt, Artificial Sequence
  Description of Artificial Sequence: Synthetic oligonucleotide
  Sense strand starting at position 1483 of SEQ ID NO: 915336
cucugugaccuugagcaau

SEQ ID NO: 1072165 - RNA, 19 nt, Artificial Sequence
  Description of Artificial Sequence: Synthetic oligonucleotide
  Antisense strand to SEQ ID NO: 1072164
auugcucaaggucacagag

SEQ ID NO: 1072166 - RNA, 19 nt, Artificial Sequence
  Description of Artificial Sequence: Synthetic oligonucleotide
  Sense strand starting at position 1648 of SEQ ID NO: 915336
gcaucuuuagaaugaggaa

SEQ ID NO: 1072167 - RNA, 19 nt, Artificial Sequence
  Description of Artificial Sequence: Synthetic oligonucleotide
  Antisense strand to SEQ ID NO: 1072166
uuccucauucuaaagaugc

SEQ ID NO: 1072168 - RNA, 19 nt, Artificial Sequence
  Description of Artificial Sequence: Synthetic oligonucleotide
  Sense strand starting at position 1683 of SEQ ID NO: 915336
ucaauuacuguguaagggu

SEQ ID NO: 1072169 - RNA, 19 nt, Artificial Sequence
  Description of Artificial Sequence: Synthetic oligonucleotide
  Antisense strand to SEQ ID NO: 1072168
acccuuacacaguaauuga

SEQ ID NO: 1072170 - RNA, 19 nt, Artificial Sequence
  Description of Artificial Sequence: Synthetic oligonucleotide
  Sense strand starting at position 1769 of SEQ ID NO: 915336
aguucuaacggguaaucau

SEQ ID NO: 1072171 - RNA, 19 nt, Artificial Sequence
  Description of Artificial Sequence: Synthetic oligonucleotide
  Antisense strand to SEQ ID NO: 1072170
augauuacccguuagaacu

SEQ ID NO: 1072172 - RNA, 19 nt, Artificial Sequence
  Description of Artificial Sequence: Synthetic oligonucleotide
  Sense strand starting at position 1780 of SEQ ID NO: 915336
guaaucauucuauagguug

SEQ ID NO: 1072173 - RNA, 19 nt, Artificial Sequence
  Description of Artificial Sequence: Synthetic oligonucleotide
  Antisense strand to SEQ ID NO: 1072172
caaccuauagaaugauuac

SEQ ID NO: 1072174 - RNA, 19 nt, Artificial Sequence
  Description of Artificial Sequence: Synthetic oligonucleotide
  Sense strand starting at position 1785 of SEQ ID NO: 915336
cauucuauagguuggcaaa

SEQ ID NO: 1072175 - RNA, 19 nt, Artificial Sequence
  Description of Artificial Sequence: Synthetic oligonucleotide
  Antisense strand to SEQ ID NO: 1072174
uuugccaaccuauagaaug

SEQ ID NO: 1072176 - RNA, 19 nt, Artificial Sequence
  Description of Artificial Sequence: Synthetic oligonucleotide
  Sense strand starting at position 2860 of SEQ ID NO: 915336
uggagaaauuuaggacauc

SEQ ID NO: 1072177 - RNA, 19 nt, Artificial Sequence
  Description of Artificial Sequence: Synthetic oligonucleotide
  Antisense strand to SEQ ID NO: 1072176
gauguccuaaauuucucca

SEQ ID NO: 1072178 - RNA, 19 nt, Artificial Sequence
  Description of Artificial Sequence: Synthetic oligonucleotide
  Sense strand starting at position 3048 of SEQ ID NO: 915336
acguuacagcuuuaaggga

SEQ ID NO: 1072179 - RNA, 19 nt, Artificial Sequence
  Description of Artificial Sequence: Synthetic oligonucleotide
  Antisense strand to SEQ ID NO: 1072178
ucccuuaaagcuguaacgu

SEQ ID NO: 1072180 - RNA, 19 nt, Artificial Sequence
  Description of Artificial Sequence: Synthetic oligonucleotide
  Sense strand starting at position 3088 of SEQ ID NO: 915336
uggagauacuugccucaua

SEQ ID NO: 1072181 - RNA, 19 nt, Artificial Sequence
  Description of Artificial Sequence: Synthetic oligonucleotide
  Antisense strand to SEQ ID NO: 1072180
uaugaggcaaguaucucca

SEQ ID NO: 1072182 - RNA, 19 nt, Artificial Sequence
  Description of Artificial Sequence: Synthetic oligonucleotide
  Sense strand starting at position 3089 of SEQ ID NO: 915336
ggagauacuugccucauau

SEQ ID NO: 1072183 - RNA, 19 nt, Artificial Sequence
  Description of Artificial Sequence: Synthetic oligonucleotide
  Antisense strand to SEQ ID NO: 1072182
auaugaggcaaguaucucc

SEQ ID NO: 1072184 - RNA, 19 nt, Artificial Sequence
  Description of Artificial Sequence: Synthetic oligonucleotide
  Sense strand starting at position 3134 of SEQ ID NO: 915336
aauggugcucaugaaagca

SEQ ID NO: 1072185 - RNA, 19 nt, Artificial Sequence
  Description of Artificial Sequence: Synthetic oligonucleotide
  Antisense strand to SEQ ID NO: 1072184
ugcuuucaugagcaccauu

SEQ ID NO: 1072186 - RNA, 19 nt, Artificial Sequence
  Description of Artificial Sequence: Synthetic oligonucleotide
  Sense strand starting at position 3296 of SEQ ID NO: 915336
ugaucuuuccuguaccuca

SEQ ID NO: 1072187 - RNA, 19 nt, Artificial Sequence
  Description of Artificial Sequence: Synthetic oligonucleotide
  Antisense strand to SEQ ID NO: 1072186
ugagguacaggaaagauca

SEQ ID NO: 1072188 - RNA, 19 nt, Artificial Sequence
  Description of Artificial Sequence: Synthetic oligonucleotide
  Sense strand starting at position 3738 of SEQ ID NO: 915336
uuuacagaauuagugguau

SEQ ID NO: 1072189 - RNA, 19 nt, Artificial Sequence
  Description of Artificial Sequence: Synthetic oligonucleotide
  Antisense strand to SEQ ID NO: 1072188
auaccacuaauucuguaaa

SEQ ID NO: 1072190 - RNA, 19 nt, Artificial Sequence
  Description of Artificial Sequence: Synthetic oligonucleotide
  Sense strand starting at position 3772 of SEQ ID NO: 915336
uugaacugguucuugaaua

SEQ ID NO: 1072191 - RNA, 19 nt, Artificial Sequence
  Description of Artificial Sequence: Synthetic oligonucleotide
  Antisense strand to SEQ ID NO: 1072190
uauucaagaaccaguucaa

SEQ ID NO: 1072192 - RNA, 19 nt, Artificial Sequence
  Description of Artificial Sequence: Synthetic oligonucleotide
  Sense strand starting at position 3777 of SEQ ID NO: 915336
cugguucuugaauagguau

SEQ ID NO: 1072193 - RNA, 19 nt, Artificial Sequence
  Description of Artificial Sequence: Synthetic oligonucleotide
  Antisense strand to SEQ ID NO: 1072192
auaccuauucaagaaccag

SEQ ID NO: 1072194 - RNA, 19 nt, Artificial Sequence
  Description of Artificial Sequence: Synthetic oligonucleotide
  Sense strand starting at position 3783 of SEQ ID NO: 915336
cuugaauagguauacguuu

SEQ ID NO: 1072195 - RNA, 19 nt, Artificial Sequence
  Description of Artificial Sequence: Synthetic oligonucleotide
  Antisense strand to SEQ ID NO: 1072194
aaacguauaccuauucaag

SEQ ID NO: 1072196 - RNA, 19 nt, Artificial Sequence
  Description of Artificial Sequence: Synthetic oligonucleotide
  Sense strand starting at position 3796 of SEQ ID NO: 915336
acguuuaccagguaugaaa

SEQ ID NO: 1072197 - RNA, 19 nt, Artificial Sequence
  Description of Artificial Sequence: Synthetic oligonucleotide
  Antisense strand to SEQ ID NO: 1072196
uuucauaccugguaaacgu

SEQ ID NO: 1072198 - RNA, 19 nt, Artificial Sequence
  Description of Artificial Sequence: Synthetic oligonucleotide
  Sense strand starting at position 3798 of SEQ ID NO: 915336
guuuaccagguaugaaaua

SEQ ID NO: 1072199 - RNA, 19 nt, Artificial Sequence
  Description of Artificial Sequence: Synthetic oligonucleotide
  Antisense strand to SEQ ID NO: 1072198
uauuucauaccugguaaac

SEQ ID NO: 1072200 - RNA, 19 nt, Artificial Sequence
  Description of Artificial Sequence: Synthetic oligonucleotide
  Sense strand starting at position 3825 of SEQ ID NO: 915336
gauagacagcaucaugcau

SEQ ID NO: 1072201 - RNA, 19 nt, Artificial Sequence
  Description of Artificial Sequence: Synthetic oligonucleotide
  Antisense strand to SEQ ID NO: 1072200
augcaugaugcugucuauc

SEQ ID NO: 1072202 - RNA, 19 nt, Artificial Sequence
  Description of Artificial Sequence: Synthetic oligonucleotide
  Sense strand starting at position 3843 of SEQ ID NO: 915336
uuaauauggcaacgagaaa

SEQ ID NO: 1072203 - RNA, 19 nt, Artificial Sequence
  Description of Artificial Sequence: Synthetic oligonucleotide
  Antisense strand to SEQ ID NO: 1072202
uuucucguugccauauuaa

SEQ ID NO: 1072204 - RNA, 19 nt, Artificial Sequence
  Description of Artificial Sequence: Synthetic oligonucleotide
  Sense strand starting at position 3941 of SEQ ID NO: 915336
cucagugguaauuagaguu

SEQ ID NO: 1072205 - RNA, 19 nt, Artificial Sequence
  Description of Artificial Sequence: Synthetic oligonucleotide
  Antisense strand to SEQ ID NO: 1072204
aacucuaauuaccacugag

SEQ ID NO: 1072206 - RNA, 19 nt, Artificial Sequence
  Description of Artificial Sequence: Synthetic oligonucleotide
  Sense strand starting at position 3947 of SEQ ID NO: 915336
gguaauuagaguuggauug

SEQ ID NO: 1072207 - RNA, 19 nt, Artificial Sequence
  Description of Artificial Sequence: Synthetic oligonucleotide
  Antisense strand to SEQ ID NO: 1072206
caauccaacucuaauuacc

SEQ ID NO: 1072208 - RNA, 19 nt, Artificial Sequence
  Description of Artificial Sequence: Synthetic oligonucleotide
  Sense strand starting at position 3967 of SEQ ID NO: 915336
gauguuuggagcugagacu

SEQ ID NO: 1072209 - RNA, 19 nt, Artificial Sequence
  Description of Artificial Sequence: Synthetic oligonucleotide
  Antisense strand to SEQ ID NO: 1072208
agucucagcuccaaacauc

SEQ ID NO: 1072210 - RNA, 19 nt, Artificial Sequence
  Description of Artificial Sequence: Synthetic oligonucleotide
  Sense strand starting at position 27 of SEQ ID NO: 915337
acaaaucugcaaugguaau

SEQ ID NO: 1072211 - RNA, 19 nt, Artificial Sequence
  Description of Artificial Sequence: Synthetic oligonucleotide
  Antisense strand to SEQ ID NO: 1072210
auuaccauugcagauuugu

SEQ ID NO: 1072212 - RNA, 19 nt, Artificial Sequence
  Description of Artificial Sequence: Synthetic oligonucleotide
  Sense strand starting at position 72 of SEQ ID NO: 915337
aaguguuuaaagggagagu

SEQ ID NO: 1072213 - RNA, 19 nt, Artificial Sequence
  Description of Artificial Sequence: Synthetic oligonucleotide
  Antisense strand to SEQ ID NO: 1072212
acucucccuuuaaacacuu

SEQ ID NO: 1072214 - RNA, 19 nt, Artificial Sequence
  Description of Artificial Sequence: Synthetic oligonucleotide
  Sense strand starting at position 817 of SEQ ID NO: 915337
auaugaacucuguguuaua

SEQ ID NO: 1072215 - RNA, 19 nt, Artificial Sequence
  Description of Artificial Sequence: Synthetic oligonucleotide
  Antisense strand to SEQ ID NO: 1072214
uauaacacagaguucauau

SEQ ID NO: 1072216 - RNA, 19 nt, Artificial Sequence
  Description of Artificial Sequence: Synthetic oligonucleotide
  Sense strand starting at position 831 of SEQ ID NO: 915337
uuauacuaaguuugagaag

SEQ ID NO: 1072217 - RNA, 19 nt, Artificial Sequence
  Description of Artificial Sequence: Synthetic oligonucleotide
  Antisense strand to SEQ ID NO: 1072216
cuucucaaacuuaguauaa

SEQ ID NO: 1072218 - RNA, 19 nt, Artificial Sequence
  Description of Artificial Sequence: Synthetic oligonucleotide
  Sense strand starting at position 1021 of SEQ ID NO: 915337
ucccaaggauccuuugcua

SEQ ID NO: 1072219 - RNA, 19 nt, Artificial Sequence
  Description of Artificial Sequence: Synthetic oligonucleotide
  Antisense strand to SEQ ID NO: 1072218
uagcaaaggauccuuggga

SEQ ID NO: 1072220 - RNA, 19 nt, Artificial Sequence
  Description of Artificial Sequence: Synthetic oligonucleotide
  Sense strand starting at position 1036 of SEQ ID NO: 915337
gcuagcaaacuugaaacau

SEQ ID NO: 1072221 - RNA, 19 nt, Artificial Sequence
  Description of Artificial Sequence: Synthetic oligonucleotide
  Antisense strand to SEQ ID NO: 1072220
auguuucaaguuugcuagc

SEQ ID NO: 1072222 - RNA, 19 nt, Artificial Sequence
  Description of Artificial Sequence: Synthetic oligonucleotide
  Sense strand starting at position 1143 of SEQ ID NO: 915337
auccucagacuuuggagau

SEQ ID NO: 1072223 - RNA, 19 nt, Artificial Sequence
  Description of Artificial Sequence: Synthetic oligonucleotide
  Antisense strand to SEQ ID NO: 1072222
aucuccaaagucugaggau

SEQ ID NO: 1072224 - RNA, 19 nt, Artificial Sequence
  Description of Artificial Sequence: Synthetic oligonucleotide
  Sense strand starting at position 1153 of SEQ ID NO: 915337
uuuggagauaccuguagau

SEQ ID NO: 1072225 - RNA, 19 nt, Artificial Sequence
  Description of Artificial Sequence: Synthetic oligonucleotide
  Antisense strand to SEQ ID NO: 1072224
aucuacagguaucuccaaa

SEQ ID NO: 1072226 - RNA, 19 nt, Artificial Sequence
  Description of Artificial Sequence: Synthetic oligonucleotide
  Sense strand starting at position 1276 of SEQ ID NO: 915337
cugacuacuggacgauaga

SEQ ID NO: 1072227 - RNA, 19 nt, Artificial Sequence
  Description of Artificial Sequence: Synthetic oligonucleotide
  Antisense strand to SEQ ID NO: 1072226
ucuaucguccaguagucag

SEQ ID NO: 1072228 - RNA, 19 nt, Artificial Sequence
  Description of Artificial Sequence: Synthetic oligonucleotide
  Sense strand starting at position 1287 of SEQ ID NO: 915337
acgauagauagguaagcuu

SEQ ID NO: 1072229 - RNA, 19 nt, Artificial Sequence
  Description of Artificial Sequence: Synthetic oligonucleotide
  Antisense strand to SEQ ID NO: 1072228
aagcuuaccuaucuaucgu

SEQ ID NO: 1072230 - RNA, 19 nt, Artificial Sequence
  Description of Artificial Sequence: Synthetic oligonucleotide
  Sense strand starting at position 1301 of SEQ ID NO: 915337
agcuuccuuguggaugaaa

SEQ ID NO: 1072231 - RNA, 19 nt, Artificial Sequence
  Description of Artificial Sequence: Synthetic oligonucleotide
  Antisense strand to SEQ ID NO: 1072230
uuucauccacaaggaagcu

SEQ ID NO: 1072232 - RNA, 19 nt, Artificial Sequence
  Description of Artificial Sequence: Synthetic oligonucleotide
  Sense strand starting at position 1327 of SEQ ID NO: 915337
gcaggugucaaaggauaug

SEQ ID NO: 1072233 - RNA, 19 nt, Artificial Sequence
  Description of Artificial Sequence: Synthetic oligonucleotide
  Antisense strand to SEQ ID NO: 1072232
cauauccuuugacaccugc

SEQ ID NO: 1072234 - RNA, 19 nt, Artificial Sequence
  Description of Artificial Sequence: Synthetic oligonucleotide
  Sense strand starting at position 1351 of SEQ ID NO: 915337
uauggagauugucccggaa

SEQ ID NO: 1072235 - RNA, 19 nt, Artificial Sequence
  Description of Artificial Sequence: Synthetic oligonucleotide
  Antisense strand to SEQ ID NO: 1072234
uuccgggacaaucuccaua

SEQ ID NO: 1072236 - RNA, 19 nt, Artificial Sequence
  Description of Artificial Sequence: Synthetic oligonucleotide
  Sense strand starting at position 1354 of SEQ ID NO: 915337
ggagauugucccggaagac

SEQ ID NO: 1072237 - RNA, 19 nt, Artificial Sequence
  Description of Artificial Sequence: Synthetic oligonucleotide
  Antisense strand to SEQ ID NO: 1072236
gucuuccgggacaaucucc

SEQ ID NO: 1072238 - RNA, 19 nt, Artificial Sequence
  Description of Artificial Sequence: Synthetic oligonucleotide
  Sense strand starting at position 1355 of SEQ ID NO: 915337
gagauugucccggaagacu

SEQ ID NO: 1072239 - RNA, 19 nt, Artificial Sequence
  Description of Artificial Sequence: Synthetic oligonucleotide
  Antisense strand to SEQ ID NO: 1072238
agucuuccgggacaaucuc

SEQ ID NO: 1072240 - RNA, 19 nt, Artificial Sequence
  Description of Artificial Sequence: Synthetic oligonucleotide
  Sense strand starting at position 1378 of SEQ ID NO: 915337
uauauagguucuguagaug

SEQ ID NO: 1072241 - RNA, 19 nt, Artificial Sequence
  Description of Artificial Sequence: Synthetic oligonucleotide
  Antisense strand to SEQ ID NO: 1072240
caucuacagaaccuauaua

SEQ ID NO: 1072242 - RNA, 19 nt, Artificial Sequence
  Description of Artificial Sequence: Synthetic oligonucleotide
  Sense strand starting at position 1441 of SEQ ID NO: 915337
uguuuacuguaaguagaag

SEQ ID NO: 1072243 - RNA, 19 nt, Artificial Sequence
  Description of Artificial Sequence: Synthetic oligonucleotide
  Antisense strand to SEQ ID NO: 1072242
cuucuacuuacaguaaaca

SEQ ID NO: 1072244 - RNA, 19 nt, Artificial Sequence
  Description of Artificial Sequence: Synthetic oligonucleotide
  Sense strand starting at position 1519 of SEQ ID NO: 915337
cucugaauaguaggucuaa

SEQ ID NO: 1072245 - RNA, 19 nt, Artificial Sequence
  Description of Artificial Sequence: Synthetic oligonucleotide
  Antisense strand to SEQ ID NO: 1072244
uuagaccuacuauucagag

SEQ ID NO: 1072246 - RNA, 19 nt, Artificial Sequence
  Description of Artificial Sequence: Synthetic oligonucleotide
  Sense strand starting at position 1520 of SEQ ID NO: 915337
ucugaauaguaggucuaaa

SEQ ID NO: 1072247 - RNA, 19 nt, Artificial Sequence
  Description of Artificial Sequence: Synthetic oligonucleotide
  Antisense strand to SEQ ID NO: 1072246
uuuagaccuacuauucaga

SEQ ID NO: 1072248 - RNA, 19 nt, Artificial Sequence
  Description of Artificial Sequence: Synthetic oligonucleotide
  Sense strand starting at position 1561 of SEQ ID NO: 915337
gggcucagaauaggaguaa

SEQ ID NO: 1072249 - RNA, 19 nt, Artificial Sequence
  Description of Artificial Sequence: Synthetic oligonucleotide
  Antisense strand to SEQ ID NO: 1072248
uuacuccuauucugagccc

SEQ ID NO: 1072250 - RNA, 19 nt, Artificial Sequence
  Description of Artificial Sequence: Synthetic oligonucleotide
  Sense strand starting at position 1570 of SEQ ID NO: 915337
auaggaguaacugguaaua

SEQ ID NO: 1072251 - RNA, 19 nt, Artificial Sequence
  Description of Artificial Sequence: Synthetic oligonucleotide
  Antisense strand to SEQ ID NO: 1072250
uauuaccaguuacuccuau

SEQ ID NO: 1072252 - RNA, 19 nt, Artificial Sequence
  Description of Artificial Sequence: Synthetic oligonucleotide
  Sense strand starting at position 1611 of SEQ ID NO: 915337
acugucauccagcaauagu

SEQ ID NO: 1072253 - RNA, 19 nt, Artificial Sequence
  Description of Artificial Sequence: Synthetic oligonucleotide
  Antisense strand to SEQ ID NO: 1072252
acuauugcuggaugacagu

SEQ ID NO: 1072254 - RNA, 19 nt, Artificial Sequence
  Description of Artificial Sequence: Synthetic oligonucleotide
  Sense strand starting at position 1926 of SEQ ID NO: 915337
cugagccauguccacuaaa

SEQ ID NO: 1072255 - RNA, 19 nt, Artificial Sequence
  Description of Artificial Sequence: Synthetic oligonucleotide
  Antisense strand to SEQ ID NO: 1072254
uuuaguggacauggcucag

SEQ ID NO: 1072256 - RNA, 19 nt, Artificial Sequence
  Description of Artificial Sequence: Synthetic oligonucleotide
  Sense strand starting at position 2069 of SEQ ID NO: 915337
cccauaugacuuuggacuu

SEQ ID NO: 1072257 - RNA, 19 nt, Artificial Sequence
  Description of Artificial Sequence: Synthetic oligonucleotide
  Antisense strand to SEQ ID NO: 1072256
aaguccaaagucauauggg

SEQ ID NO: 1072258 - RNA, 19 nt, Artificial Sequence
  Description of Artificial Sequence: Synthetic oligonucleotide
  Sense strand starting at position 2305 of SEQ ID NO: 915337
guacuucuggcagaauucu

SEQ ID NO: 1072259 - RNA, 19 nt, Artificial Sequence
  Description of Artificial Sequence: Synthetic oligonucleotide
  Antisense strand to SEQ ID NO: 1072258
agaauucugccagaaguac

SEQ ID NO: 1072260 - RNA, 19 nt, Artificial Sequence
  Description of Artificial Sequence: Synthetic oligonucleotide
  Sense strand starting at position 2314 of SEQ ID NO: 915337
gcagaauucuuagcaugaa

SEQ ID NO: 1072261 - RNA, 19 nt, Artificial Sequence
  Description of Artificial Sequence: Synthetic oligonucleotide
  Antisense strand to SEQ ID NO: 1072260
uucaugcuaagaauucugc

SEQ ID NO: 1072262 - RNA, 19 nt, Artificial Sequence
  Description of Artificial Sequence: Synthetic oligonucleotide
  Sense strand starting at position 2599 of SEQ ID NO: 915337
aguguuaaggcuuauuaga

SEQ ID NO: 1072263 - RNA, 19 nt, Artificial Sequence
  Description of Artificial Sequence: Synthetic oligonucleotide
  Antisense strand to SEQ ID NO: 1072262
ucuaauaagccuuaacacu

SEQ ID NO: 1072264 - RNA, 19 nt, Artificial Sequence
  Description of Artificial Sequence: Synthetic oligonucleotide
  Sense strand starting at position 2601 of SEQ ID NO: 915337
uguuaaggcuuauuagaag

SEQ ID NO: 1072265 - RNA, 19 nt, Artificial Sequence
  Description of Artificial Sequence: Synthetic oligonucleotide
  Antisense strand to SEQ ID NO: 1072264
cuucuaauaagccuuaaca

SEQ ID NO: 1072266 - RNA, 19 nt, Artificial Sequence
  Description of Artificial Sequence: Synthetic oligonucleotide
  Sense strand starting at position 2655 of SEQ ID NO: 915337
agcugaauuggccauauag

SEQ ID NO: 1072267 - RNA, 19 nt, Artificial Sequence
  Description of Artificial Sequence: Synthetic oligonucleotide
  Antisense strand to SEQ ID NO: 1072266
cuauauggccaauucagcu

SEQ ID NO: 1072268 - RNA, 19 nt, Artificial Sequence
  Description of Artificial Sequence: Synthetic oligonucleotide
  Sense strand starting at position 2657 of SEQ ID NO: 915337
cugaauuggccauauaguu

SEQ ID NO: 1072269 - RNA, 19 nt, Artificial Sequence
  Description of Artificial Sequence: Synthetic oligonucleotide
  Antisense strand to SEQ ID NO: 1072268
aacuauauggccaauucag

SEQ ID NO: 1072270 - RNA, 19 nt, Artificial Sequence
  Description of Artificial Sequence: Synthetic oligonucleotide
  Sense strand starting at position 2692 of SEQ ID NO: 915337
ucugauucucugcaguuaa

SEQ ID NO: 1072271 - RNA, 19 nt, Artificial Sequence
  Description of Artificial Sequence: Synthetic oligonucleotide
  Antisense strand to SEQ ID NO: 1072270
uuaacugcagagaaucaga

SEQ ID NO: 1072272 - RNA, 19 nt, Artificial Sequence
  Description of Artificial Sequence: Synthetic oligonucleotide
  Sense strand starting at position 2861 of SEQ ID NO: 915337
gaccaagauuacccuguga

SEQ ID NO: 1072273 - RNA, 19 nt, Artificial Sequence
  Description of Artificial Sequence: Synthetic oligonucleotide
  Antisense strand to SEQ ID NO: 1072272
ucacaggguaaucuugguc

SEQ ID NO: 1072274 - RNA, 19 nt, Artificial Sequence
  Description of Artificial Sequence: Synthetic oligonucleotide
  Sense strand starting at position 2863 of SEQ ID NO: 915337
ccaagauuacccugugaag

SEQ ID NO: 1072275 - RNA, 19 nt, Artificial Sequence
  Description of Artificial Sequence: Synthetic oligonucleotide
  Antisense strand to SEQ ID NO: 1072274
cuucacaggguaaucuugg

SEQ ID NO: 1072276 - RNA, 19 nt, Artificial Sequence
  Description of Artificial Sequence: Synthetic oligonucleotide
  Sense strand starting at position 2981 of SEQ ID NO: 915337
gucacaucaccuuaguuua

SEQ ID NO: 1072277 - RNA, 19 nt, Artificial Sequence
  Description of Artificial Sequence: Synthetic oligonucleotide
  Antisense strand to SEQ ID NO: 1072276
uaaacuaaggugaugugac

SEQ ID NO: 1072278 - RNA, 19 nt, Artificial Sequence
  Description of Artificial Sequence: Synthetic oligonucleotide
  Sense strand starting at position 3482 of SEQ ID NO: 915337
aaucuaaucugguuuguga

SEQ ID NO: 1072279 - RNA, 19 nt, Artificial Sequence
  Description of Artificial Sequence: Synthetic oligonucleotide
  Antisense strand to SEQ ID NO: 1072278
ucacaaaccagauuagauu

SEQ ID NO: 1072280 - RNA, 19 nt, Artificial Sequence
  Description of Artificial Sequence: Synthetic oligonucleotide
  Sense strand starting at position 3586 of SEQ ID NO: 915337
accguauaugcucaauaua

SEQ ID NO: 1072281 - RNA, 19 nt, Artificial Sequence
  Description of Artificial Sequence: Synthetic oligonucleotide
  Antisense strand to SEQ ID NO: 1072280
uauauugagcauauacggu

SEQ ID NO: 1072282 - RNA, 19 nt, Artificial Sequence
  Description of Artificial Sequence: Synthetic oligonucleotide
  Sense strand starting at position 3669 of SEQ ID NO: 915337
auccuaaguguugagguaa

SEQ ID NO: 1072283 - RNA, 19 nt, Artificial Sequence
  Description of Artificial Sequence: Synthetic oligonucleotide
  Antisense strand to SEQ ID NO: 1072282
uuaccucaacacuuaggau

SEQ ID NO: 1072284 - RNA, 19 nt, Artificial Sequence
  Description of Artificial Sequence: Synthetic oligonucleotide
  Sense strand starting at position 3743 of SEQ ID NO: 915337
aagaauguccuuggaaugu

SEQ ID NO: 1072285 - RNA, 19 nt, Artificial Sequence
  Description of Artificial Sequence: Synthetic oligonucleotide
  Antisense strand to SEQ ID NO: 1072284
acauuccaaggacauucuu

SEQ ID NO: 1072286 - RNA, 19 nt, Artificial Sequence
  Description of Artificial Sequence: Synthetic oligonucleotide
  Sense strand starting at position 3942 of SEQ ID NO: 915337
aguacuaaugucuacaauu

SEQ ID NO: 1072287 - RNA, 19 nt, Artificial Sequence
  Description of Artificial Sequence: Synthetic oligonucleotide
  Antisense strand to SEQ ID NO: 1072286
aauuguagacauuaguacu

SEQ ID NO: 1072288 - RNA, 19 nt, Artificial Sequence
  Description of Artificial Sequence: Synthetic oligonucleotide
  Sense strand starting at position 3967 of SEQ ID NO: 915337
guuguucuugucguuuaga

SEQ ID NO: 1072289 - RNA, 19 nt, Artificial Sequence
  Description of Artificial Sequence: Synthetic oligonucleotide
  Antisense strand to SEQ ID NO: 1072288
ucuaaacgacaagaacaac

SEQ ID NO: 1072290 - RNA, 19 nt, Artificial Sequence
  Description of Artificial Sequence: Synthetic oligonucleotide
  Sense strand starting at position 166 of SEQ ID NO: 915338
gggcccucuugcuuuauga

SEQ ID NO: 1072291 - RNA, 19 nt, Artificial Sequence
  Description of Artificial Sequence: Synthetic oligonucleotide
  Antisense strand to SEQ ID NO: 1072290
ucauaaagcaagagggccc

SEQ ID NO: 1072292 - RNA, 19 nt, Artificial Sequence
  Description of Artificial Sequence: Synthetic oligonucleotide
  Sense strand starting at position 168 of SEQ ID NO: 915338
gcccucuugcuuuaugaga

SEQ ID NO: 1072293 - RNA, 19 nt, Artificial Sequence
  Description of Artificial Sequence: Synthetic oligonucleotide
  Antisense strand to SEQ ID NO: 1072292
ucucauaaagcaagagggc

SEQ ID NO: 1072294 - RNA, 19 nt, Artificial Sequence
  Description of Artificial Sequence: Synthetic oligonucleotide
  Sense strand starting at position 170 of SEQ ID NO: 915338
ccucuugcuuuaugagauu

SEQ ID NO: 1072295 - RNA, 19 nt, Artificial Sequence
  Description of Artificial Sequence: Synthetic oligonucleotide
  Antisense strand to SEQ ID NO: 1072294
aaucucauaaagcaagagg

SEQ ID NO: 1072296 - RNA, 19 nt, Artificial Sequence
  Description of Artificial Sequence: Synthetic oligonucleotide
  Sense strand starting at position 181 of SEQ ID NO: 915338
augagauucugguccugcu

SEQ ID NO: 1072297 - RNA, 19 nt, Artificial Sequence
  Description of Artificial Sequence: Synthetic oligonucleotide
  Antisense strand to SEQ ID NO: 1072296
agcaggaccagaaucucau

SEQ ID NO: 1072298 - RNA, 19 nt, Artificial Sequence
  Description of Artificial Sequence: Synthetic oligonucleotide
  Sense strand starting at position 497 of SEQ ID NO: 915338
uacagauccugaggaggau

SEQ ID NO: 1072299 - RNA, 19 nt, Artificial Sequence
  Description of Artificial Sequence: Synthetic oligonucleotide
  Antisense strand to SEQ ID NO: 1072298
auccuccucaggaucugua

SEQ ID NO: 1072300 - RNA, 19 nt, Artificial Sequence
  Description of Artificial Sequence: Synthetic oligonucleotide
  Sense strand starting at position 780 of SEQ ID NO: 915338
agcagaaugugguauuccu

SEQ ID NO: 1072301 - RNA, 19 nt, Artificial Sequence
  Description of Artificial Sequence: Synthetic oligonucleotide
  Antisense strand to SEQ ID NO: 1072300
aggaauaccacauucugcu

SEQ ID NO: 1072302 - RNA, 19 nt, Artificial Sequence
  Description of Artificial Sequence: Synthetic oligonucleotide
  Sense strand starting at position 787 of SEQ ID NO: 915338
ugugguauuccuugaugag

SEQ ID NO: 1072303 - RNA, 19 nt, Artificial Sequence
  Description of Artificial Sequence: Synthetic oligonucleotide
  Antisense strand to SEQ ID NO: 1072302
cucaucaaggaauaccaca

SEQ ID NO: 1072304 - RNA, 19 nt, Artificial Sequence
  Description of Artificial Sequence: Synthetic oligonucleotide
  Sense strand starting at position 788 of SEQ ID NO: 915338
gugguauuccuugaugagc

SEQ ID NO: 1072305 - RNA, 19 nt, Artificial Sequence
  Description of Artificial Sequence: Synthetic oligonucleotide
  Antisense strand to SEQ ID NO: 1072304
gcucaucaaggaauaccac

SEQ ID NO: 1072306 - RNA, 19 nt, Artificial Sequence
  Description of Artificial Sequence: Synthetic oligonucleotide
  Sense strand starting at position 790 of SEQ ID NO: 915338
gguauuccuugaugagcau

SEQ ID NO: 1072307 - RNA, 19 nt, Artificial Sequence
  Description of Artificial Sequence: Synthetic oligonucleotide
  Antisense strand to SEQ ID NO: 1072306
augcucaucaaggaauacc

SEQ ID NO: 1072308 - RNA, 19 nt, Artificial Sequence
  Description of Artificial Sequence: Synthetic oligonucleotide
  Sense strand starting at position 2257 of SEQ ID NO: 915338
gucacagggugguuugaua

SEQ ID NO: 1072309 - RNA, 19 nt, Artificial Sequence
  Description of Artificial Sequence: Synthetic oligonucleotide
  Antisense strand to SEQ ID NO: 1072308
uaucaaaccacccugugac

SEQ ID NO: 1072310 - RNA, 19 nt, Artificial Sequence
  Description of Artificial Sequence: Synthetic oligonucleotide
  Sense strand starting at position 2711 of SEQ ID NO: 915338
ugcccuuucucucugagaa

SEQ ID NO: 1072311 - RNA, 19 nt, Artificial Sequence
  Description of Artificial Sequence: Synthetic oligonucleotide
  Antisense strand to SEQ ID NO: 1072310
uucucagagagaaagggca

SEQ ID NO: 1072312 - RNA, 19 nt, Artificial Sequence
  Description of Artificial Sequence: Synthetic oligonucleotide
  Sense strand starting at position 2712 of SEQ ID NO: 915338
gcccuuucucucugagaag

SEQ ID NO: 1072313 - RNA, 19 nt, Artificial Sequence
  Description of Artificial Sequence: Synthetic oligonucleotide
  Antisense strand to SEQ ID NO: 1072312
cuucucagagagaaagggc

SEQ ID NO: 1072314 - RNA, 19 nt, Artificial Sequence
  Description of Artificial Sequence: Synthetic oligonucleotide
  Sense strand starting at position 2713 of SEQ ID NO: 915338
cccuuucucucugagaagu

SEQ ID NO: 1072315 - RNA, 19 nt, Artificial Sequence
  Description of Artificial Sequence: Synthetic oligonucleotide
  Antisense strand to SEQ ID NO: 1072314
acuucucagagagaaaggg

SEQ ID NO: 1072316 - RNA, 19 nt, Artificial Sequence
  Description of Artificial Sequence: Synthetic oligonucleotide
  Sense strand starting at position 2715 of SEQ ID NO: 915338
cuuucucucugagaaguca

SEQ ID NO: 1072317 - RNA, 19 nt, Artificial Sequence
  Description of Artificial Sequence: Synthetic oligonucleotide
  Antisense strand to SEQ ID NO: 1072316
ugacuucucagagagaaag

SEQ ID NO: 1072318 - RNA, 19 nt, Artificial Sequence
  Description of Artificial Sequence: Synthetic oligonucleotide
  Sense strand starting at position 2762 of SEQ ID NO: 915338
ggguguugucagggcauua

SEQ ID NO: 1072319 - RNA, 19 nt, Artificial Sequence
  Description of Artificial Sequence: Synthetic oligonucleotide
  Antisense strand to SEQ ID NO: 1072318
uaaugcccugacaacaccc

SEQ ID NO: 1072320 - RNA, 19 nt, Artificial Sequence
  Description of Artificial Sequence: Synthetic oligonucleotide
  Sense strand starting at position 3486 of SEQ ID NO: 915338
uagugcaacucgggaugaa

SEQ ID NO: 1072321 - RNA, 19 nt, Artificial Sequence
  Description of Artificial Sequence: Synthetic oligonucleotide
  Antisense strand to SEQ ID NO: 1072320
uucaucccgaguugcacua

SEQ ID NO: 1072322 - RNA, 19 nt, Artificial Sequence
  Description of Artificial Sequence: Synthetic oligonucleotide
  Sense strand starting at position 3748 of SEQ ID NO: 915338
aaaucuaaugacggcuaga

SEQ ID NO: 1072323 - RNA, 19 nt, Artificial Sequence
  Description of Artificial Sequence: Synthetic oligonucleotide
  Antisense strand to SEQ ID NO: 1072322
ucuagccgucauuagauuu

SEQ ID NO: 1072324 - RNA, 19 nt, Artificial Sequence
  Description of Artificial Sequence: Synthetic oligonucleotide
  Sense strand starting at position 3751 of SEQ ID NO: 915338
ucuaaugacggcuagauga

SEQ ID NO: 1072325 - RNA, 19 nt, Artificial Sequence
  Description of Artificial Sequence: Synthetic oligonucleotide
  Antisense strand to SEQ ID NO: 1072324
ucaucuagccgucauuaga

SEQ ID NO: 1072326 - RNA, 19 nt, Artificial Sequence
  Description of Artificial Sequence: Synthetic oligonucleotide
  Sense strand starting at position 3769 of SEQ ID NO: 915338
aaauuagagguuugguuaa

SEQ ID NO: 1072327 - RNA, 19 nt, Artificial Sequence
  Description of Artificial Sequence: Synthetic oligonucleotide
  Antisense strand to SEQ ID NO: 1072326
uuaaccaaaccucuaauuu

SEQ ID NO: 1072328 - RNA, 19 nt, Artificial Sequence
  Description of Artificial Sequence: Synthetic oligonucleotide
  Sense strand starting at position 3771 of SEQ ID NO: 915338
auuagagguuugguuaauc

SEQ ID NO: 1072329 - RNA, 19 nt, Artificial Sequence
  Description of Artificial Sequence: Synthetic oligonucleotide
  Antisense strand to SEQ ID NO: 1072328
gauuaaccaaaccucuaau

SEQ ID NO: 1072330 - RNA, 19 nt, Artificial Sequence
  Description of Artificial Sequence: Synthetic oligonucleotide
  Sense strand starting at position 3776 of SEQ ID NO: 915338
agguuugguuaauccucaa

SEQ ID NO: 1072331 - RNA, 19 nt, Artificial Sequence
  Description of Artificial Sequence: Synthetic oligonucleotide
  Antisense strand to SEQ ID NO: 1072330
uugaggauuaaccaaaccu

SEQ ID NO: 1072332 - RNA, 19 nt, Artificial Sequence
  Description of Artificial Sequence: Synthetic oligonucleotide
  Sense strand starting at position 3779 of SEQ ID NO: 915338
uuugguuaauccucaaggu

SEQ ID NO: 1072333 - RNA, 19 nt, Artificial Sequence
  Description of Artificial Sequence: Synthetic oligonucleotide
  Antisense strand to SEQ ID NO: 1072332
accuugaggauuaaccaaa

SEQ ID NO: 1072334 - RNA, 19 nt, Artificial Sequence
  Description of Artificial Sequence: Synthetic oligonucleotide
  Sense strand starting at position 3820 of SEQ ID NO: 915338
ccaugcucuucccuggaaa

SEQ ID NO: 1072335 - RNA, 19 nt, Artificial Sequence
  Description of Artificial Sequence: Synthetic oligonucleotide
  Antisense strand to SEQ ID NO: 1072334
uuuccagggaagagcaugg

SEQ ID NO: 1072336 - RNA, 19 nt, Artificial Sequence
  Description of Artificial Sequence: Synthetic oligonucleotide
  Sense strand starting at position 3865 of SEQ ID NO: 915338
acaccucucugguaguaau

SEQ ID NO: 1072337 - RNA, 19 nt, Artificial Sequence
  Description of Artificial Sequence: Synthetic oligonucleotide
  Antisense strand to SEQ ID NO: 1072336
auuacuaccagagaggugu

SEQ ID NO: 1072338 - RNA, 19 nt, Artificial Sequence
  Description of Artificial Sequence: Synthetic oligonucleotide
  Sense strand starting at position 3868 of SEQ ID NO: 915338
ccucucugguaguaauacu

SEQ ID NO: 1072339 - RNA, 19 nt, Artificial Sequence
  Description of Artificial Sequence: Synthetic oligonucleotide
  Antisense strand to SEQ ID NO: 1072338
aguauuacuaccagagagg

SEQ ID NO: 1072340 - RNA, 19 nt, Artificial Sequence
  Description of Artificial Sequence: Synthetic oligonucleotide
  Sense strand starting at position 3875 of SEQ ID NO: 915338
gguaguaauacuggacauc

SEQ ID NO: 1072341 - RNA, 19 nt, Artificial Sequence
  Description of Artificial Sequence: Synthetic oligonucleotide
  Antisense strand to SEQ ID NO: 1072340
gauguccaguauuacuacc

SEQ ID NO: 1072342 - RNA, 19 nt, Artificial Sequence
  Description of Artificial Sequence: Synthetic oligonucleotide
  Sense strand starting at position 50 of SEQ ID NO: 915339
cuaauuauccaucgaugga

SEQ ID NO: 1072343 - RNA, 19 nt, Artificial Sequence
  Description of Artificial Sequence: Synthetic oligonucleotide
  Antisense strand to SEQ ID NO: 1072342
uccaucgauggauaauuag

SEQ ID NO: 1072344 - RNA, 19 nt, Artificial Sequence
  Description of Artificial Sequence: Synthetic oligonucleotide
  Sense strand starting at position 119 of SEQ ID NO: 915339
cguacaagugcagauaaau

SEQ ID NO: 1072345 - RNA, 19 nt, Artificial Sequence
  Description of Artificial Sequence: Synthetic oligonucleotide
  Antisense strand to SEQ ID NO: 1072344
auuuaucugcacuuguacg

SEQ ID NO: 1072346 - RNA, 19 nt, Artificial Sequence
  Description of Artificial Sequence: Synthetic oligonucleotide
  Sense strand starting at position 194 of SEQ ID NO: 915339
aucaaaugguauucguaua

SEQ ID NO: 1072347 - RNA, 19 nt, Artificial Sequence
  Description of Artificial Sequence: Synthetic oligonucleotide
  Antisense strand to SEQ ID NO: 1072346
uauacgaauaccauuugau

SEQ ID NO: 1072348 - RNA, 19 nt, Artificial Sequence
  Description of Artificial Sequence: Synthetic oligonucleotide
  Sense strand starting at position 199 of SEQ ID NO: 915339
augguauucguauauaaca

SEQ ID NO: 1072349 - RNA, 19 nt, Artificial Sequence
  Description of Artificial Sequence: Synthetic oligonucleotide
  Antisense strand to SEQ ID NO: 1072348
uguuauauacgaauaccau

SEQ ID NO: 1072350 - RNA, 19 nt, Artificial Sequence
  Description of Artificial Sequence: Synthetic oligonucleotide
  Sense strand starting at position 283 of SEQ ID NO: 915339
uccuaauaucuauggaguc

SEQ ID NO: 1072351 - RNA, 19 nt, Artificial Sequence
  Description of Artificial Sequence: Synthetic oligonucleotide
  Antisense strand to SEQ ID NO: 1072350
gacuccauagauauuagga

SEQ ID NO: 1072352 - RNA, 19 nt, Artificial Sequence
  Description of Artificial Sequence: Synthetic oligonucleotide
  Sense strand starting at position 295 of SEQ ID NO: 915339
uggagucccgucuaccaaa

SEQ ID NO: 1072353 - RNA, 19 nt, Artificial Sequence
  Description of Artificial Sequence: Synthetic oligonucleotide
  Antisense strand to SEQ ID NO: 1072352
uuugguagacgggacucca

SEQ ID NO: 1072354 - RNA, 19 nt, Artificial Sequence
  Description of Artificial Sequence: Synthetic oligonucleotide
  Sense strand starting at position 391 of SEQ ID NO: 915339
aggaaaucaggaugugcaa

SEQ ID NO: 1072355 - RNA, 19 nt, Artificial Sequence
  Description of Artificial Sequence: Synthetic oligonucleotide
  Antisense strand to SEQ ID NO: 1072354
uugcacauccugauuuccu

SEQ ID NO: 1072356 - RNA, 19 nt, Artificial Sequence
  Description of Artificial Sequence: Synthetic oligonucleotide
  Sense strand starting at position 566 of SEQ ID NO: 915339
ucaacagaucuaggcuaaa

SEQ ID NO: 1072357 - RNA, 19 nt, Artificial Sequence
  Description of Artificial Sequence: Synthetic oligonucleotide
  Antisense strand to SEQ ID NO: 1072356
uuuagccuagaucuguuga

SEQ ID NO: 1072358 - RNA, 19 nt, Artificial Sequence
  Description of Artificial Sequence: Synthetic oligonucleotide
  Sense strand starting at position 608 of SEQ ID NO: 915339
gauuuacaaugguaaguca

SEQ ID NO: 1072359 - RNA, 19 nt, Artificial Sequence
  Description of Artificial Sequence: Synthetic oligonucleotide
  Antisense strand to SEQ ID NO: 1072358
ugacuuaccauuguaaauc

SEQ ID NO: 1072360 - RNA, 19 nt, Artificial Sequence
  Description of Artificial Sequence: Synthetic oligonucleotide
  Sense strand starting at position 653 of SEQ ID NO: 915339
gugucaggucuuuagauua

SEQ ID NO: 1072361 - RNA, 19 nt, Artificial Sequence
  Description of Artificial Sequence: Synthetic oligonucleotide
  Antisense strand to SEQ ID NO: 1072360
uaaucuaaagaccugacac

SEQ ID NO: 1072362 - RNA, 19 nt, Artificial Sequence
  Description of Artificial Sequence: Synthetic oligonucleotide
  Sense strand starting at position 660 of SEQ ID NO: 915339
gucuuuagauuaccaugaa

SEQ ID NO: 1072363 - RNA, 19 nt, Artificial Sequence
  Description of Artificial Sequence: Synthetic oligonucleotide
  Antisense strand to SEQ ID NO: 1072362
uucaugguaaucuaaagac

SEQ ID NO: 1072364 - RNA, 19 nt, Artificial Sequence
  Description of Artificial Sequence: Synthetic oligonucleotide
  Sense strand starting at position 812 of SEQ ID NO: 915339
gauauagcuggagguguaa

SEQ ID NO: 1072365 - RNA, 19 nt, Artificial Sequence
  Description of Artificial Sequence: Synthetic oligonucleotide
  Antisense strand to SEQ ID NO: 1072364
uuacaccuccagcuauauc

SEQ ID NO: 1072366 - RNA, 19 nt, Artificial Sequence
  Description of Artificial Sequence: Synthetic oligonucleotide
  Sense strand starting at position 895 of SEQ ID NO: 915339
uggaccucaugcuuccaua

SEQ ID NO: 1072367 - RNA, 19 nt, Artificial Sequence
  Description of Artificial Sequence: Synthetic oligonucleotide
  Antisense strand to SEQ ID NO: 1072366
uauggaagcaugaggucca

SEQ ID NO: 1072368 - RNA, 19 nt, Artificial Sequence
  Description of Artificial Sequence: Synthetic oligonucleotide
  Sense strand starting at position 1156 of SEQ ID NO: 915339
uuuggauacuugcuccaaa

SEQ ID NO: 1072369 - RNA, 19 nt, Artificial Sequence
  Description of Artificial Sequence: Synthetic oligonucleotide
  Antisense strand to SEQ ID NO: 1072368
uuuggagcaaguauccaaa

SEQ ID NO: 1072370 - RNA, 19 nt, Artificial Sequence
  Description of Artificial Sequence: Synthetic oligonucleotide
  Sense strand starting at position 1157 of SEQ ID NO: 915339
uuggauacuugcuccaaau

SEQ ID NO: 1072371 - RNA, 19 nt, Artificial Sequence
  Description of Artificial Sequence: Synthetic oligonucleotide
  Antisense strand to SEQ ID NO: 1072370
auuuggagcaaguauccaa

SEQ ID NO: 1072372 - RNA, 19 nt, Artificial Sequence
  Description of Artificial Sequence: Synthetic oligonucleotide
  Sense strand starting at position 1256 of SEQ ID NO: 915339
aggagcuuucucuauagug

SEQ ID NO: 1072373 - RNA, 19 nt, Artificial Sequence
  Description of Artificial Sequence: Synthetic oligonucleotide
  Antisense strand to SEQ ID NO: 1072372
cacuauagagaaagcuccu

SEQ ID NO: 1072374 - RNA, 19 nt, Artificial Sequence
  Description of Artificial Sequence: Synthetic oligonucleotide
  Sense strand starting at position 1268 of SEQ ID NO: 915339
uauagugguugcucaagaa

SEQ ID NO: 1072375 - RNA, 19 nt, Artificial Sequence
  Description of Artificial Sequence: Synthetic oligonucleotide
  Antisense strand to SEQ ID NO: 1072374
uucuugagcaaccacuaua

SEQ ID NO: 1072376 - RNA, 19 nt, Artificial Sequence
  Description of Artificial Sequence: Synthetic oligonucleotide
  Sense strand starting at position 1287 of SEQ ID NO: 915339
acaguaguuuaaucuaaac

SEQ ID NO: 1072377 - RNA, 19 nt, Artificial Sequence
  Description of Artificial Sequence: Synthetic oligonucleotide
  Antisense strand to SEQ ID NO: 1072376
guuuagauuaaacuacugu

SEQ ID NO: 1072378 - RNA, 19 nt, Artificial Sequence
  Description of Artificial Sequence: Synthetic oligonucleotide
  Sense strand starting at position 1302 of SEQ ID NO: 915339
aaaccacaugugugagagu

SEQ ID NO: 1072379 - RNA, 19 nt, Artificial Sequence
  Description of Artificial Sequence: Synthetic oligonucleotide
  Antisense strand to SEQ ID NO: 1072378
acucucacacaugugguuu

SEQ ID NO: 1072380 - RNA, 19 nt, Artificial Sequence
  Description of Artificial Sequence: Synthetic oligonucleotide
  Sense strand starting at position 2206 of SEQ ID NO: 915339
ugcaaauugccugucguau

SEQ ID NO: 1072381 - RNA, 19 nt, Artificial Sequence
  Description of Artificial Sequence: Synthetic oligonucleotide
  Antisense strand to SEQ ID NO: 1072380
auacgacaggcaauuugca

SEQ ID NO: 1072382 - RNA, 19 nt, Artificial Sequence
  Description of Artificial Sequence: Synthetic oligonucleotide
  Sense strand starting at position 2207 of SEQ ID NO: 915339
gcaaauugccugucguauc

SEQ ID NO: 1072383 - RNA, 19 nt, Artificial Sequence
  Description of Artificial Sequence: Synthetic oligonucleotide
  Antisense strand to SEQ ID NO: 1072382
gauacgacaggcaauuugc

SEQ ID NO: 1072384 - RNA, 19 nt, Artificial Sequence
  Description of Artificial Sequence: Synthetic oligonucleotide
  Sense strand starting at position 2218 of SEQ ID NO: 915339
gucguauccguugcccauu

SEQ ID NO: 1072385 - RNA, 19 nt, Artificial Sequence
  Description of Artificial Sequence: Synthetic oligonucleotide
  Antisense strand to SEQ ID NO: 1072384
aaugggcaacggauacgac

SEQ ID NO: 1072386 - RNA, 19 nt, Artificial Sequence
  Description of Artificial Sequence: Synthetic oligonucleotide
  Sense strand starting at position 2257 of SEQ ID NO: 915339
cuuugugauuuggaagaaa

SEQ ID NO: 1072387 - RNA, 19 nt, Artificial Sequence
  Description of Artificial Sequence: Synthetic oligonucleotide
  Antisense strand to SEQ ID NO: 1072386
uuucuuccaaaucacaaag

SEQ ID NO: 1072388 - RNA, 19 nt, Artificial Sequence
  Description of Artificial Sequence: Synthetic oligonucleotide
  Sense strand starting at position 2364 of SEQ ID NO: 915339
ccuaaauuucgauguuguc

SEQ ID NO: 1072389 - RNA, 19 nt, Artificial Sequence
  Description of Artificial Sequence: Synthetic oligonucleotide
  Antisense strand to SEQ ID NO: 1072388
gacaacaucgaaauuuagg

SEQ ID NO: 1072390 - RNA, 19 nt, Artificial Sequence
  Description of Artificial Sequence: Synthetic oligonucleotide
  Sense strand starting at position 2565 of SEQ ID NO: 915339
caugcaaugugagugagau

SEQ ID NO: 1072391 - RNA, 19 nt, Artificial Sequence
  Description of Artificial Sequence: Synthetic oligonucleotide
  Antisense strand to SEQ ID NO: 1072390
aucucacucacauugcaug

SEQ ID NO: 1072392 - RNA, 19 nt, Artificial Sequence
  Description of Artificial Sequence: Synthetic oligonucleotide
  Sense strand starting at position 2566 of SEQ ID NO: 915339
augcaaugugagugagaua

SEQ ID NO: 1072393 - RNA, 19 nt, Artificial Sequence
  Description of Artificial Sequence: Synthetic oligonucleotide
  Antisense strand to SEQ ID NO: 1072392
uaucucacucacauugcau

SEQ ID NO: 1072394 - RNA, 19 nt, Artificial Sequence
  Description of Artificial Sequence: Synthetic oligonucleotide
  Sense strand starting at position 2593 of SEQ ID NO: 915339
acuuuaucuccauauagug

SEQ ID NO: 1072395 - RNA, 19 nt, Artificial Sequence
  Description of Artificial Sequence: Synthetic oligonucleotide
  Antisense strand to SEQ ID NO: 1072394
cacuauauggagauaaagu

SEQ ID NO: 1072396 - RNA, 19 nt, Artificial Sequence
  Description of Artificial Sequence: Synthetic oligonucleotide
  Sense strand starting at position 2654 of SEQ ID NO: 915339
ucucuaauacuuugugaag

SEQ ID NO: 1072397 - RNA, 19 nt, Artificial Sequence
  Description of Artificial Sequence: Synthetic oligonucleotide
  Antisense strand to SEQ ID NO: 1072396
cuucacaaaguauuagaga

SEQ ID NO: 1072398 - RNA, 19 nt, Artificial Sequence
  Description of Artificial Sequence: Synthetic oligonucleotide
  Sense strand starting at position 2688 of SEQ ID NO: 915339
gacagauucccacguauca

SEQ ID NO: 1072399 - RNA, 19 nt, Artificial Sequence
  Description of Artificial Sequence: Synthetic oligonucleotide
  Antisense strand to SEQ ID NO: 1072398
ugauacgugggaaucuguc

SEQ ID NO: 1072400 - RNA, 19 nt, Artificial Sequence
  Description of Artificial Sequence: Synthetic oligonucleotide
  Sense strand starting at position 2781 of SEQ ID NO: 915339
auagaaucuggugguauaa

SEQ ID NO: 1072401 - RNA, 19 nt, Artificial Sequence
  Description of Artificial Sequence: Synthetic oligonucleotide
  Antisense strand to SEQ ID NO: 1072400
uuauaccaccagauucuau

SEQ ID NO: 1072402 - RNA, 19 nt, Artificial Sequence
  Description of Artificial Sequence: Synthetic oligonucleotide
  Sense strand starting at position 3121 of SEQ ID NO: 915339
ugguaauuauuaguguaga

SEQ ID NO: 1072403 - RNA, 19 nt, Artificial Sequence
  Description of Artificial Sequence: Synthetic oligonucleotide
  Antisense strand to SEQ ID NO: 1072402
ucuacacuaauaauuacca

SEQ ID NO: 1072404 - RNA, 19 nt, Artificial Sequence
  Description of Artificial Sequence: Synthetic oligonucleotide
  Sense strand starting at position 3126 of SEQ ID NO: 915339
auuauuaguguagacacau

SEQ ID NO: 1072405 - RNA, 19 nt, Artificial Sequence
  Description of Artificial Sequence: Synthetic oligonucleotide
  Antisense strand to SEQ ID NO: 1072404
augugucuacacuaauaau

SEQ ID NO: 1072406 - RNA, 19 nt, Artificial Sequence
  Description of Artificial Sequence: Synthetic oligonucleotide
  Sense strand starting at position 3163 of SEQ ID NO: 915339
guugauauuguuuaucaag

SEQ ID NO: 1072407 - RNA, 19 nt, Artificial Sequence
  Description of Artificial Sequence: Synthetic oligonucleotide
  Antisense strand to SEQ ID NO: 1072406
cuugauaaacaauaucaac

SEQ ID NO: 1072408 - RNA, 19 nt, Artificial Sequence
  Description of Artificial Sequence: Synthetic oligonucleotide
  Sense strand starting at position 3184 of SEQ ID NO: 915339
ugcugaauuccucaguucu

SEQ ID NO: 1072409 - RNA, 19 nt, Artificial Sequence
  Description of Artificial Sequence: Synthetic oligonucleotide
  Antisense strand to SEQ ID NO: 1072408
agaacugaggaauucagca

SEQ ID NO: 1072410 - RNA, 19 nt, Artificial Sequence
  Description of Artificial Sequence: Synthetic oligonucleotide
  Sense strand starting at position 3233 of SEQ ID NO: 915339
guauguagauaaucauauc

SEQ ID NO: 1072411 - RNA, 19 nt, Artificial Sequence
  Description of Artificial Sequence: Synthetic oligonucleotide
  Antisense strand to SEQ ID NO: 1072410
gauaugauuaucuacauac

SEQ ID NO: 1072412 - RNA, 19 nt, Artificial Sequence
  Description of Artificial Sequence: Synthetic oligonucleotide
  Sense strand starting at position 3356 of SEQ ID NO: 915339
uuacuaugguaguuggaau

SEQ ID NO: 1072413 - RNA, 19 nt, Artificial Sequence
  Description of Artificial Sequence: Synthetic oligonucleotide
  Antisense strand to SEQ ID NO: 1072412
auuccaacuaccauaguaa

SEQ ID NO: 1072414 - RNA, 19 nt, Artificial Sequence
  Description of Artificial Sequence: Synthetic oligonucleotide
  Sense strand starting at position 3567 of SEQ ID NO: 915339
ugaaguuauaagggcacau

SEQ ID NO: 1072415 - RNA, 19 nt, Artificial Sequence
  Description of Artificial Sequence: Synthetic oligonucleotide
  Antisense strand to SEQ ID NO: 1072414
augugcccuuauaacuuca

SEQ ID NO: 1072416 - RNA, 19 nt, Artificial Sequence
  Description of Artificial Sequence: Synthetic oligonucleotide
  Sense strand starting at position 3692 of SEQ ID NO: 915339
guggauuacuaggcuaaca

SEQ ID NO: 1072417 - RNA, 19 nt, Artificial Sequence
  Description of Artificial Sequence: Synthetic oligonucleotide
  Antisense strand to SEQ ID NO: 1072416
uguuagccuaguaauccac

SEQ ID NO: 1072418 - RNA, 19 nt, Artificial Sequence
  Description of Artificial Sequence: Synthetic oligonucleotide
  Sense strand starting at position 3854 of SEQ ID NO: 915339
cuguauaugggauauguac

SEQ ID NO: 1072419 - RNA, 19 nt, Artificial Sequence
  Description of Artificial Sequence: Synthetic oligonucleotide
  Antisense strand to SEQ ID NO: 1072418
guacauaucccauauacag

SEQ ID NO: 1072420 - RNA, 19 nt, Artificial Sequence
  Description of Artificial Sequence: Synthetic oligonucleotide
  Sense strand starting at position 3856 of SEQ ID NO: 915339
guauaugggauauguacua

SEQ ID NO: 1072421 - RNA, 19 nt, Artificial Sequence
  Description of Artificial Sequence: Synthetic oligonucleotide
  Antisense strand to SEQ ID NO: 1072420
uaguacauaucccauauac

SEQ ID NO: 1072422 - RNA, 19 nt, Artificial Sequence
  Description of Artificial Sequence: Synthetic oligonucleotide
  Sense strand starting at position 201 of SEQ ID NO: 915340
gaaggucucuucgaucugu

SEQ ID NO: 1072423 - RNA, 19 nt, Artificial Sequence
  Description of Artificial Sequence: Synthetic oligonucleotide
  Antisense strand to SEQ ID NO: 1072422
acagaucgaagagaccuuc

SEQ ID NO: 1072424 - RNA, 19 nt, Artificial Sequence
  Description of Artificial Sequence: Synthetic oligonucleotide
  Sense strand starting at position 228 of SEQ ID NO: 915340
cggaaucgcucucuuagga

SEQ ID NO: 1072425 - RNA, 19 nt, Artificial Sequence
  Description of Artificial Sequence: Synthetic oligonucleotide
  Antisense strand to SEQ ID NO: 1072424
uccuaagagagcgauuccg

SEQ ID NO: 1072426 - RNA, 19 nt, Artificial Sequence
  Description of Artificial Sequence: Synthetic oligonucleotide
  Sense strand starting at position 443 of SEQ ID NO: 915340
cugugauccuguuacugaa

SEQ ID NO: 1072427 - RNA, 19 nt, Artificial Sequence
  Description of Artificial Sequence: Synthetic oligonucleotide
  Antisense strand to SEQ ID NO: 1072426
uucaguaacaggaucacag

SEQ ID NO: 1072428 - RNA, 19 nt, Artificial Sequence
  Description of Artificial Sequence: Synthetic oligonucleotide
  Sense strand starting at position 551 of SEQ ID NO: 915340
gaucccgauuccguaaaca

SEQ ID NO: 1072429 - RNA, 19 nt, Artificial Sequence
  Description of Artificial Sequence: Synthetic oligonucleotide
  Antisense strand to SEQ ID NO: 1072428
uguuuacggaaucgggauc

SEQ ID NO: 1072430 - RNA, 19 nt, Artificial Sequence
  Description of Artificial Sequence: Synthetic oligonucleotide
  Sense strand starting at position 563 of SEQ ID NO: 915340
guaaacagucuggauccua

SEQ ID NO: 1072431 - RNA, 19 nt, Artificial Sequence
  Description of Artificial Sequence: Synthetic oligonucleotide
  Antisense strand to SEQ ID NO: 1072430
uaggauccagacuguuuac

SEQ ID NO: 1072432 - RNA, 19 nt, Artificial Sequence
  Description of Artificial Sequence: Synthetic oligonucleotide
  Sense strand starting at position 590 of SEQ ID NO: 915340
acucuagacugguccuaaa

SEQ ID NO: 1072433 - RNA, 19 nt, Artificial Sequence
  Description of Artificial Sequence: Synthetic oligonucleotide
  Antisense strand to SEQ ID NO: 1072432
uuuaggaccagucuagagu

SEQ ID NO: 1072434 - RNA, 19 nt, Artificial Sequence
  Description of Artificial Sequence: Synthetic oligonucleotide
  Sense strand starting at position 769 of SEQ ID NO: 915340
gucuccuaacccgaaagaa

SEQ ID NO: 1072435 - RNA, 19 nt, Artificial Sequence
  Description of Artificial Sequence: Synthetic oligonucleotide
  Antisense strand to SEQ ID NO: 1072434
uucuuucggguuaggagac

SEQ ID NO: 1072436 - RNA, 19 nt, Artificial Sequence
  Description of Artificial Sequence: Synthetic oligonucleotide
  Sense strand starting at position 1075 of SEQ ID NO: 915340
cacugauccgucugcaaac

SEQ ID NO: 1072437 - RNA, 19 nt, Artificial Sequence
  Description of Artificial Sequence: Synthetic oligonucleotide
  Antisense strand to SEQ ID NO: 1072436
guuugcagacggaucagug

SEQ ID NO: 1072438 - RNA, 19 nt, Artificial Sequence
  Description of Artificial Sequence: Synthetic oligonucleotide
  Sense strand starting at position 1338 of SEQ ID NO: 915340
cggcgugccuguuccuauu

SEQ ID NO: 1072439 - RNA, 19 nt, Artificial Sequence
  Description of Artificial Sequence: Synthetic oligonucleotide
  Antisense strand to SEQ ID NO: 1072438
aauaggaacaggcacgccg

SEQ ID NO: 1072440 - RNA, 19 nt, Artificial Sequence
  Description of Artificial Sequence: Synthetic oligonucleotide
  Sense strand starting at position 1754 of SEQ ID NO: 915340
ugaauaauacucuggcuug

SEQ ID NO: 1072441 - RNA, 19 nt, Artificial Sequence
  Description of Artificial Sequence: Synthetic oligonucleotide
  Antisense strand to SEQ ID NO: 1072440
caagccagaguauuauuca

SEQ ID NO: 1072442 - RNA, 19 nt, Artificial Sequence
  Description of Artificial Sequence: Synthetic oligonucleotide
  Sense strand starting at position 1853 of SEQ ID NO: 915340
aagcgucucugacauggaa

SEQ ID NO: 1072443 - RNA, 19 nt, Artificial Sequence
  Description of Artificial Sequence: Synthetic oligonucleotide
  Antisense strand to SEQ ID NO: 1072442
uuccaugucagagacgcuu

SEQ ID NO: 1072444 - RNA, 19 nt, Artificial Sequence
  Description of Artificial Sequence: Synthetic oligonucleotide
  Sense strand starting at position 1855 of SEQ ID NO: 915340
gcgucucugacauggaaau

SEQ ID NO: 1072445 - RNA, 19 nt, Artificial Sequence
  Description of Artificial Sequence: Synthetic oligonucleotide
  Antisense strand to SEQ ID NO: 1072444
auuuccaugucagagacgc

SEQ ID NO: 1072446 - RNA, 19 nt, Artificial Sequence
  Description of Artificial Sequence: Synthetic oligonucleotide
  Sense strand starting at position 1868 of SEQ ID NO: 915340
ggaaaugaaugacagcuua

SEQ ID NO: 1072447 - RNA, 19 nt, Artificial Sequence
  Description of Artificial Sequence: Synthetic oligonucleotide
  Antisense strand to SEQ ID NO: 1072446
uaagcugucauucauuucc

SEQ ID NO: 1072448 - RNA, 19 nt, Artificial Sequence
  Description of Artificial Sequence: Synthetic oligonucleotide
  Sense strand starting at position 2090 of SEQ ID NO: 915340
gcuggagugucucccucua

SEQ ID NO: 1072449 - RNA, 19 nt, Artificial Sequence
  Description of Artificial Sequence: Synthetic oligonucleotide
  Antisense strand to SEQ ID NO: 1072448
uagagggagacacuccagc

SEQ ID NO: 1072450 - RNA, 19 nt, Artificial Sequence
  Description of Artificial Sequence: Synthetic oligonucleotide
  Sense strand starting at position 2253 of SEQ ID NO: 915340
ccaaguccuccuuagcgaa

SEQ ID NO: 1072451 - RNA, 19 nt, Artificial Sequence
  Description of Artificial Sequence: Synthetic oligonucleotide
  Antisense strand to SEQ ID NO: 1072450
uucgcuaaggaggacuugg

SEQ ID NO: 1072452 - RNA, 19 nt, Artificial Sequence
  Description of Artificial Sequence: Synthetic oligonucleotide
  Sense strand starting at position 2288 of SEQ ID NO: 915340
ccaagauaucaccggugcu

SEQ ID NO: 1072453 - RNA, 19 nt, Artificial Sequence
  Description of Artificial Sequence: Synthetic oligonucleotide
  Antisense strand to SEQ ID NO: 1072452
agcaccggugauaucuugg

SEQ ID NO: 1072454 - RNA, 19 nt, Artificial Sequence
  Description of Artificial Sequence: Synthetic oligonucleotide
  Sense strand starting at position 2497 of SEQ ID NO: 915340
agaugacacucugguuagu

SEQ ID NO: 1072455 - RNA, 19 nt, Artificial Sequence
  Description of Artificial Sequence: Synthetic oligonucleotide
  Antisense strand to SEQ ID NO: 1072454
acuaaccagagugucaucu

SEQ ID NO: 1072456 - RNA, 19 nt, Artificial Sequence
  Description of Artificial Sequence: Synthetic oligonucleotide
  Sense strand starting at position 2499 of SEQ ID NO: 915340
augacacucugguuaguua

SEQ ID NO: 1072457 - RNA, 19 nt, Artificial Sequence
  Description of Artificial Sequence: Synthetic oligonucleotide
  Antisense strand to SEQ ID NO: 1072456
uaacuaaccagagugucau

SEQ ID NO: 1072458 - RNA, 19 nt, Artificial Sequence
  Description of Artificial Sequence: Synthetic oligonucleotide
  Sense strand starting at position 2500 of SEQ ID NO: 915340
ugacacucugguuaguuau

SEQ ID NO: 1072459 - RNA, 19 nt, Artificial Sequence
  Description of Artificial Sequence: Synthetic oligonucleotide
  Antisense strand to SEQ ID NO: 1072458
auaacuaaccagaguguca

SEQ ID NO: 1072460 - RNA, 19 nt, Artificial Sequence
  Description of Artificial Sequence: Synthetic oligonucleotide
  Sense strand starting at position 2511 of SEQ ID NO: 915340
uuaguuauuccuggucuca

SEQ ID NO: 1072461 - RNA, 19 nt, Artificial Sequence
  Description of Artificial Sequence: Synthetic oligonucleotide
  Antisense strand to SEQ ID NO: 1072460
ugagaccaggaauaacuaa

SEQ ID NO: 1072462 - RNA, 19 nt, Artificial Sequence
  Description of Artificial Sequence: Synthetic oligonucleotide
  Sense strand starting at position 2513 of SEQ ID NO: 915340
aguuauuccuggucucaag

SEQ ID NO: 1072463 - RNA, 19 nt, Artificial Sequence
  Description of Artificial Sequence: Synthetic oligonucleotide
  Antisense strand to SEQ ID NO: 1072462
cuugagaccaggaauaacu

SEQ ID NO: 1072464 - RNA, 19 nt, Artificial Sequence
  Description of Artificial Sequence: Synthetic oligonucleotide
  Sense strand starting at position 2598 of SEQ ID NO: 915340
guggauaggcuuugucagu

SEQ ID NO: 1072465 - RNA, 19 nt, Artificial Sequence
  Description of Artificial Sequence: Synthetic oligonucleotide
  Antisense strand to SEQ ID NO: 1072464
acugacaaagccuauccac

SEQ ID NO: 1072466 - RNA, 19 nt, Artificial Sequence
  Description of Artificial Sequence: Synthetic oligonucleotide
  Sense strand starting at position 2599 of SEQ ID NO: 915340
uggauaggcuuugucagua

SEQ ID NO: 1072467 - RNA, 19 nt, Artificial Sequence
  Description of Artificial Sequence: Synthetic oligonucleotide
  Antisense strand to SEQ ID NO: 1072466
uacugacaaagccuaucca

SEQ ID NO: 1072468 - RNA, 19 nt, Artificial Sequence
  Description of Artificial Sequence: Synthetic oligonucleotide
  Sense strand starting at position 2604 of SEQ ID NO: 915340
aggcuuugucaguaaagca

SEQ ID NO: 1072469 - RNA, 19 nt, Artificial Sequence
  Description of Artificial Sequence: Synthetic oligonucleotide
  Antisense strand to SEQ ID NO: 1072468
ugcuuuacugacaaagccu

SEQ ID NO: 1072470 - RNA, 19 nt, Artificial Sequence
  Description of Artificial Sequence: Synthetic oligonucleotide
  Sense strand starting at position 2649 of SEQ ID NO: 915340
guucuaagccacugcuauu

SEQ ID NO: 1072471 - RNA, 19 nt, Artificial Sequence
  Description of Artificial Sequence: Synthetic oligonucleotide
  Antisense strand to SEQ ID NO: 1072470
aauagcaguggcuuagaac

SEQ ID NO: 1072472 - RNA, 19 nt, Artificial Sequence
  Description of Artificial Sequence: Synthetic oligonucleotide
  Sense strand starting at position 2689 of SEQ ID NO: 915340
caagaaacucagugaguuc

SEQ ID NO: 1072473 - RNA, 19 nt, Artificial Sequence
  Description of Artificial Sequence: Synthetic oligonucleotide
  Antisense strand to SEQ ID NO: 1072472
gaacucacugaguuucuug

SEQ ID NO: 1072474 - RNA, 19 nt, Artificial Sequence
  Description of Artificial Sequence: Synthetic oligonucleotide
  Sense strand starting at position 2696 of SEQ ID NO: 915340
cucagugaguucccagagu

SEQ ID NO: 1072475 - RNA, 19 nt, Artificial Sequence
  Description of Artificial Sequence: Synthetic oligonucleotide
  Antisense strand to SEQ ID NO: 1072474
acucugggaacucacugag

SEQ ID NO: 1072476 - RNA, 19 nt, Artificial Sequence
  Description of Artificial Sequence: Synthetic oligonucleotide
  Sense strand starting at position 3156 of SEQ ID NO: 915340
aguaaagaaucugacccaa

SEQ ID NO: 1072477 - RNA, 19 nt, Artificial Sequence
  Description of Artificial Sequence: Synthetic oligonucleotide
  Antisense strand to SEQ ID NO: 1072476
uugggucagauucuuuacu

SEQ ID NO: 1072478 - RNA, 19 nt, Artificial Sequence
  Description of Artificial Sequence: Synthetic oligonucleotide
  Sense strand starting at position 3257 of SEQ ID NO: 915340
guuagcauugccuggcuca

SEQ ID NO: 1072479 - RNA, 19 nt, Artificial Sequence
  Description of Artificial Sequence: Synthetic oligonucleotide
  Antisense strand to SEQ ID NO: 1072478
ugagccaggcaaugcuaac

SEQ ID NO: 1072480 - RNA, 19 nt, Artificial Sequence
  Description of Artificial Sequence: Synthetic oligonucleotide
  Sense strand starting at position 3381 of SEQ ID NO: 915340
ggagaaacucuucaguggu

SEQ ID NO: 1072481 - RNA, 19 nt, Artificial Sequence
  Description of Artificial Sequence: Synthetic oligonucleotide
  Antisense strand to SEQ ID NO: 1072480
accacugaagaguuucucc

SEQ ID NO: 1072482 - RNA, 19 nt, Artificial Sequence
  Description of Artificial Sequence: Synthetic oligonucleotide
  Sense strand starting at position 3465 of SEQ ID NO: 915340
guggauuuaugucacccua

SEQ ID NO: 1072483 - RNA, 19 nt, Artificial Sequence
  Description of Artificial Sequence: Synthetic oligonucleotide
  Antisense strand to SEQ ID NO: 1072482
uagggugacauaaauccac

SEQ ID NO: 1072484 - RNA, 19 nt, Artificial Sequence
  Description of Artificial Sequence: Synthetic oligonucleotide
  Sense strand starting at position 3518 of SEQ ID NO: 915340
acagcauaaucgcuauuau

SEQ ID NO: 1072485 - RNA, 19 nt, Artificial Sequence
  Description of Artificial Sequence: Synthetic oligonucleotide
  Antisense strand to SEQ ID NO: 1072484
auaauagcgauuaugcugu

SEQ ID NO: 1072486 - RNA, 19 nt, Artificial Sequence
  Description of Artificial Sequence: Synthetic oligonucleotide
  Sense strand starting at position 3807 of SEQ ID NO: 915340
ccaucagagaggugucagu

SEQ ID NO: 1072487 - RNA, 19 nt, Artificial Sequence
  Description of Artificial Sequence: Synthetic oligonucleotide
  Antisense strand to SEQ ID NO: 1072486
acugacaccucucugaugg

SEQ ID NO: 1072488 - RNA, 19 nt, Artificial Sequence
  Description of Artificial Sequence: Synthetic oligonucleotide
  Sense strand starting at position 3814 of SEQ ID NO: 915340
agaggugucagugagccau

SEQ ID NO: 1072489 - RNA, 19 nt, Artificial Sequence
  Description of Artificial Sequence: Synthetic oligonucleotide
  Antisense strand to SEQ ID NO: 1072488
auggcucacugacaccucu

SEQ ID NO: 1072490 - RNA, 19 nt, Artificial Sequence
  Description of Artificial Sequence: Synthetic oligonucleotide
  Sense strand starting at position 3816 of SEQ ID NO: 915340
aggugucagugagccauaa

SEQ ID NO: 1072491 - RNA, 19 nt, Artificial Sequence
  Description of Artificial Sequence: Synthetic oligonucleotide
  Antisense strand to SEQ ID NO: 1072490
uuauggcucacugacaccu

SEQ ID NO: 1072492 - RNA, 19 nt, Artificial Sequence
  Description of Artificial Sequence: Synthetic oligonucleotide
  Sense strand starting at position 3818 of SEQ ID NO: 915340
gugucagugagccauaaau

SEQ ID NO: 1072493 - RNA, 19 nt, Artificial Sequence
  Description of Artificial Sequence: Synthetic oligonucleotide
  Antisense strand to SEQ ID NO: 1072492
auuuauggcucacugacac

SEQ ID NO: 1072494 - RNA, 19 nt, Artificial Sequence
  Description of Artificial Sequence: Synthetic oligonucleotide
  Sense strand starting at position 3820 of SEQ ID NO: 915340
gucagugagccauaaauag

SEQ ID NO: 1072495 - RNA, 19 nt, Artificial Sequence
  Description of Artificial Sequence: Synthetic oligonucleotide
  Antisense strand to SEQ ID NO: 1072494
cuauuuauggcucacugac

SEQ ID NO: 1072496 - RNA, 19 nt, Artificial Sequence
  Description of Artificial Sequence: Synthetic oligonucleotide
  Sense strand starting at position 3916 of SEQ ID NO: 915340
acacuuuccugauauggga

SEQ ID NO: 1072497 - RNA, 19 nt, Artificial Sequence
  Description of Artificial Sequence: Synthetic oligonucleotide
  Antisense strand to SEQ ID NO: 1072496
ucccauaucaggaaagugu

SEQ ID NO: 1072498 - RNA, 19 nt, Artificial Sequence
  Description of Artificial Sequence: Synthetic oligonucleotide
  Sense strand starting at position 3935 of SEQ ID NO: 915340
gauccauugccaugagcua

SEQ ID NO: 1072499 - RNA, 19 nt, Artificial Sequence
  Description of Artificial Sequence: Synthetic oligonucleotide
  Antisense strand to SEQ ID NO: 1072498
uagcucauggcaauggauc

SEQ ID NO: 1072500 - RNA, 19 nt, Artificial Sequence
  Description of Artificial Sequence: Synthetic oligonucleotide
  Sense strand starting at position 3936 of SEQ ID NO: 915340
auccauugccaugagcuau

SEQ ID NO: 1072501 - RNA, 19 nt, Artificial Sequence
  Description of Artificial Sequence: Synthetic oligonucleotide
  Antisense strand to SEQ ID NO: 1072500
auagcucauggcaauggau

SEQ ID NO: 1072502 - RNA, 19 nt, Artificial Sequence
  Description of Artificial Sequence: Synthetic oligonucleotide
  Sense strand starting at position 69 of SEQ ID NO: 915341
accaguaugcccuguugca

SEQ ID NO: 1072503 - RNA, 19 nt, Artificial Sequence
  Description of Artificial Sequence: Synthetic oligonucleotide
  Antisense strand to SEQ ID NO: 1072502
ugcaacagggcauacuggu

SEQ ID NO: 1072504 - RNA, 19 nt, Artificial Sequence
  Description of Artificial Sequence: Synthetic oligonucleotide
  Sense strand starting at position 269 of SEQ ID NO: 915341
cugugacugcuggaaggau

SEQ ID NO: 1072505 - RNA, 19 nt, Artificial Sequence
  Description of Artificial Sequence: Synthetic oligonucleotide
  Antisense strand to SEQ ID NO: 1072504
auccuuccagcagucacag

SEQ ID NO: 1072506 - RNA, 19 nt, Artificial Sequence
  Description of Artificial Sequence: Synthetic oligonucleotide
  Sense strand starting at position 360 of SEQ ID NO: 915341
gagggauggacucguggau

SEQ ID NO: 1072507 - RNA, 19 nt, Artificial Sequence
  Description of Artificial Sequence: Synthetic oligonucleotide
  Antisense strand to SEQ ID NO: 1072506
auccacgaguccaucccuc

SEQ ID NO: 1072508 - RNA, 19 nt, Artificial Sequence
  Description of Artificial Sequence: Synthetic oligonucleotide
  Sense strand starting at position 577 of SEQ ID NO: 915341
cuauuaacccucugacgcu

SEQ ID NO: 1072509 - RNA, 19 nt, Artificial Sequence
  Description of Artificial Sequence: Synthetic oligonucleotide
  Antisense strand to SEQ ID NO: 1072508
agcgucagaggguuaauag

SEQ ID NO: 1072510 - RNA, 19 nt, Artificial Sequence
  Description of Artificial Sequence: Synthetic oligonucleotide
  Sense strand starting at position 688 of SEQ ID NO: 915341
cagccagggugguaauuaa

SEQ ID NO: 1072511 - RNA, 19 nt, Artificial Sequence
  Description of Artificial Sequence: Synthetic oligonucleotide
  Antisense strand to SEQ ID NO: 1072510
uuaauuaccacccuggcug

SEQ ID NO: 1072512 - RNA, 19 nt, Artificial Sequence
  Description of Artificial Sequence: Synthetic oligonucleotide
  Sense strand starting at position 926 of SEQ ID NO: 915341
ggcauucugggagguccau

SEQ ID NO: 1072513 - RNA, 19 nt, Artificial Sequence
  Description of Artificial Sequence: Synthetic oligonucleotide
  Antisense strand to SEQ ID NO: 1072512
auggaccucccagaaugcc

SEQ ID NO: 1072514 - RNA, 19 nt, Artificial Sequence
  Description of Artificial Sequence: Synthetic oligonucleotide
  Sense strand starting at position 938 of SEQ ID NO: 915341
gguccaucuuacugucuaa

SEQ ID NO: 1072515 - RNA, 19 nt, Artificial Sequence
  Description of Artificial Sequence: Synthetic oligonucleotide
  Antisense strand to SEQ ID NO: 1072514
uuagacaguaagauggacc

SEQ ID NO: 1072516 - RNA, 19 nt, Artificial Sequence
  Description of Artificial Sequence: Synthetic oligonucleotide
  Sense strand starting at position 1150 of SEQ ID NO: 915341
cagagaaaucuaggucacu

SEQ ID NO: 1072517 - RNA, 19 nt, Artificial Sequence
  Description of Artificial Sequence: Synthetic oligonucleotide
  Antisense strand to SEQ ID NO: 1072516
agugaccuagauuucucug

SEQ ID NO: 1072518 - RNA, 19 nt, Artificial Sequence
  Description of Artificial Sequence: Synthetic oligonucleotide
  Sense strand starting at position 1151 of SEQ ID NO: 915341
agagaaaucuaggucacuc

SEQ ID NO: 1072519 - RNA, 19 nt, Artificial Sequence
  Description of Artificial Sequence: Synthetic oligonucleotide
  Antisense strand to SEQ ID NO: 1072518
gagugaccuagauuucucu

SEQ ID NO: 1072520 - RNA, 19 nt, Artificial Sequence
  Description of Artificial Sequence: Synthetic oligonucleotide
  Sense strand starting at position 1276 of SEQ ID NO: 915341
ugcucauucccgugaggua

SEQ ID NO: 1072521 - RNA, 19 nt, Artificial Sequence
  Description of Artificial Sequence: Synthetic oligonucleotide
  Antisense strand to SEQ ID NO: 1072520
uaccucacgggaaugagca

SEQ ID NO: 1072522 - RNA, 19 nt, Artificial Sequence
  Description of Artificial Sequence: Synthetic oligonucleotide
  Sense strand starting at position 1277 of SEQ ID NO: 915341
gcucauucccgugagguau

SEQ ID NO: 1072523 - RNA, 19 nt, Artificial Sequence
  Description of Artificial Sequence: Synthetic oligonucleotide
  Antisense strand to SEQ ID NO: 1072522
auaccucacgggaaugagc

SEQ ID NO: 1072524 - RNA, 19 nt, Artificial Sequence
  Description of Artificial Sequence: Synthetic oligonucleotide
  Sense strand starting at position 1478 of SEQ ID NO: 915341
aggcucagucuuuggagga

SEQ ID NO: 1072525 - RNA, 19 nt, Artificial Sequence
  Description of Artificial Sequence: Synthetic oligonucleotide
  Antisense strand to SEQ ID NO: 1072524
uccuccaaagacugagccu

SEQ ID NO: 1072526 - RNA, 19 nt, Artificial Sequence
  Description of Artificial Sequence: Synthetic oligonucleotide
  Sense strand starting at position 1479 of SEQ ID NO: 915341
ggcucagucuuuggaggac

SEQ ID NO: 1072527 - RNA, 19 nt, Artificial Sequence
  Description of Artificial Sequence: Synthetic oligonucleotide
  Antisense strand to SEQ ID NO: 1072526
guccuccaaagacugagcc

SEQ ID NO: 1072528 - RNA, 19 nt, Artificial Sequence
  Description of Artificial Sequence: Synthetic oligonucleotide
  Sense strand starting at position 2122 of SEQ ID NO: 915341
gccugcuuaagguggaauu

SEQ ID NO: 1072529 - RNA, 19 nt, Artificial Sequence
  Description of Artificial Sequence: Synthetic oligonucleotide
  Antisense strand to SEQ ID NO: 1072528
aauuccaccuuaagcaggc

SEQ ID NO: 1072530 - RNA, 19 nt, Artificial Sequence
  Description of Artificial Sequence: Synthetic oligonucleotide
  Sense strand starting at position 2241 of SEQ ID NO: 915341
uuguucucagccuguaaag

SEQ ID NO: 1072531 - RNA, 19 nt, Artificial Sequence
  Description of Artificial Sequence: Synthetic oligonucleotide
  Antisense strand to SEQ ID NO: 1072530
cuuuacaggcugagaacaa

SEQ ID NO: 1072532 - RNA, 19 nt, Artificial Sequence
  Description of Artificial Sequence: Synthetic oligonucleotide
  Sense strand starting at position 3017 of SEQ ID NO: 915341
gggcuugugcccagaaggu

SEQ ID NO: 1072533 - RNA, 19 nt, Artificial Sequence
  Description of Artificial Sequence: Synthetic oligonucleotide
  Antisense strand to SEQ ID NO: 1072532
accuucugggcacaagccc

SEQ ID NO: 1072534 - RNA, 19 nt, Artificial Sequence
  Description of Artificial Sequence: Synthetic oligonucleotide
  Sense strand starting at position 3026 of SEQ ID NO: 915341
cccagaaggucuccuucua

SEQ ID NO: 1072535 - RNA, 19 nt, Artificial Sequence
  Description of Artificial Sequence: Synthetic oligonucleotide
  Antisense strand to SEQ ID NO: 1072534
uagaaggagaccuucuggg

SEQ ID NO: 1072536 - RNA, 19 nt, Artificial Sequence
  Description of Artificial Sequence: Synthetic oligonucleotide
  Sense strand starting at position 3138 of SEQ ID NO: 915341
gugggagcugaacaucuau

SEQ ID NO: 1072537 - RNA, 19 nt, Artificial Sequence
  Description of Artificial Sequence: Synthetic oligonucleotide
  Antisense strand to SEQ ID NO: 1072536
auagauguucagcucccac

SEQ ID NO: 1072538 - RNA, 19 nt, Artificial Sequence
  Description of Artificial Sequence: Synthetic oligonucleotide
  Sense strand starting at position 3144 of SEQ ID NO: 915341
gcugaacaucuaugacaac

SEQ ID NO: 1072539 - RNA, 19 nt, Artificial Sequence
  Description of Artificial Sequence: Synthetic oligonucleotide
  Antisense strand to SEQ ID NO: 1072538
guugucauagauguucagc

SEQ ID NO: 1072540 - RNA, 19 nt, Artificial Sequence
  Description of Artificial Sequence: Synthetic oligonucleotide
  Sense strand starting at position 3684 of SEQ ID NO: 915341
ggcugauucccugggagac

SEQ ID NO: 1072541 - RNA, 19 nt, Artificial Sequence
  Description of Artificial Sequence: Synthetic oligonucleotide
  Antisense strand to SEQ ID NO: 1072540
gucucccagggaaucagcc

SEQ ID NO: 1072542 - RNA, 19 nt, Artificial Sequence
  Description of Artificial Sequence: Synthetic oligonucleotide
  Sense strand starting at position 3685 of SEQ ID NO: 915341
gcugauucccugggagaca

SEQ ID NO: 1072543 - RNA, 19 nt, Artificial Sequence
  Description of Artificial Sequence: Synthetic oligonucleotide
  Antisense strand to SEQ ID NO: 1072542
ugucucccagggaaucagc

SEQ ID NO: 1072544 - RNA, 19 nt, Artificial Sequence
  Description of Artificial Sequence: Synthetic oligonucleotide
  Sense strand starting at position 3731 of SEQ ID NO: 915341
caaguuugugcggcgcaga

SEQ ID NO: 1072545 - RNA, 19 nt, Artificial Sequence
  Description of Artificial Sequence: Synthetic oligonucleotide
  Antisense strand to SEQ ID NO: 1072544
ucugcgccgcacaaacuug

SEQ ID NO: 1072546 - RNA, 19 nt, Artificial Sequence
  Description of Artificial Sequence: Synthetic oligonucleotide
  Sense strand starting at position 3758 of SEQ ID NO: 915341
ggagguaugugccuggcau

SEQ ID NO: 1072547 - RNA, 19 nt, Artificial Sequence
  Description of Artificial Sequence: Synthetic oligonucleotide
  Antisense strand to SEQ ID NO: 1072546
augccaggcacauaccucc

SEQ ID NO: 1072548 - RNA, 19 nt, Artificial Sequence
  Description of Artificial Sequence: Synthetic oligonucleotide
  Sense strand starting at position 3759 of SEQ ID NO: 915341
gagguaugugccuggcaug

SEQ ID NO: 1072549 - RNA, 19 nt, Artificial Sequence
  Description of Artificial Sequence: Synthetic oligonucleotide
  Antisense strand to SEQ ID NO: 1072548
caugccaggcacauaccuc

SEQ ID NO: 1072550 - RNA, 19 nt, Artificial Sequence
  Description of Artificial Sequence: Synthetic oligonucleotide
  Sense strand starting at position 181 of SEQ ID NO: 915342
guuguaguguuacuauuau

SEQ ID NO: 1072551 - RNA, 19 nt, Artificial Sequence
  Description of Artificial Sequence: Synthetic oligonucleotide
  Antisense strand to SEQ ID NO: 1072550
auaauaguaacacuacaac

SEQ ID NO: 1072552 - RNA, 19 nt, Artificial Sequence
  Description of Artificial Sequence: Synthetic oligonucleotide
  Sense strand starting at position 366 of SEQ ID NO: 915342
ugauuacauauacgagguu

SEQ ID NO: 1072553 - RNA, 19 nt, Artificial Sequence
  Description of Artificial Sequence: Synthetic oligonucleotide
  Antisense strand to SEQ ID NO: 1072552
aaccucguauauguaauca

SEQ ID NO: 1072554 - RNA, 19 nt, Artificial Sequence
  Description of Artificial Sequence: Synthetic oligonucleotide
  Sense strand starting at position 402 of SEQ ID NO: 915342
cacuguguuucuuucugga

SEQ ID NO: 1072555 - RNA, 19 nt, Artificial Sequence
  Description of Artificial Sequence: Synthetic oligonucleotide
  Antisense strand to SEQ ID NO: 1072554
uccagaaagaaacacagug

SEQ ID NO: 1072556 - RNA, 19 nt, Artificial Sequence
  Description of Artificial Sequence: Synthetic oligonucleotide
  Sense strand starting at position 435 of SEQ ID NO: 915342
auugcaugauuauugcuaa

SEQ ID NO: 1072557 - RNA, 19 nt, Artificial Sequence
  Description of Artificial Sequence: Synthetic oligonucleotide
  Antisense strand to SEQ ID NO: 1072556
uuagcaauaaucaugcaau

SEQ ID NO: 1072558 - RNA, 19 nt, Artificial Sequence
  Description of Artificial Sequence: Synthetic oligonucleotide
  Sense strand starting at position 558 of SEQ ID NO: 915342
cugagauaauaacaacagu

SEQ ID NO: 1072559 - RNA, 19 nt, Artificial Sequence
  Description of Artificial Sequence: Synthetic oligonucleotide
  Antisense strand to SEQ ID NO: 1072558
acuguuguuauuaucucag

SEQ ID NO: 1072560 - RNA, 19 nt, Artificial Sequence
  Description of Artificial Sequence: Synthetic oligonucleotide
  Sense strand starting at position 571 of SEQ ID NO: 915342
aacagugaauuaugguuga

SEQ ID NO: 1072561 - RNA, 19 nt, Artificial Sequence
  Description of Artificial Sequence: Synthetic oligonucleotide
  Antisense strand to SEQ ID NO: 1072560
ucaaccauaauucacuguu

SEQ ID NO: 1072562 - RNA, 19 nt, Artificial Sequence
  Description of Artificial Sequence: Synthetic oligonucleotide
  Sense strand starting at position 574 of SEQ ID NO: 915342
agugaauuaugguugagca

SEQ ID NO: 1072563 - RNA, 19 nt, Artificial Sequence
  Description of Artificial Sequence: Synthetic oligonucleotide
  Antisense strand to SEQ ID NO: 1072562
ugcucaaccauaauucacu

SEQ ID NO: 1072564 - RNA, 19 nt, Artificial Sequence
  Description of Artificial Sequence: Synthetic oligonucleotide
  Sense strand starting at position 575 of SEQ ID NO: 915342
gugaauuaugguugagcac

SEQ ID NO: 1072565 - RNA, 19 nt, Artificial Sequence
  Description of Artificial Sequence: Synthetic oligonucleotide
  Antisense strand to SEQ ID NO: 1072564
gugcucaaccauaauucac

SEQ ID NO: 1072566 - RNA, 19 nt, Artificial Sequence
  Description of Artificial Sequence: Synthetic oligonucleotide
  Sense strand starting at position 576 of SEQ ID NO: 915342
ugaauuaugguugagcacu

SEQ ID NO: 1072567 - RNA, 19 nt, Artificial Sequence
  Description of Artificial Sequence: Synthetic oligonucleotide
  Antisense strand to SEQ ID NO: 1072566
agugcucaaccauaauuca

SEQ ID NO: 1072568 - RNA, 19 nt, Artificial Sequence
  Description of Artificial Sequence: Synthetic oligonucleotide
  Sense strand starting at position 619 of SEQ ID NO: 915342
ugggcacuuucugaguauu

SEQ ID NO: 1072569 - RNA, 19 nt, Artificial Sequence
  Description of Artificial Sequence: Synthetic oligonucleotide
  Antisense strand to SEQ ID NO: 1072568
aauacucagaaagugccca

SEQ ID NO: 1072570 - RNA, 19 nt, Artificial Sequence
  Description of Artificial Sequence: Synthetic oligonucleotide
  Sense strand starting at position 621 of SEQ ID NO: 915342
ggcacuuucugaguauuaa

SEQ ID NO: 1072571 - RNA, 19 nt, Artificial Sequence
  Description of Artificial Sequence: Synthetic oligonucleotide
  Antisense strand to SEQ ID NO: 1072570
uuaauacucagaaagugcc

SEQ ID NO: 1072572 - RNA, 19 nt, Artificial Sequence
  Description of Artificial Sequence: Synthetic oligonucleotide
  Sense strand starting at position 622 of SEQ ID NO: 915342
gcacuuucugaguauuaag

SEQ ID NO: 1072573 - RNA, 19 nt, Artificial Sequence
  Description of Artificial Sequence: Synthetic oligonucleotide
  Antisense strand to SEQ ID NO: 1072572
cuuaauacucagaaagugc

SEQ ID NO: 1072574 - RNA, 19 nt, Artificial Sequence
  Description of Artificial Sequence: Synthetic oligonucleotide
  Sense strand starting at position 625 of SEQ ID NO: 915342
cuuucugaguauuaaguga

SEQ ID NO: 1072575 - RNA, 19 nt, Artificial Sequence
  Description of Artificial Sequence: Synthetic oligonucleotide
  Antisense strand to SEQ ID NO: 1072574
ucacuuaauacucagaaag

SEQ ID NO: 1072576 - RNA, 19 nt, Artificial Sequence
  Description of Artificial Sequence: Synthetic oligonucleotide
  Sense strand starting at position 1006 of SEQ ID NO: 915342
auuugaacuugaugagagu

SEQ ID NO: 1072577 - RNA, 19 nt, Artificial Sequence
  Description of Artificial Sequence: Synthetic oligonucleotide
  Antisense strand to SEQ ID NO: 1072576
acucucaucaaguucaaau

SEQ ID NO: 1072578 - RNA, 19 nt, Artificial Sequence
  Description of Artificial Sequence: Synthetic oligonucleotide
  Sense strand starting at position 1156 of SEQ ID NO: 915342
ggcuggucaugggaugagu

SEQ ID NO: 1072579 - RNA, 19 nt, Artificial Sequence
  Description of Artificial Sequence: Synthetic oligonucleotide
  Antisense strand to SEQ ID NO: 1072578
acucaucccaugaccagcc

SEQ ID NO: 1072580 - RNA, 19 nt, Artificial Sequence
  Description of Artificial Sequence: Synthetic oligonucleotide
  Sense strand starting at position 1165 of SEQ ID NO: 915342
ugggaugagucagcugaca

SEQ ID NO: 1072581 - RNA, 19 nt, Artificial Sequence
  Description of Artificial Sequence: Synthetic oligonucleotide
  Antisense strand to SEQ ID NO: 1072580
ugucagcugacucauccca

SEQ ID NO: 1072582 - RNA, 19 nt, Artificial Sequence
  Description of Artificial Sequence: Synthetic oligonucleotide
  Sense strand starting at position 1167 of SEQ ID NO: 915342
ggaugagucagcugacaua

SEQ ID NO: 1072583 - RNA, 19 nt, Artificial Sequence
  Description of Artificial Sequence: Synthetic oligonucleotide
  Antisense strand to SEQ ID NO: 1072582
uaugucagcugacucaucc

SEQ ID NO: 1072584 - RNA, 19 nt, Artificial Sequence
  Description of Artificial Sequence: Synthetic oligonucleotide
  Sense strand starting at position 1233 of SEQ ID NO: 915342
gccagauuucugcggacag

SEQ ID NO: 1072585 - RNA, 19 nt, Artificial Sequence
  Description of Artificial Sequence: Synthetic oligonucleotide
  Antisense strand to SEQ ID NO: 1072584
cuguccgcagaaaucuggc

SEQ ID NO: 1072586 - RNA, 19 nt, Artificial Sequence
  Description of Artificial Sequence: Synthetic oligonucleotide
  Sense strand starting at position 1234 of SEQ ID NO: 915342
ccagauuucugcggacaga

SEQ ID NO: 1072587 - RNA, 19 nt, Artificial Sequence
  Description of Artificial Sequence: Synthetic oligonucleotide
  Antisense strand to SEQ ID NO: 1072586
ucuguccgcagaaaucugg

SEQ ID NO: 1072588 - RNA, 19 nt, Artificial Sequence
  Description of Artificial Sequence: Synthetic oligonucleotide
  Sense strand starting at position 1577 of SEQ ID NO: 915342
gcucgauuucgcugcguag

SEQ ID NO: 1072589 - RNA, 19 nt, Artificial Sequence
  Description of Artificial Sequence: Synthetic oligonucleotide
  Antisense strand to SEQ ID NO: 1072588
cuacgcagcgaaaucgagc

SEQ ID NO: 1072590 - RNA, 19 nt, Artificial Sequence
  Description of Artificial Sequence: Synthetic oligonucleotide
  Sense strand starting at position 1579 of SEQ ID NO: 915342
ucgauuucgcugcguagau

SEQ ID NO: 1072591 - RNA, 19 nt, Artificial Sequence
  Description of Artificial Sequence: Synthetic oligonucleotide
  Antisense strand to SEQ ID NO: 1072590
aucuacgcagcgaaaucga

SEQ ID NO: 1072592 - RNA, 19 nt, Artificial Sequence
  Description of Artificial Sequence: Synthetic oligonucleotide
  Sense strand starting at position 1589 of SEQ ID NO: 915342
ugcguagaugucugaggca

SEQ ID NO: 1072593 - RNA, 19 nt, Artificial Sequence
  Description of Artificial Sequence: Synthetic oligonucleotide
  Antisense strand to SEQ ID NO: 1072592
ugccucagacaucuacgca

SEQ ID NO: 1072594 - RNA, 19 nt, Artificial Sequence
  Description of Artificial Sequence: Synthetic oligonucleotide
  Sense strand starting at position 1617 of SEQ ID NO: 915342
gggauuuauugucauuaac

SEQ ID NO: 1072595 - RNA, 19 nt, Artificial Sequence
  Description of Artificial Sequence: Synthetic oligonucleotide
  Antisense strand to SEQ ID NO: 1072594
guuaaugacaauaaauccc

SEQ ID NO: 1072596 - RNA, 19 nt, Artificial Sequence
  Description of Artificial Sequence: Synthetic oligonucleotide
  Sense strand starting at position 1829 of SEQ ID NO: 915342
agaucucuuccucgcggaa

SEQ ID NO: 1072597 - RNA, 19 nt, Artificial Sequence
  Description of Artificial Sequence: Synthetic oligonucleotide
  Antisense strand to SEQ ID NO: 1072596
uuccgcgaggaagagaucu

SEQ ID NO: 1072598 - RNA, 19 nt, Artificial Sequence
  Description of Artificial Sequence: Synthetic oligonucleotide
  Sense strand starting at position 1948 of SEQ ID NO: 915342
gcaauuggaccgggucuaa

SEQ ID NO: 1072599 - RNA, 19 nt, Artificial Sequence
  Description of Artificial Sequence: Synthetic oligonucleotide
  Antisense strand to SEQ ID NO: 1072598
uuagacccgguccaauugc

SEQ ID NO: 1072600 - RNA, 19 nt, Artificial Sequence
  Description of Artificial Sequence: Synthetic oligonucleotide
  Sense strand starting at position 2181 of SEQ ID NO: 915342
gggccaugauggguuuacu

SEQ ID NO: 1072601 - RNA, 19 nt, Artificial Sequence
  Description of Artificial Sequence: Synthetic oligonucleotide
  Antisense strand to SEQ ID NO: 1072600
aguaaacccaucauggccc

SEQ ID NO: 1072602 - RNA, 19 nt, Artificial Sequence
  Description of Artificial Sequence: Synthetic oligonucleotide
  Sense strand starting at position 2209 of SEQ ID NO: 915342
acucaagaaugggcuuaua

SEQ ID NO: 1072603 - RNA, 19 nt, Artificial Sequence
  Description of Artificial Sequence: Synthetic oligonucleotide
  Antisense strand to SEQ ID NO: 1072602
uauaagcccauucuugagu

SEQ ID NO: 1072604 - RNA, 19 nt, Artificial Sequence
  Description of Artificial Sequence: Synthetic oligonucleotide
  Sense strand starting at position 2212 of SEQ ID NO: 915342
caagaaugggcuuauaguu

SEQ ID NO: 1072605 - RNA, 19 nt, Artificial Sequence
  Description of Artificial Sequence: Synthetic oligonucleotide
  Antisense strand to SEQ ID NO: 1072604
aacuauaagcccauucuug

SEQ ID NO: 1072606 - RNA, 19 nt, Artificial Sequence
  Description of Artificial Sequence: Synthetic oligonucleotide
  Sense strand starting at position 3057 of SEQ ID NO: 915342
agaugaaauuuccauguug

SEQ ID NO: 1072607 - RNA, 19 nt, Artificial Sequence
  Description of Artificial Sequence: Synthetic oligonucleotide
  Antisense strand to SEQ ID NO: 1072606
caacauggaaauuucaucu

SEQ ID NO: 1072608 - RNA, 19 nt, Artificial Sequence
  Description of Artificial Sequence: Synthetic oligonucleotide
  Sense strand starting at position 3062 of SEQ ID NO: 915342
aaauuuccauguugaagga

SEQ ID NO: 1072609 - RNA, 19 nt, Artificial Sequence
  Description of Artificial Sequence: Synthetic oligonucleotide
  Antisense strand to SEQ ID NO: 1072608
uccuucaacauggaaauuu

SEQ ID NO: 1072610 - RNA, 19 nt, Artificial Sequence
  Description of Artificial Sequence: Synthetic oligonucleotide
  Sense strand starting at position 3127 of SEQ ID NO: 915342
aggagauguugagacggaa

SEQ ID NO: 1072611 - RNA, 19 nt, Artificial Sequence
  Description of Artificial Sequence: Synthetic oligonucleotide
  Antisense strand to SEQ ID NO: 1072610
uuccgucucaacaucuccu

SEQ ID NO: 1072612 - RNA, 19 nt, Artificial Sequence
  Description of Artificial Sequence: Synthetic oligonucleotide
  Sense strand starting at position 3152 of SEQ ID NO: 915342
cuguacagaccuuguugaa

SEQ ID NO: 1072613 - RNA, 19 nt, Artificial Sequence
  Description of Artificial Sequence: Synthetic oligonucleotide
  Antisense strand to SEQ ID NO: 1072612
uucaacaaggucuguacag

SEQ ID NO: 1072614 - RNA, 19 nt, Artificial Sequence
  Description of Artificial Sequence: Synthetic oligonucleotide
  Sense strand starting at position 3527 of SEQ ID NO: 915342
ccacguauuugucauguac

SEQ ID NO: 1072615 - RNA, 19 nt, Artificial Sequence
  Description of Artificial Sequence: Synthetic oligonucleotide
  Antisense strand to SEQ ID NO: 1072614
guacaugacaaauacgugg

SEQ ID NO: 1072616 - RNA, 19 nt, Artificial Sequence
  Description of Artificial Sequence: Synthetic oligonucleotide
  Sense strand starting at position 3529 of SEQ ID NO: 915342
acguauuugucauguacaa

SEQ ID NO: 1072617 - RNA, 19 nt, Artificial Sequence
  Description of Artificial Sequence: Synthetic oligonucleotide
  Antisense strand to SEQ ID NO: 1072616
uuguacaugacaaauacgu

SEQ ID NO: 1072618 - RNA, 19 nt, Artificial Sequence
  Description of Artificial Sequence: Synthetic oligonucleotide
  Sense strand starting at position 3703 of SEQ ID NO: 915342
gugcaauagaucuggugaa

SEQ ID NO: 1072619 - RNA, 19 nt, Artificial Sequence
  Description of Artificial Sequence: Synthetic oligonucleotide
  Antisense strand to SEQ ID NO: 1072618
uucaccagaucuauugcac

SEQ ID NO: 1072620 - RNA, 19 nt, Artificial Sequence
  Description of Artificial Sequence: Synthetic oligonucleotide
  Sense strand starting at position 3704 of SEQ ID NO: 915342
ugcaauagaucuggugaac

SEQ ID NO: 1072621 - RNA, 19 nt, Artificial Sequence
  Description of Artificial Sequence: Synthetic oligonucleotide
  Antisense strand to SEQ ID NO: 1072620
guucaccagaucuauugca

SEQ ID NO: 1072622 - RNA, 19 nt, Artificial Sequence
  Description of Artificial Sequence: Synthetic oligonucleotide
  Sense strand starting at position 3715 of SEQ ID NO: 915342
uggugaacuuauuccucua

SEQ ID NO: 1072623 - RNA, 19 nt, Artificial Sequence
  Description of Artificial Sequence: Synthetic oligonucleotide
  Antisense strand to SEQ ID NO: 1072622
uagaggaauaaguucacca

SEQ ID NO: 1072624 - RNA, 19 nt, Artificial Sequence
  Description of Artificial Sequence: Synthetic oligonucleotide
  Sense strand starting at position 3909 of SEQ ID NO: 915342
aacguaauguucuccagga

SEQ ID NO: 1072625 - RNA, 19 nt, Artificial Sequence
  Description of Artificial Sequence: Synthetic oligonucleotide
  Antisense strand to SEQ ID NO: 1072624
uccuggagaacauuacguu

SEQ ID NO: 1072626 - RNA, 19 nt, Artificial Sequence
  Description of Artificial Sequence: Synthetic oligonucleotide
  Sense strand starting at position 3910 of SEQ ID NO: 915342
acguaauguucuccaggaa

SEQ ID NO: 1072627 - RNA, 19 nt, Artificial Sequence
  Description of Artificial Sequence: Synthetic oligonucleotide
  Antisense strand to SEQ ID NO: 1072626
uuccuggagaacauuacgu

SEQ ID NO: 1072628 - RNA, 19 nt, Artificial Sequence
  Description of Artificial Sequence: Synthetic oligonucleotide
  Sense strand starting at position 3911 of SEQ ID NO: 915342
cguaauguucuccaggaaa

SEQ ID NO: 1072629 - RNA, 19 nt, Artificial Sequence
  Description of Artificial Sequence: Synthetic oligonucleotide
  Antisense strand to SEQ ID NO: 1072628
uuuccuggagaacauuacg

SEQ ID NO: 1072630 - RNA, 19 nt, Artificial Sequence
  Description of Artificial Sequence: Synthetic oligonucleotide
  Sense strand starting at position 28 of SEQ ID NO: 915343
uccuuugucucucuaguuu

SEQ ID NO: 1072631 - RNA, 19 nt, Artificial Sequence
  Description of Artificial Sequence: Synthetic oligonucleotide
  Antisense strand to SEQ ID NO: 1072630
aaacuagagagacaaagga

SEQ ID NO: 1072632 - RNA, 19 nt, Artificial Sequence
  Description of Artificial Sequence: Synthetic oligonucleotide
  Sense strand starting at position 213 of SEQ ID NO: 915343
guuguaguguuacuauuau

SEQ ID NO: 1072633 - RNA, 19 nt, Artificial Sequence
  Description of Artificial Sequence: Synthetic oligonucleotide
  Antisense strand to SEQ ID NO: 1072632
auaauaguaacacuacaac

SEQ ID NO: 1072634 - RNA, 19 nt, Artificial Sequence
  Description of Artificial Sequence: Synthetic oligonucleotide
  Sense strand starting at position 398 of SEQ ID NO: 915343
ugauuacauauacgagguu

SEQ ID NO: 1072635 - RNA, 19 nt, Artificial Sequence
  Description of Artificial Sequence: Synthetic oligonucleotide
  Antisense strand to SEQ ID NO: 1072634
aaccucguauauguaauca

SEQ ID NO: 1072636 - RNA, 19 nt, Artificial Sequence
  Description of Artificial Sequence: Synthetic oligonucleotide
  Sense strand starting at position 434 of SEQ ID NO: 915343
cacuguguuucuuucugga

SEQ ID NO: 1072637 - RNA, 19 nt, Artificial Sequence
  Description of Artificial Sequence: Synthetic oligonucleotide
  Antisense strand to SEQ ID NO: 1072636
uccagaaagaaacacagug

SEQ ID NO: 1072638 - RNA, 19 nt, Artificial Sequence
  Description of Artificial Sequence: Synthetic oligonucleotide
  Sense strand starting at position 467 of SEQ ID NO: 915343
auugcaugauuauugcuaa

SEQ ID NO: 1072639 - RNA, 19 nt, Artificial Sequence
  Description of Artificial Sequence: Synthetic oligonucleotide
  Antisense strand to SEQ ID NO: 1072638
uuagcaauaaucaugcaau

SEQ ID NO: 1072640 - RNA, 19 nt, Artificial Sequence
  Description of Artificial Sequence: Synthetic oligonucleotide
  Sense strand starting at position 590 of SEQ ID NO: 915343
cugagauaauaacaacagu

SEQ ID NO: 1072641 - RNA, 19 nt, Artificial Sequence
  Description of Artificial Sequence: Synthetic oligonucleotide
  Antisense strand to SEQ ID NO: 1072640
acuguuguuauuaucucag

SEQ ID NO: 1072642 - RNA, 19 nt, Artificial Sequence
  Description of Artificial Sequence: Synthetic oligonucleotide
  Sense strand starting at position 603 of SEQ ID NO: 915343
aacagugaauuaugguuga

SEQ ID NO: 1072643 - RNA, 19 nt, Artificial Sequence
  Description of Artificial Sequence: Synthetic oligonucleotide
  Antisense strand to SEQ ID NO: 1072642
ucaaccauaauucacuguu

SEQ ID NO: 1072644 - RNA, 19 nt, Artificial Sequence
  Description of Artificial Sequence: Synthetic oligonucleotide
  Sense strand starting at position 606 of SEQ ID NO: 915343
agugaauuaugguugagca

SEQ ID NO: 1072645 - RNA, 19 nt, Artificial Sequence
  Description of Artificial Sequence: Synthetic oligonucleotide
  Antisense strand to SEQ ID NO: 1072644
ugcucaaccauaauucacu

SEQ ID NO: 1072646 - RNA, 19 nt, Artificial Sequence
  Description of Artificial Sequence: Synthetic oligonucleotide
  Sense strand starting at position 607 of SEQ ID NO: 915343
gugaauuaugguugagcac

SEQ ID NO: 1072647 - RNA, 19 nt, Artificial Sequence
  Description of Artificial Sequence: Synthetic oligonucleotide
  Antisense strand to SEQ ID NO: 1072646
gugcucaaccauaauucac

SEQ ID NO: 1072648 - RNA, 19 nt, Artificial Sequence
  Description of Artificial Sequence: Synthetic oligonucleotide
  Sense strand starting at position 608 of SEQ ID NO: 915343
ugaauuaugguugagcacu

SEQ ID NO: 1072649 - RNA, 19 nt, Artificial Sequence
  Description of Artificial Sequence: Synthetic oligonucleotide
  Antisense strand to SEQ ID NO: 1072648
agugcucaaccauaauuca

SEQ ID NO: 1072650 - RNA, 19 nt, Artificial Sequence
  Description of Artificial Sequence: Synthetic oligonucleotide
  Sense strand starting at position 653 of SEQ ID NO: 915343
ggcacuuucugaguauuaa

SEQ ID NO: 1072651 - RNA, 19 nt, Artificial Sequence
  Description of Artificial Sequence: Synthetic oligonucleotide
  Antisense strand to SEQ ID NO: 1072650
uuaauacucagaaagugcc

SEQ ID NO: 1072652 - RNA, 19 nt, Artificial Sequence
  Description of Artificial Sequence: Synthetic oligonucleotide
  Sense strand starting at position 654 of SEQ ID NO: 915343
gcacuuucugaguauuaag

SEQ ID NO: 1072653 - RNA, 19 nt, Artificial Sequence
  Description of Artificial Sequence: Synthetic oligonucleotide
  Antisense strand to SEQ ID NO: 1072652
cuuaauacucagaaagugc

SEQ ID NO: 1072654 - RNA, 19 nt, Artificial Sequence
  Description of Artificial Sequence: Synthetic oligonucleotide
  Sense strand starting at position 657 of SEQ ID NO: 915343
cuuucugaguauuaaguga

SEQ ID NO: 1072655 - RNA, 19 nt, Artificial Sequence
  Description of Artificial Sequence: Synthetic oligonucleotide
  Antisense strand to SEQ ID NO: 1072654
ucacuuaauacucagaaag

SEQ ID NO: 1072656 - RNA, 19 nt, Artificial Sequence
  Description of Artificial Sequence: Synthetic oligonucleotide
  Sense strand starting at position 1038 of SEQ ID NO: 915343
auuugaacuugaugagagu

SEQ ID NO: 1072657 - RNA, 19 nt, Artificial Sequence
  Description of Artificial Sequence: Synthetic oligonucleotide
  Antisense strand to SEQ ID NO: 1072656
acucucaucaaguucaaau

SEQ ID NO: 1072658 - RNA, 19 nt, Artificial Sequence
  Description of Artificial Sequence: Synthetic oligonucleotide
  Sense strand starting at position 1188 of SEQ ID NO: 915343
ggcuggucaugggaugagu

SEQ ID NO: 1072659 - RNA, 19 nt, Artificial Sequence
  Description of Artificial Sequence: Synthetic oligonucleotide
  Antisense strand to SEQ ID NO: 1072658
acucaucccaugaccagcc

SEQ ID NO: 1072660 - RNA, 19 nt, Artificial Sequence
  Description of Artificial Sequence: Synthetic oligonucleotide
  Sense strand starting at position 1197 of SEQ ID NO: 915343
ugggaugagucagcugaca

SEQ ID NO: 1072661 - RNA, 19 nt, Artificial Sequence
  Description of Artificial Sequence: Synthetic oligonucleotide
  Antisense strand to SEQ ID NO: 1072660
ugucagcugacucauccca

SEQ ID NO: 1072662 - RNA, 19 nt, Artificial Sequence
  Description of Artificial Sequence: Synthetic oligonucleotide
  Sense strand starting at position 1199 of SEQ ID NO: 915343
ggaugagucagcugacaua

SEQ ID NO: 1072663 - RNA, 19 nt, Artificial Sequence
  Description of Artificial Sequence: Synthetic oligonucleotide
  Antisense strand to SEQ ID NO: 1072662
uaugucagcugacucaucc

SEQ ID NO: 1072664 - RNA, 19 nt, Artificial Sequence
  Description of Artificial Sequence: Synthetic oligonucleotide
  Sense strand starting at position 1265 of SEQ ID NO: 915343
gccagauuucugcggacag

SEQ ID NO: 1072665 - RNA, 19 nt, Artificial Sequence
  Description of Artificial Sequence: Synthetic oligonucleotide
  Antisense strand to SEQ ID NO: 1072664
cuguccgcagaaaucuggc

SEQ ID NO: 1072666 - RNA, 19 nt, Artificial Sequence
  Description of Artificial Sequence: Synthetic oligonucleotide
  Sense strand starting at position 1266 of SEQ ID NO: 915343
ccagauuucugcggacaga

SEQ ID NO: 1072667 - RNA, 19 nt, Artificial Sequence
  Description of Artificial Sequence: Synthetic oligonucleotide
  Antisense strand to SEQ ID NO: 1072666
ucuguccgcagaaaucugg

SEQ ID NO: 1072668 - RNA, 19 nt, Artificial Sequence
  Description of Artificial Sequence: Synthetic oligonucleotide
  Sense strand starting at position 1609 of SEQ ID NO: 915343
gcucgauuucgcugcguag

SEQ ID NO: 1072669 - RNA, 19 nt, Artificial Sequence
  Description of Artificial Sequence: Synthetic oligonucleotide
  Antisense strand to SEQ ID NO: 1072668
cuacgcagcgaaaucgagc

SEQ ID NO: 1072670 - RNA, 19 nt, Artificial Sequence
  Description of Artificial Sequence: Synthetic oligonucleotide
  Sense strand starting at position 1611 of SEQ ID NO: 915343
ucgauuucgcugcguagau

SEQ ID NO: 1072671 - RNA, 19 nt, Artificial Sequence
  Description of Artificial Sequence: Synthetic oligonucleotide
  Antisense strand to SEQ ID NO: 1072670
aucuacgcagcgaaaucga

SEQ ID NO: 1072672 - RNA, 19 nt, Artificial Sequence
  Description of Artificial Sequence: Synthetic oligonucleotide
  Sense strand starting at position 1621 of SEQ ID NO: 915343
ugcguagaugucugaggca

SEQ ID NO: 1072673 - RNA, 19 nt, Artificial Sequence
  Description of Artificial Sequence: Synthetic oligonucleotide
  Antisense strand to SEQ ID NO: 1072672
ugccucagacaucuacgca

SEQ ID NO: 1072674 - RNA, 19 nt, Artificial Sequence
  Description of Artificial Sequence: Synthetic oligonucleotide
  Sense strand starting at position 1649 of SEQ ID NO: 915343
gggauuuauugucauuaac

SEQ ID NO: 1072675 - RNA, 19 nt, Artificial Sequence
  Description of Artificial Sequence: Synthetic oligonucleotide
  Antisense strand to SEQ ID NO: 1072674
guuaaugacaauaaauccc

SEQ ID NO: 1072676 - RNA, 19 nt, Artificial Sequence
  Description of Artificial Sequence: Synthetic oligonucleotide
  Sense strand starting at position 1861 of SEQ ID NO: 915343
agaucucuuccucgcggaa

SEQ ID NO: 1072677 - RNA, 19 nt, Artificial Sequence
  Description of Artificial Sequence: Synthetic oligonucleotide
  Antisense strand to SEQ ID NO: 1072676
uuccgcgaggaagagaucu

SEQ ID NO: 1072678 - RNA, 19 nt, Artificial Sequence
  Description of Artificial Sequence: Synthetic oligonucleotide
  Sense strand starting at position 1980 of SEQ ID NO: 915343
gcaauuggaccgggucuaa

SEQ ID NO: 1072679 - RNA, 19 nt, Artificial Sequence
  Description of Artificial Sequence: Synthetic oligonucleotide
  Antisense strand to SEQ ID NO: 1072678
uuagacccgguccaauugc

SEQ ID NO: 1072680 - RNA, 19 nt, Artificial Sequence
  Description of Artificial Sequence: Synthetic oligonucleotide
  Sense strand starting at position 2213 of SEQ ID NO: 915343
gggccaugauggguuuacu

SEQ ID NO: 1072681 - RNA, 19 nt, Artificial Sequence
  Description of Artificial Sequence: Synthetic oligonucleotide
  Antisense strand to SEQ ID NO: 1072680
aguaaacccaucauggccc

SEQ ID NO: 1072682 - RNA, 19 nt, Artificial Sequence
  Description of Artificial Sequence: Synthetic oligonucleotide
  Sense strand starting at position 2241 of SEQ ID NO: 915343
acucaagaaugggcuuaua

SEQ ID NO: 1072683 - RNA, 19 nt, Artificial Sequence
  Description of Artificial Sequence: Synthetic oligonucleotide
  Antisense strand to SEQ ID NO: 1072682
uauaagcccauucuugagu

SEQ ID NO: 1072684 - RNA, 19 nt, Artificial Sequence
  Description of Artificial Sequence: Synthetic oligonucleotide
  Sense strand starting at position 2244 of SEQ ID NO: 915343
caagaaugggcuuauaguu

SEQ ID NO: 1072685 - RNA, 19 nt, Artificial Sequence
  Description of Artificial Sequence: Synthetic oligonucleotide
  Antisense strand to SEQ ID NO: 1072684
aacuauaagcccauucuug

SEQ ID NO: 1072686 - RNA, 19 nt, Artificial Sequence
  Description of Artificial Sequence: Synthetic oligonucleotide
  Sense strand starting at position 3089 of SEQ ID NO: 915343
agaugaaauuuccauguug

SEQ ID NO: 1072687 - RNA, 19 nt, Artificial Sequence
  Description of Artificial Sequence: Synthetic oligonucleotide
  Antisense strand to SEQ ID NO: 1072686
caacauggaaauuucaucu

SEQ ID NO: 1072688 - RNA, 19 nt, Artificial Sequence
  Description of Artificial Sequence: Synthetic oligonucleotide
  Sense strand starting at position 3094 of SEQ ID NO: 915343
aaauuuccauguugaagga

SEQ ID NO: 1072689 - RNA, 19 nt, Artificial Sequence
  Description of Artificial Sequence: Synthetic oligonucleotide
  Antisense strand to SEQ ID NO: 1072688
uccuucaacauggaaauuu

SEQ ID NO: 1072690 - RNA, 19 nt, Artificial Sequence
  Description of Artificial Sequence: Synthetic oligonucleotide
  Sense strand starting at position 3159 of SEQ ID NO: 915343
aggagauguugagacggaa

SEQ ID NO: 1072691 - RNA, 19 nt, Artificial Sequence
  Description of Artificial Sequence: Synthetic oligonucleotide
  Antisense strand to SEQ ID NO: 1072690
uuccgucucaacaucuccu

SEQ ID NO: 1072692 - RNA, 19 nt, Artificial Sequence
  Description of Artificial Sequence: Synthetic oligonucleotide
  Sense strand starting at position 3184 of SEQ ID NO: 915343
cuguacagaccuuguugaa

SEQ ID NO: 1072693 - RNA, 19 nt, Artificial Sequence
  Description of Artificial Sequence: Synthetic oligonucleotide
  Antisense strand to SEQ ID NO: 1072692
uucaacaaggucuguacag

SEQ ID NO: 1072694 - RNA, 19 nt, Artificial Sequence
  Description of Artificial Sequence: Synthetic oligonucleotide
  Sense strand starting at position 3559 of SEQ ID NO: 915343
ccacguauuugucauguac

SEQ ID NO: 1072695 - RNA, 19 nt, Artificial Sequence
  Description of Artificial Sequence: Synthetic oligonucleotide
  Antisense strand to SEQ ID NO: 1072694
guacaugacaaauacgugg

SEQ ID NO: 1072696 - RNA, 19 nt, Artificial Sequence
  Description of Artificial Sequence: Synthetic oligonucleotide
  Sense strand starting at position 3561 of SEQ ID NO: 915343
acguauuugucauguacaa

SEQ ID NO: 1072697 - RNA, 19 nt, Artificial Sequence
  Description of Artificial Sequence: Synthetic oligonucleotide
  Antisense strand to SEQ ID NO: 1072696
uuguacaugacaaauacgu

SEQ ID NO: 1072698 - RNA, 19 nt, Artificial Sequence
  Description of Artificial Sequence: Synthetic oligonucleotide
  Sense strand starting at position 3735 of SEQ ID NO: 915343
gugcaauagaucuggugaa

SEQ ID NO: 1072699 - RNA, 19 nt, Artificial Sequence
  Description of Artificial Sequence: Synthetic oligonucleotide
  Antisense strand to SEQ ID NO: 1072698
uucaccagaucuauugcac

SEQ ID NO: 1072700 - RNA, 19 nt, Artificial Sequence
  Description of Artificial Sequence: Synthetic oligonucleotide
  Sense strand starting at position 3736 of SEQ ID NO: 915343
ugcaauagaucuggugaac

SEQ ID NO: 1072701 - RNA, 19 nt, Artificial Sequence
  Description of Artificial Sequence: Synthetic oligonucleotide
  Antisense strand to SEQ ID NO: 1072700
guucaccagaucuauugca

SEQ ID NO: 1072702 - RNA, 19 nt, Artificial Sequence
  Description of Artificial Sequence: Synthetic oligonucleotide
  Sense strand starting at position 3747 of SEQ ID NO: 915343
uggugaacuuauuccucua

SEQ ID NO: 1072703 - RNA, 19 nt, Artificial Sequence
  Description of Artificial Sequence: Synthetic oligonucleotide
  Antisense strand to SEQ ID NO: 1072702
uagaggaauaaguucacca

SEQ ID NO: 1072704 - RNA, 19 nt, Artificial Sequence
  Description of Artificial Sequence: Synthetic oligonucleotide
  Sense strand starting at position 3941 of SEQ ID NO: 915343
aacguaauguucuccagga

SEQ ID NO: 1072705 - RNA, 19 nt, Artificial Sequence
  Description of Artificial Sequence: Synthetic oligonucleotide
  Antisense strand to SEQ ID NO: 1072704
uccuggagaacauuacguu

SEQ ID NO: 1072706 - RNA, 19 nt, Artificial Sequence
  Description of Artificial Sequence: Synthetic oligonucleotide
  Sense strand starting at position 3942 of SEQ ID NO: 915343
acguaauguucuccaggaa

SEQ ID NO: 1072707 - RNA, 19 nt, Artificial Sequence
  Description of Artificial Sequence: Synthetic oligonucleotide
  Antisense strand to SEQ ID NO: 1072706
uuccuggagaacauuacgu

SEQ ID NO: 1072708 - RNA, 19 nt, Artificial Sequence
  Description of Artificial Sequence: Synthetic oligonucleotide
  Sense strand starting at position 3943 of SEQ ID NO: 915343
cguaauguucuccaggaaa

SEQ ID NO: 1072709 - RNA, 19 nt, Artificial Sequence
  Description of Artificial Sequence: Synthetic oligonucleotide
  Antisense strand to SEQ ID NO: 1072708
uuuccuggagaacauuacg

SEQ ID NO: 1072710 - RNA, 19 nt, Artificial Sequence
  Description of Artificial Sequence: Synthetic oligonucleotide
  Sense strand starting at position 22 of SEQ ID NO: 915344
cagugucugguggacaaua

SEQ ID NO: 1072711 - RNA, 19 nt, Artificial Sequence
  Description of Artificial Sequence: Synthetic oligonucleotide
  Antisense strand to SEQ ID NO: 1072710
uauuguccaccagacacug

SEQ ID NO: 1072712 - RNA, 19 nt, Artificial Sequence
  Description of Artificial Sequence: Synthetic oligonucleotide
  Sense strand starting at position 30 of SEQ ID NO: 915344
gguggacaauacuauuauu

SEQ ID NO: 1072713 - RNA, 19 nt, Artificial Sequence
  Description of Artificial Sequence: Synthetic oligonucleotide
  Antisense strand to SEQ ID NO: 1072712
aauaauaguauuguccacc

SEQ ID NO: 1072714 - RNA, 19 nt, Artificial Sequence
  Description of Artificial Sequence: Synthetic oligonucleotide
  Sense strand starting at position 111 of SEQ ID NO: 915344
agcaucuucgagcacacaa

SEQ ID NO: 1072715 - RNA, 19 nt, Artificial Sequence
  Description of Artificial Sequence: Synthetic oligonucleotide
  Antisense strand to SEQ ID NO: 1072714
uugugugcucgaagaugcu

SEQ ID NO: 1072716 - RNA, 19 nt, Artificial Sequence
  Description of Artificial Sequence: Synthetic oligonucleotide
  Sense strand starting at position 351 of SEQ ID NO: 915344
ugggauaacucucugcuuu

SEQ ID NO: 1072717 - RNA, 19 nt, Artificial Sequence
  Description of Artificial Sequence: Synthetic oligonucleotide
  Antisense strand to SEQ ID NO: 1072716
aaagcagagaguuauccca

SEQ ID NO: 1072718 - RNA, 19 nt, Artificial Sequence
  Description of Artificial Sequence: Synthetic oligonucleotide
  Sense strand starting at position 352 of SEQ ID NO: 915344
gggauaacucucugcuuuc

SEQ ID NO: 1072719 - RNA, 19 nt, Artificial Sequence
  Description of Artificial Sequence: Synthetic oligonucleotide
  Antisense strand to SEQ ID NO: 1072718
gaaagcagagaguuauccc

SEQ ID NO: 1072720 - RNA, 19 nt, Artificial Sequence
  Description of Artificial Sequence: Synthetic oligonucleotide
  Sense strand starting at position 446 of SEQ ID NO: 915344
gggcguucaucugggaaca

SEQ ID NO: 1072721 - RNA, 19 nt, Artificial Sequence
  Description of Artificial Sequence: Synthetic oligonucleotide
  Antisense strand to SEQ ID NO: 1072720
uguucccagaugaacgccc

SEQ ID NO: 1072722 - RNA, 19 nt, Artificial Sequence
  Description of Artificial Sequence: Synthetic oligonucleotide
  Sense strand starting at position 448 of SEQ ID NO: 915344
gcguucaucugggaacaga

SEQ ID NO: 1072723 - RNA, 19 nt, Artificial Sequence
  Description of Artificial Sequence: Synthetic oligonucleotide
  Antisense strand to SEQ ID NO: 1072722
ucuguucccagaugaacgc

SEQ ID NO: 1072724 - RNA, 19 nt, Artificial Sequence
  Description of Artificial Sequence: Synthetic oligonucleotide
  Sense strand starting at position 747 of SEQ ID NO: 915344
uuggguuuaucacagugga

SEQ ID NO: 1072725 - RNA, 19 nt, Artificial Sequence
  Description of Artificial Sequence: Synthetic oligonucleotide
  Antisense strand to SEQ ID NO: 1072724
uccacugugauaaacccaa

SEQ ID NO: 1072726 - RNA, 19 nt, Artificial Sequence
  Description of Artificial Sequence: Synthetic oligonucleotide
  Sense strand starting at position 750 of SEQ ID NO: 915344
gguuuaucacaguggaaug

SEQ ID NO: 1072727 - RNA, 19 nt, Artificial Sequence
  Description of Artificial Sequence: Synthetic oligonucleotide
  Antisense strand to SEQ ID NO: 1072726
cauuccacugugauaaacc

SEQ ID NO: 1072728 - RNA, 19 nt, Artificial Sequence
  Description of Artificial Sequence: Synthetic oligonucleotide
  Sense strand starting at position 751 of SEQ ID NO: 915344
guuuaucacaguggaauga

SEQ ID NO: 1072729 - RNA, 19 nt, Artificial Sequence
  Description of Artificial Sequence: Synthetic oligonucleotide
  Antisense strand to SEQ ID NO: 1072728
ucauuccacugugauaaac

SEQ ID NO: 1072730 - RNA, 19 nt, Artificial Sequence
  Description of Artificial Sequence: Synthetic oligonucleotide
  Sense strand starting at position 1729 of SEQ ID NO: 915344
cugaaagagucccgggauu

SEQ ID NO: 1072731 - RNA, 19 nt, Artificial Sequence
  Description of Artificial Sequence: Synthetic oligonucleotide
  Antisense strand to SEQ ID NO: 1072730
aaucccgggacucuuucag

SEQ ID NO: 1072732 - RNA, 19 nt, Artificial Sequence
  Description of Artificial Sequence: Synthetic oligonucleotide
  Sense strand starting at position 1768 of SEQ ID NO: 915344
gcgcuuaccucgucccauu

SEQ ID NO: 1072733 - RNA, 19 nt, Artificial Sequence
  Description of Artificial Sequence: Synthetic oligonucleotide
  Antisense strand to SEQ ID NO: 1072732
aaugggacgagguaagcgc

SEQ ID NO: 1072734 - RNA, 19 nt, Artificial Sequence
  Description of Artificial Sequence: Synthetic oligonucleotide
  Sense strand starting at position 2172 of SEQ ID NO: 915344
ucagcagaaccugauucuu

SEQ ID NO: 1072735 - RNA, 19 nt, Artificial Sequence
  Description of Artificial Sequence: Synthetic oligonucleotide
  Antisense strand to SEQ ID NO: 1072734
aagaaucagguucugcuga

SEQ ID NO: 1072736 - RNA, 19 nt, Artificial Sequence
  Description of Artificial Sequence: Synthetic oligonucleotide
  Sense strand starting at position 2287 of SEQ ID NO: 915344
ggaucagcccacugagguu

SEQ ID NO: 1072737 - RNA, 19 nt, Artificial Sequence
  Description of Artificial Sequence: Synthetic oligonucleotide
  Antisense strand to SEQ ID NO: 1072736
aaccucagugggcugaucc

SEQ ID NO: 1072738 - RNA, 19 nt, Artificial Sequence
  Description of Artificial Sequence: Synthetic oligonucleotide
  Sense strand starting at position 2300 of SEQ ID NO: 915344
gagguuuccgagcgacuag

SEQ ID NO: 1072739 - RNA, 19 nt, Artificial Sequence
  Description of Artificial Sequence: Synthetic oligonucleotide
  Antisense strand to SEQ ID NO: 1072738
cuagucgcucggaaaccuc

SEQ ID NO: 1072740 - RNA, 19 nt, Artificial Sequence
  Description of Artificial Sequence: Synthetic oligonucleotide
  Sense strand starting at position 2487 of SEQ ID NO: 915344
gagcacuuagccggcuaau

SEQ ID NO: 1072741 - RNA, 19 nt, Artificial Sequence
  Description of Artificial Sequence: Synthetic oligonucleotide
  Antisense strand to SEQ ID NO: 1072740
auuagccggcuaagugcuc

SEQ ID NO: 1072742 - RNA, 19 nt, Artificial Sequence
  Description of Artificial Sequence: Synthetic oligonucleotide
  Sense strand starting at position 2587 of SEQ ID NO: 915344
cauccuggucuucgagagu

SEQ ID NO: 1072743 - RNA, 19 nt, Artificial Sequence
  Description of Artificial Sequence: Synthetic oligonucleotide
  Antisense strand to SEQ ID NO: 1072742
acucucgaagaccaggaug

SEQ ID NO: 1072744 - RNA, 19 nt, Artificial Sequence
  Description of Artificial Sequence: Synthetic oligonucleotide
  Sense strand starting at position 2716 of SEQ ID NO: 915344
gucagaagcuuuguggaug

SEQ ID NO: 1072745 - RNA, 19 nt, Artificial Sequence
  Description of Artificial Sequence: Synthetic oligonucleotide
  Antisense strand to SEQ ID NO: 1072744
cauccacaaagcuucugac

SEQ ID NO: 1072746 - RNA, 19 nt, Artificial Sequence
  Description of Artificial Sequence: Synthetic oligonucleotide
  Sense strand starting at position 2790 of SEQ ID NO: 915344
cccugaaaucugcguucca

SEQ ID NO: 1072747 - RNA, 19 nt, Artificial Sequence
  Description of Artificial Sequence: Synthetic oligonucleotide
  Antisense strand to SEQ ID NO: 1072746
uggaacgcagauuucaggg

SEQ ID NO: 1072748 - RNA, 19 nt, Artificial Sequence
  Description of Artificial Sequence: Synthetic oligonucleotide
  Sense strand starting at position 2791 of SEQ ID NO: 915344
ccugaaaucugcguuccag

SEQ ID NO: 1072749 - RNA, 19 nt, Artificial Sequence
  Description of Artificial Sequence: Synthetic oligonucleotide
  Antisense strand to SEQ ID NO: 1072748
cuggaacgcagauuucagg

SEQ ID NO: 1072750 - RNA, 19 nt, Artificial Sequence
  Description of Artificial Sequence: Synthetic oligonucleotide
  Sense strand starting at position 2795 of SEQ ID NO: 915344
aaaucugcguuccagagau

SEQ ID NO: 1072751 - RNA, 19 nt, Artificial Sequence
  Description of Artificial Sequence: Synthetic oligonucleotide
  Antisense strand to SEQ ID NO: 1072750
aucucuggaacgcagauuu

SEQ ID NO: 1072752 - RNA, 19 nt, Artificial Sequence
  Description of Artificial Sequence: Synthetic oligonucleotide
  Sense strand starting at position 2799 of SEQ ID NO: 915344
cugcguuccagagauggga

SEQ ID NO: 1072753 - RNA, 19 nt, Artificial Sequence
  Description of Artificial Sequence: Synthetic oligonucleotide
  Antisense strand to SEQ ID NO: 1072752
ucccaucucuggaacgcag

SEQ ID NO: 1072754 - RNA, 19 nt, Artificial Sequence
  Description of Artificial Sequence: Synthetic oligonucleotide
  Sense strand starting at position 2946 of SEQ ID NO: 915344
gcagguuuaaaguagaacu

SEQ ID NO: 1072755 - RNA, 19 nt, Artificial Sequence
  Description of Artificial Sequence: Synthetic oligonucleotide
  Antisense strand to SEQ ID NO: 1072754
aguucuacuuuaaaccugc

SEQ ID NO: 1072756 - RNA, 19 nt, Artificial Sequence
  Description of Artificial Sequence: Synthetic oligonucleotide
  Sense strand starting at position 3128 of SEQ ID NO: 915344
ccgccaaguucuccaucaa

SEQ ID NO: 1072757 - RNA, 19 nt, Artificial Sequence
  Description of Artificial Sequence: Synthetic oligonucleotide
  Antisense strand to SEQ ID NO: 1072756
uugauggagaacuuggcgg

SEQ ID NO: 1072758 - RNA, 19 nt, Artificial Sequence
  Description of Artificial Sequence: Synthetic oligonucleotide
  Sense strand starting at position 3129 of SEQ ID NO: 915344
cgccaaguucuccaucaac

SEQ ID NO: 1072759 - RNA, 19 nt, Artificial Sequence
  Description of Artificial Sequence: Synthetic oligonucleotide
  Antisense strand to SEQ ID NO: 1072758
guugauggagaacuuggcg

SEQ ID NO: 1072760 - RNA, 19 nt, Artificial Sequence
  Description of Artificial Sequence: Synthetic oligonucleotide
  Sense strand starting at position 3192 of SEQ ID NO: 915344
gugugauuaugaucuccac

SEQ ID NO: 1072761 - RNA, 19 nt, Artificial Sequence
  Description of Artificial Sequence: Synthetic oligonucleotide
  Antisense strand to SEQ ID NO: 1072760
guggagaucauaaucacac

SEQ ID NO: 1072762 - RNA, 19 nt, Artificial Sequence
  Description of Artificial Sequence: Synthetic oligonucleotide
  Sense strand starting at position 3195 of SEQ ID NO: 915344
ugauuaugaucuccacuug

SEQ ID NO: 1072763 - RNA, 19 nt, Artificial Sequence
  Description of Artificial Sequence: Synthetic oligonucleotide
  Antisense strand to SEQ ID NO: 1072762
caaguggagaucauaauca

SEQ ID NO: 1072764 - RNA, 19 nt, Artificial Sequence
  Description of Artificial Sequence: Synthetic oligonucleotide
  Sense strand starting at position 3249 of SEQ ID NO: 915344
cacagcuucuuaggaggau

SEQ ID NO: 1072765 - RNA, 19 nt, Artificial Sequence
  Description of Artificial Sequence: Synthetic oligonucleotide
  Antisense strand to SEQ ID NO: 1072764
auccuccuaagaagcugug

SEQ ID NO: 1072766 - RNA, 19 nt, Artificial Sequence
  Description of Artificial Sequence: Synthetic oligonucleotide
  Sense strand starting at position 3250 of SEQ ID NO: 915344
acagcuucuuaggaggauu

SEQ ID NO: 1072767 - RNA, 19 nt, Artificial Sequence
  Description of Artificial Sequence: Synthetic oligonucleotide
  Antisense strand to SEQ ID NO: 1072766
aauccuccuaagaagcugu

SEQ ID NO: 1072768 - RNA, 19 nt, Artificial Sequence
  Description of Artificial Sequence: Synthetic oligonucleotide
  Sense strand starting at position 3430 of SEQ ID NO: 915344
ucagucaccuuguccagaa

SEQ ID NO: 1072769 - RNA, 19 nt, Artificial Sequence
  Description of Artificial Sequence: Synthetic oligonucleotide
  Antisense strand to SEQ ID NO: 1072768
uucuggacaaggugacuga

SEQ ID NO: 1072770 - RNA, 19 nt, Artificial Sequence
  Description of Artificial Sequence: Synthetic oligonucleotide
  Sense strand starting at position 3446 of SEQ ID NO: 915344
gaaccuaaagguuguugua

SEQ ID NO: 1072771 - RNA, 19 nt, Artificial Sequence
  Description of Artificial Sequence: Synthetic oligonucleotide
  Antisense strand to SEQ ID NO: 1072770
uacaacaaccuuuagguuc

SEQ ID NO: 1072772 - RNA, 19 nt, Artificial Sequence
  Description of Artificial Sequence: Synthetic oligonucleotide
  Sense strand starting at position 3448 of SEQ ID NO: 915344
accuaaagguuguuguaua

SEQ ID NO: 1072773 - RNA, 19 nt, Artificial Sequence
  Description of Artificial Sequence: Synthetic oligonucleotide
  Antisense strand to SEQ ID NO: 1072772
uauacaacaaccuuuaggu

SEQ ID NO: 1072774 - RNA, 19 nt, Artificial Sequence
  Description of Artificial Sequence: Synthetic oligonucleotide
  Sense strand starting at position 3449 of SEQ ID NO: 915344
ccuaaagguuguuguauac

SEQ ID NO: 1072775 - RNA, 19 nt, Artificial Sequence
  Description of Artificial Sequence: Synthetic oligonucleotide
  Antisense strand to SEQ ID NO: 1072774
guauacaacaaccuuuagg

SEQ ID NO: 1072776 - RNA, 19 nt, Artificial Sequence
  Description of Artificial Sequence: Synthetic oligonucleotide
  Sense strand starting at position 3453 of SEQ ID NO: 915344
aagguuguuguauacauaa

SEQ ID NO: 1072777 - RNA, 19 nt, Artificial Sequence
  Description of Artificial Sequence: Synthetic oligonucleotide
  Antisense strand to SEQ ID NO: 1072776
uuauguauacaacaaccuu

SEQ ID NO: 1072778 - RNA, 19 nt, Artificial Sequence
  Description of Artificial Sequence: Synthetic oligonucleotide
  Sense strand starting at position 3487 of SEQ ID NO: 915344
augccaaauugacaugagu

SEQ ID NO: 1072779 - RNA, 19 nt, Artificial Sequence
  Description of Artificial Sequence: Synthetic oligonucleotide
  Antisense strand to SEQ ID NO: 1072778
acucaugucaauuuggcau

SEQ ID NO: 1072780 - RNA, 19 nt, Artificial Sequence
  Description of Artificial Sequence: Synthetic oligonucleotide
  Sense strand starting at position 3489 of SEQ ID NO: 915344
gccaaauugacaugaguag

SEQ ID NO: 1072781 - RNA, 19 nt, Artificial Sequence
  Description of Artificial Sequence: Synthetic oligonucleotide
  Antisense strand to SEQ ID NO: 1072780
cuacucaugucaauuuggc

SEQ ID NO: 1072782 - RNA, 19 nt, Artificial Sequence
  Description of Artificial Sequence: Synthetic oligonucleotide
  Sense strand starting at position 3653 of SEQ ID NO: 915344
gcaagcguacuuuagagaa

SEQ ID NO: 1072783 - RNA, 19 nt, Artificial Sequence
  Description of Artificial Sequence: Synthetic oligonucleotide
  Antisense strand to SEQ ID NO: 1072782
uucucuaaaguacgcuugc

SEQ ID NO: 1072784 - RNA, 19 nt, Artificial Sequence
  Description of Artificial Sequence: Synthetic oligonucleotide
  Sense strand starting at position 3657 of SEQ ID NO: 915344
gcguacuuuagagaagcau

SEQ ID NO: 1072785 - RNA, 19 nt, Artificial Sequence
  Description of Artificial Sequence: Synthetic oligonucleotide
  Antisense strand to SEQ ID NO: 1072784
augcuucucuaaaguacgc

SEQ ID NO: 1072786 - RNA, 19 nt, Artificial Sequence
  Description of Artificial Sequence: Synthetic oligonucleotide
  Sense strand starting at position 3816 of SEQ ID NO: 915344
cauccuugguaaugguaau

SEQ ID NO: 1072787 - RNA, 19 nt, Artificial Sequence
  Description of Artificial Sequence: Synthetic oligonucleotide
  Antisense strand to SEQ ID NO: 1072786
auuaccauuaccaaggaug

SEQ ID NO: 1072788 - RNA, 19 nt, Artificial Sequence
  Description of Artificial Sequence: Synthetic oligonucleotide
  Sense strand starting at position 3880 of SEQ ID NO: 915344
ggacucuacccuugauuga

SEQ ID NO: 1072789 - RNA, 19 nt, Artificial Sequence
  Description of Artificial Sequence: Synthetic oligonucleotide
  Antisense strand to SEQ ID NO: 1072788
ucaaucaaggguagagucc

SEQ ID NO: 1072790 - RNA, 19 nt, Artificial Sequence
  Description of Artificial Sequence: Synthetic oligonucleotide
  Sense strand starting at position 153 of SEQ ID NO: 915345
aguaguaaccacgaucuga

SEQ ID NO: 1072791 - RNA, 19 nt, Artificial Sequence
  Description of Artificial Sequence: Synthetic oligonucleotide
  Antisense strand to SEQ ID NO: 1072790
ucagaucgugguuacuacu

SEQ ID NO: 1072792 - RNA, 19 nt, Artificial Sequence
  Description of Artificial Sequence: Synthetic oligonucleotide
  Sense strand starting at position 332 of SEQ ID NO: 915345
gcaguuaugagccagagag

SEQ ID NO: 1072793 - RNA, 19 nt, Artificial Sequence
  Description of Artificial Sequence: Synthetic oligonucleotide
  Antisense strand to SEQ ID NO: 1072792
cucucuggcucauaacugc

SEQ ID NO: 1072794 - RNA, 19 nt, Artificial Sequence
  Description of Artificial Sequence: Synthetic oligonucleotide
  Sense strand starting at position 445 of SEQ ID NO: 915345
aguccuuaggucuguaaau

SEQ ID NO: 1072795 - RNA, 19 nt, Artificial Sequence
  Description of Artificial Sequence: Synthetic oligonucleotide
  Antisense strand to SEQ ID NO: 1072794
auuuacagaccuaaggacu

SEQ ID NO: 1072796 - RNA, 19 nt, Artificial Sequence
  Description of Artificial Sequence: Synthetic oligonucleotide
  Sense strand starting at position 446 of SEQ ID NO: 915345
guccuuaggucuguaaauc

SEQ ID NO: 1072797 - RNA, 19 nt, Artificial Sequence
  Description of Artificial Sequence: Synthetic oligonucleotide
  Antisense strand to SEQ ID NO: 1072796
gauuuacagaccuaaggac

SEQ ID NO: 1072798 - RNA, 19 nt, Artificial Sequence
  Description of Artificial Sequence: Synthetic oligonucleotide
  Sense strand starting at position 447 of SEQ ID NO: 915345
uccuuaggucuguaaaucu

SEQ ID NO: 1072799 - RNA, 19 nt, Artificial Sequence
  Description of Artificial Sequence: Synthetic oligonucleotide
  Antisense strand to SEQ ID NO: 1072798
agauuuacagaccuaagga

SEQ ID NO: 1072800 - RNA, 19 nt, Artificial Sequence
  Description of Artificial Sequence: Synthetic oligonucleotide
  Sense strand starting at position 595 of SEQ ID NO: 915345
gucaguacuagucagacca

SEQ ID NO: 1072801 - RNA, 19 nt, Artificial Sequence
  Description of Artificial Sequence: Synthetic oligonucleotide
  Antisense strand to SEQ ID NO: 1072800
uggucugacuaguacugac

SEQ ID NO: 1072802 - RNA, 19 nt, Artificial Sequence
  Description of Artificial Sequence: Synthetic oligonucleotide
  Sense strand starting at position 975 of SEQ ID NO: 915345
gcgcucgaggaaagucauu

SEQ ID NO: 1072803 - RNA, 19 nt, Artificial Sequence
  Description of Artificial Sequence: Synthetic oligonucleotide
  Antisense strand to SEQ ID NO: 1072802
aaugacuuuccucgagcgc

SEQ ID NO: 1072804 - RNA, 19 nt, Artificial Sequence
  Description of Artificial Sequence: Synthetic oligonucleotide
  Sense strand starting at position 980 of SEQ ID NO: 915345
cgaggaaagucauugguug

SEQ ID NO: 1072805 - RNA, 19 nt, Artificial Sequence
  Description of Artificial Sequence: Synthetic oligonucleotide
  Antisense strand to SEQ ID NO: 1072804
caaccaaugacuuuccucg

SEQ ID NO: 1072806 - RNA, 19 nt, Artificial Sequence
  Description of Artificial Sequence: Synthetic oligonucleotide
  Sense strand starting at position 981 of SEQ ID NO: 915345
gaggaaagucauugguuga

SEQ ID NO: 1072807 - RNA, 19 nt, Artificial Sequence
  Description of Artificial Sequence: Synthetic oligonucleotide
  Antisense strand to SEQ ID NO: 1072806
ucaaccaaugacuuuccuc

SEQ ID NO: 1072808 - RNA, 19 nt, Artificial Sequence
  Description of Artificial Sequence: Synthetic oligonucleotide
  Sense strand starting at position 982 of SEQ ID NO: 915345
aggaaagucauugguugac

SEQ ID NO: 1072809 - RNA, 19 nt, Artificial Sequence
  Description of Artificial Sequence: Synthetic oligonucleotide
  Antisense strand to SEQ ID NO: 1072808
gucaaccaaugacuuuccu

SEQ ID NO: 1072810 - RNA, 19 nt, Artificial Sequence
  Description of Artificial Sequence: Synthetic oligonucleotide
  Sense strand starting at position 984 of SEQ ID NO: 915345
gaaagucauugguugacca

SEQ ID NO: 1072811 - RNA, 19 nt, Artificial Sequence
  Description of Artificial Sequence: Synthetic oligonucleotide
  Antisense strand to SEQ ID NO: 1072810
uggucaaccaaugacuuuc

SEQ ID NO: 1072812 - RNA, 19 nt, Artificial Sequence
  Description of Artificial Sequence: Synthetic oligonucleotide
  Sense strand starting at position 986 of SEQ ID NO: 915345
aagucauugguugaccagu

SEQ ID NO: 1072813 - RNA, 19 nt, Artificial Sequence
  Description of Artificial Sequence: Synthetic oligonucleotide
  Antisense strand to SEQ ID NO: 1072812
acuggucaaccaaugacuu

SEQ ID NO: 1072814 - RNA, 19 nt, Artificial Sequence
  Description of Artificial Sequence: Synthetic oligonucleotide
  Sense strand starting at position 1112 of SEQ ID NO: 915345
cguccuccuaagcgagauu

SEQ ID NO: 1072815 - RNA, 19 nt, Artificial Sequence
  Description of Artificial Sequence: Synthetic oligonucleotide
  Antisense strand to SEQ ID NO: 1072814
aaucucgcuuaggaggacg

SEQ ID NO: 1072816 - RNA, 19 nt, Artificial Sequence
  Description of Artificial Sequence: Synthetic oligonucleotide
  Sense strand starting at position 1565 of SEQ ID NO: 915345
ucacucacucgaugaagua

SEQ ID NO: 1072817 - RNA, 19 nt, Artificial Sequence
  Description of Artificial Sequence: Synthetic oligonucleotide
  Antisense strand to SEQ ID NO: 1072816
uacuucaucgagugaguga

SEQ ID NO: 1072818 - RNA, 19 nt, Artificial Sequence
  Description of Artificial Sequence: Synthetic oligonucleotide
  Sense strand starting at position 2527 of SEQ ID NO: 915345
cgggauuguuguguagauu

SEQ ID NO: 1072819 - RNA, 19 nt, Artificial Sequence
  Description of Artificial Sequence: Synthetic oligonucleotide
  Antisense strand to SEQ ID NO: 1072818
aaucuacacaacaaucccg

SEQ ID NO: 1072820 - RNA, 19 nt, Artificial Sequence
  Description of Artificial Sequence: Synthetic oligonucleotide
  Sense strand starting at position 2528 of SEQ ID NO: 915345
gggauuguuguguagauua

SEQ ID NO: 1072821 - RNA, 19 nt, Artificial Sequence
  Description of Artificial Sequence: Synthetic oligonucleotide
  Antisense strand to SEQ ID NO: 1072820
uaaucuacacaacaauccc

SEQ ID NO: 1072822 - RNA, 19 nt, Artificial Sequence
  Description of Artificial Sequence: Synthetic oligonucleotide
  Sense strand starting at position 2553 of SEQ ID NO: 915345
guaacaaucgcauaaagug

SEQ ID NO: 1072823 - RNA, 19 nt, Artificial Sequence
  Description of Artificial Sequence: Synthetic oligonucleotide
  Antisense strand to SEQ ID NO: 1072822
cacuuuaugcgauuguuac

SEQ ID NO: 1072824 - RNA, 19 nt, Artificial Sequence
  Description of Artificial Sequence: Synthetic oligonucleotide
  Sense strand starting at position 2590 of SEQ ID NO: 915345
uguaguaggugcucuauca

SEQ ID NO: 1072825 - RNA, 19 nt, Artificial Sequence
  Description of Artificial Sequence: Synthetic oligonucleotide
  Antisense strand to SEQ ID NO: 1072824
ugauagagcaccuacuaca

SEQ ID NO: 1072826 - RNA, 19 nt, Artificial Sequence
  Description of Artificial Sequence: Synthetic oligonucleotide
  Sense strand starting at position 2967 of SEQ ID NO: 915345
ugauauuuguguuugucuu

SEQ ID NO: 1072827 - RNA, 19 nt, Artificial Sequence
  Description of Artificial Sequence: Synthetic oligonucleotide
  Antisense strand to SEQ ID NO: 1072826
aagacaaacacaaauauca

SEQ ID NO: 1072828 - RNA, 19 nt, Artificial Sequence
  Description of Artificial Sequence: Synthetic oligonucleotide
  Sense strand starting at position 2968 of SEQ ID NO: 915345
gauauuuguguuugucuug

SEQ ID NO: 1072829 - RNA, 19 nt, Artificial Sequence
  Description of Artificial Sequence: Synthetic oligonucleotide
  Antisense strand to SEQ ID NO: 1072828
caagacaaacacaaauauc

SEQ ID NO: 1072830 - RNA, 19 nt, Artificial Sequence
  Description of Artificial Sequence: Synthetic oligonucleotide
  Sense strand starting at position 2971 of SEQ ID NO: 915345
auuuguguuugucuuguuu

SEQ ID NO: 1072831 - RNA, 19 nt, Artificial Sequence
  Description of Artificial Sequence: Synthetic oligonucleotide
  Antisense strand to SEQ ID NO: 1072830
aaacaagacaaacacaaau

SEQ ID NO: 1072832 - RNA, 19 nt, Artificial Sequence
  Description of Artificial Sequence: Synthetic oligonucleotide
  Sense strand starting at position 2974 of SEQ ID NO: 915345
uguguuugucuuguuuguu

SEQ ID NO: 1072833 - RNA, 19 nt, Artificial Sequence
  Description of Artificial Sequence: Synthetic oligonucleotide
  Antisense strand to SEQ ID NO: 1072832
aacaaacaagacaaacaca

SEQ ID NO: 1072834 - RNA, 19 nt, Artificial Sequence
  Description of Artificial Sequence: Synthetic oligonucleotide
  Sense strand starting at position 2979 of SEQ ID NO: 915345
uugucuuguuuguuguaua

SEQ ID NO: 1072835 - RNA, 19 nt, Artificial Sequence
  Description of Artificial Sequence: Synthetic oligonucleotide
  Antisense strand to SEQ ID NO: 1072834
uauacaacaaacaagacaa

SEQ ID NO: 1072836 - RNA, 19 nt, Artificial Sequence
  Description of Artificial Sequence: Synthetic oligonucleotide
  Sense strand starting at position 2989 of SEQ ID NO: 915345
uguuguauauuaguuccaa

SEQ ID NO: 1072837 - RNA, 19 nt, Artificial Sequence
  Description of Artificial Sequence: Synthetic oligonucleotide
  Antisense strand to SEQ ID NO: 1072836
uuggaacuaauauacaaca

SEQ ID NO: 1072838 - RNA, 19 nt, Artificial Sequence
  Description of Artificial Sequence: Synthetic oligonucleotide
  Sense strand starting at position 2990 of SEQ ID NO: 915345
guuguauauuaguuccaac

SEQ ID NO: 1072839 - RNA, 19 nt, Artificial Sequence
  Description of Artificial Sequence: Synthetic oligonucleotide
  Antisense strand to SEQ ID NO: 1072838
guuggaacuaauauacaac

SEQ ID NO: 1072840 - RNA, 19 nt, Artificial Sequence
  Description of Artificial Sequence: Synthetic oligonucleotide
  Sense strand starting at position 3082 of SEQ ID NO: 915345
cugacucauguaugcauua

SEQ ID NO: 1072841 - RNA, 19 nt, Artificial Sequence
  Description of Artificial Sequence: Synthetic oligonucleotide
  Antisense strand to SEQ ID NO: 1072840
uaaugcauacaugagucag

SEQ ID NO: 1072842 - RNA, 19 nt, Artificial Sequence
  Description of Artificial Sequence: Synthetic oligonucleotide
  Sense strand starting at position 3087 of SEQ ID NO: 915345
ucauguaugcauuacgcau

SEQ ID NO: 1072843 - RNA, 19 nt, Artificial Sequence
  Description of Artificial Sequence: Synthetic oligonucleotide
  Antisense strand to SEQ ID NO: 1072842
augcguaaugcauacauga

SEQ ID NO: 1072844 - RNA, 19 nt, Artificial Sequence
  Description of Artificial Sequence: Synthetic oligonucleotide
  Sense strand starting at position 3549 of SEQ ID NO: 915345
ggacauaggcucugauuga

SEQ ID NO: 1072845 - RNA, 19 nt, Artificial Sequence
  Description of Artificial Sequence: Synthetic oligonucleotide
  Antisense strand to SEQ ID NO: 1072844
ucaaucagagccuaugucc

SEQ ID NO: 1072846 - RNA, 19 nt, Artificial Sequence
  Description of Artificial Sequence: Synthetic oligonucleotide
  Sense strand starting at position 3550 of SEQ ID NO: 915345
gacauaggcucugauugau

SEQ ID NO: 1072847 - RNA, 19 nt, Artificial Sequence
  Description of Artificial Sequence: Synthetic oligonucleotide
  Antisense strand to SEQ ID NO: 1072846
aucaaucagagccuauguc

SEQ ID NO: 1072848 - RNA, 19 nt, Artificial Sequence
  Description of Artificial Sequence: Synthetic oligonucleotide
  Sense strand starting at position 3602 of SEQ ID NO: 915345
caaugugagcacuaguuau

SEQ ID NO: 1072849 - RNA, 19 nt, Artificial Sequence
  Description of Artificial Sequence: Synthetic oligonucleotide
  Antisense strand to SEQ ID NO: 1072848
auaacuagugcucacauug

SEQ ID NO: 1072850 - RNA, 19 nt, Artificial Sequence
  Description of Artificial Sequence: Synthetic oligonucleotide
  Sense strand starting at position 3630 of SEQ ID NO: 915345
ugcccaaacagguggaauu

SEQ ID NO: 1072851 - RNA, 19 nt, Artificial Sequence
  Description of Artificial Sequence: Synthetic oligonucleotide
  Antisense strand to SEQ ID NO: 1072850
aauuccaccuguuugggca

SEQ ID NO: 1072852 - RNA, 19 nt, Artificial Sequence
  Description of Artificial Sequence: Synthetic oligonucleotide
  Sense strand starting at position 3631 of SEQ ID NO: 915345
gcccaaacagguggaauua

SEQ ID NO: 1072853 - RNA, 19 nt, Artificial Sequence
  Description of Artificial Sequence: Synthetic oligonucleotide
  Antisense strand to SEQ ID NO: 1072852
uaauuccaccuguuugggc

SEQ ID NO: 1072854 - RNA, 19 nt, Artificial Sequence
  Description of Artificial Sequence: Synthetic oligonucleotide
  Sense strand starting at position 3737 of SEQ ID NO: 915345
agggcugugagauguugau

SEQ ID NO: 1072855 - RNA, 19 nt, Artificial Sequence
  Description of Artificial Sequence: Synthetic oligonucleotide
  Antisense strand to SEQ ID NO: 1072854
aucaacaucucacagcccu

SEQ ID NO: 1072856 - RNA, 19 nt, Artificial Sequence
  Description of Artificial Sequence: Synthetic oligonucleotide
  Sense strand starting at position 3746 of SEQ ID NO: 915345
agauguugaugagaccaua

SEQ ID NO: 1072857 - RNA, 19 nt, Artificial Sequence
  Description of Artificial Sequence: Synthetic oligonucleotide
  Antisense strand to SEQ ID NO: 1072856
uauggucucaucaacaucu

SEQ ID NO: 1072858 - RNA, 19 nt, Artificial Sequence
  Description of Artificial Sequence: Synthetic oligonucleotide
  Sense strand starting at position 3816 of SEQ ID NO: 915345
ugaguuagaagagguaacu

SEQ ID NO: 1072859 - RNA, 19 nt, Artificial Sequence
  Description of Artificial Sequence: Synthetic oligonucleotide
  Antisense strand to SEQ ID NO: 1072858
aguuaccucuucuaacuca

SEQ ID NO: 1072860 - RNA, 19 nt, Artificial Sequence
  Description of Artificial Sequence: Synthetic oligonucleotide
  Sense strand starting at position 3825 of SEQ ID NO: 915345
agagguaacugguugcaga

SEQ ID NO: 1072861 - RNA, 19 nt, Artificial Sequence
  Description of Artificial Sequence: Synthetic oligonucleotide
  Antisense strand to SEQ ID NO: 1072860
ucugcaaccaguuaccucu

SEQ ID NO: 1072862 - RNA, 19 nt, Artificial Sequence
  Description of Artificial Sequence: Synthetic oligonucleotide
  Sense strand starting at position 3850 of SEQ ID NO: 915345
gggacaccugucugaagga

SEQ ID NO: 1072863 - RNA, 19 nt, Artificial Sequence
  Description of Artificial Sequence: Synthetic oligonucleotide
  Antisense strand to SEQ ID NO: 1072862
uccuucagacagguguccc

SEQ ID NO: 1072864 - RNA, 19 nt, Artificial Sequence
  Description of Artificial Sequence: Synthetic oligonucleotide
  Sense strand starting at position 3851 of SEQ ID NO: 915345
ggacaccugucugaaggaa

SEQ ID NO: 1072865 - RNA, 19 nt, Artificial Sequence
  Description of Artificial Sequence: Synthetic oligonucleotide
  Antisense strand to SEQ ID NO: 1072864
uuccuucagacaggugucc

SEQ ID NO: 1072866 - RNA, 19 nt, Artificial Sequence
  Description of Artificial Sequence: Synthetic oligonucleotide
  Sense strand starting at position 3884 of SEQ ID NO: 915345
ggagguuguugagcaaaug

SEQ ID NO: 1072867 - RNA, 19 nt, Artificial Sequence
  Description of Artificial Sequence: Synthetic oligonucleotide
  Antisense strand to SEQ ID NO: 1072866
cauuugcucaacaaccucc

SEQ ID NO: 1072868 - RNA, 19 nt, Artificial Sequence
  Description of Artificial Sequence: Synthetic oligonucleotide
  Sense strand starting at position 3885 of SEQ ID NO: 915345
gagguuguugagcaaauga

SEQ ID NO: 1072869 - RNA, 19 nt, Artificial Sequence
  Description of Artificial Sequence: Synthetic oligonucleotide
  Antisense strand to SEQ ID NO: 1072868
ucauuugcucaacaaccuc

SEQ ID NO: 1072870 - RNA, 19 nt, Artificial Sequence
  Description of Artificial Sequence: Synthetic oligonucleotide
  Sense strand starting at position 3 of SEQ ID NO: 915346
ggaggcaagcccugauacu

SEQ ID NO: 1072871 - RNA, 19 nt, Artificial Sequence
  Description of Artificial Sequence: Synthetic oligonucleotide
  Antisense strand to SEQ ID NO: 1072870
aguaucagggcuugccucc

SEQ ID NO: 1072872 - RNA, 19 nt, Artificial Sequence
  Description of Artificial Sequence: Synthetic oligonucleotide
  Sense strand starting at position 157 of SEQ ID NO: 915346
aggguuagcaaaugacuca

SEQ ID NO: 1072873 - RNA, 19 nt, Artificial Sequence
  Description of Artificial Sequence: Synthetic oligonucleotide
  Antisense strand to SEQ ID NO: 1072872
ugagucauuugcuaacccu

SEQ ID NO: 1072874 - RNA, 19 nt, Artificial Sequence
  Description of Artificial Sequence: Synthetic oligonucleotide
  Sense strand starting at position 158 of SEQ ID NO: 915346
ggguuagcaaaugacucau

SEQ ID NO: 1072875 - RNA, 19 nt, Artificial Sequence
  Description of Artificial Sequence: Synthetic oligonucleotide
  Antisense strand to SEQ ID NO: 1072874
augagucauuugcuaaccc

SEQ ID NO: 1072876 - RNA, 19 nt, Artificial Sequence
  Description of Artificial Sequence: Synthetic oligonucleotide
  Sense strand starting at position 164 of SEQ ID NO: 915346
gcaaaugacucauccaugu

SEQ ID NO: 1072877 - RNA, 19 nt, Artificial Sequence
  Description of Artificial Sequence: Synthetic oligonucleotide
  Antisense strand to SEQ ID NO: 1072876
acauggaugagucauuugc

SEQ ID NO: 1072878 - RNA, 19 nt, Artificial Sequence
  Description of Artificial Sequence: Synthetic oligonucleotide
  Sense strand starting at position 168 of SEQ ID NO: 915346
augacucauccauguacau

SEQ ID NO: 1072879 - RNA, 19 nt, Artificial Sequence
  Description of Artificial Sequence: Synthetic oligonucleotide
  Antisense strand to SEQ ID NO: 1072878
auguacauggaugagucau

SEQ ID NO: 1072880 - RNA, 19 nt, Artificial Sequence
  Description of Artificial Sequence: Synthetic oligonucleotide
  Sense strand starting at position 367 of SEQ ID NO: 915346
acggucuugacacagauca

SEQ ID NO: 1072881 - RNA, 19 nt, Artificial Sequence
  Description of Artificial Sequence: Synthetic oligonucleotide
  Antisense strand to SEQ ID NO: 1072880
ugaucugugucaagaccgu

SEQ ID NO: 1072882 - RNA, 19 nt, Artificial Sequence
  Description of Artificial Sequence: Synthetic oligonucleotide
  Sense strand starting at position 779 of SEQ ID NO: 915346
ugaacucaguuccuagaaa

SEQ ID NO: 1072883 - RNA, 19 nt, Artificial Sequence
  Description of Artificial Sequence: Synthetic oligonucleotide
  Antisense strand to SEQ ID NO: 1072882
uuucuaggaacugaguuca

SEQ ID NO: 1072884 - RNA, 19 nt, Artificial Sequence
  Description of Artificial Sequence: Synthetic oligonucleotide
  Sense strand starting at position 883 of SEQ ID NO: 915346
cagucuagugagggagauu

SEQ ID NO: 1072885 - RNA, 19 nt, Artificial Sequence
  Description of Artificial Sequence: Synthetic oligonucleotide
  Antisense strand to SEQ ID NO: 1072884
aaucucccucacuagacug

SEQ ID NO: 1072886 - RNA, 19 nt, Artificial Sequence
  Description of Artificial Sequence: Synthetic oligonucleotide
  Sense strand starting at position 922 of SEQ ID NO: 915346
agcacaaggugugauuuaa

SEQ ID NO: 1072887 - RNA, 19 nt, Artificial Sequence
  Description of Artificial Sequence: Synthetic oligonucleotide
  Antisense strand to SEQ ID NO: 1072886
uuaaaucacaccuugugcu

SEQ ID NO: 1072888 - RNA, 19 nt, Artificial Sequence
  Description of Artificial Sequence: Synthetic oligonucleotide
  Sense strand starting at position 1086 of SEQ ID NO: 915346
ccagcauuuccgugugucu

SEQ ID NO: 1072889 - RNA, 19 nt, Artificial Sequence
  Description of Artificial Sequence: Synthetic oligonucleotide
  Antisense strand to SEQ ID NO: 1072888
agacacacggaaaugcugg

SEQ ID NO: 1072890 - RNA, 19 nt, Artificial Sequence
  Description of Artificial Sequence: Synthetic oligonucleotide
  Sense strand starting at position 1088 of SEQ ID NO: 915346
agcauuuccgugugucuag

SEQ ID NO: 1072891 - RNA, 19 nt, Artificial Sequence
  Description of Artificial Sequence: Synthetic oligonucleotide
  Antisense strand to SEQ ID NO: 1072890
cuagacacacggaaaugcu

SEQ ID NO: 1072892 - RNA, 19 nt, Artificial Sequence
  Description of Artificial Sequence: Synthetic oligonucleotide
  Sense strand starting at position 1089 of SEQ ID NO: 915346
gcauuuccgugugucuaga

SEQ ID NO: 1072893 - RNA, 19 nt, Artificial Sequence
  Description of Artificial Sequence: Synthetic oligonucleotide
  Antisense strand to SEQ ID NO: 1072892
ucuagacacacggaaaugc

SEQ ID NO: 1072894 - RNA, 19 nt, Artificial Sequence
  Description of Artificial Sequence: Synthetic oligonucleotide
  Sense strand starting at position 1137 of SEQ ID NO: 915346
gggagugucaggcgauaga

SEQ ID NO: 1072895 - RNA, 19 nt, Artificial Sequence
  Description of Artificial Sequence: Synthetic oligonucleotide
  Antisense strand to SEQ ID NO: 1072894
ucuaucgccugacacuccc

SEQ ID NO: 1072896 - RNA, 19 nt, Artificial Sequence
  Description of Artificial Sequence: Synthetic oligonucleotide
  Sense strand starting at position 1260 of SEQ ID NO: 915346
aggagugaggugugugauu

SEQ ID NO: 1072897 - RNA, 19 nt, Artificial Sequence
  Description of Artificial Sequence: Synthetic oligonucleotide
  Antisense strand to SEQ ID NO: 1072896
aaucacacaccucacuccu

SEQ ID NO: 1072898 - RNA, 19 nt, Artificial Sequence
  Description of Artificial Sequence: Synthetic oligonucleotide
  Sense strand starting at position 1261 of SEQ ID NO: 915346
ggagugaggugugugauua

SEQ ID NO: 1072899 - RNA, 19 nt, Artificial Sequence
  Description of Artificial Sequence: Synthetic oligonucleotide
  Antisense strand to SEQ ID NO: 1072898
uaaucacacaccucacucc

SEQ ID NO: 1072900 - RNA, 19 nt, Artificial Sequence
  Description of Artificial Sequence: Synthetic oligonucleotide
  Sense strand starting at position 1262 of SEQ ID NO: 915346
gagugaggugugugauuag

SEQ ID NO: 1072901 - RNA, 19 nt, Artificial Sequence
  Description of Artificial Sequence: Synthetic oligonucleotide
  Antisense strand to SEQ ID NO: 1072900
cuaaucacacaccucacuc

SEQ ID NO: 1072902 - RNA, 19 nt, Artificial Sequence
  Description of Artificial Sequence: Synthetic oligonucleotide
  Sense strand starting at position 1343 of SEQ ID NO: 915346
aaggaagacuuucuguauc

SEQ ID NO: 1072903 - RNA, 19 nt, Artificial Sequence
  Description of Artificial Sequence: Synthetic oligonucleotide
  Antisense strand to SEQ ID NO: 1072902
gauacagaaagucuuccuu

SEQ ID NO: 1072904 - RNA, 19 nt, Artificial Sequence
  Description of Artificial Sequence: Synthetic oligonucleotide
  Sense strand starting at position 1345 of SEQ ID NO: 915346
ggaagacuuucuguaucua

SEQ ID NO: 1072905 - RNA, 19 nt, Artificial Sequence
  Description of Artificial Sequence: Synthetic oligonucleotide
  Antisense strand to SEQ ID NO: 1072904
uagauacagaaagucuucc

SEQ ID NO: 1072906 - RNA, 19 nt, Artificial Sequence
  Description of Artificial Sequence: Synthetic oligonucleotide
  Sense strand starting at position 1450 of SEQ ID NO: 915346
agaggaugucagggccuaa

SEQ ID NO: 1072907 - RNA, 19 nt, Artificial Sequence
  Description of Artificial Sequence: Synthetic oligonucleotide
  Antisense strand to SEQ ID NO: 1072906
uuaggcccugacauccucu

SEQ ID NO: 1072908 - RNA, 19 nt, Artificial Sequence
  Description of Artificial Sequence: Synthetic oligonucleotide
  Sense strand starting at position 1525 of SEQ ID NO: 915346
ccuccugucccagagaacu

SEQ ID NO: 1072909 - RNA, 19 nt, Artificial Sequence
  Description of Artificial Sequence: Synthetic oligonucleotide
  Antisense strand to SEQ ID NO: 1072908
aguucucugggacaggagg

SEQ ID NO: 1072910 - RNA, 19 nt, Artificial Sequence
  Description of Artificial Sequence: Synthetic oligonucleotide
  Sense strand starting at position 2076 of SEQ ID NO: 915346
agggauucgccauggccaa

SEQ ID NO: 1072911 - RNA, 19 nt, Artificial Sequence
  Description of Artificial Sequence: Synthetic oligonucleotide
  Antisense strand to SEQ ID NO: 1072910
uuggccauggcgaaucccu

SEQ ID NO: 1072912 - RNA, 19 nt, Artificial Sequence
  Description of Artificial Sequence: Synthetic oligonucleotide
  Sense strand starting at position 2487 of SEQ ID NO: 915346
gugcaaucaucuccuagau

SEQ ID NO: 1072913 - RNA, 19 nt, Artificial Sequence
  Description of Artificial Sequence: Synthetic oligonucleotide
  Antisense strand to SEQ ID NO: 1072912
aucuaggagaugauugcac

SEQ ID NO: 1072914 - RNA, 19 nt, Artificial Sequence
  Description of Artificial Sequence: Synthetic oligonucleotide
  Sense strand starting at position 2708 of SEQ ID NO: 915346
cagugacccucuuugagaa

SEQ ID NO: 1072915 - RNA, 19 nt, Artificial Sequence
  Description of Artificial Sequence: Synthetic oligonucleotide
  Antisense strand to SEQ ID NO: 1072914
uucucaaagagggucacug

SEQ ID NO: 1072916 - RNA, 19 nt, Artificial Sequence
  Description of Artificial Sequence: Synthetic oligonucleotide
  Sense strand starting at position 2740 of SEQ ID NO: 915346
uguagacuguccucaggaa

SEQ ID NO: 1072917 - RNA, 19 nt, Artificial Sequence
  Description of Artificial Sequence: Synthetic oligonucleotide
  Antisense strand to SEQ ID NO: 1072916
uuccugaggacagucuaca

SEQ ID NO: 1072918 - RNA, 19 nt, Artificial Sequence
  Description of Artificial Sequence: Synthetic oligonucleotide
  Sense strand starting at position 2767 of SEQ ID NO: 915346
cguauaauuccugggaguu

SEQ ID NO: 1072919 - RNA, 19 nt, Artificial Sequence
  Description of Artificial Sequence: Synthetic oligonucleotide
  Antisense strand to SEQ ID NO: 1072918
aacucccaggaauuauacg

SEQ ID NO: 1072920 - RNA, 19 nt, Artificial Sequence
  Description of Artificial Sequence: Synthetic oligonucleotide
  Sense strand starting at position 2768 of SEQ ID NO: 915346
guauaauuccugggaguuc

SEQ ID NO: 1072921 - RNA, 19 nt, Artificial Sequence
  Description of Artificial Sequence: Synthetic oligonucleotide
  Antisense strand to SEQ ID NO: 1072920
gaacucccaggaauuauac

SEQ ID NO: 1072922 - RNA, 19 nt, Artificial Sequence
  Description of Artificial Sequence: Synthetic oligonucleotide
  Sense strand starting at position 2799 of SEQ ID NO: 915346
agccaugauagucaugguu

SEQ ID NO: 1072923 - RNA, 19 nt, Artificial Sequence
  Description of Artificial Sequence: Synthetic oligonucleotide
  Antisense strand to SEQ ID NO: 1072922
aaccaugacuaucauggcu

SEQ ID NO: 1072924 - RNA, 19 nt, Artificial Sequence
  Description of Artificial Sequence: Synthetic oligonucleotide
  Sense strand starting at position 2802 of SEQ ID NO: 915346
caugauagucaugguugga

SEQ ID NO: 1072925 - RNA, 19 nt, Artificial Sequence
  Description of Artificial Sequence: Synthetic oligonucleotide
  Antisense strand to SEQ ID NO: 1072924
uccaaccaugacuaucaug

SEQ ID NO: 1072926 - RNA, 19 nt, Artificial Sequence
  Description of Artificial Sequence: Synthetic oligonucleotide
  Sense strand starting at position 2805 of SEQ ID NO: 915346
gauagucaugguuggauug

SEQ ID NO: 1072927 - RNA, 19 nt, Artificial Sequence
  Description of Artificial Sequence: Synthetic oligonucleotide
  Antisense strand to SEQ ID NO: 1072926
caauccaaccaugacuauc

SEQ ID NO: 1072928 - RNA, 19 nt, Artificial Sequence
  Description of Artificial Sequence: Synthetic oligonucleotide
  Sense strand starting at position 2831 of SEQ ID NO: 915346
uuuccagagcuguguagau

SEQ ID NO: 1072929 - RNA, 19 nt, Artificial Sequence
  Description of Artificial Sequence: Synthetic oligonucleotide
  Antisense strand to SEQ ID NO: 1072928
aucuacacagcucuggaaa

SEQ ID NO: 1072930 - RNA, 19 nt, Artificial Sequence
  Description of Artificial Sequence: Synthetic oligonucleotide
  Sense strand starting at position 2867 of SEQ ID NO: 915346
ugacgagugagagguauga

SEQ ID NO: 1072931 - RNA, 19 nt, Artificial Sequence
  Description of Artificial Sequence: Synthetic oligonucleotide
  Antisense strand to SEQ ID NO: 1072930
ucauaccucucacucguca

SEQ ID NO: 1072932 - RNA, 19 nt, Artificial Sequence
  Description of Artificial Sequence: Synthetic oligonucleotide
  Sense strand starting at position 2871 of SEQ ID NO: 915346
gagugagagguaugacagu

SEQ ID NO: 1072933 - RNA, 19 nt, Artificial Sequence
  Description of Artificial Sequence: Synthetic oligonucleotide
  Antisense strand to SEQ ID NO: 1072932
acugucauaccucucacuc

SEQ ID NO: 1072934 - RNA, 19 nt, Artificial Sequence
  Description of Artificial Sequence: Synthetic oligonucleotide
  Sense strand starting at position 2877 of SEQ ID NO: 915346
gagguaugacaguauguca

SEQ ID NO: 1072935 - RNA, 19 nt, Artificial Sequence
  Description of Artificial Sequence: Synthetic oligonucleotide
  Antisense strand to SEQ ID NO: 1072934
ugacauacugucauaccuc

SEQ ID NO: 1072936 - RNA, 19 nt, Artificial Sequence
  Description of Artificial Sequence: Synthetic oligonucleotide
  Sense strand starting at position 2912 of SEQ ID NO: 915346
caguccuggcugugagaga

SEQ ID NO: 1072937 - RNA, 19 nt, Artificial Sequence
  Description of Artificial Sequence: Synthetic oligonucleotide
  Antisense strand to SEQ ID NO: 1072936
ucucucacagccaggacug

SEQ ID NO: 1072938 - RNA, 19 nt, Artificial Sequence
  Description of Artificial Sequence: Synthetic oligonucleotide
  Sense strand starting at position 2987 of SEQ ID NO: 915346
uuacauuucuuuguggcua

SEQ ID NO: 1072939 - RNA, 19 nt, Artificial Sequence
  Description of Artificial Sequence: Synthetic oligonucleotide
  Antisense strand to SEQ ID NO: 1072938
uagccacaaagaaauguaa

SEQ ID NO: 1072940 - RNA, 19 nt, Artificial Sequence
  Description of Artificial Sequence: Synthetic oligonucleotide
  Sense strand starting at position 3049 of SEQ ID NO: 915346
ucaagugucccuggugaau

SEQ ID NO: 1072941 - RNA, 19 nt, Artificial Sequence
  Description of Artificial Sequence: Synthetic oligonucleotide
  Antisense strand to SEQ ID NO: 1072940
auucaccagggacacuuga

SEQ ID NO: 1072942 - RNA, 19 nt, Artificial Sequence
  Description of Artificial Sequence: Synthetic oligonucleotide
  Sense strand starting at position 3102 of SEQ ID NO: 915346
aguggacuggcucaucaaa

SEQ ID NO: 1072943 - RNA, 19 nt, Artificial Sequence
  Description of Artificial Sequence: Synthetic oligonucleotide
  Antisense strand to SEQ ID NO: 1072942
uuugaugagccaguccacu

SEQ ID NO: 1072944 - RNA, 19 nt, Artificial Sequence
  Description of Artificial Sequence: Synthetic oligonucleotide
  Sense strand starting at position 3104 of SEQ ID NO: 915346
uggacuggcucaucaaauu

SEQ ID NO: 1072945 - RNA, 19 nt, Artificial Sequence
  Description of Artificial Sequence: Synthetic oligonucleotide
  Antisense strand to SEQ ID NO: 1072944
aauuugaugagccagucca

SEQ ID NO: 1072946 - RNA, 19 nt, Artificial Sequence
  Description of Artificial Sequence: Synthetic oligonucleotide
  Sense strand starting at position 3201 of SEQ ID NO: 915346
aguuuauaucaagaugcaa

SEQ ID NO: 1072947 - RNA, 19 nt, Artificial Sequence
  Description of Artificial Sequence: Synthetic oligonucleotide
  Antisense strand to SEQ ID NO: 1072946
uugcaucuugauauaaacu

SEQ ID NO: 1072948 - RNA, 19 nt, Artificial Sequence
  Description of Artificial Sequence: Synthetic oligonucleotide
  Sense strand starting at position 3705 of SEQ ID NO: 915346
cccugagagcgggauuaca

SEQ ID NO: 1072949 - RNA, 19 nt, Artificial Sequence
  Description of Artificial Sequence: Synthetic oligonucleotide
  Antisense strand to SEQ ID NO: 1072948
uguaaucccgcucucaggg

SEQ ID NO: 1072950 - RNA, 19 nt, Artificial Sequence
  Description of Artificial Sequence: Synthetic oligonucleotide
  Sense strand starting at position 119 of SEQ ID NO: 915347
auagacaguucuguucuaa

SEQ ID NO: 1072951 - RNA, 19 nt, Artificial Sequence
  Description of Artificial Sequence: Synthetic oligonucleotide
  Antisense strand to SEQ ID NO: 1072950
uuagaacagaacugucuau

SEQ ID NO: 1072952 - RNA, 19 nt, Artificial Sequence
  Description of Artificial Sequence: Synthetic oligonucleotide
  Sense strand starting at position 267 of SEQ ID NO: 915347
augggucgugaugaacaaa

SEQ ID NO: 1072953 - RNA, 19 nt, Artificial Sequence
  Description of Artificial Sequence: Synthetic oligonucleotide
  Antisense strand to SEQ ID NO: 1072952
uuuguucaucacgacccau

SEQ ID NO: 1072954 - RNA, 19 nt, Artificial Sequence
  Description of Artificial Sequence: Synthetic oligonucleotide
  Sense strand starting at position 368 of SEQ ID NO: 915347
agguccugguuucuugaga

SEQ ID NO: 1072955 - RNA, 19 nt, Artificial Sequence
  Description of Artificial Sequence: Synthetic oligonucleotide
  Antisense strand to SEQ ID NO: 1072954
ucucaagaaaccaggaccu

SEQ ID NO: 1072956 - RNA, 19 nt, Artificial Sequence
  Description of Artificial Sequence: Synthetic oligonucleotide
  Sense strand starting at position 375 of SEQ ID NO: 915347
gguuucuugagagaagugu

SEQ ID NO: 1072957 - RNA, 19 nt, Artificial Sequence
  Description of Artificial Sequence: Synthetic oligonucleotide
  Antisense strand to SEQ ID NO: 1072956
acacuucucucaagaaacc

SEQ ID NO: 1072958 - RNA, 19 nt, Artificial Sequence
  Description of Artificial Sequence: Synthetic oligonucleotide
  Sense strand starting at position 844 of SEQ ID NO: 915347
ucuagaucuguagaagugu

SEQ ID NO: 1072959 - RNA, 19 nt, Artificial Sequence
  Description of Artificial Sequence: Synthetic oligonucleotide
  Antisense strand to SEQ ID NO: 1072958
acacuucuacagaucuaga

SEQ ID NO: 1072960 - RNA, 19 nt, Artificial Sequence
  Description of Artificial Sequence: Synthetic oligonucleotide
  Sense strand starting at position 853 of SEQ ID NO: 915347
guagaagugugucugugag

SEQ ID NO: 1072961 - RNA, 19 nt, Artificial Sequence
  Description of Artificial Sequence: Synthetic oligonucleotide
  Antisense strand to SEQ ID NO: 1072960
cucacagacacacuucuac

SEQ ID NO: 1072962 - RNA, 19 nt, Artificial Sequence
  Description of Artificial Sequence: Synthetic oligonucleotide
  Sense strand starting at position 898 of SEQ ID NO: 915347
cuugaaacauuagaauaug

SEQ ID NO: 1072963 - RNA, 19 nt, Artificial Sequence
  Description of Artificial Sequence: Synthetic oligonucleotide
  Antisense strand to SEQ ID NO: 1072962
cauauucuaauguuucaag

SEQ ID NO: 1072964 - RNA, 19 nt, Artificial Sequence
  Description of Artificial Sequence: Synthetic oligonucleotide
  Sense strand starting at position 906 of SEQ ID NO: 915347
auuagaauaugccugacua

SEQ ID NO: 1072965 - RNA, 19 nt, Artificial Sequence
  Description of Artificial Sequence: Synthetic oligonucleotide
  Antisense strand to SEQ ID NO: 1072964
uagucaggcauauucuaau

SEQ ID NO: 1072966 - RNA, 19 nt, Artificial Sequence
  Description of Artificial Sequence: Synthetic oligonucleotide
  Sense strand starting at position 907 of SEQ ID NO: 915347
uuagaauaugccugacuag

SEQ ID NO: 1072967 - RNA, 19 nt, Artificial Sequence
  Description of Artificial Sequence: Synthetic oligonucleotide
  Antisense strand to SEQ ID NO: 1072966
cuagucaggcauauucuaa

SEQ ID NO: 1072968 - RNA, 19 nt, Artificial Sequence
  Description of Artificial Sequence: Synthetic oligonucleotide
  Sense strand starting at position 971 of SEQ ID NO: 915347
gauucuguaauguggaagu

SEQ ID NO: 1072969 - RNA, 19 nt, Artificial Sequence
  Description of Artificial Sequence: Synthetic oligonucleotide
  Antisense strand to SEQ ID NO: 1072968
acuuccacauuacagaauc

SEQ ID NO: 1072970 - RNA, 19 nt, Artificial Sequence
  Description of Artificial Sequence: Synthetic oligonucleotide
  Sense strand starting at position 1048 of SEQ ID NO: 915347
acuagagcuguuuacaaag

SEQ ID NO: 1072971 - RNA, 19 nt, Artificial Sequence
  Description of Artificial Sequence: Synthetic oligonucleotide
  Antisense strand to SEQ ID NO: 1072970
cuuuguaaacagcucuagu

SEQ ID NO: 1072972 - RNA, 19 nt, Artificial Sequence
  Description of Artificial Sequence: Synthetic oligonucleotide
  Sense strand starting at position 1163 of SEQ ID NO: 915347
cccugcaguccuuauuauu

SEQ ID NO: 1072973 - RNA, 19 nt, Artificial Sequence
  Description of Artificial Sequence: Synthetic oligonucleotide
  Antisense strand to SEQ ID NO: 1072972
aauaauaaggacugcaggg

SEQ ID NO: 1072974 - RNA, 19 nt, Artificial Sequence
  Description of Artificial Sequence: Synthetic oligonucleotide
  Sense strand starting at position 1236 of SEQ ID NO: 915347
gccacuugauuaguaagca

SEQ ID NO: 1072975 - RNA, 19 nt, Artificial Sequence
  Description of Artificial Sequence: Synthetic oligonucleotide
  Antisense strand to SEQ ID NO: 1072974
ugcuuacuaaucaaguggc

SEQ ID NO: 1072976 - RNA, 19 nt, Artificial Sequence
  Description of Artificial Sequence: Synthetic oligonucleotide
  Sense strand starting at position 1333 of SEQ ID NO: 915347
ggccacacuccguaacaau

SEQ ID NO: 1072977 - RNA, 19 nt, Artificial Sequence
  Description of Artificial Sequence: Synthetic oligonucleotide
  Antisense strand to SEQ ID NO: 1072976
auuguuacggaguguggcc

SEQ ID NO: 1072978 - RNA, 19 nt, Artificial Sequence
  Description of Artificial Sequence: Synthetic oligonucleotide
  Sense strand starting at position 1374 of SEQ ID NO: 915347
ggaggcaagcccugauacu

SEQ ID NO: 1072979 - RNA, 19 nt, Artificial Sequence
  Description of Artificial Sequence: Synthetic oligonucleotide
  Antisense strand to SEQ ID NO: 1072978
aguaucagggcuugccucc

SEQ ID NO: 1072980 - RNA, 19 nt, Artificial Sequence
  Description of Artificial Sequence: Synthetic oligonucleotide
  Sense strand starting at position 1528 of SEQ ID NO: 915347
aggguuagcaaaugacuca

SEQ ID NO: 1072981 - RNA, 19 nt, Artificial Sequence
  Description of Artificial Sequence: Synthetic oligonucleotide
  Antisense strand to SEQ ID NO: 1072980
ugagucauuugcuaacccu

SEQ ID NO: 1072982 - RNA, 19 nt, Artificial Sequence
  Description of Artificial Sequence: Synthetic oligonucleotide
  Sense strand starting at position 1529 of SEQ ID NO: 915347
ggguuagcaaaugacucau

SEQ ID NO: 1072983 - RNA, 19 nt, Artificial Sequence
  Description of Artificial Sequence: Synthetic oligonucleotide
  Antisense strand to SEQ ID NO: 1072982
augagucauuugcuaaccc

SEQ ID NO: 1072984 - RNA, 19 nt, Artificial Sequence
  Description of Artificial Sequence: Synthetic oligonucleotide
  Sense strand starting at position 1535 of SEQ ID NO: 915347
gcaaaugacucauccaugu

SEQ ID NO: 1072985 - RNA, 19 nt, Artificial Sequence
  Description of Artificial Sequence: Synthetic oligonucleotide
  Antisense strand to SEQ ID NO: 1072984
acauggaugagucauuugc

SEQ ID NO: 1072986 - RNA, 19 nt, Artificial Sequence
  Description of Artificial Sequence: Synthetic oligonucleotide
  Sense strand starting at position 1539 of SEQ ID NO: 915347
augacucauccauguacau

SEQ ID NO: 1072987 - RNA, 19 nt, Artificial Sequence
  Description of Artificial Sequence: Synthetic oligonucleotide
  Antisense strand to SEQ ID NO: 1072986
auguacauggaugagucau

SEQ ID NO: 1072988 - RNA, 19 nt, Artificial Sequence
  Description of Artificial Sequence: Synthetic oligonucleotide
  Sense strand starting at position 1738 of SEQ ID NO: 915347
acggucuugacacagauca

SEQ ID NO: 1072989 - RNA, 19 nt, Artificial Sequence
  Description of Artificial Sequence: Synthetic oligonucleotide
  Antisense strand to SEQ ID NO: 1072988
ugaucugugucaagaccgu

SEQ ID NO: 1072990 - RNA, 19 nt, Artificial Sequence
  Description of Artificial Sequence: Synthetic oligonucleotide
  Sense strand starting at position 2150 of SEQ ID NO: 915347
ugaacucaguuccuagaaa

SEQ ID NO: 1072991 - RNA, 19 nt, Artificial Sequence
  Description of Artificial Sequence: Synthetic oligonucleotide
  Antisense strand to SEQ ID NO: 1072990
uuucuaggaacugaguuca

SEQ ID NO: 1072992 - RNA, 19 nt, Artificial Sequence
  Description of Artificial Sequence: Synthetic oligonucleotide
  Sense strand starting at position 2254 of SEQ ID NO: 915347
cagucuagugagggagauu

SEQ ID NO: 1072993 - RNA, 19 nt, Artificial Sequence
  Description of Artificial Sequence: Synthetic oligonucleotide
  Antisense strand to SEQ ID NO: 1072992
aaucucccucacuagacug

SEQ ID NO: 1072994 - RNA, 19 nt, Artificial Sequence
  Description of Artificial Sequence: Synthetic oligonucleotide
  Sense strand starting at position 2293 of SEQ ID NO: 915347
agcacaaggugugauuuaa

SEQ ID NO: 1072995 - RNA, 19 nt, Artificial Sequence
  Description of Artificial Sequence: Synthetic oligonucleotide
  Antisense strand to SEQ ID NO: 1072994
uuaaaucacaccuugugcu

SEQ ID NO: 1072996 - RNA, 19 nt, Artificial Sequence
  Description of Artificial Sequence: Synthetic oligonucleotide
  Sense strand starting at position 2445 of SEQ ID NO: 915347
guugaagagugcccagcau

SEQ ID NO: 1072997 - RNA, 19 nt, Artificial Sequence
  Description of Artificial Sequence: Synthetic oligonucleotide
  Antisense strand to SEQ ID NO: 1072996
augcugggcacucuucaac

SEQ ID NO: 1072998 - RNA, 19 nt, Artificial Sequence
  Description of Artificial Sequence: Synthetic oligonucleotide
  Sense strand starting at position 2457 of SEQ ID NO: 915347
ccagcauuuccgugugucu

SEQ ID NO: 1072999 - RNA, 19 nt, Artificial Sequence
  Description of Artificial Sequence: Synthetic oligonucleotide
  Antisense strand to SEQ ID NO: 1072998
agacacacggaaaugcugg

SEQ ID NO: 1073000 - RNA, 19 nt, Artificial Sequence
  Description of Artificial Sequence: Synthetic oligonucleotide
  Sense strand starting at position 2459 of SEQ ID NO: 915347
agcauuuccgugugucuag

SEQ ID NO: 1073001 - RNA, 19 nt, Artificial Sequence
  Description of Artificial Sequence: Synthetic oligonucleotide
  Antisense strand to SEQ ID NO: 1073000
cuagacacacggaaaugcu

SEQ ID NO: 1073002 - RNA, 19 nt, Artificial Sequence
  Description of Artificial Sequence: Synthetic oligonucleotide
  Sense strand starting at position 2460 of SEQ ID NO: 915347
gcauuuccgugugucuaga

SEQ ID NO: 1073003 - RNA, 19 nt, Artificial Sequence
  Description of Artificial Sequence: Synthetic oligonucleotide
  Antisense strand to SEQ ID NO: 1073002
ucuagacacacggaaaugc

SEQ ID NO: 1073004 - RNA, 19 nt, Artificial Sequence
  Description of Artificial Sequence: Synthetic oligonucleotide
  Sense strand starting at position 2508 of SEQ ID NO: 915347
gggagugucaggcgauaga

SEQ ID NO: 1073005 - RNA, 19 nt, Artificial Sequence
  Description of Artificial Sequence: Synthetic oligonucleotide
  Antisense strand to SEQ ID NO: 1073004
ucuaucgccugacacuccc

SEQ ID NO: 1073006 - RNA, 19 nt, Artificial Sequence
  Description of Artificial Sequence: Synthetic oligonucleotide
  Sense strand starting at position 2571 of SEQ ID NO: 915347
ggcggagagcuuggauguu

SEQ ID NO: 1073007 - RNA, 19 nt, Artificial Sequence
  Description of Artificial Sequence: Synthetic oligonucleotide
  Antisense strand to SEQ ID NO: 1073006
aacauccaagcucuccgcc

SEQ ID NO: 1073008 - RNA, 19 nt, Artificial Sequence
  Description of Artificial Sequence: Synthetic oligonucleotide
  Sense strand starting at position 2631 of SEQ ID NO: 915347
aggagugaggugugugauu

SEQ ID NO: 1073009 - RNA, 19 nt, Artificial Sequence
  Description of Artificial Sequence: Synthetic oligonucleotide
  Antisense strand to SEQ ID NO: 1073008
aaucacacaccucacuccu

SEQ ID NO: 1073010 - RNA, 19 nt, Artificial Sequence
  Description of Artificial Sequence: Synthetic oligonucleotide
  Sense strand starting at position 2632 of SEQ ID NO: 915347
ggagugaggugugugauua

SEQ ID NO: 1073011 - RNA, 19 nt, Artificial Sequence
  Description of Artificial Sequence: Synthetic oligonucleotide
  Antisense strand to SEQ ID NO: 1073010
uaaucacacaccucacucc

SEQ ID NO: 1073012 - RNA, 19 nt, Artificial Sequence
  Description of Artificial Sequence: Synthetic oligonucleotide
  Sense strand starting at position 2633 of SEQ ID NO: 915347
gagugaggugugugauuag

SEQ ID NO: 1073013 - RNA, 19 nt, Artificial Sequence
  Description of Artificial Sequence: Synthetic oligonucleotide
  Antisense strand to SEQ ID NO: 1073012
cuaaucacacaccucacuc

SEQ ID NO: 1073014 - RNA, 19 nt, Artificial Sequence
  Description of Artificial Sequence: Synthetic oligonucleotide
  Sense strand starting at position 2714 of SEQ ID NO: 915347
aaggaagacuuucuguauc

SEQ ID NO: 1073015 - RNA, 19 nt, Artificial Sequence
  Description of Artificial Sequence: Synthetic oligonucleotide
  Antisense strand to SEQ ID NO: 1073014
gauacagaaagucuuccuu

SEQ ID NO: 1073016 - RNA, 19 nt, Artificial Sequence
  Description of Artificial Sequence: Synthetic oligonucleotide
  Sense strand starting at position 2716 of SEQ ID NO: 915347
ggaagacuuucuguaucua

SEQ ID NO: 1073017 - RNA, 19 nt, Artificial Sequence
  Description of Artificial Sequence: Synthetic oligonucleotide
  Antisense strand to SEQ ID NO: 1073016
uagauacagaaagucuucc

SEQ ID NO: 1073018 - RNA, 19 nt, Artificial Sequence
  Description of Artificial Sequence: Synthetic oligonucleotide
  Sense strand starting at position 2821 of SEQ ID NO: 915347
agaggaugucagggccuaa

SEQ ID NO: 1073019 - RNA, 19 nt, Artificial Sequence
  Description of Artificial Sequence: Synthetic oligonucleotide
  Antisense strand to SEQ ID NO: 1073018
uuaggcccugacauccucu

SEQ ID NO: 1073020 - RNA, 19 nt, Artificial Sequence
  Description of Artificial Sequence: Synthetic oligonucleotide
  Sense strand starting at position 2896 of SEQ ID NO: 915347
ccuccugucccagagaacu

SEQ ID NO: 1073021 - RNA, 19 nt, Artificial Sequence
  Description of Artificial Sequence: Synthetic oligonucleotide
  Antisense strand to SEQ ID NO: 1073020
aguucucugggacaggagg

SEQ ID NO: 1073022 - RNA, 19 nt, Artificial Sequence
  Description of Artificial Sequence: Synthetic oligonucleotide
  Sense strand starting at position 3373 of SEQ ID NO: 915347
gcuccugagucucuguaau

SEQ ID NO: 1073023 - RNA, 19 nt, Artificial Sequence
  Description of Artificial Sequence: Synthetic oligonucleotide
  Antisense strand to SEQ ID NO: 1073022
auuacagagacucaggagc

SEQ ID NO: 1073024 - RNA, 19 nt, Artificial Sequence
  Description of Artificial Sequence: Synthetic oligonucleotide
  Sense strand starting at position 3447 of SEQ ID NO: 915347
agggauucgccauggccaa

SEQ ID NO: 1073025 - RNA, 19 nt, Artificial Sequence
  Description of Artificial Sequence: Synthetic oligonucleotide
  Antisense strand to SEQ ID NO: 1073024
uuggccauggcgaaucccu

SEQ ID NO: 1073026 - RNA, 19 nt, Artificial Sequence
  Description of Artificial Sequence: Synthetic oligonucleotide
  Sense strand starting at position 3448 of SEQ ID NO: 915347
gggauucgccauggccaau

SEQ ID NO: 1073027 - RNA, 19 nt, Artificial Sequence
  Description of Artificial Sequence: Synthetic oligonucleotide
  Antisense strand to SEQ ID NO: 1073026
auuggccauggcgaauccc

SEQ ID NO: 1073028 - RNA, 19 nt, Artificial Sequence
  Description of Artificial Sequence: Synthetic oligonucleotide
  Sense strand starting at position 3858 of SEQ ID NO: 915347
gugcaaucaucuccuagau

SEQ ID NO: 1073029 - RNA, 19 nt, Artificial Sequence
  Description of Artificial Sequence: Synthetic oligonucleotide
  Antisense strand to SEQ ID NO: 1073028
aucuaggagaugauugcac

SEQ ID NO: 1073030 - RNA, 19 nt, Artificial Sequence
  Description of Artificial Sequence: Synthetic oligonucleotide
  Sense strand starting at position 135 of SEQ ID NO: 915348
gagccuguacgauauucca

SEQ ID NO: 1073031 - RNA, 19 nt, Artificial Sequence
  Description of Artificial Sequence: Synthetic oligonucleotide
  Antisense strand to SEQ ID NO: 1073030
uggaauaucguacaggcuc

SEQ ID NO: 1073032 - RNA, 19 nt, Artificial Sequence
  Description of Artificial Sequence: Synthetic oligonucleotide
  Sense strand starting at position 138 of SEQ ID NO: 915348
ccuguacgauauuccagau

SEQ ID NO: 1073033 - RNA, 19 nt, Artificial Sequence
  Description of Artificial Sequence: Synthetic oligonucleotide
  Antisense strand to SEQ ID NO: 1073032
aucuggaauaucguacagg

SEQ ID NO: 1073034 - RNA, 19 nt, Artificial Sequence
  Description of Artificial Sequence: Synthetic oligonucleotide
  Sense strand starting at position 321 of SEQ ID NO: 915348
gggucugaugcauagcaga

SEQ ID NO: 1073035 - RNA, 19 nt, Artificial Sequence
  Description of Artificial Sequence: Synthetic oligonucleotide
  Antisense strand to SEQ ID NO: 1073034
ucugcuaugcaucagaccc

SEQ ID NO: 1073036 - RNA, 19 nt, Artificial Sequence
  Description of Artificial Sequence: Synthetic oligonucleotide
  Sense strand starting at position 580 of SEQ ID NO: 915348
ucccaaauagcuggaacau

SEQ ID NO: 1073037 - RNA, 19 nt, Artificial Sequence
  Description of Artificial Sequence: Synthetic oligonucleotide
  Antisense strand to SEQ ID NO: 1073036
auguuccagcuauuuggga

SEQ ID NO: 1073038 - RNA, 19 nt, Artificial Sequence
  Description of Artificial Sequence: Synthetic oligonucleotide
  Sense strand starting at position 637 of SEQ ID NO: 915348
ccagguagguauucuugga

SEQ ID NO: 1073039 - RNA, 19 nt, Artificial Sequence
  Description of Artificial Sequence: Synthetic oligonucleotide
  Antisense strand to SEQ ID NO: 1073038
uccaagaauaccuaccugg

SEQ ID NO: 1073040 - RNA, 19 nt, Artificial Sequence
  Description of Artificial Sequence: Synthetic oligonucleotide
  Sense strand starting at position 641 of SEQ ID NO: 915348
guagguauucuuggagaca

SEQ ID NO: 1073041 - RNA, 19 nt, Artificial Sequence
  Description of Artificial Sequence: Synthetic oligonucleotide
  Antisense strand to SEQ ID NO: 1073040
ugucuccaagaauaccuac

SEQ ID NO: 1073042 - RNA, 19 nt, Artificial Sequence
  Description of Artificial Sequence: Synthetic oligonucleotide
  Sense strand starting at position 792 of SEQ ID NO: 915348
uugugugaugguuauuugu

SEQ ID NO: 1073043 - RNA, 19 nt, Artificial Sequence
  Description of Artificial Sequence: Synthetic oligonucleotide
  Antisense strand to SEQ ID NO: 1073042
acaaauaaccaucacacaa

SEQ ID NO: 1073044 - RNA, 19 nt, Artificial Sequence
  Description of Artificial Sequence: Synthetic oligonucleotide
  Sense strand starting at position 794 of SEQ ID NO: 915348
gugugaugguuauuugugu

SEQ ID NO: 1073045 - RNA, 19 nt, Artificial Sequence
  Description of Artificial Sequence: Synthetic oligonucleotide
  Antisense strand to SEQ ID NO: 1073044
acacaaauaaccaucacac

SEQ ID NO: 1073046 - RNA, 19 nt, Artificial Sequence
  Description of Artificial Sequence: Synthetic oligonucleotide
  Sense strand starting at position 795 of SEQ ID NO: 915348
ugugaugguuauuugugua

SEQ ID NO: 1073047 - RNA, 19 nt, Artificial Sequence
  Description of Artificial Sequence: Synthetic oligonucleotide
  Antisense strand to SEQ ID NO: 1073046
uacacaaauaaccaucaca

SEQ ID NO: 1073048 - RNA, 19 nt, Artificial Sequence
  Description of Artificial Sequence: Synthetic oligonucleotide
  Sense strand starting at position 799 of SEQ ID NO: 915348
augguuauuuguguagcau

SEQ ID NO: 1073049 - RNA, 19 nt, Artificial Sequence
  Description of Artificial Sequence: Synthetic oligonucleotide
  Antisense strand to SEQ ID NO: 1073048
augcuacacaaauaaccau

SEQ ID NO: 1073050 - RNA, 19 nt, Artificial Sequence
  Description of Artificial Sequence: Synthetic oligonucleotide
  Sense strand starting at position 800 of SEQ ID NO: 915348
ugguuauuuguguagcauc

SEQ ID NO: 1073051 - RNA, 19 nt, Artificial Sequence
  Description of Artificial Sequence: Synthetic oligonucleotide
  Antisense strand to SEQ ID NO: 1073050
gaugcuacacaaauaacca

SEQ ID NO: 1073052 - RNA, 19 nt, Artificial Sequence
  Description of Artificial Sequence: Synthetic oligonucleotide
  Sense strand starting at position 811 of SEQ ID NO: 915348
guagcaucugccuccugua

SEQ ID NO: 1073053 - RNA, 19 nt, Artificial Sequence
  Description of Artificial Sequence: Synthetic oligonucleotide
  Antisense strand to SEQ ID NO: 1073052
uacaggaggcagaugcuac

SEQ ID NO: 1073054 - RNA, 19 nt, Artificial Sequence
  Description of Artificial Sequence: Synthetic oligonucleotide
  Sense strand starting at position 1041 of SEQ ID NO: 915348
uggaaaucuuaacagggaa

SEQ ID NO: 1073055 - RNA, 19 nt, Artificial Sequence
  Description of Artificial Sequence: Synthetic oligonucleotide
  Antisense strand to SEQ ID NO: 1073054
uucccuguuaagauuucca

SEQ ID NO: 1073056 - RNA, 19 nt, Artificial Sequence
  Description of Artificial Sequence: Synthetic oligonucleotide
  Sense strand starting at position 1260 of SEQ ID NO: 915348
auagacaguucuguucuaa

SEQ ID NO: 1073057 - RNA, 19 nt, Artificial Sequence
  Description of Artificial Sequence: Synthetic oligonucleotide
  Antisense strand to SEQ ID NO: 1073056
uuagaacagaacugucuau

SEQ ID NO: 1073058 - RNA, 19 nt, Artificial Sequence
  Description of Artificial Sequence: Synthetic oligonucleotide
  Sense strand starting at position 1408 of SEQ ID NO: 915348
augggucgugaugaacaaa

SEQ ID NO: 1073059 - RNA, 19 nt, Artificial Sequence
  Description of Artificial Sequence: Synthetic oligonucleotide
  Antisense strand to SEQ ID NO: 1073058
uuuguucaucacgacccau

SEQ ID NO: 1073060 - RNA, 19 nt, Artificial Sequence
  Description of Artificial Sequence: Synthetic oligonucleotide
  Sense strand starting at position 1509 of SEQ ID NO: 915348
agguccugguuucuugaga

SEQ ID NO: 1073061 - RNA, 19 nt, Artificial Sequence
  Description of Artificial Sequence: Synthetic oligonucleotide
  Antisense strand to SEQ ID NO: 1073060
ucucaagaaaccaggaccu

SEQ ID NO: 1073062 - RNA, 19 nt, Artificial Sequence
  Description of Artificial Sequence: Synthetic oligonucleotide
  Sense strand starting at position 1516 of SEQ ID NO: 915348
gguuucuugagagaagugu

SEQ ID NO: 1073063 - RNA, 19 nt, Artificial Sequence
  Description of Artificial Sequence: Synthetic oligonucleotide
  Antisense strand to SEQ ID NO: 1073062
acacuucucucaagaaacc

SEQ ID NO: 1073064 - RNA, 19 nt, Artificial Sequence
  Description of Artificial Sequence: Synthetic oligonucleotide
  Sense strand starting at position 1985 of SEQ ID NO: 915348
ucuagaucuguagaagugu

SEQ ID NO: 1073065 - RNA, 19 nt, Artificial Sequence
  Description of Artificial Sequence: Synthetic oligonucleotide
  Antisense strand to SEQ ID NO: 1073064
acacuucuacagaucuaga

SEQ ID NO: 1073066 - RNA, 19 nt, Artificial Sequence
  Description of Artificial Sequence: Synthetic oligonucleotide
  Sense strand starting at position 2047 of SEQ ID NO: 915348
auuagaauaugccugacua

SEQ ID NO: 1073067 - RNA, 19 nt, Artificial Sequence
  Description of Artificial Sequence: Synthetic oligonucleotide
  Antisense strand to SEQ ID NO: 1073066
uagucaggcauauucuaau

SEQ ID NO: 1073068 - RNA, 19 nt, Artificial Sequence
  Description of Artificial Sequence: Synthetic oligonucleotide
  Sense strand starting at position 2048 of SEQ ID NO: 915348
uuagaauaugccugacuag

SEQ ID NO: 1073069 - RNA, 19 nt, Artificial Sequence
  Description of Artificial Sequence: Synthetic oligonucleotide
  Antisense strand to SEQ ID NO: 1073068
cuagucaggcauauucuaa

SEQ ID NO: 1073070 - RNA, 19 nt, Artificial Sequence
  Description of Artificial Sequence: Synthetic oligonucleotide
  Sense strand starting at position 2112 of SEQ ID NO: 915348
gauucuguaauguggaagu

SEQ ID NO: 1073071 - RNA, 19 nt, Artificial Sequence
  Description of Artificial Sequence: Synthetic oligonucleotide
  Antisense strand to SEQ ID NO: 1073070
acuuccacauuacagaauc

SEQ ID NO: 1073072 - RNA, 19 nt, Artificial Sequence
  Description of Artificial Sequence: Synthetic oligonucleotide
  Sense strand starting at position 2189 of SEQ ID NO: 915348
acuagagcuguuuacaaag

SEQ ID NO: 1073073 - RNA, 19 nt, Artificial Sequence
  Description of Artificial Sequence: Synthetic oligonucleotide
  Antisense strand to SEQ ID NO: 1073072
cuuuguaaacagcucuagu

SEQ ID NO: 1073074 - RNA, 19 nt, Artificial Sequence
  Description of Artificial Sequence: Synthetic oligonucleotide
  Sense strand starting at position 2304 of SEQ ID NO: 915348
cccugcaguccuuauuauu

SEQ ID NO: 1073075 - RNA, 19 nt, Artificial Sequence
  Description of Artificial Sequence: Synthetic oligonucleotide
  Antisense strand to SEQ ID NO: 1073074
aauaauaaggacugcaggg

SEQ ID NO: 1073076 - RNA, 19 nt, Artificial Sequence
  Description of Artificial Sequence: Synthetic oligonucleotide
  Sense strand starting at position 2474 of SEQ ID NO: 915348
ggccacacuccguaacaau

SEQ ID NO: 1073077 - RNA, 19 nt, Artificial Sequence
  Description of Artificial Sequence: Synthetic oligonucleotide
  Antisense strand to SEQ ID NO: 1073076
auuguuacggaguguggcc

SEQ ID NO: 1073078 - RNA, 19 nt, Artificial Sequence
  Description of Artificial Sequence: Synthetic oligonucleotide
  Sense strand starting at position 2515 of SEQ ID NO: 915348
ggaggcaagcccugauacu

SEQ ID NO: 1073079 - RNA, 19 nt, Artificial Sequence
  Description of Artificial Sequence: Synthetic oligonucleotide
  Antisense strand to SEQ ID NO: 1073078
aguaucagggcuugccucc

SEQ ID NO: 1073080 - RNA, 19 nt, Artificial Sequence
  Description of Artificial Sequence: Synthetic oligonucleotide
  Sense strand starting at position 2669 of SEQ ID NO: 915348
aggguuagcaaaugacuca

SEQ ID NO: 1073081 - RNA, 19 nt, Artificial Sequence
  Description of Artificial Sequence: Synthetic oligonucleotide
  Antisense strand to SEQ ID NO: 1073080
ugagucauuugcuaacccu

SEQ ID NO: 1073082 - RNA, 19 nt, Artificial Sequence
  Description of Artificial Sequence: Synthetic oligonucleotide
  Sense strand starting at position 2670 of SEQ ID NO: 915348
ggguuagcaaaugacucau

SEQ ID NO: 1073083 - RNA, 19 nt, Artificial Sequence
  Description of Artificial Sequence: Synthetic oligonucleotide
  Antisense strand to SEQ ID NO: 1073082
augagucauuugcuaaccc

SEQ ID NO: 1073084 - RNA, 19 nt, Artificial Sequence
  Description of Artificial Sequence: Synthetic oligonucleotide
  Sense strand starting at position 2676 of SEQ ID NO: 915348
gcaaaugacucauccaugu

SEQ ID NO: 1073085 - RNA, 19 nt, Artificial Sequence
  Description of Artificial Sequence: Synthetic oligonucleotide
  Antisense strand to SEQ ID NO: 1073084
acauggaugagucauuugc

SEQ ID NO: 1073086 - RNA, 19 nt, Artificial Sequence
  Description of Artificial Sequence: Synthetic oligonucleotide
  Sense strand starting at position 2680 of SEQ ID NO: 915348
augacucauccauguacau

SEQ ID NO: 1073087 - RNA, 19 nt, Artificial Sequence
  Description of Artificial Sequence: Synthetic oligonucleotide
  Antisense strand to SEQ ID NO: 1073086
auguacauggaugagucau

SEQ ID NO: 1073088 - RNA, 19 nt, Artificial Sequence
  Description of Artificial Sequence: Synthetic oligonucleotide
  Sense strand starting at position 2879 of SEQ ID NO: 915348
acggucuugacacagauca

SEQ ID NO: 1073089 - RNA, 19 nt, Artificial Sequence
  Description of Artificial Sequence: Synthetic oligonucleotide
  Antisense strand to SEQ ID NO: 1073088
ugaucugugucaagaccgu

SEQ ID NO: 1073090 - RNA, 19 nt, Artificial Sequence
  Description of Artificial Sequence: Synthetic oligonucleotide
  Sense strand starting at position 3291 of SEQ ID NO: 915348
ugaacucaguuccuagaaa

SEQ ID NO: 1073091 - RNA, 19 nt, Artificial Sequence
  Description of Artificial Sequence: Synthetic oligonucleotide
  Antisense strand to SEQ ID NO: 1073090
uuucuaggaacugaguuca

SEQ ID NO: 1073092 - RNA, 19 nt, Artificial Sequence
  Description of Artificial Sequence: Synthetic oligonucleotide
  Sense strand starting at position 3395 of SEQ ID NO: 915348
cagucuagugagggagauu

SEQ ID NO: 1073093 - RNA, 19 nt, Artificial Sequence
  Description of Artificial Sequence: Synthetic oligonucleotide
  Antisense strand to SEQ ID NO: 1073092
aaucucccucacuagacug

SEQ ID NO: 1073094 - RNA, 19 nt, Artificial Sequence
  Description of Artificial Sequence: Synthetic oligonucleotide
  Sense strand starting at position 3601 of SEQ ID NO: 915348
gcauuuccgugugucuaga

SEQ ID NO: 1073095 - RNA, 19 nt, Artificial Sequence
  Description of Artificial Sequence: Synthetic oligonucleotide
  Antisense strand to SEQ ID NO: 1073094
ucuagacacacggaaaugc

SEQ ID NO: 1073096 - RNA, 19 nt, Artificial Sequence
  Description of Artificial Sequence: Synthetic oligonucleotide
  Sense strand starting at position 3649 of SEQ ID NO: 915348
gggagugucaggcgauaga

SEQ ID NO: 1073097 - RNA, 19 nt, Artificial Sequence
  Description of Artificial Sequence: Synthetic oligonucleotide
  Antisense strand to SEQ ID NO: 1073096
ucuaucgccugacacuccc

SEQ ID NO: 1073098 - RNA, 19 nt, Artificial Sequence
  Description of Artificial Sequence: Synthetic oligonucleotide
  Sense strand starting at position 3772 of SEQ ID NO: 915348
aggagugaggugugugauu

SEQ ID NO: 1073099 - RNA, 19 nt, Artificial Sequence
  Description of Artificial Sequence: Synthetic oligonucleotide
  Antisense strand to SEQ ID NO: 1073098
aaucacacaccucacuccu

SEQ ID NO: 1073100 - RNA, 19 nt, Artificial Sequence
  Description of Artificial Sequence: Synthetic oligonucleotide
  Sense strand starting at position 3773 of SEQ ID NO: 915348
ggagugaggugugugauua

SEQ ID NO: 1073101 - RNA, 19 nt, Artificial Sequence
  Description of Artificial Sequence: Synthetic oligonucleotide
  Antisense strand to SEQ ID NO: 1073100
uaaucacacaccucacucc

SEQ ID NO: 1073102 - RNA, 19 nt, Artificial Sequence
  Description of Artificial Sequence: Synthetic oligonucleotide
  Sense strand starting at position 3774 of SEQ ID NO: 915348
gagugaggugugugauuag

SEQ ID NO: 1073103 - RNA, 19 nt, Artificial Sequence
  Description of Artificial Sequence: Synthetic oligonucleotide
  Antisense strand to SEQ ID NO: 1073102
cuaaucacacaccucacuc

SEQ ID NO: 1073104 - RNA, 19 nt, Artificial Sequence
  Description of Artificial Sequence: Synthetic oligonucleotide
  Sense strand starting at position 3855 of SEQ ID NO: 915348
aaggaagacuuucuguauc

SEQ ID NO: 1073105 - RNA, 19 nt, Artificial Sequence
  Description of Artificial Sequence: Synthetic oligonucleotide
  Antisense strand to SEQ ID NO: 1073104
gauacagaaagucuuccuu

SEQ ID NO: 1073106 - RNA, 19 nt, Artificial Sequence
  Description of Artificial Sequence: Synthetic oligonucleotide
  Sense strand starting at position 3857 of SEQ ID NO: 915348
ggaagacuuucuguaucua

SEQ ID NO: 1073107 - RNA, 19 nt, Artificial Sequence
  Description of Artificial Sequence: Synthetic oligonucleotide
  Antisense strand to SEQ ID NO: 1073106
uagauacagaaagucuucc

SEQ ID NO: 1073108 - RNA, 19 nt, Artificial Sequence
  Description of Artificial Sequence: Synthetic oligonucleotide
  Sense strand starting at position 3962 of SEQ ID NO: 915348
agaggaugucagggccuaa

SEQ ID NO: 1073109 - RNA, 19 nt, Artificial Sequence
  Description of Artificial Sequence: Synthetic oligonucleotide
  Antisense strand to SEQ ID NO: 1073108
uuaggcccugacauccucu

SEQ ID NO: 1073110 - RNA, 19 nt, Artificial Sequence
  Description of Artificial Sequence: Synthetic oligonucleotide
  Sense strand starting at position 63 of SEQ ID NO: 915349
agacuaugaguguggagau

SEQ ID NO: 1073111 - RNA, 19 nt, Artificial Sequence
  Description of Artificial Sequence: Synthetic oligonucleotide
  Antisense strand to SEQ ID NO: 1073110
aucuccacacucauagucu

SEQ ID NO: 1073112 - RNA, 19 nt, Artificial Sequence
  Description of Artificial Sequence: Synthetic oligonucleotide
  Sense strand starting at position 263 of SEQ ID NO: 915349
gccucaguucuugucugua

SEQ ID NO: 1073113 - RNA, 19 nt, Artificial Sequence
  Description of Artificial Sequence: Synthetic oligonucleotide
  Antisense strand to SEQ ID NO: 1073112
uacagacaagaacugaggc

SEQ ID NO: 1073114 - RNA, 19 nt, Artificial Sequence
  Description of Artificial Sequence: Synthetic oligonucleotide
  Sense strand starting at position 333 of SEQ ID NO: 915349
guuagcucucacuacuaua

SEQ ID NO: 1073115 - RNA, 19 nt, Artificial Sequence
  Description of Artificial Sequence: Synthetic oligonucleotide
  Antisense strand to SEQ ID NO: 1073114
uauaguagugagagcuaac

SEQ ID NO: 1073116 - RNA, 19 nt, Artificial Sequence
  Description of Artificial Sequence: Synthetic oligonucleotide
  Sense strand starting at position 356 of SEQ ID NO: 915349
agaguauauagugguuaaa

SEQ ID NO: 1073117 - RNA, 19 nt, Artificial Sequence
  Description of Artificial Sequence: Synthetic oligonucleotide
  Antisense strand to SEQ ID NO: 1073116
uuuaaccacuauauacucu

SEQ ID NO: 1073118 - RNA, 19 nt, Artificial Sequence
  Description of Artificial Sequence: Synthetic oligonucleotide
  Sense strand starting at position 692 of SEQ ID NO: 915349
ccaguucuaugacuuacua

SEQ ID NO: 1073119 - RNA, 19 nt, Artificial Sequence
  Description of Artificial Sequence: Synthetic oligonucleotide
  Antisense strand to SEQ ID NO: 1073118
uaguaagucauagaacugg

SEQ ID NO: 1073120 - RNA, 19 nt, Artificial Sequence
  Description of Artificial Sequence: Synthetic oligonucleotide
  Sense strand starting at position 765 of SEQ ID NO: 915349
cauaaaguggguuaguaau

SEQ ID NO: 1073121 - RNA, 19 nt, Artificial Sequence
  Description of Artificial Sequence: Synthetic oligonucleotide
  Antisense strand to SEQ ID NO: 1073120
auuacuaacccacuuuaug

SEQ ID NO: 1073122 - RNA, 19 nt, Artificial Sequence
  Description of Artificial Sequence: Synthetic oligonucleotide
  Sense strand starting at position 853 of SEQ ID NO: 915349
ggcaucauauugucaaaua

SEQ ID NO: 1073123 - RNA, 19 nt, Artificial Sequence
  Description of Artificial Sequence: Synthetic oligonucleotide
  Antisense strand to SEQ ID NO: 1073122
uauuugacaauaugaugcc

SEQ ID NO: 1073124 - RNA, 19 nt, Artificial Sequence
  Description of Artificial Sequence: Synthetic oligonucleotide
  Sense strand starting at position 1213 of SEQ ID NO: 915349
acuggaaugcaaugauuau

SEQ ID NO: 1073125 - RNA, 19 nt, Artificial Sequence
  Description of Artificial Sequence: Synthetic oligonucleotide
  Antisense strand to SEQ ID NO: 1073124
auaaucauugcauuccagu

SEQ ID NO: 1073126 - RNA, 19 nt, Artificial Sequence
  Description of Artificial Sequence: Synthetic oligonucleotide
  Sense strand starting at position 1258 of SEQ ID NO: 915349
uuauuuaagucagagaauc

SEQ ID NO: 1073127 - RNA, 19 nt, Artificial Sequence
  Description of Artificial Sequence: Synthetic oligonucleotide
  Antisense strand to SEQ ID NO: 1073126
gauucucugacuuaaauaa

SEQ ID NO: 1073128 - RNA, 19 nt, Artificial Sequence
  Description of Artificial Sequence: Synthetic oligonucleotide
  Sense strand starting at position 1451 of SEQ ID NO: 915349
uauaauugagaguagcgau

SEQ ID NO: 1073129 - RNA, 19 nt, Artificial Sequence
  Description of Artificial Sequence: Synthetic oligonucleotide
  Antisense strand to SEQ ID NO: 1073128
aucgcuacucucaauuaua

SEQ ID NO: 1073130 - RNA, 19 nt, Artificial Sequence
  Description of Artificial Sequence: Synthetic oligonucleotide
  Sense strand starting at position 1533 of SEQ ID NO: 915349
ggcuucuacucaccagaau

SEQ ID NO: 1073131 - RNA, 19 nt, Artificial Sequence
  Description of Artificial Sequence: Synthetic oligonucleotide
  Antisense strand to SEQ ID NO: 1073130
auucuggugaguagaagcc

SEQ ID NO: 1073132 - RNA, 19 nt, Artificial Sequence
  Description of Artificial Sequence: Synthetic oligonucleotide
  Sense strand starting at position 1634 of SEQ ID NO: 915349
gcuacuguaccuuauaaag

SEQ ID NO: 1073133 - RNA, 19 nt, Artificial Sequence
  Description of Artificial Sequence: Synthetic oligonucleotide
  Antisense strand to SEQ ID NO: 1073132
cuuuauaagguacaguagc

SEQ ID NO: 1073134 - RNA, 19 nt, Artificial Sequence
  Description of Artificial Sequence: Synthetic oligonucleotide
  Sense strand starting at position 1642 of SEQ ID NO: 915349
accuuauaaagguggcaga

SEQ ID NO: 1073135 - RNA, 19 nt, Artificial Sequence
  Description of Artificial Sequence: Synthetic oligonucleotide
  Antisense strand to SEQ ID NO: 1073134
ucugccaccuuuauaaggu

SEQ ID NO: 1073136 - RNA, 19 nt, Artificial Sequence
  Description of Artificial Sequence: Synthetic oligonucleotide
  Sense strand starting at position 1758 of SEQ ID NO: 915349
ccuggaauugggugaaacu

SEQ ID NO: 1073137 - RNA, 19 nt, Artificial Sequence
  Description of Artificial Sequence: Synthetic oligonucleotide
  Antisense strand to SEQ ID NO: 1073136
aguuucacccaauuccagg

SEQ ID NO: 1073138 - RNA, 19 nt, Artificial Sequence
  Description of Artificial Sequence: Synthetic oligonucleotide
  Sense strand starting at position 1813 of SEQ ID NO: 915349
ggugaagucauacaugcag

SEQ ID NO: 1073139 - RNA, 19 nt, Artificial Sequence
  Description of Artificial Sequence: Synthetic oligonucleotide
  Antisense strand to SEQ ID NO: 1073138
cugcauguaugacuucacc

SEQ ID NO: 1073140 - RNA, 19 nt, Artificial Sequence
  Description of Artificial Sequence: Synthetic oligonucleotide
  Sense strand starting at position 1963 of SEQ ID NO: 915349
gaauguccugaauaugguu

SEQ ID NO: 1073141 - RNA, 19 nt, Artificial Sequence
  Description of Artificial Sequence: Synthetic oligonucleotide
  Antisense strand to SEQ ID NO: 1073140
aaccauauucaggacauuc

SEQ ID NO: 1073142 - RNA, 19 nt, Artificial Sequence
  Description of Artificial Sequence: Synthetic oligonucleotide
  Sense strand starting at position 2037 of SEQ ID NO: 915349
ugugaauaccagcaaguga

SEQ ID NO: 1073143 - RNA, 19 nt, Artificial Sequence
  Description of Artificial Sequence: Synthetic oligonucleotide
  Antisense strand to SEQ ID NO: 1073142
ucacuugcugguauucaca

SEQ ID NO: 1073144 - RNA, 19 nt, Artificial Sequence
  Description of Artificial Sequence: Synthetic oligonucleotide
  Sense strand starting at position 2127 of SEQ ID NO: 915349
ggacgaaucccugggaauc

SEQ ID NO: 1073145 - RNA, 19 nt, Artificial Sequence
  Description of Artificial Sequence: Synthetic oligonucleotide
  Antisense strand to SEQ ID NO: 1073144
gauucccagggauucgucc

SEQ ID NO: 1073146 - RNA, 19 nt, Artificial Sequence
  Description of Artificial Sequence: Synthetic oligonucleotide
  Sense strand starting at position 2128 of SEQ ID NO: 915349
gacgaaucccugggaaucu

SEQ ID NO: 1073147 - RNA, 19 nt, Artificial Sequence
  Description of Artificial Sequence: Synthetic oligonucleotide
  Antisense strand to SEQ ID NO: 1073146
agauucccagggauucguc

SEQ ID NO: 1073148 - RNA, 19 nt, Artificial Sequence
  Description of Artificial Sequence: Synthetic oligonucleotide
  Sense strand starting at position 2230 of SEQ ID NO: 915349
ugaggcucugcacaaguaa

SEQ ID NO: 1073149 - RNA, 19 nt, Artificial Sequence
  Description of Artificial Sequence: Synthetic oligonucleotide
  Antisense strand to SEQ ID NO: 1073148
uuacuugugcagagccuca

SEQ ID NO: 1073150 - RNA, 19 nt, Artificial Sequence
  Description of Artificial Sequence: Synthetic oligonucleotide
  Sense strand starting at position 2270 of SEQ ID NO: 915349
cuguaaacugccuaucuga

SEQ ID NO: 1073151 - RNA, 19 nt, Artificial Sequence
  Description of Artificial Sequence: Synthetic oligonucleotide
  Antisense strand to SEQ ID NO: 1073150
ucagauaggcaguuuacag

SEQ ID NO: 1073152 - RNA, 19 nt, Artificial Sequence
  Description of Artificial Sequence: Synthetic oligonucleotide
  Sense strand starting at position 2278 of SEQ ID NO: 915349
ugccuaucugaucacugaa

SEQ ID NO: 1073153 - RNA, 19 nt, Artificial Sequence
  Description of Artificial Sequence: Synthetic oligonucleotide
  Antisense strand to SEQ ID NO: 1073152
uucagugaucagauaggca

SEQ ID NO: 1073154 - RNA, 19 nt, Artificial Sequence
  Description of Artificial Sequence: Synthetic oligonucleotide
  Sense strand starting at position 2340 of SEQ ID NO: 915349
gggagacuuguugguucca

SEQ ID NO: 1073155 - RNA, 19 nt, Artificial Sequence
  Description of Artificial Sequence: Synthetic oligonucleotide
  Antisense strand to SEQ ID NO: 1073154
uggaaccaacaagucuccc

SEQ ID NO: 1073156 - RNA, 19 nt, Artificial Sequence
  Description of Artificial Sequence: Synthetic oligonucleotide
  Sense strand starting at position 2342 of SEQ ID NO: 915349
gagacuuguugguuccaga

SEQ ID NO: 1073157 - RNA, 19 nt, Artificial Sequence
  Description of Artificial Sequence: Synthetic oligonucleotide
  Antisense strand to SEQ ID NO: 1073156
ucuggaaccaacaagucuc

SEQ ID NO: 1073158 - RNA, 19 nt, Artificial Sequence
  Description of Artificial Sequence: Synthetic oligonucleotide
  Sense strand starting at position 2351 of SEQ ID NO: 915349
ugguuccagaguuauuagu

SEQ ID NO: 1073159 - RNA, 19 nt, Artificial Sequence
  Description of Artificial Sequence: Synthetic oligonucleotide
  Antisense strand to SEQ ID NO: 1073158
acuaauaacucuggaacca

SEQ ID NO: 1073160 - RNA, 19 nt, Artificial Sequence
  Description of Artificial Sequence: Synthetic oligonucleotide
  Sense strand starting at position 2357 of SEQ ID NO: 915349
cagaguuauuaguuaaaga

SEQ ID NO: 1073161 - RNA, 19 nt, Artificial Sequence
  Description of Artificial Sequence: Synthetic oligonucleotide
  Antisense strand to SEQ ID NO: 1073160
ucuuuaacuaauaacucug

SEQ ID NO: 1073162 - RNA, 19 nt, Artificial Sequence
  Description of Artificial Sequence: Synthetic oligonucleotide
  Sense strand starting at position 2389 of SEQ ID NO: 915349
ucuauuuauuagcugguca

SEQ ID NO: 1073163 - RNA, 19 nt, Artificial Sequence
  Description of Artificial Sequence: Synthetic oligonucleotide
  Antisense strand to SEQ ID NO: 1073162
ugaccagcuaauaaauaga

SEQ ID NO: 1073164 - RNA, 19 nt, Artificial Sequence
  Description of Artificial Sequence: Synthetic oligonucleotide
  Sense strand starting at position 2394 of SEQ ID NO: 915349
uuauuagcuggucaauaag

SEQ ID NO: 1073165 - RNA, 19 nt, Artificial Sequence
  Description of Artificial Sequence: Synthetic oligonucleotide
  Antisense strand to SEQ ID NO: 1073164
cuuauugaccagcuaauaa

SEQ ID NO: 1073166 - RNA, 19 nt, Artificial Sequence
  Description of Artificial Sequence: Synthetic oligonucleotide
  Sense strand starting at position 2397 of SEQ ID NO: 915349
uuagcuggucaauaagcaa

SEQ ID NO: 1073167 - RNA, 19 nt, Artificial Sequence
  Description of Artificial Sequence: Synthetic oligonucleotide
  Antisense strand to SEQ ID NO: 1073166
uugcuuauugaccagcuaa

SEQ ID NO: 1073168 - RNA, 19 nt, Artificial Sequence
  Description of Artificial Sequence: Synthetic oligonucleotide
  Sense strand starting at position 2423 of SEQ ID NO: 915349
agagacuuuggugguuaca

SEQ ID NO: 1073169 - RNA, 19 nt, Artificial Sequence
  Description of Artificial Sequence: Synthetic oligonucleotide
  Antisense strand to SEQ ID NO: 1073168
uguaaccaccaaagucucu

SEQ ID NO: 1073170 - RNA, 19 nt, Artificial Sequence
  Description of Artificial Sequence: Synthetic oligonucleotide
  Sense strand starting at position 2425 of SEQ ID NO: 915349
agacuuuggugguuacaca

SEQ ID NO: 1073171 - RNA, 19 nt, Artificial Sequence
  Description of Artificial Sequence: Synthetic oligonucleotide
  Antisense strand to SEQ ID NO: 1073170
uguguaaccaccaaagucu

SEQ ID NO: 1073172 - RNA, 19 nt, Artificial Sequence
  Description of Artificial Sequence: Synthetic oligonucleotide
  Sense strand starting at position 2426 of SEQ ID NO: 915349
gacuuuggugguuacacau

SEQ ID NO: 1073173 - RNA, 19 nt, Artificial Sequence
  Description of Artificial Sequence: Synthetic oligonucleotide
  Antisense strand to SEQ ID NO: 1073172
auguguaaccaccaaaguc

SEQ ID NO: 1073174 - RNA, 19 nt, Artificial Sequence
  Description of Artificial Sequence: Synthetic oligonucleotide
  Sense strand starting at position 2432 of SEQ ID NO: 915349
ggugguuacacaugauaaa

SEQ ID NO: 1073175 - RNA, 19 nt, Artificial Sequence
  Description of Artificial Sequence: Synthetic oligonucleotide
  Antisense strand to SEQ ID NO: 1073174
uuuaucauguguaaccacc

SEQ ID NO: 1073176 - RNA, 19 nt, Artificial Sequence
  Description of Artificial Sequence: Synthetic oligonucleotide
  Sense strand starting at position 2827 of SEQ ID NO: 915349
uccagacuguuauugaacu

SEQ ID NO: 1073177 - RNA, 19 nt, Artificial Sequence
  Description of Artificial Sequence: Synthetic oligonucleotide
  Antisense strand to SEQ ID NO: 1073176
aguucaauaacagucugga

SEQ ID NO: 1073178 - RNA, 19 nt, Artificial Sequence
  Description of Artificial Sequence: Synthetic oligonucleotide
  Sense strand starting at position 2838 of SEQ ID NO: 915349
auugaacuccugggcauaa

SEQ ID NO: 1073179 - RNA, 19 nt, Artificial Sequence
  Description of Artificial Sequence: Synthetic oligonucleotide
  Antisense strand to SEQ ID NO: 1073178
uuaugcccaggaguucaau

SEQ ID NO: 1073180 - RNA, 19 nt, Artificial Sequence
  Description of Artificial Sequence: Synthetic oligonucleotide
  Sense strand starting at position 3056 of SEQ ID NO: 915349
ugacauagacguuaacuca

SEQ ID NO: 1073181 - RNA, 19 nt, Artificial Sequence
  Description of Artificial Sequence: Synthetic oligonucleotide
  Antisense strand to SEQ ID NO: 1073180
ugaguuaacgucuauguca

SEQ ID NO: 1073182 - RNA, 19 nt, Artificial Sequence
  Description of Artificial Sequence: Synthetic oligonucleotide
  Sense strand starting at position 3293 of SEQ ID NO: 915349
aagaaaguauuggugaacu

SEQ ID NO: 1073183 - RNA, 19 nt, Artificial Sequence
  Description of Artificial Sequence: Synthetic oligonucleotide
  Antisense strand to SEQ ID NO: 1073182
aguucaccaauacuuucuu

SEQ ID NO: 1073184 - RNA, 19 nt, Artificial Sequence
  Description of Artificial Sequence: Synthetic oligonucleotide
  Sense strand starting at position 3350 of SEQ ID NO: 915349
gcaagacuuguauacggaa

SEQ ID NO: 1073185 - RNA, 19 nt, Artificial Sequence
  Description of Artificial Sequence: Synthetic oligonucleotide
  Antisense strand to SEQ ID NO: 1073184
uuccguauacaagucuugc

SEQ ID NO: 1073186 - RNA, 19 nt, Artificial Sequence
  Description of Artificial Sequence: Synthetic oligonucleotide
  Sense strand starting at position 3774 of SEQ ID NO: 915349
ugguuuaagcaacaguuau

SEQ ID NO: 1073187 - RNA, 19 nt, Artificial Sequence
  Description of Artificial Sequence: Synthetic oligonucleotide
  Antisense strand to SEQ ID NO: 1073186
auaacuguugcuuaaacca

SEQ ID NO: 1073188 - RNA, 19 nt, Artificial Sequence
  Description of Artificial Sequence: Synthetic oligonucleotide
  Sense strand starting at position 3794 of SEQ ID NO: 915349
agacaugaugccugaggca

SEQ ID NO: 1073189 - RNA, 19 nt, Artificial Sequence
  Description of Artificial Sequence: Synthetic oligonucleotide
  Antisense strand to SEQ ID NO: 1073188
ugccucaggcaucaugucu

SEQ ID NO: 1073190 - RNA, 19 nt, Artificial Sequence
  Description of Artificial Sequence: Synthetic oligonucleotide
  Sense strand starting at position 109 of SEQ ID NO: 915350
ggcuguucccaauaauagc

SEQ ID NO: 1073191 - RNA, 19 nt, Artificial Sequence
  Description of Artificial Sequence: Synthetic oligonucleotide
  Antisense strand to SEQ ID NO: 1073190
gcuauuauugggaacagcc

SEQ ID NO: 1073192 - RNA, 19 nt, Artificial Sequence
  Description of Artificial Sequence: Synthetic oligonucleotide
  Sense strand starting at position 128 of SEQ ID NO: 915350
ucuaguuauugggaccuga

SEQ ID NO: 1073193 - RNA, 19 nt, Artificial Sequence
  Description of Artificial Sequence: Synthetic oligonucleotide
  Antisense strand to SEQ ID NO: 1073192
ucaggucccaauaacuaga

SEQ ID NO: 1073194 - RNA, 19 nt, Artificial Sequence
  Description of Artificial Sequence: Synthetic oligonucleotide
  Sense strand starting at position 275 of SEQ ID NO: 915350
ccugaagucgugugcugua

SEQ ID NO: 1073195 - RNA, 19 nt, Artificial Sequence
  Description of Artificial Sequence: Synthetic oligonucleotide
  Antisense strand to SEQ ID NO: 1073194
uacagcacacgacuucagg

SEQ ID NO: 1073196 - RNA, 19 nt, Artificial Sequence
  Description of Artificial Sequence: Synthetic oligonucleotide
  Sense strand starting at position 278 of SEQ ID NO: 915350
gaagucgugugcuguaaac

SEQ ID NO: 1073197 - RNA, 19 nt, Artificial Sequence
  Description of Artificial Sequence: Synthetic oligonucleotide
  Antisense strand to SEQ ID NO: 1073196
guuuacagcacacgacuuc

SEQ ID NO: 1073198 - RNA, 19 nt, Artificial Sequence
  Description of Artificial Sequence: Synthetic oligonucleotide
  Sense strand starting at position 280 of SEQ ID NO: 915350
agucgugugcuguaaacau

SEQ ID NO: 1073199 - RNA, 19 nt, Artificial Sequence
  Description of Artificial Sequence: Synthetic oligonucleotide
  Antisense strand to SEQ ID NO: 1073198
auguuuacagcacacgacu

SEQ ID NO: 1073200 - RNA, 19 nt, Artificial Sequence
  Description of Artificial Sequence: Synthetic oligonucleotide
  Sense strand starting at position 284 of SEQ ID NO: 915350
gugugcuguaaacaucacu

SEQ ID NO: 1073201 - RNA, 19 nt, Artificial Sequence
  Description of Artificial Sequence: Synthetic oligonucleotide
  Antisense strand to SEQ ID NO: 1073200
agugauguuuacagcacac

SEQ ID NO: 1073202 - RNA, 19 nt, Artificial Sequence
  Description of Artificial Sequence: Synthetic oligonucleotide
  Sense strand starting at position 636 of SEQ ID NO: 915350
gcuggcaccgguuguaaua

SEQ ID NO: 1073203 - RNA, 19 nt, Artificial Sequence
  Description of Artificial Sequence: Synthetic oligonucleotide
  Antisense strand to SEQ ID NO: 1073202
uauuacaaccggugccagc

SEQ ID NO: 1073204 - RNA, 19 nt, Artificial Sequence
  Description of Artificial Sequence: Synthetic oligonucleotide
  Sense strand starting at position 1997 of SEQ ID NO: 915350
ccgcccugcucccgauaau

SEQ ID NO: 1073205 - RNA, 19 nt, Artificial Sequence
  Description of Artificial Sequence: Synthetic oligonucleotide
  Antisense strand to SEQ ID NO: 1073204
auuaucgggagcagggcgg

SEQ ID NO: 1073206 - RNA, 19 nt, Artificial Sequence
  Description of Artificial Sequence: Synthetic oligonucleotide
  Sense strand starting at position 1998 of SEQ ID NO: 915350
cgcccugcucccgauaauu

SEQ ID NO: 1073207 - RNA, 19 nt, Artificial Sequence
  Description of Artificial Sequence: Synthetic oligonucleotide
  Antisense strand to SEQ ID NO: 1073206
aauuaucgggagcagggcg

SEQ ID NO: 1073208 - RNA, 19 nt, Artificial Sequence
  Description of Artificial Sequence: Synthetic oligonucleotide
  Sense strand starting at position 2027 of SEQ ID NO: 915350
uggagcaauccugggugau

SEQ ID NO: 1073209 - RNA, 19 nt, Artificial Sequence
  Description of Artificial Sequence: Synthetic oligonucleotide
  Antisense strand to SEQ ID NO: 1073208
aucacccaggauugcucca

SEQ ID NO: 1073210 - RNA, 19 nt, Artificial Sequence
  Description of Artificial Sequence: Synthetic oligonucleotide
  Sense strand starting at position 2028 of SEQ ID NO: 915350
ggagcaauccugggugaug

SEQ ID NO: 1073211 - RNA, 19 nt, Artificial Sequence
  Description of Artificial Sequence: Synthetic oligonucleotide
  Antisense strand to SEQ ID NO: 1073210
caucacccaggauugcucc

SEQ ID NO: 1073212 - RNA, 19 nt, Artificial Sequence
  Description of Artificial Sequence: Synthetic oligonucleotide
  Sense strand starting at position 2029 of SEQ ID NO: 915350
gagcaauccugggugaugu

SEQ ID NO: 1073213 - RNA, 19 nt, Artificial Sequence
  Description of Artificial Sequence: Synthetic oligonucleotide
  Antisense strand to SEQ ID NO: 1073212
acaucacccaggauugcuc

SEQ ID NO: 1073214 - RNA, 19 nt, Artificial Sequence
  Description of Artificial Sequence: Synthetic oligonucleotide
  Sense strand starting at position 2221 of SEQ ID NO: 915350
gaggucaucucuggaccua

SEQ ID NO: 1073215 - RNA, 19 nt, Artificial Sequence
  Description of Artificial Sequence: Synthetic oligonucleotide
  Antisense strand to SEQ ID NO: 1073214
uagguccagagaugaccuc

SEQ ID NO: 1073216 - RNA, 19 nt, Artificial Sequence
  Description of Artificial Sequence: Synthetic oligonucleotide
  Sense strand starting at position 2233 of SEQ ID NO: 915350
ggaccuagcuguugccaga

SEQ ID NO: 1073217 - RNA, 19 nt, Artificial Sequence
  Description of Artificial Sequence: Synthetic oligonucleotide
  Antisense strand to SEQ ID NO: 1073216
ucuggcaacagcuaggucc

SEQ ID NO: 1073218 - RNA, 19 nt, Artificial Sequence
  Description of Artificial Sequence: Synthetic oligonucleotide
  Sense strand starting at position 2530 of SEQ ID NO: 915350
cacagaaagucgggaguuu

SEQ ID NO: 1073219 - RNA, 19 nt, Artificial Sequence
  Description of Artificial Sequence: Synthetic oligonucleotide
  Antisense strand to SEQ ID NO: 1073218
aaacucccgacuuucugug

SEQ ID NO: 1073220 - RNA, 19 nt, Artificial Sequence
  Description of Artificial Sequence: Synthetic oligonucleotide
  Sense strand starting at position 2728 of SEQ ID NO: 915350
gagcgaggcuccguccuaa

SEQ ID NO: 1073221 - RNA, 19 nt, Artificial Sequence
  Description of Artificial Sequence: Synthetic oligonucleotide
  Antisense strand to SEQ ID NO: 1073220
uuaggacggagccucgcuc

SEQ ID NO: 1073222 - RNA, 19 nt, Artificial Sequence
  Description of Artificial Sequence: Synthetic oligonucleotide
  Sense strand starting at position 3132 of SEQ ID NO: 915350
ggaagugaugcugaguuga

SEQ ID NO: 1073223 - RNA, 19 nt, Artificial Sequence
  Description of Artificial Sequence: Synthetic oligonucleotide
  Antisense strand to SEQ ID NO: 1073222
ucaacucagcaucacuucc

SEQ ID NO: 1073224 - RNA, 19 nt, Artificial Sequence
  Description of Artificial Sequence: Synthetic oligonucleotide
  Sense strand starting at position 3134 of SEQ ID NO: 915350
aagugaugcugaguugaau

SEQ ID NO: 1073225 - RNA, 19 nt, Artificial Sequence
  Description of Artificial Sequence: Synthetic oligonucleotide
  Antisense strand to SEQ ID NO: 1073224
auucaacucagcaucacuu

SEQ ID NO: 1073226 - RNA, 19 nt, Artificial Sequence
  Description of Artificial Sequence: Synthetic oligonucleotide
  Sense strand starting at position 3395 of SEQ ID NO: 915350
gcaacauagcuugauucca

SEQ ID NO: 1073227 - RNA, 19 nt, Artificial Sequence
  Description of Artificial Sequence: Synthetic oligonucleotide
  Antisense strand to SEQ ID NO: 1073226
uggaaucaagcuauguugc

SEQ ID NO: 1073228 - RNA, 19 nt, Artificial Sequence
  Description of Artificial Sequence: Synthetic oligonucleotide
  Sense strand starting at position 17 of SEQ ID NO: 915351
gccugaagccuuuacaaau

SEQ ID NO: 1073229 - RNA, 19 nt, Artificial Sequence
  Description of Artificial Sequence: Synthetic oligonucleotide
  Antisense strand to SEQ ID NO: 1073228
auuuguaaaggcuucaggc

SEQ ID NO: 1073230 - RNA, 19 nt, Artificial Sequence
  Description of Artificial Sequence: Synthetic oligonucleotide
  Sense strand starting at position 331 of SEQ ID NO: 915351
ggucucaaauucucgacuu

SEQ ID NO: 1073231 - RNA, 19 nt, Artificial Sequence
  Description of Artificial Sequence: Synthetic oligonucleotide
  Antisense strand to SEQ ID NO: 1073230
aagucgagaauuugagacc

SEQ ID NO: 1073232 - RNA, 19 nt, Artificial Sequence
  Description of Artificial Sequence: Synthetic oligonucleotide
  Sense strand starting at position 775 of SEQ ID NO: 915351
gaaguauucugguuucuga

SEQ ID NO: 1073233 - RNA, 19 nt, Artificial Sequence
  Description of Artificial Sequence: Synthetic oligonucleotide
  Antisense strand to SEQ ID NO: 1073232
ucagaaaccagaauacuuc

SEQ ID NO: 1073234 - RNA, 19 nt, Artificial Sequence
  Description of Artificial Sequence: Synthetic oligonucleotide
  Sense strand starting at position 778 of SEQ ID NO: 915351
guauucugguuucugaaag

SEQ ID NO: 1073235 - RNA, 19 nt, Artificial Sequence
  Description of Artificial Sequence: Synthetic oligonucleotide
  Antisense strand to SEQ ID NO: 1073234
cuuucagaaaccagaauac

SEQ ID NO: 1073236 - RNA, 19 nt, Artificial Sequence
  Description of Artificial Sequence: Synthetic oligonucleotide
  Sense strand starting at position 812 of SEQ ID NO: 915351
aauuaacguuucguuaucu

SEQ ID NO: 1073237 - RNA, 19 nt, Artificial Sequence
  Description of Artificial Sequence: Synthetic oligonucleotide
  Antisense strand to SEQ ID NO: 1073236
agauaacgaaacguuaauu

SEQ ID NO: 1073238 - RNA, 19 nt, Artificial Sequence
  Description of Artificial Sequence: Synthetic oligonucleotide
  Sense strand starting at position 813 of SEQ ID NO: 915351
auuaacguuucguuaucuu

SEQ ID NO: 1073239 - RNA, 19 nt, Artificial Sequence
  Description of Artificial Sequence: Synthetic oligonucleotide
  Antisense strand to SEQ ID NO: 1073238
aagauaacgaaacguuaau

SEQ ID NO: 1073240 - RNA, 19 nt, Artificial Sequence
  Description of Artificial Sequence: Synthetic oligonucleotide
  Sense strand starting at position 849 of SEQ ID NO: 915351
caaaguguugagugguuaa

SEQ ID NO: 1073241 - RNA, 19 nt, Artificial Sequence
  Description of Artificial Sequence: Synthetic oligonucleotide
  Antisense strand to SEQ ID NO: 1073240
uuaaccacucaacacuuug

SEQ ID NO: 1073242 - RNA, 19 nt, Artificial Sequence
  Description of Artificial Sequence: Synthetic oligonucleotide
  Sense strand starting at position 1057 of SEQ ID NO: 915351
uguaaagcucccuaaagcu

SEQ ID NO: 1073243 - RNA, 19 nt, Artificial Sequence
  Description of Artificial Sequence: Synthetic oligonucleotide
  Antisense strand to SEQ ID NO: 1073242
agcuuuagggagcuuuaca

SEQ ID NO: 1073244 - RNA, 19 nt, Artificial Sequence
  Description of Artificial Sequence: Synthetic oligonucleotide
  Sense strand starting at position 1162 of SEQ ID NO: 915351
gauggaucagcagagguuu

SEQ ID NO: 1073245 - RNA, 19 nt, Artificial Sequence
  Description of Artificial Sequence: Synthetic oligonucleotide
  Antisense strand to SEQ ID NO: 1073244
aaaccucugcugauccauc

SEQ ID NO: 1073246 - RNA, 19 nt, Artificial Sequence
  Description of Artificial Sequence: Synthetic oligonucleotide
  Sense strand starting at position 1164 of SEQ ID NO: 915351
uggaucagcagagguuuaa

SEQ ID NO: 1073247 - RNA, 19 nt, Artificial Sequence
  Description of Artificial Sequence: Synthetic oligonucleotide
  Antisense strand to SEQ ID NO: 1073246
uuaaaccucugcugaucca

SEQ ID NO: 1073248 - RNA, 19 nt, Artificial Sequence
  Description of Artificial Sequence: Synthetic oligonucleotide
  Sense strand starting at position 1292 of SEQ ID NO: 915351
agugccuagucucuaucua

SEQ ID NO: 1073249 - RNA, 19 nt, Artificial Sequence
  Description of Artificial Sequence: Synthetic oligonucleotide
  Antisense strand to SEQ ID NO: 1073248
uagauagagacuaggcacu

SEQ ID NO: 1073250 - RNA, 19 nt, Artificial Sequence
  Description of Artificial Sequence: Synthetic oligonucleotide
  Sense strand starting at position 1331 of SEQ ID NO: 915351
ucgggaacuucgaguuggu

SEQ ID NO: 1073251 - RNA, 19 nt, Artificial Sequence
  Description of Artificial Sequence: Synthetic oligonucleotide
  Antisense strand to SEQ ID NO: 1073250
accaacucgaaguucccga

SEQ ID NO: 1073252 - RNA, 19 nt, Artificial Sequence
  Description of Artificial Sequence: Synthetic oligonucleotide
  Sense strand starting at position 1334 of SEQ ID NO: 915351
ggaacuucgaguugguuua

SEQ ID NO: 1073253 - RNA, 19 nt, Artificial Sequence
  Description of Artificial Sequence: Synthetic oligonucleotide
  Antisense strand to SEQ ID NO: 1073252
uaaaccaacucgaaguucc

SEQ ID NO: 1073254 - RNA, 19 nt, Artificial Sequence
  Description of Artificial Sequence: Synthetic oligonucleotide
  Sense strand starting at position 1335 of SEQ ID NO: 915351
gaacuucgaguugguuuaa

SEQ ID NO: 1073255 - RNA, 19 nt, Artificial Sequence
  Description of Artificial Sequence: Synthetic oligonucleotide
  Antisense strand to SEQ ID NO: 1073254
uuaaaccaacucgaaguuc

SEQ ID NO: 1073256 - RNA, 19 nt, Artificial Sequence
  Description of Artificial Sequence: Synthetic oligonucleotide
  Sense strand starting at position 1336 of SEQ ID NO: 915351
aacuucgaguugguuuaaa

SEQ ID NO: 1073257 - RNA, 19 nt, Artificial Sequence
  Description of Artificial Sequence: Synthetic oligonucleotide
  Antisense strand to SEQ ID NO: 1073256
uuuaaaccaacucgaaguu

SEQ ID NO: 1073258 - RNA, 19 nt, Artificial Sequence
  Description of Artificial Sequence: Synthetic oligonucleotide
  Sense strand starting at position 2019 of SEQ ID NO: 915351
gccaaaugguuugugcagu

SEQ ID NO: 1073259 - RNA, 19 nt, Artificial Sequence
  Description of Artificial Sequence: Synthetic oligonucleotide
  Antisense strand to SEQ ID NO: 1073258
acugcacaaaccauuuggc

SEQ ID NO: 1073260 - RNA, 19 nt, Artificial Sequence
  Description of Artificial Sequence: Synthetic oligonucleotide
  Sense strand starting at position 2219 of SEQ ID NO: 915351
gcgagaaugccgguuguga

SEQ ID NO: 1073261 - RNA, 19 nt, Artificial Sequence
  Description of Artificial Sequence: Synthetic oligonucleotide
  Antisense strand to SEQ ID NO: 1073260
ucacaaccggcauucucgc

SEQ ID NO: 1073262 - RNA, 19 nt, Artificial Sequence
  Description of Artificial Sequence: Synthetic oligonucleotide
  Sense strand starting at position 2221 of SEQ ID NO: 915351
gagaaugccgguugugacu

SEQ ID NO: 1073263 - RNA, 19 nt, Artificial Sequence
  Description of Artificial Sequence: Synthetic oligonucleotide
  Antisense strand to SEQ ID NO: 1073262
agucacaaccggcauucuc

SEQ ID NO: 1073264 - RNA, 19 nt, Artificial Sequence
  Description of Artificial Sequence: Synthetic oligonucleotide
  Sense strand starting at position 2299 of SEQ ID NO: 915351
gggcaucggcugcucgaua

SEQ ID NO: 1073265 - RNA, 19 nt, Artificial Sequence
  Description of Artificial Sequence: Synthetic oligonucleotide
  Antisense strand to SEQ ID NO: 1073264
uaucgagcagccgaugccc

SEQ ID NO: 1073266 - RNA, 19 nt, Artificial Sequence
  Description of Artificial Sequence: Synthetic oligonucleotide
  Sense strand starting at position 2300 of SEQ ID NO: 915351
ggcaucggcugcucgauaa

SEQ ID NO: 1073267 - RNA, 19 nt, Artificial Sequence
  Description of Artificial Sequence: Synthetic oligonucleotide
  Antisense strand to SEQ ID NO: 1073266
uuaucgagcagccgaugcc

SEQ ID NO: 1073268 - RNA, 19 nt, Artificial Sequence
  Description of Artificial Sequence: Synthetic oligonucleotide
  Sense strand starting at position 2382 of SEQ ID NO: 915351
gcgugccuucgacuaucua

SEQ ID NO: 1073269 - RNA, 19 nt, Artificial Sequence
  Description of Artificial Sequence: Synthetic oligonucleotide
  Antisense strand to SEQ ID NO: 1073268
uagauagucgaaggcacgc

SEQ ID NO: 1073270 - RNA, 19 nt, Artificial Sequence
  Description of Artificial Sequence: Synthetic oligonucleotide
  Sense strand starting at position 2383 of SEQ ID NO: 915351
cgugccuucgacuaucuaa

SEQ ID NO: 1073271 - RNA, 19 nt, Artificial Sequence
  Description of Artificial Sequence: Synthetic oligonucleotide
  Antisense strand to SEQ ID NO: 1073270
uuagauagucgaaggcacg

SEQ ID NO: 1073272 - RNA, 19 nt, Artificial Sequence
  Description of Artificial Sequence: Synthetic oligonucleotide
  Sense strand starting at position 2483 of SEQ ID NO: 915351
uagggaaucugguugccau

SEQ ID NO: 1073273 - RNA, 19 nt, Artificial Sequence
  Description of Artificial Sequence: Synthetic oligonucleotide
  Antisense strand to SEQ ID NO: 1073272
auggcaaccagauucccua

SEQ ID NO: 1073274 - RNA, 19 nt, Artificial Sequence
  Description of Artificial Sequence: Synthetic oligonucleotide
  Sense strand starting at position 2490 of SEQ ID NO: 915351
ucugguugccaugguuauu

SEQ ID NO: 1073275 - RNA, 19 nt, Artificial Sequence
  Description of Artificial Sequence: Synthetic oligonucleotide
  Antisense strand to SEQ ID NO: 1073274
aauaaccauggcaaccaga

SEQ ID NO: 1073276 - RNA, 19 nt, Artificial Sequence
  Description of Artificial Sequence: Synthetic oligonucleotide
  Sense strand starting at position 2504 of SEQ ID NO: 915351
uuauuaucgugcuuaucac

SEQ ID NO: 1073277 - RNA, 19 nt, Artificial Sequence
  Description of Artificial Sequence: Synthetic oligonucleotide
  Antisense strand to SEQ ID NO: 1073276
gugauaagcacgauaauaa

SEQ ID NO: 1073278 - RNA, 19 nt, Artificial Sequence
  Description of Artificial Sequence: Synthetic oligonucleotide
  Sense strand starting at position 2535 of SEQ ID NO: 915351
cacagugauggguauguuu

SEQ ID NO: 1073279 - RNA, 19 nt, Artificial Sequence
  Description of Artificial Sequence: Synthetic oligonucleotide
  Antisense strand to SEQ ID NO: 1073278
aaacauacccaucacugug

SEQ ID NO: 1073280 - RNA, 19 nt, Artificial Sequence
  Description of Artificial Sequence: Synthetic oligonucleotide
  Sense strand starting at position 2586 of SEQ ID NO: 915351
ugggaaggugacggauaau

SEQ ID NO: 1073281 - RNA, 19 nt, Artificial Sequence
  Description of Artificial Sequence: Synthetic oligonucleotide
  Antisense strand to SEQ ID NO: 1073280
auuauccgucaccuuccca

SEQ ID NO: 1073282 - RNA, 19 nt, Artificial Sequence
  Description of Artificial Sequence: Synthetic oligonucleotide
  Sense strand starting at position 2626 of SEQ ID NO: 915351
uugagugccucugggauuu

SEQ ID NO: 1073283 - RNA, 19 nt, Artificial Sequence
  Description of Artificial Sequence: Synthetic oligonucleotide
  Antisense strand to SEQ ID NO: 1073282
aaaucccagaggcacucaa

SEQ ID NO: 1073284 - RNA, 19 nt, Artificial Sequence
  Description of Artificial Sequence: Synthetic oligonucleotide
  Sense strand starting at position 2651 of SEQ ID NO: 915351
agagauucccaguggguga

SEQ ID NO: 1073285 - RNA, 19 nt, Artificial Sequence
  Description of Artificial Sequence: Synthetic oligonucleotide
  Antisense strand to SEQ ID NO: 1073284
ucacccacugggaaucucu

SEQ ID NO: 1073286 - RNA, 19 nt, Artificial Sequence
  Description of Artificial Sequence: Synthetic oligonucleotide
  Sense strand starting at position 2742 of SEQ ID NO: 915351
cuugaaauacaccguaauu

SEQ ID NO: 1073287 - RNA, 19 nt, Artificial Sequence
  Description of Artificial Sequence: Synthetic oligonucleotide
  Antisense strand to SEQ ID NO: 1073286
aauuacgguguauuucaag

SEQ ID NO: 1073288 - RNA, 19 nt, Artificial Sequence
  Description of Artificial Sequence: Synthetic oligonucleotide
  Sense strand starting at position 2744 of SEQ ID NO: 915351
ugaaauacaccguaauucu

SEQ ID NO: 1073289 - RNA, 19 nt, Artificial Sequence
  Description of Artificial Sequence: Synthetic oligonucleotide
  Antisense strand to SEQ ID NO: 1073288
agaauuacgguguauuuca

SEQ ID NO: 1073290 - RNA, 19 nt, Artificial Sequence
  Description of Artificial Sequence: Synthetic oligonucleotide
  Sense strand starting at position 2752 of SEQ ID NO: 915351
accguaauucuuugagcca

SEQ ID NO: 1073291 - RNA, 19 nt, Artificial Sequence
  Description of Artificial Sequence: Synthetic oligonucleotide
  Antisense strand to SEQ ID NO: 1073290
uggcucaaagaauuacggu

SEQ ID NO: 1073292 - RNA, 19 nt, Artificial Sequence
  Description of Artificial Sequence: Synthetic oligonucleotide
  Sense strand starting at position 2753 of SEQ ID NO: 915351
ccguaauucuuugagccaa

SEQ ID NO: 1073293 - RNA, 19 nt, Artificial Sequence
  Description of Artificial Sequence: Synthetic oligonucleotide
  Antisense strand to SEQ ID NO: 1073292
uuggcucaaagaauuacgg

SEQ ID NO: 1073294 - RNA, 19 nt, Artificial Sequence
  Description of Artificial Sequence: Synthetic oligonucleotide
  Sense strand starting at position 2779 of SEQ ID NO: 915351
aaccguaggcgucauacaa

SEQ ID NO: 1073295 - RNA, 19 nt, Artificial Sequence
  Description of Artificial Sequence: Synthetic oligonucleotide
  Antisense strand to SEQ ID NO: 1073294
uuguaugacgccuacgguu

SEQ ID NO: 1073296 - RNA, 19 nt, Artificial Sequence
  Description of Artificial Sequence: Synthetic oligonucleotide
  Sense strand starting at position 2812 of SEQ ID NO: 915351
uauagagcguuucgagaaa

SEQ ID NO: 1073297 - RNA, 19 nt, Artificial Sequence
  Description of Artificial Sequence: Synthetic oligonucleotide
  Antisense strand to SEQ ID NO: 1073296
uuucucgaaacgcucuaua

SEQ ID NO: 1073298 - RNA, 19 nt, Artificial Sequence
  Description of Artificial Sequence: Synthetic oligonucleotide
  Sense strand starting at position 2929 of SEQ ID NO: 915351
ggcggaucacuuuguagca

SEQ ID NO: 1073299 - RNA, 19 nt, Artificial Sequence
  Description of Artificial Sequence: Synthetic oligonucleotide
  Antisense strand to SEQ ID NO: 1073298
ugcuacaaagugauccgcc

SEQ ID NO: 1073300 - RNA, 19 nt, Artificial Sequence
  Description of Artificial Sequence: Synthetic oligonucleotide
  Sense strand starting at position 3105 of SEQ ID NO: 915351
cugagagggucgugaucaa

SEQ ID NO: 1073301 - RNA, 19 nt, Artificial Sequence
  Description of Artificial Sequence: Synthetic oligonucleotide
  Antisense strand to SEQ ID NO: 1073300
uugaucacgacccucucag

SEQ ID NO: 1073302 - RNA, 19 nt, Artificial Sequence
  Description of Artificial Sequence: Synthetic oligonucleotide
  Sense strand starting at position 3553 of SEQ ID NO: 915351
gugagucaugaucgccuca

SEQ ID NO: 1073303 - RNA, 19 nt, Artificial Sequence
  Description of Artificial Sequence: Synthetic oligonucleotide
  Antisense strand to SEQ ID NO: 1073302
ugaggcgaucaugacucac

SEQ ID NO: 1073304 - RNA, 19 nt, Artificial Sequence
  Description of Artificial Sequence: Synthetic oligonucleotide
  Sense strand starting at position 3555 of SEQ ID NO: 915351
gagucaugaucgccucacu

SEQ ID NO: 1073305 - RNA, 19 nt, Artificial Sequence
  Description of Artificial Sequence: Synthetic oligonucleotide
  Antisense strand to SEQ ID NO: 1073304
agugaggcgaucaugacuc

SEQ ID NO: 1073306 - RNA, 19 nt, Artificial Sequence
  Description of Artificial Sequence: Synthetic oligonucleotide
  Sense strand starting at position 3943 of SEQ ID NO: 915351
cgaaguaugugugaccucu

SEQ ID NO: 1073307 - RNA, 19 nt, Artificial Sequence
  Description of Artificial Sequence: Synthetic oligonucleotide
  Antisense strand to SEQ ID NO: 1073306
agaggucacacauacuucg

SEQ ID NO: 1073308 - RNA, 19 nt, Artificial Sequence
  Description of Artificial Sequence: Synthetic oligonucleotide
  Sense strand starting at position 126 of SEQ ID NO: 915352
acauguaauuaguuaagac

SEQ ID NO: 1073309 - RNA, 19 nt, Artificial Sequence
  Description of Artificial Sequence: Synthetic oligonucleotide
  Antisense strand to SEQ ID NO: 1073308
gucuuaacuaauuacaugu

SEQ ID NO: 1073310 - RNA, 19 nt, Artificial Sequence
  Description of Artificial Sequence: Synthetic oligonucleotide
  Sense strand starting at position 207 of SEQ ID NO: 915352
cgugcaaagauacagauau

SEQ ID NO: 1073311 - RNA, 19 nt, Artificial Sequence
  Description of Artificial Sequence: Synthetic oligonucleotide
  Antisense strand to SEQ ID NO: 1073310
auaucuguaucuuugcacg

SEQ ID NO: 1073312 - RNA, 19 nt, Artificial Sequence
  Description of Artificial Sequence: Synthetic oligonucleotide
  Sense strand starting at position 330 of SEQ ID NO: 915352
aggcuaucuguagaguuaa

SEQ ID NO: 1073313 - RNA, 19 nt, Artificial Sequence
  Description of Artificial Sequence: Synthetic oligonucleotide
  Antisense strand to SEQ ID NO: 1073312
uuaacucuacagauagccu

SEQ ID NO: 1073314 - RNA, 19 nt, Artificial Sequence
  Description of Artificial Sequence: Synthetic oligonucleotide
  Sense strand starting at position 458 of SEQ ID NO: 915352
auuuguaugucaccuguaa

SEQ ID NO: 1073315 - RNA, 19 nt, Artificial Sequence
  Description of Artificial Sequence: Synthetic oligonucleotide
  Antisense strand to SEQ ID NO: 1073314
uuacaggugacauacaaau

SEQ ID NO: 1073316 - RNA, 19 nt, Artificial Sequence
  Description of Artificial Sequence: Synthetic oligonucleotide
  Sense strand starting at position 462 of SEQ ID NO: 915352
guaugucaccuguaacaag

SEQ ID NO: 1073317 - RNA, 19 nt, Artificial Sequence
  Description of Artificial Sequence: Synthetic oligonucleotide
  Antisense strand to SEQ ID NO: 1073316
cuuguuacaggugacauac

SEQ ID NO: 1073318 - RNA, 19 nt, Artificial Sequence
  Description of Artificial Sequence: Synthetic oligonucleotide
  Sense strand starting at position 533 of SEQ ID NO: 915352
gaaggucuguugcuaaaga

SEQ ID NO: 1073319 - RNA, 19 nt, Artificial Sequence
  Description of Artificial Sequence: Synthetic oligonucleotide
  Antisense strand to SEQ ID NO: 1073318
ucuuuagcaacagaccuuc

SEQ ID NO: 1073320 - RNA, 19 nt, Artificial Sequence
  Description of Artificial Sequence: Synthetic oligonucleotide
  Sense strand starting at position 549 of SEQ ID NO: 915352
agauuccuauucuuagaug

SEQ ID NO: 1073321 - RNA, 19 nt, Artificial Sequence
  Description of Artificial Sequence: Synthetic oligonucleotide
  Antisense strand to SEQ ID NO: 1073320
caucuaagaauaggaaucu

SEQ ID NO: 1073322 - RNA, 19 nt, Artificial Sequence
  Description of Artificial Sequence: Synthetic oligonucleotide
  Sense strand starting at position 563 of SEQ ID NO: 915352
agaugauuaugccuuacaa

SEQ ID NO: 1073323 - RNA, 19 nt, Artificial Sequence
  Description of Artificial Sequence: Synthetic oligonucleotide
  Antisense strand to SEQ ID NO: 1073322
uuguaaggcauaaucaucu

SEQ ID NO: 1073324 - RNA, 19 nt, Artificial Sequence
  Description of Artificial Sequence: Synthetic oligonucleotide
  Sense strand starting at position 612 of SEQ ID NO: 915352
agaacuaucuaucugggua

SEQ ID NO: 1073325 - RNA, 19 nt, Artificial Sequence
  Description of Artificial Sequence: Synthetic oligonucleotide
  Antisense strand to SEQ ID NO: 1073324
uacccagauagauaguucu

SEQ ID NO: 1073326 - RNA, 19 nt, Artificial Sequence
  Description of Artificial Sequence: Synthetic oligonucleotide
  Sense strand starting at position 616 of SEQ ID NO: 915352
cuaucuaucuggguaggca

SEQ ID NO: 1073327 - RNA, 19 nt, Artificial Sequence
  Description of Artificial Sequence: Synthetic oligonucleotide
  Antisense strand to SEQ ID NO: 1073326
ugccuacccagauagauag

SEQ ID NO: 1073328 - RNA, 19 nt, Artificial Sequence
  Description of Artificial Sequence: Synthetic oligonucleotide
  Sense strand starting at position 764 of SEQ ID NO: 915352
cccuuuccucaugauguuu

SEQ ID NO: 1073329 - RNA, 19 nt, Artificial Sequence
  Description of Artificial Sequence: Synthetic oligonucleotide
  Antisense strand to SEQ ID NO: 1073328
aaacaucaugaggaaaggg

SEQ ID NO: 1073330 - RNA, 19 nt, Artificial Sequence
  Description of Artificial Sequence: Synthetic oligonucleotide
  Sense strand starting at position 825 of SEQ ID NO: 915352
gaagcuagaugacuuugaa

SEQ ID NO: 1073331 - RNA, 19 nt, Artificial Sequence
  Description of Artificial Sequence: Synthetic oligonucleotide
  Antisense strand to SEQ ID NO: 1073330
uucaaagucaucuagcuuc

SEQ ID NO: 1073332 - RNA, 19 nt, Artificial Sequence
  Description of Artificial Sequence: Synthetic oligonucleotide
  Sense strand starting at position 833 of SEQ ID NO: 915352
augacuuugaagugugaug

SEQ ID NO: 1073333 - RNA, 19 nt, Artificial Sequence
  Description of Artificial Sequence: Synthetic oligonucleotide
  Antisense strand to SEQ ID NO: 1073332
caucacacuucaaagucau

SEQ ID NO: 1073334 - RNA, 19 nt, Artificial Sequence
  Description of Artificial Sequence: Synthetic oligonucleotide
  Sense strand starting at position 1091 of SEQ ID NO: 915352
ggcagugugauguagaaga

SEQ ID NO: 1073335 - RNA, 19 nt, Artificial Sequence
  Description of Artificial Sequence: Synthetic oligonucleotide
  Antisense strand to SEQ ID NO: 1073334
ucuucuacaucacacugcc

SEQ ID NO: 1073336 - RNA, 19 nt, Artificial Sequence
  Description of Artificial Sequence: Synthetic oligonucleotide
  Sense strand starting at position 1112 of SEQ ID NO: 915352
gcauuaguaagaggacaga

SEQ ID NO: 1073337 - RNA, 19 nt, Artificial Sequence
  Description of Artificial Sequence: Synthetic oligonucleotide
  Antisense strand to SEQ ID NO: 1073336
ucuguccucuuacuaaugc

SEQ ID NO: 1073338 - RNA, 19 nt, Artificial Sequence
  Description of Artificial Sequence: Synthetic oligonucleotide
  Sense strand starting at position 1202 of SEQ ID NO: 915352
uccucaucucgggauacca

SEQ ID NO: 1073339 - RNA, 19 nt, Artificial Sequence
  Description of Artificial Sequence: Synthetic oligonucleotide
  Antisense strand to SEQ ID NO: 1073338
ugguaucccgagaugagga

SEQ ID NO: 1073340 - RNA, 19 nt, Artificial Sequence
  Description of Artificial Sequence: Synthetic oligonucleotide
  Sense strand starting at position 1380 of SEQ ID NO: 915352
ugcuuaaauuuccaggaag

SEQ ID NO: 1073341 - RNA, 19 nt, Artificial Sequence
  Description of Artificial Sequence: Synthetic oligonucleotide
  Antisense strand to SEQ ID NO: 1073340
cuuccuggaaauuuaagca

SEQ ID NO: 1073342 - RNA, 19 nt, Artificial Sequence
  Description of Artificial Sequence: Synthetic oligonucleotide
  Sense strand starting at position 2015 of SEQ ID NO: 915352
gggucaaacuagucaggga

SEQ ID NO: 1073343 - RNA, 19 nt, Artificial Sequence
  Description of Artificial Sequence: Synthetic oligonucleotide
  Antisense strand to SEQ ID NO: 1073342
ucccugacuaguuugaccc

SEQ ID NO: 1073344 - RNA, 19 nt, Artificial Sequence
  Description of Artificial Sequence: Synthetic oligonucleotide
  Sense strand starting at position 2217 of SEQ ID NO: 915352
uagugaauauggucucuca

SEQ ID NO: 1073345 - RNA, 19 nt, Artificial Sequence
  Description of Artificial Sequence: Synthetic oligonucleotide
  Antisense strand to SEQ ID NO: 1073344
ugagagaccauauucacua

SEQ ID NO: 1073346 - RNA, 19 nt, Artificial Sequence
  Description of Artificial Sequence: Synthetic oligonucleotide
  Sense strand starting at position 2220 of SEQ ID NO: 915352
ugaauauggucucucaaca

SEQ ID NO: 1073347 - RNA, 19 nt, Artificial Sequence
  Description of Artificial Sequence: Synthetic oligonucleotide
  Antisense strand to SEQ ID NO: 1073346
uguugagagaccauauuca

SEQ ID NO: 1073348 - RNA, 19 nt, Artificial Sequence
  Description of Artificial Sequence: Synthetic oligonucleotide
  Sense strand starting at position 2235 of SEQ ID NO: 915352
aacagaugucauuggguau

SEQ ID NO: 1073349 - RNA, 19 nt, Artificial Sequence
  Description of Artificial Sequence: Synthetic oligonucleotide
  Antisense strand to SEQ ID NO: 1073348
auacccaaugacaucuguu

SEQ ID NO: 1073350 - RNA, 19 nt, Artificial Sequence
  Description of Artificial Sequence: Synthetic oligonucleotide
  Sense strand starting at position 2236 of SEQ ID NO: 915352
acagaugucauuggguaua

SEQ ID NO: 1073351 - RNA, 19 nt, Artificial Sequence
  Description of Artificial Sequence: Synthetic oligonucleotide
  Antisense strand to SEQ ID NO: 1073350
uauacccaaugacaucugu

SEQ ID NO: 1073352 - RNA, 19 nt, Artificial Sequence
  Description of Artificial Sequence: Synthetic oligonucleotide
  Sense strand starting at position 2238 of SEQ ID NO: 915352
agaugucauuggguauaau

SEQ ID NO: 1073353 - RNA, 19 nt, Artificial Sequence
  Description of Artificial Sequence: Synthetic oligonucleotide
  Antisense strand to SEQ ID NO: 1073352
auuauacccaaugacaucu

SEQ ID NO: 1073354 - RNA, 19 nt, Artificial Sequence
  Description of Artificial Sequence: Synthetic oligonucleotide
  Sense strand starting at position 2241 of SEQ ID NO: 915352
ugucauuggguauaauauu

SEQ ID NO: 1073355 - RNA, 19 nt, Artificial Sequence
  Description of Artificial Sequence: Synthetic oligonucleotide
  Antisense strand to SEQ ID NO: 1073354
aauauuauacccaaugaca

SEQ ID NO: 1073356 - RNA, 19 nt, Artificial Sequence
  Description of Artificial Sequence: Synthetic oligonucleotide
  Sense strand starting at position 2281 of SEQ ID NO: 915352
cgugaugaaacccgggaaa

SEQ ID NO: 1073357 - RNA, 19 nt, Artificial Sequence
  Description of Artificial Sequence: Synthetic oligonucleotide
  Antisense strand to SEQ ID NO: 1073356
uuucccggguuucaucacg

SEQ ID NO: 1073358 - RNA, 19 nt, Artificial Sequence
  Description of Artificial Sequence: Synthetic oligonucleotide
  Sense strand starting at position 2292 of SEQ ID NO: 915352
ccgggaaagccaggauaaa

SEQ ID NO: 1073359 - RNA, 19 nt, Artificial Sequence
  Description of Artificial Sequence: Synthetic oligonucleotide
  Antisense strand to SEQ ID NO: 1073358
uuuauccuggcuuucccgg

SEQ ID NO: 1073360 - RNA, 19 nt, Artificial Sequence
  Description of Artificial Sequence: Synthetic oligonucleotide
  Sense strand starting at position 2370 of SEQ ID NO: 915352
cuguuauaaucccucagag

SEQ ID NO: 1073361 - RNA, 19 nt, Artificial Sequence
  Description of Artificial Sequence: Synthetic oligonucleotide
  Antisense strand to SEQ ID NO: 1073360
cucugagggauuauaacag

SEQ ID NO: 1073362 - RNA, 19 nt, Artificial Sequence
  Description of Artificial Sequence: Synthetic oligonucleotide
  Sense strand starting at position 2372 of SEQ ID NO: 915352
guuauaaucccucagaguu

SEQ ID NO: 1073363 - RNA, 19 nt, Artificial Sequence
  Description of Artificial Sequence: Synthetic oligonucleotide
  Antisense strand to SEQ ID NO: 1073362
aacucugagggauuauaac

SEQ ID NO: 1073364 - RNA, 19 nt, Artificial Sequence
  Description of Artificial Sequence: Synthetic oligonucleotide
  Sense strand starting at position 2434 of SEQ ID NO: 915352
gaguguuucggauagaagc

SEQ ID NO: 1073365 - RNA, 19 nt, Artificial Sequence
  Description of Artificial Sequence: Synthetic oligonucleotide
  Antisense strand to SEQ ID NO: 1073364
gcuucuauccgaaacacuc

SEQ ID NO: 1073366 - RNA, 19 nt, Artificial Sequence
  Description of Artificial Sequence: Synthetic oligonucleotide
  Sense strand starting at position 2476 of SEQ ID NO: 915352
ucauuaucucuggauuguu

SEQ ID NO: 1073367 - RNA, 19 nt, Artificial Sequence
  Description of Artificial Sequence: Synthetic oligonucleotide
  Antisense strand to SEQ ID NO: 1073366
aacaauccagagauaauga

SEQ ID NO: 1073368 - RNA, 19 nt, Artificial Sequence
  Description of Artificial Sequence: Synthetic oligonucleotide
  Sense strand starting at position 2533 of SEQ ID NO: 915352
aaucguugugccuaggaga

SEQ ID NO: 1073369 - RNA, 19 nt, Artificial Sequence
  Description of Artificial Sequence: Synthetic oligonucleotide
  Antisense strand to SEQ ID NO: 1073368
ucuccuaggcacaacgauu

SEQ ID NO: 1073370 - RNA, 19 nt, Artificial Sequence
  Description of Artificial Sequence: Synthetic oligonucleotide
  Sense strand starting at position 2691 of SEQ ID NO: 915352
ucaguaucgcagguguagu

SEQ ID NO: 1073371 - RNA, 19 nt, Artificial Sequence
  Description of Artificial Sequence: Synthetic oligonucleotide
  Antisense strand to SEQ ID NO: 1073370
acuacaccugcgauacuga

SEQ ID NO: 1073372 - RNA, 19 nt, Artificial Sequence
  Description of Artificial Sequence: Synthetic oligonucleotide
  Sense strand starting at position 2722 of SEQ ID NO: 915352
gggcucuagagucagacuu

SEQ ID NO: 1073373 - RNA, 19 nt, Artificial Sequence
  Description of Artificial Sequence: Synthetic oligonucleotide
  Antisense strand to SEQ ID NO: 1073372
aagucugacucuagagccc

SEQ ID NO: 1073374 - RNA, 19 nt, Artificial Sequence
  Description of Artificial Sequence: Synthetic oligonucleotide
  Sense strand starting at position 2773 of SEQ ID NO: 915352
guguaaacuuagguaauuc

SEQ ID NO: 1073375 - RNA, 19 nt, Artificial Sequence
  Description of Artificial Sequence: Synthetic oligonucleotide
  Antisense strand to SEQ ID NO: 1073374
gaauuaccuaaguuuacac

SEQ ID NO: 1073376 - RNA, 19 nt, Artificial Sequence
  Description of Artificial Sequence: Synthetic oligonucleotide
  Sense strand starting at position 2911 of SEQ ID NO: 915352
auacuauucugaguguuga

SEQ ID NO: 1073377 - RNA, 19 nt, Artificial Sequence
  Description of Artificial Sequence: Synthetic oligonucleotide
  Antisense strand to SEQ ID NO: 1073376
ucaacacucagaauaguau

SEQ ID NO: 1073378 - RNA, 19 nt, Artificial Sequence
  Description of Artificial Sequence: Synthetic oligonucleotide
  Sense strand starting at position 2912 of SEQ ID NO: 915352
uacuauucugaguguugag

SEQ ID NO: 1073379 - RNA, 19 nt, Artificial Sequence
  Description of Artificial Sequence: Synthetic oligonucleotide
  Antisense strand to SEQ ID NO: 1073378
cucaacacucagaauagua

SEQ ID NO: 1073380 - RNA, 19 nt, Artificial Sequence
  Description of Artificial Sequence: Synthetic oligonucleotide
  Sense strand starting at position 2941 of SEQ ID NO: 915352
ugcagcuaugagcaauaau

SEQ ID NO: 1073381 - RNA, 19 nt, Artificial Sequence
  Description of Artificial Sequence: Synthetic oligonucleotide
  Antisense strand to SEQ ID NO: 1073380
auuauugcucauagcugca

SEQ ID NO: 1073382 - RNA, 19 nt, Artificial Sequence
  Description of Artificial Sequence: Synthetic oligonucleotide
  Sense strand starting at position 3004 of SEQ ID NO: 915352
gugaaagauaguggugguu

SEQ ID NO: 1073383 - RNA, 19 nt, Artificial Sequence
  Description of Artificial Sequence: Synthetic oligonucleotide
  Antisense strand to SEQ ID NO: 1073382
aaccaccacuaucuuucac

SEQ ID NO: 1073384 - RNA, 19 nt, Artificial Sequence
  Description of Artificial Sequence: Synthetic oligonucleotide
  Sense strand starting at position 3007 of SEQ ID NO: 915352
aaagauaguggugguuuaa

SEQ ID NO: 1073385 - RNA, 19 nt, Artificial Sequence
  Description of Artificial Sequence: Synthetic oligonucleotide
  Antisense strand to SEQ ID NO: 1073384
uuaaaccaccacuaucuuu

SEQ ID NO: 1073386 - RNA, 19 nt, Artificial Sequence
  Description of Artificial Sequence: Synthetic oligonucleotide
  Sense strand starting at position 3874 of SEQ ID NO: 915352
cagugagcacuugaucaug

SEQ ID NO: 1073387 - RNA, 19 nt, Artificial Sequence
  Description of Artificial Sequence: Synthetic oligonucleotide
  Antisense strand to SEQ ID NO: 1073386
caugaucaagugcucacug

SEQ ID NO: 1073388 - RNA, 19 nt, Artificial Sequence
  Description of Artificial Sequence: Synthetic oligonucleotide
  Sense strand starting at position 67 of SEQ ID NO: 915353
aucaacuguccaugucuga

SEQ ID NO: 1073389 - RNA, 19 nt, Artificial Sequence
  Description of Artificial Sequence: Synthetic oligonucleotide
  Antisense strand to SEQ ID NO: 1073388
ucagacauggacaguugau

SEQ ID NO: 1073390 - RNA, 19 nt, Artificial Sequence
  Description of Artificial Sequence: Synthetic oligonucleotide
  Sense strand starting at position 80 of SEQ ID NO: 915353
gucugacugugccuaacuu

SEQ ID NO: 1073391 - RNA, 19 nt, Artificial Sequence
  Description of Artificial Sequence: Synthetic oligonucleotide
  Antisense strand to SEQ ID NO: 1073390
aaguuaggcacagucagac

SEQ ID NO: 1073392 - RNA, 19 nt, Artificial Sequence
  Description of Artificial Sequence: Synthetic oligonucleotide
  Sense strand starting at position 233 of SEQ ID NO: 915353
gcugguuagauggaggagu

SEQ ID NO: 1073393 - RNA, 19 nt, Artificial Sequence
  Description of Artificial Sequence: Synthetic oligonucleotide
  Antisense strand to SEQ ID NO: 1073392
acuccuccaucuaaccagc

SEQ ID NO: 1073394 - RNA, 19 nt, Artificial Sequence
  Description of Artificial Sequence: Synthetic oligonucleotide
  Sense strand starting at position 234 of SEQ ID NO: 915353
cugguuagauggaggaguu

SEQ ID NO: 1073395 - RNA, 19 nt, Artificial Sequence
  Description of Artificial Sequence: Synthetic oligonucleotide
  Antisense strand to SEQ ID NO: 1073394
aacuccuccaucuaaccag

SEQ ID NO: 1073396 - RNA, 19 nt, Artificial Sequence
  Description of Artificial Sequence: Synthetic oligonucleotide
  Sense strand starting at position 477 of SEQ ID NO: 915353
cagagaaucaguuguugag

SEQ ID NO: 1073397 - RNA, 19 nt, Artificial Sequence
  Description of Artificial Sequence: Synthetic oligonucleotide
  Antisense strand to SEQ ID NO: 1073396
cucaacaacugauucucug

SEQ ID NO: 1073398 - RNA, 19 nt, Artificial Sequence
  Description of Artificial Sequence: Synthetic oligonucleotide
  Sense strand starting at position 479 of SEQ ID NO: 915353
gagaaucaguuguugaguc

SEQ ID NO: 1073399 - RNA, 19 nt, Artificial Sequence
  Description of Artificial Sequence: Synthetic oligonucleotide
  Antisense strand to SEQ ID NO: 1073398
gacucaacaacugauucuc

SEQ ID NO: 1073400 - RNA, 19 nt, Artificial Sequence
  Description of Artificial Sequence: Synthetic oligonucleotide
  Sense strand starting at position 532 of SEQ ID NO: 915353
ugcccauaguccuugggaa

SEQ ID NO: 1073401 - RNA, 19 nt, Artificial Sequence
  Description of Artificial Sequence: Synthetic oligonucleotide
  Antisense strand to SEQ ID NO: 1073400
uucccaaggacuaugggca

SEQ ID NO: 1073402 - RNA, 19 nt, Artificial Sequence
  Description of Artificial Sequence: Synthetic oligonucleotide
  Sense strand starting at position 533 of SEQ ID NO: 915353
gcccauaguccuugggaaa

SEQ ID NO: 1073403 - RNA, 19 nt, Artificial Sequence
  Description of Artificial Sequence: Synthetic oligonucleotide
  Antisense strand to SEQ ID NO: 1073402
uuucccaaggacuaugggc

SEQ ID NO: 1073404 - RNA, 19 nt, Artificial Sequence
  Description of Artificial Sequence: Synthetic oligonucleotide
  Sense strand starting at position 534 of SEQ ID NO: 915353
cccauaguccuugggaaac

SEQ ID NO: 1073405 - RNA, 19 nt, Artificial Sequence
  Description of Artificial Sequence: Synthetic oligonucleotide
  Antisense strand to SEQ ID NO: 1073404
guuucccaaggacuauggg

SEQ ID NO: 1073406 - RNA, 19 nt, Artificial Sequence
  Description of Artificial Sequence: Synthetic oligonucleotide
  Sense strand starting at position 565 of SEQ ID NO: 915353
aauagauaguuccuugggu

SEQ ID NO: 1073407 - RNA, 19 nt, Artificial Sequence
  Description of Artificial Sequence: Synthetic oligonucleotide
  Antisense strand to SEQ ID NO: 1073406
acccaaggaacuaucuauu

SEQ ID NO: 1073408 - RNA, 19 nt, Artificial Sequence
  Description of Artificial Sequence: Synthetic oligonucleotide
  Sense strand starting at position 607 of SEQ ID NO: 915353
cuagcuuguagagguaaga

SEQ ID NO: 1073409 - RNA, 19 nt, Artificial Sequence
  Description of Artificial Sequence: Synthetic oligonucleotide
  Antisense strand to SEQ ID NO: 1073408
ucuuaccucuacaagcuag

SEQ ID NO: 1073410 - RNA, 19 nt, Artificial Sequence
  Description of Artificial Sequence: Synthetic oligonucleotide
  Sense strand starting at position 623 of SEQ ID NO: 915353
agaauuauuggccgggugu

SEQ ID NO: 1073411 - RNA, 19 nt, Artificial Sequence
  Description of Artificial Sequence: Synthetic oligonucleotide
  Antisense strand to SEQ ID NO: 1073410
acacccggccaauaauucu

SEQ ID NO: 1073412 - RNA, 19 nt, Artificial Sequence
  Description of Artificial Sequence: Synthetic oligonucleotide
  Sense strand starting at position 1219 of SEQ ID NO: 915353
gaagaagacucuggagacu

SEQ ID NO: 1073413 - RNA, 19 nt, Artificial Sequence
  Description of Artificial Sequence: Synthetic oligonucleotide
  Antisense strand to SEQ ID NO: 1073412
agucuccagagucuucuuc

SEQ ID NO: 1073414 - RNA, 19 nt, Artificial Sequence
  Description of Artificial Sequence: Synthetic oligonucleotide
  Sense strand starting at position 1252 of SEQ ID NO: 915353
uagagucugagcuggagaa

SEQ ID NO: 1073415 - RNA, 19 nt, Artificial Sequence
  Description of Artificial Sequence: Synthetic oligonucleotide
  Antisense strand to SEQ ID NO: 1073414
uucuccagcucagacucua

SEQ ID NO: 1073416 - RNA, 19 nt, Artificial Sequence
  Description of Artificial Sequence: Synthetic oligonucleotide
  Sense strand starting at position 1253 of SEQ ID NO: 915353
agagucugagcuggagaau

SEQ ID NO: 1073417 - RNA, 19 nt, Artificial Sequence
  Description of Artificial Sequence: Synthetic oligonucleotide
  Antisense strand to SEQ ID NO: 1073416
auucuccagcucagacucu

SEQ ID NO: 1073418 - RNA, 19 nt, Artificial Sequence
  Description of Artificial Sequence: Synthetic oligonucleotide
  Sense strand starting at position 1767 of SEQ ID NO: 915353
ccggguaggaaucagugau

SEQ ID NO: 1073419 - RNA, 19 nt, Artificial Sequence
  Description of Artificial Sequence: Synthetic oligonucleotide
  Antisense strand to SEQ ID NO: 1073418
aucacugauuccuacccgg

SEQ ID NO: 1073420 - RNA, 19 nt, Artificial Sequence
  Description of Artificial Sequence: Synthetic oligonucleotide
  Sense strand starting at position 2295 of SEQ ID NO: 915353
gccaguuuguaacucccua

SEQ ID NO: 1073421 - RNA, 19 nt, Artificial Sequence
  Description of Artificial Sequence: Synthetic oligonucleotide
  Antisense strand to SEQ ID NO: 1073420
uagggaguuacaaacuggc

SEQ ID NO: 1073422 - RNA, 19 nt, Artificial Sequence
  Description of Artificial Sequence: Synthetic oligonucleotide
  Sense strand starting at position 2299 of SEQ ID NO: 915353
guuuguaacucccuagagu

SEQ ID NO: 1073423 - RNA, 19 nt, Artificial Sequence
  Description of Artificial Sequence: Synthetic oligonucleotide
  Antisense strand to SEQ ID NO: 1073422
acucuagggaguuacaaac

SEQ ID NO: 1073424 - RNA, 19 nt, Artificial Sequence
  Description of Artificial Sequence: Synthetic oligonucleotide
  Sense strand starting at position 2383 of SEQ ID NO: 915353
aagagaguuugggcuaauc

SEQ ID NO: 1073425 - RNA, 19 nt, Artificial Sequence
  Description of Artificial Sequence: Synthetic oligonucleotide
  Antisense strand to SEQ ID NO: 1073424
gauuagcccaaacucucuu

SEQ ID NO: 1073426 - RNA, 19 nt, Artificial Sequence
  Description of Artificial Sequence: Synthetic oligonucleotide
  Sense strand starting at position 2385 of SEQ ID NO: 915353
gagaguuugggcuaaucca

SEQ ID NO: 1073427 - RNA, 19 nt, Artificial Sequence
  Description of Artificial Sequence: Synthetic oligonucleotide
  Antisense strand to SEQ ID NO: 1073426
uggauuagcccaaacucuc

SEQ ID NO: 1073428 - RNA, 19 nt, Artificial Sequence
  Description of Artificial Sequence: Synthetic oligonucleotide
  Sense strand starting at position 2488 of SEQ ID NO: 915353
cacagucugugcccaaaga

SEQ ID NO: 1073429 - RNA, 19 nt, Artificial Sequence
  Description of Artificial Sequence: Synthetic oligonucleotide
  Antisense strand to SEQ ID NO: 1073428
ucuuugggcacagacugug

SEQ ID NO: 1073430 - RNA, 19 nt, Artificial Sequence
  Description of Artificial Sequence: Synthetic oligonucleotide
  Sense strand starting at position 2513 of SEQ ID NO: 915353
ccacucuuaguccgaguaa

SEQ ID NO: 1073431 - RNA, 19 nt, Artificial Sequence
  Description of Artificial Sequence: Synthetic oligonucleotide
  Antisense strand to SEQ ID NO: 1073430
uuacucggacuaagagugg

SEQ ID NO: 1073432 - RNA, 19 nt, Artificial Sequence
  Description of Artificial Sequence: Synthetic oligonucleotide
  Sense strand starting at position 2597 of SEQ ID NO: 915353
auuccauacugaguaggaa

SEQ ID NO: 1073433 - RNA, 19 nt, Artificial Sequence
  Description of Artificial Sequence: Synthetic oligonucleotide
  Antisense strand to SEQ ID NO: 1073432
uuccuacucaguauggaau

SEQ ID NO: 1073434 - RNA, 19 nt, Artificial Sequence
  Description of Artificial Sequence: Synthetic oligonucleotide
  Sense strand starting at position 2702 of SEQ ID NO: 915353
augugagucugagcagaaa

SEQ ID NO: 1073435 - RNA, 19 nt, Artificial Sequence
  Description of Artificial Sequence: Synthetic oligonucleotide
  Antisense strand to SEQ ID NO: 1073434
uuucugcucagacucacau

SEQ ID NO: 1073436 - RNA, 19 nt, Artificial Sequence
  Description of Artificial Sequence: Synthetic oligonucleotide
  Sense strand starting at position 2777 of SEQ ID NO: 915353
agcacuuucccacauguua

SEQ ID NO: 1073437 - RNA, 19 nt, Artificial Sequence
  Description of Artificial Sequence: Synthetic oligonucleotide
  Antisense strand to SEQ ID NO: 1073436
uaacaugugggaaagugcu

SEQ ID NO: 1073438 - RNA, 19 nt, Artificial Sequence
  Description of Artificial Sequence: Synthetic oligonucleotide
  Sense strand starting at position 2938 of SEQ ID NO: 915353
gaugcacaguugucaguga

SEQ ID NO: 1073439 - RNA, 19 nt, Artificial Sequence
  Description of Artificial Sequence: Synthetic oligonucleotide
  Antisense strand to SEQ ID NO: 1073438
ucacugacaacugugcauc

SEQ ID NO: 1073440 - RNA, 19 nt, Artificial Sequence
  Description of Artificial Sequence: Synthetic oligonucleotide
  Sense strand starting at position 2942 of SEQ ID NO: 915353
cacaguugucagugagagg

SEQ ID NO: 1073441 - RNA, 19 nt, Artificial Sequence
  Description of Artificial Sequence: Synthetic oligonucleotide
  Antisense strand to SEQ ID NO: 1073440
ccucucacugacaacugug

SEQ ID NO: 1073442 - RNA, 19 nt, Artificial Sequence
  Description of Artificial Sequence: Synthetic oligonucleotide
  Sense strand starting at position 2947 of SEQ ID NO: 915353
uugucagugagaggcuaua

SEQ ID NO: 1073443 - RNA, 19 nt, Artificial Sequence
  Description of Artificial Sequence: Synthetic oligonucleotide
  Antisense strand to SEQ ID NO: 1073442
uauagccucucacugacaa

SEQ ID NO: 1073444 - RNA, 19 nt, Artificial Sequence
  Description of Artificial Sequence: Synthetic oligonucleotide
  Sense strand starting at position 2993 of SEQ ID NO: 915353
gucagagauugguuaggac

SEQ ID NO: 1073445 - RNA, 19 nt, Artificial Sequence
  Description of Artificial Sequence: Synthetic oligonucleotide
  Antisense strand to SEQ ID NO: 1073444
guccuaaccaaucucugac

SEQ ID NO: 1073446 - RNA, 19 nt, Artificial Sequence
  Description of Artificial Sequence: Synthetic oligonucleotide
  Sense strand starting at position 3015 of SEQ ID NO: 915353
agggaugauuagcauugga

SEQ ID NO: 1073447 - RNA, 19 nt, Artificial Sequence
  Description of Artificial Sequence: Synthetic oligonucleotide
  Antisense strand to SEQ ID NO: 1073446
uccaaugcuaaucaucccu

SEQ ID NO: 1073448 - RNA, 19 nt, Artificial Sequence
  Description of Artificial Sequence: Synthetic oligonucleotide
  Sense strand starting at position 3049 of SEQ ID NO: 915353
gguggacugcuguaaacaa

SEQ ID NO: 1073449 - RNA, 19 nt, Artificial Sequence
  Description of Artificial Sequence: Synthetic oligonucleotide
  Antisense strand to SEQ ID NO: 1073448
uuguuuacagcaguccacc

SEQ ID NO: 1073450 - RNA, 19 nt, Artificial Sequence
  Description of Artificial Sequence: Synthetic oligonucleotide
  Sense strand starting at position 3104 of SEQ ID NO: 915353
gggcuccugucaucacuga

SEQ ID NO: 1073451 - RNA, 19 nt, Artificial Sequence
  Description of Artificial Sequence: Synthetic oligonucleotide
  Antisense strand to SEQ ID NO: 1073450
ucagugaugacaggagccc

SEQ ID NO: 1073452 - RNA, 19 nt, Artificial Sequence
  Description of Artificial Sequence: Synthetic oligonucleotide
  Sense strand starting at position 3108 of SEQ ID NO: 915353
uccugucaucacugacuca

SEQ ID NO: 1073453 - RNA, 19 nt, Artificial Sequence
  Description of Artificial Sequence: Synthetic oligonucleotide
  Antisense strand to SEQ ID NO: 1073452
ugagucagugaugacagga

SEQ ID NO: 1073454 - RNA, 19 nt, Artificial Sequence
  Description of Artificial Sequence: Synthetic oligonucleotide
  Sense strand starting at position 3251 of SEQ ID NO: 915353
ucuuccuuccagggauacu

SEQ ID NO: 1073455 - RNA, 19 nt, Artificial Sequence
  Description of Artificial Sequence: Synthetic oligonucleotide
  Antisense strand to SEQ ID NO: 1073454
aguaucccuggaaggaaga

SEQ ID NO: 1073456 - RNA, 19 nt, Artificial Sequence
  Description of Artificial Sequence: Synthetic oligonucleotide
  Sense strand starting at position 3348 of SEQ ID NO: 915353
gguguucugcacuggaaga

SEQ ID NO: 1073457 - RNA, 19 nt, Artificial Sequence
  Description of Artificial Sequence: Synthetic oligonucleotide
  Antisense strand to SEQ ID NO: 1073456
ucuuccagugcagaacacc

SEQ ID NO: 1073458 - RNA, 19 nt, Artificial Sequence
  Description of Artificial Sequence: Synthetic oligonucleotide
  Sense strand starting at position 3398 of SEQ ID NO: 915353
ggaggaagcugcucuggaa

SEQ ID NO: 1073459 - RNA, 19 nt, Artificial Sequence
  Description of Artificial Sequence: Synthetic oligonucleotide
  Antisense strand to SEQ ID NO: 1073458
uuccagagcagcuuccucc

SEQ ID NO: 1073460 - RNA, 19 nt, Artificial Sequence
  Description of Artificial Sequence: Synthetic oligonucleotide
  Sense strand starting at position 3402 of SEQ ID NO: 915353
gaagcugcucuggaaagga

SEQ ID NO: 1073461 - RNA, 19 nt, Artificial Sequence
  Description of Artificial Sequence: Synthetic oligonucleotide
  Antisense strand to SEQ ID NO: 1073460
uccuuuccagagcagcuuc

SEQ ID NO: 1073462 - RNA, 19 nt, Artificial Sequence
  Description of Artificial Sequence: Synthetic oligonucleotide
  Sense strand starting at position 3634 of SEQ ID NO: 915353
ugcggaguuagugauggaa

SEQ ID NO: 1073463 - RNA, 19 nt, Artificial Sequence
  Description of Artificial Sequence: Synthetic oligonucleotide
  Antisense strand to SEQ ID NO: 1073462
uuccaucacuaacuccgca

SEQ ID NO: 1073464 - RNA, 19 nt, Artificial Sequence
  Description of Artificial Sequence: Synthetic oligonucleotide
  Sense strand starting at position 3637 of SEQ ID NO: 915353
ggaguuagugauggaagca

SEQ ID NO: 1073465 - RNA, 19 nt, Artificial Sequence
  Description of Artificial Sequence: Synthetic oligonucleotide
  Antisense strand to SEQ ID NO: 1073464
ugcuuccaucacuaacucc

SEQ ID NO: 1073466 - RNA, 19 nt, Artificial Sequence
  Description of Artificial Sequence: Synthetic oligonucleotide
  Sense strand starting at position 3793 of SEQ ID NO: 915353
ggcuguuuccagaggugug

SEQ ID NO: 1073467 - RNA, 19 nt, Artificial Sequence
  Description of Artificial Sequence: Synthetic oligonucleotide
  Antisense strand to SEQ ID NO: 1073466
cacaccucuggaaacagcc

SEQ ID NO: 1073468 - RNA, 19 nt, Artificial Sequence
  Description of Artificial Sequence: Synthetic oligonucleotide
  Sense strand starting at position 410 of SEQ ID NO: 915354
agugaagugacuuagccaa

SEQ ID NO: 1073469 - RNA, 19 nt, Artificial Sequence
  Description of Artificial Sequence: Synthetic oligonucleotide
  Antisense strand to SEQ ID NO: 1073468
uuggcuaagucacuucacu

SEQ ID NO: 1073470 - RNA, 19 nt, Artificial Sequence
  Description of Artificial Sequence: Synthetic oligonucleotide
  Sense strand starting at position 412 of SEQ ID NO: 915354
ugaagugacuuagccaaag

SEQ ID NO: 1073471 - RNA, 19 nt, Artificial Sequence
  Description of Artificial Sequence: Synthetic oligonucleotide
  Antisense strand to SEQ ID NO: 1073470
cuuuggcuaagucacuuca

SEQ ID NO: 1073472 - RNA, 19 nt, Artificial Sequence
  Description of Artificial Sequence: Synthetic oligonucleotide
  Sense strand starting at position 424 of SEQ ID NO: 915354
gccaaaggcacagaguuau

SEQ ID NO: 1073473 - RNA, 19 nt, Artificial Sequence
  Description of Artificial Sequence: Synthetic oligonucleotide
  Antisense strand to SEQ ID NO: 1073472
auaacucugugccuuuggc

SEQ ID NO: 1073474 - RNA, 19 nt, Artificial Sequence
  Description of Artificial Sequence: Synthetic oligonucleotide
  Sense strand starting at position 836 of SEQ ID NO: 915354
aacagagaucaguaugugu

SEQ ID NO: 1073475 - RNA, 19 nt, Artificial Sequence
  Description of Artificial Sequence: Synthetic oligonucleotide
  Antisense strand to SEQ ID NO: 1073474
acacauacugaucucuguu

SEQ ID NO: 1073476 - RNA, 19 nt, Artificial Sequence
  Description of Artificial Sequence: Synthetic oligonucleotide
  Sense strand starting at position 838 of SEQ ID NO: 915354
cagagaucaguauguguaa

SEQ ID NO: 1073477 - RNA, 19 nt, Artificial Sequence
  Description of Artificial Sequence: Synthetic oligonucleotide
  Antisense strand to SEQ ID NO: 1073476
uuacacauacugaucucug

SEQ ID NO: 1073478 - RNA, 19 nt, Artificial Sequence
  Description of Artificial Sequence: Synthetic oligonucleotide
  Sense strand starting at position 840 of SEQ ID NO: 915354
gagaucaguauguguaaga

SEQ ID NO: 1073479 - RNA, 19 nt, Artificial Sequence
  Description of Artificial Sequence: Synthetic oligonucleotide
  Antisense strand to SEQ ID NO: 1073478
ucuuacacauacugaucuc

SEQ ID NO: 1073480 - RNA, 19 nt, Artificial Sequence
  Description of Artificial Sequence: Synthetic oligonucleotide
  Sense strand starting at position 858 of SEQ ID NO: 915354
accaaaugcuguucuggua

SEQ ID NO: 1073481 - RNA, 19 nt, Artificial Sequence
  Description of Artificial Sequence: Synthetic oligonucleotide
  Antisense strand to SEQ ID NO: 1073480
uaccagaacagcauuuggu

SEQ ID NO: 1073482 - RNA, 19 nt, Artificial Sequence
  Description of Artificial Sequence: Synthetic oligonucleotide
  Sense strand starting at position 901 of SEQ ID NO: 915354
gcuggaguccuugaggcaa

SEQ ID NO: 1073483 - RNA, 19 nt, Artificial Sequence
  Description of Artificial Sequence: Synthetic oligonucleotide
  Antisense strand to SEQ ID NO: 1073482
uugccucaaggacuccagc

SEQ ID NO: 1073484 - RNA, 19 nt, Artificial Sequence
  Description of Artificial Sequence: Synthetic oligonucleotide
  Sense strand starting at position 921 of SEQ ID NO: 915354
agaucucaaucuucgggau

SEQ ID NO: 1073485 - RNA, 19 nt, Artificial Sequence
  Description of Artificial Sequence: Synthetic oligonucleotide
  Antisense strand to SEQ ID NO: 1073484
aucccgaagauugagaucu

SEQ ID NO: 1073486 - RNA, 19 nt, Artificial Sequence
  Description of Artificial Sequence: Synthetic oligonucleotide
  Sense strand starting at position 927 of SEQ ID NO: 915354
caaucuucgggaugccuga

SEQ ID NO: 1073487 - RNA, 19 nt, Artificial Sequence
  Description of Artificial Sequence: Synthetic oligonucleotide
  Antisense strand to SEQ ID NO: 1073486
ucaggcaucccgaagauug

SEQ ID NO: 1073488 - RNA, 19 nt, Artificial Sequence
  Description of Artificial Sequence: Synthetic oligonucleotide
  Sense strand starting at position 940 of SEQ ID NO: 915354
gccugagaaucaucuucuu

SEQ ID NO: 1073489 - RNA, 19 nt, Artificial Sequence
  Description of Artificial Sequence: Synthetic oligonucleotide
  Antisense strand to SEQ ID NO: 1073488
aagaagaugauucucaggc

SEQ ID NO: 1073490 - RNA, 19 nt, Artificial Sequence
  Description of Artificial Sequence: Synthetic oligonucleotide
  Sense strand starting at position 989 of SEQ ID NO: 915354
agucuugauucuguaggga

SEQ ID NO: 1073491 - RNA, 19 nt, Artificial Sequence
  Description of Artificial Sequence: Synthetic oligonucleotide
  Antisense strand to SEQ ID NO: 1073490
ucccuacagaaucaagacu

SEQ ID NO: 1073492 - RNA, 19 nt, Artificial Sequence
  Description of Artificial Sequence: Synthetic oligonucleotide
  Sense strand starting at position 992 of SEQ ID NO: 915354
cuugauucuguagggaaua

SEQ ID NO: 1073493 - RNA, 19 nt, Artificial Sequence
  Description of Artificial Sequence: Synthetic oligonucleotide
  Antisense strand to SEQ ID NO: 1073492
uauucccuacagaaucaag

SEQ ID NO: 1073494 - RNA, 19 nt, Artificial Sequence
  Description of Artificial Sequence: Synthetic oligonucleotide
  Sense strand starting at position 1085 of SEQ ID NO: 915354
ugggucccagcucauuaau

SEQ ID NO: 1073495 - RNA, 19 nt, Artificial Sequence
  Description of Artificial Sequence: Synthetic oligonucleotide
  Antisense strand to SEQ ID NO: 1073494
auuaaugagcugggaccca

SEQ ID NO: 1073496 - RNA, 19 nt, Artificial Sequence
  Description of Artificial Sequence: Synthetic oligonucleotide
  Sense strand starting at position 1087 of SEQ ID NO: 915354
ggucccagcucauuaauau

SEQ ID NO: 1073497 - RNA, 19 nt, Artificial Sequence
  Description of Artificial Sequence: Synthetic oligonucleotide
  Antisense strand to SEQ ID NO: 1073496
auauuaaugagcugggacc

SEQ ID NO: 1073498 - RNA, 19 nt, Artificial Sequence
  Description of Artificial Sequence: Synthetic oligonucleotide
  Sense strand starting at position 1138 of SEQ ID NO: 915354
ggucaaaucccaggcuacu

SEQ ID NO: 1073499 - RNA, 19 nt, Artificial Sequence
  Description of Artificial Sequence: Synthetic oligonucleotide
  Antisense strand to SEQ ID NO: 1073498
aguagccugggauuugacc

SEQ ID NO: 1073500 - RNA, 19 nt, Artificial Sequence
  Description of Artificial Sequence: Synthetic oligonucleotide
  Sense strand starting at position 1296 of SEQ ID NO: 915354
caaugauuacacugugagc

SEQ ID NO: 1073501 - RNA, 19 nt, Artificial Sequence
  Description of Artificial Sequence: Synthetic oligonucleotide
  Antisense strand to SEQ ID NO: 1073500
gcucacaguguaaucauug

SEQ ID NO: 1073502 - RNA, 19 nt, Artificial Sequence
  Description of Artificial Sequence: Synthetic oligonucleotide
  Sense strand starting at position 1445 of SEQ ID NO: 915354
aaggaagucuuauugucca

SEQ ID NO: 1073503 - RNA, 19 nt, Artificial Sequence
  Description of Artificial Sequence: Synthetic oligonucleotide
  Antisense strand to SEQ ID NO: 1073502
uggacaauaagacuuccuu

SEQ ID NO: 1073504 - RNA, 19 nt, Artificial Sequence
  Description of Artificial Sequence: Synthetic oligonucleotide
  Sense strand starting at position 1448 of SEQ ID NO: 915354
gaagucuuauuguccagca

SEQ ID NO: 1073505 - RNA, 19 nt, Artificial Sequence
  Description of Artificial Sequence: Synthetic oligonucleotide
  Antisense strand to SEQ ID NO: 1073504
ugcuggacaauaagacuuc

SEQ ID NO: 1073506 - RNA, 19 nt, Artificial Sequence
  Description of Artificial Sequence: Synthetic oligonucleotide
  Sense strand starting at position 1450 of SEQ ID NO: 915354
agucuuauuguccagcauu

SEQ ID NO: 1073507 - RNA, 19 nt, Artificial Sequence
  Description of Artificial Sequence: Synthetic oligonucleotide
  Antisense strand to SEQ ID NO: 1073506
aaugcuggacaauaagacu

SEQ ID NO: 1073508 - RNA, 19 nt, Artificial Sequence
  Description of Artificial Sequence: Synthetic oligonucleotide
  Sense strand starting at position 1453 of SEQ ID NO: 915354
cuuauuguccagcauugca

SEQ ID NO: 1073509 - RNA, 19 nt, Artificial Sequence
  Description of Artificial Sequence: Synthetic oligonucleotide
  Antisense strand to SEQ ID NO: 1073508
ugcaaugcuggacaauaag

SEQ ID NO: 1073510 - RNA, 19 nt, Artificial Sequence
  Description of Artificial Sequence: Synthetic oligonucleotide
  Sense strand starting at position 1737 of SEQ ID NO: 915354
uagggagaucugcggagaa

SEQ ID NO: 1073511 - RNA, 19 nt, Artificial Sequence
  Description of Artificial Sequence: Synthetic oligonucleotide
  Antisense strand to SEQ ID NO: 1073510
uucuccgcagaucucccua

SEQ ID NO: 1073512 - RNA, 19 nt, Artificial Sequence
  Description of Artificial Sequence: Synthetic oligonucleotide
  Sense strand starting at position 2420 of SEQ ID NO: 915354
gucggcaacuaucugaauu

SEQ ID NO: 1073513 - RNA, 19 nt, Artificial Sequence
  Description of Artificial Sequence: Synthetic oligonucleotide
  Antisense strand to SEQ ID NO: 1073512
aauucagauaguugccgac

SEQ ID NO: 1073514 - RNA, 19 nt, Artificial Sequence
  Description of Artificial Sequence: Synthetic oligonucleotide
  Sense strand starting at position 2430 of SEQ ID NO: 915354
aucugaauugcuugaaccu

SEQ ID NO: 1073515 - RNA, 19 nt, Artificial Sequence
  Description of Artificial Sequence: Synthetic oligonucleotide
  Antisense strand to SEQ ID NO: 1073514
agguucaagcaauucagau

SEQ ID NO: 1073516 - RNA, 19 nt, Artificial Sequence
  Description of Artificial Sequence: Synthetic oligonucleotide
  Sense strand starting at position 2617 of SEQ ID NO: 915354
acugcuuucuuccuagaug

SEQ ID NO: 1073517 - RNA, 19 nt, Artificial Sequence
  Description of Artificial Sequence: Synthetic oligonucleotide
  Antisense strand to SEQ ID NO: 1073516
caucuaggaagaaagcagu

SEQ ID NO: 1073518 - RNA, 19 nt, Artificial Sequence
  Description of Artificial Sequence: Synthetic oligonucleotide
  Sense strand starting at position 2628 of SEQ ID NO: 915354
ccuagaugccugggcaaca

SEQ ID NO: 1073519 - RNA, 19 nt, Artificial Sequence
  Description of Artificial Sequence: Synthetic oligonucleotide
  Antisense strand to SEQ ID NO: 1073518
uguugcccaggcaucuagg

SEQ ID NO: 1073520 - RNA, 19 nt, Artificial Sequence
  Description of Artificial Sequence: Synthetic oligonucleotide
  Sense strand starting at position 2729 of SEQ ID NO: 915354
cugugcuaagcgcuugaua

SEQ ID NO: 1073521 - RNA, 19 nt, Artificial Sequence
  Description of Artificial Sequence: Synthetic oligonucleotide
  Antisense strand to SEQ ID NO: 1073520
uaucaagcgcuuagcacag

SEQ ID NO: 1073522 - RNA, 19 nt, Artificial Sequence
  Description of Artificial Sequence: Synthetic oligonucleotide
  Sense strand starting at position 2730 of SEQ ID NO: 915354
ugugcuaagcgcuugauau

SEQ ID NO: 1073523 - RNA, 19 nt, Artificial Sequence
  Description of Artificial Sequence: Synthetic oligonucleotide
  Antisense strand to SEQ ID NO: 1073522
auaucaagcgcuuagcaca

SEQ ID NO: 1073524 - RNA, 19 nt, Artificial Sequence
  Description of Artificial Sequence: Synthetic oligonucleotide
  Sense strand starting at position 2732 of SEQ ID NO: 915354
ugcuaagcgcuugauauaa

SEQ ID NO: 1073525 - RNA, 19 nt, Artificial Sequence
  Description of Artificial Sequence: Synthetic oligonucleotide
  Antisense strand to SEQ ID NO: 1073524
uuauaucaagcgcuuagca

SEQ ID NO: 1073526 - RNA, 19 nt, Artificial Sequence
  Description of Artificial Sequence: Synthetic oligonucleotide
  Sense strand starting at position 3185 of SEQ ID NO: 915354
cacuuuaagccucgagaga

SEQ ID NO: 1073527 - RNA, 19 nt, Artificial Sequence
  Description of Artificial Sequence: Synthetic oligonucleotide
  Antisense strand to SEQ ID NO: 1073526
ucucucgaggcuuaaagug

SEQ ID NO: 1073528 - RNA, 19 nt, Artificial Sequence
  Description of Artificial Sequence: Synthetic oligonucleotide
  Sense strand starting at position 3186 of SEQ ID NO: 915354
acuuuaagccucgagagag

SEQ ID NO: 1073529 - RNA, 19 nt, Artificial Sequence
  Description of Artificial Sequence: Synthetic oligonucleotide
  Antisense strand to SEQ ID NO: 1073528
cucucucgaggcuuaaagu

SEQ ID NO: 1073530 - RNA, 19 nt, Artificial Sequence
  Description of Artificial Sequence: Synthetic oligonucleotide
  Sense strand starting at position 3200 of SEQ ID NO: 915354
gagagauaugacugcgagu

SEQ ID NO: 1073531 - RNA, 19 nt, Artificial Sequence
  Description of Artificial Sequence: Synthetic oligonucleotide
  Antisense strand to SEQ ID NO: 1073530
acucgcagucauaucucuc

SEQ ID NO: 1073532 - RNA, 19 nt, Artificial Sequence
  Description of Artificial Sequence: Synthetic oligonucleotide
  Sense strand starting at position 3202 of SEQ ID NO: 915354
gagauaugacugcgaguca

SEQ ID NO: 1073533 - RNA, 19 nt, Artificial Sequence
  Description of Artificial Sequence: Synthetic oligonucleotide
  Antisense strand to SEQ ID NO: 1073532
ugacucgcagucauaucuc

SEQ ID NO: 1073534 - RNA, 19 nt, Artificial Sequence
  Description of Artificial Sequence: Synthetic oligonucleotide
  Sense strand starting at position 3207 of SEQ ID NO: 915354
augacugcgagucacauau

SEQ ID NO: 1073535 - RNA, 19 nt, Artificial Sequence
  Description of Artificial Sequence: Synthetic oligonucleotide
  Antisense strand to SEQ ID NO: 1073534
auaugugacucgcagucau

SEQ ID NO: 1073536 - RNA, 19 nt, Artificial Sequence
  Description of Artificial Sequence: Synthetic oligonucleotide
  Sense strand starting at position 3211 of SEQ ID NO: 915354
cugcgagucacauauaguu

SEQ ID NO: 1073537 - RNA, 19 nt, Artificial Sequence
  Description of Artificial Sequence: Synthetic oligonucleotide
  Antisense strand to SEQ ID NO: 1073536
aacuauaugugacucgcag

SEQ ID NO: 1073538 - RNA, 19 nt, Artificial Sequence
  Description of Artificial Sequence: Synthetic oligonucleotide
  Sense strand starting at position 3213 of SEQ ID NO: 915354
gcgagucacauauaguuua

SEQ ID NO: 1073539 - RNA, 19 nt, Artificial Sequence
  Description of Artificial Sequence: Synthetic oligonucleotide
  Antisense strand to SEQ ID NO: 1073538
uaaacuauaugugacucgc

SEQ ID NO: 1073540 - RNA, 19 nt, Artificial Sequence
  Description of Artificial Sequence: Synthetic oligonucleotide
  Sense strand starting at position 3216 of SEQ ID NO: 915354
agucacauauaguuuacaa

SEQ ID NO: 1073541 - RNA, 19 nt, Artificial Sequence
  Description of Artificial Sequence: Synthetic oligonucleotide
  Antisense strand to SEQ ID NO: 1073540
uuguaaacuauaugugacu

SEQ ID NO: 1073542 - RNA, 19 nt, Artificial Sequence
  Description of Artificial Sequence: Synthetic oligonucleotide
  Sense strand starting at position 3310 of SEQ ID NO: 915354
caggcugaaguguaggaaa

SEQ ID NO: 1073543 - RNA, 19 nt, Artificial Sequence
  Description of Artificial Sequence: Synthetic oligonucleotide
  Antisense strand to SEQ ID NO: 1073542
uuuccuacacuucagccug

SEQ ID NO: 1073544 - RNA, 19 nt, Artificial Sequence
  Description of Artificial Sequence: Synthetic oligonucleotide
  Sense strand starting at position 3312 of SEQ ID NO: 915354
ggcugaaguguaggaaauc

SEQ ID NO: 1073545 - RNA, 19 nt, Artificial Sequence
  Description of Artificial Sequence: Synthetic oligonucleotide
  Antisense strand to SEQ ID NO: 1073544
gauuuccuacacuucagcc

SEQ ID NO: 1073546 - RNA, 19 nt, Artificial Sequence
  Description of Artificial Sequence: Synthetic oligonucleotide
  Sense strand starting at position 3321 of SEQ ID NO: 915354
guaggaaauccaugacuau

SEQ ID NO: 1073547 - RNA, 19 nt, Artificial Sequence
  Description of Artificial Sequence: Synthetic oligonucleotide
  Antisense strand to SEQ ID NO: 1073546
auagucauggauuuccuac

SEQ ID NO: 1073548 - RNA, 19 nt, Artificial Sequence
  Description of Artificial Sequence: Synthetic oligonucleotide
  Sense strand starting at position 98 of SEQ ID NO: 915355
gagaucuagcaguaugauc

SEQ ID NO: 1073549 - RNA, 19 nt, Artificial Sequence
  Description of Artificial Sequence: Synthetic oligonucleotide
  Antisense strand to SEQ ID NO: 1073548
gaucauacugcuagaucuc

SEQ ID NO: 1073550 - RNA, 19 nt, Artificial Sequence
  Description of Artificial Sequence: Synthetic oligonucleotide
  Sense strand starting at position 107 of SEQ ID NO: 915355
caguaugauccuggcugga

SEQ ID NO: 1073551 - RNA, 19 nt, Artificial Sequence
  Description of Artificial Sequence: Synthetic oligonucleotide
  Antisense strand to SEQ ID NO: 1073550
uccagccaggaucauacug

SEQ ID NO: 1073552 - RNA, 19 nt, Artificial Sequence
  Description of Artificial Sequence: Synthetic oligonucleotide
  Sense strand starting at position 109 of SEQ ID NO: 915355
guaugauccuggcuggagu

SEQ ID NO: 1073553 - RNA, 19 nt, Artificial Sequence
  Description of Artificial Sequence: Synthetic oligonucleotide
  Antisense strand to SEQ ID NO: 1073552
acuccagccaggaucauac

SEQ ID NO: 1073554 - RNA, 19 nt, Artificial Sequence
  Description of Artificial Sequence: Synthetic oligonucleotide
  Sense strand starting at position 110 of SEQ ID NO: 915355
uaugauccuggcuggagua

SEQ ID NO: 1073555 - RNA, 19 nt, Artificial Sequence
  Description of Artificial Sequence: Synthetic oligonucleotide
  Antisense strand to SEQ ID NO: 1073554
uacuccagccaggaucaua

SEQ ID NO: 1073556 - RNA, 19 nt, Artificial Sequence
  Description of Artificial Sequence: Synthetic oligonucleotide
  Sense strand starting at position 120 of SEQ ID NO: 915355
gcuggaguaaccuggaaau

SEQ ID NO: 1073557 - RNA, 19 nt, Artificial Sequence
  Description of Artificial Sequence: Synthetic oligonucleotide
  Antisense strand to SEQ ID NO: 1073556
auuuccagguuacuccagc

SEQ ID NO: 1073558 - RNA, 19 nt, Artificial Sequence
  Description of Artificial Sequence: Synthetic oligonucleotide
  Sense strand starting at position 200 of SEQ ID NO: 915355
guguguauaacguauguaa

SEQ ID NO: 1073559 - RNA, 19 nt, Artificial Sequence
  Description of Artificial Sequence: Synthetic oligonucleotide
  Antisense strand to SEQ ID NO: 1073558
uuacauacguuauacacac

SEQ ID NO: 1073560 - RNA, 19 nt, Artificial Sequence
  Description of Artificial Sequence: Synthetic oligonucleotide
  Sense strand starting at position 202 of SEQ ID NO: 915355
guguauaacguauguaaga

SEQ ID NO: 1073561 - RNA, 19 nt, Artificial Sequence
  Description of Artificial Sequence: Synthetic oligonucleotide
  Antisense strand to SEQ ID NO: 1073560
ucuuacauacguuauacac

SEQ ID NO: 1073562 - RNA, 19 nt, Artificial Sequence
  Description of Artificial Sequence: Synthetic oligonucleotide
  Sense strand starting at position 203 of SEQ ID NO: 915355
uguauaacguauguaagaa

SEQ ID NO: 1073563 - RNA, 19 nt, Artificial Sequence
  Description of Artificial Sequence: Synthetic oligonucleotide
  Antisense strand to SEQ ID NO: 1073562
uucuuacauacguuauaca

SEQ ID NO: 1073564 - RNA, 19 nt, Artificial Sequence
  Description of Artificial Sequence: Synthetic oligonucleotide
  Sense strand starting at position 204 of SEQ ID NO: 915355
guauaacguauguaagaaa

SEQ ID NO: 1073565 - RNA, 19 nt, Artificial Sequence
  Description of Artificial Sequence: Synthetic oligonucleotide
  Antisense strand to SEQ ID NO: 1073564
uuucuuacauacguuauac

SEQ ID NO: 1073566 - RNA, 19 nt, Artificial Sequence
  Description of Artificial Sequence: Synthetic oligonucleotide
  Sense strand starting at position 207 of SEQ ID NO: 915355
uaacguauguaagaaaugu

SEQ ID NO: 1073567 - RNA, 19 nt, Artificial Sequence
  Description of Artificial Sequence: Synthetic oligonucleotide
  Antisense strand to SEQ ID NO: 1073566
acauuucuuacauacguua

SEQ ID NO: 1073568 - RNA, 19 nt, Artificial Sequence
  Description of Artificial Sequence: Synthetic oligonucleotide
  Sense strand starting at position 880 of SEQ ID NO: 915355
gcaagucuacccugcauuu

SEQ ID NO: 1073569 - RNA, 19 nt, Artificial Sequence
  Description of Artificial Sequence: Synthetic oligonucleotide
  Antisense strand to SEQ ID NO: 1073568
aaaugcaggguagacuugc

SEQ ID NO: 1073570 - RNA, 19 nt, Artificial Sequence
  Description of Artificial Sequence: Synthetic oligonucleotide
  Sense strand starting at position 1059 of SEQ ID NO: 915355
ccgccauguccggcgaauu

SEQ ID NO: 1073571 - RNA, 19 nt, Artificial Sequence
  Description of Artificial Sequence: Synthetic oligonucleotide
  Antisense strand to SEQ ID NO: 1073570
aauucgccggacauggcgg

SEQ ID NO: 1073572 - RNA, 19 nt, Artificial Sequence
  Description of Artificial Sequence: Synthetic oligonucleotide
  Sense strand starting at position 1060 of SEQ ID NO: 915355
cgccauguccggcgaauua

SEQ ID NO: 1073573 - RNA, 19 nt, Artificial Sequence
  Description of Artificial Sequence: Synthetic oligonucleotide
  Antisense strand to SEQ ID NO: 1073572
uaauucgccggacauggcg

SEQ ID NO: 1073574 - RNA, 19 nt, Artificial Sequence
  Description of Artificial Sequence: Synthetic oligonucleotide
  Sense strand starting at position 1589 of SEQ ID NO: 915355
ggcuuuacugcgggugaca

SEQ ID NO: 1073575 - RNA, 19 nt, Artificial Sequence
  Description of Artificial Sequence: Synthetic oligonucleotide
  Antisense strand to SEQ ID NO: 1073574
ugucacccgcaguaaagcc

SEQ ID NO: 1073576 - RNA, 19 nt, Artificial Sequence
  Description of Artificial Sequence: Synthetic oligonucleotide
  Sense strand starting at position 1694 of SEQ ID NO: 915355
gggauaagguucucccgaa

SEQ ID NO: 1073577 - RNA, 19 nt, Artificial Sequence
  Description of Artificial Sequence: Synthetic oligonucleotide
  Antisense strand to SEQ ID NO: 1073576
uucgggagaaccuuauccc

SEQ ID NO: 1073578 - RNA, 19 nt, Artificial Sequence
  Description of Artificial Sequence: Synthetic oligonucleotide
  Sense strand starting at position 1695 of SEQ ID NO: 915355
ggauaagguucucccgaaa

SEQ ID NO: 1073579 - RNA, 19 nt, Artificial Sequence
  Description of Artificial Sequence: Synthetic oligonucleotide
  Antisense strand to SEQ ID NO: 1073578
uuucgggagaaccuuaucc

SEQ ID NO: 1073580 - RNA, 19 nt, Artificial Sequence
  Description of Artificial Sequence: Synthetic oligonucleotide
  Sense strand starting at position 1698 of SEQ ID NO: 915355
uaagguucucccgaaagca

SEQ ID NO: 1073581 - RNA, 19 nt, Artificial Sequence
  Description of Artificial Sequence: Synthetic oligonucleotide
  Antisense strand to SEQ ID NO: 1073580
ugcuuucgggagaaccuua

SEQ ID NO: 1073582 - RNA, 19 nt, Artificial Sequence
  Description of Artificial Sequence: Synthetic oligonucleotide
  Sense strand starting at position 1937 of SEQ ID NO: 915355
cgacgaucuugccacaagu

SEQ ID NO: 1073583 - RNA, 19 nt, Artificial Sequence
  Description of Artificial Sequence: Synthetic oligonucleotide
  Antisense strand to SEQ ID NO: 1073582
acuuguggcaagaucgucg

SEQ ID NO: 1073584 - RNA, 19 nt, Artificial Sequence
  Description of Artificial Sequence: Synthetic oligonucleotide
  Sense strand starting at position 1939 of SEQ ID NO: 915355
acgaucuugccacaaguga

SEQ ID NO: 1073585 - RNA, 19 nt, Artificial Sequence
  Description of Artificial Sequence: Synthetic oligonucleotide
  Antisense strand to SEQ ID NO: 1073584
ucacuuguggcaagaucgu

SEQ ID NO: 1073586 - RNA, 19 nt, Artificial Sequence
  Description of Artificial Sequence: Synthetic oligonucleotide
  Sense strand starting at position 2135 of SEQ ID NO: 915355
cgcaguuuccgccgcgaua

SEQ ID NO: 1073587 - RNA, 19 nt, Artificial Sequence
  Description of Artificial Sequence: Synthetic oligonucleotide
  Antisense strand to SEQ ID NO: 1073586
uaucgcggcggaaacugcg

SEQ ID NO: 1073588 - RNA, 19 nt, Artificial Sequence
  Description of Artificial Sequence: Synthetic oligonucleotide
  Sense strand starting at position 2774 of SEQ ID NO: 915355
uccgcucuuucccgggaau

SEQ ID NO: 1073589 - RNA, 19 nt, Artificial Sequence
  Description of Artificial Sequence: Synthetic oligonucleotide
  Antisense strand to SEQ ID NO: 1073588
auucccgggaaagagcgga

SEQ ID NO: 1073590 - RNA, 19 nt, Artificial Sequence
  Description of Artificial Sequence: Synthetic oligonucleotide
  Sense strand starting at position 2907 of SEQ ID NO: 915355
gggagggagucguggaaga

SEQ ID NO: 1073591 - RNA, 19 nt, Artificial Sequence
  Description of Artificial Sequence: Synthetic oligonucleotide
  Antisense strand to SEQ ID NO: 1073590
ucuuccacgacucccuccc

SEQ ID NO: 1073592 - RNA, 19 nt, Artificial Sequence
  Description of Artificial Sequence: Synthetic oligonucleotide
  Sense strand starting at position 3317 of SEQ ID NO: 915355
gccgcuuucucagggcaau

SEQ ID NO: 1073593 - RNA, 19 nt, Artificial Sequence
  Description of Artificial Sequence: Synthetic oligonucleotide
  Antisense strand to SEQ ID NO: 1073592
auugcccugagaaagcggc

SEQ ID NO: 1073594 - RNA, 19 nt, Artificial Sequence
  Description of Artificial Sequence: Synthetic oligonucleotide
  Sense strand starting at position 3318 of SEQ ID NO: 915355
ccgcuuucucagggcaaug

SEQ ID NO: 1073595 - RNA, 19 nt, Artificial Sequence
  Description of Artificial Sequence: Synthetic oligonucleotide
  Antisense strand to SEQ ID NO: 1073594
cauugcccugagaaagcgg

SEQ ID NO: 1073596 - RNA, 19 nt, Artificial Sequence
  Description of Artificial Sequence: Synthetic oligonucleotide
  Sense strand starting at position 3386 of SEQ ID NO: 915355
cggaguggugcuagccaga

SEQ ID NO: 1073597 - RNA, 19 nt, Artificial Sequence
  Description of Artificial Sequence: Synthetic oligonucleotide
  Antisense strand to SEQ ID NO: 1073596
ucuggcuagcaccacuccg

SEQ ID NO: 1073598 - RNA, 19 nt, Artificial Sequence
  Description of Artificial Sequence: Synthetic oligonucleotide
  Sense strand starting at position 3772 of SEQ ID NO: 915355
gcaggaguuguuuacucag

SEQ ID NO: 1073599 - RNA, 19 nt, Artificial Sequence
  Description of Artificial Sequence: Synthetic oligonucleotide
  Antisense strand to SEQ ID NO: 1073598
cugaguaaacaacuccugc

SEQ ID NO: 1073600 - RNA, 19 nt, Artificial Sequence
  Description of Artificial Sequence: Synthetic oligonucleotide
  Sense strand starting at position 3774 of SEQ ID NO: 915355
aggaguuguuuacucagag

SEQ ID NO: 1073601 - RNA, 19 nt, Artificial Sequence
  Description of Artificial Sequence: Synthetic oligonucleotide
  Antisense strand to SEQ ID NO: 1073600
cucugaguaaacaacuccu

SEQ ID NO: 1073602 - RNA, 19 nt, Artificial Sequence
  Description of Artificial Sequence: Synthetic oligonucleotide
  Sense strand starting at position 3775 of SEQ ID NO: 915355
ggaguuguuuacucagagc

SEQ ID NO: 1073603 - RNA, 19 nt, Artificial Sequence
  Description of Artificial Sequence: Synthetic oligonucleotide
  Antisense strand to SEQ ID NO: 1073602
gcucugaguaaacaacucc

SEQ ID NO: 1073604 - RNA, 19 nt, Artificial Sequence
  Description of Artificial Sequence: Synthetic oligonucleotide
  Sense strand starting at position 3778 of SEQ ID NO: 915355
guuguuuacucagagcaag

SEQ ID NO: 1073605 - RNA, 19 nt, Artificial Sequence
  Description of Artificial Sequence: Synthetic oligonucleotide
  Antisense strand to SEQ ID NO: 1073604
cuugcucugaguaaacaac

SEQ ID NO: 1073606 - RNA, 19 nt, Artificial Sequence
  Description of Artificial Sequence: Synthetic oligonucleotide
  Sense strand starting at position 3809 of SEQ ID NO: 915355
gugagcugcucuccaaauc

SEQ ID NO: 1073607 - RNA, 19 nt, Artificial Sequence
  Description of Artificial Sequence: Synthetic oligonucleotide
  Antisense strand to SEQ ID NO: 1073606
gauuuggagagcagcucac

SEQ ID NO: 1073608 - RNA, 19 nt, Artificial Sequence
  Description of Artificial Sequence: Synthetic oligonucleotide
  Sense strand starting at position 3841 of SEQ ID NO: 915355
agcugacauucuuggaauu

SEQ ID NO: 1073609 - RNA, 19 nt, Artificial Sequence
  Description of Artificial Sequence: Synthetic oligonucleotide
  Antisense strand to SEQ ID NO: 1073608
aauuccaagaaugucagcu

SEQ ID NO: 1073610 - RNA, 19 nt, Artificial Sequence
  Description of Artificial Sequence: Synthetic oligonucleotide
  Sense strand starting at position 3842 of SEQ ID NO: 915355
gcugacauucuuggaauuc

SEQ ID NO: 1073611 - RNA, 19 nt, Artificial Sequence
  Description of Artificial Sequence: Synthetic oligonucleotide
  Antisense strand to SEQ ID NO: 1073610
gaauuccaagaaugucagc

SEQ ID NO: 1073612 - RNA, 19 nt, Artificial Sequence
  Description of Artificial Sequence: Synthetic oligonucleotide
  Sense strand starting at position 3862 of SEQ ID NO: 915355
gagugugugcgcuuccuau

SEQ ID NO: 1073613 - RNA, 19 nt, Artificial Sequence
  Description of Artificial Sequence: Synthetic oligonucleotide
  Antisense strand to SEQ ID NO: 1073612
auaggaagcgcacacacuc

SEQ ID NO: 1073614 - RNA, 19 nt, Artificial Sequence
  Description of Artificial Sequence: Synthetic oligonucleotide
  Sense strand starting at position 35 of SEQ ID NO: 915356
gaauauggcagauggugaa

SEQ ID NO: 1073615 - RNA, 19 nt, Artificial Sequence
  Description of Artificial Sequence: Synthetic oligonucleotide
  Antisense strand to SEQ ID NO: 1073614
uucaccaucugccauauuc

SEQ ID NO: 1073616 - RNA, 19 nt, Artificial Sequence
  Description of Artificial Sequence: Synthetic oligonucleotide
  Sense strand starting at position 131 of SEQ ID NO: 915356
aaggauagauccucagugu

SEQ ID NO: 1073617 - RNA, 19 nt, Artificial Sequence
  Description of Artificial Sequence: Synthetic oligonucleotide
  Antisense strand to SEQ ID NO: 1073616
acacugaggaucuauccuu

SEQ ID NO: 1073618 - RNA, 19 nt, Artificial Sequence
  Description of Artificial Sequence: Synthetic oligonucleotide
  Sense strand starting at position 132 of SEQ ID NO: 915356
aggauagauccucagugug

SEQ ID NO: 1073619 - RNA, 19 nt, Artificial Sequence
  Description of Artificial Sequence: Synthetic oligonucleotide
  Antisense strand to SEQ ID NO: 1073618
cacacugaggaucuauccu

SEQ ID NO: 1073620 - RNA, 19 nt, Artificial Sequence
  Description of Artificial Sequence: Synthetic oligonucleotide
  Sense strand starting at position 134 of SEQ ID NO: 915356
gauagauccucagugugga

SEQ ID NO: 1073621 - RNA, 19 nt, Artificial Sequence
  Description of Artificial Sequence: Synthetic oligonucleotide
  Antisense strand to SEQ ID NO: 1073620
uccacacugaggaucuauc

SEQ ID NO: 1073622 - RNA, 19 nt, Artificial Sequence
  Description of Artificial Sequence: Synthetic oligonucleotide
  Sense strand starting at position 135 of SEQ ID NO: 915356
auagauccucaguguggau

SEQ ID NO: 1073623 - RNA, 19 nt, Artificial Sequence
  Description of Artificial Sequence: Synthetic oligonucleotide
  Antisense strand to SEQ ID NO: 1073622
auccacacugaggaucuau

SEQ ID NO: 1073624 - RNA, 19 nt, Artificial Sequence
  Description of Artificial Sequence: Synthetic oligonucleotide
  Sense strand starting at position 137 of SEQ ID NO: 915356
agauccucaguguggauau

SEQ ID NO: 1073625 - RNA, 19 nt, Artificial Sequence
  Description of Artificial Sequence: Synthetic oligonucleotide
  Antisense strand to SEQ ID NO: 1073624
auauccacacugaggaucu

SEQ ID NO: 1073626 - RNA, 19 nt, Artificial Sequence
  Description of Artificial Sequence: Synthetic oligonucleotide
  Sense strand starting at position 203 of SEQ ID NO: 915356
aggaaaguggcuugcucau

SEQ ID NO: 1073627 - RNA, 19 nt, Artificial Sequence
  Description of Artificial Sequence: Synthetic oligonucleotide
  Antisense strand to SEQ ID NO: 1073626
augagcaagccacuuuccu

SEQ ID NO: 1073628 - RNA, 19 nt, Artificial Sequence
  Description of Artificial Sequence: Synthetic oligonucleotide
  Sense strand starting at position 380 of SEQ ID NO: 915356
gccauugucccagaaagga

SEQ ID NO: 1073629 - RNA, 19 nt, Artificial Sequence
  Description of Artificial Sequence: Synthetic oligonucleotide
  Antisense strand to SEQ ID NO: 1073628
uccuuucugggacaauggc

SEQ ID NO: 1073630 - RNA, 19 nt, Artificial Sequence
  Description of Artificial Sequence: Synthetic oligonucleotide
  Sense strand starting at position 457 of SEQ ID NO: 915356
auuccuaguuaucuuggaa

SEQ ID NO: 1073631 - RNA, 19 nt, Artificial Sequence
  Description of Artificial Sequence: Synthetic oligonucleotide
  Antisense strand to SEQ ID NO: 1073630
uuccaagauaacuaggaau

SEQ ID NO: 1073632 - RNA, 19 nt, Artificial Sequence
  Description of Artificial Sequence: Synthetic oligonucleotide
  Sense strand starting at position 460 of SEQ ID NO: 915356
ccuaguuaucuuggaagga

SEQ ID NO: 1073633 - RNA, 19 nt, Artificial Sequence
  Description of Artificial Sequence: Synthetic oligonucleotide
  Antisense strand to SEQ ID NO: 1073632
uccuuccaagauaacuagg

SEQ ID NO: 1073634 - RNA, 19 nt, Artificial Sequence
  Description of Artificial Sequence: Synthetic oligonucleotide
  Sense strand starting at position 584 of SEQ ID NO: 915356
ugaaaucacucuucugugu

SEQ ID NO: 1073635 - RNA, 19 nt, Artificial Sequence
  Description of Artificial Sequence: Synthetic oligonucleotide
  Antisense strand to SEQ ID NO: 1073634
acacagaagagugauuuca

SEQ ID NO: 1073636 - RNA, 19 nt, Artificial Sequence
  Description of Artificial Sequence: Synthetic oligonucleotide
  Sense strand starting at position 604 of SEQ ID NO: 915356
acugguuaaucagcuuaau

SEQ ID NO: 1073637 - RNA, 19 nt, Artificial Sequence
  Description of Artificial Sequence: Synthetic oligonucleotide
  Antisense strand to SEQ ID NO: 1073636
auuaagcugauuaaccagu

SEQ ID NO: 1073638 - RNA, 19 nt, Artificial Sequence
  Description of Artificial Sequence: Synthetic oligonucleotide
  Sense strand starting at position 663 of SEQ ID NO: 915356
uggugaugacagugucaca

SEQ ID NO: 1073639 - RNA, 19 nt, Artificial Sequence
  Description of Artificial Sequence: Synthetic oligonucleotide
  Antisense strand to SEQ ID NO: 1073638
ugugacacugucaucacca

SEQ ID NO: 1073640 - RNA, 19 nt, Artificial Sequence
  Description of Artificial Sequence: Synthetic oligonucleotide
  Sense strand starting at position 707 of SEQ ID NO: 915356
cgaacuuuaguggauccaa

SEQ ID NO: 1073641 - RNA, 19 nt, Artificial Sequence
  Description of Artificial Sequence: Synthetic oligonucleotide
  Antisense strand to SEQ ID NO: 1073640
uuggauccacuaaaguucg

SEQ ID NO: 1073642 - RNA, 19 nt, Artificial Sequence
  Description of Artificial Sequence: Synthetic oligonucleotide
  Sense strand starting at position 889 of SEQ ID NO: 915356
cauucuucuugcuugagga

SEQ ID NO: 1073643 - RNA, 19 nt, Artificial Sequence
  Description of Artificial Sequence: Synthetic oligonucleotide
  Antisense strand to SEQ ID NO: 1073642
uccucaagcaagaagaaug

SEQ ID NO: 1073644 - RNA, 19 nt, Artificial Sequence
  Description of Artificial Sequence: Synthetic oligonucleotide
  Sense strand starting at position 890 of SEQ ID NO: 915356
auucuucuugcuugaggaa

SEQ ID NO: 1073645 - RNA, 19 nt, Artificial Sequence
  Description of Artificial Sequence: Synthetic oligonucleotide
  Antisense strand to SEQ ID NO: 1073644
uuccucaagcaagaagaau

SEQ ID NO: 1073646 - RNA, 19 nt, Artificial Sequence
  Description of Artificial Sequence: Synthetic oligonucleotide
  Sense strand starting at position 1028 of SEQ ID NO: 915356
cuguuugguccacauaaag

SEQ ID NO: 1073647 - RNA, 19 nt, Artificial Sequence
  Description of Artificial Sequence: Synthetic oligonucleotide
  Antisense strand to SEQ ID NO: 1073646
cuuuauguggaccaaacag

SEQ ID NO: 1073648 - RNA, 19 nt, Artificial Sequence
  Description of Artificial Sequence: Synthetic oligonucleotide
  Sense strand starting at position 1132 of SEQ ID NO: 915356
auggacaagccuugucaca

SEQ ID NO: 1073649 - RNA, 19 nt, Artificial Sequence
  Description of Artificial Sequence: Synthetic oligonucleotide
  Antisense strand to SEQ ID NO: 1073648
ugugacaaggcuuguccau

SEQ ID NO: 1073650 - RNA, 19 nt, Artificial Sequence
  Description of Artificial Sequence: Synthetic oligonucleotide
  Sense strand starting at position 1134 of SEQ ID NO: 915356
ggacaagccuugucacaga

SEQ ID NO: 1073651 - RNA, 19 nt, Artificial Sequence
  Description of Artificial Sequence: Synthetic oligonucleotide
  Antisense strand to SEQ ID NO: 1073650
ucugugacaaggcuugucc

SEQ ID NO: 1073652 - RNA, 19 nt, Artificial Sequence
  Description of Artificial Sequence: Synthetic oligonucleotide
  Sense strand starting at position 1269 of SEQ ID NO: 915356
cuaagucacucagcuagaa

SEQ ID NO: 1073653 - RNA, 19 nt, Artificial Sequence
  Description of Artificial Sequence: Synthetic oligonucleotide
  Antisense strand to SEQ ID NO: 1073652
uucuagcugagugacuuag

SEQ ID NO: 1073654 - RNA, 19 nt, Artificial Sequence
  Description of Artificial Sequence: Synthetic oligonucleotide
  Sense strand starting at position 2304 of SEQ ID NO: 915356
ggaggaaacaccugucauc

SEQ ID NO: 1073655 - RNA, 19 nt, Artificial Sequence
  Description of Artificial Sequence: Synthetic oligonucleotide
  Antisense strand to SEQ ID NO: 1073654
gaugacagguguuuccucc

SEQ ID NO: 1073656 - RNA, 19 nt, Artificial Sequence
  Description of Artificial Sequence: Synthetic oligonucleotide
  Sense strand starting at position 2607 of SEQ ID NO: 915356
acaggaagcuucuuuaagu

SEQ ID NO: 1073657 - RNA, 19 nt, Artificial Sequence
  Description of Artificial Sequence: Synthetic oligonucleotide
  Antisense strand to SEQ ID NO: 1073656
acuuaaagaagcuuccugu

SEQ ID NO: 1073658 - RNA, 19 nt, Artificial Sequence
  Description of Artificial Sequence: Synthetic oligonucleotide
  Sense strand starting at position 2608 of SEQ ID NO: 915356
caggaagcuucuuuaagua

SEQ ID NO: 1073659 - RNA, 19 nt, Artificial Sequence
  Description of Artificial Sequence: Synthetic oligonucleotide
  Antisense strand to SEQ ID NO: 1073658
uacuuaaagaagcuuccug

SEQ ID NO: 1073660 - RNA, 19 nt, Artificial Sequence
  Description of Artificial Sequence: Synthetic oligonucleotide
  Sense strand starting at position 2621 of SEQ ID NO: 915356
uaaguaagucaugggcuca

SEQ ID NO: 1073661 - RNA, 19 nt, Artificial Sequence
  Description of Artificial Sequence: Synthetic oligonucleotide
  Antisense strand to SEQ ID NO: 1073660
ugagcccaugacuuacuua

SEQ ID NO: 1073662 - RNA, 19 nt, Artificial Sequence
  Description of Artificial Sequence: Synthetic oligonucleotide
  Sense strand starting at position 2639 of SEQ ID NO: 915356
accaucuggaaguguagau

SEQ ID NO: 1073663 - RNA, 19 nt, Artificial Sequence
  Description of Artificial Sequence: Synthetic oligonucleotide
  Antisense strand to SEQ ID NO: 1073662
aucuacacuuccagauggu

SEQ ID NO: 1073664 - RNA, 19 nt, Artificial Sequence
  Description of Artificial Sequence: Synthetic oligonucleotide
  Sense strand starting at position 2840 of SEQ ID NO: 915356
ccuagaccugaucaugcua

SEQ ID NO: 1073665 - RNA, 19 nt, Artificial Sequence
  Description of Artificial Sequence: Synthetic oligonucleotide
  Antisense strand to SEQ ID NO: 1073664
uagcaugaucaggucuagg

SEQ ID NO: 1073666 - RNA, 19 nt, Artificial Sequence
  Description of Artificial Sequence: Synthetic oligonucleotide
  Sense strand starting at position 3077 of SEQ ID NO: 915356
agagaauacuuguucgucu

SEQ ID NO: 1073667 - RNA, 19 nt, Artificial Sequence
  Description of Artificial Sequence: Synthetic oligonucleotide
  Antisense strand to SEQ ID NO: 1073666
agacgaacaaguauucucu

SEQ ID NO: 1073668 - RNA, 19 nt, Artificial Sequence
  Description of Artificial Sequence: Synthetic oligonucleotide
  Sense strand starting at position 3119 of SEQ ID NO: 915356
ucauuaugugauggugaau

SEQ ID NO: 1073669 - RNA, 19 nt, Artificial Sequence
  Description of Artificial Sequence: Synthetic oligonucleotide
  Antisense strand to SEQ ID NO: 1073668
auucaccaucacauaauga

SEQ ID NO: 1073670 - RNA, 19 nt, Artificial Sequence
  Description of Artificial Sequence: Synthetic oligonucleotide
  Sense strand starting at position 3122 of SEQ ID NO: 915356
uuaugugauggugaauugu

SEQ ID NO: 1073671 - RNA, 19 nt, Artificial Sequence
  Description of Artificial Sequence: Synthetic oligonucleotide
  Antisense strand to SEQ ID NO: 1073670
acaauucaccaucacauaa

SEQ ID NO: 1073672 - RNA, 19 nt, Artificial Sequence
  Description of Artificial Sequence: Synthetic oligonucleotide
  Sense strand starting at position 3128 of SEQ ID NO: 915356
gauggugaauugucacaug

SEQ ID NO: 1073673 - RNA, 19 nt, Artificial Sequence
  Description of Artificial Sequence: Synthetic oligonucleotide
  Antisense strand to SEQ ID NO: 1073672
caugugacaauucaccauc

SEQ ID NO: 1073674 - RNA, 19 nt, Artificial Sequence
  Description of Artificial Sequence: Synthetic oligonucleotide
  Sense strand starting at position 3139 of SEQ ID NO: 915356
gucacaugacucugacagu

SEQ ID NO: 1073675 - RNA, 19 nt, Artificial Sequence
  Description of Artificial Sequence: Synthetic oligonucleotide
  Antisense strand to SEQ ID NO: 1073674
acugucagagucaugugac

SEQ ID NO: 1073676 - RNA, 19 nt, Artificial Sequence
  Description of Artificial Sequence: Synthetic oligonucleotide
  Sense strand starting at position 3149 of SEQ ID NO: 915356
ucugacaguuucucaagga

SEQ ID NO: 1073677 - RNA, 19 nt, Artificial Sequence
  Description of Artificial Sequence: Synthetic oligonucleotide
  Antisense strand to SEQ ID NO: 1073676
uccuugagaaacugucaga

SEQ ID NO: 1073678 - RNA, 19 nt, Artificial Sequence
  Description of Artificial Sequence: Synthetic oligonucleotide
  Sense strand starting at position 3153 of SEQ ID NO: 915356
acaguuucucaaggagguu

SEQ ID NO: 1073679 - RNA, 19 nt, Artificial Sequence
  Description of Artificial Sequence: Synthetic oligonucleotide
  Antisense strand to SEQ ID NO: 1073678
aaccuccuugagaaacugu

SEQ ID NO: 1073680 - RNA, 19 nt, Artificial Sequence
  Description of Artificial Sequence: Synthetic oligonucleotide
  Sense strand starting at position 3538 of SEQ ID NO: 915356
agacguggguucccaugaa

SEQ ID NO: 1073681 - RNA, 19 nt, Artificial Sequence
  Description of Artificial Sequence: Synthetic oligonucleotide
  Antisense strand to SEQ ID NO: 1073680
uucaugggaacccacgucu

SEQ ID NO: 1073682 - RNA, 19 nt, Artificial Sequence
  Description of Artificial Sequence: Synthetic oligonucleotide
  Sense strand starting at position 3550 of SEQ ID NO: 915356
ccaugaaggcucugacacu

SEQ ID NO: 1073683 - RNA, 19 nt, Artificial Sequence
  Description of Artificial Sequence: Synthetic oligonucleotide
  Antisense strand to SEQ ID NO: 1073682
agugucagagccuucaugg

SEQ ID NO: 1073684 - RNA, 19 nt, Artificial Sequence
  Description of Artificial Sequence: Synthetic oligonucleotide
  Sense strand starting at position 3744 of SEQ ID NO: 915356
cuccaaguccgugaaauuc

SEQ ID NO: 1073685 - RNA, 19 nt, Artificial Sequence
  Description of Artificial Sequence: Synthetic oligonucleotide
  Antisense strand to SEQ ID NO: 1073684
gaauuucacggacuuggag

SEQ ID NO: 1073686 - RNA, 19 nt, Artificial Sequence
  Description of Artificial Sequence: Synthetic oligonucleotide
  Sense strand starting at position 3797 of SEQ ID NO: 915356
caggccuagcaugaugauu

SEQ ID NO: 1073687 - RNA, 19 nt, Artificial Sequence
  Description of Artificial Sequence: Synthetic oligonucleotide
  Antisense strand to SEQ ID NO: 1073686
aaucaucaugcuaggccug

SEQ ID NO: 1073688 - RNA, 19 nt, Artificial Sequence
  Description of Artificial Sequence: Synthetic oligonucleotide
  Sense strand starting at position 3908 of SEQ ID NO: 915356
caaggaaacgucuaccugu

SEQ ID NO: 1073689 - RNA, 19 nt, Artificial Sequence
  Description of Artificial Sequence: Synthetic oligonucleotide
  Antisense strand to SEQ ID NO: 1073688
acagguagacguuuccuug

SEQ ID NO: 1073690 - RNA, 19 nt, Artificial Sequence
  Description of Artificial Sequence: Synthetic oligonucleotide
  Sense strand starting at position 3911 of SEQ ID NO: 915356
ggaaacgucuaccuguauu

SEQ ID NO: 1073691 - RNA, 19 nt, Artificial Sequence
  Description of Artificial Sequence: Synthetic oligonucleotide
  Antisense strand to SEQ ID NO: 1073690
aauacagguagacguuucc

SEQ ID NO: 1073692 - RNA, 19 nt, Artificial Sequence
  Description of Artificial Sequence: Synthetic oligonucleotide
  Sense strand starting at position 3968 of SEQ ID NO: 915356
guccaaugucaccaagcua

SEQ ID NO: 1073693 - RNA, 19 nt, Artificial Sequence
  Description of Artificial Sequence: Synthetic oligonucleotide
  Antisense strand to SEQ ID NO: 1073692
uagcuuggugacauuggac

SEQ ID NO: 1073694 - RNA, 19 nt, Artificial Sequence
  Description of Artificial Sequence: Synthetic oligonucleotide
  Sense strand starting at position 149 of SEQ ID NO: 915357
cugguugguaacugaucaa

SEQ ID NO: 1073695 - RNA, 19 nt, Artificial Sequence
  Description of Artificial Sequence: Synthetic oligonucleotide
  Antisense strand to SEQ ID NO: 1073694
uugaucaguuaccaaccag

SEQ ID NO: 1073696 - RNA, 19 nt, Artificial Sequence
  Description of Artificial Sequence: Synthetic oligonucleotide
  Sense strand starting at position 152 of SEQ ID NO: 915357
guugguaacugaucaauug

SEQ ID NO: 1073697 - RNA, 19 nt, Artificial Sequence
  Description of Artificial Sequence: Synthetic oligonucleotide
  Antisense strand to SEQ ID NO: 1073696
caauugaucaguuaccaac

SEQ ID NO: 1073698 - RNA, 19 nt, Artificial Sequence
  Description of Artificial Sequence: Synthetic oligonucleotide
  Sense strand starting at position 362 of SEQ ID NO: 915357
agagaaacuucuucuugcu

SEQ ID NO: 1073699 - RNA, 19 nt, Artificial Sequence
  Description of Artificial Sequence: Synthetic oligonucleotide
  Antisense strand to SEQ ID NO: 1073698
agcaagaagaaguuucucu

SEQ ID NO: 1073700 - RNA, 19 nt, Artificial Sequence
  Description of Artificial Sequence: Synthetic oligonucleotide
  Sense strand starting at position 691 of SEQ ID NO: 915357
uguuucuucugggugagga

SEQ ID NO: 1073701 - RNA, 19 nt, Artificial Sequence
  Description of Artificial Sequence: Synthetic oligonucleotide
  Antisense strand to SEQ ID NO: 1073700
uccucacccagaagaaaca

SEQ ID NO: 1073702 - RNA, 19 nt, Artificial Sequence
  Description of Artificial Sequence: Synthetic oligonucleotide
  Sense strand starting at position 692 of SEQ ID NO: 915357
guuucuucugggugaggaa

SEQ ID NO: 1073703 - RNA, 19 nt, Artificial Sequence
  Description of Artificial Sequence: Synthetic oligonucleotide
  Antisense strand to SEQ ID NO: 1073702
uuccucacccagaagaaac

SEQ ID NO: 1073704 - RNA, 19 nt, Artificial Sequence
  Description of Artificial Sequence: Synthetic oligonucleotide
  Sense strand starting at position 945 of SEQ ID NO: 915357
gugugcuugugauuuccau

SEQ ID NO: 1073705 - RNA, 19 nt, Artificial Sequence
  Description of Artificial Sequence: Synthetic oligonucleotide
  Antisense strand to SEQ ID NO: 1073704
auggaaaucacaagcacac

SEQ ID NO: 1073706 - RNA, 19 nt, Artificial Sequence
  Description of Artificial Sequence: Synthetic oligonucleotide
  Sense strand starting at position 976 of SEQ ID NO: 915357
auauuauuugcauggccau

SEQ ID NO: 1073707 - RNA, 19 nt, Artificial Sequence
  Description of Artificial Sequence: Synthetic oligonucleotide
  Antisense strand to SEQ ID NO: 1073706
auggccaugcaaauaauau

SEQ ID NO: 1073708 - RNA, 19 nt, Artificial Sequence
  Description of Artificial Sequence: Synthetic oligonucleotide
  Sense strand starting at position 1102 of SEQ ID NO: 915357
aggcccauauuugauaauu

SEQ ID NO: 1073709 - RNA, 19 nt, Artificial Sequence
  Description of Artificial Sequence: Synthetic oligonucleotide
  Antisense strand to SEQ ID NO: 1073708
aauuaucaaauaugggccu

SEQ ID NO: 1073710 - RNA, 19 nt, Artificial Sequence
  Description of Artificial Sequence: Synthetic oligonucleotide
  Sense strand starting at position 1403 of SEQ ID NO: 915357
aacugugcuccaugcugaa

SEQ ID NO: 1073711 - RNA, 19 nt, Artificial Sequence
  Description of Artificial Sequence: Synthetic oligonucleotide
  Antisense strand to SEQ ID NO: 1073710
uucagcauggagcacaguu

SEQ ID NO: 1073712 - RNA, 19 nt, Artificial Sequence
  Description of Artificial Sequence: Synthetic oligonucleotide
  Sense strand starting at position 1407 of SEQ ID NO: 915357
gugcuccaugcugaacaua

SEQ ID NO: 1073713 - RNA, 19 nt, Artificial Sequence
  Description of Artificial Sequence: Synthetic oligonucleotide
  Antisense strand to SEQ ID NO: 1073712
uauguucagcauggagcac

SEQ ID NO: 1073714 - RNA, 19 nt, Artificial Sequence
  Description of Artificial Sequence: Synthetic oligonucleotide
  Sense strand starting at position 1477 of SEQ ID NO: 915357
cccugcguuacagaugaga

SEQ ID NO: 1073715 - RNA, 19 nt, Artificial Sequence
  Description of Artificial Sequence: Synthetic oligonucleotide
  Antisense strand to SEQ ID NO: 1073714
ucucaucuguaacgcaggg

SEQ ID NO: 1073716 - RNA, 19 nt, Artificial Sequence
  Description of Artificial Sequence: Synthetic oligonucleotide
  Sense strand starting at position 1479 of SEQ ID NO: 915357
cugcguuacagaugagaaa

SEQ ID NO: 1073717 - RNA, 19 nt, Artificial Sequence
  Description of Artificial Sequence: Synthetic oligonucleotide
  Antisense strand to SEQ ID NO: 1073716
uuucucaucuguaacgcag

SEQ ID NO: 1073718 - RNA, 19 nt, Artificial Sequence
  Description of Artificial Sequence: Synthetic oligonucleotide
  Sense strand starting at position 1529 of SEQ ID NO: 915357
agacuacagaguugguauu

SEQ ID NO: 1073719 - RNA, 19 nt, Artificial Sequence
  Description of Artificial Sequence: Synthetic oligonucleotide
  Antisense strand to SEQ ID NO: 1073718
aauaccaacucuguagucu

SEQ ID NO: 1073720 - RNA, 19 nt, Artificial Sequence
  Description of Artificial Sequence: Synthetic oligonucleotide
  Sense strand starting at position 1727 of SEQ ID NO: 915357
acauauggcucagcagaga

SEQ ID NO: 1073721 - RNA, 19 nt, Artificial Sequence
  Description of Artificial Sequence: Synthetic oligonucleotide
  Antisense strand to SEQ ID NO: 1073720
ucucugcugagccauaugu

SEQ ID NO: 1073722 - RNA, 19 nt, Artificial Sequence
  Description of Artificial Sequence: Synthetic oligonucleotide
  Sense strand starting at position 1837 of SEQ ID NO: 915357
gggaauggugagcaaucuu

SEQ ID NO: 1073723 - RNA, 19 nt, Artificial Sequence
  Description of Artificial Sequence: Synthetic oligonucleotide
  Antisense strand to SEQ ID NO: 1073722
aagauugcucaccauuccc

SEQ ID NO: 1073724 - RNA, 19 nt, Artificial Sequence
  Description of Artificial Sequence: Synthetic oligonucleotide
  Sense strand starting at position 1844 of SEQ ID NO: 915357
gugagcaaucuuuauuccu

SEQ ID NO: 1073725 - RNA, 19 nt, Artificial Sequence
  Description of Artificial Sequence: Synthetic oligonucleotide
  Antisense strand to SEQ ID NO: 1073724
aggaauaaagauugcucac

SEQ ID NO: 1073726 - RNA, 19 nt, Artificial Sequence
  Description of Artificial Sequence: Synthetic oligonucleotide
  Sense strand starting at position 1868 of SEQ ID NO: 915357
cucagacuugcucacugau

SEQ ID NO: 1073727 - RNA, 19 nt, Artificial Sequence
  Description of Artificial Sequence: Synthetic oligonucleotide
  Antisense strand to SEQ ID NO: 1073726
aucagugagcaagucugag

SEQ ID NO: 1073728 - RNA, 19 nt, Artificial Sequence
  Description of Artificial Sequence: Synthetic oligonucleotide
  Sense strand starting at position 1871 of SEQ ID NO: 915357
agacuugcucacugaucau

SEQ ID NO: 1073729 - RNA, 19 nt, Artificial Sequence
  Description of Artificial Sequence: Synthetic oligonucleotide
  Antisense strand to SEQ ID NO: 1073728
augaucagugagcaagucu

SEQ ID NO: 1073730 - RNA, 19 nt, Artificial Sequence
  Description of Artificial Sequence: Synthetic oligonucleotide
  Sense strand starting at position 1891 of SEQ ID NO: 915357
ucaguuagaugagcuagaa

SEQ ID NO: 1073731 - RNA, 19 nt, Artificial Sequence
  Description of Artificial Sequence: Synthetic oligonucleotide
  Antisense strand to SEQ ID NO: 1073730
uucuagcucaucuaacuga

SEQ ID NO: 1073732 - RNA, 19 nt, Artificial Sequence
  Description of Artificial Sequence: Synthetic oligonucleotide
  Sense strand starting at position 2046 of SEQ ID NO: 915357
cccuguuuagcuuaggaga

SEQ ID NO: 1073733 - RNA, 19 nt, Artificial Sequence
  Description of Artificial Sequence: Synthetic oligonucleotide
  Antisense strand to SEQ ID NO: 1073732
ucuccuaagcuaaacaggg

SEQ ID NO: 1073734 - RNA, 19 nt, Artificial Sequence
  Description of Artificial Sequence: Synthetic oligonucleotide
  Sense strand starting at position 2163 of SEQ ID NO: 915357
ugugccuuuggacaucaaa

SEQ ID NO: 1073735 - RNA, 19 nt, Artificial Sequence
  Description of Artificial Sequence: Synthetic oligonucleotide
  Antisense strand to SEQ ID NO: 1073734
uuugauguccaaaggcaca

SEQ ID NO: 1073736 - RNA, 19 nt, Artificial Sequence
  Description of Artificial Sequence: Synthetic oligonucleotide
  Sense strand starting at position 2582 of SEQ ID NO: 915357
ggaccuucuuggcuguaga

SEQ ID NO: 1073737 - RNA, 19 nt, Artificial Sequence
  Description of Artificial Sequence: Synthetic oligonucleotide
  Antisense strand to SEQ ID NO: 1073736
ucuacagccaagaaggucc

SEQ ID NO: 1073738 - RNA, 19 nt, Artificial Sequence
  Description of Artificial Sequence: Synthetic oligonucleotide
  Sense strand starting at position 2633 of SEQ ID NO: 915357
gcuggauugaguugucagg

SEQ ID NO: 1073739 - RNA, 19 nt, Artificial Sequence
  Description of Artificial Sequence: Synthetic oligonucleotide
  Antisense strand to SEQ ID NO: 1073738
ccugacaacucaauccagc

SEQ ID NO: 1073740 - RNA, 19 nt, Artificial Sequence
  Description of Artificial Sequence: Synthetic oligonucleotide
  Sense strand starting at position 2642 of SEQ ID NO: 915357
aguugucagggcuaggaga

SEQ ID NO: 1073741 - RNA, 19 nt, Artificial Sequence
  Description of Artificial Sequence: Synthetic oligonucleotide
  Antisense strand to SEQ ID NO: 1073740
ucuccuagcccugacaacu

SEQ ID NO: 1073742 - RNA, 19 nt, Artificial Sequence
  Description of Artificial Sequence: Synthetic oligonucleotide
  Sense strand starting at position 2779 of SEQ ID NO: 915357
uugccucagggugaucaaa

SEQ ID NO: 1073743 - RNA, 19 nt, Artificial Sequence
  Description of Artificial Sequence: Synthetic oligonucleotide
  Antisense strand to SEQ ID NO: 1073742
uuugaucacccugaggcaa

SEQ ID NO: 1073744 - RNA, 19 nt, Artificial Sequence
  Description of Artificial Sequence: Synthetic oligonucleotide
  Sense strand starting at position 2781 of SEQ ID NO: 915357
gccucagggugaucaaaga

SEQ ID NO: 1073745 - RNA, 19 nt, Artificial Sequence
  Description of Artificial Sequence: Synthetic oligonucleotide
  Antisense strand to SEQ ID NO: 1073744
ucuuugaucacccugaggc

SEQ ID NO: 1073746 - RNA, 19 nt, Artificial Sequence
  Description of Artificial Sequence: Synthetic oligonucleotide
  Sense strand starting at position 2881 of SEQ ID NO: 915357
aucauaugucaagguacau

SEQ ID NO: 1073747 - RNA, 19 nt, Artificial Sequence
  Description of Artificial Sequence: Synthetic oligonucleotide
  Antisense strand to SEQ ID NO: 1073746
auguaccuugacauaugau

SEQ ID NO: 1073748 - RNA, 19 nt, Artificial Sequence
  Description of Artificial Sequence: Synthetic oligonucleotide
  Sense strand starting at position 2959 of SEQ ID NO: 915357
agugaaaggugucuuggga

SEQ ID NO: 1073749 - RNA, 19 nt, Artificial Sequence
  Description of Artificial Sequence: Synthetic oligonucleotide
  Antisense strand to SEQ ID NO: 1073748
ucccaagacaccuuucacu

SEQ ID NO: 1073750 - RNA, 19 nt, Artificial Sequence
  Description of Artificial Sequence: Synthetic oligonucleotide
  Sense strand starting at position 2982 of SEQ ID NO: 915357
ggauaagguaacugugacu

SEQ ID NO: 1073751 - RNA, 19 nt, Artificial Sequence
  Description of Artificial Sequence: Synthetic oligonucleotide
  Antisense strand to SEQ ID NO: 1073750
agucacaguuaccuuaucc

SEQ ID NO: 1073752 - RNA, 19 nt, Artificial Sequence
  Description of Artificial Sequence: Synthetic oligonucleotide
  Sense strand starting at position 3040 of SEQ ID NO: 915357
gagcuauucucugcucuga

SEQ ID NO: 1073753 - RNA, 19 nt, Artificial Sequence
  Description of Artificial Sequence: Synthetic oligonucleotide
  Antisense strand to SEQ ID NO: 1073752
ucagagcagagaauagcuc

SEQ ID NO: 1073754 - RNA, 19 nt, Artificial Sequence
  Description of Artificial Sequence: Synthetic oligonucleotide
  Sense strand starting at position 3042 of SEQ ID NO: 915357
gcuauucucugcucugaug

SEQ ID NO: 1073755 - RNA, 19 nt, Artificial Sequence
  Description of Artificial Sequence: Synthetic oligonucleotide
  Antisense strand to SEQ ID NO: 1073754
caucagagcagagaauagc

SEQ ID NO: 1073756 - RNA, 19 nt, Artificial Sequence
  Description of Artificial Sequence: Synthetic oligonucleotide
  Sense strand starting at position 3050 of SEQ ID NO: 915357
cugcucugaugucucuaau

SEQ ID NO: 1073757 - RNA, 19 nt, Artificial Sequence
  Description of Artificial Sequence: Synthetic oligonucleotide
  Antisense strand to SEQ ID NO: 1073756
auuagagacaucagagcag

SEQ ID NO: 1073758 - RNA, 19 nt, Artificial Sequence
  Description of Artificial Sequence: Synthetic oligonucleotide
  Sense strand starting at position 3053 of SEQ ID NO: 915357
cucugaugucucuaaugcu

SEQ ID NO: 1073759 - RNA, 19 nt, Artificial Sequence
  Description of Artificial Sequence: Synthetic oligonucleotide
  Antisense strand to SEQ ID NO: 1073758
agcauuagagacaucagag

SEQ ID NO: 1073760 - RNA, 19 nt, Artificial Sequence
  Description of Artificial Sequence: Synthetic oligonucleotide
  Sense strand starting at position 3083 of SEQ ID NO: 915357
gcccuugcccaagagacau

SEQ ID NO: 1073761 - RNA, 19 nt, Artificial Sequence
  Description of Artificial Sequence: Synthetic oligonucleotide
  Antisense strand to SEQ ID NO: 1073760
augucucuugggcaagggc

SEQ ID NO: 1073762 - RNA, 19 nt, Artificial Sequence
  Description of Artificial Sequence: Synthetic oligonucleotide
  Sense strand starting at position 3272 of SEQ ID NO: 915357
ggaccugagcuggaucuuu

SEQ ID NO: 1073763 - RNA, 19 nt, Artificial Sequence
  Description of Artificial Sequence: Synthetic oligonucleotide
  Antisense strand to SEQ ID NO: 1073762
aaagauccagcucaggucc

SEQ ID NO: 1073764 - RNA, 19 nt, Artificial Sequence
  Description of Artificial Sequence: Synthetic oligonucleotide
  Sense strand starting at position 3666 of SEQ ID NO: 915357
guuguuucugcucagucaa

SEQ ID NO: 1073765 - RNA, 19 nt, Artificial Sequence
  Description of Artificial Sequence: Synthetic oligonucleotide
  Antisense strand to SEQ ID NO: 1073764
uugacugagcagaaacaac

SEQ ID NO: 1073766 - RNA, 19 nt, Artificial Sequence
  Description of Artificial Sequence: Synthetic oligonucleotide
  Sense strand starting at position 3729 of SEQ ID NO: 915357
gcuggacaucucugccagu

SEQ ID NO: 1073767 - RNA, 19 nt, Artificial Sequence
  Description of Artificial Sequence: Synthetic oligonucleotide
  Antisense strand to SEQ ID NO: 1073766
acuggcagagauguccagc

SEQ ID NO: 1073768 - RNA, 19 nt, Artificial Sequence
  Description of Artificial Sequence: Synthetic oligonucleotide
  Sense strand starting at position 3803 of SEQ ID NO: 915357
gugggaucagcguauagac

SEQ ID NO: 1073769 - RNA, 19 nt, Artificial Sequence
  Description of Artificial Sequence: Synthetic oligonucleotide
  Antisense strand to SEQ ID NO: 1073768
gucuauacgcugaucccac

SEQ ID NO: 1073770 - RNA, 19 nt, Artificial Sequence
  Description of Artificial Sequence: Synthetic oligonucleotide
  Sense strand starting at position 3805 of SEQ ID NO: 915357
gggaucagcguauagacaa

SEQ ID NO: 1073771 - RNA, 19 nt, Artificial Sequence
  Description of Artificial Sequence: Synthetic oligonucleotide
  Antisense strand to SEQ ID NO: 1073770
uugucuauacgcugauccc

SEQ ID NO: 1073772 - RNA, 19 nt, Artificial Sequence
  Description of Artificial Sequence: Synthetic oligonucleotide
  Sense strand starting at position 3886 of SEQ ID NO: 915357
ccuggaaucugcccugacu

SEQ ID NO: 1073773 - RNA, 19 nt, Artificial Sequence
  Description of Artificial Sequence: Synthetic oligonucleotide
  Antisense strand to SEQ ID NO: 1073772
agucagggcagauuccagg

SEQ ID NO: 1073774 - RNA, 19 nt, Artificial Sequence
  Description of Artificial Sequence: Synthetic oligonucleotide
  Sense strand starting at position 219 of SEQ ID NO: 915358
ggagaaggugucugggcuu

SEQ ID NO: 1073775 - RNA, 19 nt, Artificial Sequence
  Description of Artificial Sequence: Synthetic oligonucleotide
  Antisense strand to SEQ ID NO: 1073774
aagcccagacaccuucucc

SEQ ID NO: 1073776 - RNA, 19 nt, Artificial Sequence
  Description of Artificial Sequence: Synthetic oligonucleotide
  Sense strand starting at position 439 of SEQ ID NO: 915358
ccaggaagucugugaucuu

SEQ ID NO: 1073777 - RNA, 19 nt, Artificial Sequence
  Description of Artificial Sequence: Synthetic oligonucleotide
  Antisense strand to SEQ ID NO: 1073776
aagaucacagacuuccugg

SEQ ID NO: 1073778 - RNA, 19 nt, Artificial Sequence
  Description of Artificial Sequence: Synthetic oligonucleotide
  Sense strand starting at position 442 of SEQ ID NO: 915358
ggaagucugugaucuuggu

SEQ ID NO: 1073779 - RNA, 19 nt, Artificial Sequence
  Description of Artificial Sequence: Synthetic oligonucleotide
  Antisense strand to SEQ ID NO: 1073778
accaagaucacagacuucc

SEQ ID NO: 1073780 - RNA, 19 nt, Artificial Sequence
  Description of Artificial Sequence: Synthetic oligonucleotide
  Sense strand starting at position 499 of SEQ ID NO: 915358
ugaagagacuugcucccau

SEQ ID NO: 1073781 - RNA, 19 nt, Artificial Sequence
  Description of Artificial Sequence: Synthetic oligonucleotide
  Antisense strand to SEQ ID NO: 1073780
augggagcaagucucuuca

SEQ ID NO: 1073782 - RNA, 19 nt, Artificial Sequence
  Description of Artificial Sequence: Synthetic oligonucleotide
  Sense strand starting at position 948 of SEQ ID NO: 915358
cuuugagaguaaguugcua

SEQ ID NO: 1073783 - RNA, 19 nt, Artificial Sequence
  Description of Artificial Sequence: Synthetic oligonucleotide
  Antisense strand to SEQ ID NO: 1073782
uagcaacuuacucucaaag

SEQ ID NO: 1073784 - RNA, 19 nt, Artificial Sequence
  Description of Artificial Sequence: Synthetic oligonucleotide
  Sense strand starting at position 952 of SEQ ID NO: 915358
gagaguaaguugcuagguu

SEQ ID NO: 1073785 - RNA, 19 nt, Artificial Sequence
  Description of Artificial Sequence: Synthetic oligonucleotide
  Antisense strand to SEQ ID NO: 1073784
aaccuagcaacuuacucuc

SEQ ID NO: 1073786 - RNA, 19 nt, Artificial Sequence
  Description of Artificial Sequence: Synthetic oligonucleotide
  Sense strand starting at position 956 of SEQ ID NO: 915358
guaaguugcuagguuagaa

SEQ ID NO: 1073787 - RNA, 19 nt, Artificial Sequence
  Description of Artificial Sequence: Synthetic oligonucleotide
  Antisense strand to SEQ ID NO: 1073786
uucuaaccuagcaacuuac

SEQ ID NO: 1073788 - RNA, 19 nt, Artificial Sequence
  Description of Artificial Sequence: Synthetic oligonucleotide
  Sense strand starting at position 968 of SEQ ID NO: 915358
guuagaaauggccagguca

SEQ ID NO: 1073789 - RNA, 19 nt, Artificial Sequence
  Description of Artificial Sequence: Synthetic oligonucleotide
  Antisense strand to SEQ ID NO: 1073788
ugaccuggccauuucuaac

SEQ ID NO: 1073790 - RNA, 19 nt, Artificial Sequence
  Description of Artificial Sequence: Synthetic oligonucleotide
  Sense strand starting at position 1262 of SEQ ID NO: 915358
gaggaugugucugucacca

SEQ ID NO: 1073791 - RNA, 19 nt, Artificial Sequence
  Description of Artificial Sequence: Synthetic oligonucleotide
  Antisense strand to SEQ ID NO: 1073790
uggugacagacacauccuc

SEQ ID NO: 1073792 - RNA, 19 nt, Artificial Sequence
  Description of Artificial Sequence: Synthetic oligonucleotide
  Sense strand starting at position 1505 of SEQ ID NO: 915358
cugcaaccuccugagacua

SEQ ID NO: 1073793 - RNA, 19 nt, Artificial Sequence
  Description of Artificial Sequence: Synthetic oligonucleotide
  Antisense strand to SEQ ID NO: 1073792
uagucucaggagguugcag

SEQ ID NO: 1073794 - RNA, 19 nt, Artificial Sequence
  Description of Artificial Sequence: Synthetic oligonucleotide
  Sense strand starting at position 1624 of SEQ ID NO: 915358
caggguuucuuaucccaga

SEQ ID NO: 1073795 - RNA, 19 nt, Artificial Sequence
  Description of Artificial Sequence: Synthetic oligonucleotide
  Antisense strand to SEQ ID NO: 1073794
ucugggauaagaaacccug

SEQ ID NO: 1073796 - RNA, 19 nt, Artificial Sequence
  Description of Artificial Sequence: Synthetic oligonucleotide
  Sense strand starting at position 1625 of SEQ ID NO: 915358
aggguuucuuaucccagau

SEQ ID NO: 1073797 - RNA, 19 nt, Artificial Sequence
  Description of Artificial Sequence: Synthetic oligonucleotide
  Antisense strand to SEQ ID NO: 1073796
aucugggauaagaaacccu

SEQ ID NO: 1073798 - RNA, 19 nt, Artificial Sequence
  Description of Artificial Sequence: Synthetic oligonucleotide
  Sense strand starting at position 1783 of SEQ ID NO: 915358
cgcagugacaccugucaga

SEQ ID NO: 1073799 - RNA, 19 nt, Artificial Sequence
  Description of Artificial Sequence: Synthetic oligonucleotide
  Antisense strand to SEQ ID NO: 1073798
ucugacaggugucacugcg

SEQ ID NO: 1073800 - RNA, 19 nt, Artificial Sequence
  Description of Artificial Sequence: Synthetic oligonucleotide
  Sense strand starting at position 2141 of SEQ ID NO: 915358
agcagugauuugcauacau

SEQ ID NO: 1073801 - RNA, 19 nt, Artificial Sequence
  Description of Artificial Sequence: Synthetic oligonucleotide
  Antisense strand to SEQ ID NO: 1073800
auguaugcaaaucacugcu

SEQ ID NO: 1073802 - RNA, 19 nt, Artificial Sequence
  Description of Artificial Sequence: Synthetic oligonucleotide
  Sense strand starting at position 2350 of SEQ ID NO: 915358
uggacagaucgcgaagugu

SEQ ID NO: 1073803 - RNA, 19 nt, Artificial Sequence
  Description of Artificial Sequence: Synthetic oligonucleotide
  Antisense strand to SEQ ID NO: 1073802
acacuucgcgaucugucca

SEQ ID NO: 1073804 - RNA, 19 nt, Artificial Sequence
  Description of Artificial Sequence: Synthetic oligonucleotide
  Sense strand starting at position 2385 of SEQ ID NO: 915358
uggaguguuuggagaaguc

SEQ ID NO: 1073805 - RNA, 19 nt, Artificial Sequence
  Description of Artificial Sequence: Synthetic oligonucleotide
  Antisense strand to SEQ ID NO: 1073804
gacuucuccaaacacucca

SEQ ID NO: 1073806 - RNA, 19 nt, Artificial Sequence
  Description of Artificial Sequence: Synthetic oligonucleotide
  Sense strand starting at position 2594 of SEQ ID NO: 915358
acagcauugugggauuuag

SEQ ID NO: 1073807 - RNA, 19 nt, Artificial Sequence
  Description of Artificial Sequence: Synthetic oligonucleotide
  Antisense strand to SEQ ID NO: 1073806
cuaaaucccacaaugcugu

SEQ ID NO: 1073808 - RNA, 19 nt, Artificial Sequence
  Description of Artificial Sequence: Synthetic oligonucleotide
  Sense strand starting at position 2622 of SEQ ID NO: 915358
aguuuauuauuagcagagu

SEQ ID NO: 1073809 - RNA, 19 nt, Artificial Sequence
  Description of Artificial Sequence: Synthetic oligonucleotide
  Antisense strand to SEQ ID NO: 1073808
acucugcuaauaauaaacu

SEQ ID NO: 1073810 - RNA, 19 nt, Artificial Sequence
  Description of Artificial Sequence: Synthetic oligonucleotide
  Sense strand starting at position 2625 of SEQ ID NO: 915358
uuauuauuagcagaguuuc

SEQ ID NO: 1073811 - RNA, 19 nt, Artificial Sequence
  Description of Artificial Sequence: Synthetic oligonucleotide
  Antisense strand to SEQ ID NO: 1073810
gaaacucugcuaauaauaa

SEQ ID NO: 1073812 - RNA, 19 nt, Artificial Sequence
  Description of Artificial Sequence: Synthetic oligonucleotide
  Sense strand starting at position 2710 of SEQ ID NO: 915358
ggcucuacgagaugaugga

SEQ ID NO: 1073813 - RNA, 19 nt, Artificial Sequence
  Description of Artificial Sequence: Synthetic oligonucleotide
  Antisense strand to SEQ ID NO: 1073812
uccaucaucucguagagcc

SEQ ID NO: 1073814 - RNA, 19 nt, Artificial Sequence
  Description of Artificial Sequence: Synthetic oligonucleotide
  Sense strand starting at position 2711 of SEQ ID NO: 915358
gcucuacgagaugauggau

SEQ ID NO: 1073815 - RNA, 19 nt, Artificial Sequence
  Description of Artificial Sequence: Synthetic oligonucleotide
  Antisense strand to SEQ ID NO: 1073814
auccaucaucucguagagc

SEQ ID NO: 1073816 - RNA, 19 nt, Artificial Sequence
  Description of Artificial Sequence: Synthetic oligonucleotide
  Sense strand starting at position 2717 of SEQ ID NO: 915358
cgagaugauggauguggaa

SEQ ID NO: 1073817 - RNA, 19 nt, Artificial Sequence
  Description of Artificial Sequence: Synthetic oligonucleotide
  Antisense strand to SEQ ID NO: 1073816
uuccacauccaucaucucg

SEQ ID NO: 1073818 - RNA, 19 nt, Artificial Sequence
  Description of Artificial Sequence: Synthetic oligonucleotide
  Sense strand starting at position 2719 of SEQ ID NO: 915358
agaugauggauguggaagu

SEQ ID NO: 1073819 - RNA, 19 nt, Artificial Sequence
  Description of Artificial Sequence: Synthetic oligonucleotide
  Antisense strand to SEQ ID NO: 1073818
acuuccacauccaucaucu

SEQ ID NO: 1073820 - RNA, 19 nt, Artificial Sequence
  Description of Artificial Sequence: Synthetic oligonucleotide
  Sense strand starting at position 2914 of SEQ ID NO: 915358
cccaguaaguggucuguca

SEQ ID NO: 1073821 - RNA, 19 nt, Artificial Sequence
  Description of Artificial Sequence: Synthetic oligonucleotide
  Antisense strand to SEQ ID NO: 1073820
ugacagaccacuuacuggg

SEQ ID NO: 1073822 - RNA, 19 nt, Artificial Sequence
  Description of Artificial Sequence: Synthetic oligonucleotide
  Sense strand starting at position 2957 of SEQ ID NO: 915358
ccagaaagcugugugcaga

SEQ ID NO: 1073823 - RNA, 19 nt, Artificial Sequence
  Description of Artificial Sequence: Synthetic oligonucleotide
  Antisense strand to SEQ ID NO: 1073822
ucugcacacagcuuucugg

SEQ ID NO: 1073824 - RNA, 19 nt, Artificial Sequence
  Description of Artificial Sequence: Synthetic oligonucleotide
  Sense strand starting at position 2991 of SEQ ID NO: 915358
ucgcuuuccuucccagaca

SEQ ID NO: 1073825 - RNA, 19 nt, Artificial Sequence
  Description of Artificial Sequence: Synthetic oligonucleotide
  Antisense strand to SEQ ID NO: 1073824
ugucugggaaggaaagcga

SEQ ID NO: 1073826 - RNA, 19 nt, Artificial Sequence
  Description of Artificial Sequence: Synthetic oligonucleotide
  Sense strand starting at position 3033 of SEQ ID NO: 915358
uccuuagucccaugggcua

SEQ ID NO: 1073827 - RNA, 19 nt, Artificial Sequence
  Description of Artificial Sequence: Synthetic oligonucleotide
  Antisense strand to SEQ ID NO: 1073826
uagcccaugggacuaagga

SEQ ID NO: 1073828 - RNA, 19 nt, Artificial Sequence
  Description of Artificial Sequence: Synthetic oligonucleotide
  Sense strand starting at position 3048 of SEQ ID NO: 915358
gcuacuuucugagcacaga

SEQ ID NO: 1073829 - RNA, 19 nt, Artificial Sequence
  Description of Artificial Sequence: Synthetic oligonucleotide
  Antisense strand to SEQ ID NO: 1073828
ucugugcucagaaaguagc

SEQ ID NO: 1073830 - RNA, 19 nt, Artificial Sequence
  Description of Artificial Sequence: Synthetic oligonucleotide
  Sense strand starting at position 3049 of SEQ ID NO: 915358
cuacuuucugagcacagaa

SEQ ID NO: 1073831 - RNA, 19 nt, Artificial Sequence
  Description of Artificial Sequence: Synthetic oligonucleotide
  Antisense strand to SEQ ID NO: 1073830
uucugugcucagaaaguag

SEQ ID NO: 1073832 - RNA, 19 nt, Artificial Sequence
  Description of Artificial Sequence: Synthetic oligonucleotide
  Sense strand starting at position 3076 of SEQ ID NO: 915358
gggcuuuccugccucuaca

SEQ ID NO: 1073833 - RNA, 19 nt, Artificial Sequence
  Description of Artificial Sequence: Synthetic oligonucleotide
  Antisense strand to SEQ ID NO: 1073832
uguagaggcaggaaagccc

SEQ ID NO: 1073834 - RNA, 19 nt, Artificial Sequence
  Description of Artificial Sequence: Synthetic oligonucleotide
  Sense strand starting at position 3144 of SEQ ID NO: 915358
uccagucaugcccacgaua

SEQ ID NO: 1073835 - RNA, 19 nt, Artificial Sequence
  Description of Artificial Sequence: Synthetic oligonucleotide
  Antisense strand to SEQ ID NO: 1073834
uaucgugggcaugacugga

SEQ ID NO: 1073836 - RNA, 19 nt, Artificial Sequence
  Description of Artificial Sequence: Synthetic oligonucleotide
  Sense strand starting at position 3146 of SEQ ID NO: 915358
cagucaugcccacgauaac

SEQ ID NO: 1073837 - RNA, 19 nt, Artificial Sequence
  Description of Artificial Sequence: Synthetic oligonucleotide
  Antisense strand to SEQ ID NO: 1073836
guuaucgugggcaugacug

SEQ ID NO: 1073838 - RNA, 19 nt, Artificial Sequence
  Description of Artificial Sequence: Synthetic oligonucleotide
  Sense strand starting at position 3147 of SEQ ID NO: 915358
agucaugcccacgauaaca

SEQ ID NO: 1073839 - RNA, 19 nt, Artificial Sequence
  Description of Artificial Sequence: Synthetic oligonucleotide
  Antisense strand to SEQ ID NO: 1073838
uguuaucgugggcaugacu

SEQ ID NO: 1073840 - RNA, 19 nt, Artificial Sequence
  Description of Artificial Sequence: Synthetic oligonucleotide
  Sense strand starting at position 3224 of SEQ ID NO: 915358
ggcaucuuucgugccuuua

SEQ ID NO: 1073841 - RNA, 19 nt, Artificial Sequence
  Description of Artificial Sequence: Synthetic oligonucleotide
  Antisense strand to SEQ ID NO: 1073840
uaaaggcacgaaagaugcc

SEQ ID NO: 1073842 - RNA, 19 nt, Artificial Sequence
  Description of Artificial Sequence: Synthetic oligonucleotide
  Sense strand starting at position 3243 of SEQ ID NO: 915358
guucuuguuuaguccucaa

SEQ ID NO: 1073843 - RNA, 19 nt, Artificial Sequence
  Description of Artificial Sequence: Synthetic oligonucleotide
  Antisense strand to SEQ ID NO: 1073842
uugaggacuaaacaagaac

SEQ ID NO: 1073844 - RNA, 19 nt, Artificial Sequence
  Description of Artificial Sequence: Synthetic oligonucleotide
  Sense strand starting at position 3274 of SEQ ID NO: 915358
guacuaugauuauugccau

SEQ ID NO: 1073845 - RNA, 19 nt, Artificial Sequence
  Description of Artificial Sequence: Synthetic oligonucleotide
  Antisense strand to SEQ ID NO: 1073844
auggcaauaaucauaguac

SEQ ID NO: 1073846 - RNA, 19 nt, Artificial Sequence
  Description of Artificial Sequence: Synthetic oligonucleotide
  Sense strand starting at position 3638 of SEQ ID NO: 915358
gccuaaguuccauguucuu

SEQ ID NO: 1073847 - RNA, 19 nt, Artificial Sequence
  Description of Artificial Sequence: Synthetic oligonucleotide
  Antisense strand to SEQ ID NO: 1073846
aagaacauggaacuuaggc

SEQ ID NO: 1073848 - RNA, 19 nt, Artificial Sequence
  Description of Artificial Sequence: Synthetic oligonucleotide
  Sense strand starting at position 3703 of SEQ ID NO: 915358
cugguugguaacugaucaa

SEQ ID NO: 1073849 - RNA, 19 nt, Artificial Sequence
  Description of Artificial Sequence: Synthetic oligonucleotide
  Antisense strand to SEQ ID NO: 1073848
uugaucaguuaccaaccag

SEQ ID NO: 1073850 - RNA, 19 nt, Artificial Sequence
  Description of Artificial Sequence: Synthetic oligonucleotide
  Sense strand starting at position 3706 of SEQ ID NO: 915358
guugguaacugaucaauug

SEQ ID NO: 1073851 - RNA, 19 nt, Artificial Sequence
  Description of Artificial Sequence: Synthetic oligonucleotide
  Antisense strand to SEQ ID NO: 1073850
caauugaucaguuaccaac

SEQ ID NO: 1073852 - RNA, 19 nt, Artificial Sequence
  Description of Artificial Sequence: Synthetic oligonucleotide
  Sense strand starting at position 3916 of SEQ ID NO: 915358
agagaaacuucuucuugcu

SEQ ID NO: 1073853 - RNA, 19 nt, Artificial Sequence
  Description of Artificial Sequence: Synthetic oligonucleotide
  Antisense strand to SEQ ID NO: 1073852
agcaagaagaaguuucucu

SEQ ID NO: 1073854 - RNA, 19 nt, Artificial Sequence
  Description of Artificial Sequence: Synthetic oligonucleotide
  Sense strand starting at position 102 of SEQ ID NO: 915359
guuuaaucccuaggaacuu

SEQ ID NO: 1073855 - RNA, 19 nt, Artificial Sequence
  Description of Artificial Sequence: Synthetic oligonucleotide
  Antisense strand to SEQ ID NO: 1073854
aaguuccuagggauuaaac

SEQ ID NO: 1073856 - RNA, 19 nt, Artificial Sequence
  Description of Artificial Sequence: Synthetic oligonucleotide
  Sense strand starting at position 111 of SEQ ID NO: 915359
cuaggaacuuuguauuuga

SEQ ID NO: 1073857 - RNA, 19 nt, Artificial Sequence
  Description of Artificial Sequence: Synthetic oligonucleotide
  Antisense strand to SEQ ID NO: 1073856
ucaaauacaaaguuccuag

SEQ ID NO: 1073858 - RNA, 19 nt, Artificial Sequence
  Description of Artificial Sequence: Synthetic oligonucleotide
  Sense strand starting at position 256 of SEQ ID NO: 915359
cacucauaccuguggaagu

SEQ ID NO: 1073859 - RNA, 19 nt, Artificial Sequence
  Description of Artificial Sequence: Synthetic oligonucleotide
  Antisense strand to SEQ ID NO: 1073858
acuuccacagguaugagug

SEQ ID NO: 1073860 - RNA, 19 nt, Artificial Sequence
  Description of Artificial Sequence: Synthetic oligonucleotide
  Sense strand starting at position 626 of SEQ ID NO: 915359
gucucauuaugcucagauc

SEQ ID NO: 1073861 - RNA, 19 nt, Artificial Sequence
  Description of Artificial Sequence: Synthetic oligonucleotide
  Antisense strand to SEQ ID NO: 1073860
gaucugagcauaaugagac

SEQ ID NO: 1073862 - RNA, 19 nt, Artificial Sequence
  Description of Artificial Sequence: Synthetic oligonucleotide
  Sense strand starting at position 647 of SEQ ID NO: 915359
uuaugcuuuguguguaaau

SEQ ID NO: 1073863 - RNA, 19 nt, Artificial Sequence
  Description of Artificial Sequence: Synthetic oligonucleotide
  Antisense strand to SEQ ID NO: 1073862
auuuacacacaaagcauaa

SEQ ID NO: 1073864 - RNA, 19 nt, Artificial Sequence
  Description of Artificial Sequence: Synthetic oligonucleotide
  Sense strand starting at position 648 of SEQ ID NO: 915359
uaugcuuuguguguaaaua

SEQ ID NO: 1073865 - RNA, 19 nt, Artificial Sequence
  Description of Artificial Sequence: Synthetic oligonucleotide
  Antisense strand to SEQ ID NO: 1073864
uauuuacacacaaagcaua

SEQ ID NO: 1073866 - RNA, 19 nt, Artificial Sequence
  Description of Artificial Sequence: Synthetic oligonucleotide
  Sense strand starting at position 649 of SEQ ID NO: 915359
augcuuuguguguaaauaa

SEQ ID NO: 1073867 - RNA, 19 nt, Artificial Sequence
  Description of Artificial Sequence: Synthetic oligonucleotide
  Antisense strand to SEQ ID NO: 1073866
uuauuuacacacaaagcau

SEQ ID NO: 1073868 - RNA, 19 nt, Artificial Sequence
  Description of Artificial Sequence: Synthetic oligonucleotide
  Sense strand starting at position 658 of SEQ ID NO: 915359
guguaaauaagcugggaaa

SEQ ID NO: 1073869 - RNA, 19 nt, Artificial Sequence
  Description of Artificial Sequence: Synthetic oligonucleotide
  Antisense strand to SEQ ID NO: 1073868
uuucccagcuuauuuacac

SEQ ID NO: 1073870 - RNA, 19 nt, Artificial Sequence
  Description of Artificial Sequence: Synthetic oligonucleotide
  Sense strand starting at position 687 of SEQ ID NO: 915359
ggcaaauauuaagugcaaa

SEQ ID NO: 1073871 - RNA, 19 nt, Artificial Sequence
  Description of Artificial Sequence: Synthetic oligonucleotide
  Antisense strand to SEQ ID NO: 1073870
uuugcacuuaauauuugcc

SEQ ID NO: 1073872 - RNA, 19 nt, Artificial Sequence
  Description of Artificial Sequence: Synthetic oligonucleotide
  Sense strand starting at position 836 of SEQ ID NO: 915359
aaacaagugugcuucuguu

SEQ ID NO: 1073873 - RNA, 19 nt, Artificial Sequence
  Description of Artificial Sequence: Synthetic oligonucleotide
  Antisense strand to SEQ ID NO: 1073872
aacagaagcacacuuguuu

SEQ ID NO: 1073874 - RNA, 19 nt, Artificial Sequence
  Description of Artificial Sequence: Synthetic oligonucleotide
  Sense strand starting at position 844 of SEQ ID NO: 915359
gugcuucuguuaccuauuu

SEQ ID NO: 1073875 - RNA, 19 nt, Artificial Sequence
  Description of Artificial Sequence: Synthetic oligonucleotide
  Antisense strand to SEQ ID NO: 1073874
aaauagguaacagaagcac

SEQ ID NO: 1073876 - RNA, 19 nt, Artificial Sequence
  Description of Artificial Sequence: Synthetic oligonucleotide
  Sense strand starting at position 1008 of SEQ ID NO: 915359
gcaggaaugugugcaguca

SEQ ID NO: 1073877 - RNA, 19 nt, Artificial Sequence
  Description of Artificial Sequence: Synthetic oligonucleotide
  Antisense strand to SEQ ID NO: 1073876
ugacugcacacauuccugc

SEQ ID NO: 1073878 - RNA, 19 nt, Artificial Sequence
  Description of Artificial Sequence: Synthetic oligonucleotide
  Sense strand starting at position 1040 of SEQ ID NO: 915359
acugacggcucccugaauu

SEQ ID NO: 1073879 - RNA, 19 nt, Artificial Sequence
  Description of Artificial Sequence: Synthetic oligonucleotide
  Antisense strand to SEQ ID NO: 1073878
aauucagggagccgucagu

SEQ ID NO: 1073880 - RNA, 19 nt, Artificial Sequence
  Description of Artificial Sequence: Synthetic oligonucleotide
  Sense strand starting at position 1052 of SEQ ID NO: 915359
cugaauucuugggcuggau

SEQ ID NO: 1073881 - RNA, 19 nt, Artificial Sequence
  Description of Artificial Sequence: Synthetic oligonucleotide
  Antisense strand to SEQ ID NO: 1073880
auccagcccaagaauucag

SEQ ID NO: 1073882 - RNA, 19 nt, Artificial Sequence
  Description of Artificial Sequence: Synthetic oligonucleotide
  Sense strand starting at position 1086 of SEQ ID NO: 915359
aggaaccggauucguuaaa

SEQ ID NO: 1073883 - RNA, 19 nt, Artificial Sequence
  Description of Artificial Sequence: Synthetic oligonucleotide
  Antisense strand to SEQ ID NO: 1073882
uuuaacgaauccgguuccu

SEQ ID NO: 1073884 - RNA, 19 nt, Artificial Sequence
  Description of Artificial Sequence: Synthetic oligonucleotide
  Sense strand starting at position 1096 of SEQ ID NO: 915359
uucguuaaacgcugguaga

SEQ ID NO: 1073885 - RNA, 19 nt, Artificial Sequence
  Description of Artificial Sequence: Synthetic oligonucleotide
  Antisense strand to SEQ ID NO: 1073884
ucuaccagcguuuaacgaa

SEQ ID NO: 1073886 - RNA, 19 nt, Artificial Sequence
  Description of Artificial Sequence: Synthetic oligonucleotide
  Sense strand starting at position 1097 of SEQ ID NO: 915359
ucguuaaacgcugguagaa

SEQ ID NO: 1073887 - RNA, 19 nt, Artificial Sequence
  Description of Artificial Sequence: Synthetic oligonucleotide
  Antisense strand to SEQ ID NO: 1073886
uucuaccagcguuuaacga

SEQ ID NO: 1073888 - RNA, 19 nt, Artificial Sequence
  Description of Artificial Sequence: Synthetic oligonucleotide
  Sense strand starting at position 1190 of SEQ ID NO: 915359
ggaaauauagcaggucgau

SEQ ID NO: 1073889 - RNA, 19 nt, Artificial Sequence
  Description of Artificial Sequence: Synthetic oligonucleotide
  Antisense strand to SEQ ID NO: 1073888
aucgaccugcuauauuucc

SEQ ID NO: 1073890 - RNA, 19 nt, Artificial Sequence
  Description of Artificial Sequence: Synthetic oligonucleotide
  Sense strand starting at position 1247 of SEQ ID NO: 915359
gugagauuacgagagucua

SEQ ID NO: 1073891 - RNA, 19 nt, Artificial Sequence
  Description of Artificial Sequence: Synthetic oligonucleotide
  Antisense strand to SEQ ID NO: 1073890
uagacucucguaaucucac

SEQ ID NO: 1073892 - RNA, 19 nt, Artificial Sequence
  Description of Artificial Sequence: Synthetic oligonucleotide
  Sense strand starting at position 1262 of SEQ ID NO: 915359
ucuauuaagugucugggau

SEQ ID NO: 1073893 - RNA, 19 nt, Artificial Sequence
  Description of Artificial Sequence: Synthetic oligonucleotide
  Antisense strand to SEQ ID NO: 1073892
aucccagacacuuaauaga

SEQ ID NO: 1073894 - RNA, 19 nt, Artificial Sequence
  Description of Artificial Sequence: Synthetic oligonucleotide
  Sense strand starting at position 1263 of SEQ ID NO: 915359
cuauuaagugucugggaua

SEQ ID NO: 1073895 - RNA, 19 nt, Artificial Sequence
  Description of Artificial Sequence: Synthetic oligonucleotide
  Antisense strand to SEQ ID NO: 1073894
uaucccagacacuuaauag

SEQ ID NO: 1073896 - RNA, 19 nt, Artificial Sequence
  Description of Artificial Sequence: Synthetic oligonucleotide
  Sense strand starting at position 1266 of SEQ ID NO: 915359
uuaagugucugggauauaa

SEQ ID NO: 1073897 - RNA, 19 nt, Artificial Sequence
  Description of Artificial Sequence: Synthetic oligonucleotide
  Antisense strand to SEQ ID NO: 1073896
uuauaucccagacacuuaa

SEQ ID NO: 1073898 - RNA, 19 nt, Artificial Sequence
  Description of Artificial Sequence: Synthetic oligonucleotide
  Sense strand starting at position 1317 of SEQ ID NO: 915359
gagccuuucgggcaguacu

SEQ ID NO: 1073899 - RNA, 19 nt, Artificial Sequence
  Description of Artificial Sequence: Synthetic oligonucleotide
  Antisense strand to SEQ ID NO: 1073898
aguacugcccgaaaggcuc

SEQ ID NO: 1073900 - RNA, 19 nt, Artificial Sequence
  Description of Artificial Sequence: Synthetic oligonucleotide
  Sense strand starting at position 2306 of SEQ ID NO: 915359
ggccuuugcugagugucua

SEQ ID NO: 1073901 - RNA, 19 nt, Artificial Sequence
  Description of Artificial Sequence: Synthetic oligonucleotide
  Antisense strand to SEQ ID NO: 1073900
uagacacucagcaaaggcc

SEQ ID NO: 1073902 - RNA, 19 nt, Artificial Sequence
  Description of Artificial Sequence: Synthetic oligonucleotide
  Sense strand starting at position 2389 of SEQ ID NO: 915359
ggauucgcaccuugcagaa

SEQ ID NO: 1073903 - RNA, 19 nt, Artificial Sequence
  Description of Artificial Sequence: Synthetic oligonucleotide
  Antisense strand to SEQ ID NO: 1073902
uucugcaaggugcgaaucc

SEQ ID NO: 1073904 - RNA, 19 nt, Artificial Sequence
  Description of Artificial Sequence: Synthetic oligonucleotide
  Sense strand starting at position 2655 of SEQ ID NO: 915359
uccgauguaggaugggaaa

SEQ ID NO: 1073905 - RNA, 19 nt, Artificial Sequence
  Description of Artificial Sequence: Synthetic oligonucleotide
  Antisense strand to SEQ ID NO: 1073904
uuucccauccuacaucgga

SEQ ID NO: 1073906 - RNA, 19 nt, Artificial Sequence
  Description of Artificial Sequence: Synthetic oligonucleotide
  Sense strand starting at position 2689 of SEQ ID NO: 915359
cugcgaggcugcuuuaaga

SEQ ID NO: 1073907 - RNA, 19 nt, Artificial Sequence
  Description of Artificial Sequence: Synthetic oligonucleotide
  Antisense strand to SEQ ID NO: 1073906
ucuuaaagcagccucgcag

SEQ ID NO: 1073908 - RNA, 19 nt, Artificial Sequence
  Description of Artificial Sequence: Synthetic oligonucleotide
  Sense strand starting at position 2705 of SEQ ID NO: 915359
agacaugaaucagauguga

SEQ ID NO: 1073909 - RNA, 19 nt, Artificial Sequence
  Description of Artificial Sequence: Synthetic oligonucleotide
  Antisense strand to SEQ ID NO: 1073908
ucacaucugauucaugucu

SEQ ID NO: 1073910 - RNA, 19 nt, Artificial Sequence
  Description of Artificial Sequence: Synthetic oligonucleotide
  Sense strand starting at position 2758 of SEQ ID NO: 915359
gcgcgagucuuggucauuu

SEQ ID NO: 1073911 - RNA, 19 nt, Artificial Sequence
  Description of Artificial Sequence: Synthetic oligonucleotide
  Antisense strand to SEQ ID NO: 1073910
aaaugaccaagacucgcgc

SEQ ID NO: 1073912 - RNA, 19 nt, Artificial Sequence
  Description of Artificial Sequence: Synthetic oligonucleotide
  Sense strand starting at position 2760 of SEQ ID NO: 915359
gcgagucuuggucauuuca

SEQ ID NO: 1073913 - RNA, 19 nt, Artificial Sequence
  Description of Artificial Sequence: Synthetic oligonucleotide
  Antisense strand to SEQ ID NO: 1073912
ugaaaugaccaagacucgc

SEQ ID NO: 1073914 - RNA, 19 nt, Artificial Sequence
  Description of Artificial Sequence: Synthetic oligonucleotide
  Sense strand starting at position 3124 of SEQ ID NO: 915359
ucuugugcuagauguugca

SEQ ID NO: 1073915 - RNA, 19 nt, Artificial Sequence
  Description of Artificial Sequence: Synthetic oligonucleotide
  Antisense strand to SEQ ID NO: 1073914
ugcaacaucuagcacaaga

SEQ ID NO: 1073916 - RNA, 19 nt, Artificial Sequence
  Description of Artificial Sequence: Synthetic oligonucleotide
  Sense strand starting at position 3206 of SEQ ID NO: 915359
ggauuugacucggagcaca

SEQ ID NO: 1073917 - RNA, 19 nt, Artificial Sequence
  Description of Artificial Sequence: Synthetic oligonucleotide
  Antisense strand to SEQ ID NO: 1073916
ugugcuccgagucaaaucc

SEQ ID NO: 1073918 - RNA, 19 nt, Artificial Sequence
  Description of Artificial Sequence: Synthetic oligonucleotide
  Sense strand starting at position 3313 of SEQ ID NO: 915359
acuaguaagucugagaaga

SEQ ID NO: 1073919 - RNA, 19 nt, Artificial Sequence
  Description of Artificial Sequence: Synthetic oligonucleotide
  Antisense strand to SEQ ID NO: 1073918
ucuucucagacuuacuagu

SEQ ID NO: 1073920 - RNA, 19 nt, Artificial Sequence
  Description of Artificial Sequence: Synthetic oligonucleotide
  Sense strand starting at position 3355 of SEQ ID NO: 915359
gagaaaugagcccguccaa

SEQ ID NO: 1073921 - RNA, 19 nt, Artificial Sequence
  Description of Artificial Sequence: Synthetic oligonucleotide
  Antisense strand to SEQ ID NO: 1073920
uuggacgggcucauuucuc

SEQ ID NO: 1073922 - RNA, 19 nt, Artificial Sequence
  Description of Artificial Sequence: Synthetic oligonucleotide
  Sense strand starting at position 3371 of SEQ ID NO: 915359
caaggugaauuccuugauu

SEQ ID NO: 1073923 - RNA, 19 nt, Artificial Sequence
  Description of Artificial Sequence: Synthetic oligonucleotide
  Antisense strand to SEQ ID NO: 1073922
aaucaaggaauucaccuug

SEQ ID NO: 1073924 - RNA, 19 nt, Artificial Sequence
  Description of Artificial Sequence: Synthetic oligonucleotide
  Sense strand starting at position 3373 of SEQ ID NO: 915359
aggugaauuccuugauucu

SEQ ID NO: 1073925 - RNA, 19 nt, Artificial Sequence
  Description of Artificial Sequence: Synthetic oligonucleotide
  Antisense strand to SEQ ID NO: 1073924
agaaucaaggaauucaccu

SEQ ID NO: 1073926 - RNA, 19 nt, Artificial Sequence
  Description of Artificial Sequence: Synthetic oligonucleotide
  Sense strand starting at position 3374 of SEQ ID NO: 915359
ggugaauuccuugauucuc

SEQ ID NO: 1073927 - RNA, 19 nt, Artificial Sequence
  Description of Artificial Sequence: Synthetic oligonucleotide
  Antisense strand to SEQ ID NO: 1073926
gagaaucaaggaauucacc

SEQ ID NO: 1073928 - RNA, 19 nt, Artificial Sequence
  Description of Artificial Sequence: Synthetic oligonucleotide
  Sense strand starting at position 3384 of SEQ ID NO: 915359
uugauucuccauugugagu

SEQ ID NO: 1073929 - RNA, 19 nt, Artificial Sequence
  Description of Artificial Sequence: Synthetic oligonucleotide
  Antisense strand to SEQ ID NO: 1073928
acucacaauggagaaucaa

SEQ ID NO: 1073930 - RNA, 19 nt, Artificial Sequence
  Description of Artificial Sequence: Synthetic oligonucleotide
  Sense strand starting at position 3959 of SEQ ID NO: 915359
gcaauauaucgagacccau

SEQ ID NO: 1073931 - RNA, 19 nt, Artificial Sequence
  Description of Artificial Sequence: Synthetic oligonucleotide
  Antisense strand to SEQ ID NO: 1073930
augggucucgauauauugc

SEQ ID NO: 1073932 - RNA, 19 nt, Artificial Sequence
  Description of Artificial Sequence: Synthetic oligonucleotide
  Sense strand starting at position 3965 of SEQ ID NO: 915359
uaucgagacccaugucuau

SEQ ID NO: 1073933 - RNA, 19 nt, Artificial Sequence
  Description of Artificial Sequence: Synthetic oligonucleotide
  Antisense strand to SEQ ID NO: 1073932
auagacaugggucucgaua

SEQ ID NO: 1073934 - RNA, 19 nt, Artificial Sequence
  Description of Artificial Sequence: Synthetic oligonucleotide
  Sense strand starting at position 116 of SEQ ID NO: 915360
aggaaauauuaugaacaag

SEQ ID NO: 1073935 - RNA, 19 nt, Artificial Sequence
  Description of Artificial Sequence: Synthetic oligonucleotide
  Antisense strand to SEQ ID NO: 1073934
cuuguucauaauauuuccu

SEQ ID NO: 1073936 - RNA, 19 nt, Artificial Sequence
  Description of Artificial Sequence: Synthetic oligonucleotide
  Sense strand starting at position 162 of SEQ ID NO: 915360
aucaaauggcgccaagaau

SEQ ID NO: 1073937 - RNA, 19 nt, Artificial Sequence
  Description of Artificial Sequence: Synthetic oligonucleotide
  Antisense strand to SEQ ID NO: 1073936
auucuuggcgccauuugau

SEQ ID NO: 1073938 - RNA, 19 nt, Artificial Sequence
  Description of Artificial Sequence: Synthetic oligonucleotide
  Sense strand starting at position 223 of SEQ ID NO: 915360
guuccugaaucauugaaac

SEQ ID NO: 1073939 - RNA, 19 nt, Artificial Sequence
  Description of Artificial Sequence: Synthetic oligonucleotide
  Antisense strand to SEQ ID NO: 1073938
guuucaaugauucaggaac

SEQ ID NO: 1073940 - RNA, 19 nt, Artificial Sequence
  Description of Artificial Sequence: Synthetic oligonucleotide
  Sense strand starting at position 341 of SEQ ID NO: 915360
caugacauuugucaugaga

SEQ ID NO: 1073941 - RNA, 19 nt, Artificial Sequence
  Description of Artificial Sequence: Synthetic oligonucleotide
  Antisense strand to SEQ ID NO: 1073940
ucucaugacaaaugucaug

SEQ ID NO: 1073942 - RNA, 19 nt, Artificial Sequence
  Description of Artificial Sequence: Synthetic oligonucleotide
  Sense strand starting at position 392 of SEQ ID NO: 915360
guaugcugucaagaaacaa

SEQ ID NO: 1073943 - RNA, 19 nt, Artificial Sequence
  Description of Artificial Sequence: Synthetic oligonucleotide
  Antisense strand to SEQ ID NO: 1073942
uuguuucuugacagcauac

SEQ ID NO: 1073944 - RNA, 19 nt, Artificial Sequence
  Description of Artificial Sequence: Synthetic oligonucleotide
  Sense strand starting at position 414 of SEQ ID NO: 915360
gagucuuaugcugaucaug

SEQ ID NO: 1073945 - RNA, 19 nt, Artificial Sequence
  Description of Artificial Sequence: Synthetic oligonucleotide
  Antisense strand to SEQ ID NO: 1073944
caugaucagcauaagacuc

SEQ ID NO: 1073946 - RNA, 19 nt, Artificial Sequence
  Description of Artificial Sequence: Synthetic oligonucleotide
  Sense strand starting at position 530 of SEQ ID NO: 915360
aguaauugugaguaccuuu

SEQ ID NO: 1073947 - RNA, 19 nt, Artificial Sequence
  Description of Artificial Sequence: Synthetic oligonucleotide
  Antisense strand to SEQ ID NO: 1073946
aaagguacucacaauuacu

SEQ ID NO: 1073948 - RNA, 19 nt, Artificial Sequence
  Description of Artificial Sequence: Synthetic oligonucleotide
  Sense strand starting at position 559 of SEQ ID NO: 915360
guacuaugccaggaguuau

SEQ ID NO: 1073949 - RNA, 19 nt, Artificial Sequence
  Description of Artificial Sequence: Synthetic oligonucleotide
  Antisense strand to SEQ ID NO: 1073948
auaacuccuggcauaguac

SEQ ID NO: 1073950 - RNA, 19 nt, Artificial Sequence
  Description of Artificial Sequence: Synthetic oligonucleotide
  Sense strand starting at position 841 of SEQ ID NO: 915360
aaucuauuauaggugauag

SEQ ID NO: 1073951 - RNA, 19 nt, Artificial Sequence
  Description of Artificial Sequence: Synthetic oligonucleotide
  Antisense strand to SEQ ID NO: 1073950
cuaucaccuauaauagauu

SEQ ID NO: 1073952 - RNA, 19 nt, Artificial Sequence
  Description of Artificial Sequence: Synthetic oligonucleotide
  Sense strand starting at position 843 of SEQ ID NO: 915360
ucuauuauaggugauagua

SEQ ID NO: 1073953 - RNA, 19 nt, Artificial Sequence
  Description of Artificial Sequence: Synthetic oligonucleotide
  Antisense strand to SEQ ID NO: 1073952
uacuaucaccuauaauaga

SEQ ID NO: 1073954 - RNA, 19 nt, Artificial Sequence
  Description of Artificial Sequence: Synthetic oligonucleotide
  Sense strand starting at position 939 of SEQ ID NO: 915360
aucucuugugauuacagau

SEQ ID NO: 1073955 - RNA, 19 nt, Artificial Sequence
  Description of Artificial Sequence: Synthetic oligonucleotide
  Antisense strand to SEQ ID NO: 1073954
aucuguaaucacaagagau

SEQ ID NO: 1073956 - RNA, 19 nt, Artificial Sequence
  Description of Artificial Sequence: Synthetic oligonucleotide
  Sense strand starting at position 949 of SEQ ID NO: 915360
auuacagauuuggaaagua

SEQ ID NO: 1073957 - RNA, 19 nt, Artificial Sequence
  Description of Artificial Sequence: Synthetic oligonucleotide
  Antisense strand to SEQ ID NO: 1073956
uacuuuccaaaucuguaau

SEQ ID NO: 1073958 - RNA, 19 nt, Artificial Sequence
  Description of Artificial Sequence: Synthetic oligonucleotide
  Sense strand starting at position 1005 of SEQ ID NO: 915360
aagacauuauuugaauggu

SEQ ID NO: 1073959 - RNA, 19 nt, Artificial Sequence
  Description of Artificial Sequence: Synthetic oligonucleotide
  Antisense strand to SEQ ID NO: 1073958
accauucaaauaaugucuu

SEQ ID NO: 1073960 - RNA, 19 nt, Artificial Sequence
  Description of Artificial Sequence: Synthetic oligonucleotide
  Sense strand starting at position 1011 of SEQ ID NO: 915360
uuauuugaaugguagggaa

SEQ ID NO: 1073961 - RNA, 19 nt, Artificial Sequence
  Description of Artificial Sequence: Synthetic oligonucleotide
  Antisense strand to SEQ ID NO: 1073960
uucccuaccauucaaauaa

SEQ ID NO: 1073962 - RNA, 19 nt, Artificial Sequence
  Description of Artificial Sequence: Synthetic oligonucleotide
  Sense strand starting at position 1148 of SEQ ID NO: 915360
ggcauagaaucagcugaga

SEQ ID NO: 1073963 - RNA, 19 nt, Artificial Sequence
  Description of Artificial Sequence: Synthetic oligonucleotide
  Antisense strand to SEQ ID NO: 1073962
ucucagcugauucuaugcc

SEQ ID NO: 1073964 - RNA, 19 nt, Artificial Sequence
  Description of Artificial Sequence: Synthetic oligonucleotide
  Sense strand starting at position 1263 of SEQ ID NO: 915360
cugggaaucugucuaacca

SEQ ID NO: 1073965 - RNA, 19 nt, Artificial Sequence
  Description of Artificial Sequence: Synthetic oligonucleotide
  Antisense strand to SEQ ID NO: 1073964
ugguuagacagauucccag

SEQ ID NO: 1073966 - RNA, 19 nt, Artificial Sequence
  Description of Artificial Sequence: Synthetic oligonucleotide
  Sense strand starting at position 1367 of SEQ ID NO: 915360
guauaaacaccguacaacu

SEQ ID NO: 1073967 - RNA, 19 nt, Artificial Sequence
  Description of Artificial Sequence: Synthetic oligonucleotide
  Antisense strand to SEQ ID NO: 1073966
aguuguacgguguuuauac

SEQ ID NO: 1073968 - RNA, 19 nt, Artificial Sequence
  Description of Artificial Sequence: Synthetic oligonucleotide
  Sense strand starting at position 1624 of SEQ ID NO: 915360
ucaccuguuccaggaaaua

SEQ ID NO: 1073969 - RNA, 19 nt, Artificial Sequence
  Description of Artificial Sequence: Synthetic oligonucleotide
  Antisense strand to SEQ ID NO: 1073968
uauuuccuggaacagguga

SEQ ID NO: 1073970 - RNA, 19 nt, Artificial Sequence
  Description of Artificial Sequence: Synthetic oligonucleotide
  Sense strand starting at position 2009 of SEQ ID NO: 915360
ggaagagcgguccaaacuu

SEQ ID NO: 1073971 - RNA, 19 nt, Artificial Sequence
  Description of Artificial Sequence: Synthetic oligonucleotide
  Antisense strand to SEQ ID NO: 1073970
aaguuuggaccgcucuucc

SEQ ID NO: 1073972 - RNA, 19 nt, Artificial Sequence
  Description of Artificial Sequence: Synthetic oligonucleotide
  Sense strand starting at position 2070 of SEQ ID NO: 915360
gaggacugcucaccuauca

SEQ ID NO: 1073973 - RNA, 19 nt, Artificial Sequence
  Description of Artificial Sequence: Synthetic oligonucleotide
  Antisense strand to SEQ ID NO: 1073972
ugauaggugagcaguccuc

SEQ ID NO: 1073974 - RNA, 19 nt, Artificial Sequence
  Description of Artificial Sequence: Synthetic oligonucleotide
  Sense strand starting at position 2080 of SEQ ID NO: 915360
caccuaucaggugaguguu

SEQ ID NO: 1073975 - RNA, 19 nt, Artificial Sequence
  Description of Artificial Sequence: Synthetic oligonucleotide
  Antisense strand to SEQ ID NO: 1073974
aacacucaccugauaggug

SEQ ID NO: 1073976 - RNA, 19 nt, Artificial Sequence
  Description of Artificial Sequence: Synthetic oligonucleotide
  Sense strand starting at position 2109 of SEQ ID NO: 915360
uaaggaaugugggcuguaa

SEQ ID NO: 1073977 - RNA, 19 nt, Artificial Sequence
  Description of Artificial Sequence: Synthetic oligonucleotide
  Antisense strand to SEQ ID NO: 1073976
uuacagcccacauuccuua

SEQ ID NO: 1073978 - RNA, 19 nt, Artificial Sequence
  Description of Artificial Sequence: Synthetic oligonucleotide
  Sense strand starting at position 2133 of SEQ ID NO: 915360
auguauuagcacugacaaa

SEQ ID NO: 1073979 - RNA, 19 nt, Artificial Sequence
  Description of Artificial Sequence: Synthetic oligonucleotide
  Antisense strand to SEQ ID NO: 1073978
uuugucagugcuaauacau

SEQ ID NO: 1073980 - RNA, 19 nt, Artificial Sequence
  Description of Artificial Sequence: Synthetic oligonucleotide
  Sense strand starting at position 2259 of SEQ ID NO: 915360
ucugaagaacgcugagaau

SEQ ID NO: 1073981 - RNA, 19 nt, Artificial Sequence
  Description of Artificial Sequence: Synthetic oligonucleotide
  Antisense strand to SEQ ID NO: 1073980
auucucagcguucuucaga

SEQ ID NO: 1073982 - RNA, 19 nt, Artificial Sequence
  Description of Artificial Sequence: Synthetic oligonucleotide
  Sense strand starting at position 2562 of SEQ ID NO: 915360
ggaauaauagauggugcau

SEQ ID NO: 1073983 - RNA, 19 nt, Artificial Sequence
  Description of Artificial Sequence: Synthetic oligonucleotide
  Antisense strand to SEQ ID NO: 1073982
augcaccaucuauuauucc

SEQ ID NO: 1073984 - RNA, 19 nt, Artificial Sequence
  Description of Artificial Sequence: Synthetic oligonucleotide
  Sense strand starting at position 2720 of SEQ ID NO: 915360
ugaaacauauuccuggagu

SEQ ID NO: 1073985 - RNA, 19 nt, Artificial Sequence
  Description of Artificial Sequence: Synthetic oligonucleotide
  Antisense strand to SEQ ID NO: 1073984
acuccaggaauauguuuca

SEQ ID NO: 1073986 - RNA, 19 nt, Artificial Sequence
  Description of Artificial Sequence: Synthetic oligonucleotide
  Sense strand starting at position 2722 of SEQ ID NO: 915360
aaacauauuccuggaguug

SEQ ID NO: 1073987 - RNA, 19 nt, Artificial Sequence
  Description of Artificial Sequence: Synthetic oligonucleotide
  Antisense strand to SEQ ID NO: 1073986
caacuccaggaauauguuu

SEQ ID NO: 1073988 - RNA, 19 nt, Artificial Sequence
  Description of Artificial Sequence: Synthetic oligonucleotide
  Sense strand starting at position 2734 of SEQ ID NO: 915360
ggaguugacacaugguuaa

SEQ ID NO: 1073989 - RNA, 19 nt, Artificial Sequence
  Description of Artificial Sequence: Synthetic oligonucleotide
  Antisense strand to SEQ ID NO: 1073988
uuaaccaugugucaacucc

SEQ ID NO: 1073990 - RNA, 19 nt, Artificial Sequence
  Description of Artificial Sequence: Synthetic oligonucleotide
  Sense strand starting at position 2737 of SEQ ID NO: 915360
guugacacaugguuaacau

SEQ ID NO: 1073991 - RNA, 19 nt, Artificial Sequence
  Description of Artificial Sequence: Synthetic oligonucleotide
  Antisense strand to SEQ ID NO: 1073990
auguuaaccaugugucaac

SEQ ID NO: 1073992 - RNA, 19 nt, Artificial Sequence
  Description of Artificial Sequence: Synthetic oligonucleotide
  Sense strand starting at position 2985 of SEQ ID NO: 915360
ugguuaaucuuauuaugag

SEQ ID NO: 1073993 - RNA, 19 nt, Artificial Sequence
  Description of Artificial Sequence: Synthetic oligonucleotide
  Antisense strand to SEQ ID NO: 1073992
cucauaauaagauuaacca

SEQ ID NO: 1073994 - RNA, 19 nt, Artificial Sequence
  Description of Artificial Sequence: Synthetic oligonucleotide
  Sense strand starting at position 2992 of SEQ ID NO: 915360
ucuuauuaugaggguuaaa

SEQ ID NO: 1073995 - RNA, 19 nt, Artificial Sequence
  Description of Artificial Sequence: Synthetic oligonucleotide
  Antisense strand to SEQ ID NO: 1073994
uuuaacccucauaauaaga

SEQ ID NO: 1073996 - RNA, 19 nt, Artificial Sequence
  Description of Artificial Sequence: Synthetic oligonucleotide
  Sense strand starting at position 3065 of SEQ ID NO: 915360
aucauaggaucucuagcau

SEQ ID NO: 1073997 - RNA, 19 nt, Artificial Sequence
  Description of Artificial Sequence: Synthetic oligonucleotide
  Antisense strand to SEQ ID NO: 1073996
augcuagagauccuaugau

SEQ ID NO: 1073998 - RNA, 19 nt, Artificial Sequence
  Description of Artificial Sequence: Synthetic oligonucleotide
  Sense strand starting at position 3395 of SEQ ID NO: 915360
ugugauuugccuuguucua

SEQ ID NO: 1073999 - RNA, 19 nt, Artificial Sequence
  Description of Artificial Sequence: Synthetic oligonucleotide
  Antisense strand to SEQ ID NO: 1073998
uagaacaaggcaaaucaca

SEQ ID NO: 1074000 - RNA, 19 nt, Artificial Sequence
  Description of Artificial Sequence: Synthetic oligonucleotide
  Sense strand starting at position 3397 of SEQ ID NO: 915360
ugauuugccuuguucuaug

SEQ ID NO: 1074001 - RNA, 19 nt, Artificial Sequence
  Description of Artificial Sequence: Synthetic oligonucleotide
  Antisense strand to SEQ ID NO: 1074000
cauagaacaaggcaaauca

SEQ ID NO: 1074002 - RNA, 19 nt, Artificial Sequence
  Description of Artificial Sequence: Synthetic oligonucleotide
  Sense strand starting at position 3405 of SEQ ID NO: 915360
cuuguucuaugaguagaac

SEQ ID NO: 1074003 - RNA, 19 nt, Artificial Sequence
  Description of Artificial Sequence: Synthetic oligonucleotide
  Antisense strand to SEQ ID NO: 1074002
guucuacucauagaacaag

SEQ ID NO: 1074004 - RNA, 19 nt, Artificial Sequence
  Description of Artificial Sequence: Synthetic oligonucleotide
  Sense strand starting at position 3508 of SEQ ID NO: 915360
cugagaaucugccuaacca

SEQ ID NO: 1074005 - RNA, 19 nt, Artificial Sequence
  Description of Artificial Sequence: Synthetic oligonucleotide
  Antisense strand to SEQ ID NO: 1074004
ugguuaggcagauucucag

SEQ ID NO: 1074006 - RNA, 19 nt, Artificial Sequence
  Description of Artificial Sequence: Synthetic oligonucleotide
  Sense strand starting at position 3580 of SEQ ID NO: 915360
auaagcucccaguagagua

SEQ ID NO: 1074007 - RNA, 19 nt, Artificial Sequence
  Description of Artificial Sequence: Synthetic oligonucleotide
  Antisense strand to SEQ ID NO: 1074006
uacucuacugggagcuuau

SEQ ID NO: 1074008 - RNA, 19 nt, Artificial Sequence
  Description of Artificial Sequence: Synthetic oligonucleotide
  Sense strand starting at position 3751 of SEQ ID NO: 915360
uguaauccucuguaaauag

SEQ ID NO: 1074009 - RNA, 19 nt, Artificial Sequence
  Description of Artificial Sequence: Synthetic oligonucleotide
  Antisense strand to SEQ ID NO: 1074008
cuauuuacagaggauuaca

SEQ ID NO: 1074010 - RNA, 19 nt, Artificial Sequence
  Description of Artificial Sequence: Synthetic oligonucleotide
  Sense strand starting at position 3861 of SEQ ID NO: 915360
uuaaucaugucauugggau

SEQ ID NO: 1074011 - RNA, 19 nt, Artificial Sequence
  Description of Artificial Sequence: Synthetic oligonucleotide
  Antisense strand to SEQ ID NO: 1074010
aucccaaugacaugauuaa

SEQ ID NO: 1074012 - RNA, 19 nt, Artificial Sequence
  Description of Artificial Sequence: Synthetic oligonucleotide
  Sense strand starting at position 3862 of SEQ ID NO: 915360
uaaucaugucauugggaua

SEQ ID NO: 1074013 - RNA, 19 nt, Artificial Sequence
  Description of Artificial Sequence: Synthetic oligonucleotide
  Antisense strand to SEQ ID NO: 1074012
uaucccaaugacaugauua

SEQ ID NO: 1074014 - RNA, 19 nt, Artificial Sequence
  Description of Artificial Sequence: Synthetic oligonucleotide
  Sense strand starting at position 183 of SEQ ID NO: 915361
gccacuauugaguacuuga

SEQ ID NO: 1074015 - RNA, 19 nt, Artificial Sequence
  Description of Artificial Sequence: Synthetic oligonucleotide
  Antisense strand to SEQ ID NO: 1074014
ucaaguacucaauaguggc

SEQ ID NO: 1074016 - RNA, 19 nt, Artificial Sequence
  Description of Artificial Sequence: Synthetic oligonucleotide
  Sense strand starting at position 186 of SEQ ID NO: 915361
acuauugaguacuugaaca

SEQ ID NO: 1074017 - RNA, 19 nt, Artificial Sequence
  Description of Artificial Sequence: Synthetic oligonucleotide
  Antisense strand to SEQ ID NO: 1074016
uguucaaguacucaauagu

SEQ ID NO: 1074018 - RNA, 19 nt, Artificial Sequence
  Description of Artificial Sequence: Synthetic oligonucleotide
  Sense strand starting at position 935 of SEQ ID NO: 915361
cuaagagucuacucugcuu

SEQ ID NO: 1074019 - RNA, 19 nt, Artificial Sequence
  Description of Artificial Sequence: Synthetic oligonucleotide
  Antisense strand to SEQ ID NO: 1074018
aagcagaguagacucuuag

SEQ ID NO: 1074020 - RNA, 19 nt, Artificial Sequence
  Description of Artificial Sequence: Synthetic oligonucleotide
  Sense strand starting at position 978 of SEQ ID NO: 915361
uaacuaccagguugugauu

SEQ ID NO: 1074021 - RNA, 19 nt, Artificial Sequence
  Description of Artificial Sequence: Synthetic oligonucleotide
  Antisense strand to SEQ ID NO: 1074020
aaucacaaccugguaguua

SEQ ID NO: 1074022 - RNA, 19 nt, Artificial Sequence
  Description of Artificial Sequence: Synthetic oligonucleotide
  Sense strand starting at position 984 of SEQ ID NO: 915361
ccagguugugauuagucau

SEQ ID NO: 1074023 - RNA, 19 nt, Artificial Sequence
  Description of Artificial Sequence: Synthetic oligonucleotide
  Antisense strand to SEQ ID NO: 1074022
augacuaaucacaaccugg

SEQ ID NO: 1074024 - RNA, 19 nt, Artificial Sequence
  Description of Artificial Sequence: Synthetic oligonucleotide
  Sense strand starting at position 987 of SEQ ID NO: 915361
gguugugauuagucauacc

SEQ ID NO: 1074025 - RNA, 19 nt, Artificial Sequence
  Description of Artificial Sequence: Synthetic oligonucleotide
  Antisense strand to SEQ ID NO: 1074024
gguaugacuaaucacaacc

SEQ ID NO: 1074026 - RNA, 19 nt, Artificial Sequence
  Description of Artificial Sequence: Synthetic oligonucleotide
  Sense strand starting at position 1140 of SEQ ID NO: 915361
gaaaccugagguugcuuaa

SEQ ID NO: 1074027 - RNA, 19 nt, Artificial Sequence
  Description of Artificial Sequence: Synthetic oligonucleotide
  Antisense strand to SEQ ID NO: 1074026
uuaagcaaccucagguuuc

SEQ ID NO: 1074028 - RNA, 19 nt, Artificial Sequence
  Description of Artificial Sequence: Synthetic oligonucleotide
  Sense strand starting at position 1393 of SEQ ID NO: 915361
ugugcuuuaauaggaguua

SEQ ID NO: 1074029 - RNA, 19 nt, Artificial Sequence
  Description of Artificial Sequence: Synthetic oligonucleotide
  Antisense strand to SEQ ID NO: 1074028
uaacuccuauuaaagcaca

SEQ ID NO: 1074030 - RNA, 19 nt, Artificial Sequence
  Description of Artificial Sequence: Synthetic oligonucleotide
  Sense strand starting at position 1405 of SEQ ID NO: 915361
ggaguuaacuuauccuaca

SEQ ID NO: 1074031 - RNA, 19 nt, Artificial Sequence
  Description of Artificial Sequence: Synthetic oligonucleotide
  Antisense strand to SEQ ID NO: 1074030
uguaggauaaguuaacucc

SEQ ID NO: 1074032 - RNA, 19 nt, Artificial Sequence
  Description of Artificial Sequence: Synthetic oligonucleotide
  Sense strand starting at position 1692 of SEQ ID NO: 915361
ugacuugaucaacagcuuu

SEQ ID NO: 1074033 - RNA, 19 nt, Artificial Sequence
  Description of Artificial Sequence: Synthetic oligonucleotide
  Antisense strand to SEQ ID NO: 1074032
aaagcuguugaucaaguca

SEQ ID NO: 1074034 - RNA, 19 nt, Artificial Sequence
  Description of Artificial Sequence: Synthetic oligonucleotide
  Sense strand starting at position 2003 of SEQ ID NO: 915361
gccacuaguuacuuaguaa

SEQ ID NO: 1074035 - RNA, 19 nt, Artificial Sequence
  Description of Artificial Sequence: Synthetic oligonucleotide
  Antisense strand to SEQ ID NO: 1074034
uuacuaaguaacuaguggc

SEQ ID NO: 1074036 - RNA, 19 nt, Artificial Sequence
  Description of Artificial Sequence: Synthetic oligonucleotide
  Sense strand starting at position 2010 of SEQ ID NO: 915361
guuacuuaguaacucuauu

SEQ ID NO: 1074037 - RNA, 19 nt, Artificial Sequence
  Description of Artificial Sequence: Synthetic oligonucleotide
  Antisense strand to SEQ ID NO: 1074036
aauagaguuacuaaguaac

SEQ ID NO: 1074038 - RNA, 19 nt, Artificial Sequence
  Description of Artificial Sequence: Synthetic oligonucleotide
  Sense strand starting at position 2080 of SEQ ID NO: 915361
guaccuugaggugagucau

SEQ ID NO: 1074039 - RNA, 19 nt, Artificial Sequence
  Description of Artificial Sequence: Synthetic oligonucleotide
  Antisense strand to SEQ ID NO: 1074038
augacucaccucaagguac

SEQ ID NO: 1074040 - RNA, 19 nt, Artificial Sequence
  Description of Artificial Sequence: Synthetic oligonucleotide
  Sense strand starting at position 2086 of SEQ ID NO: 915361
ugaggugagucauuccaau

SEQ ID NO: 1074041 - RNA, 19 nt, Artificial Sequence
  Description of Artificial Sequence: Synthetic oligonucleotide
  Antisense strand to SEQ ID NO: 1074040
auuggaaugacucaccuca

SEQ ID NO: 1074042 - RNA, 19 nt, Artificial Sequence
  Description of Artificial Sequence: Synthetic oligonucleotide
  Sense strand starting at position 2136 of SEQ ID NO: 915361
ggaucucaucccuguaaca

SEQ ID NO: 1074043 - RNA, 19 nt, Artificial Sequence
  Description of Artificial Sequence: Synthetic oligonucleotide
  Antisense strand to SEQ ID NO: 1074042
uguuacagggaugagaucc

SEQ ID NO: 1074044 - RNA, 19 nt, Artificial Sequence
  Description of Artificial Sequence: Synthetic oligonucleotide
  Sense strand starting at position 2214 of SEQ ID NO: 915361
gcuagugaaaggcaauuaa

SEQ ID NO: 1074045 - RNA, 19 nt, Artificial Sequence
  Description of Artificial Sequence: Synthetic oligonucleotide
  Antisense strand to SEQ ID NO: 1074044
uuaauugccuuucacuagc

SEQ ID NO: 1074046 - RNA, 19 nt, Artificial Sequence
  Description of Artificial Sequence: Synthetic oligonucleotide
  Sense strand starting at position 2251 of SEQ ID NO: 915361
guacaaauuugugcuaucu

SEQ ID NO: 1074047 - RNA, 19 nt, Artificial Sequence
  Description of Artificial Sequence: Synthetic oligonucleotide
  Antisense strand to SEQ ID NO: 1074046
agauagcacaaauuuguac

SEQ ID NO: 1074048 - RNA, 19 nt, Artificial Sequence
  Description of Artificial Sequence: Synthetic oligonucleotide
  Sense strand starting at position 2285 of SEQ ID NO: 915361
uccaauacugccuggcaaa

SEQ ID NO: 1074049 - RNA, 19 nt, Artificial Sequence
  Description of Artificial Sequence: Synthetic oligonucleotide
  Antisense strand to SEQ ID NO: 1074048
uuugccaggcaguauugga

SEQ ID NO: 1074050 - RNA, 19 nt, Artificial Sequence
  Description of Artificial Sequence: Synthetic oligonucleotide
  Sense strand starting at position 2412 of SEQ ID NO: 915361
cuccucguauuugcugaaa

SEQ ID NO: 1074051 - RNA, 19 nt, Artificial Sequence
  Description of Artificial Sequence: Synthetic oligonucleotide
  Antisense strand to SEQ ID NO: 1074050
uuucagcaaauacgaggag

SEQ ID NO: 1074052 - RNA, 19 nt, Artificial Sequence
  Description of Artificial Sequence: Synthetic oligonucleotide
  Sense strand starting at position 2538 of SEQ ID NO: 915361
guuccuuuccaaggauaaa

SEQ ID NO: 1074053 - RNA, 19 nt, Artificial Sequence
  Description of Artificial Sequence: Synthetic oligonucleotide
  Antisense strand to SEQ ID NO: 1074052
uuuauccuuggaaaggaac

SEQ ID NO: 1074054 - RNA, 19 nt, Artificial Sequence
  Description of Artificial Sequence: Synthetic oligonucleotide
  Sense strand starting at position 2548 of SEQ ID NO: 915361
aaggauaaacugcgacaau

SEQ ID NO: 1074055 - RNA, 19 nt, Artificial Sequence
  Description of Artificial Sequence: Synthetic oligonucleotide
  Antisense strand to SEQ ID NO: 1074054
auugucgcaguuuauccuu

SEQ ID NO: 1074056 - RNA, 19 nt, Artificial Sequence
  Description of Artificial Sequence: Synthetic oligonucleotide
  Sense strand starting at position 2551 of SEQ ID NO: 915361
gauaaacugcgacaauugu

SEQ ID NO: 1074057 - RNA, 19 nt, Artificial Sequence
  Description of Artificial Sequence: Synthetic oligonucleotide
  Antisense strand to SEQ ID NO: 1074056
acaauugucgcaguuuauc

SEQ ID NO: 1074058 - RNA, 19 nt, Artificial Sequence
  Description of Artificial Sequence: Synthetic oligonucleotide
  Sense strand starting at position 2662 of SEQ ID NO: 915361
aggauacaaugcuuccaga

SEQ ID NO: 1074059 - RNA, 19 nt, Artificial Sequence
  Description of Artificial Sequence: Synthetic oligonucleotide
  Antisense strand to SEQ ID NO: 1074058
ucuggaagcauuguauccu

SEQ ID NO: 1074060 - RNA, 19 nt, Artificial Sequence
  Description of Artificial Sequence: Synthetic oligonucleotide
  Sense strand starting at position 2764 of SEQ ID NO: 915361
cuugauaaaccuuacggua

SEQ ID NO: 1074061 - RNA, 19 nt, Artificial Sequence
  Description of Artificial Sequence: Synthetic oligonucleotide
  Antisense strand to SEQ ID NO: 1074060
uaccguaagguuuaucaag

SEQ ID NO: 1074062 - RNA, 19 nt, Artificial Sequence
  Description of Artificial Sequence: Synthetic oligonucleotide
  Sense strand starting at position 2780 of SEQ ID NO: 915361
guaacuuccuggucaacca

SEQ ID NO: 1074063 - RNA, 19 nt, Artificial Sequence
  Description of Artificial Sequence: Synthetic oligonucleotide
  Antisense strand to SEQ ID NO: 1074062
ugguugaccaggaaguuac

SEQ ID NO: 1074064 - RNA, 19 nt, Artificial Sequence
  Description of Artificial Sequence: Synthetic oligonucleotide
  Sense strand starting at position 2911 of SEQ ID NO: 915361
uugaguaaguucccaccaa

SEQ ID NO: 1074065 - RNA, 19 nt, Artificial Sequence
  Description of Artificial Sequence: Synthetic oligonucleotide
  Antisense strand to SEQ ID NO: 1074064
uuggugggaacuuacucaa

SEQ ID NO: 1074066 - RNA, 19 nt, Artificial Sequence
  Description of Artificial Sequence: Synthetic oligonucleotide
  Sense strand starting at position 2943 of SEQ ID NO: 915361
cuagguuagggccaucaau

SEQ ID NO: 1074067 - RNA, 19 nt, Artificial Sequence
  Description of Artificial Sequence: Synthetic oligonucleotide
  Antisense strand to SEQ ID NO: 1074066
auugauggcccuaaccuag

SEQ ID NO: 1074068 - RNA, 19 nt, Artificial Sequence
  Description of Artificial Sequence: Synthetic oligonucleotide
  Sense strand starting at position 3048 of SEQ ID NO: 915361
aaagaaacuuccgucuuga

SEQ ID NO: 1074069 - RNA, 19 nt, Artificial Sequence
  Description of Artificial Sequence: Synthetic oligonucleotide
  Antisense strand to SEQ ID NO: 1074068
ucaagacggaaguuucuuu

SEQ ID NO: 1074070 - RNA, 19 nt, Artificial Sequence
  Description of Artificial Sequence: Synthetic oligonucleotide
  Sense strand starting at position 3100 of SEQ ID NO: 915361
uguccucuugcuggacaaa

SEQ ID NO: 1074071 - RNA, 19 nt, Artificial Sequence
  Description of Artificial Sequence: Synthetic oligonucleotide
  Antisense strand to SEQ ID NO: 1074070
uuuguccagcaagaggaca

SEQ ID NO: 1074072 - RNA, 19 nt, Artificial Sequence
  Description of Artificial Sequence: Synthetic oligonucleotide
  Sense strand starting at position 3101 of SEQ ID NO: 915361
guccucuugcuggacaaau

SEQ ID NO: 1074073 - RNA, 19 nt, Artificial Sequence
  Description of Artificial Sequence: Synthetic oligonucleotide
  Antisense strand to SEQ ID NO: 1074072
auuuguccagcaagaggac

SEQ ID NO: 1074074 - RNA, 19 nt, Artificial Sequence
  Description of Artificial Sequence: Synthetic oligonucleotide
  Sense strand starting at position 3318 of SEQ ID NO: 915361
gugugucacuccucaacaa

SEQ ID NO: 1074075 - RNA, 19 nt, Artificial Sequence
  Description of Artificial Sequence: Synthetic oligonucleotide
  Antisense strand to SEQ ID NO: 1074074
uuguugaggagugacacac

SEQ ID NO: 1074076 - RNA, 19 nt, Artificial Sequence
  Description of Artificial Sequence: Synthetic oligonucleotide
  Sense strand starting at position 3416 of SEQ ID NO: 915361
ugagaugcagcuugcauuu

SEQ ID NO: 1074077 - RNA, 19 nt, Artificial Sequence
  Description of Artificial Sequence: Synthetic oligonucleotide
  Antisense strand to SEQ ID NO: 1074076
aaaugcaagcugcaucuca

SEQ ID NO: 1074078 - RNA, 19 nt, Artificial Sequence
  Description of Artificial Sequence: Synthetic oligonucleotide
  Sense strand starting at position 3565 of SEQ ID NO: 915361
cugucaauccuguaaggaa

SEQ ID NO: 1074079 - RNA, 19 nt, Artificial Sequence
  Description of Artificial Sequence: Synthetic oligonucleotide
  Antisense strand to SEQ ID NO: 1074078
uuccuuacaggauugacag

SEQ ID NO: 1074080 - RNA, 19 nt, Artificial Sequence
  Description of Artificial Sequence: Synthetic oligonucleotide
  Sense strand starting at position 3623 of SEQ ID NO: 915361
uggagucaacucugaucca

SEQ ID NO: 1074081 - RNA, 19 nt, Artificial Sequence
  Description of Artificial Sequence: Synthetic oligonucleotide
  Antisense strand to SEQ ID NO: 1074080
uggaucagaguugacucca

SEQ ID NO: 1074082 - RNA, 19 nt, Artificial Sequence
  Description of Artificial Sequence: Synthetic oligonucleotide
  Sense strand starting at position 3714 of SEQ ID NO: 915361
ggaauccugcuggagucau

SEQ ID NO: 1074083 - RNA, 19 nt, Artificial Sequence
  Description of Artificial Sequence: Synthetic oligonucleotide
  Antisense strand to SEQ ID NO: 1074082
augacuccagcaggauucc

SEQ ID NO: 1074084 - RNA, 19 nt, Artificial Sequence
  Description of Artificial Sequence: Synthetic oligonucleotide
  Sense strand starting at position 3824 of SEQ ID NO: 915361
cucccaauuguuugaaggu

SEQ ID NO: 1074085 - RNA, 19 nt, Artificial Sequence
  Description of Artificial Sequence: Synthetic oligonucleotide
  Antisense strand to SEQ ID NO: 1074084
accuucaaacaauugggag

SEQ ID NO: 1074086 - RNA, 19 nt, Artificial Sequence
  Description of Artificial Sequence: Synthetic oligonucleotide
  Sense strand starting at position 3837 of SEQ ID NO: 915361
gaagguucccugugcaaau

SEQ ID NO: 1074087 - RNA, 19 nt, Artificial Sequence
  Description of Artificial Sequence: Synthetic oligonucleotide
  Antisense strand to SEQ ID NO: 1074086
auuugcacagggaaccuuc

SEQ ID NO: 1074088 - RNA, 19 nt, Artificial Sequence
  Description of Artificial Sequence: Synthetic oligonucleotide
  Sense strand starting at position 3838 of SEQ ID NO: 915361
aagguucccugugcaaaua

SEQ ID NO: 1074089 - RNA, 19 nt, Artificial Sequence
  Description of Artificial Sequence: Synthetic oligonucleotide
  Antisense strand to SEQ ID NO: 1074088
uauuugcacagggaaccuu

SEQ ID NO: 1074090 - RNA, 19 nt, Artificial Sequence
  Description of Artificial Sequence: Synthetic oligonucleotide
  Sense strand starting at position 3839 of SEQ ID NO: 915361
agguucccugugcaaauaa

SEQ ID NO: 1074091 - RNA, 19 nt, Artificial Sequence
  Description of Artificial Sequence: Synthetic oligonucleotide
  Antisense strand to SEQ ID NO: 1074090
uuauuugcacagggaaccu

SEQ ID NO: 1074092 - RNA, 19 nt, Artificial Sequence
  Description of Artificial Sequence: Synthetic oligonucleotide
  Sense strand starting at position 3899 of SEQ ID NO: 915361
ugugauggaccaugaaacu

SEQ ID NO: 1074093 - RNA, 19 nt, Artificial Sequence
  Description of Artificial Sequence: Synthetic oligonucleotide
  Antisense strand to SEQ ID NO: 1074092
aguuucaugguccaucaca

SEQ ID NO: 1074094 - RNA, 19 nt, Artificial Sequence
  Description of Artificial Sequence: Synthetic oligonucleotide
  Sense strand starting at position 127 of SEQ ID NO: 915362
gccacuucucauggugagu

SEQ ID NO: 1074095 - RNA, 19 nt, Artificial Sequence
  Description of Artificial Sequence: Synthetic oligonucleotide
  Antisense strand to SEQ ID NO: 1074094
acucaccaugagaaguggc

SEQ ID NO: 1074096 - RNA, 19 nt, Artificial Sequence
  Description of Artificial Sequence: Synthetic oligonucleotide
  Sense strand starting at position 224 of SEQ ID NO: 915362
uccuuugagguccaucaca

SEQ ID NO: 1074097 - RNA, 19 nt, Artificial Sequence
  Description of Artificial Sequence: Synthetic oligonucleotide
  Antisense strand to SEQ ID NO: 1074096
ugugauggaccucaaagga

SEQ ID NO: 1074098 - RNA, 19 nt, Artificial Sequence
  Description of Artificial Sequence: Synthetic oligonucleotide
  Sense strand starting at position 363 of SEQ ID NO: 915362
agcgcaucucccuuagcua

SEQ ID NO: 1074099 - RNA, 19 nt, Artificial Sequence
  Description of Artificial Sequence: Synthetic oligonucleotide
  Antisense strand to SEQ ID NO: 1074098
uagcuaagggagaugcgcu

SEQ ID NO: 1074100 - RNA, 19 nt, Artificial Sequence
  Description of Artificial Sequence: Synthetic oligonucleotide
  Sense strand starting at position 375 of SEQ ID NO: 915362
uuagcuacccaguaaagaa

SEQ ID NO: 1074101 - RNA, 19 nt, Artificial Sequence
  Description of Artificial Sequence: Synthetic oligonucleotide
  Antisense strand to SEQ ID NO: 1074100
uucuuuacuggguagcuaa

SEQ ID NO: 1074102 - RNA, 19 nt, Artificial Sequence
  Description of Artificial Sequence: Synthetic oligonucleotide
  Sense strand starting at position 929 of SEQ ID NO: 915362
auuaaacacuggcaagaau

SEQ ID NO: 1074103 - RNA, 19 nt, Artificial Sequence
  Description of Artificial Sequence: Synthetic oligonucleotide
  Antisense strand to SEQ ID NO: 1074102
auucuugccaguguuuaau

SEQ ID NO: 1074104 - RNA, 19 nt, Artificial Sequence
  Description of Artificial Sequence: Synthetic oligonucleotide
  Sense strand starting at position 971 of SEQ ID NO: 915362
gcuggaaguucuguucucu

SEQ ID NO: 1074105 - RNA, 19 nt, Artificial Sequence
  Description of Artificial Sequence: Synthetic oligonucleotide
  Antisense strand to SEQ ID NO: 1074104
agagaacagaacuuccagc

SEQ ID NO: 1074106 - RNA, 19 nt, Artificial Sequence
  Description of Artificial Sequence: Synthetic oligonucleotide
  Sense strand starting at position 975 of SEQ ID NO: 915362
gaaguucuguucucuuguu

SEQ ID NO: 1074107 - RNA, 19 nt, Artificial Sequence
  Description of Artificial Sequence: Synthetic oligonucleotide
  Antisense strand to SEQ ID NO: 1074106
aacaagagaacagaacuuc

SEQ ID NO: 1074108 - RNA, 19 nt, Artificial Sequence
  Description of Artificial Sequence: Synthetic oligonucleotide
  Sense strand starting at position 980 of SEQ ID NO: 915362
ucuguucucuuguuacaua

SEQ ID NO: 1074109 - RNA, 19 nt, Artificial Sequence
  Description of Artificial Sequence: Synthetic oligonucleotide
  Antisense strand to SEQ ID NO: 1074108
uauguaacaagagaacaga

SEQ ID NO: 1074110 - RNA, 19 nt, Artificial Sequence
  Description of Artificial Sequence: Synthetic oligonucleotide
  Sense strand starting at position 1196 of SEQ ID NO: 915362
cgcuguguccaccagagaa

SEQ ID NO: 1074111 - RNA, 19 nt, Artificial Sequence
  Description of Artificial Sequence: Synthetic oligonucleotide
  Antisense strand to SEQ ID NO: 1074110
uucucugguggacacagcg

SEQ ID NO: 1074112 - RNA, 19 nt, Artificial Sequence
  Description of Artificial Sequence: Synthetic oligonucleotide
  Sense strand starting at position 1198 of SEQ ID NO: 915362
cuguguccaccagagaauu

SEQ ID NO: 1074113 - RNA, 19 nt, Artificial Sequence
  Description of Artificial Sequence: Synthetic oligonucleotide
  Antisense strand to SEQ ID NO: 1074112
aauucucugguggacacag

SEQ ID NO: 1074114 - RNA, 19 nt, Artificial Sequence
  Description of Artificial Sequence: Synthetic oligonucleotide
  Sense strand starting at position 1209 of SEQ ID NO: 915362
agagaauugccugggcuga

SEQ ID NO: 1074115 - RNA, 19 nt, Artificial Sequence
  Description of Artificial Sequence: Synthetic oligonucleotide
  Antisense strand to SEQ ID NO: 1074114
ucagcccaggcaauucucu

SEQ ID NO: 1074116 - RNA, 19 nt, Artificial Sequence
  Description of Artificial Sequence: Synthetic oligonucleotide
  Sense strand starting at position 1211 of SEQ ID NO: 915362
agaauugccugggcugaca

SEQ ID NO: 1074117 - RNA, 19 nt, Artificial Sequence
  Description of Artificial Sequence: Synthetic oligonucleotide
  Antisense strand to SEQ ID NO: 1074116
ugucagcccaggcaauucu

SEQ ID NO: 1074118 - RNA, 19 nt, Artificial Sequence
  Description of Artificial Sequence: Synthetic oligonucleotide
  Sense strand starting at position 1395 of SEQ ID NO: 915362
gcaggguuggguggagauu

SEQ ID NO: 1074119 - RNA, 19 nt, Artificial Sequence
  Description of Artificial Sequence: Synthetic oligonucleotide
  Antisense strand to SEQ ID NO: 1074118
aaucuccacccaacccugc

SEQ ID NO: 1074120 - RNA, 19 nt, Artificial Sequence
  Description of Artificial Sequence: Synthetic oligonucleotide
  Sense strand starting at position 2242 of SEQ ID NO: 915362
ggaaacggugucgagaauu

SEQ ID NO: 1074121 - RNA, 19 nt, Artificial Sequence
  Description of Artificial Sequence: Synthetic oligonucleotide
  Antisense strand to SEQ ID NO: 1074120
aauucucgacaccguuucc

SEQ ID NO: 1074122 - RNA, 19 nt, Artificial Sequence
  Description of Artificial Sequence: Synthetic oligonucleotide
  Sense strand starting at position 2466 of SEQ ID NO: 915362
agugguuggcaccaaacaa

SEQ ID NO: 1074123 - RNA, 19 nt, Artificial Sequence
  Description of Artificial Sequence: Synthetic oligonucleotide
  Antisense strand to SEQ ID NO: 1074122
uuguuuggugccaaccacu

SEQ ID NO: 1074124 - RNA, 19 nt, Artificial Sequence
  Description of Artificial Sequence: Synthetic oligonucleotide
  Sense strand starting at position 2589 of SEQ ID NO: 915362
aggaauggguucucgaacu

SEQ ID NO: 1074125 - RNA, 19 nt, Artificial Sequence
  Description of Artificial Sequence: Synthetic oligonucleotide
  Antisense strand to SEQ ID NO: 1074124
aguucgagaacccauuccu

SEQ ID NO: 1074126 - RNA, 19 nt, Artificial Sequence
  Description of Artificial Sequence: Synthetic oligonucleotide
  Sense strand starting at position 2906 of SEQ ID NO: 915362
ccaguaggcccaggagaau

SEQ ID NO: 1074127 - RNA, 19 nt, Artificial Sequence
  Description of Artificial Sequence: Synthetic oligonucleotide
  Antisense strand to SEQ ID NO: 1074126
auucuccugggccuacugg

SEQ ID NO: 1074128 - RNA, 19 nt, Artificial Sequence
  Description of Artificial Sequence: Synthetic oligonucleotide
  Sense strand starting at position 3139 of SEQ ID NO: 915362
ggucauggcuguuuccgaa

SEQ ID NO: 1074129 - RNA, 19 nt, Artificial Sequence
  Description of Artificial Sequence: Synthetic oligonucleotide
  Antisense strand to SEQ ID NO: 1074128
uucggaaacagccaugacc

SEQ ID NO: 1074130 - RNA, 19 nt, Artificial Sequence
  Description of Artificial Sequence: Synthetic oligonucleotide
  Sense strand starting at position 3164 of SEQ ID NO: 915362
ccuuuauugcccuagcgga

SEQ ID NO: 1074131 - RNA, 19 nt, Artificial Sequence
  Description of Artificial Sequence: Synthetic oligonucleotide
  Antisense strand to SEQ ID NO: 1074130
uccgcuagggcaauaaagg

SEQ ID NO: 1074132 - RNA, 19 nt, Artificial Sequence
  Description of Artificial Sequence: Synthetic oligonucleotide
  Sense strand starting at position 3212 of SEQ ID NO: 915362
cugcuagccuguucuuaaa

SEQ ID NO: 1074133 - RNA, 19 nt, Artificial Sequence
  Description of Artificial Sequence: Synthetic oligonucleotide
  Antisense strand to SEQ ID NO: 1074132
uuuaagaacaggcuagcag

SEQ ID NO: 1074134 - RNA, 19 nt, Artificial Sequence
  Description of Artificial Sequence: Synthetic oligonucleotide
  Sense strand starting at position 3214 of SEQ ID NO: 915362
gcuagccuguucuuaaauu

SEQ ID NO: 1074135 - RNA, 19 nt, Artificial Sequence
  Description of Artificial Sequence: Synthetic oligonucleotide
  Antisense strand to SEQ ID NO: 1074134
aauuuaagaacaggcuagc

SEQ ID NO: 1074136 - RNA, 19 nt, Artificial Sequence
  Description of Artificial Sequence: Synthetic oligonucleotide
  Sense strand starting at position 3381 of SEQ ID NO: 915362
cggcaugaggacuguuaaa

SEQ ID NO: 1074137 - RNA, 19 nt, Artificial Sequence
  Description of Artificial Sequence: Synthetic oligonucleotide
  Antisense strand to SEQ ID NO: 1074136
uuuaacaguccucaugccg

SEQ ID NO: 1074138 - RNA, 19 nt, Artificial Sequence
  Description of Artificial Sequence: Synthetic oligonucleotide
  Sense strand starting at position 3408 of SEQ ID NO: 915362
ggugauucuuaugugcaac

SEQ ID NO: 1074139 - RNA, 19 nt, Artificial Sequence
  Description of Artificial Sequence: Synthetic oligonucleotide
  Antisense strand to SEQ ID NO: 1074138
guugcacauaagaaucacc

SEQ ID NO: 1074140 - RNA, 19 nt, Artificial Sequence
  Description of Artificial Sequence: Synthetic oligonucleotide
  Sense strand starting at position 3410 of SEQ ID NO: 915362
ugauucuuaugugcaacaa

SEQ ID NO: 1074141 - RNA, 19 nt, Artificial Sequence
  Description of Artificial Sequence: Synthetic oligonucleotide
  Antisense strand to SEQ ID NO: 1074140
uuguugcacauaagaauca

SEQ ID NO: 1074142 - RNA, 19 nt, Artificial Sequence
  Description of Artificial Sequence: Synthetic oligonucleotide
  Sense strand starting at position 3414 of SEQ ID NO: 915362
ucuuaugugcaacaaaguu

SEQ ID NO: 1074143 - RNA, 19 nt, Artificial Sequence
  Description of Artificial Sequence: Synthetic oligonucleotide
  Antisense strand to SEQ ID NO: 1074142
aacuuuguugcacauaaga

SEQ ID NO: 1074144 - RNA, 19 nt, Artificial Sequence
  Description of Artificial Sequence: Synthetic oligonucleotide
  Sense strand starting at position 3443 of SEQ ID NO: 915362
ugauguaggccaugucgau

SEQ ID NO: 1074145 - RNA, 19 nt, Artificial Sequence
  Description of Artificial Sequence: Synthetic oligonucleotide
  Antisense strand to SEQ ID NO: 1074144
aucgacauggccuacauca

SEQ ID NO: 1074146 - RNA, 19 nt, Artificial Sequence
  Description of Artificial Sequence: Synthetic oligonucleotide
  Sense strand starting at position 3562 of SEQ ID NO: 915362
gaagcaaaguggucccuua

SEQ ID NO: 1074147 - RNA, 19 nt, Artificial Sequence
  Description of Artificial Sequence: Synthetic oligonucleotide
  Antisense strand to SEQ ID NO: 1074146
uaagggaccacuuugcuuc

SEQ ID NO: 1074148 - RNA, 19 nt, Artificial Sequence
  Description of Artificial Sequence: Synthetic oligonucleotide
  Sense strand starting at position 3648 of SEQ ID NO: 915362
guaccaaggugaguuguuu

SEQ ID NO: 1074149 - RNA, 19 nt, Artificial Sequence
  Description of Artificial Sequence: Synthetic oligonucleotide
  Antisense strand to SEQ ID NO: 1074148
aaacaacucaccuugguac

SEQ ID NO: 1074150 - RNA, 19 nt, Artificial Sequence
  Description of Artificial Sequence: Synthetic oligonucleotide
  Sense strand starting at position 3699 of SEQ ID NO: 915362
aaucauaucccagguggaa

SEQ ID NO: 1074151 - RNA, 19 nt, Artificial Sequence
  Description of Artificial Sequence: Synthetic oligonucleotide
  Antisense strand to SEQ ID NO: 1074150
uuccaccugggauaugauu

SEQ ID NO: 1074152 - RNA, 19 nt, Artificial Sequence
  Description of Artificial Sequence: Synthetic oligonucleotide
  Sense strand starting at position 3841 of SEQ ID NO: 915362
cugugaaauagguagguaa

SEQ ID NO: 1074153 - RNA, 19 nt, Artificial Sequence
  Description of Artificial Sequence: Synthetic oligonucleotide
  Antisense strand to SEQ ID NO: 1074152
uuaccuaccuauuucacag

SEQ ID NO: 1074154 - RNA, 19 nt, Artificial Sequence
  Description of Artificial Sequence: Synthetic oligonucleotide
  Sense strand starting at position 3843 of SEQ ID NO: 915362
gugaaauagguagguaaua

SEQ ID NO: 1074155 - RNA, 19 nt, Artificial Sequence
  Description of Artificial Sequence: Synthetic oligonucleotide
  Antisense strand to SEQ ID NO: 1074154
uauuaccuaccuauuucac

SEQ ID NO: 1074156 - RNA, 19 nt, Artificial Sequence
  Description of Artificial Sequence: Synthetic oligonucleotide
  Sense strand starting at position 3855 of SEQ ID NO: 915362
gguaauagggcagguaaua

SEQ ID NO: 1074157 - RNA, 19 nt, Artificial Sequence
  Description of Artificial Sequence: Synthetic oligonucleotide
  Antisense strand to SEQ ID NO: 1074156
uauuaccugcccuauuacc

SEQ ID NO: 1074158 - RNA, 19 nt, Artificial Sequence
  Description of Artificial Sequence: Synthetic oligonucleotide
  Sense strand starting at position 3924 of SEQ ID NO: 915362
cuguaccauucuguuagaa

SEQ ID NO: 1074159 - RNA, 19 nt, Artificial Sequence
  Description of Artificial Sequence: Synthetic oligonucleotide
  Antisense strand to SEQ ID NO: 1074158
uucuaacagaaugguacag

SEQ ID NO: 1074160 - RNA, 19 nt, Artificial Sequence
  Description of Artificial Sequence: Synthetic oligonucleotide
  Sense strand starting at position 3934 of SEQ ID NO: 915362
cuguuagaacuguggguaa

SEQ ID NO: 1074161 - RNA, 19 nt, Artificial Sequence
  Description of Artificial Sequence: Synthetic oligonucleotide
  Antisense strand to SEQ ID NO: 1074160
uuacccacaguucuaacag

SEQ ID NO: 1074162 - RNA, 19 nt, Artificial Sequence
  Description of Artificial Sequence: Synthetic oligonucleotide
  Sense strand starting at position 3936 of SEQ ID NO: 915362
guuagaacuguggguaauu

SEQ ID NO: 1074163 - RNA, 19 nt, Artificial Sequence
  Description of Artificial Sequence: Synthetic oligonucleotide
  Antisense strand to SEQ ID NO: 1074162
aauuacccacaguucuaac

SEQ ID NO: 1074164 - RNA, 19 nt, Artificial Sequence
  Description of Artificial Sequence: Synthetic oligonucleotide
  Sense strand starting at position 3937 of SEQ ID NO: 915362
uuagaacuguggguaauua

SEQ ID NO: 1074165 - RNA, 19 nt, Artificial Sequence
  Description of Artificial Sequence: Synthetic oligonucleotide
  Antisense strand to SEQ ID NO: 1074164
uaauuacccacaguucuaa

SEQ ID NO: 1074166 - RNA, 19 nt, Artificial Sequence
  Description of Artificial Sequence: Synthetic oligonucleotide
  Sense strand starting at position 3949 of SEQ ID NO: 915362
guaauuacacuguauccau

SEQ ID NO: 1074167 - RNA, 19 nt, Artificial Sequence
  Description of Artificial Sequence: Synthetic oligonucleotide
  Antisense strand to SEQ ID NO: 1074166
auggauacaguguaauuac

SEQ ID NO: 1074168 - RNA, 19 nt, Artificial Sequence
  Description of Artificial Sequence: Synthetic oligonucleotide
  Sense strand starting at position 3956 of SEQ ID NO: 915362
cacuguauccauggguuga

SEQ ID NO: 1074169 - RNA, 19 nt, Artificial Sequence
  Description of Artificial Sequence: Synthetic oligonucleotide
  Antisense strand to SEQ ID NO: 1074168
ucaacccauggauacagug

SEQ ID NO: 1074170 - RNA, 19 nt, Artificial Sequence
  Description of Artificial Sequence: Synthetic oligonucleotide
  Sense strand starting at position 3960 of SEQ ID NO: 915362
guauccauggguugaguaa

SEQ ID NO: 1074171 - RNA, 19 nt, Artificial Sequence
  Description of Artificial Sequence: Synthetic oligonucleotide
  Antisense strand to SEQ ID NO: 1074170
uuacucaacccauggauac

SEQ ID NO: 1074172 - RNA, 19 nt, Artificial Sequence
  Description of Artificial Sequence: Synthetic oligonucleotide
  Sense strand starting at position 3961 of SEQ ID NO: 915362
uauccauggguugaguaau

SEQ ID NO: 1074173 - RNA, 19 nt, Artificial Sequence
  Description of Artificial Sequence: Synthetic oligonucleotide
  Antisense strand to SEQ ID NO: 1074172
auuacucaacccauggaua

SEQ ID NO: 1074174 - RNA, 19 nt, Artificial Sequence
  Description of Artificial Sequence: Synthetic oligonucleotide
  Sense strand starting at position 334 of SEQ ID NO: 915363
ccagaauccuguuugaaac

SEQ ID NO: 1074175 - RNA, 19 nt, Artificial Sequence
  Description of Artificial Sequence: Synthetic oligonucleotide
  Antisense strand to SEQ ID NO: 1074174
guuucaaacaggauucugg

SEQ ID NO: 1074176 - RNA, 19 nt, Artificial Sequence
  Description of Artificial Sequence: Synthetic oligonucleotide
  Sense strand starting at position 970 of SEQ ID NO: 915363
ucuuuacaccucugggaau

SEQ ID NO: 1074177 - RNA, 19 nt, Artificial Sequence
  Description of Artificial Sequence: Synthetic oligonucleotide
  Antisense strand to SEQ ID NO: 1074176
auucccagagguguaaaga

SEQ ID NO: 1074178 - RNA, 19 nt, Artificial Sequence
  Description of Artificial Sequence: Synthetic oligonucleotide
  Sense strand starting at position 983 of SEQ ID NO: 915363
gggaauucucuagaaucgu

SEQ ID NO: 1074179 - RNA, 19 nt, Artificial Sequence
  Description of Artificial Sequence: Synthetic oligonucleotide
  Antisense strand to SEQ ID NO: 1074178
acgauucuagagaauuccc

SEQ ID NO: 1074180 - RNA, 19 nt, Artificial Sequence
  Description of Artificial Sequence: Synthetic oligonucleotide
  Sense strand starting at position 1082 of SEQ ID NO: 915363
ucucacagugcagauauua

SEQ ID NO: 1074181 - RNA, 19 nt, Artificial Sequence
  Description of Artificial Sequence: Synthetic oligonucleotide
  Antisense strand to SEQ ID NO: 1074180
uaauaucugcacugugaga

SEQ ID NO: 1074182 - RNA, 19 nt, Artificial Sequence
  Description of Artificial Sequence: Synthetic oligonucleotide
  Sense strand starting at position 1252 of SEQ ID NO: 915363
uccuuuauuguggaaguga

SEQ ID NO: 1074183 - RNA, 19 nt, Artificial Sequence
  Description of Artificial Sequence: Synthetic oligonucleotide
  Antisense strand to SEQ ID NO: 1074182
ucacuuccacaauaaagga

SEQ ID NO: 1074184 - RNA, 19 nt, Artificial Sequence
  Description of Artificial Sequence: Synthetic oligonucleotide
  Sense strand starting at position 2114 of SEQ ID NO: 915363
ggagacuguuagaggaaga

SEQ ID NO: 1074185 - RNA, 19 nt, Artificial Sequence
  Description of Artificial Sequence: Synthetic oligonucleotide
  Antisense strand to SEQ ID NO: 1074184
ucuuccucuaacagucucc

SEQ ID NO: 1074186 - RNA, 19 nt, Artificial Sequence
  Description of Artificial Sequence: Synthetic oligonucleotide
  Sense strand starting at position 2210 of SEQ ID NO: 915363
ggaggauacugcuuaggug

SEQ ID NO: 1074187 - RNA, 19 nt, Artificial Sequence
  Description of Artificial Sequence: Synthetic oligonucleotide
  Antisense strand to SEQ ID NO: 1074186
caccuaagcaguauccucc

SEQ ID NO: 1074188 - RNA, 19 nt, Artificial Sequence
  Description of Artificial Sequence: Synthetic oligonucleotide
  Sense strand starting at position 2262 of SEQ ID NO: 915363
cgggcucaucaugaaacaa

SEQ ID NO: 1074189 - RNA, 19 nt, Artificial Sequence
  Description of Artificial Sequence: Synthetic oligonucleotide
  Antisense strand to SEQ ID NO: 1074188
uuguuucaugaugagcccg

SEQ ID NO: 1074190 - RNA, 19 nt, Artificial Sequence
  Description of Artificial Sequence: Synthetic oligonucleotide
  Sense strand starting at position 2326 of SEQ ID NO: 915363
gguaaccugagcgaucaaa

SEQ ID NO: 1074191 - RNA, 19 nt, Artificial Sequence
  Description of Artificial Sequence: Synthetic oligonucleotide
  Antisense strand to SEQ ID NO: 1074190
uuugaucgcucagguuacc

SEQ ID NO: 1074192 - RNA, 19 nt, Artificial Sequence
  Description of Artificial Sequence: Synthetic oligonucleotide
  Sense strand starting at position 2336 of SEQ ID NO: 915363
gcgaucaaagauugaggaa

SEQ ID NO: 1074193 - RNA, 19 nt, Artificial Sequence
  Description of Artificial Sequence: Synthetic oligonucleotide
  Antisense strand to SEQ ID NO: 1074192
uuccucaaucuuugaucgc

SEQ ID NO: 1074194 - RNA, 19 nt, Artificial Sequence
  Description of Artificial Sequence: Synthetic oligonucleotide
  Sense strand starting at position 2345 of SEQ ID NO: 915363
gauugaggaaagcguaaua

SEQ ID NO: 1074195 - RNA, 19 nt, Artificial Sequence
  Description of Artificial Sequence: Synthetic oligonucleotide
  Antisense strand to SEQ ID NO: 1074194
uauuacgcuuuccucaauc

SEQ ID NO: 1074196 - RNA, 19 nt, Artificial Sequence
  Description of Artificial Sequence: Synthetic oligonucleotide
  Sense strand starting at position 2532 of SEQ ID NO: 915363
cgauuaaugagaugaaggu

SEQ ID NO: 1074197 - RNA, 19 nt, Artificial Sequence
  Description of Artificial Sequence: Synthetic oligonucleotide
  Antisense strand to SEQ ID NO: 1074196
accuucaucucauuaaucg

SEQ ID NO: 1074198 - RNA, 19 nt, Artificial Sequence
  Description of Artificial Sequence: Synthetic oligonucleotide
  Sense strand starting at position 2545 of SEQ ID NO: 915363
gaagguuaccgguaggaug

SEQ ID NO: 1074199 - RNA, 19 nt, Artificial Sequence
  Description of Artificial Sequence: Synthetic oligonucleotide
  Antisense strand to SEQ ID NO: 1074198
cauccuaccgguaaccuuc

SEQ ID NO: 1074200 - RNA, 19 nt, Artificial Sequence
  Description of Artificial Sequence: Synthetic oligonucleotide
  Sense strand starting at position 2602 of SEQ ID NO: 915363
uugauaacgaagugaaaug

SEQ ID NO: 1074201 - RNA, 19 nt, Artificial Sequence
  Description of Artificial Sequence: Synthetic oligonucleotide
  Antisense strand to SEQ ID NO: 1074200
cauuucacuucguuaucaa

SEQ ID NO: 1074202 - RNA, 19 nt, Artificial Sequence
  Description of Artificial Sequence: Synthetic oligonucleotide
  Sense strand starting at position 2677 of SEQ ID NO: 915363
aagggauuauaucauuugu

SEQ ID NO: 1074203 - RNA, 19 nt, Artificial Sequence
  Description of Artificial Sequence: Synthetic oligonucleotide
  Antisense strand to SEQ ID NO: 1074202
acaaaugauauaaucccuu

SEQ ID NO: 1074204 - RNA, 19 nt, Artificial Sequence
  Description of Artificial Sequence: Synthetic oligonucleotide
  Sense strand starting at position 2698 of SEQ ID NO: 915363
ugugauugugggcaagaau

SEQ ID NO: 1074205 - RNA, 19 nt, Artificial Sequence
  Description of Artificial Sequence: Synthetic oligonucleotide
  Antisense strand to SEQ ID NO: 1074204
auucuugcccacaaucaca

SEQ ID NO: 1074206 - RNA, 19 nt, Artificial Sequence
  Description of Artificial Sequence: Synthetic oligonucleotide
  Sense strand starting at position 2755 of SEQ ID NO: 915363
aaagcaggacucgguaaau

SEQ ID NO: 1074207 - RNA, 19 nt, Artificial Sequence
  Description of Artificial Sequence: Synthetic oligonucleotide
  Antisense strand to SEQ ID NO: 1074206
auuuaccgaguccugcuuu

SEQ ID NO: 1074208 - RNA, 19 nt, Artificial Sequence
  Description of Artificial Sequence: Synthetic oligonucleotide
  Sense strand starting at position 2837 of SEQ ID NO: 915363
gaguauagagccgggaaga

SEQ ID NO: 1074209 - RNA, 19 nt, Artificial Sequence
  Description of Artificial Sequence: Synthetic oligonucleotide
  Antisense strand to SEQ ID NO: 1074208
ucuucccggcucuauacuc

SEQ ID NO: 1074210 - RNA, 19 nt, Artificial Sequence
  Description of Artificial Sequence: Synthetic oligonucleotide
  Sense strand starting at position 2839 of SEQ ID NO: 915363
guauagagccgggaagagu

SEQ ID NO: 1074211 - RNA, 19 nt, Artificial Sequence
  Description of Artificial Sequence: Synthetic oligonucleotide
  Antisense strand to SEQ ID NO: 1074210
acucuucccggcucuauac

SEQ ID NO: 1074212 - RNA, 19 nt, Artificial Sequence
  Description of Artificial Sequence: Synthetic oligonucleotide
  Sense strand starting at position 2859 of SEQ ID NO: 915363
gggaaugacaggugugaua

SEQ ID NO: 1074213 - RNA, 19 nt, Artificial Sequence
  Description of Artificial Sequence: Synthetic oligonucleotide
  Antisense strand to SEQ ID NO: 1074212
uaucacaccugucauuccc

SEQ ID NO: 1074214 - RNA, 19 nt, Artificial Sequence
  Description of Artificial Sequence: Synthetic oligonucleotide
  Sense strand starting at position 2870 of SEQ ID NO: 915363
gugugauaggauuggagug

SEQ ID NO: 1074215 - RNA, 19 nt, Artificial Sequence
  Description of Artificial Sequence: Synthetic oligonucleotide
  Antisense strand to SEQ ID NO: 1074214
cacuccaauccuaucacac

SEQ ID NO: 1074216 - RNA, 19 nt, Artificial Sequence
  Description of Artificial Sequence: Synthetic oligonucleotide
  Sense strand starting at position 2946 of SEQ ID NO: 915363
gagaguccucaucagguua

SEQ ID NO: 1074217 - RNA, 19 nt, Artificial Sequence
  Description of Artificial Sequence: Synthetic oligonucleotide
  Antisense strand to SEQ ID NO: 1074216
uaaccugaugaggacucuc

SEQ ID NO: 1074218 - RNA, 19 nt, Artificial Sequence
  Description of Artificial Sequence: Synthetic oligonucleotide
  Sense strand starting at position 3195 of SEQ ID NO: 915363
agcuacaaucugggaauua

SEQ ID NO: 1074219 - RNA, 19 nt, Artificial Sequence
  Description of Artificial Sequence: Synthetic oligonucleotide
  Antisense strand to SEQ ID NO: 1074218
uaauucccagauuguagcu

SEQ ID NO: 1074220 - RNA, 19 nt, Artificial Sequence
  Description of Artificial Sequence: Synthetic oligonucleotide
  Sense strand starting at position 3219 of SEQ ID NO: 915363
auccaagcuguuuaaagau

SEQ ID NO: 1074221 - RNA, 19 nt, Artificial Sequence
  Description of Artificial Sequence: Synthetic oligonucleotide
  Antisense strand to SEQ ID NO: 1074220
aucuuuaaacagcuuggau

SEQ ID NO: 1074222 - RNA, 19 nt, Artificial Sequence
  Description of Artificial Sequence: Synthetic oligonucleotide
  Sense strand starting at position 3251 of SEQ ID NO: 915363
uugagauacugacuuuccu

SEQ ID NO: 1074223 - RNA, 19 nt, Artificial Sequence
  Description of Artificial Sequence: Synthetic oligonucleotide
  Antisense strand to SEQ ID NO: 1074222
aggaaagucaguaucucaa

SEQ ID NO: 1074224 - RNA, 19 nt, Artificial Sequence
  Description of Artificial Sequence: Synthetic oligonucleotide
  Sense strand starting at position 3262 of SEQ ID NO: 915363
acuuuccugccaggaaaga

SEQ ID NO: 1074225 - RNA, 19 nt, Artificial Sequence
  Description of Artificial Sequence: Synthetic oligonucleotide
  Antisense strand to SEQ ID NO: 1074224
ucuuuccuggcaggaaagu

SEQ ID NO: 1074226 - RNA, 19 nt, Artificial Sequence
  Description of Artificial Sequence: Synthetic oligonucleotide
  Sense strand starting at position 3263 of SEQ ID NO: 915363
cuuuccugccaggaaagau

SEQ ID NO: 1074227 - RNA, 19 nt, Artificial Sequence
  Description of Artificial Sequence: Synthetic oligonucleotide
  Antisense strand to SEQ ID NO: 1074226
aucuuuccuggcaggaaag

SEQ ID NO: 1074228 - RNA, 19 nt, Artificial Sequence
  Description of Artificial Sequence: Synthetic oligonucleotide
  Sense strand starting at position 3339 of SEQ ID NO: 915363
uuugguugauaaucggaaa

SEQ ID NO: 1074229 - RNA, 19 nt, Artificial Sequence
  Description of Artificial Sequence: Synthetic oligonucleotide
  Antisense strand to SEQ ID NO: 1074228
uuuccgauuaucaaccaaa

SEQ ID NO: 1074230 - RNA, 19 nt, Artificial Sequence
  Description of Artificial Sequence: Synthetic oligonucleotide
  Sense strand starting at position 3340 of SEQ ID NO: 915363
uugguugauaaucggaaag

SEQ ID NO: 1074231 - RNA, 19 nt, Artificial Sequence
  Description of Artificial Sequence: Synthetic oligonucleotide
  Antisense strand to SEQ ID NO: 1074230
cuuuccgauuaucaaccaa

SEQ ID NO: 1074232 - RNA, 19 nt, Artificial Sequence
  Description of Artificial Sequence: Synthetic oligonucleotide
  Sense strand starting at position 3415 of SEQ ID NO: 915363
uuuccauauguagaaaugu

SEQ ID NO: 1074233 - RNA, 19 nt, Artificial Sequence
  Description of Artificial Sequence: Synthetic oligonucleotide
  Antisense strand to SEQ ID NO: 1074232
acauuucuacauauggaaa

SEQ ID NO: 1074234 - RNA, 19 nt, Artificial Sequence
  Description of Artificial Sequence: Synthetic oligonucleotide
  Sense strand starting at position 3434 of SEQ ID NO: 915363
auacacaacuguguauaau

SEQ ID NO: 1074235 - RNA, 19 nt, Artificial Sequence
  Description of Artificial Sequence: Synthetic oligonucleotide
  Antisense strand to SEQ ID NO: 1074234
auuauacacaguuguguau

SEQ ID NO: 1074236 - RNA, 19 nt, Artificial Sequence
  Description of Artificial Sequence: Synthetic oligonucleotide
  Sense strand starting at position 3458 of SEQ ID NO: 915363
uguugaaacuauccauaag

SEQ ID NO: 1074237 - RNA, 19 nt, Artificial Sequence
  Description of Artificial Sequence: Synthetic oligonucleotide
  Antisense strand to SEQ ID NO: 1074236
cuuauggauaguuucaaca

SEQ ID NO: 1074238 - RNA, 19 nt, Artificial Sequence
  Description of Artificial Sequence: Synthetic oligonucleotide
  Sense strand starting at position 3514 of SEQ ID NO: 915363
ggcgguguuugcauuagaa

SEQ ID NO: 1074239 - RNA, 19 nt, Artificial Sequence
  Description of Artificial Sequence: Synthetic oligonucleotide
  Antisense strand to SEQ ID NO: 1074238
uucuaaugcaaacaccgcc

SEQ ID NO: 1074240 - RNA, 19 nt, Artificial Sequence
  Description of Artificial Sequence: Synthetic oligonucleotide
  Sense strand starting at position 3637 of SEQ ID NO: 915363
uaggaaugguuucuuaaau

SEQ ID NO: 1074241 - RNA, 19 nt, Artificial Sequence
  Description of Artificial Sequence: Synthetic oligonucleotide
  Antisense strand to SEQ ID NO: 1074240
auuuaagaaaccauuccua

SEQ ID NO: 1074242 - RNA, 19 nt, Artificial Sequence
  Description of Artificial Sequence: Synthetic oligonucleotide
  Sense strand starting at position 3638 of SEQ ID NO: 915363
aggaaugguuucuuaaauc

SEQ ID NO: 1074243 - RNA, 19 nt, Artificial Sequence
  Description of Artificial Sequence: Synthetic oligonucleotide
  Antisense strand to SEQ ID NO: 1074242
gauuuaagaaaccauuccu

SEQ ID NO: 1074244 - RNA, 19 nt, Artificial Sequence
  Description of Artificial Sequence: Synthetic oligonucleotide
  Sense strand starting at position 3827 of SEQ ID NO: 915363
aguggcagaaucugaagau

SEQ ID NO: 1074245 - RNA, 19 nt, Artificial Sequence
  Description of Artificial Sequence: Synthetic oligonucleotide
  Antisense strand to SEQ ID NO: 1074244
aucuucagauucugccacu

SEQ ID NO: 1074246 - RNA, 19 nt, Artificial Sequence
  Description of Artificial Sequence: Synthetic oligonucleotide
  Sense strand starting at position 3873 of SEQ ID NO: 915363
gugaucuuggcaggaaaga

SEQ ID NO: 1074247 - RNA, 19 nt, Artificial Sequence
  Description of Artificial Sequence: Synthetic oligonucleotide
  Antisense strand to SEQ ID NO: 1074246
ucuuuccugccaagaucac

SEQ ID NO: 1074248 - RNA, 19 nt, Artificial Sequence
  Description of Artificial Sequence: Synthetic oligonucleotide
  Sense strand starting at position 3916 of SEQ ID NO: 915363
cauugaaaugcugaguugu

SEQ ID NO: 1074249 - RNA, 19 nt, Artificial Sequence
  Description of Artificial Sequence: Synthetic oligonucleotide
  Antisense strand to SEQ ID NO: 1074248
acaacucagcauuucaaug

SEQ ID NO: 1074250 - RNA, 19 nt, Artificial Sequence
  Description of Artificial Sequence: Synthetic oligonucleotide
  Sense strand starting at position 3929 of SEQ ID NO: 915363
aguuguaugauauagucua

SEQ ID NO: 1074251 - RNA, 19 nt, Artificial Sequence
  Description of Artificial Sequence: Synthetic oligonucleotide
  Antisense strand to SEQ ID NO: 1074250
uagacuauaucauacaacu

SEQ ID NO: 1074252 - RNA, 19 nt, Artificial Sequence
  Description of Artificial Sequence: Synthetic oligonucleotide
  Sense strand starting at position 3950 of SEQ ID NO: 915363
ucguuugugagugaaggga

SEQ ID NO: 1074253 - RNA, 19 nt, Artificial Sequence
  Description of Artificial Sequence: Synthetic oligonucleotide
  Antisense strand to SEQ ID NO: 1074252
ucccuucacucacaaacga

SEQ ID NO: 1074254 - RNA, 19 nt, Artificial Sequence
  Description of Artificial Sequence: Synthetic oligonucleotide
  Sense strand starting at position 343 of SEQ ID NO: 915364
ggccuccugccagaaguaa

SEQ ID NO: 1074255 - RNA, 19 nt, Artificial Sequence
  Description of Artificial Sequence: Synthetic oligonucleotide
  Antisense strand to SEQ ID NO: 1074254
uuacuucuggcaggaggcc

SEQ ID NO: 1074256 - RNA, 19 nt, Artificial Sequence
  Description of Artificial Sequence: Synthetic oligonucleotide
  Sense strand starting at position 373 of SEQ ID NO: 915364
ccgaguccacuggaaacua

SEQ ID NO: 1074257 - RNA, 19 nt, Artificial Sequence
  Description of Artificial Sequence: Synthetic oligonucleotide
  Antisense strand to SEQ ID NO: 1074256
uaguuuccaguggacucgg

SEQ ID NO: 1074258 - RNA, 19 nt, Artificial Sequence
  Description of Artificial Sequence: Synthetic oligonucleotide
  Sense strand starting at position 456 of SEQ ID NO: 915364
aaguccaggucugguuuau

SEQ ID NO: 1074259 - RNA, 19 nt, Artificial Sequence
  Description of Artificial Sequence: Synthetic oligonucleotide
  Antisense strand to SEQ ID NO: 1074258
auaaaccagaccuggacuu

SEQ ID NO: 1074260 - RNA, 19 nt, Artificial Sequence
  Description of Artificial Sequence: Synthetic oligonucleotide
  Sense strand starting at position 460 of SEQ ID NO: 915364
ccaggucugguuuaucuca

SEQ ID NO: 1074261 - RNA, 19 nt, Artificial Sequence
  Description of Artificial Sequence: Synthetic oligonucleotide
  Antisense strand to SEQ ID NO: 1074260
ugagauaaaccagaccugg

SEQ ID NO: 1074262 - RNA, 19 nt, Artificial Sequence
  Description of Artificial Sequence: Synthetic oligonucleotide
  Sense strand starting at position 512 of SEQ ID NO: 915364
cuaagugcuuaguagcaaa

SEQ ID NO: 1074263 - RNA, 19 nt, Artificial Sequence
  Description of Artificial Sequence: Synthetic oligonucleotide
  Antisense strand to SEQ ID NO: 1074262
uuugcuacuaagcacuuag

SEQ ID NO: 1074264 - RNA, 19 nt, Artificial Sequence
  Description of Artificial Sequence: Synthetic oligonucleotide
  Sense strand starting at position 515 of SEQ ID NO: 915364
agugcuuaguagcaaaugu

SEQ ID NO: 1074265 - RNA, 19 nt, Artificial Sequence
  Description of Artificial Sequence: Synthetic oligonucleotide
  Antisense strand to SEQ ID NO: 1074264
acauuugcuacuaagcacu

SEQ ID NO: 1074266 - RNA, 19 nt, Artificial Sequence
  Description of Artificial Sequence: Synthetic oligonucleotide
  Sense strand starting at position 682 of SEQ ID NO: 915364
cuaucaagugucugucaga

SEQ ID NO: 1074267 - RNA, 19 nt, Artificial Sequence
  Description of Artificial Sequence: Synthetic oligonucleotide
  Antisense strand to SEQ ID NO: 1074266
ucugacagacacuugauag

SEQ ID NO: 1074268 - RNA, 19 nt, Artificial Sequence
  Description of Artificial Sequence: Synthetic oligonucleotide
  Sense strand starting at position 683 of SEQ ID NO: 915364
uaucaagugucugucagau

SEQ ID NO: 1074269 - RNA, 19 nt, Artificial Sequence
  Description of Artificial Sequence: Synthetic oligonucleotide
  Antisense strand to SEQ ID NO: 1074268
aucugacagacacuugaua

SEQ ID NO: 1074270 - RNA, 19 nt, Artificial Sequence
  Description of Artificial Sequence: Synthetic oligonucleotide
  Sense strand starting at position 685 of SEQ ID NO: 915364
ucaagugucugucagauau

SEQ ID NO: 1074271 - RNA, 19 nt, Artificial Sequence
  Description of Artificial Sequence: Synthetic oligonucleotide
  Antisense strand to SEQ ID NO: 1074270
auaucugacagacacuuga

SEQ ID NO: 1074272 - RNA, 19 nt, Artificial Sequence
  Description of Artificial Sequence: Synthetic oligonucleotide
  Sense strand starting at position 687 of SEQ ID NO: 915364
aagugucugucagauauca

SEQ ID NO: 1074273 - RNA, 19 nt, Artificial Sequence
  Description of Artificial Sequence: Synthetic oligonucleotide
  Antisense strand to SEQ ID NO: 1074272
ugauaucugacagacacuu

SEQ ID NO: 1074274 - RNA, 19 nt, Artificial Sequence
  Description of Artificial Sequence: Synthetic oligonucleotide
  Sense strand starting at position 689 of SEQ ID NO: 915364
gugucugucagauaucagg

SEQ ID NO: 1074275 - RNA, 19 nt, Artificial Sequence
  Description of Artificial Sequence: Synthetic oligonucleotide
  Antisense strand to SEQ ID NO: 1074274
ccugauaucugacagacac

SEQ ID NO: 1074276 - RNA, 19 nt, Artificial Sequence
  Description of Artificial Sequence: Synthetic oligonucleotide
  Sense strand starting at position 711 of SEQ ID NO: 915364
augugaaggucccacugaa

SEQ ID NO: 1074277 - RNA, 19 nt, Artificial Sequence
  Description of Artificial Sequence: Synthetic oligonucleotide
  Antisense strand to SEQ ID NO: 1074276
uucagugggaccuucacau

SEQ ID NO: 1074278 - RNA, 19 nt, Artificial Sequence
  Description of Artificial Sequence: Synthetic oligonucleotide
  Sense strand starting at position 778 of SEQ ID NO: 915364
acucacacucaucguagaa

SEQ ID NO: 1074279 - RNA, 19 nt, Artificial Sequence
  Description of Artificial Sequence: Synthetic oligonucleotide
  Antisense strand to SEQ ID NO: 1074278
uucuacgaugagugugagu

SEQ ID NO: 1074280 - RNA, 19 nt, Artificial Sequence
  Description of Artificial Sequence: Synthetic oligonucleotide
  Sense strand starting at position 886 of SEQ ID NO: 915364
ggcagauggucuccaagga

SEQ ID NO: 1074281 - RNA, 19 nt, Artificial Sequence
  Description of Artificial Sequence: Synthetic oligonucleotide
  Antisense strand to SEQ ID NO: 1074280
uccuuggagaccaucugcc

SEQ ID NO: 1074282 - RNA, 19 nt, Artificial Sequence
  Description of Artificial Sequence: Synthetic oligonucleotide
  Sense strand starting at position 957 of SEQ ID NO: 915364
gggaaaccgccauacucaa

SEQ ID NO: 1074283 - RNA, 19 nt, Artificial Sequence
  Description of Artificial Sequence: Synthetic oligonucleotide
  Antisense strand to SEQ ID NO: 1074282
uugaguauggcgguuuccc

SEQ ID NO: 1074284 - RNA, 19 nt, Artificial Sequence
  Description of Artificial Sequence: Synthetic oligonucleotide
  Sense strand starting at position 981 of SEQ ID NO: 915364
cgcagaaggucguaguacu

SEQ ID NO: 1074285 - RNA, 19 nt, Artificial Sequence
  Description of Artificial Sequence: Synthetic oligonucleotide
  Antisense strand to SEQ ID NO: 1074284
aguacuacgaccuucugcg

SEQ ID NO: 1074286 - RNA, 19 nt, Artificial Sequence
  Description of Artificial Sequence: Synthetic oligonucleotide
  Sense strand starting at position 991 of SEQ ID NO: 915364
cguaguacuggccguguau

SEQ ID NO: 1074287 - RNA, 19 nt, Artificial Sequence
  Description of Artificial Sequence: Synthetic oligonucleotide
  Antisense strand to SEQ ID NO: 1074286
auacacggccaguacuacg

SEQ ID NO: 1074288 - RNA, 19 nt, Artificial Sequence
  Description of Artificial Sequence: Synthetic oligonucleotide
  Sense strand starting at position 1002 of SEQ ID NO: 915364
ccguguaugucaccuguga

SEQ ID NO: 1074289 - RNA, 19 nt, Artificial Sequence
  Description of Artificial Sequence: Synthetic oligonucleotide
  Antisense strand to SEQ ID NO: 1074288
ucacaggugacauacacgg

SEQ ID NO: 1074290 - RNA, 19 nt, Artificial Sequence
  Description of Artificial Sequence: Synthetic oligonucleotide
  Sense strand starting at position 1006 of SEQ ID NO: 915364
guaugucaccugugaccca

SEQ ID NO: 1074291 - RNA, 19 nt, Artificial Sequence
  Description of Artificial Sequence: Synthetic oligonucleotide
  Antisense strand to SEQ ID NO: 1074290
ugggucacaggugacauac

SEQ ID NO: 1074292 - RNA, 19 nt, Artificial Sequence
  Description of Artificial Sequence: Synthetic oligonucleotide
  Sense strand starting at position 1030 of SEQ ID NO: 915364
ccggguaagcuagaugcaa

SEQ ID NO: 1074293 - RNA, 19 nt, Artificial Sequence
  Description of Artificial Sequence: Synthetic oligonucleotide
  Antisense strand to SEQ ID NO: 1074292
uugcaucuagcuuacccgg

SEQ ID NO: 1074294 - RNA, 19 nt, Artificial Sequence
  Description of Artificial Sequence: Synthetic oligonucleotide
  Sense strand starting at position 1181 of SEQ ID NO: 915364
ccuccagcuccagaagaau

SEQ ID NO: 1074295 - RNA, 19 nt, Artificial Sequence
  Description of Artificial Sequence: Synthetic oligonucleotide
  Antisense strand to SEQ ID NO: 1074294
auucuucuggagcuggagg

SEQ ID NO: 1074296 - RNA, 19 nt, Artificial Sequence
  Description of Artificial Sequence: Synthetic oligonucleotide
  Sense strand starting at position 1192 of SEQ ID NO: 915364
agaagaaugggcuggcuca

SEQ ID NO: 1074297 - RNA, 19 nt, Artificial Sequence
  Description of Artificial Sequence: Synthetic oligonucleotide
  Antisense strand to SEQ ID NO: 1074296
ugagccagcccauucuucu

SEQ ID NO: 1074298 - RNA, 19 nt, Artificial Sequence
  Description of Artificial Sequence: Synthetic oligonucleotide
  Sense strand starting at position 2249 of SEQ ID NO: 915364
gguggaagguguugugaac

SEQ ID NO: 1074299 - RNA, 19 nt, Artificial Sequence
  Description of Artificial Sequence: Synthetic oligonucleotide
  Antisense strand to SEQ ID NO: 1074298
guucacaacaccuuccacc

SEQ ID NO: 1074300 - RNA, 19 nt, Artificial Sequence
  Description of Artificial Sequence: Synthetic oligonucleotide
  Sense strand starting at position 2255 of SEQ ID NO: 915364
agguguugugaacauguua

SEQ ID NO: 1074301 - RNA, 19 nt, Artificial Sequence
  Description of Artificial Sequence: Synthetic oligonucleotide
  Antisense strand to SEQ ID NO: 1074300
uaacauguucacaacaccu

SEQ ID NO: 1074302 - RNA, 19 nt, Artificial Sequence
  Description of Artificial Sequence: Synthetic oligonucleotide
  Sense strand starting at position 2260 of SEQ ID NO: 915364
uugugaacauguuaauaac

SEQ ID NO: 1074303 - RNA, 19 nt, Artificial Sequence
  Description of Artificial Sequence: Synthetic oligonucleotide
  Antisense strand to SEQ ID NO: 1074302
guuauuaacauguucacaa

SEQ ID NO: 1074304 - RNA, 19 nt, Artificial Sequence
  Description of Artificial Sequence: Synthetic oligonucleotide
  Sense strand starting at position 2295 of SEQ ID NO: 915364
aggguuaacugcuccaagu

SEQ ID NO: 1074305 - RNA, 19 nt, Artificial Sequence
  Description of Artificial Sequence: Synthetic oligonucleotide
  Antisense strand to SEQ ID NO: 1074304
acuuggagcaguuaacccu

SEQ ID NO: 1074306 - RNA, 19 nt, Artificial Sequence
  Description of Artificial Sequence: Synthetic oligonucleotide
  Sense strand starting at position 2817 of SEQ ID NO: 915364
ugaguagcacaguaauauu

SEQ ID NO: 1074307 - RNA, 19 nt, Artificial Sequence
  Description of Artificial Sequence: Synthetic oligonucleotide
  Antisense strand to SEQ ID NO: 1074306
aauauuacugugcuacuca

SEQ ID NO: 1074308 - RNA, 19 nt, Artificial Sequence
  Description of Artificial Sequence: Synthetic oligonucleotide
  Sense strand starting at position 3024 of SEQ ID NO: 915364
augggagccuccuguaauc

SEQ ID NO: 1074309 - RNA, 19 nt, Artificial Sequence
  Description of Artificial Sequence: Synthetic oligonucleotide
  Antisense strand to SEQ ID NO: 1074308
gauuacaggaggcucccau

SEQ ID NO: 1074310 - RNA, 19 nt, Artificial Sequence
  Description of Artificial Sequence: Synthetic oligonucleotide
  Sense strand starting at position 3163 of SEQ ID NO: 915364
ccuuaauucuuguuggaac

SEQ ID NO: 1074311 - RNA, 19 nt, Artificial Sequence
  Description of Artificial Sequence: Synthetic oligonucleotide
  Antisense strand to SEQ ID NO: 1074310
guuccaacaagaauuaagg

SEQ ID NO: 1074312 - RNA, 19 nt, Artificial Sequence
  Description of Artificial Sequence: Synthetic oligonucleotide
  Sense strand starting at position 3183 of SEQ ID NO: 915364
cugaguuggugcuuuacau

SEQ ID NO: 1074313 - RNA, 19 nt, Artificial Sequence
  Description of Artificial Sequence: Synthetic oligonucleotide
  Antisense strand to SEQ ID NO: 1074312
auguaaagcaccaacucag

SEQ ID NO: 1074314 - RNA, 19 nt, Artificial Sequence
  Description of Artificial Sequence: Synthetic oligonucleotide
  Sense strand starting at position 3579 of SEQ ID NO: 915364
ggucaagaguuugaccaau

SEQ ID NO: 1074315 - RNA, 19 nt, Artificial Sequence
  Description of Artificial Sequence: Synthetic oligonucleotide
  Antisense strand to SEQ ID NO: 1074314
auuggucaaacucuugacc

SEQ ID NO: 1074316 - RNA, 19 nt, Artificial Sequence
  Description of Artificial Sequence: Synthetic oligonucleotide
  Sense strand starting at position 3581 of SEQ ID NO: 915364
ucaagaguuugaccaaugu

SEQ ID NO: 1074317 - RNA, 19 nt, Artificial Sequence
  Description of Artificial Sequence: Synthetic oligonucleotide
  Antisense strand to SEQ ID NO: 1074316
acauuggucaaacucuuga

SEQ ID NO: 1074318 - RNA, 19 nt, Artificial Sequence
  Description of Artificial Sequence: Synthetic oligonucleotide
  Sense strand starting at position 3585 of SEQ ID NO: 915364
gaguuugaccaauguggca

SEQ ID NO: 1074319 - RNA, 19 nt, Artificial Sequence
  Description of Artificial Sequence: Synthetic oligonucleotide
  Antisense strand to SEQ ID NO: 1074318
ugccacauuggucaaacuc

SEQ ID NO: 1074320 - RNA, 19 nt, Artificial Sequence
  Description of Artificial Sequence: Synthetic oligonucleotide
  Sense strand starting at position 3587 of SEQ ID NO: 915364
guuugaccaauguggcaaa

SEQ ID NO: 1074321 - RNA, 19 nt, Artificial Sequence
  Description of Artificial Sequence: Synthetic oligonucleotide
  Antisense strand to SEQ ID NO: 1074320
uuugccacauuggucaaac

SEQ ID NO: 1074322 - RNA, 19 nt, Artificial Sequence
  Description of Artificial Sequence: Synthetic oligonucleotide
  Sense strand starting at position 42 of SEQ ID NO: 915365
aaggauaagugaguccuca

SEQ ID NO: 1074323 - RNA, 19 nt, Artificial Sequence
  Description of Artificial Sequence: Synthetic oligonucleotide
  Antisense strand to SEQ ID NO: 1074322
ugaggacucacuuauccuu

SEQ ID NO: 1074324 - RNA, 19 nt, Artificial Sequence
  Description of Artificial Sequence: Synthetic oligonucleotide
  Sense strand starting at position 46 of SEQ ID NO: 915365
auaagugaguccucaggag

SEQ ID NO: 1074325 - RNA, 19 nt, Artificial Sequence
  Description of Artificial Sequence: Synthetic oligonucleotide
  Antisense strand to SEQ ID NO: 1074324
cuccugaggacucacuuau

SEQ ID NO: 1074326 - RNA, 19 nt, Artificial Sequence
  Description of Artificial Sequence: Synthetic oligonucleotide
  Sense strand starting at position 373 of SEQ ID NO: 915365
gagacauaagccugaguug

SEQ ID NO: 1074327 - RNA, 19 nt, Artificial Sequence
  Description of Artificial Sequence: Synthetic oligonucleotide
  Antisense strand to SEQ ID NO: 1074326
caacucaggcuuaugucuc

SEQ ID NO: 1074328 - RNA, 19 nt, Artificial Sequence
  Description of Artificial Sequence: Synthetic oligonucleotide
  Sense strand starting at position 687 of SEQ ID NO: 915365
gcugucccagcuuaucaua

SEQ ID NO: 1074329 - RNA, 19 nt, Artificial Sequence
  Description of Artificial Sequence: Synthetic oligonucleotide
  Antisense strand to SEQ ID NO: 1074328
uaugauaagcugggacagc

SEQ ID NO: 1074330 - RNA, 19 nt, Artificial Sequence
  Description of Artificial Sequence: Synthetic oligonucleotide
  Sense strand starting at position 883 of SEQ ID NO: 915365
guuuguagucagcugcauu

SEQ ID NO: 1074331 - RNA, 19 nt, Artificial Sequence
  Description of Artificial Sequence: Synthetic oligonucleotide
  Antisense strand to SEQ ID NO: 1074330
aaugcagcugacuacaaac

SEQ ID NO: 1074332 - RNA, 19 nt, Artificial Sequence
  Description of Artificial Sequence: Synthetic oligonucleotide
  Sense strand starting at position 970 of SEQ ID NO: 915365
ugagucaccgucugaacaa

SEQ ID NO: 1074333 - RNA, 19 nt, Artificial Sequence
  Description of Artificial Sequence: Synthetic oligonucleotide
  Antisense strand to SEQ ID NO: 1074332
uuguucagacggugacuca

SEQ ID NO: 1074334 - RNA, 19 nt, Artificial Sequence
  Description of Artificial Sequence: Synthetic oligonucleotide
  Sense strand starting at position 1293 of SEQ ID NO: 915365
gcagaagugacuuagguca

SEQ ID NO: 1074335 - RNA, 19 nt, Artificial Sequence
  Description of Artificial Sequence: Synthetic oligonucleotide
  Antisense strand to SEQ ID NO: 1074334
ugaccuaagucacuucugc

SEQ ID NO: 1074336 - RNA, 19 nt, Artificial Sequence
  Description of Artificial Sequence: Synthetic oligonucleotide
  Sense strand starting at position 1300 of SEQ ID NO: 915365
ugacuuaggucaggcaaga

SEQ ID NO: 1074337 - RNA, 19 nt, Artificial Sequence
  Description of Artificial Sequence: Synthetic oligonucleotide
  Antisense strand to SEQ ID NO: 1074336
ucuugccugaccuaaguca

SEQ ID NO: 1074338 - RNA, 19 nt, Artificial Sequence
  Description of Artificial Sequence: Synthetic oligonucleotide
  Sense strand starting at position 2232 of SEQ ID NO: 915365
cucauucuguccucauuga

SEQ ID NO: 1074339 - RNA, 19 nt, Artificial Sequence
  Description of Artificial Sequence: Synthetic oligonucleotide
  Antisense strand to SEQ ID NO: 1074338
ucaaugaggacagaaugag

SEQ ID NO: 1074340 - RNA, 19 nt, Artificial Sequence
  Description of Artificial Sequence: Synthetic oligonucleotide
  Sense strand starting at position 2462 of SEQ ID NO: 915365
ucccuagacucuccgagua

SEQ ID NO: 1074341 - RNA, 19 nt, Artificial Sequence
  Description of Artificial Sequence: Synthetic oligonucleotide
  Antisense strand to SEQ ID NO: 1074340
uacucggagagucuaggga

SEQ ID NO: 1074342 - RNA, 19 nt, Artificial Sequence
  Description of Artificial Sequence: Synthetic oligonucleotide
  Sense strand starting at position 2754 of SEQ ID NO: 915365
ggccgcgacuuauaauaau

SEQ ID NO: 1074343 - RNA, 19 nt, Artificial Sequence
  Description of Artificial Sequence: Synthetic oligonucleotide
  Antisense strand to SEQ ID NO: 1074342
auuauuauaagucgcggcc

SEQ ID NO: 1074344 - RNA, 19 nt, Artificial Sequence
  Description of Artificial Sequence: Synthetic oligonucleotide
  Sense strand starting at position 2757 of SEQ ID NO: 915365
cgcgacuuauaauaauaaa

SEQ ID NO: 1074345 - RNA, 19 nt, Artificial Sequence
  Description of Artificial Sequence: Synthetic oligonucleotide
  Antisense strand to SEQ ID NO: 1074344
uuuauuauuauaagucgcg

SEQ ID NO: 1074346 - RNA, 19 nt, Artificial Sequence
  Description of Artificial Sequence: Synthetic oligonucleotide
  Sense strand starting at position 2767 of SEQ ID NO: 915365
aauaauaaaggcgguaauu

SEQ ID NO: 1074347 - RNA, 19 nt, Artificial Sequence
  Description of Artificial Sequence: Synthetic oligonucleotide
  Antisense strand to SEQ ID NO: 1074346
aauuaccgccuuuauuauu

SEQ ID NO: 1074348 - RNA, 19 nt, Artificial Sequence
  Description of Artificial Sequence: Synthetic oligonucleotide
  Sense strand starting at position 3002 of SEQ ID NO: 915365
ccacuucuagauugugagu

SEQ ID NO: 1074349 - RNA, 19 nt, Artificial Sequence
  Description of Artificial Sequence: Synthetic oligonucleotide
  Antisense strand to SEQ ID NO: 1074348
acucacaaucuagaagugg

SEQ ID NO: 1074350 - RNA, 19 nt, Artificial Sequence
  Description of Artificial Sequence: Synthetic oligonucleotide
  Sense strand starting at position 3139 of SEQ ID NO: 915365
cuaugucacacucguagua

SEQ ID NO: 1074351 - RNA, 19 nt, Artificial Sequence
  Description of Artificial Sequence: Synthetic oligonucleotide
  Antisense strand to SEQ ID NO: 1074350
uacuacgagugugacauag

SEQ ID NO: 1074352 - RNA, 19 nt, Artificial Sequence
  Description of Artificial Sequence: Synthetic oligonucleotide
  Sense strand starting at position 3161 of SEQ ID NO: 915365
cgcugcauugguugaacaa

SEQ ID NO: 1074353 - RNA, 19 nt, Artificial Sequence
  Description of Artificial Sequence: Synthetic oligonucleotide
  Antisense strand to SEQ ID NO: 1074352
uuguucaaccaaugcagcg

SEQ ID NO: 1074354 - RNA, 19 nt, Artificial Sequence
  Description of Artificial Sequence: Synthetic oligonucleotide
  Sense strand starting at position 3162 of SEQ ID NO: 915365
gcugcauugguugaacaaa

SEQ ID NO: 1074355 - RNA, 19 nt, Artificial Sequence
  Description of Artificial Sequence: Synthetic oligonucleotide
  Antisense strand to SEQ ID NO: 1074354
uuuguucaaccaaugcagc

SEQ ID NO: 1074356 - RNA, 19 nt, Artificial Sequence
  Description of Artificial Sequence: Synthetic oligonucleotide
  Sense strand starting at position 3192 of SEQ ID NO: 915365
gaaugaaugucuuccucug

SEQ ID NO: 1074357 - RNA, 19 nt, Artificial Sequence
  Description of Artificial Sequence: Synthetic oligonucleotide
  Antisense strand to SEQ ID NO: 1074356
cagaggaagacauucauuc

SEQ ID NO: 1074358 - RNA, 19 nt, Artificial Sequence
  Description of Artificial Sequence: Synthetic oligonucleotide
  Sense strand starting at position 3215 of SEQ ID NO: 915365
ugcauuuccucagaaggcu

SEQ ID NO: 1074359 - RNA, 19 nt, Artificial Sequence
  Description of Artificial Sequence: Synthetic oligonucleotide
  Antisense strand to SEQ ID NO: 1074358
agccuucugaggaaaugca

SEQ ID NO: 1074360 - RNA, 19 nt, Artificial Sequence
  Description of Artificial Sequence: Synthetic oligonucleotide
  Sense strand starting at position 3363 of SEQ ID NO: 915365
acacgaagucucuacucaa

SEQ ID NO: 1074361 - RNA, 19 nt, Artificial Sequence
  Description of Artificial Sequence: Synthetic oligonucleotide
  Antisense strand to SEQ ID NO: 1074360
uugaguagagacuucgugu

SEQ ID NO: 1074362 - RNA, 19 nt, Artificial Sequence
  Description of Artificial Sequence: Synthetic oligonucleotide
  Sense strand starting at position 3432 of SEQ ID NO: 915365
gggauguuucuguggaagg

SEQ ID NO: 1074363 - RNA, 19 nt, Artificial Sequence
  Description of Artificial Sequence: Synthetic oligonucleotide
  Antisense strand to SEQ ID NO: 1074362
ccuuccacagaaacauccc

SEQ ID NO: 1074364 - RNA, 19 nt, Artificial Sequence
  Description of Artificial Sequence: Synthetic oligonucleotide
  Sense strand starting at position 3485 of SEQ ID NO: 915365
ggaucugagaggcaauguu

SEQ ID NO: 1074365 - RNA, 19 nt, Artificial Sequence
  Description of Artificial Sequence: Synthetic oligonucleotide
  Antisense strand to SEQ ID NO: 1074364
aacauugccucucagaucc

SEQ ID NO: 1074366 - RNA, 19 nt, Artificial Sequence
  Description of Artificial Sequence: Synthetic oligonucleotide
  Sense strand starting at position 3521 of SEQ ID NO: 915365
aagacacucuuuggauguu

SEQ ID NO: 1074367 - RNA, 19 nt, Artificial Sequence
  Description of Artificial Sequence: Synthetic oligonucleotide
  Antisense strand to SEQ ID NO: 1074366
aacauccaaagagugucuu

SEQ ID NO: 1074368 - RNA, 19 nt, Artificial Sequence
  Description of Artificial Sequence: Synthetic oligonucleotide
  Sense strand starting at position 3655 of SEQ ID NO: 915365
gcccuauagucagagagaa

SEQ ID NO: 1074369 - RNA, 19 nt, Artificial Sequence
  Description of Artificial Sequence: Synthetic oligonucleotide
  Antisense strand to SEQ ID NO: 1074368
uucucucugacuauagggc

SEQ ID NO: 1074370 - RNA, 19 nt, Artificial Sequence
  Description of Artificial Sequence: Synthetic oligonucleotide
  Sense strand starting at position 3834 of SEQ ID NO: 915365
cgcucuugcggauuaggua

SEQ ID NO: 1074371 - RNA, 19 nt, Artificial Sequence
  Description of Artificial Sequence: Synthetic oligonucleotide
  Antisense strand to SEQ ID NO: 1074370
uaccuaauccgcaagagcg

SEQ ID NO: 1074372 - RNA, 19 nt, Artificial Sequence
  Description of Artificial Sequence: Synthetic oligonucleotide
  Sense strand starting at position 3900 of SEQ ID NO: 915365
cccuaagccuggccugaua

SEQ ID NO: 1074373 - RNA, 19 nt, Artificial Sequence
  Description of Artificial Sequence: Synthetic oligonucleotide
  Antisense strand to SEQ ID NO: 1074372
uaucaggccaggcuuaggg

SEQ ID NO: 1074374 - RNA, 19 nt, Artificial Sequence
  Description of Artificial Sequence: Synthetic oligonucleotide
  Sense strand starting at position 449 of SEQ ID NO: 915366
gggcuuguucccugagggu

SEQ ID NO: 1074375 - RNA, 19 nt, Artificial Sequence
  Description of Artificial Sequence: Synthetic oligonucleotide
  Antisense strand to SEQ ID NO: 1074374
acccucagggaacaagccc

SEQ ID NO: 1074376 - RNA, 19 nt, Artificial Sequence
  Description of Artificial Sequence: Synthetic oligonucleotide
  Sense strand starting at position 1007 of SEQ ID NO: 915366
gcagaaucacagugacaga

SEQ ID NO: 1074377 - RNA, 19 nt, Artificial Sequence
  Description of Artificial Sequence: Synthetic oligonucleotide
  Antisense strand to SEQ ID NO: 1074376
ucugucacugugauucugc

SEQ ID NO: 1074378 - RNA, 19 nt, Artificial Sequence
  Description of Artificial Sequence: Synthetic oligonucleotide
  Sense strand starting at position 1010 of SEQ ID NO: 915366
gaaucacagugacagaauu

SEQ ID NO: 1074379 - RNA, 19 nt, Artificial Sequence
  Description of Artificial Sequence: Synthetic oligonucleotide
  Antisense strand to SEQ ID NO: 1074378
aauucugucacugugauuc

SEQ ID NO: 1074380 - RNA, 19 nt, Artificial Sequence
  Description of Artificial Sequence: Synthetic oligonucleotide
  Sense strand starting at position 1588 of SEQ ID NO: 915366
ugagguuccaagugauaaa

SEQ ID NO: 1074381 - RNA, 19 nt, Artificial Sequence
  Description of Artificial Sequence: Synthetic oligonucleotide
  Antisense strand to SEQ ID NO: 1074380
uuuaucacuuggaaccuca

SEQ ID NO: 1074382 - RNA, 19 nt, Artificial Sequence
  Description of Artificial Sequence: Synthetic oligonucleotide
  Sense strand starting at position 1591 of SEQ ID NO: 915366
gguuccaagugauaaagga

SEQ ID NO: 1074383 - RNA, 19 nt, Artificial Sequence
  Description of Artificial Sequence: Synthetic oligonucleotide
  Antisense strand to SEQ ID NO: 1074382
uccuuuaucacuuggaacc

SEQ ID NO: 1074384 - RNA, 19 nt, Artificial Sequence
  Description of Artificial Sequence: Synthetic oligonucleotide
  Sense strand starting at position 1625 of SEQ ID NO: 915366
gugguagugcugggauuca

SEQ ID NO: 1074385 - RNA, 19 nt, Artificial Sequence
  Description of Artificial Sequence: Synthetic oligonucleotide
  Antisense strand to SEQ ID NO: 1074384
ugaaucccagcacuaccac

SEQ ID NO: 1074386 - RNA, 19 nt, Artificial Sequence
  Description of Artificial Sequence: Synthetic oligonucleotide
  Sense strand starting at position 1643 of SEQ ID NO: 915366
agaccuagguguuugacua

SEQ ID NO: 1074387 - RNA, 19 nt, Artificial Sequence
  Description of Artificial Sequence: Synthetic oligonucleotide
  Antisense strand to SEQ ID NO: 1074386
uagucaaacaccuaggucu

SEQ ID NO: 1074388 - RNA, 19 nt, Artificial Sequence
  Description of Artificial Sequence: Synthetic oligonucleotide
  Sense strand starting at position 1644 of SEQ ID NO: 915366
gaccuagguguuugacuac

SEQ ID NO: 1074389 - RNA, 19 nt, Artificial Sequence
  Description of Artificial Sequence: Synthetic oligonucleotide
  Antisense strand to SEQ ID NO: 1074388
guagucaaacaccuagguc

SEQ ID NO: 1074390 - RNA, 19 nt, Artificial Sequence
  Description of Artificial Sequence: Synthetic oligonucleotide
  Sense strand starting at position 1691 of SEQ ID NO: 915366
caccucucggaaugaauga

SEQ ID NO: 1074391 - RNA, 19 nt, Artificial Sequence
  Description of Artificial Sequence: Synthetic oligonucleotide
  Antisense strand to SEQ ID NO: 1074390
ucauucauuccgagaggug

SEQ ID NO: 1074392 - RNA, 19 nt, Artificial Sequence
  Description of Artificial Sequence: Synthetic oligonucleotide
  Sense strand starting at position 2173 of SEQ ID NO: 915366
agaguugcugucugcguga

SEQ ID NO: 1074393 - RNA, 19 nt, Artificial Sequence
  Description of Artificial Sequence: Synthetic oligonucleotide
  Antisense strand to SEQ ID NO: 1074392
ucacgcagacagcaacucu

SEQ ID NO: 1074394 - RNA, 19 nt, Artificial Sequence
  Description of Artificial Sequence: Synthetic oligonucleotide
  Sense strand starting at position 2178 of SEQ ID NO: 915366
ugcugucugcgugacauaa

SEQ ID NO: 1074395 - RNA, 19 nt, Artificial Sequence
  Description of Artificial Sequence: Synthetic oligonucleotide
  Antisense strand to SEQ ID NO: 1074394
uuaugucacgcagacagca

SEQ ID NO: 1074396 - RNA, 19 nt, Artificial Sequence
  Description of Artificial Sequence: Synthetic oligonucleotide
  Sense strand starting at position 2234 of SEQ ID NO: 915366
acccacuucucggcagaua

SEQ ID NO: 1074397 - RNA, 19 nt, Artificial Sequence
  Description of Artificial Sequence: Synthetic oligonucleotide
  Antisense strand to SEQ ID NO: 1074396
uaucugccgagaagugggu

SEQ ID NO: 1074398 - RNA, 19 nt, Artificial Sequence
  Description of Artificial Sequence: Synthetic oligonucleotide
  Sense strand starting at position 2237 of SEQ ID NO: 915366
cacuucucggcagauacuu

SEQ ID NO: 1074399 - RNA, 19 nt, Artificial Sequence
  Description of Artificial Sequence: Synthetic oligonucleotide
  Antisense strand to SEQ ID NO: 1074398
aaguaucugccgagaagug

SEQ ID NO: 1074400 - RNA, 19 nt, Artificial Sequence
  Description of Artificial Sequence: Synthetic oligonucleotide
  Sense strand starting at position 2393 of SEQ ID NO: 915366
gauucaaacguggguggau

SEQ ID NO: 1074401 - RNA, 19 nt, Artificial Sequence
  Description of Artificial Sequence: Synthetic oligonucleotide
  Antisense strand to SEQ ID NO: 1074400
auccacccacguuugaauc

SEQ ID NO: 1074402 - RNA, 19 nt, Artificial Sequence
  Description of Artificial Sequence: Synthetic oligonucleotide
  Sense strand starting at position 2426 of SEQ ID NO: 915366
ucugccucucgguaaauca

SEQ ID NO: 1074403 - RNA, 19 nt, Artificial Sequence
  Description of Artificial Sequence: Synthetic oligonucleotide
  Antisense strand to SEQ ID NO: 1074402
ugauuuaccgagaggcaga

SEQ ID NO: 1074404 - RNA, 19 nt, Artificial Sequence
  Description of Artificial Sequence: Synthetic oligonucleotide
  Sense strand starting at position 2449 of SEQ ID NO: 915366
uuacuauguuccucuggag

SEQ ID NO: 1074405 - RNA, 19 nt, Artificial Sequence
  Description of Artificial Sequence: Synthetic oligonucleotide
  Antisense strand to SEQ ID NO: 1074404
cuccagaggaacauaguaa

SEQ ID NO: 1074406 - RNA, 19 nt, Artificial Sequence
  Description of Artificial Sequence: Synthetic oligonucleotide
  Sense strand starting at position 2463 of SEQ ID NO: 915366
uggagcugaaucugugcua

SEQ ID NO: 1074407 - RNA, 19 nt, Artificial Sequence
  Description of Artificial Sequence: Synthetic oligonucleotide
  Antisense strand to SEQ ID NO: 1074406
uagcacagauucagcucca

SEQ ID NO: 1074408 - RNA, 19 nt, Artificial Sequence
  Description of Artificial Sequence: Synthetic oligonucleotide
  Sense strand starting at position 2464 of SEQ ID NO: 915366
ggagcugaaucugugcuaa

SEQ ID NO: 1074409 - RNA, 19 nt, Artificial Sequence
  Description of Artificial Sequence: Synthetic oligonucleotide
  Antisense strand to SEQ ID NO: 1074408
uuagcacagauucagcucc

SEQ ID NO: 1074410 - RNA, 19 nt, Artificial Sequence
  Description of Artificial Sequence: Synthetic oligonucleotide
  Sense strand starting at position 2492 of SEQ ID NO: 915366
cacacauuacgucguguaa

SEQ ID NO: 1074411 - RNA, 19 nt, Artificial Sequence
  Description of Artificial Sequence: Synthetic oligonucleotide
  Antisense strand to SEQ ID NO: 1074410
uuacacgacguaaugugug

SEQ ID NO: 1074412 - RNA, 19 nt, Artificial Sequence
  Description of Artificial Sequence: Synthetic oligonucleotide
  Sense strand starting at position 2525 of SEQ ID NO: 915366
cugugaacugggcacuauu

SEQ ID NO: 1074413 - RNA, 19 nt, Artificial Sequence
  Description of Artificial Sequence: Synthetic oligonucleotide
  Antisense strand to SEQ ID NO: 1074412
aauagugcccaguucacag

SEQ ID NO: 1074414 - RNA, 19 nt, Artificial Sequence
  Description of Artificial Sequence: Synthetic oligonucleotide
  Sense strand starting at position 2528 of SEQ ID NO: 915366
ugaacugggcacuauuauu

SEQ ID NO: 1074415 - RNA, 19 nt, Artificial Sequence
  Description of Artificial Sequence: Synthetic oligonucleotide
  Antisense strand to SEQ ID NO: 1074414
aauaauagugcccaguuca

SEQ ID NO: 1074416 - RNA, 19 nt, Artificial Sequence
  Description of Artificial Sequence: Synthetic oligonucleotide
  Sense strand starting at position 2565 of SEQ ID NO: 915366
agcaguuaagagugugguu

SEQ ID NO: 1074417 - RNA, 19 nt, Artificial Sequence
  Description of Artificial Sequence: Synthetic oligonucleotide
  Antisense strand to SEQ ID NO: 1074416
aaccacacucuuaacugcu

SEQ ID NO: 1074418 - RNA, 19 nt, Artificial Sequence
  Description of Artificial Sequence: Synthetic oligonucleotide
  Sense strand starting at position 2588 of SEQ ID NO: 915366
ucugaucugucaccuuuga

SEQ ID NO: 1074419 - RNA, 19 nt, Artificial Sequence
  Description of Artificial Sequence: Synthetic oligonucleotide
  Antisense strand to SEQ ID NO: 1074418
ucaaaggugacagaucaga

SEQ ID NO: 1074420 - RNA, 19 nt, Artificial Sequence
  Description of Artificial Sequence: Synthetic oligonucleotide
  Sense strand starting at position 2893 of SEQ ID NO: 915366
cugacuugcuuauuuaugu

SEQ ID NO: 1074421 - RNA, 19 nt, Artificial Sequence
  Description of Artificial Sequence: Synthetic oligonucleotide
  Antisense strand to SEQ ID NO: 1074420
acauaaauaagcaagucag

SEQ ID NO: 1074422 - RNA, 19 nt, Artificial Sequence
  Description of Artificial Sequence: Synthetic oligonucleotide
  Sense strand starting at position 2894 of SEQ ID NO: 915366
ugacuugcuuauuuaugua

SEQ ID NO: 1074423 - RNA, 19 nt, Artificial Sequence
  Description of Artificial Sequence: Synthetic oligonucleotide
  Antisense strand to SEQ ID NO: 1074422
uacauaaauaagcaaguca

SEQ ID NO: 1074424 - RNA, 19 nt, Artificial Sequence
  Description of Artificial Sequence: Synthetic oligonucleotide
  Sense strand starting at position 3035 of SEQ ID NO: 915366
cucggcaaaugcucaauuu

SEQ ID NO: 1074425 - RNA, 19 nt, Artificial Sequence
  Description of Artificial Sequence: Synthetic oligonucleotide
  Antisense strand to SEQ ID NO: 1074424
aaauugagcauuugccgag

SEQ ID NO: 1074426 - RNA, 19 nt, Artificial Sequence
  Description of Artificial Sequence: Synthetic oligonucleotide
  Sense strand starting at position 3154 of SEQ ID NO: 915366
cucaaaucugagugcgcaa

SEQ ID NO: 1074427 - RNA, 19 nt, Artificial Sequence
  Description of Artificial Sequence: Synthetic oligonucleotide
  Antisense strand to SEQ ID NO: 1074426
uugcgcacucagauuugag

SEQ ID NO: 1074428 - RNA, 19 nt, Artificial Sequence
  Description of Artificial Sequence: Synthetic oligonucleotide
  Sense strand starting at position 3182 of SEQ ID NO: 915366
ugagaaucuucuuccauga

SEQ ID NO: 1074429 - RNA, 19 nt, Artificial Sequence
  Description of Artificial Sequence: Synthetic oligonucleotide
  Antisense strand to SEQ ID NO: 1074428
ucauggaagaagauucuca

SEQ ID NO: 1074430 - RNA, 19 nt, Artificial Sequence
  Description of Artificial Sequence: Synthetic oligonucleotide
  Sense strand starting at position 3239 of SEQ ID NO: 915366
uguuguaacaguuagaucu

SEQ ID NO: 1074431 - RNA, 19 nt, Artificial Sequence
  Description of Artificial Sequence: Synthetic oligonucleotide
  Antisense strand to SEQ ID NO: 1074430
agaucuaacuguuacaaca

SEQ ID NO: 1074432 - RNA, 19 nt, Artificial Sequence
  Description of Artificial Sequence: Synthetic oligonucleotide
  Sense strand starting at position 3267 of SEQ ID NO: 915366
gugggauagcccuacuuug

SEQ ID NO: 1074433 - RNA, 19 nt, Artificial Sequence
  Description of Artificial Sequence: Synthetic oligonucleotide
  Antisense strand to SEQ ID NO: 1074432
caaaguagggcuaucccac

SEQ ID NO: 1074434 - RNA, 19 nt, Artificial Sequence
  Description of Artificial Sequence: Synthetic oligonucleotide
  Sense strand starting at position 3296 of SEQ ID NO: 915366
caauuucugugaugucagu

SEQ ID NO: 1074435 - RNA, 19 nt, Artificial Sequence
  Description of Artificial Sequence: Synthetic oligonucleotide
  Antisense strand to SEQ ID NO: 1074434
acugacaucacagaaauug

SEQ ID NO: 1074436 - RNA, 19 nt, Artificial Sequence
  Description of Artificial Sequence: Synthetic oligonucleotide
  Sense strand starting at position 3342 of SEQ ID NO: 915366
ccacuacagugucuuugaa

SEQ ID NO: 1074437 - RNA, 19 nt, Artificial Sequence
  Description of Artificial Sequence: Synthetic oligonucleotide
  Antisense strand to SEQ ID NO: 1074436
uucaaagacacuguagugg

SEQ ID NO: 1074438 - RNA, 19 nt, Artificial Sequence
  Description of Artificial Sequence: Synthetic oligonucleotide
  Sense strand starting at position 3350 of SEQ ID NO: 915366
gugucuuugaaccgggaca

SEQ ID NO: 1074439 - RNA, 19 nt, Artificial Sequence
  Description of Artificial Sequence: Synthetic oligonucleotide
  Antisense strand to SEQ ID NO: 1074438
ugucccgguucaaagacac

SEQ ID NO: 1074440 - RNA, 19 nt, Artificial Sequence
  Description of Artificial Sequence: Synthetic oligonucleotide
  Sense strand starting at position 3351 of SEQ ID NO: 915366
ugucuuugaaccgggacau

SEQ ID NO: 1074441 - RNA, 19 nt, Artificial Sequence
  Description of Artificial Sequence: Synthetic oligonucleotide
  Antisense strand to SEQ ID NO: 1074440
augucccgguucaaagaca

SEQ ID NO: 1074442 - RNA, 19 nt, Artificial Sequence
  Description of Artificial Sequence: Synthetic oligonucleotide
  Sense strand starting at position 3412 of SEQ ID NO: 915366
agacauaaugggcguaagu

SEQ ID NO: 1074443 - RNA, 19 nt, Artificial Sequence
  Description of Artificial Sequence: Synthetic oligonucleotide
  Antisense strand to SEQ ID NO: 1074442
acuuacgcccauuaugucu

SEQ ID NO: 1074444 - RNA, 19 nt, Artificial Sequence
  Description of Artificial Sequence: Synthetic oligonucleotide
  Sense strand starting at position 3414 of SEQ ID NO: 915366
acauaaugggcguaaguaa

SEQ ID NO: 1074445 - RNA, 19 nt, Artificial Sequence
  Description of Artificial Sequence: Synthetic oligonucleotide
  Antisense strand to SEQ ID NO: 1074444
uuacuuacgcccauuaugu

SEQ ID NO: 1074446 - RNA, 19 nt, Artificial Sequence
  Description of Artificial Sequence: Synthetic oligonucleotide
  Sense strand starting at position 3425 of SEQ ID NO: 915366
guaaguaaccucgacagca

SEQ ID NO: 1074447 - RNA, 19 nt, Artificial Sequence
  Description of Artificial Sequence: Synthetic oligonucleotide
  Antisense strand to SEQ ID NO: 1074446
ugcugucgagguuacuuac

SEQ ID NO: 1074448 - RNA, 19 nt, Artificial Sequence
  Description of Artificial Sequence: Synthetic oligonucleotide
  Sense strand starting at position 3855 of SEQ ID NO: 915366
ccgcgcucggccaguaauu

SEQ ID NO: 1074449 - RNA, 19 nt, Artificial Sequence
  Description of Artificial Sequence: Synthetic oligonucleotide
  Antisense strand to SEQ ID NO: 1074448
aauuacuggccgagcgcgg

SEQ ID NO: 1074450 - RNA, 19 nt, Artificial Sequence
  Description of Artificial Sequence: Synthetic oligonucleotide
  Sense strand starting at position 3857 of SEQ ID NO: 915366
gcgcucggccaguaauuua

SEQ ID NO: 1074451 - RNA, 19 nt, Artificial Sequence
  Description of Artificial Sequence: Synthetic oligonucleotide
  Antisense strand to SEQ ID NO: 1074450
uaaauuacuggccgagcgc

SEQ ID NO: 1074452 - RNA, 19 nt, Artificial Sequence
  Description of Artificial Sequence: Synthetic oligonucleotide
  Sense strand starting at position 3907 of SEQ ID NO: 915366
uugccaauuuccuggaagu

SEQ ID NO: 1074453 - RNA, 19 nt, Artificial Sequence
  Description of Artificial Sequence: Synthetic oligonucleotide
  Antisense strand to SEQ ID NO: 1074452
acuuccaggaaauuggcaa

SEQ ID NO: 1074454 - RNA, 19 nt, Artificial Sequence
  Description of Artificial Sequence: Synthetic oligonucleotide
  Sense strand starting at position 389 of SEQ ID NO: 915367
ccacuaggccagugaaauu

SEQ ID NO: 1074455 - RNA, 19 nt, Artificial Sequence
  Description of Artificial Sequence: Synthetic oligonucleotide
  Antisense strand to SEQ ID NO: 1074454
aauuucacuggccuagugg

SEQ ID NO: 1074456 - RNA, 19 nt, Artificial Sequence
  Description of Artificial Sequence: Synthetic oligonucleotide
  Sense strand starting at position 449 of SEQ ID NO: 915367
cauaaauuguaucuggaag

SEQ ID NO: 1074457 - RNA, 19 nt, Artificial Sequence
  Description of Artificial Sequence: Synthetic oligonucleotide
  Antisense strand to SEQ ID NO: 1074456
cuuccagauacaauuuaug

SEQ ID NO: 1074458 - RNA, 19 nt, Artificial Sequence
  Description of Artificial Sequence: Synthetic oligonucleotide
  Sense strand starting at position 613 of SEQ ID NO: 915367
aucugcuuugcacaacgaa

SEQ ID NO: 1074459 - RNA, 19 nt, Artificial Sequence
  Description of Artificial Sequence: Synthetic oligonucleotide
  Antisense strand to SEQ ID NO: 1074458
uucguugugcaaagcagau

SEQ ID NO: 1074460 - RNA, 19 nt, Artificial Sequence
  Description of Artificial Sequence: Synthetic oligonucleotide
  Sense strand starting at position 668 of SEQ ID NO: 915367
agcuaaaugguugauguuu

SEQ ID NO: 1074461 - RNA, 19 nt, Artificial Sequence
  Description of Artificial Sequence: Synthetic oligonucleotide
  Antisense strand to SEQ ID NO: 1074460
aaacaucaaccauuuagcu

SEQ ID NO: 1074462 - RNA, 19 nt, Artificial Sequence
  Description of Artificial Sequence: Synthetic oligonucleotide
  Sense strand starting at position 673 of SEQ ID NO: 915367
aaugguugauguuugaaua

SEQ ID NO: 1074463 - RNA, 19 nt, Artificial Sequence
  Description of Artificial Sequence: Synthetic oligonucleotide
  Antisense strand to SEQ ID NO: 1074462
uauucaaacaucaaccauu

SEQ ID NO: 1074464 - RNA, 19 nt, Artificial Sequence
  Description of Artificial Sequence: Synthetic oligonucleotide
  Sense strand starting at position 674 of SEQ ID NO: 915367
augguugauguuugaauau

SEQ ID NO: 1074465 - RNA, 19 nt, Artificial Sequence
  Description of Artificial Sequence: Synthetic oligonucleotide
  Antisense strand to SEQ ID NO: 1074464
auauucaaacaucaaccau

SEQ ID NO: 1074466 - RNA, 19 nt, Artificial Sequence
  Description of Artificial Sequence: Synthetic oligonucleotide
  Sense strand starting at position 683 of SEQ ID NO: 915367
guuugaauauaucuagcca

SEQ ID NO: 1074467 - RNA, 19 nt, Artificial Sequence
  Description of Artificial Sequence: Synthetic oligonucleotide
  Antisense strand to SEQ ID NO: 1074466
uggcuagauauauucaaac

SEQ ID NO: 1074468 - RNA, 19 nt, Artificial Sequence
  Description of Artificial Sequence: Synthetic oligonucleotide
  Sense strand starting at position 708 of SEQ ID NO: 915367
acaauauacucuguucugu

SEQ ID NO: 1074469 - RNA, 19 nt, Artificial Sequence
  Description of Artificial Sequence: Synthetic oligonucleotide
  Antisense strand to SEQ ID NO: 1074468
acagaacagaguauauugu

SEQ ID NO: 1074470 - RNA, 19 nt, Artificial Sequence
  Description of Artificial Sequence: Synthetic oligonucleotide
  Sense strand starting at position 808 of SEQ ID NO: 915367
auggaaugucccuaccuuu

SEQ ID NO: 1074471 - RNA, 19 nt, Artificial Sequence
  Description of Artificial Sequence: Synthetic oligonucleotide
  Antisense strand to SEQ ID NO: 1074470
aaagguagggacauuccau

SEQ ID NO: 1074472 - RNA, 19 nt, Artificial Sequence
  Description of Artificial Sequence: Synthetic oligonucleotide
  Sense strand starting at position 899 of SEQ ID NO: 915367
agggcaauuguugauaacu

SEQ ID NO: 1074473 - RNA, 19 nt, Artificial Sequence
  Description of Artificial Sequence: Synthetic oligonucleotide
  Antisense strand to SEQ ID NO: 1074472
aguuaucaacaauugcccu

SEQ ID NO: 1074474 - RNA, 19 nt, Artificial Sequence
  Description of Artificial Sequence: Synthetic oligonucleotide
  Sense strand starting at position 1007 of SEQ ID NO: 915367
ggugcuaacaggugaaauu

SEQ ID NO: 1074475 - RNA, 19 nt, Artificial Sequence
  Description of Artificial Sequence: Synthetic oligonucleotide
  Antisense strand to SEQ ID NO: 1074474
aauuucaccuguuagcacc

SEQ ID NO: 1074476 - RNA, 19 nt, Artificial Sequence
  Description of Artificial Sequence: Synthetic oligonucleotide
  Sense strand starting at position 1008 of SEQ ID NO: 915367
gugcuaacaggugaaauua

SEQ ID NO: 1074477 - RNA, 19 nt, Artificial Sequence
  Description of Artificial Sequence: Synthetic oligonucleotide
  Antisense strand to SEQ ID NO: 1074476
uaauuucaccuguuagcac

SEQ ID NO: 1074478 - RNA, 19 nt, Artificial Sequence
  Description of Artificial Sequence: Synthetic oligonucleotide
  Sense strand starting at position 1248 of SEQ ID NO: 915367
aggugaaacgguugaauac

SEQ ID NO: 1074479 - RNA, 19 nt, Artificial Sequence
  Description of Artificial Sequence: Synthetic oligonucleotide
  Antisense strand to SEQ ID NO: 1074478
guauucaaccguuucaccu

SEQ ID NO: 1074480 - RNA, 19 nt, Artificial Sequence
  Description of Artificial Sequence: Synthetic oligonucleotide
  Sense strand starting at position 1249 of SEQ ID NO: 915367
ggugaaacgguugaauaca

SEQ ID NO: 1074481 - RNA, 19 nt, Artificial Sequence
  Description of Artificial Sequence: Synthetic oligonucleotide
  Antisense strand to SEQ ID NO: 1074480
uguauucaaccguuucacc

SEQ ID NO: 1074482 - RNA, 19 nt, Artificial Sequence
  Description of Artificial Sequence: Synthetic oligonucleotide
  Sense strand starting at position 1305 of SEQ ID NO: 915367
auacacuacucguccagau

SEQ ID NO: 1074483 - RNA, 19 nt, Artificial Sequence
  Description of Artificial Sequence: Synthetic oligonucleotide
  Antisense strand to SEQ ID NO: 1074482
aucuggacgaguaguguau

SEQ ID NO: 1074484 - RNA, 19 nt, Artificial Sequence
  Description of Artificial Sequence: Synthetic oligonucleotide
  Sense strand starting at position 1307 of SEQ ID NO: 915367
acacuacucguccagauua

SEQ ID NO: 1074485 - RNA, 19 nt, Artificial Sequence
  Description of Artificial Sequence: Synthetic oligonucleotide
  Antisense strand to SEQ ID NO: 1074484
uaaucuggacgaguagugu

SEQ ID NO: 1074486 - RNA, 19 nt, Artificial Sequence
  Description of Artificial Sequence: Synthetic oligonucleotide
  Sense strand starting at position 1309 of SEQ ID NO: 915367
acuacucguccagauuaau

SEQ ID NO: 1074487 - RNA, 19 nt, Artificial Sequence
  Description of Artificial Sequence: Synthetic oligonucleotide
  Antisense strand to SEQ ID NO: 1074486
auuaaucuggacgaguagu

SEQ ID NO: 1074488 - RNA, 19 nt, Artificial Sequence
  Description of Artificial Sequence: Synthetic oligonucleotide
  Sense strand starting at position 1320 of SEQ ID NO: 915367
agauuaaucggccauccca

SEQ ID NO: 1074489 - RNA, 19 nt, Artificial Sequence
  Description of Artificial Sequence: Synthetic oligonucleotide
  Antisense strand to SEQ ID NO: 1074488
ugggauggccgauuaaucu

SEQ ID NO: 1074490 - RNA, 19 nt, Artificial Sequence
  Description of Artificial Sequence: Synthetic oligonucleotide
  Sense strand starting at position 1596 of SEQ ID NO: 915367
gaagcaagguuacuagaga

SEQ ID NO: 1074491 - RNA, 19 nt, Artificial Sequence
  Description of Artificial Sequence: Synthetic oligonucleotide
  Antisense strand to SEQ ID NO: 1074490
ucucuaguaaccuugcuuc

SEQ ID NO: 1074492 - RNA, 19 nt, Artificial Sequence
  Description of Artificial Sequence: Synthetic oligonucleotide
  Sense strand starting at position 2031 of SEQ ID NO: 915367
cgcguuucugucccgauga

SEQ ID NO: 1074493 - RNA, 19 nt, Artificial Sequence
  Description of Artificial Sequence: Synthetic oligonucleotide
  Antisense strand to SEQ ID NO: 1074492
ucaucgggacagaaacgcg

SEQ ID NO: 1074494 - RNA, 19 nt, Artificial Sequence
  Description of Artificial Sequence: Synthetic oligonucleotide
  Sense strand starting at position 2036 of SEQ ID NO: 915367
uucugucccgaugauuaag

SEQ ID NO: 1074495 - RNA, 19 nt, Artificial Sequence
  Description of Artificial Sequence: Synthetic oligonucleotide
  Antisense strand to SEQ ID NO: 1074494
cuuaaucaucgggacagaa

SEQ ID NO: 1074496 - RNA, 19 nt, Artificial Sequence
  Description of Artificial Sequence: Synthetic oligonucleotide
  Sense strand starting at position 2226 of SEQ ID NO: 915367
cgcugugcccucuuaagac

SEQ ID NO: 1074497 - RNA, 19 nt, Artificial Sequence
  Description of Artificial Sequence: Synthetic oligonucleotide
  Antisense strand to SEQ ID NO: 1074496
gucuuaagagggcacagcg

SEQ ID NO: 1074498 - RNA, 19 nt, Artificial Sequence
  Description of Artificial Sequence: Synthetic oligonucleotide
  Sense strand starting at position 2338 of SEQ ID NO: 915367
gcccuaauuucuccgcuca

SEQ ID NO: 1074499 - RNA, 19 nt, Artificial Sequence
  Description of Artificial Sequence: Synthetic oligonucleotide
  Antisense strand to SEQ ID NO: 1074498
ugagcggagaaauuagggc

SEQ ID NO: 1074500 - RNA, 19 nt, Artificial Sequence
  Description of Artificial Sequence: Synthetic oligonucleotide
  Sense strand starting at position 2340 of SEQ ID NO: 915367
ccuaauuucuccgcucaga

SEQ ID NO: 1074501 - RNA, 19 nt, Artificial Sequence
  Description of Artificial Sequence: Synthetic oligonucleotide
  Antisense strand to SEQ ID NO: 1074500
ucugagcggagaaauuagg

SEQ ID NO: 1074502 - RNA, 19 nt, Artificial Sequence
  Description of Artificial Sequence: Synthetic oligonucleotide
  Sense strand starting at position 2394 of SEQ ID NO: 915367
cggcucuuucuccagaaug

SEQ ID NO: 1074503 - RNA, 19 nt, Artificial Sequence
  Description of Artificial Sequence: Synthetic oligonucleotide
  Antisense strand to SEQ ID NO: 1074502
cauucuggagaaagagccg

SEQ ID NO: 1074504 - RNA, 19 nt, Artificial Sequence
  Description of Artificial Sequence: Synthetic oligonucleotide
  Sense strand starting at position 2396 of SEQ ID NO: 915367
gcucuuucuccagaauggu

SEQ ID NO: 1074505 - RNA, 19 nt, Artificial Sequence
  Description of Artificial Sequence: Synthetic oligonucleotide
  Antisense strand to SEQ ID NO: 1074504
accauucuggagaaagagc

SEQ ID NO: 1074506 - RNA, 19 nt, Artificial Sequence
  Description of Artificial Sequence: Synthetic oligonucleotide
  Sense strand starting at position 2715 of SEQ ID NO: 915367
ucccuagaccuccaagagu

SEQ ID NO: 1074507 - RNA, 19 nt, Artificial Sequence
  Description of Artificial Sequence: Synthetic oligonucleotide
  Antisense strand to SEQ ID NO: 1074506
acucuuggaggucuaggga

SEQ ID NO: 1074508 - RNA, 19 nt, Artificial Sequence
  Description of Artificial Sequence: Synthetic oligonucleotide
  Sense strand starting at position 2888 of SEQ ID NO: 915367
uacauauggugaucacaag

SEQ ID NO: 1074509 - RNA, 19 nt, Artificial Sequence
  Description of Artificial Sequence: Synthetic oligonucleotide
  Antisense strand to SEQ ID NO: 1074508
cuugugaucaccauaugua

SEQ ID NO: 1074510 - RNA, 19 nt, Artificial Sequence
  Description of Artificial Sequence: Synthetic oligonucleotide
  Sense strand starting at position 2909 of SEQ ID NO: 915367
ccgaaaugguaauucuaug

SEQ ID NO: 1074511 - RNA, 19 nt, Artificial Sequence
  Description of Artificial Sequence: Synthetic oligonucleotide
  Antisense strand to SEQ ID NO: 1074510
cauagaauuaccauuucgg

SEQ ID NO: 1074512 - RNA, 19 nt, Artificial Sequence
  Description of Artificial Sequence: Synthetic oligonucleotide
  Sense strand starting at position 2921 of SEQ ID NO: 915367
uucuaugugccugauuaau

SEQ ID NO: 1074513 - RNA, 19 nt, Artificial Sequence
  Description of Artificial Sequence: Synthetic oligonucleotide
  Antisense strand to SEQ ID NO: 1074512
auuaaucaggcacauagaa

SEQ ID NO: 1074514 - RNA, 19 nt, Artificial Sequence
  Description of Artificial Sequence: Synthetic oligonucleotide
  Sense strand starting at position 2923 of SEQ ID NO: 915367
cuaugugccugauuaauaa

SEQ ID NO: 1074515 - RNA, 19 nt, Artificial Sequence
  Description of Artificial Sequence: Synthetic oligonucleotide
  Antisense strand to SEQ ID NO: 1074514
uuauuaaucaggcacauag

SEQ ID NO: 1074516 - RNA, 19 nt, Artificial Sequence
  Description of Artificial Sequence: Synthetic oligonucleotide
  Sense strand starting at position 2944 of SEQ ID NO: 915367
cuauaaaugcaguguagga

SEQ ID NO: 1074517 - RNA, 19 nt, Artificial Sequence
  Description of Artificial Sequence: Synthetic oligonucleotide
  Antisense strand to SEQ ID NO: 1074516
uccuacacugcauuuauag

SEQ ID NO: 1074518 - RNA, 19 nt, Artificial Sequence
  Description of Artificial Sequence: Synthetic oligonucleotide
  Sense strand starting at position 3246 of SEQ ID NO: 915367
uaaauagcguucuuggaag

SEQ ID NO: 1074519 - RNA, 19 nt, Artificial Sequence
  Description of Artificial Sequence: Synthetic oligonucleotide
  Antisense strand to SEQ ID NO: 1074518
cuuccaagaacgcuauuua

SEQ ID NO: 1074520 - RNA, 19 nt, Artificial Sequence
  Description of Artificial Sequence: Synthetic oligonucleotide
  Sense strand starting at position 3275 of SEQ ID NO: 915367
agagccuuugaaugaauga

SEQ ID NO: 1074521 - RNA, 19 nt, Artificial Sequence
  Description of Artificial Sequence: Synthetic oligonucleotide
  Antisense strand to SEQ ID NO: 1074520
ucauucauucaaaggcucu

SEQ ID NO: 1074522 - RNA, 19 nt, Artificial Sequence
  Description of Artificial Sequence: Synthetic oligonucleotide
  Sense strand starting at position 3445 of SEQ ID NO: 915367
gaauguauucucuaggguu

SEQ ID NO: 1074523 - RNA, 19 nt, Artificial Sequence
  Description of Artificial Sequence: Synthetic oligonucleotide
  Antisense strand to SEQ ID NO: 1074522
aacccuagagaauacauuc

SEQ ID NO: 1074524 - RNA, 19 nt, Artificial Sequence
  Description of Artificial Sequence: Synthetic oligonucleotide
  Sense strand starting at position 3499 of SEQ ID NO: 915367
guauaagcauauucugaau

SEQ ID NO: 1074525 - RNA, 19 nt, Artificial Sequence
  Description of Artificial Sequence: Synthetic oligonucleotide
  Antisense strand to SEQ ID NO: 1074524
auucagaauaugcuuauac

SEQ ID NO: 1074526 - RNA, 19 nt, Artificial Sequence
  Description of Artificial Sequence: Synthetic oligonucleotide
  Sense strand starting at position 3597 of SEQ ID NO: 915367
uuuauuguucugggauaau

SEQ ID NO: 1074527 - RNA, 19 nt, Artificial Sequence
  Description of Artificial Sequence: Synthetic oligonucleotide
  Antisense strand to SEQ ID NO: 1074526
auuaucccagaacaauaaa

SEQ ID NO: 1074528 - RNA, 19 nt, Artificial Sequence
  Description of Artificial Sequence: Synthetic oligonucleotide
  Sense strand starting at position 3673 of SEQ ID NO: 915367
agccaaaugcaucaugaga

SEQ ID NO: 1074529 - RNA, 19 nt, Artificial Sequence
  Description of Artificial Sequence: Synthetic oligonucleotide
  Antisense strand to SEQ ID NO: 1074528
ucucaugaugcauuuggcu

SEQ ID NO: 1074530 - RNA, 19 nt, Artificial Sequence
  Description of Artificial Sequence: Synthetic oligonucleotide
  Sense strand starting at position 3681 of SEQ ID NO: 915367
gcaucaugagauugcacua

SEQ ID NO: 1074531 - RNA, 19 nt, Artificial Sequence
  Description of Artificial Sequence: Synthetic oligonucleotide
  Antisense strand to SEQ ID NO: 1074530
uagugcaaucucaugaugc

SEQ ID NO: 1074532 - RNA, 19 nt, Artificial Sequence
  Description of Artificial Sequence: Synthetic oligonucleotide
  Sense strand starting at position 3842 of SEQ ID NO: 915367
auacaucauuugucacguu

SEQ ID NO: 1074533 - RNA, 19 nt, Artificial Sequence
  Description of Artificial Sequence: Synthetic oligonucleotide
  Antisense strand to SEQ ID NO: 1074532
aacgugacaaaugauguau

SEQ ID NO: 1074534 - RNA, 19 nt, Artificial Sequence
  Description of Artificial Sequence: Synthetic oligonucleotide
  Sense strand starting at position 180 of SEQ ID NO: 915368
agaguaugauggccugagu

SEQ ID NO: 1074535 - RNA, 19 nt, Artificial Sequence
  Description of Artificial Sequence: Synthetic oligonucleotide
  Antisense strand to SEQ ID NO: 1074534
acucaggccaucauacucu

SEQ ID NO: 1074536 - RNA, 19 nt, Artificial Sequence
  Description of Artificial Sequence: Synthetic oligonucleotide
  Sense strand starting at position 210 of SEQ ID NO: 915368
aucacaaauccuggaugca

SEQ ID NO: 1074537 - RNA, 19 nt, Artificial Sequence
  Description of Artificial Sequence: Synthetic oligonucleotide
  Antisense strand to SEQ ID NO: 1074536
ugcauccaggauuugugau

SEQ ID NO: 1074538 - RNA, 19 nt, Artificial Sequence
  Description of Artificial Sequence: Synthetic oligonucleotide
  Sense strand starting at position 283 of SEQ ID NO: 915368
uguucuaagggccagaaau

SEQ ID NO: 1074539 - RNA, 19 nt, Artificial Sequence
  Description of Artificial Sequence: Synthetic oligonucleotide
  Antisense strand to SEQ ID NO: 1074538
auuucuggcccuuagaaca

SEQ ID NO: 1074540 - RNA, 19 nt, Artificial Sequence
  Description of Artificial Sequence: Synthetic oligonucleotide
  Sense strand starting at position 383 of SEQ ID NO: 915368
gaccuauguggugauccca

SEQ ID NO: 1074541 - RNA, 19 nt, Artificial Sequence
  Description of Artificial Sequence: Synthetic oligonucleotide
  Antisense strand to SEQ ID NO: 1074540
ugggaucaccacauagguc

SEQ ID NO: 1074542 - RNA, 19 nt, Artificial Sequence
  Description of Artificial Sequence: Synthetic oligonucleotide
  Sense strand starting at position 560 of SEQ ID NO: 915368
ggccaugugucagcagaga

SEQ ID NO: 1074543 - RNA, 19 nt, Artificial Sequence
  Description of Artificial Sequence: Synthetic oligonucleotide
  Antisense strand to SEQ ID NO: 1074542
ucucugcugacacauggcc

SEQ ID NO: 1074544 - RNA, 19 nt, Artificial Sequence
  Description of Artificial Sequence: Synthetic oligonucleotide
  Sense strand starting at position 594 of SEQ ID NO: 915368
ggucaguucugauggcgga

SEQ ID NO: 1074545 - RNA, 19 nt, Artificial Sequence
  Description of Artificial Sequence: Synthetic oligonucleotide
  Antisense strand to SEQ ID NO: 1074544
uccgccaucagaacugacc

SEQ ID NO: 1074546 - RNA, 19 nt, Artificial Sequence
  Description of Artificial Sequence: Synthetic oligonucleotide
  Sense strand starting at position 597 of SEQ ID NO: 915368
caguucugauggcggagaa

SEQ ID NO: 1074547 - RNA, 19 nt, Artificial Sequence
  Description of Artificial Sequence: Synthetic oligonucleotide
  Antisense strand to SEQ ID NO: 1074546
uucuccgccaucagaacug

SEQ ID NO: 1074548 - RNA, 19 nt, Artificial Sequence
  Description of Artificial Sequence: Synthetic oligonucleotide
  Sense strand starting at position 1286 of SEQ ID NO: 915368
cguggagugcccaggucuu

SEQ ID NO: 1074549 - RNA, 19 nt, Artificial Sequence
  Description of Artificial Sequence: Synthetic oligonucleotide
  Antisense strand to SEQ ID NO: 1074548
aagaccugggcacuccacg

SEQ ID NO: 1074550 - RNA, 19 nt, Artificial Sequence
  Description of Artificial Sequence: Synthetic oligonucleotide
  Sense strand starting at position 2192 of SEQ ID NO: 915368
gcgggaagccuggauucua

SEQ ID NO: 1074551 - RNA, 19 nt, Artificial Sequence
  Description of Artificial Sequence: Synthetic oligonucleotide
  Antisense strand to SEQ ID NO: 1074550
uagaauccaggcuucccgc

SEQ ID NO: 1074552 - RNA, 19 nt, Artificial Sequence
  Description of Artificial Sequence: Synthetic oligonucleotide
  Sense strand starting at position 2246 of SEQ ID NO: 915368
gaguuugcaccaggaaagu

SEQ ID NO: 1074553 - RNA, 19 nt, Artificial Sequence
  Description of Artificial Sequence: Synthetic oligonucleotide
  Antisense strand to SEQ ID NO: 1074552
acuuuccuggugcaaacuc

SEQ ID NO: 1074554 - RNA, 19 nt, Artificial Sequence
  Description of Artificial Sequence: Synthetic oligonucleotide
  Sense strand starting at position 2415 of SEQ ID NO: 915368
ccagcacuggacuaguuaa

SEQ ID NO: 1074555 - RNA, 19 nt, Artificial Sequence
  Description of Artificial Sequence: Synthetic oligonucleotide
  Antisense strand to SEQ ID NO: 1074554
uuaacuaguccagugcugg

SEQ ID NO: 1074556 - RNA, 19 nt, Artificial Sequence
  Description of Artificial Sequence: Synthetic oligonucleotide
  Sense strand starting at position 2441 of SEQ ID NO: 915368
cgaugagucagugcuugcu

SEQ ID NO: 1074557 - RNA, 19 nt, Artificial Sequence
  Description of Artificial Sequence: Synthetic oligonucleotide
  Antisense strand to SEQ ID NO: 1074556
agcaagcacugacucaucg

SEQ ID NO: 1074558 - RNA, 19 nt, Artificial Sequence
  Description of Artificial Sequence: Synthetic oligonucleotide
  Sense strand starting at position 2533 of SEQ ID NO: 915368
cuugcugucuauggugaca

SEQ ID NO: 1074559 - RNA, 19 nt, Artificial Sequence
  Description of Artificial Sequence: Synthetic oligonucleotide
  Antisense strand to SEQ ID NO: 1074558
ugucaccauagacagcaag

SEQ ID NO: 1074560 - RNA, 19 nt, Artificial Sequence
  Description of Artificial Sequence: Synthetic oligonucleotide
  Sense strand starting at position 2536 of SEQ ID NO: 915368
gcugucuauggugacauca

SEQ ID NO: 1074561 - RNA, 19 nt, Artificial Sequence
  Description of Artificial Sequence: Synthetic oligonucleotide
  Antisense strand to SEQ ID NO: 1074560
ugaugucaccauagacagc

SEQ ID NO: 1074562 - RNA, 19 nt, Artificial Sequence
  Description of Artificial Sequence: Synthetic oligonucleotide
  Sense strand starting at position 2538 of SEQ ID NO: 915368
ugucuauggugacaucaug

SEQ ID NO: 1074563 - RNA, 19 nt, Artificial Sequence
  Description of Artificial Sequence: Synthetic oligonucleotide
  Antisense strand to SEQ ID NO: 1074562
caugaugucaccauagaca

SEQ ID NO: 1074564 - RNA, 19 nt, Artificial Sequence
  Description of Artificial Sequence: Synthetic oligonucleotide
  Sense strand starting at position 2549 of SEQ ID NO: 915368
acaucauggucuccaguuu

SEQ ID NO: 1074565 - RNA, 19 nt, Artificial Sequence
  Description of Artificial Sequence: Synthetic oligonucleotide
  Antisense strand to SEQ ID NO: 1074564
aaacuggagaccaugaugu

SEQ ID NO: 1074566 - RNA, 19 nt, Artificial Sequence
  Description of Artificial Sequence: Synthetic oligonucleotide
  Sense strand starting at position 2574 of SEQ ID NO: 915368
ccagucuuggaguggcaaa

SEQ ID NO: 1074567 - RNA, 19 nt, Artificial Sequence
  Description of Artificial Sequence: Synthetic oligonucleotide
  Antisense strand to SEQ ID NO: 1074566
uuugccacuccaagacugg

SEQ ID NO: 1074568 - RNA, 19 nt, Artificial Sequence
  Description of Artificial Sequence: Synthetic oligonucleotide
  Sense strand starting at position 2700 of SEQ ID NO: 915368
gucagugucucuugcucaa

SEQ ID NO: 1074569 - RNA, 19 nt, Artificial Sequence
  Description of Artificial Sequence: Synthetic oligonucleotide
  Antisense strand to SEQ ID NO: 1074568
uugagcaagagacacugac

SEQ ID NO: 1074570 - RNA, 19 nt, Artificial Sequence
  Description of Artificial Sequence: Synthetic oligonucleotide
  Sense strand starting at position 2755 of SEQ ID NO: 915368
ccaggaguuuggcaugcua

SEQ ID NO: 1074571 - RNA, 19 nt, Artificial Sequence
  Description of Artificial Sequence: Synthetic oligonucleotide
  Antisense strand to SEQ ID NO: 1074570
uagcaugccaaacuccugg

SEQ ID NO: 1074572 - RNA, 19 nt, Artificial Sequence
  Description of Artificial Sequence: Synthetic oligonucleotide
  Sense strand starting at position 2757 of SEQ ID NO: 915368
aggaguuuggcaugcuaac

SEQ ID NO: 1074573 - RNA, 19 nt, Artificial Sequence
  Description of Artificial Sequence: Synthetic oligonucleotide
  Antisense strand to SEQ ID NO: 1074572
guuagcaugccaaacuccu

SEQ ID NO: 1074574 - RNA, 19 nt, Artificial Sequence
  Description of Artificial Sequence: Synthetic oligonucleotide
  Sense strand starting at position 2856 of SEQ ID NO: 915368
ccgcuacacugcugugaaa

SEQ ID NO: 1074575 - RNA, 19 nt, Artificial Sequence
  Description of Artificial Sequence: Synthetic oligonucleotide
  Antisense strand to SEQ ID NO: 1074574
uuucacagcaguguagcgg

SEQ ID NO: 1074576 - RNA, 19 nt, Artificial Sequence
  Description of Artificial Sequence: Synthetic oligonucleotide
  Sense strand starting at position 2858 of SEQ ID NO: 915368
gcuacacugcugugaaauc

SEQ ID NO: 1074577 - RNA, 19 nt, Artificial Sequence
  Description of Artificial Sequence: Synthetic oligonucleotide
  Antisense strand to SEQ ID NO: 1074576
gauuucacagcaguguagc

SEQ ID NO: 1074578 - RNA, 19 nt, Artificial Sequence
  Description of Artificial Sequence: Synthetic oligonucleotide
  Sense strand starting at position 2859 of SEQ ID NO: 915368
cuacacugcugugaaaucu

SEQ ID NO: 1074579 - RNA, 19 nt, Artificial Sequence
  Description of Artificial Sequence: Synthetic oligonucleotide
  Antisense strand to SEQ ID NO: 1074578
agauuucacagcaguguag

SEQ ID NO: 1074580 - RNA, 19 nt, Artificial Sequence
  Description of Artificial Sequence: Synthetic oligonucleotide
  Sense strand starting at position 2882 of SEQ ID NO: 915368
ccugaaauguugccuggau

SEQ ID NO: 1074581 - RNA, 19 nt, Artificial Sequence
  Description of Artificial Sequence: Synthetic oligonucleotide
  Antisense strand to SEQ ID NO: 1074580
auccaggcaacauuucagg

SEQ ID NO: 1074582 - RNA, 19 nt, Artificial Sequence
  Description of Artificial Sequence: Synthetic oligonucleotide
  Sense strand starting at position 2883 of SEQ ID NO: 915368
cugaaauguugccuggaug

SEQ ID NO: 1074583 - RNA, 19 nt, Artificial Sequence
  Description of Artificial Sequence: Synthetic oligonucleotide
  Antisense strand to SEQ ID NO: 1074582
cauccaggcaacauuucag

SEQ ID NO: 1074584 - RNA, 19 nt, Artificial Sequence
  Description of Artificial Sequence: Synthetic oligonucleotide
  Sense strand starting at position 2884 of SEQ ID NO: 915368
ugaaauguugccuggauga

SEQ ID NO: 1074585 - RNA, 19 nt, Artificial Sequence
  Description of Artificial Sequence: Synthetic oligonucleotide
  Antisense strand to SEQ ID NO: 1074584
ucauccaggcaacauuuca

SEQ ID NO: 1074586 - RNA, 19 nt, Artificial Sequence
  Description of Artificial Sequence: Synthetic oligonucleotide
  Sense strand starting at position 2913 of SEQ ID NO: 915368
cauggugagcaguaggaaa

SEQ ID NO: 1074587 - RNA, 19 nt, Artificial Sequence
  Description of Artificial Sequence: Synthetic oligonucleotide
  Antisense strand to SEQ ID NO: 1074586
uuuccuacugcucaccaug

SEQ ID NO: 1074588 - RNA, 19 nt, Artificial Sequence
  Description of Artificial Sequence: Synthetic oligonucleotide
  Sense strand starting at position 3183 of SEQ ID NO: 915368
ugcucugcuugcucaggaa

SEQ ID NO: 1074589 - RNA, 19 nt, Artificial Sequence
  Description of Artificial Sequence: Synthetic oligonucleotide
  Antisense strand to SEQ ID NO: 1074588
uuccugagcaagcagagca

SEQ ID NO: 1074590 - RNA, 19 nt, Artificial Sequence
  Description of Artificial Sequence: Synthetic oligonucleotide
  Sense strand starting at position 3239 of SEQ ID NO: 915368
cugucuguccaaugggaau

SEQ ID NO: 1074591 - RNA, 19 nt, Artificial Sequence
  Description of Artificial Sequence: Synthetic oligonucleotide
  Antisense strand to SEQ ID NO: 1074590
auucccauuggacagacag

SEQ ID NO: 1074592 - RNA, 19 nt, Artificial Sequence
  Description of Artificial Sequence: Synthetic oligonucleotide
  Sense strand starting at position 3393 of SEQ ID NO: 915368
cacacagcgugucaucaaa

SEQ ID NO: 1074593 - RNA, 19 nt, Artificial Sequence
  Description of Artificial Sequence: Synthetic oligonucleotide
  Antisense strand to SEQ ID NO: 1074592
uuugaugacacgcugugug

SEQ ID NO: 1074594 - RNA, 19 nt, Artificial Sequence
  Description of Artificial Sequence: Synthetic oligonucleotide
  Sense strand starting at position 3642 of SEQ ID NO: 915368
cugugauugugcugucgca

SEQ ID NO: 1074595 - RNA, 19 nt, Artificial Sequence
  Description of Artificial Sequence: Synthetic oligonucleotide
  Antisense strand to SEQ ID NO: 1074594
ugcgacagcacaaucacag

SEQ ID NO: 1074596 - RNA, 19 nt, Artificial Sequence
  Description of Artificial Sequence: Synthetic oligonucleotide
  Sense strand starting at position 3643 of SEQ ID NO: 915368
ugugauugugcugucgcau

SEQ ID NO: 1074597 - RNA, 19 nt, Artificial Sequence
  Description of Artificial Sequence: Synthetic oligonucleotide
  Antisense strand to SEQ ID NO: 1074596
augcgacagcacaaucaca

SEQ ID NO: 1074598 - RNA, 19 nt, Artificial Sequence
  Description of Artificial Sequence: Synthetic oligonucleotide
  Sense strand starting at position 3644 of SEQ ID NO: 915368
gugauugugcugucgcauu

SEQ ID NO: 1074599 - RNA, 19 nt, Artificial Sequence
  Description of Artificial Sequence: Synthetic oligonucleotide
  Antisense strand to SEQ ID NO: 1074598
aaugcgacagcacaaucac

SEQ ID NO: 1074600 - RNA, 19 nt, Artificial Sequence
  Description of Artificial Sequence: Synthetic oligonucleotide
  Sense strand starting at position 3712 of SEQ ID NO: 915368
gauguuccauuugagaaau

SEQ ID NO: 1074601 - RNA, 19 nt, Artificial Sequence
  Description of Artificial Sequence: Synthetic oligonucleotide
  Antisense strand to SEQ ID NO: 1074600
auuucucaaauggaacauc

SEQ ID NO: 1074602 - RNA, 19 nt, Artificial Sequence
  Description of Artificial Sequence: Synthetic oligonucleotide
  Sense strand starting at position 3755 of SEQ ID NO: 915368
ggauaagacucuuggaaga

SEQ ID NO: 1074603 - RNA, 19 nt, Artificial Sequence
  Description of Artificial Sequence: Synthetic oligonucleotide
  Antisense strand to SEQ ID NO: 1074602
ucuuccaagagucuuaucc

SEQ ID NO: 1074604 - RNA, 19 nt, Artificial Sequence
  Description of Artificial Sequence: Synthetic oligonucleotide
  Sense strand starting at position 60 of SEQ ID NO: 915369
aguggagaauaccuuccaa

SEQ ID NO: 1074605 - RNA, 19 nt, Artificial Sequence
  Description of Artificial Sequence: Synthetic oligonucleotide
  Antisense strand to SEQ ID NO: 1074604
uuggaagguauucuccacu

SEQ ID NO: 1074606 - RNA, 19 nt, Artificial Sequence
  Description of Artificial Sequence: Synthetic oligonucleotide
  Sense strand starting at position 79 of SEQ ID NO: 915369
aguaucccuccaggacaaa

SEQ ID NO: 1074607 - RNA, 19 nt, Artificial Sequence
  Description of Artificial Sequence: Synthetic oligonucleotide
  Antisense strand to SEQ ID NO: 1074606
uuuguccuggagggauacu

SEQ ID NO: 1074608 - RNA, 19 nt, Artificial Sequence
  Description of Artificial Sequence: Synthetic oligonucleotide
  Sense strand starting at position 111 of SEQ ID NO: 915369
acuaucuuugcugaagaau

SEQ ID NO: 1074609 - RNA, 19 nt, Artificial Sequence
  Description of Artificial Sequence: Synthetic oligonucleotide
  Antisense strand to SEQ ID NO: 1074608
auucuucagcaaagauagu

SEQ ID NO: 1074610 - RNA, 19 nt, Artificial Sequence
  Description of Artificial Sequence: Synthetic oligonucleotide
  Sense strand starting at position 114 of SEQ ID NO: 915369
aucuuugcugaagaauacu

SEQ ID NO: 1074611 - RNA, 19 nt, Artificial Sequence
  Description of Artificial Sequence: Synthetic oligonucleotide
  Antisense strand to SEQ ID NO: 1074610
aguauucuucagcaaagau

SEQ ID NO: 1074612 - RNA, 19 nt, Artificial Sequence
  Description of Artificial Sequence: Synthetic oligonucleotide
  Sense strand starting at position 208 of SEQ ID NO: 915369
ggcagucacccagaaacua

SEQ ID NO: 1074613 - RNA, 19 nt, Artificial Sequence
  Description of Artificial Sequence: Synthetic oligonucleotide
  Antisense strand to SEQ ID NO: 1074612
uaguuucugggugacugcc

SEQ ID NO: 1074614 - RNA, 19 nt, Artificial Sequence
  Description of Artificial Sequence: Synthetic oligonucleotide
  Sense strand starting at position 322 of SEQ ID NO: 915369
cucauuaauuacuccggua

SEQ ID NO: 1074615 - RNA, 19 nt, Artificial Sequence
  Description of Artificial Sequence: Synthetic oligonucleotide
  Antisense strand to SEQ ID NO: 1074614
uaccggaguaauuaaugag

SEQ ID NO: 1074616 - RNA, 19 nt, Artificial Sequence
  Description of Artificial Sequence: Synthetic oligonucleotide
  Sense strand starting at position 327 of SEQ ID NO: 915369
uaauuacuccgguaaaugu

SEQ ID NO: 1074617 - RNA, 19 nt, Artificial Sequence
  Description of Artificial Sequence: Synthetic oligonucleotide
  Antisense strand to SEQ ID NO: 1074616
acauuuaccggaguaauua

SEQ ID NO: 1074618 - RNA, 19 nt, Artificial Sequence
  Description of Artificial Sequence: Synthetic oligonucleotide
  Sense strand starting at position 334 of SEQ ID NO: 915369
uccgguaaauguuccuaau

SEQ ID NO: 1074619 - RNA, 19 nt, Artificial Sequence
  Description of Artificial Sequence: Synthetic oligonucleotide
  Antisense strand to SEQ ID NO: 1074618
auuaggaacauuuaccgga

SEQ ID NO: 1074620 - RNA, 19 nt, Artificial Sequence
  Description of Artificial Sequence: Synthetic oligonucleotide
  Sense strand starting at position 336 of SEQ ID NO: 915369
cgguaaauguuccuaauuu

SEQ ID NO: 1074621 - RNA, 19 nt, Artificial Sequence
  Description of Artificial Sequence: Synthetic oligonucleotide
  Antisense strand to SEQ ID NO: 1074620
aaauuaggaacauuuaccg

SEQ ID NO: 1074622 - RNA, 19 nt, Artificial Sequence
  Description of Artificial Sequence: Synthetic oligonucleotide
  Sense strand starting at position 337 of SEQ ID NO: 915369
gguaaauguuccuaauuua

SEQ ID NO: 1074623 - RNA, 19 nt, Artificial Sequence
  Description of Artificial Sequence: Synthetic oligonucleotide
  Antisense strand to SEQ ID NO: 1074622
uaaauuaggaacauuuacc

SEQ ID NO: 1074624 - RNA, 19 nt, Artificial Sequence
  Description of Artificial Sequence: Synthetic oligonucleotide
  Sense strand starting at position 612 of SEQ ID NO: 915369
cauguauuagggcaauuau

SEQ ID NO: 1074625 - RNA, 19 nt, Artificial Sequence
  Description of Artificial Sequence: Synthetic oligonucleotide
  Antisense strand to SEQ ID NO: 1074624
auaauugcccuaauacaug

SEQ ID NO: 1074626 - RNA, 19 nt, Artificial Sequence
  Description of Artificial Sequence: Synthetic oligonucleotide
  Sense strand starting at position 636 of SEQ ID NO: 915369
caaacuuauggcugggaca

SEQ ID NO: 1074627 - RNA, 19 nt, Artificial Sequence
  Description of Artificial Sequence: Synthetic oligonucleotide
  Antisense strand to SEQ ID NO: 1074626
ugucccagccauaaguuug

SEQ ID NO: 1074628 - RNA, 19 nt, Artificial Sequence
  Description of Artificial Sequence: Synthetic oligonucleotide
  Sense strand starting at position 638 of SEQ ID NO: 915369
aacuuauggcugggacacu

SEQ ID NO: 1074629 - RNA, 19 nt, Artificial Sequence
  Description of Artificial Sequence: Synthetic oligonucleotide
  Antisense strand to SEQ ID NO: 1074628
agugucccagccauaaguu

SEQ ID NO: 1074630 - RNA, 19 nt, Artificial Sequence
  Description of Artificial Sequence: Synthetic oligonucleotide
  Sense strand starting at position 647 of SEQ ID NO: 915369
cugggacacuuauuauuau

SEQ ID NO: 1074631 - RNA, 19 nt, Artificial Sequence
  Description of Artificial Sequence: Synthetic oligonucleotide
  Antisense strand to SEQ ID NO: 1074630
auaauaauaagugucccag

SEQ ID NO: 1074632 - RNA, 19 nt, Artificial Sequence
  Description of Artificial Sequence: Synthetic oligonucleotide
  Sense strand starting at position 688 of SEQ ID NO: 915369
aagagaagcuggguaacuu

SEQ ID NO: 1074633 - RNA, 19 nt, Artificial Sequence
  Description of Artificial Sequence: Synthetic oligonucleotide
  Antisense strand to SEQ ID NO: 1074632
aaguuacccagcuucucuu

SEQ ID NO: 1074634 - RNA, 19 nt, Artificial Sequence
  Description of Artificial Sequence: Synthetic oligonucleotide
  Sense strand starting at position 809 of SEQ ID NO: 915369
acaguucggugguuggaaa

SEQ ID NO: 1074635 - RNA, 19 nt, Artificial Sequence
  Description of Artificial Sequence: Synthetic oligonucleotide
  Antisense strand to SEQ ID NO: 1074634
uuuccaaccaccgaacugu

SEQ ID NO: 1074636 - RNA, 19 nt, Artificial Sequence
  Description of Artificial Sequence: Synthetic oligonucleotide
  Sense strand starting at position 888 of SEQ ID NO: 915369
guaaacgucccacgaauaa

SEQ ID NO: 1074637 - RNA, 19 nt, Artificial Sequence
  Description of Artificial Sequence: Synthetic oligonucleotide
  Antisense strand to SEQ ID NO: 1074636
uuauucgugggacguuuac

SEQ ID NO: 1074638 - RNA, 19 nt, Artificial Sequence
  Description of Artificial Sequence: Synthetic oligonucleotide
  Sense strand starting at position 926 of SEQ ID NO: 915369
aagugcugcgaggaugaaa

SEQ ID NO: 1074639 - RNA, 19 nt, Artificial Sequence
  Description of Artificial Sequence: Synthetic oligonucleotide
  Antisense strand to SEQ ID NO: 1074638
uuucauccucgcagcacuu

SEQ ID NO: 1074640 - RNA, 19 nt, Artificial Sequence
  Description of Artificial Sequence: Synthetic oligonucleotide
  Sense strand starting at position 1107 of SEQ ID NO: 915369
ucuaaauugugaucacagc

SEQ ID NO: 1074641 - RNA, 19 nt, Artificial Sequence
  Description of Artificial Sequence: Synthetic oligonucleotide
  Antisense strand to SEQ ID NO: 1074640
gcugugaucacaauuuaga

SEQ ID NO: 1074642 - RNA, 19 nt, Artificial Sequence
  Description of Artificial Sequence: Synthetic oligonucleotide
  Sense strand starting at position 1244 of SEQ ID NO: 915369
cagggaggcauucgagaca

SEQ ID NO: 1074643 - RNA, 19 nt, Artificial Sequence
  Description of Artificial Sequence: Synthetic oligonucleotide
  Antisense strand to SEQ ID NO: 1074642
ugucucgaaugccucccug

SEQ ID NO: 1074644 - RNA, 19 nt, Artificial Sequence
  Description of Artificial Sequence: Synthetic oligonucleotide
  Sense strand starting at position 1247 of SEQ ID NO: 915369
ggaggcauucgagacaguu

SEQ ID NO: 1074645 - RNA, 19 nt, Artificial Sequence
  Description of Artificial Sequence: Synthetic oligonucleotide
  Antisense strand to SEQ ID NO: 1074644
aacugucucgaaugccucc

SEQ ID NO: 1074646 - RNA, 19 nt, Artificial Sequence
  Description of Artificial Sequence: Synthetic oligonucleotide
  Sense strand starting at position 1249 of SEQ ID NO: 915369
aggcauucgagacaguuua

SEQ ID NO: 1074647 - RNA, 19 nt, Artificial Sequence
  Description of Artificial Sequence: Synthetic oligonucleotide
  Antisense strand to SEQ ID NO: 1074646
uaaacugucucgaaugccu

SEQ ID NO: 1074648 - RNA, 19 nt, Artificial Sequence
  Description of Artificial Sequence: Synthetic oligonucleotide
  Sense strand starting at position 1336 of SEQ ID NO: 915369
uguggaucccgaugacucu

SEQ ID NO: 1074649 - RNA, 19 nt, Artificial Sequence
  Description of Artificial Sequence: Synthetic oligonucleotide
  Antisense strand to SEQ ID NO: 1074648
agagucaucgggauccaca

SEQ ID NO: 1074650 - RNA, 19 nt, Artificial Sequence
  Description of Artificial Sequence: Synthetic oligonucleotide
  Sense strand starting at position 1348 of SEQ ID NO: 915369
ugacucugcggcgaauuaa

SEQ ID NO: 1074651 - RNA, 19 nt, Artificial Sequence
  Description of Artificial Sequence: Synthetic oligonucleotide
  Antisense strand to SEQ ID NO: 1074650
uuaauucgccgcagaguca

SEQ ID NO: 1074652 - RNA, 19 nt, Artificial Sequence
  Description of Artificial Sequence: Synthetic oligonucleotide
  Sense strand starting at position 1430 of SEQ ID NO: 915369
cggcgaguugcugccucaa

SEQ ID NO: 1074653 - RNA, 19 nt, Artificial Sequence
  Description of Artificial Sequence: Synthetic oligonucleotide
  Antisense strand to SEQ ID NO: 1074652
uugaggcagcaacucgccg

SEQ ID NO: 1074654 - RNA, 19 nt, Artificial Sequence
  Description of Artificial Sequence: Synthetic oligonucleotide
  Sense strand starting at position 1433 of SEQ ID NO: 915369
cgaguugcugccucaacuu

SEQ ID NO: 1074655 - RNA, 19 nt, Artificial Sequence
  Description of Artificial Sequence: Synthetic oligonucleotide
  Antisense strand to SEQ ID NO: 1074654
aaguugaggcagcaacucg

SEQ ID NO: 1074656 - RNA, 19 nt, Artificial Sequence
  Description of Artificial Sequence: Synthetic oligonucleotide
  Sense strand starting at position 2451 of SEQ ID NO: 915369
ggugacgugagccacaaua

SEQ ID NO: 1074657 - RNA, 19 nt, Artificial Sequence
  Description of Artificial Sequence: Synthetic oligonucleotide
  Antisense strand to SEQ ID NO: 1074656
uauuguggcucacgucacc

SEQ ID NO: 1074658 - RNA, 19 nt, Artificial Sequence
  Description of Artificial Sequence: Synthetic oligonucleotide
  Sense strand starting at position 2453 of SEQ ID NO: 915369
ugacgugagccacaauaug

SEQ ID NO: 1074659 - RNA, 19 nt, Artificial Sequence
  Description of Artificial Sequence: Synthetic oligonucleotide
  Antisense strand to SEQ ID NO: 1074658
cauauuguggcucacguca

SEQ ID NO: 1074660 - RNA, 19 nt, Artificial Sequence
  Description of Artificial Sequence: Synthetic oligonucleotide
  Sense strand starting at position 2514 of SEQ ID NO: 915369
guggaggagcguucguuua

SEQ ID NO: 1074661 - RNA, 19 nt, Artificial Sequence
  Description of Artificial Sequence: Synthetic oligonucleotide
  Antisense strand to SEQ ID NO: 1074660
uaaacgaacgcuccuccac

SEQ ID NO: 1074662 - RNA, 19 nt, Artificial Sequence
  Description of Artificial Sequence: Synthetic oligonucleotide
  Sense strand starting at position 2518 of SEQ ID NO: 915369
aggagcguucguuuaguau

SEQ ID NO: 1074663 - RNA, 19 nt, Artificial Sequence
  Description of Artificial Sequence: Synthetic oligonucleotide
  Antisense strand to SEQ ID NO: 1074662
auacuaaacgaacgcuccu

SEQ ID NO: 1074664 - RNA, 19 nt, Artificial Sequence
  Description of Artificial Sequence: Synthetic oligonucleotide
  Sense strand starting at position 2591 of SEQ ID NO: 915369
augauuucccauugcgauc

SEQ ID NO: 1074665 - RNA, 19 nt, Artificial Sequence
  Description of Artificial Sequence: Synthetic oligonucleotide
  Antisense strand to SEQ ID NO: 1074664
gaucgcaaugggaaaucau

SEQ ID NO: 1074666 - RNA, 19 nt, Artificial Sequence
  Description of Artificial Sequence: Synthetic oligonucleotide
  Sense strand starting at position 2602 of SEQ ID NO: 915369
uugcgaucucuuuaccuga

SEQ ID NO: 1074667 - RNA, 19 nt, Artificial Sequence
  Description of Artificial Sequence: Synthetic oligonucleotide
  Antisense strand to SEQ ID NO: 1074666
ucagguaaagagaucgcaa

SEQ ID NO: 1074668 - RNA, 19 nt, Artificial Sequence
  Description of Artificial Sequence: Synthetic oligonucleotide
  Sense strand starting at position 2604 of SEQ ID NO: 915369
gcgaucucuuuaccugaaa

SEQ ID NO: 1074669 - RNA, 19 nt, Artificial Sequence
  Description of Artificial Sequence: Synthetic oligonucleotide
  Antisense strand to SEQ ID NO: 1074668
uuucagguaaagagaucgc

SEQ ID NO: 1074670 - RNA, 19 nt, Artificial Sequence
  Description of Artificial Sequence: Synthetic oligonucleotide
  Sense strand starting at position 2605 of SEQ ID NO: 915369
cgaucucuuuaccugaaag

SEQ ID NO: 1074671 - RNA, 19 nt, Artificial Sequence
  Description of Artificial Sequence: Synthetic oligonucleotide
  Antisense strand to SEQ ID NO: 1074670
cuuucagguaaagagaucg

SEQ ID NO: 1074672 - RNA, 19 nt, Artificial Sequence
  Description of Artificial Sequence: Synthetic oligonucleotide
  Sense strand starting at position 2652 of SEQ ID NO: 915369
gugagggaucgcggaauau

SEQ ID NO: 1074673 - RNA, 19 nt, Artificial Sequence
  Description of Artificial Sequence: Synthetic oligonucleotide
  Antisense strand to SEQ ID NO: 1074672
auauuccgcgaucccucac

SEQ ID NO: 1074674 - RNA, 19 nt, Artificial Sequence
  Description of Artificial Sequence: Synthetic oligonucleotide
  Sense strand starting at position 2662 of SEQ ID NO: 915369
gcggaauaucccuaccugu

SEQ ID NO: 1074675 - RNA, 19 nt, Artificial Sequence
  Description of Artificial Sequence: Synthetic oligonucleotide
  Antisense strand to SEQ ID NO: 1074674
acagguagggauauuccgc

SEQ ID NO: 1074676 - RNA, 19 nt, Artificial Sequence
  Description of Artificial Sequence: Synthetic oligonucleotide
  Sense strand starting at position 2702 of SEQ ID NO: 915369
ugcccuuguccugggagaa

SEQ ID NO: 1074677 - RNA, 19 nt, Artificial Sequence
  Description of Artificial Sequence: Synthetic oligonucleotide
  Antisense strand to SEQ ID NO: 1074676
uucucccaggacaagggca

SEQ ID NO: 1074678 - RNA, 19 nt, Artificial Sequence
  Description of Artificial Sequence: Synthetic oligonucleotide
  Sense strand starting at position 2703 of SEQ ID NO: 915369
gcccuuguccugggagaag

SEQ ID NO: 1074679 - RNA, 19 nt, Artificial Sequence
  Description of Artificial Sequence: Synthetic oligonucleotide
  Antisense strand to SEQ ID NO: 1074678
cuucucccaggacaagggc

SEQ ID NO: 1074680 - RNA, 19 nt, Artificial Sequence
  Description of Artificial Sequence: Synthetic oligonucleotide
  Sense strand starting at position 2918 of SEQ ID NO: 915369
agaagagacggguguuuca

SEQ ID NO: 1074681 - RNA, 19 nt, Artificial Sequence
  Description of Artificial Sequence: Synthetic oligonucleotide
  Antisense strand to SEQ ID NO: 1074680
ugaaacacccgucucuucu

SEQ ID NO: 1074682 - RNA, 19 nt, Artificial Sequence
  Description of Artificial Sequence: Synthetic oligonucleotide
  Sense strand starting at position 3782 of SEQ ID NO: 915369
augauauuguaguuguacu

SEQ ID NO: 1074683 - RNA, 19 nt, Artificial Sequence
  Description of Artificial Sequence: Synthetic oligonucleotide
  Antisense strand to SEQ ID NO: 1074682
aguacaacuacaauaucau

SEQ ID NO: 1074684 - RNA, 19 nt, Artificial Sequence
  Description of Artificial Sequence: Synthetic oligonucleotide
  Sense strand starting at position 207 of SEQ ID NO: 915370
agggaauuaugcccuagag

SEQ ID NO: 1074685 - RNA, 19 nt, Artificial Sequence
  Description of Artificial Sequence: Synthetic oligonucleotide
  Antisense strand to SEQ ID NO: 1074684
cucuagggcauaauucccu

SEQ ID NO: 1074686 - RNA, 19 nt, Artificial Sequence
  Description of Artificial Sequence: Synthetic oligonucleotide
  Sense strand starting at position 225 of SEQ ID NO: 915370
gaauuaauuuaagggaguu

SEQ ID NO: 1074687 - RNA, 19 nt, Artificial Sequence
  Description of Artificial Sequence: Synthetic oligonucleotide
  Antisense strand to SEQ ID NO: 1074686
aacucccuuaaauuaauuc

SEQ ID NO: 1074688 - RNA, 19 nt, Artificial Sequence
  Description of Artificial Sequence: Synthetic oligonucleotide
  Sense strand starting at position 235 of SEQ ID NO: 915370
aagggaguugccugagaaa

SEQ ID NO: 1074689 - RNA, 19 nt, Artificial Sequence
  Description of Artificial Sequence: Synthetic oligonucleotide
  Antisense strand to SEQ ID NO: 1074688
uuucucaggcaacucccuu

SEQ ID NO: 1074690 - RNA, 19 nt, Artificial Sequence
  Description of Artificial Sequence: Synthetic oligonucleotide
  Sense strand starting at position 314 of SEQ ID NO: 915370
aacucaaaugucuggguua

SEQ ID NO: 1074691 - RNA, 19 nt, Artificial Sequence
  Description of Artificial Sequence: Synthetic oligonucleotide
  Antisense strand to SEQ ID NO: 1074690
uaacccagacauuugaguu

SEQ ID NO: 1074692 - RNA, 19 nt, Artificial Sequence
  Description of Artificial Sequence: Synthetic oligonucleotide
  Sense strand starting at position 316 of SEQ ID NO: 915370
cucaaaugucuggguuaaa

SEQ ID NO: 1074693 - RNA, 19 nt, Artificial Sequence
  Description of Artificial Sequence: Synthetic oligonucleotide
  Antisense strand to SEQ ID NO: 1074692
uuuaacccagacauuugag

SEQ ID NO: 1074694 - RNA, 19 nt, Artificial Sequence
  Description of Artificial Sequence: Synthetic oligonucleotide
  Sense strand starting at position 495 of SEQ ID NO: 915370
uuucuaaguuauucuggaa

SEQ ID NO: 1074695 - RNA, 19 nt, Artificial Sequence
  Description of Artificial Sequence: Synthetic oligonucleotide
  Antisense strand to SEQ ID NO: 1074694
uuccagaauaacuuagaaa

SEQ ID NO: 1074696 - RNA, 19 nt, Artificial Sequence
  Description of Artificial Sequence: Synthetic oligonucleotide
  Sense strand starting at position 499 of SEQ ID NO: 915370
uaaguuauucuggaagucu

SEQ ID NO: 1074697 - RNA, 19 nt, Artificial Sequence
  Description of Artificial Sequence: Synthetic oligonucleotide
  Antisense strand to SEQ ID NO: 1074696
agacuuccagaauaacuua

SEQ ID NO: 1074698 - RNA, 19 nt, Artificial Sequence
  Description of Artificial Sequence: Synthetic oligonucleotide
  Sense strand starting at position 507 of SEQ ID NO: 915370
ucuggaagucuaugacauc

SEQ ID NO: 1074699 - RNA, 19 nt, Artificial Sequence
  Description of Artificial Sequence: Synthetic oligonucleotide
  Antisense strand to SEQ ID NO: 1074698
gaugucauagacuuccaga

SEQ ID NO: 1074700 - RNA, 19 nt, Artificial Sequence
  Description of Artificial Sequence: Synthetic oligonucleotide
  Sense strand starting at position 607 of SEQ ID NO: 915370
gcugaugcagaaggauuau

SEQ ID NO: 1074701 - RNA, 19 nt, Artificial Sequence
  Description of Artificial Sequence: Synthetic oligonucleotide
  Antisense strand to SEQ ID NO: 1074700
auaauccuucugcaucagc

SEQ ID NO: 1074702 - RNA, 19 nt, Artificial Sequence
  Description of Artificial Sequence: Synthetic oligonucleotide
  Sense strand starting at position 620 of SEQ ID NO: 915370
gauuauugagcccacaagu

SEQ ID NO: 1074703 - RNA, 19 nt, Artificial Sequence
  Description of Artificial Sequence: Synthetic oligonucleotide
  Antisense strand to SEQ ID NO: 1074702
acuugugggcucaauaauc

SEQ ID NO: 1074704 - RNA, 19 nt, Artificial Sequence
  Description of Artificial Sequence: Synthetic oligonucleotide
  Sense strand starting at position 744 of SEQ ID NO: 915370
gccagauacucugcuaaga

SEQ ID NO: 1074705 - RNA, 19 nt, Artificial Sequence
  Description of Artificial Sequence: Synthetic oligonucleotide
  Antisense strand to SEQ ID NO: 1074704
ucuuagcagaguaucuggc

SEQ ID NO: 1074706 - RNA, 19 nt, Artificial Sequence
  Description of Artificial Sequence: Synthetic oligonucleotide
  Sense strand starting at position 755 of SEQ ID NO: 915370
ugcuaagaguacguuaucu

SEQ ID NO: 1074707 - RNA, 19 nt, Artificial Sequence
  Description of Artificial Sequence: Synthetic oligonucleotide
  Antisense strand to SEQ ID NO: 1074706
agauaacguacucuuagca

SEQ ID NO: 1074708 - RNA, 19 nt, Artificial Sequence
  Description of Artificial Sequence: Synthetic oligonucleotide
  Sense strand starting at position 876 of SEQ ID NO: 915370
gguucuaucugacuccuaa

SEQ ID NO: 1074709 - RNA, 19 nt, Artificial Sequence
  Description of Artificial Sequence: Synthetic oligonucleotide
  Antisense strand to SEQ ID NO: 1074708
uuaggagucagauagaacc

SEQ ID NO: 1074710 - RNA, 19 nt, Artificial Sequence
  Description of Artificial Sequence: Synthetic oligonucleotide
  Sense strand starting at position 1348 of SEQ ID NO: 915370
ggaugacuaucaccgcaga

SEQ ID NO: 1074711 - RNA, 19 nt, Artificial Sequence
  Description of Artificial Sequence: Synthetic oligonucleotide
  Antisense strand to SEQ ID NO: 1074710
ucugcggugauagucaucc

SEQ ID NO: 1074712 - RNA, 19 nt, Artificial Sequence
  Description of Artificial Sequence: Synthetic oligonucleotide
  Sense strand starting at position 1351 of SEQ ID NO: 915370
ugacuaucaccgcagacua

SEQ ID NO: 1074713 - RNA, 19 nt, Artificial Sequence
  Description of Artificial Sequence: Synthetic oligonucleotide
  Antisense strand to SEQ ID NO: 1074712
uagucugcggugauaguca

SEQ ID NO: 1074714 - RNA, 19 nt, Artificial Sequence
  Description of Artificial Sequence: Synthetic oligonucleotide
  Sense strand starting at position 1625 of SEQ ID NO: 915370
gugugaauuucgagguagg

SEQ ID NO: 1074715 - RNA, 19 nt, Artificial Sequence
  Description of Artificial Sequence: Synthetic oligonucleotide
  Antisense strand to SEQ ID NO: 1074714
ccuaccucgaaauucacac

SEQ ID NO: 1074716 - RNA, 19 nt, Artificial Sequence
  Description of Artificial Sequence: Synthetic oligonucleotide
  Sense strand starting at position 1713 of SEQ ID NO: 915370
cccuuaccuucuguuggaa

SEQ ID NO: 1074717 - RNA, 19 nt, Artificial Sequence
  Description of Artificial Sequence: Synthetic oligonucleotide
  Antisense strand to SEQ ID NO: 1074716
uuccaacagaagguaaggg

SEQ ID NO: 1074718 - RNA, 19 nt, Artificial Sequence
  Description of Artificial Sequence: Synthetic oligonucleotide
  Sense strand starting at position 1716 of SEQ ID NO: 915370
uuaccuucuguuggaagua

SEQ ID NO: 1074719 - RNA, 19 nt, Artificial Sequence
  Description of Artificial Sequence: Synthetic oligonucleotide
  Antisense strand to SEQ ID NO: 1074718
uacuuccaacagaagguaa

SEQ ID NO: 1074720 - RNA, 19 nt, Artificial Sequence
  Description of Artificial Sequence: Synthetic oligonucleotide
  Sense strand starting at position 1739 of SEQ ID NO: 915370
accgaauaguucuuggcua

SEQ ID NO: 1074721 - RNA, 19 nt, Artificial Sequence
  Description of Artificial Sequence: Synthetic oligonucleotide
  Antisense strand to SEQ ID NO: 1074720
uagccaagaacuauucggu

SEQ ID NO: 1074722 - RNA, 19 nt, Artificial Sequence
  Description of Artificial Sequence: Synthetic oligonucleotide
  Sense strand starting at position 1741 of SEQ ID NO: 915370
cgaauaguucuuggcuaca

SEQ ID NO: 1074723 - RNA, 19 nt, Artificial Sequence
  Description of Artificial Sequence: Synthetic oligonucleotide
  Antisense strand to SEQ ID NO: 1074722
uguagccaagaacuauucg

SEQ ID NO: 1074724 - RNA, 19 nt, Artificial Sequence
  Description of Artificial Sequence: Synthetic oligonucleotide
  Sense strand starting at position 2197 of SEQ ID NO: 915370
gcuguagcccaugcuuuau

SEQ ID NO: 1074725 - RNA, 19 nt, Artificial Sequence
  Description of Artificial Sequence: Synthetic oligonucleotide
  Antisense strand to SEQ ID NO: 1074724
auaaagcaugggcuacagc

SEQ ID NO: 1074726 - RNA, 19 nt, Artificial Sequence
  Description of Artificial Sequence: Synthetic oligonucleotide
  Sense strand starting at position 2364 of SEQ ID NO: 915370
augacaauuuauugaaggu

SEQ ID NO: 1074727 - RNA, 19 nt, Artificial Sequence
  Description of Artificial Sequence: Synthetic oligonucleotide
  Antisense strand to SEQ ID NO: 1074726
accuucaauaaauugucau

SEQ ID NO: 1074728 - RNA, 19 nt, Artificial Sequence
  Description of Artificial Sequence: Synthetic oligonucleotide
  Sense strand starting at position 2452 of SEQ ID NO: 915370
caaucuugugcgucguaua

SEQ ID NO: 1074729 - RNA, 19 nt, Artificial Sequence
  Description of Artificial Sequence: Synthetic oligonucleotide
  Antisense strand to SEQ ID NO: 1074728
uauacgacgcacaagauug

SEQ ID NO: 1074730 - RNA, 19 nt, Artificial Sequence
  Description of Artificial Sequence: Synthetic oligonucleotide
  Sense strand starting at position 2468 of SEQ ID NO: 915370
auaugauuguuauucccau

SEQ ID NO: 1074731 - RNA, 19 nt, Artificial Sequence
  Description of Artificial Sequence: Synthetic oligonucleotide
  Antisense strand to SEQ ID NO: 1074730
augggaauaacaaucauau

SEQ ID NO: 1074732 - RNA, 19 nt, Artificial Sequence
  Description of Artificial Sequence: Synthetic oligonucleotide
  Sense strand starting at position 2532 of SEQ ID NO: 915370
cuagaucacucagcaguga

SEQ ID NO: 1074733 - RNA, 19 nt, Artificial Sequence
  Description of Artificial Sequence: Synthetic oligonucleotide
  Antisense strand to SEQ ID NO: 1074732
ucacugcugagugaucuag

SEQ ID NO: 1074734 - RNA, 19 nt, Artificial Sequence
  Description of Artificial Sequence: Synthetic oligonucleotide
  Sense strand starting at position 3114 of SEQ ID NO: 915370
guaggauuuccucgcuaag

SEQ ID NO: 1074735 - RNA, 19 nt, Artificial Sequence
  Description of Artificial Sequence: Synthetic oligonucleotide
  Antisense strand to SEQ ID NO: 1074734
cuuagcgaggaaauccuac

SEQ ID NO: 1074736 - RNA, 19 nt, Artificial Sequence
  Description of Artificial Sequence: Synthetic oligonucleotide
  Sense strand starting at position 3116 of SEQ ID NO: 915370
aggauuuccucgcuaagcu

SEQ ID NO: 1074737 - RNA, 19 nt, Artificial Sequence
  Description of Artificial Sequence: Synthetic oligonucleotide
  Antisense strand to SEQ ID NO: 1074736
agcuuagcgaggaaauccu

SEQ ID NO: 1074738 - RNA, 19 nt, Artificial Sequence
  Description of Artificial Sequence: Synthetic oligonucleotide
  Sense strand starting at position 3156 of SEQ ID NO: 915370
ucugauuggcucugaguaa

SEQ ID NO: 1074739 - RNA, 19 nt, Artificial Sequence
  Description of Artificial Sequence: Synthetic oligonucleotide
  Antisense strand to SEQ ID NO: 1074738
uuacucagagccaaucaga

SEQ ID NO: 1074740 - RNA, 19 nt, Artificial Sequence
  Description of Artificial Sequence: Synthetic oligonucleotide
  Sense strand starting at position 3417 of SEQ ID NO: 915370
acaagugguucucuguaaa

SEQ ID NO: 1074741 - RNA, 19 nt, Artificial Sequence
  Description of Artificial Sequence: Synthetic oligonucleotide
  Antisense strand to SEQ ID NO: 1074740
uuuacagagaaccacuugu

SEQ ID NO: 1074742 - RNA, 19 nt, Artificial Sequence
  Description of Artificial Sequence: Synthetic oligonucleotide
  Sense strand starting at position 3443 of SEQ ID NO: 915370
ccaugaggguaacagaaua

SEQ ID NO: 1074743 - RNA, 19 nt, Artificial Sequence
  Description of Artificial Sequence: Synthetic oligonucleotide
  Antisense strand to SEQ ID NO: 1074742
uauucuguuacccucaugg

SEQ ID NO: 1074744 - RNA, 19 nt, Artificial Sequence
  Description of Artificial Sequence: Synthetic oligonucleotide
  Sense strand starting at position 3457 of SEQ ID NO: 915370
gaauauaaacgucaguuau

SEQ ID NO: 1074745 - RNA, 19 nt, Artificial Sequence
  Description of Artificial Sequence: Synthetic oligonucleotide
  Antisense strand to SEQ ID NO: 1074744
auaacugacguuuauauuc

SEQ ID NO: 1074746 - RNA, 19 nt, Artificial Sequence
  Description of Artificial Sequence: Synthetic oligonucleotide
  Sense strand starting at position 3592 of SEQ ID NO: 915370
gcgacucuugcuucuguaa

SEQ ID NO: 1074747 - RNA, 19 nt, Artificial Sequence
  Description of Artificial Sequence: Synthetic oligonucleotide
  Antisense strand to SEQ ID NO: 1074746
uuacagaagcaagagucgc

SEQ ID NO: 1074748 - RNA, 19 nt, Artificial Sequence
  Description of Artificial Sequence: Synthetic oligonucleotide
  Sense strand starting at position 3618 of SEQ ID NO: 915370
auacguauucagugggcca

SEQ ID NO: 1074749 - RNA, 19 nt, Artificial Sequence
  Description of Artificial Sequence: Synthetic oligonucleotide
  Antisense strand to SEQ ID NO: 1074748
uggcccacugaauacguau

SEQ ID NO: 1074750 - RNA, 19 nt, Artificial Sequence
  Description of Artificial Sequence: Synthetic oligonucleotide
  Sense strand starting at position 3642 of SEQ ID NO: 915370
cagaguaguacgugcugaa

SEQ ID NO: 1074751 - RNA, 19 nt, Artificial Sequence
  Description of Artificial Sequence: Synthetic oligonucleotide
  Antisense strand to SEQ ID NO: 1074750
uucagcacguacuacucug

SEQ ID NO: 1074752 - RNA, 19 nt, Artificial Sequence
  Description of Artificial Sequence: Synthetic oligonucleotide
  Sense strand starting at position 3676 of SEQ ID NO: 915370
augcuaugauggcuuagaa

SEQ ID NO: 1074753 - RNA, 19 nt, Artificial Sequence
  Description of Artificial Sequence: Synthetic oligonucleotide
  Antisense strand to SEQ ID NO: 1074752
uucuaagccaucauagcau

SEQ ID NO: 1074754 - RNA, 19 nt, Artificial Sequence
  Description of Artificial Sequence: Synthetic oligonucleotide
  Sense strand starting at position 3680 of SEQ ID NO: 915370
uaugauggcuuagaaggaa

SEQ ID NO: 1074755 - RNA, 19 nt, Artificial Sequence
  Description of Artificial Sequence: Synthetic oligonucleotide
  Antisense strand to SEQ ID NO: 1074754
uuccuucuaagccaucaua

SEQ ID NO: 1074756 - RNA, 19 nt, Artificial Sequence
  Description of Artificial Sequence: Synthetic oligonucleotide
  Sense strand starting at position 3705 of SEQ ID NO: 915370
uuaacugagccaugugcuu

SEQ ID NO: 1074757 - RNA, 19 nt, Artificial Sequence
  Description of Artificial Sequence: Synthetic oligonucleotide
  Antisense strand to SEQ ID NO: 1074756
aagcacauggcucaguuaa

SEQ ID NO: 1074758 - RNA, 19 nt, Artificial Sequence
  Description of Artificial Sequence: Synthetic oligonucleotide
  Sense strand starting at position 3711 of SEQ ID NO: 915370
gagccaugugcuuaaacca

SEQ ID NO: 1074759 - RNA, 19 nt, Artificial Sequence
  Description of Artificial Sequence: Synthetic oligonucleotide
  Antisense strand to SEQ ID NO: 1074758
ugguuuaagcacauggcuc

SEQ ID NO: 1074760 - RNA, 19 nt, Artificial Sequence
  Description of Artificial Sequence: Synthetic oligonucleotide
  Sense strand starting at position 3831 of SEQ ID NO: 915370
uugguucgacccuaugacu

SEQ ID NO: 1074761 - RNA, 19 nt, Artificial Sequence
  Description of Artificial Sequence: Synthetic oligonucleotide
  Antisense strand to SEQ ID NO: 1074760
agucauagggucgaaccaa

SEQ ID NO: 1074762 - RNA, 19 nt, Artificial Sequence
  Description of Artificial Sequence: Synthetic oligonucleotide
  Sense strand starting at position 3938 of SEQ ID NO: 915370
ccacauugcugggcugaua

SEQ ID NO: 1074763 - RNA, 19 nt, Artificial Sequence
  Description of Artificial Sequence: Synthetic oligonucleotide
  Antisense strand to SEQ ID NO: 1074762
uaucagcccagcaaugugg

SEQ ID NO: 1074764 - RNA, 19 nt, Artificial Sequence
  Description of Artificial Sequence: Synthetic oligonucleotide
  Sense strand starting at position 59 of SEQ ID NO: 915371
cucagcaguucguaaccau

SEQ ID NO: 1074765 - RNA, 19 nt, Artificial Sequence
  Description of Artificial Sequence: Synthetic oligonucleotide
  Antisense strand to SEQ ID NO: 1074764
augguuacgaacugcugag

SEQ ID NO: 1074766 - RNA, 19 nt, Artificial Sequence
  Description of Artificial Sequence: Synthetic oligonucleotide
  Sense strand starting at position 415 of SEQ ID NO: 915371
aguggaagcuauugugaug

SEQ ID NO: 1074767 - RNA, 19 nt, Artificial Sequence
  Description of Artificial Sequence: Synthetic oligonucleotide
  Antisense strand to SEQ ID NO: 1074766
caucacaauagcuuccacu

SEQ ID NO: 1074768 - RNA, 19 nt, Artificial Sequence
  Description of Artificial Sequence: Synthetic oligonucleotide
  Sense strand starting at position 420 of SEQ ID NO: 915371
aagcuauugugaugcugga

SEQ ID NO: 1074769 - RNA, 19 nt, Artificial Sequence
  Description of Artificial Sequence: Synthetic oligonucleotide
  Antisense strand to SEQ ID NO: 1074768
uccagcaucacaauagcuu

SEQ ID NO: 1074770 - RNA, 19 nt, Artificial Sequence
  Description of Artificial Sequence: Synthetic oligonucleotide
  Sense strand starting at position 433 of SEQ ID NO: 915371
gcuggaaugguaggaagau

SEQ ID NO: 1074771 - RNA, 19 nt, Artificial Sequence
  Description of Artificial Sequence: Synthetic oligonucleotide
  Antisense strand to SEQ ID NO: 1074770
aucuuccuaccauuccagc

SEQ ID NO: 1074772 - RNA, 19 nt, Artificial Sequence
  Description of Artificial Sequence: Synthetic oligonucleotide
  Sense strand starting at position 434 of SEQ ID NO: 915371
cuggaaugguaggaagaua

SEQ ID NO: 1074773 - RNA, 19 nt, Artificial Sequence
  Description of Artificial Sequence: Synthetic oligonucleotide
  Antisense strand to SEQ ID NO: 1074772
uaucuuccuaccauuccag

SEQ ID NO: 1074774 - RNA, 19 nt, Artificial Sequence
  Description of Artificial Sequence: Synthetic oligonucleotide
  Sense strand starting at position 494 of SEQ ID NO: 915371
gcgauggaggagugauaga

SEQ ID NO: 1074775 - RNA, 19 nt, Artificial Sequence
  Description of Artificial Sequence: Synthetic oligonucleotide
  Antisense strand to SEQ ID NO: 1074774
ucuaucacuccuccaucgc

SEQ ID NO: 1074776 - RNA, 19 nt, Artificial Sequence
  Description of Artificial Sequence: Synthetic oligonucleotide
  Sense strand starting at position 547 of SEQ ID NO: 915371
aacagucaugagugauucu

SEQ ID NO: 1074777 - RNA, 19 nt, Artificial Sequence
  Description of Artificial Sequence: Synthetic oligonucleotide
  Antisense strand to SEQ ID NO: 1074776
agaaucacucaugacuguu

SEQ ID NO: 1074778 - RNA, 19 nt, Artificial Sequence
  Description of Artificial Sequence: Synthetic oligonucleotide
  Sense strand starting at position 585 of SEQ ID NO: 915371
aaguacugcuaaguuuaga

SEQ ID NO: 1074779 - RNA, 19 nt, Artificial Sequence
  Description of Artificial Sequence: Synthetic oligonucleotide
  Antisense strand to SEQ ID NO: 1074778
ucuaaacuuagcaguacuu

SEQ ID NO: 1074780 - RNA, 19 nt, Artificial Sequence
  Description of Artificial Sequence: Synthetic oligonucleotide
  Sense strand starting at position 588 of SEQ ID NO: 915371
uacugcuaaguuuagagaa

SEQ ID NO: 1074781 - RNA, 19 nt, Artificial Sequence
  Description of Artificial Sequence: Synthetic oligonucleotide
  Antisense strand to SEQ ID NO: 1074780
uucucuaaacuuagcagua

SEQ ID NO: 1074782 - RNA, 19 nt, Artificial Sequence
  Description of Artificial Sequence: Synthetic oligonucleotide
  Sense strand starting at position 590 of SEQ ID NO: 915371
cugcuaaguuuagagaauu

SEQ ID NO: 1074783 - RNA, 19 nt, Artificial Sequence
  Description of Artificial Sequence: Synthetic oligonucleotide
  Antisense strand to SEQ ID NO: 1074782
aauucucuaaacuuagcag

SEQ ID NO: 1074784 - RNA, 19 nt, Artificial Sequence
  Description of Artificial Sequence: Synthetic oligonucleotide
  Sense strand starting at position 672 of SEQ ID NO: 915371
cugggugggucucaucaca

SEQ ID NO: 1074785 - RNA, 19 nt, Artificial Sequence
  Description of Artificial Sequence: Synthetic oligonucleotide
  Antisense strand to SEQ ID NO: 1074784
ugugaugagacccacccag

SEQ ID NO: 1074786 - RNA, 19 nt, Artificial Sequence
  Description of Artificial Sequence: Synthetic oligonucleotide
  Sense strand starting at position 690 of SEQ ID NO: 915371
acaucuaauccucgaugac

SEQ ID NO: 1074787 - RNA, 19 nt, Artificial Sequence
  Description of Artificial Sequence: Synthetic oligonucleotide
  Antisense strand to SEQ ID NO: 1074786
gucaucgaggauuagaugu

SEQ ID NO: 1074788 - RNA, 19 nt, Artificial Sequence
  Description of Artificial Sequence: Synthetic oligonucleotide
  Sense strand starting at position 726 of SEQ ID NO: 915371
ccuugugcuuaaguguaca

SEQ ID NO: 1074789 - RNA, 19 nt, Artificial Sequence
  Description of Artificial Sequence: Synthetic oligonucleotide
  Antisense strand to SEQ ID NO: 1074788
uguacacuuaagcacaagg

SEQ ID NO: 1074790 - RNA, 19 nt, Artificial Sequence
  Description of Artificial Sequence: Synthetic oligonucleotide
  Sense strand starting at position 737 of SEQ ID NO: 915371
aguguacacgcacauugau

SEQ ID NO: 1074791 - RNA, 19 nt, Artificial Sequence
  Description of Artificial Sequence: Synthetic oligonucleotide
  Antisense strand to SEQ ID NO: 1074790
aucaaugugcguguacacu

SEQ ID NO: 1074792 - RNA, 19 nt, Artificial Sequence
  Description of Artificial Sequence: Synthetic oligonucleotide
  Sense strand starting at position 898 of SEQ ID NO: 915371
gguuaaaccugcuuaacaa

SEQ ID NO: 1074793 - RNA, 19 nt, Artificial Sequence
  Description of Artificial Sequence: Synthetic oligonucleotide
  Antisense strand to SEQ ID NO: 1074792
uuguuaagcagguuuaacc

SEQ ID NO: 1074794 - RNA, 19 nt, Artificial Sequence
  Description of Artificial Sequence: Synthetic oligonucleotide
  Sense strand starting at position 713 of SEQ ID NO: 915372
cucuguugaacugggauua

SEQ ID NO: 1074795 - RNA, 19 nt, Artificial Sequence
  Description of Artificial Sequence: Synthetic oligonucleotide
  Antisense strand to SEQ ID NO: 1074794
uaaucccaguucaacagag

SEQ ID NO: 1074796 - RNA, 19 nt, Artificial Sequence
  Description of Artificial Sequence: Synthetic oligonucleotide
  Sense strand starting at position 821 of SEQ ID NO: 915372
ucugaagagccucaguaau

SEQ ID NO: 1074797 - RNA, 19 nt, Artificial Sequence
  Description of Artificial Sequence: Synthetic oligonucleotide
  Antisense strand to SEQ ID NO: 1074796
auuacugaggcucuucaga

SEQ ID NO: 1074798 - RNA, 19 nt, Artificial Sequence
  Description of Artificial Sequence: Synthetic oligonucleotide
  Sense strand starting at position 840 of SEQ ID NO: 915372
gcaaaucaaugaguaagca

SEQ ID NO: 1074799 - RNA, 19 nt, Artificial Sequence
  Description of Artificial Sequence: Synthetic oligonucleotide
  Antisense strand to SEQ ID NO: 1074798
ugcuuacucauugauuugc

SEQ ID NO: 1074800 - RNA, 19 nt, Artificial Sequence
  Description of Artificial Sequence: Synthetic oligonucleotide
  Sense strand starting at position 1221 of SEQ ID NO: 915372
gaagcucuggugugagaga

SEQ ID NO: 1074801 - RNA, 19 nt, Artificial Sequence
  Description of Artificial Sequence: Synthetic oligonucleotide
  Antisense strand to SEQ ID NO: 1074800
ucucucacaccagagcuuc

SEQ ID NO: 1074802 - RNA, 19 nt, Artificial Sequence
  Description of Artificial Sequence: Synthetic oligonucleotide
  Sense strand starting at position 1309 of SEQ ID NO: 915372
uuguuuacucaucaguaaa

SEQ ID NO: 1074803 - RNA, 19 nt, Artificial Sequence
  Description of Artificial Sequence: Synthetic oligonucleotide
  Antisense strand to SEQ ID NO: 1074802
uuuacugaugaguaaacaa

SEQ ID NO: 1074804 - RNA, 19 nt, Artificial Sequence
  Description of Artificial Sequence: Synthetic oligonucleotide
  Sense strand starting at position 1311 of SEQ ID NO: 915372
guuuacucaucaguaaauc

SEQ ID NO: 1074805 - RNA, 19 nt, Artificial Sequence
  Description of Artificial Sequence: Synthetic oligonucleotide
  Antisense strand to SEQ ID NO: 1074804
gauuuacugaugaguaaac

SEQ ID NO: 1074806 - RNA, 19 nt, Artificial Sequence
  Description of Artificial Sequence: Synthetic oligonucleotide
  Sense strand starting at position 1337 of SEQ ID NO: 915372
gaaggagagugucccucaa

SEQ ID NO: 1074807 - RNA, 19 nt, Artificial Sequence
  Description of Artificial Sequence: Synthetic oligonucleotide
  Antisense strand to SEQ ID NO: 1074806
uugagggacacucuccuuc

SEQ ID NO: 1074808 - RNA, 19 nt, Artificial Sequence
  Description of Artificial Sequence: Synthetic oligonucleotide
  Sense strand starting at position 1339 of SEQ ID NO: 915372
aggagagugucccucaaag

SEQ ID NO: 1074809 - RNA, 19 nt, Artificial Sequence
  Description of Artificial Sequence: Synthetic oligonucleotide
  Antisense strand to SEQ ID NO: 1074808
cuuugagggacacucuccu

SEQ ID NO: 1074810 - RNA, 19 nt, Artificial Sequence
  Description of Artificial Sequence: Synthetic oligonucleotide
  Sense strand starting at position 1725 of SEQ ID NO: 915372
cugguuaugaacuggcaau

SEQ ID NO: 1074811 - RNA, 19 nt, Artificial Sequence
  Description of Artificial Sequence: Synthetic oligonucleotide
  Antisense strand to SEQ ID NO: 1074810
auugccaguucauaaccag

SEQ ID NO: 1074812 - RNA, 19 nt, Artificial Sequence
  Description of Artificial Sequence: Synthetic oligonucleotide
  Sense strand starting at position 2192 of SEQ ID NO: 915372
gaccguuucgaugugugca

SEQ ID NO: 1074813 - RNA, 19 nt, Artificial Sequence
  Description of Artificial Sequence: Synthetic oligonucleotide
  Antisense strand to SEQ ID NO: 1074812
ugcacacaucgaaacgguc

SEQ ID NO: 1074814 - RNA, 19 nt, Artificial Sequence
  Description of Artificial Sequence: Synthetic oligonucleotide
  Sense strand starting at position 2208 of SEQ ID NO: 915372
gcacaugugagguaucauc

SEQ ID NO: 1074815 - RNA, 19 nt, Artificial Sequence
  Description of Artificial Sequence: Synthetic oligonucleotide
  Antisense strand to SEQ ID NO: 1074814
gaugauaccucacaugugc

SEQ ID NO: 1074816 - RNA, 19 nt, Artificial Sequence
  Description of Artificial Sequence: Synthetic oligonucleotide
  Sense strand starting at position 2216 of SEQ ID NO: 915372
gagguaucaucaguuucca

SEQ ID NO: 1074817 - RNA, 19 nt, Artificial Sequence
  Description of Artificial Sequence: Synthetic oligonucleotide
  Antisense strand to SEQ ID NO: 1074816
uggaaacugaugauaccuc

SEQ ID NO: 1074818 - RNA, 19 nt, Artificial Sequence
  Description of Artificial Sequence: Synthetic oligonucleotide
  Sense strand starting at position 2301 of SEQ ID NO: 915372
ggguaaaugaguugaccua

SEQ ID NO: 1074819 - RNA, 19 nt, Artificial Sequence
  Description of Artificial Sequence: Synthetic oligonucleotide
  Antisense strand to SEQ ID NO: 1074818
uaggucaacucauuuaccc

SEQ ID NO: 1074820 - RNA, 19 nt, Artificial Sequence
  Description of Artificial Sequence: Synthetic oligonucleotide
  Sense strand starting at position 2477 of SEQ ID NO: 915372
gucagucuccugcaaauaa

SEQ ID NO: 1074821 - RNA, 19 nt, Artificial Sequence
  Description of Artificial Sequence: Synthetic oligonucleotide
  Antisense strand to SEQ ID NO: 1074820
uuauuugcaggagacugac

SEQ ID NO: 1074822 - RNA, 19 nt, Artificial Sequence
  Description of Artificial Sequence: Synthetic oligonucleotide
  Sense strand starting at position 2498 of SEQ ID NO: 915372
cacaguuugggucauguau

SEQ ID NO: 1074823 - RNA, 19 nt, Artificial Sequence
  Description of Artificial Sequence: Synthetic oligonucleotide
  Antisense strand to SEQ ID NO: 1074822
auacaugacccaaacugug

SEQ ID NO: 1074824 - RNA, 19 nt, Artificial Sequence
  Description of Artificial Sequence: Synthetic oligonucleotide
  Sense strand starting at position 2534 of SEQ ID NO: 915372
aucaaauauccuggcagaa

SEQ ID NO: 1074825 - RNA, 19 nt, Artificial Sequence
  Description of Artificial Sequence: Synthetic oligonucleotide
  Antisense strand to SEQ ID NO: 1074824
uucugccaggauauuugau

SEQ ID NO: 1074826 - RNA, 19 nt, Artificial Sequence
  Description of Artificial Sequence: Synthetic oligonucleotide
  Sense strand starting at position 2584 of SEQ ID NO: 915372
ccuccaaucuaaguguuau

SEQ ID NO: 1074827 - RNA, 19 nt, Artificial Sequence
  Description of Artificial Sequence: Synthetic oligonucleotide
  Antisense strand to SEQ ID NO: 1074826
auaacacuuagauuggagg

SEQ ID NO: 1074828 - RNA, 19 nt, Artificial Sequence
  Description of Artificial Sequence: Synthetic oligonucleotide
  Sense strand starting at position 2592 of SEQ ID NO: 915372
cuaaguguuaugggauuau

SEQ ID NO: 1074829 - RNA, 19 nt, Artificial Sequence
  Description of Artificial Sequence: Synthetic oligonucleotide
  Antisense strand to SEQ ID NO: 1074828
auaaucccauaacacuuag

SEQ ID NO: 1074830 - RNA, 19 nt, Artificial Sequence
  Description of Artificial Sequence: Synthetic oligonucleotide
  Sense strand starting at position 2596 of SEQ ID NO: 915372
guguuaugggauuauacac

SEQ ID NO: 1074831 - RNA, 19 nt, Artificial Sequence
  Description of Artificial Sequence: Synthetic oligonucleotide
  Antisense strand to SEQ ID NO: 1074830
guguauaaucccauaacac

SEQ ID NO: 1074832 - RNA, 19 nt, Artificial Sequence
  Description of Artificial Sequence: Synthetic oligonucleotide
  Sense strand starting at position 2603 of SEQ ID NO: 915372
gggauuauacacuggccua

SEQ ID NO: 1074833 - RNA, 19 nt, Artificial Sequence
  Description of Artificial Sequence: Synthetic oligonucleotide
  Antisense strand to SEQ ID NO: 1074832
uaggccaguguauaauccc

SEQ ID NO: 1074834 - RNA, 19 nt, Artificial Sequence
  Description of Artificial Sequence: Synthetic oligonucleotide
  Sense strand starting at position 2606 of SEQ ID NO: 915372
auuauacacuggccuagaa

SEQ ID NO: 1074835 - RNA, 19 nt, Artificial Sequence
  Description of Artificial Sequence: Synthetic oligonucleotide
  Antisense strand to SEQ ID NO: 1074834
uucuaggccaguguauaau

SEQ ID NO: 1074836 - RNA, 19 nt, Artificial Sequence
  Description of Artificial Sequence: Synthetic oligonucleotide
  Sense strand starting at position 2616 of SEQ ID NO: 915372
ggccuagaaucccuuuaug

SEQ ID NO: 1074837 - RNA, 19 nt, Artificial Sequence
  Description of Artificial Sequence: Synthetic oligonucleotide
  Antisense strand to SEQ ID NO: 1074836
cauaaagggauucuaggcc

SEQ ID NO: 1074838 - RNA, 19 nt, Artificial Sequence
  Description of Artificial Sequence: Synthetic oligonucleotide
  Sense strand starting at position 2869 of SEQ ID NO: 915372
agcccuuggagccauagaa

SEQ ID NO: 1074839 - RNA, 19 nt, Artificial Sequence
  Description of Artificial Sequence: Synthetic oligonucleotide
  Antisense strand to SEQ ID NO: 1074838
uucuauggcuccaagggcu

SEQ ID NO: 1074840 - RNA, 19 nt, Artificial Sequence
  Description of Artificial Sequence: Synthetic oligonucleotide
  Sense strand starting at position 3018 of SEQ ID NO: 915372
aggacuuuccucuggaggu

SEQ ID NO: 1074841 - RNA, 19 nt, Artificial Sequence
  Description of Artificial Sequence: Synthetic oligonucleotide
  Antisense strand to SEQ ID NO: 1074840
accuccagaggaaaguccu

SEQ ID NO: 1074842 - RNA, 19 nt, Artificial Sequence
  Description of Artificial Sequence: Synthetic oligonucleotide
  Sense strand starting at position 3053 of SEQ ID NO: 915372
acccuuccgccacaagaau

SEQ ID NO: 1074843 - RNA, 19 nt, Artificial Sequence
  Description of Artificial Sequence: Synthetic oligonucleotide
  Antisense strand to SEQ ID NO: 1074842
auucuuguggcggaagggu

SEQ ID NO: 1074844 - RNA, 19 nt, Artificial Sequence
  Description of Artificial Sequence: Synthetic oligonucleotide
  Sense strand starting at position 3158 of SEQ ID NO: 915372
ucauuuauuucgcagugga

SEQ ID NO: 1074845 - RNA, 19 nt, Artificial Sequence
  Description of Artificial Sequence: Synthetic oligonucleotide
  Antisense strand to SEQ ID NO: 1074844
uccacugcgaaauaaauga

SEQ ID NO: 1074846 - RNA, 19 nt, Artificial Sequence
  Description of Artificial Sequence: Synthetic oligonucleotide
  Sense strand starting at position 3161 of SEQ ID NO: 915372
uuuauuucgcaguggauuc

SEQ ID NO: 1074847 - RNA, 19 nt, Artificial Sequence
  Description of Artificial Sequence: Synthetic oligonucleotide
  Antisense strand to SEQ ID NO: 1074846
gaauccacugcgaaauaaa

SEQ ID NO: 1074848 - RNA, 19 nt, Artificial Sequence
  Description of Artificial Sequence: Synthetic oligonucleotide
  Sense strand starting at position 3205 of SEQ ID NO: 915372
ggugcauuaguguuuacgu

SEQ ID NO: 1074849 - RNA, 19 nt, Artificial Sequence
  Description of Artificial Sequence: Synthetic oligonucleotide
  Antisense strand to SEQ ID NO: 1074848
acguaaacacuaaugcacc

SEQ ID NO: 1074850 - RNA, 19 nt, Artificial Sequence
  Description of Artificial Sequence: Synthetic oligonucleotide
  Sense strand starting at position 3252 of SEQ ID NO: 915372
ccugaacuugcagauaacu

SEQ ID NO: 1074851 - RNA, 19 nt, Artificial Sequence
  Description of Artificial Sequence: Synthetic oligonucleotide
  Antisense strand to SEQ ID NO: 1074850
aguuaucugcaaguucagg

SEQ ID NO: 1074852 - RNA, 19 nt, Artificial Sequence
  Description of Artificial Sequence: Synthetic oligonucleotide
  Sense strand starting at position 3422 of SEQ ID NO: 915372
cugccaagaucuuuagacu

SEQ ID NO: 1074853 - RNA, 19 nt, Artificial Sequence
  Description of Artificial Sequence: Synthetic oligonucleotide
  Antisense strand to SEQ ID NO: 1074852
agucuaaagaucuuggcag

SEQ ID NO: 1074854 - RNA, 19 nt, Artificial Sequence
  Description of Artificial Sequence: Synthetic oligonucleotide
  Sense strand starting at position 3423 of SEQ ID NO: 915372
ugccaagaucuuuagacuu

SEQ ID NO: 1074855 - RNA, 19 nt, Artificial Sequence
  Description of Artificial Sequence: Synthetic oligonucleotide
  Antisense strand to SEQ ID NO: 1074854
aagucuaaagaucuuggca

SEQ ID NO: 1074856 - RNA, 19 nt, Artificial Sequence
  Description of Artificial Sequence: Synthetic oligonucleotide
  Sense strand starting at position 3555 of SEQ ID NO: 915372
acugcaccucagggaaaua

SEQ ID NO: 1074857 - RNA, 19 nt, Artificial Sequence
  Description of Artificial Sequence: Synthetic oligonucleotide
  Antisense strand to SEQ ID NO: 1074856
uauuucccugaggugcagu

SEQ ID NO: 1074858 - RNA, 19 nt, Artificial Sequence
  Description of Artificial Sequence: Synthetic oligonucleotide
  Sense strand starting at position 3750 of SEQ ID NO: 915372
agcauuuaguaacugcuua

SEQ ID NO: 1074859 - RNA, 19 nt, Artificial Sequence
  Description of Artificial Sequence: Synthetic oligonucleotide
  Antisense strand to SEQ ID NO: 1074858
uaagcaguuacuaaaugcu

SEQ ID NO: 1074860 - RNA, 19 nt, Artificial Sequence
  Description of Artificial Sequence: Synthetic oligonucleotide
  Sense strand starting at position 3755 of SEQ ID NO: 915372
uuaguaacugcuuaguauu

SEQ ID NO: 1074861 - RNA, 19 nt, Artificial Sequence
  Description of Artificial Sequence: Synthetic oligonucleotide
  Antisense strand to SEQ ID NO: 1074860
aauacuaagcaguuacuaa

SEQ ID NO: 1074862 - RNA, 19 nt, Artificial Sequence
  Description of Artificial Sequence: Synthetic oligonucleotide
  Sense strand starting at position 3784 of SEQ ID NO: 915372
auccuaaguucuuuaagga

SEQ ID NO: 1074863 - RNA, 19 nt, Artificial Sequence
  Description of Artificial Sequence: Synthetic oligonucleotide
  Antisense strand to SEQ ID NO: 1074862
uccuuaaagaacuuaggau

SEQ ID NO: 1074864 - RNA, 19 nt, Artificial Sequence
  Description of Artificial Sequence: Synthetic oligonucleotide
  Sense strand starting at position 3785 of SEQ ID NO: 915372
uccuaaguucuuuaaggac

SEQ ID NO: 1074865 - RNA, 19 nt, Artificial Sequence
  Description of Artificial Sequence: Synthetic oligonucleotide
  Antisense strand to SEQ ID NO: 1074864
guccuuaaagaacuuagga

SEQ ID NO: 1074866 - RNA, 19 nt, Artificial Sequence
  Description of Artificial Sequence: Synthetic oligonucleotide
  Sense strand starting at position 3838 of SEQ ID NO: 915372
aaagaucgcugagcauaaa

SEQ ID NO: 1074867 - RNA, 19 nt, Artificial Sequence
  Description of Artificial Sequence: Synthetic oligonucleotide
  Antisense strand to SEQ ID NO: 1074866
uuuaugcucagcgaucuuu

SEQ ID NO: 1074868 - RNA, 19 nt, Artificial Sequence
  Description of Artificial Sequence: Synthetic oligonucleotide
  Sense strand starting at position 3841 of SEQ ID NO: 915372
gaucgcugagcauaaagua

SEQ ID NO: 1074869 - RNA, 19 nt, Artificial Sequence
  Description of Artificial Sequence: Synthetic oligonucleotide
  Antisense strand to SEQ ID NO: 1074868
uacuuuaugcucagcgauc

SEQ ID NO: 1074870 - RNA, 19 nt, Artificial Sequence
  Description of Artificial Sequence: Synthetic oligonucleotide
  Sense strand starting at position 3934 of SEQ ID NO: 915372
agaggaagucuuugcagua

SEQ ID NO: 1074871 - RNA, 19 nt, Artificial Sequence
  Description of Artificial Sequence: Synthetic oligonucleotide
  Antisense strand to SEQ ID NO: 1074870
uacugcaaagacuuccucu

SEQ ID NO: 1074872 - RNA, 19 nt, Artificial Sequence
  Description of Artificial Sequence: Synthetic oligonucleotide
  Sense strand starting at position 3978 of SEQ ID NO: 915372
gugcaucuuaaucgaagaa

SEQ ID NO: 1074873 - RNA, 19 nt, Artificial Sequence
  Description of Artificial Sequence: Synthetic oligonucleotide
  Antisense strand to SEQ ID NO: 1074872
uucuucgauuaagaugcac

SEQ ID NO: 1074874 - RNA, 19 nt, Artificial Sequence
  Description of Artificial Sequence: Synthetic oligonucleotide
  Sense strand starting at position 16 of SEQ ID NO: 915373
cagaucauucgguagcuuu

SEQ ID NO: 1074875 - RNA, 19 nt, Artificial Sequence
  Description of Artificial Sequence: Synthetic oligonucleotide
  Antisense strand to SEQ ID NO: 1074874
aaagcuaccgaaugaucug

SEQ ID NO: 1074876 - RNA, 19 nt, Artificial Sequence
  Description of Artificial Sequence: Synthetic oligonucleotide
  Sense strand starting at position 77 of SEQ ID NO: 915373
gaaagacuucuagguguuu

SEQ ID NO: 1074877 - RNA, 19 nt, Artificial Sequence
  Description of Artificial Sequence: Synthetic oligonucleotide
  Antisense strand to SEQ ID NO: 1074876
aaacaccuagaagucuuuc

SEQ ID NO: 1074878 - RNA, 19 nt, Artificial Sequence
  Description of Artificial Sequence: Synthetic oligonucleotide
  Sense strand starting at position 78 of SEQ ID NO: 915373
aaagacuucuagguguuua

SEQ ID NO: 1074879 - RNA, 19 nt, Artificial Sequence
  Description of Artificial Sequence: Synthetic oligonucleotide
  Antisense strand to SEQ ID NO: 1074878
uaaacaccuagaagucuuu

SEQ ID NO: 1074880 - RNA, 19 nt, Artificial Sequence
  Description of Artificial Sequence: Synthetic oligonucleotide
  Sense strand starting at position 83 of SEQ ID NO: 915373
cuucuagguguuuaaagca

SEQ ID NO: 1074881 - RNA, 19 nt, Artificial Sequence
  Description of Artificial Sequence: Synthetic oligonucleotide
  Antisense strand to SEQ ID NO: 1074880
ugcuuuaaacaccuagaag

SEQ ID NO: 1074882 - RNA, 19 nt, Artificial Sequence
  Description of Artificial Sequence: Synthetic oligonucleotide
  Sense strand starting at position 90 of SEQ ID NO: 915373
guguuuaaagcaggaaaug

SEQ ID NO: 1074883 - RNA, 19 nt, Artificial Sequence
  Description of Artificial Sequence: Synthetic oligonucleotide
  Antisense strand to SEQ ID NO: 1074882
cauuuccugcuuuaaacac

SEQ ID NO: 1074884 - RNA, 19 nt, Artificial Sequence
  Description of Artificial Sequence: Synthetic oligonucleotide
  Sense strand starting at position 137 of SEQ ID NO: 915373
ggaucacucugacugccau

SEQ ID NO: 1074885 - RNA, 19 nt, Artificial Sequence
  Description of Artificial Sequence: Synthetic oligonucleotide
  Antisense strand to SEQ ID NO: 1074884
auggcagucagagugaucc

SEQ ID NO: 1074886 - RNA, 19 nt, Artificial Sequence
  Description of Artificial Sequence: Synthetic oligonucleotide
  Sense strand starting at position 212 of SEQ ID NO: 915373
cagcgauggcuugacuaca

SEQ ID NO: 1074887 - RNA, 19 nt, Artificial Sequence
  Description of Artificial Sequence: Synthetic oligonucleotide
  Antisense strand to SEQ ID NO: 1074886
uguagucaagccaucgcug

SEQ ID NO: 1074888 - RNA, 19 nt, Artificial Sequence
  Description of Artificial Sequence: Synthetic oligonucleotide
  Sense strand starting at position 254 of SEQ ID NO: 915373
agaaguggauggguucauu

SEQ ID NO: 1074889 - RNA, 19 nt, Artificial Sequence
  Description of Artificial Sequence: Synthetic oligonucleotide
  Antisense strand to SEQ ID NO: 1074888
aaugaacccauccacuucu

SEQ ID NO: 1074890 - RNA, 19 nt, Artificial Sequence
  Description of Artificial Sequence: Synthetic oligonucleotide
  Sense strand starting at position 262 of SEQ ID NO: 915373
auggguucauuugagagga

SEQ ID NO: 1074891 - RNA, 19 nt, Artificial Sequence
  Description of Artificial Sequence: Synthetic oligonucleotide
  Antisense strand to SEQ ID NO: 1074890
uccucucaaaugaacccau

SEQ ID NO: 1074892 - RNA, 19 nt, Artificial Sequence
  Description of Artificial Sequence: Synthetic oligonucleotide
  Sense strand starting at position 264 of SEQ ID NO: 915373
ggguucauuugagaggaua

SEQ ID NO: 1074893 - RNA, 19 nt, Artificial Sequence
  Description of Artificial Sequence: Synthetic oligonucleotide
  Antisense strand to SEQ ID NO: 1074892
uauccucucaaaugaaccc

SEQ ID NO: 1074894 - RNA, 19 nt, Artificial Sequence
  Description of Artificial Sequence: Synthetic oligonucleotide
  Sense strand starting at position 277 of SEQ ID NO: 915373
aggauaaaguuaucugggu

SEQ ID NO: 1074895 - RNA, 19 nt, Artificial Sequence
  Description of Artificial Sequence: Synthetic oligonucleotide
  Antisense strand to SEQ ID NO: 1074894
acccagauaacuuuauccu

SEQ ID NO: 1074896 - RNA, 19 nt, Artificial Sequence
  Description of Artificial Sequence: Synthetic oligonucleotide
  Sense strand starting at position 285 of SEQ ID NO: 915373
guuaucugggucuggagau

SEQ ID NO: 1074897 - RNA, 19 nt, Artificial Sequence
  Description of Artificial Sequence: Synthetic oligonucleotide
  Antisense strand to SEQ ID NO: 1074896
aucuccagacccagauaac

SEQ ID NO: 1074898 - RNA, 19 nt, Artificial Sequence
  Description of Artificial Sequence: Synthetic oligonucleotide
  Sense strand starting at position 338 of SEQ ID NO: 915373
aggcuucugccuuaaagag

SEQ ID NO: 1074899 - RNA, 19 nt, Artificial Sequence
  Description of Artificial Sequence: Synthetic oligonucleotide
  Antisense strand to SEQ ID NO: 1074898
cucuuuaaggcagaagccu

SEQ ID NO: 1074900 - RNA, 19 nt, Artificial Sequence
  Description of Artificial Sequence: Synthetic oligonucleotide
  Sense strand starting at position 371 of SEQ ID NO: 915373
gcucuuggccaagaucaga

SEQ ID NO: 1074901 - RNA, 19 nt, Artificial Sequence
  Description of Artificial Sequence: Synthetic oligonucleotide
  Antisense strand to SEQ ID NO: 1074900
ucugaucuuggccaagagc

SEQ ID NO: 1074902 - RNA, 19 nt, Artificial Sequence
  Description of Artificial Sequence: Synthetic oligonucleotide
  Sense strand starting at position 442 of SEQ ID NO: 915373
guuugucaugccuaugaga

SEQ ID NO: 1074903 - RNA, 19 nt, Artificial Sequence
  Description of Artificial Sequence: Synthetic oligonucleotide
  Antisense strand to SEQ ID NO: 1074902
ucucauaggcaugacaaac

SEQ ID NO: 1074904 - RNA, 19 nt, Artificial Sequence
  Description of Artificial Sequence: Synthetic oligonucleotide
  Sense strand starting at position 444 of SEQ ID NO: 915373
uugucaugccuaugagaca

SEQ ID NO: 1074905 - RNA, 19 nt, Artificial Sequence
  Description of Artificial Sequence: Synthetic oligonucleotide
  Antisense strand to SEQ ID NO: 1074904
ugucucauaggcaugacaa

SEQ ID NO: 1074906 - RNA, 19 nt, Artificial Sequence
  Description of Artificial Sequence: Synthetic oligonucleotide
  Sense strand starting at position 521 of SEQ ID NO: 915373
cccaguguucuuuacuuua

SEQ ID NO: 1074907 - RNA, 19 nt, Artificial Sequence
  Description of Artificial Sequence: Synthetic oligonucleotide
  Antisense strand to SEQ ID NO: 1074906
uaaaguaaagaacacuggg

SEQ ID NO: 1074908 - RNA, 19 nt, Artificial Sequence
  Description of Artificial Sequence: Synthetic oligonucleotide
  Sense strand starting at position 562 of SEQ ID NO: 915373
agggaaacucccuguaagu

SEQ ID NO: 1074909 - RNA, 19 nt, Artificial Sequence
  Description of Artificial Sequence: Synthetic oligonucleotide
  Antisense strand to SEQ ID NO: 1074908
acuuacagggaguuucccu

SEQ ID NO: 1074910 - RNA, 19 nt, Artificial Sequence
  Description of Artificial Sequence: Synthetic oligonucleotide
  Sense strand starting at position 593 of SEQ ID NO: 915373
agauccaaauaggagaaau

SEQ ID NO: 1074911 - RNA, 19 nt, Artificial Sequence
  Description of Artificial Sequence: Synthetic oligonucleotide
  Antisense strand to SEQ ID NO: 1074910
auuucuccuauuuggaucu

SEQ ID NO: 1074912 - RNA, 19 nt, Artificial Sequence
  Description of Artificial Sequence: Synthetic oligonucleotide
  Sense strand starting at position 666 of SEQ ID NO: 915373
agacgacagaacuguaacu

SEQ ID NO: 1074913 - RNA, 19 nt, Artificial Sequence
  Description of Artificial Sequence: Synthetic oligonucleotide
  Antisense strand to SEQ ID NO: 1074912
aguuacaguucugucgucu

SEQ ID NO: 1074914 - RNA, 19 nt, Artificial Sequence
  Description of Artificial Sequence: Synthetic oligonucleotide
  Sense strand starting at position 685 of SEQ ID NO: 915373
caggucaaaugaguccaua

SEQ ID NO: 1074915 - RNA, 19 nt, Artificial Sequence
  Description of Artificial Sequence: Synthetic oligonucleotide
  Antisense strand to SEQ ID NO: 1074914
uauggacucauuugaccug

SEQ ID NO: 1074916 - RNA, 19 nt, Artificial Sequence
  Description of Artificial Sequence: Synthetic oligonucleotide
  Sense strand starting at position 688 of SEQ ID NO: 915373
gucaaaugaguccauaagu

SEQ ID NO: 1074917 - RNA, 19 nt, Artificial Sequence
  Description of Artificial Sequence: Synthetic oligonucleotide
  Antisense strand to SEQ ID NO: 1074916
acuuauggacucauuugac

SEQ ID NO: 1074918 - RNA, 19 nt, Artificial Sequence
  Description of Artificial Sequence: Synthetic oligonucleotide
  Sense strand starting at position 709 of SEQ ID NO: 915373
agaggugauggcuaucaug

SEQ ID NO: 1074919 - RNA, 19 nt, Artificial Sequence
  Description of Artificial Sequence: Synthetic oligonucleotide
  Antisense strand to SEQ ID NO: 1074918
caugauagccaucaccucu

SEQ ID NO: 1074920 - RNA, 19 nt, Artificial Sequence
  Description of Artificial Sequence: Synthetic oligonucleotide
  Sense strand starting at position 717 of SEQ ID NO: 915373
uggcuaucaugaccaaucu

SEQ ID NO: 1074921 - RNA, 19 nt, Artificial Sequence
  Description of Artificial Sequence: Synthetic oligonucleotide
  Antisense strand to SEQ ID NO: 1074920
agauuggucaugauagcca

SEQ ID NO: 1074922 - RNA, 19 nt, Artificial Sequence
  Description of Artificial Sequence: Synthetic oligonucleotide
  Sense strand starting at position 718 of SEQ ID NO: 915373
ggcuaucaugaccaaucua

SEQ ID NO: 1074923 - RNA, 19 nt, Artificial Sequence
  Description of Artificial Sequence: Synthetic oligonucleotide
  Antisense strand to SEQ ID NO: 1074922
uagauuggucaugauagcc

SEQ ID NO: 1074924 - RNA, 19 nt, Artificial Sequence
  Description of Artificial Sequence: Synthetic oligonucleotide
  Sense strand starting at position 878 of SEQ ID NO: 915373
cugauauucccaggucagu

SEQ ID NO: 1074925 - RNA, 19 nt, Artificial Sequence
  Description of Artificial Sequence: Synthetic oligonucleotide
  Antisense strand to SEQ ID NO: 1074924
acugaccugggaauaucag

SEQ ID NO: 1074926 - RNA, 19 nt, Artificial Sequence
  Description of Artificial Sequence: Synthetic oligonucleotide
  Sense strand starting at position 1183 of SEQ ID NO: 915373
cuacacgugcccuauagaa

SEQ ID NO: 1074927 - RNA, 19 nt, Artificial Sequence
  Description of Artificial Sequence: Synthetic oligonucleotide
  Antisense strand to SEQ ID NO: 1074926
uucuauagggcacguguag

SEQ ID NO: 1074928 - RNA, 19 nt, Artificial Sequence
  Description of Artificial Sequence: Synthetic oligonucleotide
  Sense strand starting at position 1185 of SEQ ID NO: 915373
acacgugcccuauagaacu

SEQ ID NO: 1074929 - RNA, 19 nt, Artificial Sequence
  Description of Artificial Sequence: Synthetic oligonucleotide
  Antisense strand to SEQ ID NO: 1074928
aguucuauagggcacgugu

SEQ ID NO: 1074930 - RNA, 19 nt, Artificial Sequence
  Description of Artificial Sequence: Synthetic oligonucleotide
  Sense strand starting at position 1400 of SEQ ID NO: 915373
uuuauaggguuuccaggua

SEQ ID NO: 1074931 - RNA, 19 nt, Artificial Sequence
  Description of Artificial Sequence: Synthetic oligonucleotide
  Antisense strand to SEQ ID NO: 1074930
uaccuggaaacccuauaaa

SEQ ID NO: 1074932 - RNA, 19 nt, Artificial Sequence
  Description of Artificial Sequence: Synthetic oligonucleotide
  Sense strand starting at position 1524 of SEQ ID NO: 915373
agcaaacgucuaggaaaga

SEQ ID NO: 1074933 - RNA, 19 nt, Artificial Sequence
  Description of Artificial Sequence: Synthetic oligonucleotide
  Antisense strand to SEQ ID NO: 1074932
ucuuuccuagacguuugcu

SEQ ID NO: 1074934 - RNA, 19 nt, Artificial Sequence
  Description of Artificial Sequence: Synthetic oligonucleotide
  Sense strand starting at position 1718 of SEQ ID NO: 915373
ggucauuggccgcuaaguu

SEQ ID NO: 1074935 - RNA, 19 nt, Artificial Sequence
  Description of Artificial Sequence: Synthetic oligonucleotide
  Antisense strand to SEQ ID NO: 1074934
aacuuagcggccaaugacc

SEQ ID NO: 1074936 - RNA, 19 nt, Artificial Sequence
  Description of Artificial Sequence: Synthetic oligonucleotide
  Sense strand starting at position 1740 of SEQ ID NO: 915373
gcaguuucugcauaggaga

SEQ ID NO: 1074937 - RNA, 19 nt, Artificial Sequence
  Description of Artificial Sequence: Synthetic oligonucleotide
  Antisense strand to SEQ ID NO: 1074936
ucuccuaugcagaaacugc

SEQ ID NO: 1074938 - RNA, 19 nt, Artificial Sequence
  Description of Artificial Sequence: Synthetic oligonucleotide
  Sense strand starting at position 2057 of SEQ ID NO: 915373
gugucaccgcguucucauu

SEQ ID NO: 1074939 - RNA, 19 nt, Artificial Sequence
  Description of Artificial Sequence: Synthetic oligonucleotide
  Antisense strand to SEQ ID NO: 1074938
aaugagaacgcggugacac

SEQ ID NO: 1074940 - RNA, 19 nt, Artificial Sequence
  Description of Artificial Sequence: Synthetic oligonucleotide
  Sense strand starting at position 2136 of SEQ ID NO: 915373
cgccgcuugcggagagaaa

SEQ ID NO: 1074941 - RNA, 19 nt, Artificial Sequence
  Description of Artificial Sequence: Synthetic oligonucleotide
  Antisense strand to SEQ ID NO: 1074940
uuucucuccgcaagcggcg

SEQ ID NO: 1074942 - RNA, 19 nt, Artificial Sequence
  Description of Artificial Sequence: Synthetic oligonucleotide
  Sense strand starting at position 3004 of SEQ ID NO: 915373
uuaauaaagucauugugag

SEQ ID NO: 1074943 - RNA, 19 nt, Artificial Sequence
  Description of Artificial Sequence: Synthetic oligonucleotide
  Antisense strand to SEQ ID NO: 1074942
cucacaaugacuuuauuaa

SEQ ID NO: 1074944 - RNA, 19 nt, Artificial Sequence
  Description of Artificial Sequence: Synthetic oligonucleotide
  Sense strand starting at position 3005 of SEQ ID NO: 915373
uaauaaagucauugugagg

SEQ ID NO: 1074945 - RNA, 19 nt, Artificial Sequence
  Description of Artificial Sequence: Synthetic oligonucleotide
  Antisense strand to SEQ ID NO: 1074944
ccucacaaugacuuuauua

SEQ ID NO: 1074946 - RNA, 19 nt, Artificial Sequence
  Description of Artificial Sequence: Synthetic oligonucleotide
  Sense strand starting at position 3081 of SEQ ID NO: 915373
ggagucgacgcguuuggau

SEQ ID NO: 1074947 - RNA, 19 nt, Artificial Sequence
  Description of Artificial Sequence: Synthetic oligonucleotide
  Antisense strand to SEQ ID NO: 1074946
auccaaacgcgucgacucc

SEQ ID NO: 1074948 - RNA, 19 nt, Artificial Sequence
  Description of Artificial Sequence: Synthetic oligonucleotide
  Sense strand starting at position 3417 of SEQ ID NO: 915373
ccaucugugaaaugggauu

SEQ ID NO: 1074949 - RNA, 19 nt, Artificial Sequence
  Description of Artificial Sequence: Synthetic oligonucleotide
  Antisense strand to SEQ ID NO: 1074948
aaucccauuucacagaugg

SEQ ID NO: 1074950 - RNA, 19 nt, Artificial Sequence
  Description of Artificial Sequence: Synthetic oligonucleotide
  Sense strand starting at position 3482 of SEQ ID NO: 915373
ggaauugucacagagugcu

SEQ ID NO: 1074951 - RNA, 19 nt, Artificial Sequence
  Description of Artificial Sequence: Synthetic oligonucleotide
  Antisense strand to SEQ ID NO: 1074950
agcacucugugacaauucc

SEQ ID NO: 1074952 - RNA, 19 nt, Artificial Sequence
  Description of Artificial Sequence: Synthetic oligonucleotide
  Sense strand starting at position 3735 of SEQ ID NO: 915373
ggugauucccaggaaggca

SEQ ID NO: 1074953 - RNA, 19 nt, Artificial Sequence
  Description of Artificial Sequence: Synthetic oligonucleotide
  Antisense strand to SEQ ID NO: 1074952
ugccuuccugggaaucacc

SEQ ID NO: 1074954 - RNA, 19 nt, Artificial Sequence
  Description of Artificial Sequence: Synthetic oligonucleotide
  Sense strand starting at position 111 of SEQ ID NO: 915374
uugugauggcacugaaaug

SEQ ID NO: 1074955 - RNA, 19 nt, Artificial Sequence
  Description of Artificial Sequence: Synthetic oligonucleotide
  Antisense strand to SEQ ID NO: 1074954
cauuucagugccaucacaa

SEQ ID NO: 1074956 - RNA, 19 nt, Artificial Sequence
  Description of Artificial Sequence: Synthetic oligonucleotide
  Sense strand starting at position 137 of SEQ ID NO: 915374
ggaguccuaucaggacuau

SEQ ID NO: 1074957 - RNA, 19 nt, Artificial Sequence
  Description of Artificial Sequence: Synthetic oligonucleotide
  Antisense strand to SEQ ID NO: 1074956
auaguccugauaggacucc

SEQ ID NO: 1074958 - RNA, 19 nt, Artificial Sequence
  Description of Artificial Sequence: Synthetic oligonucleotide
  Sense strand starting at position 149 of SEQ ID NO: 915374
ggacuauguggaggacuua

SEQ ID NO: 1074959 - RNA, 19 nt, Artificial Sequence
  Description of Artificial Sequence: Synthetic oligonucleotide
  Antisense strand to SEQ ID NO: 1074958
uaaguccuccacauagucc

SEQ ID NO: 1074960 - RNA, 19 nt, Artificial Sequence
  Description of Artificial Sequence: Synthetic oligonucleotide
  Sense strand starting at position 458 of SEQ ID NO: 915374
gcugaaacccagcaggaua

SEQ ID NO: 1074961 - RNA, 19 nt, Artificial Sequence
  Description of Artificial Sequence: Synthetic oligonucleotide
  Antisense strand to SEQ ID NO: 1074960
uauccugcuggguuucagc

SEQ ID NO: 1074962 - RNA, 19 nt, Artificial Sequence
  Description of Artificial Sequence: Synthetic oligonucleotide
  Sense strand starting at position 573 of SEQ ID NO: 915374
ggccauuggugacaacaga

SEQ ID NO: 1074963 - RNA, 19 nt, Artificial Sequence
  Description of Artificial Sequence: Synthetic oligonucleotide
  Antisense strand to SEQ ID NO: 1074962
ucuguugucaccaauggcc

SEQ ID NO: 1074964 - RNA, 19 nt, Artificial Sequence
  Description of Artificial Sequence: Synthetic oligonucleotide
  Sense strand starting at position 618 of SEQ ID NO: 915374
gucgcaaaggguugcauaa

SEQ ID NO: 1074965 - RNA, 19 nt, Artificial Sequence
  Description of Artificial Sequence: Synthetic oligonucleotide
  Antisense strand to SEQ ID NO: 1074964
uuaugcaacccuuugcgac

SEQ ID NO: 1074966 - RNA, 19 nt, Artificial Sequence
  Description of Artificial Sequence: Synthetic oligonucleotide
  Sense strand starting at position 633 of SEQ ID NO: 915374
auaacaugcugucuagguu

SEQ ID NO: 1074967 - RNA, 19 nt, Artificial Sequence
  Description of Artificial Sequence: Synthetic oligonucleotide
  Antisense strand to SEQ ID NO: 1074966
aaccuagacagcauguuau

SEQ ID NO: 1074968 - RNA, 19 nt, Artificial Sequence
  Description of Artificial Sequence: Synthetic oligonucleotide
  Sense strand starting at position 634 of SEQ ID NO: 915374
uaacaugcugucuagguua

SEQ ID NO: 1074969 - RNA, 19 nt, Artificial Sequence
  Description of Artificial Sequence: Synthetic oligonucleotide
  Antisense strand to SEQ ID NO: 1074968
uaaccuagacagcauguua

SEQ ID NO: 1074970 - RNA, 19 nt, Artificial Sequence
  Description of Artificial Sequence: Synthetic oligonucleotide
  Sense strand starting at position 636 of SEQ ID NO: 915374
acaugcugucuagguuaca

SEQ ID NO: 1074971 - RNA, 19 nt, Artificial Sequence
  Description of Artificial Sequence: Synthetic oligonucleotide
  Antisense strand to SEQ ID NO: 1074970
uguaaccuagacagcaugu

SEQ ID NO: 1074972 - RNA, 19 nt, Artificial Sequence
  Description of Artificial Sequence: Synthetic oligonucleotide
  Sense strand starting at position 681 of SEQ ID NO: 915374
gggcuagagggcuguauuu

SEQ ID NO: 1074973 - RNA, 19 nt, Artificial Sequence
  Description of Artificial Sequence: Synthetic oligonucleotide
  Antisense strand to SEQ ID NO: 1074972
aaauacagcccucuagccc

SEQ ID NO: 1074974 - RNA, 19 nt, Artificial Sequence
  Description of Artificial Sequence: Synthetic oligonucleotide
  Sense strand starting at position 1046 of SEQ ID NO: 915374
ggacgguuccaggaaguga

SEQ ID NO: 1074975 - RNA, 19 nt, Artificial Sequence
  Description of Artificial Sequence: Synthetic oligonucleotide
  Antisense strand to SEQ ID NO: 1074974
ucacuuccuggaaccgucc

SEQ ID NO: 1074976 - RNA, 19 nt, Artificial Sequence
  Description of Artificial Sequence: Synthetic oligonucleotide
  Sense strand starting at position 1148 of SEQ ID NO: 915374
agggacagcuguuucagaa

SEQ ID NO: 1074977 - RNA, 19 nt, Artificial Sequence
  Description of Artificial Sequence: Synthetic oligonucleotide
  Antisense strand to SEQ ID NO: 1074976
uucugaaacagcugucccu

SEQ ID NO: 1074978 - RNA, 19 nt, Artificial Sequence
  Description of Artificial Sequence: Synthetic oligonucleotide
  Sense strand starting at position 1531 of SEQ ID NO: 915374
cacgauuggcgagaaaggu

SEQ ID NO: 1074979 - RNA, 19 nt, Artificial Sequence
  Description of Artificial Sequence: Synthetic oligonucleotide
  Antisense strand to SEQ ID NO: 1074978
accuuucucgccaaucgug

SEQ ID NO: 1074980 - RNA, 19 nt, Artificial Sequence
  Description of Artificial Sequence: Synthetic oligonucleotide
  Sense strand starting at position 2104 of SEQ ID NO: 915374
agcagcuaauuugcauaua

SEQ ID NO: 1074981 - RNA, 19 nt, Artificial Sequence
  Description of Artificial Sequence: Synthetic oligonucleotide
  Antisense strand to SEQ ID NO: 1074980
uauaugcaaauuagcugcu

SEQ ID NO: 1074982 - RNA, 19 nt, Artificial Sequence
  Description of Artificial Sequence: Synthetic oligonucleotide
  Sense strand starting at position 2222 of SEQ ID NO: 915374
gcgccuguguaggaguaaa

SEQ ID NO: 1074983 - RNA, 19 nt, Artificial Sequence
  Description of Artificial Sequence: Synthetic oligonucleotide
  Antisense strand to SEQ ID NO: 1074982
uuuacuccuacacaggcgc

SEQ ID NO: 1074984 - RNA, 19 nt, Artificial Sequence
  Description of Artificial Sequence: Synthetic oligonucleotide
  Sense strand starting at position 2288 of SEQ ID NO: 915374
ugcauaugauuugcaucuu

SEQ ID NO: 1074985 - RNA, 19 nt, Artificial Sequence
  Description of Artificial Sequence: Synthetic oligonucleotide
  Antisense strand to SEQ ID NO: 1074984
aagaugcaaaucauaugca

SEQ ID NO: 1074986 - RNA, 19 nt, Artificial Sequence
  Description of Artificial Sequence: Synthetic oligonucleotide
  Sense strand starting at position 2289 of SEQ ID NO: 915374
gcauaugauuugcaucuua

SEQ ID NO: 1074987 - RNA, 19 nt, Artificial Sequence
  Description of Artificial Sequence: Synthetic oligonucleotide
  Antisense strand to SEQ ID NO: 1074986
uaagaugcaaaucauaugc

SEQ ID NO: 1074988 - RNA, 19 nt, Artificial Sequence
  Description of Artificial Sequence: Synthetic oligonucleotide
  Sense strand starting at position 2294 of SEQ ID NO: 915374
ugauuugcaucuuacgaag

SEQ ID NO: 1074989 - RNA, 19 nt, Artificial Sequence
  Description of Artificial Sequence: Synthetic oligonucleotide
  Antisense strand to SEQ ID NO: 1074988
cuucguaagaugcaaauca

SEQ ID NO: 1074990 - RNA, 19 nt, Artificial Sequence
  Description of Artificial Sequence: Synthetic oligonucleotide
  Sense strand starting at position 2296 of SEQ ID NO: 915374
auuugcaucuuacgaagaa

SEQ ID NO: 1074991 - RNA, 19 nt, Artificial Sequence
  Description of Artificial Sequence: Synthetic oligonucleotide
  Antisense strand to SEQ ID NO: 1074990
uucuucguaagaugcaaau

SEQ ID NO: 1074992 - RNA, 19 nt, Artificial Sequence
  Description of Artificial Sequence: Synthetic oligonucleotide
  Sense strand starting at position 2297 of SEQ ID NO: 915374
uuugcaucuuacgaagaau

SEQ ID NO: 1074993 - RNA, 19 nt, Artificial Sequence
  Description of Artificial Sequence: Synthetic oligonucleotide
  Antisense strand to SEQ ID NO: 1074992
auucuucguaagaugcaaa

SEQ ID NO: 1074994 - RNA, 19 nt, Artificial Sequence
  Description of Artificial Sequence: Synthetic oligonucleotide
  Sense strand starting at position 2357 of SEQ ID NO: 915374
ugcugagacgcuuccggua

SEQ ID NO: 1074995 - RNA, 19 nt, Artificial Sequence
  Description of Artificial Sequence: Synthetic oligonucleotide
  Antisense strand to SEQ ID NO: 1074994
uaccggaagcgucucagca

SEQ ID NO: 1074996 - RNA, 19 nt, Artificial Sequence
  Description of Artificial Sequence: Synthetic oligonucleotide
  Sense strand starting at position 2458 of SEQ ID NO: 915374
gguucuccuggcuauccaa

SEQ ID NO: 1074997 - RNA, 19 nt, Artificial Sequence
  Description of Artificial Sequence: Synthetic oligonucleotide
  Antisense strand to SEQ ID NO: 1074996
uuggauagccaggagaacc

SEQ ID NO: 1074998 - RNA, 19 nt, Artificial Sequence
  Description of Artificial Sequence: Synthetic oligonucleotide
  Sense strand starting at position 2545 of SEQ ID NO: 915374
gagaguuugugcggcgaca

SEQ ID NO: 1074999 - RNA, 19 nt, Artificial Sequence
  Description of Artificial Sequence: Synthetic oligonucleotide
  Antisense strand to SEQ ID NO: 1074998
ugucgccgcacaaacucuc

SEQ ID NO: 1075000 - RNA, 19 nt, Artificial Sequence
  Description of Artificial Sequence: Synthetic oligonucleotide
  Sense strand starting at position 2546 of SEQ ID NO: 915374
agaguuugugcggcgacau

SEQ ID NO: 1075001 - RNA, 19 nt, Artificial Sequence
  Description of Artificial Sequence: Synthetic oligonucleotide
  Antisense strand to SEQ ID NO: 1075000
augucgccgcacaaacucu

SEQ ID NO: 1075002 - RNA, 19 nt, Artificial Sequence
  Description of Artificial Sequence: Synthetic oligonucleotide
  Sense strand starting at position 2547 of SEQ ID NO: 915374
gaguuugugcggcgacaug

SEQ ID NO: 1075003 - RNA, 19 nt, Artificial Sequence
  Description of Artificial Sequence: Synthetic oligonucleotide
  Antisense strand to SEQ ID NO: 1075002
caugucgccgcacaaacuc

SEQ ID NO: 1075004 - RNA, 19 nt, Artificial Sequence
  Description of Artificial Sequence: Synthetic oligonucleotide
  Sense strand starting at position 2688 of SEQ ID NO: 915374
ggguccagugcuugccuaa

SEQ ID NO: 1075005 - RNA, 19 nt, Artificial Sequence
  Description of Artificial Sequence: Synthetic oligonucleotide
  Antisense strand to SEQ ID NO: 1075004
uuaggcaagcacuggaccc

SEQ ID NO: 1075006 - RNA, 19 nt, Artificial Sequence
  Description of Artificial Sequence: Synthetic oligonucleotide
  Sense strand starting at position 2691 of SEQ ID NO: 915374
uccagugcuugccuaaacu

SEQ ID NO: 1075007 - RNA, 19 nt, Artificial Sequence
  Description of Artificial Sequence: Synthetic oligonucleotide
  Antisense strand to SEQ ID NO: 1075006
aguuuaggcaagcacugga

SEQ ID NO: 1075008 - RNA, 19 nt, Artificial Sequence
  Description of Artificial Sequence: Synthetic oligonucleotide
  Sense strand starting at position 2735 of SEQ ID NO: 915374
ccguaucugcccuguggaa

SEQ ID NO: 1075009 - RNA, 19 nt, Artificial Sequence
  Description of Artificial Sequence: Synthetic oligonucleotide
  Antisense strand to SEQ ID NO: 1075008
uuccacagggcagauacgg

SEQ ID NO: 1075010 - RNA, 19 nt, Artificial Sequence
  Description of Artificial Sequence: Synthetic oligonucleotide
  Sense strand starting at position 2737 of SEQ ID NO: 915374
guaucugcccuguggaauu

SEQ ID NO: 1075011 - RNA, 19 nt, Artificial Sequence
  Description of Artificial Sequence: Synthetic oligonucleotide
  Antisense strand to SEQ ID NO: 1075010
aauuccacagggcagauac

SEQ ID NO: 1075012 - RNA, 19 nt, Artificial Sequence
  Description of Artificial Sequence: Synthetic oligonucleotide
  Sense strand starting at position 2765 of SEQ ID NO: 915374
cuucguggcgcguaugaua

SEQ ID NO: 1075013 - RNA, 19 nt, Artificial Sequence
  Description of Artificial Sequence: Synthetic oligonucleotide
  Antisense strand to SEQ ID NO: 1075012
uaucauacgcgccacgaag

SEQ ID NO: 1075014 - RNA, 19 nt, Artificial Sequence
  Description of Artificial Sequence: Synthetic oligonucleotide
  Sense strand starting at position 2773 of SEQ ID NO: 915374
cgcguaugauaccuaaagu

SEQ ID NO: 1075015 - RNA, 19 nt, Artificial Sequence
  Description of Artificial Sequence: Synthetic oligonucleotide
  Antisense strand to SEQ ID NO: 1075014
acuuuagguaucauacgcg

SEQ ID NO: 1075016 - RNA, 19 nt, Artificial Sequence
  Description of Artificial Sequence: Synthetic oligonucleotide
  Sense strand starting at position 2774 of SEQ ID NO: 915374
gcguaugauaccuaaagug

SEQ ID NO: 1075017 - RNA, 19 nt, Artificial Sequence
  Description of Artificial Sequence: Synthetic oligonucleotide
  Antisense strand to SEQ ID NO: 1075016
cacuuuagguaucauacgc

SEQ ID NO: 1075018 - RNA, 19 nt, Artificial Sequence
  Description of Artificial Sequence: Synthetic oligonucleotide
  Sense strand starting at position 2903 of SEQ ID NO: 915374
ucgggaugcccggagauaa

SEQ ID NO: 1075019 - RNA, 19 nt, Artificial Sequence
  Description of Artificial Sequence: Synthetic oligonucleotide
  Antisense strand to SEQ ID NO: 1075018
uuaucuccgggcaucccga

SEQ ID NO: 1075020 - RNA, 19 nt, Artificial Sequence
  Description of Artificial Sequence: Synthetic oligonucleotide
  Sense strand starting at position 2937 of SEQ ID NO: 915374
cacaguugcgucugaucca

SEQ ID NO: 1075021 - RNA, 19 nt, Artificial Sequence
  Description of Artificial Sequence: Synthetic oligonucleotide
  Antisense strand to SEQ ID NO: 1075020
uggaucagacgcaacugug

SEQ ID NO: 1075022 - RNA, 19 nt, Artificial Sequence
  Description of Artificial Sequence: Synthetic oligonucleotide
  Sense strand starting at position 2946 of SEQ ID NO: 915374
gucugauccaggugccgaa

SEQ ID NO: 1075023 - RNA, 19 nt, Artificial Sequence
  Description of Artificial Sequence: Synthetic oligonucleotide
  Antisense strand to SEQ ID NO: 1075022
uucggcaccuggaucagac

SEQ ID NO: 1075024 - RNA, 19 nt, Artificial Sequence
  Description of Artificial Sequence: Synthetic oligonucleotide
  Sense strand starting at position 2994 of SEQ ID NO: 915374
aggaguuucugaggaccau

SEQ ID NO: 1075025 - RNA, 19 nt, Artificial Sequence
  Description of Artificial Sequence: Synthetic oligonucleotide
  Antisense strand to SEQ ID NO: 1075024
augguccucagaaacuccu

SEQ ID NO: 1075026 - RNA, 19 nt, Artificial Sequence
  Description of Artificial Sequence: Synthetic oligonucleotide
  Sense strand starting at position 3249 of SEQ ID NO: 915374
ucuuguuaugacuguguau

SEQ ID NO: 1075027 - RNA, 19 nt, Artificial Sequence
  Description of Artificial Sequence: Synthetic oligonucleotide
  Antisense strand to SEQ ID NO: 1075026
auacacagucauaacaaga

SEQ ID NO: 1075028 - RNA, 19 nt, Artificial Sequence
  Description of Artificial Sequence: Synthetic oligonucleotide
  Sense strand starting at position 3251 of SEQ ID NO: 915374
uuguuaugacuguguauuu

SEQ ID NO: 1075029 - RNA, 19 nt, Artificial Sequence
  Description of Artificial Sequence: Synthetic oligonucleotide
  Antisense strand to SEQ ID NO: 1075028
aaauacacagucauaacaa

SEQ ID NO: 1075030 - RNA, 19 nt, Artificial Sequence
  Description of Artificial Sequence: Synthetic oligonucleotide
  Sense strand starting at position 80 of SEQ ID NO: 915375
ggagcauccuuccuacaug

SEQ ID NO: 1075031 - RNA, 19 nt, Artificial Sequence
  Description of Artificial Sequence: Synthetic oligonucleotide
  Antisense strand to SEQ ID NO: 1075030
cauguaggaaggaugcucc

SEQ ID NO: 1075032 - RNA, 19 nt, Artificial Sequence
  Description of Artificial Sequence: Synthetic oligonucleotide
  Sense strand starting at position 360 of SEQ ID NO: 915375
ugacuaaacgucugaagac

SEQ ID NO: 1075033 - RNA, 19 nt, Artificial Sequence
  Description of Artificial Sequence: Synthetic oligonucleotide
  Antisense strand to SEQ ID NO: 1075032
gucuucagacguuuaguca

SEQ ID NO: 1075034 - RNA, 19 nt, Artificial Sequence
  Description of Artificial Sequence: Synthetic oligonucleotide
  Sense strand starting at position 376 of SEQ ID NO: 915375
gacuucucaccaggaggua

SEQ ID NO: 1075035 - RNA, 19 nt, Artificial Sequence
  Description of Artificial Sequence: Synthetic oligonucleotide
  Antisense strand to SEQ ID NO: 1075034
uaccuccuggugagaaguc

SEQ ID NO: 1075036 - RNA, 19 nt, Artificial Sequence
  Description of Artificial Sequence: Synthetic oligonucleotide
  Sense strand starting at position 473 of SEQ ID NO: 915375
cauaucuggcacugagaua

SEQ ID NO: 1075037 - RNA, 19 nt, Artificial Sequence
  Description of Artificial Sequence: Synthetic oligonucleotide
  Antisense strand to SEQ ID NO: 1075036
uaucucagugccagauaug

SEQ ID NO: 1075038 - RNA, 19 nt, Artificial Sequence
  Description of Artificial Sequence: Synthetic oligonucleotide
  Sense strand starting at position 896 of SEQ ID NO: 915375
ccagcuguauuucugugaa

SEQ ID NO: 1075039 - RNA, 19 nt, Artificial Sequence
  Description of Artificial Sequence: Synthetic oligonucleotide
  Antisense strand to SEQ ID NO: 1075038
uucacagaaauacagcugg

SEQ ID NO: 1075040 - RNA, 19 nt, Artificial Sequence
  Description of Artificial Sequence: Synthetic oligonucleotide
  Sense strand starting at position 982 of SEQ ID NO: 915375
agcucaaaguaagcauaau

SEQ ID NO: 1075041 - RNA, 19 nt, Artificial Sequence
  Description of Artificial Sequence: Synthetic oligonucleotide
  Antisense strand to SEQ ID NO: 1075040
auuaugcuuacuuugagcu

SEQ ID NO: 1075042 - RNA, 19 nt, Artificial Sequence
  Description of Artificial Sequence: Synthetic oligonucleotide
  Sense strand starting at position 1291 of SEQ ID NO: 915375
ggcuuuauccugcaacgga

SEQ ID NO: 1075043 - RNA, 19 nt, Artificial Sequence
  Description of Artificial Sequence: Synthetic oligonucleotide
  Antisense strand to SEQ ID NO: 1075042
uccguugcaggauaaagcc

SEQ ID NO: 1075044 - RNA, 19 nt, Artificial Sequence
  Description of Artificial Sequence: Synthetic oligonucleotide
  Sense strand starting at position 1308 of SEQ ID NO: 915375
gagaacacaguuugucauu

SEQ ID NO: 1075045 - RNA, 19 nt, Artificial Sequence
  Description of Artificial Sequence: Synthetic oligonucleotide
  Antisense strand to SEQ ID NO: 1075044
aaugacaaacuguguucuc

SEQ ID NO: 1075046 - RNA, 19 nt, Artificial Sequence
  Description of Artificial Sequence: Synthetic oligonucleotide
  Sense strand starting at position 1310 of SEQ ID NO: 915375
gaacacaguuugucauuga

SEQ ID NO: 1075047 - RNA, 19 nt, Artificial Sequence
  Description of Artificial Sequence: Synthetic oligonucleotide
  Antisense strand to SEQ ID NO: 1075046
ucaaugacaaacuguguuc

SEQ ID NO: 1075048 - RNA, 19 nt, Artificial Sequence
  Description of Artificial Sequence: Synthetic oligonucleotide
  Sense strand starting at position 1314 of SEQ ID NO: 915375
acaguuugucauugacaca

SEQ ID NO: 1075049 - RNA, 19 nt, Artificial Sequence
  Description of Artificial Sequence: Synthetic oligonucleotide
  Antisense strand to SEQ ID NO: 1075048
ugugucaaugacaaacugu

SEQ ID NO: 1075050 - RNA, 19 nt, Artificial Sequence
  Description of Artificial Sequence: Synthetic oligonucleotide
  Sense strand starting at position 1560 of SEQ ID NO: 915375
agggacuauuacgcuuauu

SEQ ID NO: 1075051 - RNA, 19 nt, Artificial Sequence
  Description of Artificial Sequence: Synthetic oligonucleotide
  Antisense strand to SEQ ID NO: 1075050
aauaagcguaauagucccu

SEQ ID NO: 1075052 - RNA, 19 nt, Artificial Sequence
  Description of Artificial Sequence: Synthetic oligonucleotide
  Sense strand starting at position 1572 of SEQ ID NO: 915375
gcuuauuuguuuguacuua

SEQ ID NO: 1075053 - RNA, 19 nt, Artificial Sequence
  Description of Artificial Sequence: Synthetic oligonucleotide
  Antisense strand to SEQ ID NO: 1075052
uaaguacaaacaaauaagc

SEQ ID NO: 1075054 - RNA, 19 nt, Artificial Sequence
  Description of Artificial Sequence: Synthetic oligonucleotide
  Sense strand starting at position 2060 of SEQ ID NO: 915375
gccucugucagagggagau

SEQ ID NO: 1075055 - RNA, 19 nt, Artificial Sequence
  Description of Artificial Sequence: Synthetic oligonucleotide
  Antisense strand to SEQ ID NO: 1075054
aucucccucugacagaggc

SEQ ID NO: 1075056 - RNA, 19 nt, Artificial Sequence
  Description of Artificial Sequence: Synthetic oligonucleotide
  Sense strand starting at position 2072 of SEQ ID NO: 915375
gggagauagcaaggcugau

SEQ ID NO: 1075057 - RNA, 19 nt, Artificial Sequence
  Description of Artificial Sequence: Synthetic oligonucleotide
  Antisense strand to SEQ ID NO: 1075056
aucagccuugcuaucuccc

SEQ ID NO: 1075058 - RNA, 19 nt, Artificial Sequence
  Description of Artificial Sequence: Synthetic oligonucleotide
  Sense strand starting at position 2366 of SEQ ID NO: 915375
gagacuauccuuuaggcau

SEQ ID NO: 1075059 - RNA, 19 nt, Artificial Sequence
  Description of Artificial Sequence: Synthetic oligonucleotide
  Antisense strand to SEQ ID NO: 1075058
augccuaaaggauagucuc

SEQ ID NO: 1075060 - RNA, 19 nt, Artificial Sequence
  Description of Artificial Sequence: Synthetic oligonucleotide
  Sense strand starting at position 2382 of SEQ ID NO: 915375
cauaaaugcgccuauaagu

SEQ ID NO: 1075061 - RNA, 19 nt, Artificial Sequence
  Description of Artificial Sequence: Synthetic oligonucleotide
  Antisense strand to SEQ ID NO: 1075060
acuuauaggcgcauuuaug

SEQ ID NO: 1075062 - RNA, 19 nt, Artificial Sequence
  Description of Artificial Sequence: Synthetic oligonucleotide
  Sense strand starting at position 2416 of SEQ ID NO: 915375
gaguuauguuauuccuuga

SEQ ID NO: 1075063 - RNA, 19 nt, Artificial Sequence
  Description of Artificial Sequence: Synthetic oligonucleotide
  Antisense strand to SEQ ID NO: 1075062
ucaaggaauaacauaacuc

SEQ ID NO: 1075064 - RNA, 19 nt, Artificial Sequence
  Description of Artificial Sequence: Synthetic oligonucleotide
  Sense strand starting at position 2419 of SEQ ID NO: 915375
uuauguuauuccuugacua

SEQ ID NO: 1075065 - RNA, 19 nt, Artificial Sequence
  Description of Artificial Sequence: Synthetic oligonucleotide
  Antisense strand to SEQ ID NO: 1075064
uagucaaggaauaacauaa

SEQ ID NO: 1075066 - RNA, 19 nt, Artificial Sequence
  Description of Artificial Sequence: Synthetic oligonucleotide
  Sense strand starting at position 2421 of SEQ ID NO: 915375
auguuauuccuugacuauu

SEQ ID NO: 1075067 - RNA, 19 nt, Artificial Sequence
  Description of Artificial Sequence: Synthetic oligonucleotide
  Antisense strand to SEQ ID NO: 1075066
aauagucaaggaauaacau

SEQ ID NO: 1075068 - RNA, 19 nt, Artificial Sequence
  Description of Artificial Sequence: Synthetic oligonucleotide
  Sense strand starting at position 2430 of SEQ ID NO: 915375
cuugacuauuuguagaaau

SEQ ID NO: 1075069 - RNA, 19 nt, Artificial Sequence
  Description of Artificial Sequence: Synthetic oligonucleotide
  Antisense strand to SEQ ID NO: 1075068
auuucuacaaauagucaag

SEQ ID NO: 1075070 - RNA, 19 nt, Artificial Sequence
  Description of Artificial Sequence: Synthetic oligonucleotide
  Sense strand starting at position 2489 of SEQ ID NO: 915375
auguguccucucuauucua

SEQ ID NO: 1075071 - RNA, 19 nt, Artificial Sequence
  Description of Artificial Sequence: Synthetic oligonucleotide
  Antisense strand to SEQ ID NO: 1075070
uagaauagagaggacacau

SEQ ID NO: 1075072 - RNA, 19 nt, Artificial Sequence
  Description of Artificial Sequence: Synthetic oligonucleotide
  Sense strand starting at position 2538 of SEQ ID NO: 915375
cuggaccuguaucuauaaa

SEQ ID NO: 1075073 - RNA, 19 nt, Artificial Sequence
  Description of Artificial Sequence: Synthetic oligonucleotide
  Antisense strand to SEQ ID NO: 1075072
uuuauagauacagguccag

SEQ ID NO: 1075074 - RNA, 19 nt, Artificial Sequence
  Description of Artificial Sequence: Synthetic oligonucleotide
  Sense strand starting at position 2568 of SEQ ID NO: 915375
guuucugugacaugaagug

SEQ ID NO: 1075075 - RNA, 19 nt, Artificial Sequence
  Description of Artificial Sequence: Synthetic oligonucleotide
  Antisense strand to SEQ ID NO: 1075074
cacuucaugucacagaaac

SEQ ID NO: 1075076 - RNA, 19 nt, Artificial Sequence
  Description of Artificial Sequence: Synthetic oligonucleotide
  Sense strand starting at position 2607 of SEQ ID NO: 915375
gaaaguauuuaguauguga

SEQ ID NO: 1075077 - RNA, 19 nt, Artificial Sequence
  Description of Artificial Sequence: Synthetic oligonucleotide
  Antisense strand to SEQ ID NO: 1075076
ucacauacuaaauacuuuc

SEQ ID NO: 1075078 - RNA, 19 nt, Artificial Sequence
  Description of Artificial Sequence: Synthetic oligonucleotide
  Sense strand starting at position 2677 of SEQ ID NO: 915375
auccuuaugugaccauuga

SEQ ID NO: 1075079 - RNA, 19 nt, Artificial Sequence
  Description of Artificial Sequence: Synthetic oligonucleotide
  Antisense strand to SEQ ID NO: 1075078
ucaauggucacauaaggau

SEQ ID NO: 1075080 - RNA, 19 nt, Artificial Sequence
  Description of Artificial Sequence: Synthetic oligonucleotide
  Sense strand starting at position 2678 of SEQ ID NO: 915375
uccuuaugugaccauugau

SEQ ID NO: 1075081 - RNA, 19 nt, Artificial Sequence
  Description of Artificial Sequence: Synthetic oligonucleotide
  Antisense strand to SEQ ID NO: 1075080
aucaauggucacauaagga

SEQ ID NO: 1075082 - RNA, 19 nt, Artificial Sequence
  Description of Artificial Sequence: Synthetic oligonucleotide
  Sense strand starting at position 2681 of SEQ ID NO: 915375
uuaugugaccauugaugga

SEQ ID NO: 1075083 - RNA, 19 nt, Artificial Sequence
  Description of Artificial Sequence: Synthetic oligonucleotide
  Antisense strand to SEQ ID NO: 1075082
uccaucaauggucacauaa

SEQ ID NO: 1075084 - RNA, 19 nt, Artificial Sequence
  Description of Artificial Sequence: Synthetic oligonucleotide
  Sense strand starting at position 2779 of SEQ ID NO: 915375
gacagauuguuguuuaucu

SEQ ID NO: 1075085 - RNA, 19 nt, Artificial Sequence
  Description of Artificial Sequence: Synthetic oligonucleotide
  Antisense strand to SEQ ID NO: 1075084
agauaaacaacaaucuguc

SEQ ID NO: 1075086 - RNA, 19 nt, Artificial Sequence
  Description of Artificial Sequence: Synthetic oligonucleotide
  Sense strand starting at position 2840 of SEQ ID NO: 915375
cgugcugaaucuguaauuu

SEQ ID NO: 1075087 - RNA, 19 nt, Artificial Sequence
  Description of Artificial Sequence: Synthetic oligonucleotide
  Antisense strand to SEQ ID NO: 1075086
aaauuacagauucagcacg

SEQ ID NO: 1075088 - RNA, 19 nt, Artificial Sequence
  Description of Artificial Sequence: Synthetic oligonucleotide
  Sense strand starting at position 2860 of SEQ ID NO: 915375
gaggcugccuuauuaaaga

SEQ ID NO: 1075089 - RNA, 19 nt, Artificial Sequence
  Description of Artificial Sequence: Synthetic oligonucleotide
  Antisense strand to SEQ ID NO: 1075088
ucuuuaauaaggcagccuc

SEQ ID NO: 1075090 - RNA, 19 nt, Artificial Sequence
  Description of Artificial Sequence: Synthetic oligonucleotide
  Sense strand starting at position 2907 of SEQ ID NO: 915375
agaaacuucugcuuggcua

SEQ ID NO: 1075091 - RNA, 19 nt, Artificial Sequence
  Description of Artificial Sequence: Synthetic oligonucleotide
  Antisense strand to SEQ ID NO: 1075090
uagccaagcagaaguuucu

SEQ ID NO: 1075092 - RNA, 19 nt, Artificial Sequence
  Description of Artificial Sequence: Synthetic oligonucleotide
  Sense strand starting at position 2941 of SEQ ID NO: 915375
aggucagaugucugcauuu

SEQ ID NO: 1075093 - RNA, 19 nt, Artificial Sequence
  Description of Artificial Sequence: Synthetic oligonucleotide
  Antisense strand to SEQ ID NO: 1075092
aaaugcagacaucugaccu

SEQ ID NO: 1075094 - RNA, 19 nt, Artificial Sequence
  Description of Artificial Sequence: Synthetic oligonucleotide
  Sense strand starting at position 2976 of SEQ ID NO: 915375
gcugacugugauggaagau

SEQ ID NO: 1075095 - RNA, 19 nt, Artificial Sequence
  Description of Artificial Sequence: Synthetic oligonucleotide
  Antisense strand to SEQ ID NO: 1075094
aucuuccaucacagucagc

SEQ ID NO: 1075096 - RNA, 19 nt, Artificial Sequence
  Description of Artificial Sequence: Synthetic oligonucleotide
  Sense strand starting at position 3466 of SEQ ID NO: 915375
uggcaaguauuaccucauu

SEQ ID NO: 1075097 - RNA, 19 nt, Artificial Sequence
  Description of Artificial Sequence: Synthetic oligonucleotide
  Antisense strand to SEQ ID NO: 1075096
aaugagguaauacuugcca

SEQ ID NO: 1075098 - RNA, 19 nt, Artificial Sequence
  Description of Artificial Sequence: Synthetic oligonucleotide
  Sense strand starting at position 3666 of SEQ ID NO: 915375
uugugagauuacuugguua

SEQ ID NO: 1075099 - RNA, 19 nt, Artificial Sequence
  Description of Artificial Sequence: Synthetic oligonucleotide
  Antisense strand to SEQ ID NO: 1075098
uaaccaaguaaucucacaa

SEQ ID NO: 1075100 - RNA, 19 nt, Artificial Sequence
  Description of Artificial Sequence: Synthetic oligonucleotide
  Sense strand starting at position 3668 of SEQ ID NO: 915375
gugagauuacuugguuaau

SEQ ID NO: 1075101 - RNA, 19 nt, Artificial Sequence
  Description of Artificial Sequence: Synthetic oligonucleotide
  Antisense strand to SEQ ID NO: 1075100
auuaaccaaguaaucucac

SEQ ID NO: 1075102 - RNA, 19 nt, Artificial Sequence
  Description of Artificial Sequence: Synthetic oligonucleotide
  Sense strand starting at position 3669 of SEQ ID NO: 915375
ugagauuacuugguuaaug

SEQ ID NO: 1075103 - RNA, 19 nt, Artificial Sequence
  Description of Artificial Sequence: Synthetic oligonucleotide
  Antisense strand to SEQ ID NO: 1075102
cauuaaccaaguaaucuca

SEQ ID NO: 1075104 - RNA, 19 nt, Artificial Sequence
  Description of Artificial Sequence: Synthetic oligonucleotide
  Sense strand starting at position 3670 of SEQ ID NO: 915375
gagauuacuugguuaaugg

SEQ ID NO: 1075105 - RNA, 19 nt, Artificial Sequence
  Description of Artificial Sequence: Synthetic oligonucleotide
  Antisense strand to SEQ ID NO: 1075104
ccauuaaccaaguaaucuc

SEQ ID NO: 1075106 - RNA, 19 nt, Artificial Sequence
  Description of Artificial Sequence: Synthetic oligonucleotide
  Sense strand starting at position 3922 of SEQ ID NO: 915375
augcuauccagguggagau

SEQ ID NO: 1075107 - RNA, 19 nt, Artificial Sequence
  Description of Artificial Sequence: Synthetic oligonucleotide
  Antisense strand to SEQ ID NO: 1075106
aucuccaccuggauagcau

SEQ ID NO: 1075108 - RNA, 19 nt, Artificial Sequence
  Description of Artificial Sequence: Synthetic oligonucleotide
  Sense strand starting at position 3923 of SEQ ID NO: 915375
ugcuauccagguggagaua

SEQ ID NO: 1075109 - RNA, 19 nt, Artificial Sequence
  Description of Artificial Sequence: Synthetic oligonucleotide
  Antisense strand to SEQ ID NO: 1075108
uaucuccaccuggauagca

SEQ ID NO: 1075110 - RNA, 19 nt, Artificial Sequence
  Description of Artificial Sequence: Synthetic oligonucleotide
  Sense strand starting at position 215 of SEQ ID NO: 915376
acaacaacuccaggugauu

SEQ ID NO: 1075111 - RNA, 19 nt, Artificial Sequence
  Description of Artificial Sequence: Synthetic oligonucleotide
  Antisense strand to SEQ ID NO: 1075110
aaucaccuggaguuguugu

SEQ ID NO: 1075112 - RNA, 19 nt, Artificial Sequence
  Description of Artificial Sequence: Synthetic oligonucleotide
  Sense strand starting at position 445 of SEQ ID NO: 915376
acuggaaguccuugucuaa

SEQ ID NO: 1075113 - RNA, 19 nt, Artificial Sequence
  Description of Artificial Sequence: Synthetic oligonucleotide
  Antisense strand to SEQ ID NO: 1075112
uuagacaaggacuuccagu

SEQ ID NO: 1075114 - RNA, 19 nt, Artificial Sequence
  Description of Artificial Sequence: Synthetic oligonucleotide
  Sense strand starting at position 496 of SEQ ID NO: 915376
ccucaaaguugucuugaca

SEQ ID NO: 1075115 - RNA, 19 nt, Artificial Sequence
  Description of Artificial Sequence: Synthetic oligonucleotide
  Antisense strand to SEQ ID NO: 1075114
ugucaagacaacuuugagg

SEQ ID NO: 1075116 - RNA, 19 nt, Artificial Sequence
  Description of Artificial Sequence: Synthetic oligonucleotide
  Sense strand starting at position 503 of SEQ ID NO: 915376
guugucuugacaggcagaa

SEQ ID NO: 1075117 - RNA, 19 nt, Artificial Sequence
  Description of Artificial Sequence: Synthetic oligonucleotide
  Antisense strand to SEQ ID NO: 1075116
uucugccugucaagacaac

SEQ ID NO: 1075118 - RNA, 19 nt, Artificial Sequence
  Description of Artificial Sequence: Synthetic oligonucleotide
  Sense strand starting at position 647 of SEQ ID NO: 915376
ggcaucauucucugggaag

SEQ ID NO: 1075119 - RNA, 19 nt, Artificial Sequence
  Description of Artificial Sequence: Synthetic oligonucleotide
  Antisense strand to SEQ ID NO: 1075118
cuucccagagaaugaugcc

SEQ ID NO: 1075120 - RNA, 19 nt, Artificial Sequence
  Description of Artificial Sequence: Synthetic oligonucleotide
  Sense strand starting at position 736 of SEQ ID NO: 915376
cgagcuuuccuaggaauuc

SEQ ID NO: 1075121 - RNA, 19 nt, Artificial Sequence
  Description of Artificial Sequence: Synthetic oligonucleotide
  Antisense strand to SEQ ID NO: 1075120
gaauuccuaggaaagcucg

SEQ ID NO: 1075122 - RNA, 19 nt, Artificial Sequence
  Description of Artificial Sequence: Synthetic oligonucleotide
  Sense strand starting at position 798 of SEQ ID NO: 915376
gagagaucucucgggucac

SEQ ID NO: 1075123 - RNA, 19 nt, Artificial Sequence
  Description of Artificial Sequence: Synthetic oligonucleotide
  Antisense strand to SEQ ID NO: 1075122
gugacccgagagaucucuc

SEQ ID NO: 1075124 - RNA, 19 nt, Artificial Sequence
  Description of Artificial Sequence: Synthetic oligonucleotide
  Sense strand starting at position 878 of SEQ ID NO: 915376
ggagaaagcacgugugaga

SEQ ID NO: 1075125 - RNA, 19 nt, Artificial Sequence
  Description of Artificial Sequence: Synthetic oligonucleotide
  Antisense strand to SEQ ID NO: 1075124
ucucacacgugcuuucucc

SEQ ID NO: 1075126 - RNA, 19 nt, Artificial Sequence
  Description of Artificial Sequence: Synthetic oligonucleotide
  Sense strand starting at position 1319 of SEQ ID NO: 915376
gagaaaguuccagguuaca

SEQ ID NO: 1075127 - RNA, 19 nt, Artificial Sequence
  Description of Artificial Sequence: Synthetic oligonucleotide
  Antisense strand to SEQ ID NO: 1075126
uguaaccuggaacuuucuc

SEQ ID NO: 1075128 - RNA, 19 nt, Artificial Sequence
  Description of Artificial Sequence: Synthetic oligonucleotide
  Sense strand starting at position 1336 of SEQ ID NO: 915376
caguucugaguccaaguga

SEQ ID NO: 1075129 - RNA, 19 nt, Artificial Sequence
  Description of Artificial Sequence: Synthetic oligonucleotide
  Antisense strand to SEQ ID NO: 1075128
ucacuuggacucagaacug

SEQ ID NO: 1075130 - RNA, 19 nt, Artificial Sequence
  Description of Artificial Sequence: Synthetic oligonucleotide
  Sense strand starting at position 1350 of SEQ ID NO: 915376
agugauaucuuaccggaga

SEQ ID NO: 1075131 - RNA, 19 nt, Artificial Sequence
  Description of Artificial Sequence: Synthetic oligonucleotide
  Antisense strand to SEQ ID NO: 1075130
ucuccgguaagauaucacu

SEQ ID NO: 1075132 - RNA, 19 nt, Artificial Sequence
  Description of Artificial Sequence: Synthetic oligonucleotide
  Sense strand starting at position 1352 of SEQ ID NO: 915376
ugauaucuuaccggagaug

SEQ ID NO: 1075133 - RNA, 19 nt, Artificial Sequence
  Description of Artificial Sequence: Synthetic oligonucleotide
  Antisense strand to SEQ ID NO: 1075132
caucuccgguaagauauca

SEQ ID NO: 1075134 - RNA, 19 nt, Artificial Sequence
  Description of Artificial Sequence: Synthetic oligonucleotide
  Sense strand starting at position 1369 of SEQ ID NO: 915376
ugagcuguaucagcuaaag

SEQ ID NO: 1075135 - RNA, 19 nt, Artificial Sequence
  Description of Artificial Sequence: Synthetic oligonucleotide
  Antisense strand to SEQ ID NO: 1075134
cuuuagcugauacagcuca

SEQ ID NO: 1075136 - RNA, 19 nt, Artificial Sequence
  Description of Artificial Sequence: Synthetic oligonucleotide
  Sense strand starting at position 1371 of SEQ ID NO: 915376
agcuguaucagcuaaagag

SEQ ID NO: 1075137 - RNA, 19 nt, Artificial Sequence
  Description of Artificial Sequence: Synthetic oligonucleotide
  Antisense strand to SEQ ID NO: 1075136
cucuuuagcugauacagcu

SEQ ID NO: 1075138 - RNA, 19 nt, Artificial Sequence
  Description of Artificial Sequence: Synthetic oligonucleotide
  Sense strand starting at position 1405 of SEQ ID NO: 915376
uggccucaugagugcaaau

SEQ ID NO: 1075139 - RNA, 19 nt, Artificial Sequence
  Description of Artificial Sequence: Synthetic oligonucleotide
  Antisense strand to SEQ ID NO: 1075138
auuugcacucaugaggcca

SEQ ID NO: 1075140 - RNA, 19 nt, Artificial Sequence
  Description of Artificial Sequence: Synthetic oligonucleotide
  Sense strand starting at position 1407 of SEQ ID NO: 915376
gccucaugagugcaaauaa

SEQ ID NO: 1075141 - RNA, 19 nt, Artificial Sequence
  Description of Artificial Sequence: Synthetic oligonucleotide
  Antisense strand to SEQ ID NO: 1075140
uuauuugcacucaugaggc

SEQ ID NO: 1075142 - RNA, 19 nt, Artificial Sequence
  Description of Artificial Sequence: Synthetic oligonucleotide
  Sense strand starting at position 1514 of SEQ ID NO: 915376
aacuguucccagcaggaga

SEQ ID NO: 1075143 - RNA, 19 nt, Artificial Sequence
  Description of Artificial Sequence: Synthetic oligonucleotide
  Antisense strand to SEQ ID NO: 1075142
ucuccugcugggaacaguu

SEQ ID NO: 1075144 - RNA, 19 nt, Artificial Sequence
  Description of Artificial Sequence: Synthetic oligonucleotide
  Sense strand starting at position 1607 of SEQ ID NO: 915376
ugucuuugugugucuagua

SEQ ID NO: 1075145 - RNA, 19 nt, Artificial Sequence
  Description of Artificial Sequence: Synthetic oligonucleotide
  Antisense strand to SEQ ID NO: 1075144
uacuagacacacaaagaca

SEQ ID NO: 1075146 - RNA, 19 nt, Artificial Sequence
  Description of Artificial Sequence: Synthetic oligonucleotide
  Sense strand starting at position 1698 of SEQ ID NO: 915376
uccucuugccaugaacaga

SEQ ID NO: 1075147 - RNA, 19 nt, Artificial Sequence
  Description of Artificial Sequence: Synthetic oligonucleotide
  Antisense strand to SEQ ID NO: 1075146
ucuguucauggcaagagga

SEQ ID NO: 1075148 - RNA, 19 nt, Artificial Sequence
  Description of Artificial Sequence: Synthetic oligonucleotide
  Sense strand starting at position 1856 of SEQ ID NO: 915376
uagcuaugauguuccuaag

SEQ ID NO: 1075149 - RNA, 19 nt, Artificial Sequence
  Description of Artificial Sequence: Synthetic oligonucleotide
  Antisense strand to SEQ ID NO: 1075148
cuuaggaacaucauagcua

SEQ ID NO: 1075150 - RNA, 19 nt, Artificial Sequence
  Description of Artificial Sequence: Synthetic oligonucleotide
  Sense strand starting at position 2058 of SEQ ID NO: 915376
cagaaugauugcuccagga

SEQ ID NO: 1075151 - RNA, 19 nt, Artificial Sequence
  Description of Artificial Sequence: Synthetic oligonucleotide
  Antisense strand to SEQ ID NO: 1075150
uccuggagcaaucauucug

SEQ ID NO: 1075152 - RNA, 19 nt, Artificial Sequence
  Description of Artificial Sequence: Synthetic oligonucleotide
  Sense strand starting at position 2062 of SEQ ID NO: 915376
augauugcuccaggacaga

SEQ ID NO: 1075153 - RNA, 19 nt, Artificial Sequence
  Description of Artificial Sequence: Synthetic oligonucleotide
  Antisense strand to SEQ ID NO: 1075152
ucuguccuggagcaaucau

SEQ ID NO: 1075154 - RNA, 19 nt, Artificial Sequence
  Description of Artificial Sequence: Synthetic oligonucleotide
  Sense strand starting at position 2223 of SEQ ID NO: 915376
ccuagauguuauguccauu

SEQ ID NO: 1075155 - RNA, 19 nt, Artificial Sequence
  Description of Artificial Sequence: Synthetic oligonucleotide
  Antisense strand to SEQ ID NO: 1075154
aauggacauaacaucuagg

SEQ ID NO: 1075156 - RNA, 19 nt, Artificial Sequence
  Description of Artificial Sequence: Synthetic oligonucleotide
  Sense strand starting at position 2235 of SEQ ID NO: 915376
guccauuguccaggcauaa

SEQ ID NO: 1075157 - RNA, 19 nt, Artificial Sequence
  Description of Artificial Sequence: Synthetic oligonucleotide
  Antisense strand to SEQ ID NO: 1075156
uuaugccuggacaauggac

SEQ ID NO: 1075158 - RNA, 19 nt, Artificial Sequence
  Description of Artificial Sequence: Synthetic oligonucleotide
  Sense strand starting at position 2239 of SEQ ID NO: 915376
auuguccaggcauaauuau

SEQ ID NO: 1075159 - RNA, 19 nt, Artificial Sequence
  Description of Artificial Sequence: Synthetic oligonucleotide
  Antisense strand to SEQ ID NO: 1075158
auaauuaugccuggacaau

SEQ ID NO: 1075160 - RNA, 19 nt, Artificial Sequence
  Description of Artificial Sequence: Synthetic oligonucleotide
  Sense strand starting at position 2296 of SEQ ID NO: 915376
gccuuaacuccaggaguag

SEQ ID NO: 1075161 - RNA, 19 nt, Artificial Sequence
  Description of Artificial Sequence: Synthetic oligonucleotide
  Antisense strand to SEQ ID NO: 1075160
cuacuccuggaguuaaggc

SEQ ID NO: 1075162 - RNA, 19 nt, Artificial Sequence
  Description of Artificial Sequence: Synthetic oligonucleotide
  Sense strand starting at position 2518 of SEQ ID NO: 915376
augugagauucagagaaag

SEQ ID NO: 1075163 - RNA, 19 nt, Artificial Sequence
  Description of Artificial Sequence: Synthetic oligonucleotide
  Antisense strand to SEQ ID NO: 1075162
cuuucucugaaucucacau

SEQ ID NO: 1075164 - RNA, 19 nt, Artificial Sequence
  Description of Artificial Sequence: Synthetic oligonucleotide
  Sense strand starting at position 3056 of SEQ ID NO: 915376
uccugagucacagggauua

SEQ ID NO: 1075165 - RNA, 19 nt, Artificial Sequence
  Description of Artificial Sequence: Synthetic oligonucleotide
  Antisense strand to SEQ ID NO: 1075164
uaaucccugugacucagga

SEQ ID NO: 1075166 - RNA, 19 nt, Artificial Sequence
  Description of Artificial Sequence: Synthetic oligonucleotide
  Sense strand starting at position 3133 of SEQ ID NO: 915376
guggaucuagaucaagguu

SEQ ID NO: 1075167 - RNA, 19 nt, Artificial Sequence
  Description of Artificial Sequence: Synthetic oligonucleotide
  Antisense strand to SEQ ID NO: 1075166
aaccuugaucuagauccac

SEQ ID NO: 1075168 - RNA, 19 nt, Artificial Sequence
  Description of Artificial Sequence: Synthetic oligonucleotide
  Sense strand starting at position 3162 of SEQ ID NO: 915376
gugcuauuaauaugugagg

SEQ ID NO: 1075169 - RNA, 19 nt, Artificial Sequence
  Description of Artificial Sequence: Synthetic oligonucleotide
  Antisense strand to SEQ ID NO: 1075168
ccucacauauuaauagcac

SEQ ID NO: 1075170 - RNA, 19 nt, Artificial Sequence
  Description of Artificial Sequence: Synthetic oligonucleotide
  Sense strand starting at position 3163 of SEQ ID NO: 915376
ugcuauuaauaugugaggu

SEQ ID NO: 1075171 - RNA, 19 nt, Artificial Sequence
  Description of Artificial Sequence: Synthetic oligonucleotide
  Antisense strand to SEQ ID NO: 1075170
accucacauauuaauagca

SEQ ID NO: 1075172 - RNA, 19 nt, Artificial Sequence
  Description of Artificial Sequence: Synthetic oligonucleotide
  Sense strand starting at position 3164 of SEQ ID NO: 915376
gcuauuaauaugugagguc

SEQ ID NO: 1075173 - RNA, 19 nt, Artificial Sequence
  Description of Artificial Sequence: Synthetic oligonucleotide
  Antisense strand to SEQ ID NO: 1075172
gaccucacauauuaauagc

SEQ ID NO: 1075174 - RNA, 19 nt, Artificial Sequence
  Description of Artificial Sequence: Synthetic oligonucleotide
  Sense strand starting at position 3303 of SEQ ID NO: 915376
gucuccacauguuuccaaa

SEQ ID NO: 1075175 - RNA, 19 nt, Artificial Sequence
  Description of Artificial Sequence: Synthetic oligonucleotide
  Antisense strand to SEQ ID NO: 1075174
uuuggaaacauguggagac

SEQ ID NO: 1075176 - RNA, 19 nt, Artificial Sequence
  Description of Artificial Sequence: Synthetic oligonucleotide
  Sense strand starting at position 3356 of SEQ ID NO: 915376
aucucugaucuaggauaug

SEQ ID NO: 1075177 - RNA, 19 nt, Artificial Sequence
  Description of Artificial Sequence: Synthetic oligonucleotide
  Antisense strand to SEQ ID NO: 1075176
cauauccuagaucagagau

SEQ ID NO: 1075178 - RNA, 19 nt, Artificial Sequence
  Description of Artificial Sequence: Synthetic oligonucleotide
  Sense strand starting at position 3734 of SEQ ID NO: 915376
ugucucaagccuugaauuu

SEQ ID NO: 1075179 - RNA, 19 nt, Artificial Sequence
  Description of Artificial Sequence: Synthetic oligonucleotide
  Antisense strand to SEQ ID NO: 1075178
aaauucaaggcuugagaca

SEQ ID NO: 1075180 - RNA, 19 nt, Artificial Sequence
  Description of Artificial Sequence: Synthetic oligonucleotide
  Sense strand starting at position 3754 of SEQ ID NO: 915376
ccagaugucucugccaaga

SEQ ID NO: 1075181 - RNA, 19 nt, Artificial Sequence
  Description of Artificial Sequence: Synthetic oligonucleotide
  Antisense strand to SEQ ID NO: 1075180
ucuuggcagagacaucugg

SEQ ID NO: 1075182 - RNA, 19 nt, Artificial Sequence
  Description of Artificial Sequence: Synthetic oligonucleotide
  Sense strand starting at position 3778 of SEQ ID NO: 915376
uggacuugucagggugaac

SEQ ID NO: 1075183 - RNA, 19 nt, Artificial Sequence
  Description of Artificial Sequence: Synthetic oligonucleotide
  Antisense strand to SEQ ID NO: 1075182
guucacccugacaagucca

SEQ ID NO: 1075184 - RNA, 19 nt, Artificial Sequence
  Description of Artificial Sequence: Synthetic oligonucleotide
  Sense strand starting at position 3811 of SEQ ID NO: 915376
gugggaugcuucucagaac

SEQ ID NO: 1075185 - RNA, 19 nt, Artificial Sequence
  Description of Artificial Sequence: Synthetic oligonucleotide
  Antisense strand to SEQ ID NO: 1075184
guucugagaagcaucccac

SEQ ID NO: 1075186 - RNA, 19 nt, Artificial Sequence
  Description of Artificial Sequence: Synthetic oligonucleotide
  Sense strand starting at position 3849 of SEQ ID NO: 915376
gagggugacccuugucaau

SEQ ID NO: 1075187 - RNA, 19 nt, Artificial Sequence
  Description of Artificial Sequence: Synthetic oligonucleotide
  Antisense strand to SEQ ID NO: 1075186
auugacaagggucacccuc

SEQ ID NO: 1075188 - RNA, 19 nt, Artificial Sequence
  Description of Artificial Sequence: Synthetic oligonucleotide
  Sense strand starting at position 3851 of SEQ ID NO: 915376
gggugacccuugucaauua

SEQ ID NO: 1075189 - RNA, 19 nt, Artificial Sequence
  Description of Artificial Sequence: Synthetic oligonucleotide
  Antisense strand to SEQ ID NO: 1075188
uaauugacaagggucaccc

SEQ ID NO: 1075190 - RNA, 19 nt, Artificial Sequence
  Description of Artificial Sequence: Synthetic oligonucleotide
  Sense strand starting at position 243 of SEQ ID NO: 915377
guguguucccaugaggaaa

SEQ ID NO: 1075191 - RNA, 19 nt, Artificial Sequence
  Description of Artificial Sequence: Synthetic oligonucleotide
  Antisense strand to SEQ ID NO: 1075190
uuuccucaugggaacacac

SEQ ID NO: 1075192 - RNA, 19 nt, Artificial Sequence
  Description of Artificial Sequence: Synthetic oligonucleotide
  Sense strand starting at position 251 of SEQ ID NO: 915377
ccaugaggaaaguguuuaa

SEQ ID NO: 1075193 - RNA, 19 nt, Artificial Sequence
  Description of Artificial Sequence: Synthetic oligonucleotide
  Antisense strand to SEQ ID NO: 1075192
uuaaacacuuuccucaugg

SEQ ID NO: 1075194 - RNA, 19 nt, Artificial Sequence
  Description of Artificial Sequence: Synthetic oligonucleotide
  Sense strand starting at position 284 of SEQ ID NO: 915377
gaaggauauuucuaugugu

SEQ ID NO: 1075195 - RNA, 19 nt, Artificial Sequence
  Description of Artificial Sequence: Synthetic oligonucleotide
  Antisense strand to SEQ ID NO: 1075194
acacauagaaauauccuuc

SEQ ID NO: 1075196 - RNA, 19 nt, Artificial Sequence
  Description of Artificial Sequence: Synthetic oligonucleotide
  Sense strand starting at position 319 of SEQ ID NO: 915377
ccaggacuccguggaaacu

SEQ ID NO: 1075197 - RNA, 19 nt, Artificial Sequence
  Description of Artificial Sequence: Synthetic oligonucleotide
  Antisense strand to SEQ ID NO: 1075196
aguuuccacggaguccugg

SEQ ID NO: 1075198 - RNA, 19 nt, Artificial Sequence
  Description of Artificial Sequence: Synthetic oligonucleotide
  Sense strand starting at position 368 of SEQ ID NO: 915377
uuugucuuauuccuuguaa

SEQ ID NO: 1075199 - RNA, 19 nt, Artificial Sequence
  Description of Artificial Sequence: Synthetic oligonucleotide
  Antisense strand to SEQ ID NO: 1075198
uuacaaggaauaagacaaa

SEQ ID NO: 1075200 - RNA, 19 nt, Artificial Sequence
  Description of Artificial Sequence: Synthetic oligonucleotide
  Sense strand starting at position 369 of SEQ ID NO: 915377
uugucuuauuccuuguaac

SEQ ID NO: 1075201 - RNA, 19 nt, Artificial Sequence
  Description of Artificial Sequence: Synthetic oligonucleotide
  Antisense strand to SEQ ID NO: 1075200
guuacaaggaauaagacaa

SEQ ID NO: 1075202 - RNA, 19 nt, Artificial Sequence
  Description of Artificial Sequence: Synthetic oligonucleotide
  Sense strand starting at position 431 of SEQ ID NO: 915377
ucugguucgggugaaauua

SEQ ID NO: 1075203 - RNA, 19 nt, Artificial Sequence
  Description of Artificial Sequence: Synthetic oligonucleotide
  Antisense strand to SEQ ID NO: 1075202
uaauuucacccgaaccaga

SEQ ID NO: 1075204 - RNA, 19 nt, Artificial Sequence
  Description of Artificial Sequence: Synthetic oligonucleotide
  Sense strand starting at position 558 of SEQ ID NO: 915377
aggauucgcuccuuauuag

SEQ ID NO: 1075205 - RNA, 19 nt, Artificial Sequence
  Description of Artificial Sequence: Synthetic oligonucleotide
  Antisense strand to SEQ ID NO: 1075204
cuaauaaggagcgaauccu

SEQ ID NO: 1075206 - RNA, 19 nt, Artificial Sequence
  Description of Artificial Sequence: Synthetic oligonucleotide
  Sense strand starting at position 696 of SEQ ID NO: 915377
ccaggucucccgggaucuu

SEQ ID NO: 1075207 - RNA, 19 nt, Artificial Sequence
  Description of Artificial Sequence: Synthetic oligonucleotide
  Antisense strand to SEQ ID NO: 1075206
aagaucccgggagaccugg

SEQ ID NO: 1075208 - RNA, 19 nt, Artificial Sequence
  Description of Artificial Sequence: Synthetic oligonucleotide
  Sense strand starting at position 1105 of SEQ ID NO: 915377
gcccgaaacucacuccuua

SEQ ID NO: 1075209 - RNA, 19 nt, Artificial Sequence
  Description of Artificial Sequence: Synthetic oligonucleotide
  Antisense strand to SEQ ID NO: 1075208
uaaggagugaguuucgggc

SEQ ID NO: 1075210 - RNA, 19 nt, Artificial Sequence
  Description of Artificial Sequence: Synthetic oligonucleotide
  Sense strand starting at position 1446 of SEQ ID NO: 915377
gagucuguuccacagcaac

SEQ ID NO: 1075211 - RNA, 19 nt, Artificial Sequence
  Description of Artificial Sequence: Synthetic oligonucleotide
  Antisense strand to SEQ ID NO: 1075210
guugcuguggaacagacuc

SEQ ID NO: 1075212 - RNA, 19 nt, Artificial Sequence
  Description of Artificial Sequence: Synthetic oligonucleotide
  Sense strand starting at position 1481 of SEQ ID NO: 915377
caggaauguggguguggua

SEQ ID NO: 1075213 - RNA, 19 nt, Artificial Sequence
  Description of Artificial Sequence: Synthetic oligonucleotide
  Antisense strand to SEQ ID NO: 1075212
uaccacacccacauuccug

SEQ ID NO: 1075214 - RNA, 19 nt, Artificial Sequence
  Description of Artificial Sequence: Synthetic oligonucleotide
  Sense strand starting at position 1567 of SEQ ID NO: 915377
guuugaggucacugaccuu

SEQ ID NO: 1075215 - RNA, 19 nt, Artificial Sequence
  Description of Artificial Sequence: Synthetic oligonucleotide
  Antisense strand to SEQ ID NO: 1075214
aaggucagugaccucaaac

SEQ ID NO: 1075216 - RNA, 19 nt, Artificial Sequence
  Description of Artificial Sequence: Synthetic oligonucleotide
  Sense strand starting at position 1570 of SEQ ID NO: 915377
ugaggucacugaccuugaa

SEQ ID NO: 1075217 - RNA, 19 nt, Artificial Sequence
  Description of Artificial Sequence: Synthetic oligonucleotide
  Antisense strand to SEQ ID NO: 1075216
uucaaggucagugaccuca

SEQ ID NO: 1075218 - RNA, 19 nt, Artificial Sequence
  Description of Artificial Sequence: Synthetic oligonucleotide
  Sense strand starting at position 2221 of SEQ ID NO: 915377
ucacucugaguuugaguua

SEQ ID NO: 1075219 - RNA, 19 nt, Artificial Sequence
  Description of Artificial Sequence: Synthetic oligonucleotide
  Antisense strand to SEQ ID NO: 1075218
uaacucaaacucagaguga

SEQ ID NO: 1075220 - RNA, 19 nt, Artificial Sequence
  Description of Artificial Sequence: Synthetic oligonucleotide
  Sense strand starting at position 2274 of SEQ ID NO: 915377
ucaguucuccacugcaaag

SEQ ID NO: 1075221 - RNA, 19 nt, Artificial Sequence
  Description of Artificial Sequence: Synthetic oligonucleotide
  Antisense strand to SEQ ID NO: 1075220
cuuugcaguggagaacuga

SEQ ID NO: 1075222 - RNA, 19 nt, Artificial Sequence
  Description of Artificial Sequence: Synthetic oligonucleotide
  Sense strand starting at position 2454 of SEQ ID NO: 915377
ggaacauucugcuuacaga

SEQ ID NO: 1075223 - RNA, 19 nt, Artificial Sequence
  Description of Artificial Sequence: Synthetic oligonucleotide
  Antisense strand to SEQ ID NO: 1075222
ucuguaagcagaauguucc

SEQ ID NO: 1075224 - RNA, 19 nt, Artificial Sequence
  Description of Artificial Sequence: Synthetic oligonucleotide
  Sense strand starting at position 2565 of SEQ ID NO: 915377
aauagucaucuccaggguu

SEQ ID NO: 1075225 - RNA, 19 nt, Artificial Sequence
  Description of Artificial Sequence: Synthetic oligonucleotide
  Antisense strand to SEQ ID NO: 1075224
aacccuggagaugacuauu

SEQ ID NO: 1075226 - RNA, 19 nt, Artificial Sequence
  Description of Artificial Sequence: Synthetic oligonucleotide
  Sense strand starting at position 2567 of SEQ ID NO: 915377
uagucaucuccaggguuua

SEQ ID NO: 1075227 - RNA, 19 nt, Artificial Sequence
  Description of Artificial Sequence: Synthetic oligonucleotide
  Antisense strand to SEQ ID NO: 1075226
uaaacccuggagaugacua

SEQ ID NO: 1075228 - RNA, 19 nt, Artificial Sequence
  Description of Artificial Sequence: Synthetic oligonucleotide
  Sense strand starting at position 2630 of SEQ ID NO: 915377
agcauuaucugguuucuuu

SEQ ID NO: 1075229 - RNA, 19 nt, Artificial Sequence
  Description of Artificial Sequence: Synthetic oligonucleotide
  Antisense strand to SEQ ID NO: 1075228
aaagaaaccagauaaugcu

SEQ ID NO: 1075230 - RNA, 19 nt, Artificial Sequence
  Description of Artificial Sequence: Synthetic oligonucleotide
  Sense strand starting at position 2783 of SEQ ID NO: 915377
acuggucuuugcuuugaua

SEQ ID NO: 1075231 - RNA, 19 nt, Artificial Sequence
  Description of Artificial Sequence: Synthetic oligonucleotide
  Antisense strand to SEQ ID NO: 1075230
uaucaaagcaaagaccagu

SEQ ID NO: 1075232 - RNA, 19 nt, Artificial Sequence
  Description of Artificial Sequence: Synthetic oligonucleotide
  Sense strand starting at position 2785 of SEQ ID NO: 915377
uggucuuugcuuugauaga

SEQ ID NO: 1075233 - RNA, 19 nt, Artificial Sequence
  Description of Artificial Sequence: Synthetic oligonucleotide
  Antisense strand to SEQ ID NO: 1075232
ucuaucaaagcaaagacca

SEQ ID NO: 1075234 - RNA, 19 nt, Artificial Sequence
  Description of Artificial Sequence: Synthetic oligonucleotide
  Sense strand starting at position 2790 of SEQ ID NO: 915377
uuugcuuugauagagguua

SEQ ID NO: 1075235 - RNA, 19 nt, Artificial Sequence
  Description of Artificial Sequence: Synthetic oligonucleotide
  Antisense strand to SEQ ID NO: 1075234
uaaccucuaucaaagcaaa

SEQ ID NO: 1075236 - RNA, 19 nt, Artificial Sequence
  Description of Artificial Sequence: Synthetic oligonucleotide
  Sense strand starting at position 2792 of SEQ ID NO: 915377
ugcuuugauagagguuacu

SEQ ID NO: 1075237 - RNA, 19 nt, Artificial Sequence
  Description of Artificial Sequence: Synthetic oligonucleotide
  Antisense strand to SEQ ID NO: 1075236
aguaaccucuaucaaagca

SEQ ID NO: 1075238 - RNA, 19 nt, Artificial Sequence
  Description of Artificial Sequence: Synthetic oligonucleotide
  Sense strand starting at position 2873 of SEQ ID NO: 915377
gaguaaagauuugaaauug

SEQ ID NO: 1075239 - RNA, 19 nt, Artificial Sequence
  Description of Artificial Sequence: Synthetic oligonucleotide
  Antisense strand to SEQ ID NO: 1075238
caauuucaaaucuuuacuc

SEQ ID NO: 1075240 - RNA, 19 nt, Artificial Sequence
  Description of Artificial Sequence: Synthetic oligonucleotide
  Sense strand starting at position 2928 of SEQ ID NO: 915377
caguuaaugauguggauug

SEQ ID NO: 1075241 - RNA, 19 nt, Artificial Sequence
  Description of Artificial Sequence: Synthetic oligonucleotide
  Antisense strand to SEQ ID NO: 1075240
caauccacaucauuaacug

SEQ ID NO: 1075242 - RNA, 19 nt, Artificial Sequence
  Description of Artificial Sequence: Synthetic oligonucleotide
  Sense strand starting at position 2957 of SEQ ID NO: 915377
augucagcaguucgaaaca

SEQ ID NO: 1075243 - RNA, 19 nt, Artificial Sequence
  Description of Artificial Sequence: Synthetic oligonucleotide
  Antisense strand to SEQ ID NO: 1075242
uguuucgaacugcugacau

SEQ ID NO: 1075244 - RNA, 19 nt, Artificial Sequence
  Description of Artificial Sequence: Synthetic oligonucleotide
  Sense strand starting at position 2969 of SEQ ID NO: 915377
cgaaacaucccaugccuua

SEQ ID NO: 1075245 - RNA, 19 nt, Artificial Sequence
  Description of Artificial Sequence: Synthetic oligonucleotide
  Antisense strand to SEQ ID NO: 1075244
uaaggcaugggauguuucg

SEQ ID NO: 1075246 - RNA, 19 nt, Artificial Sequence
  Description of Artificial Sequence: Synthetic oligonucleotide
  Sense strand starting at position 3209 of SEQ ID NO: 915377
gcaguaaaccaagauugcu

SEQ ID NO: 1075247 - RNA, 19 nt, Artificial Sequence
  Description of Artificial Sequence: Synthetic oligonucleotide
  Antisense strand to SEQ ID NO: 1075246
agcaaucuugguuuacugc

SEQ ID NO: 1075248 - RNA, 19 nt, Artificial Sequence
  Description of Artificial Sequence: Synthetic oligonucleotide
  Sense strand starting at position 3410 of SEQ ID NO: 915377
cuuguugacaacuguggaa

SEQ ID NO: 1075249 - RNA, 19 nt, Artificial Sequence
  Description of Artificial Sequence: Synthetic oligonucleotide
  Antisense strand to SEQ ID NO: 1075248
uuccacaguugucaacaag

SEQ ID NO: 1075250 - RNA, 19 nt, Artificial Sequence
  Description of Artificial Sequence: Synthetic oligonucleotide
  Sense strand starting at position 3412 of SEQ ID NO: 915377
uguugacaacuguggaaga

SEQ ID NO: 1075251 - RNA, 19 nt, Artificial Sequence
  Description of Artificial Sequence: Synthetic oligonucleotide
  Antisense strand to SEQ ID NO: 1075250
ucuuccacaguugucaaca

SEQ ID NO: 1075252 - RNA, 19 nt, Artificial Sequence
  Description of Artificial Sequence: Synthetic oligonucleotide
  Sense strand starting at position 3426 of SEQ ID NO: 915377
gaagaaacuugugucacuc

SEQ ID NO: 1075253 - RNA, 19 nt, Artificial Sequence
  Description of Artificial Sequence: Synthetic oligonucleotide
  Antisense strand to SEQ ID NO: 1075252
gagugacacaaguuucuuc

SEQ ID NO: 1075254 - RNA, 19 nt, Artificial Sequence
  Description of Artificial Sequence: Synthetic oligonucleotide
  Sense strand starting at position 3430 of SEQ ID NO: 915377
aaacuugugucacucugga

SEQ ID NO: 1075255 - RNA, 19 nt, Artificial Sequence
  Description of Artificial Sequence: Synthetic oligonucleotide
  Antisense strand to SEQ ID NO: 1075254
uccagagugacacaaguuu

SEQ ID NO: 1075256 - RNA, 19 nt, Artificial Sequence
  Description of Artificial Sequence: Synthetic oligonucleotide
  Sense strand starting at position 3491 of SEQ ID NO: 915377
augccagaaaucuggugau

SEQ ID NO: 1075257 - RNA, 19 nt, Artificial Sequence
  Description of Artificial Sequence: Synthetic oligonucleotide
  Antisense strand to SEQ ID NO: 1075256
aucaccagauuucuggcau

SEQ ID NO: 1075258 - RNA, 19 nt, Artificial Sequence
  Description of Artificial Sequence: Synthetic oligonucleotide
  Sense strand starting at position 3495 of SEQ ID NO: 915377
cagaaaucuggugaugcua

SEQ ID NO: 1075259 - RNA, 19 nt, Artificial Sequence
  Description of Artificial Sequence: Synthetic oligonucleotide
  Antisense strand to SEQ ID NO: 1075258
uagcaucaccagauuucug

SEQ ID NO: 1075260 - RNA, 19 nt, Artificial Sequence
  Description of Artificial Sequence: Synthetic oligonucleotide
  Sense strand starting at position 3519 of SEQ ID NO: 915377
auggcugauuucuacaaau

SEQ ID NO: 1075261 - RNA, 19 nt, Artificial Sequence
  Description of Artificial Sequence: Synthetic oligonucleotide
  Antisense strand to SEQ ID NO: 1075260
auuuguagaaaucagccau

SEQ ID NO: 1075262 - RNA, 19 nt, Artificial Sequence
  Description of Artificial Sequence: Synthetic oligonucleotide
  Sense strand starting at position 3756 of SEQ ID NO: 915377
ggauugguagaguggugau

SEQ ID NO: 1075263 - RNA, 19 nt, Artificial Sequence
  Description of Artificial Sequence: Synthetic oligonucleotide
  Antisense strand to SEQ ID NO: 1075262
aucaccacucuaccaaucc

SEQ ID NO: 1075264 - RNA, 19 nt, Artificial Sequence
  Description of Artificial Sequence: Synthetic oligonucleotide
  Sense strand starting at position 3763 of SEQ ID NO: 915377
uagaguggugauuaagugu

SEQ ID NO: 1075265 - RNA, 19 nt, Artificial Sequence
  Description of Artificial Sequence: Synthetic oligonucleotide
  Antisense strand to SEQ ID NO: 1075264
acacuuaaucaccacucua

SEQ ID NO: 1075266 - RNA, 19 nt, Artificial Sequence
  Description of Artificial Sequence: Synthetic oligonucleotide
  Sense strand starting at position 3769 of SEQ ID NO: 915377
ggugauuaagugugaguca

SEQ ID NO: 1075267 - RNA, 19 nt, Artificial Sequence
  Description of Artificial Sequence: Synthetic oligonucleotide
  Antisense strand to SEQ ID NO: 1075266
ugacucacacuuaaucacc

SEQ ID NO: 1075268 - RNA, 19 nt, Artificial Sequence
  Description of Artificial Sequence: Synthetic oligonucleotide
  Sense strand starting at position 3772 of SEQ ID NO: 915377
gauuaagugugagucauuc

SEQ ID NO: 1075269 - RNA, 19 nt, Artificial Sequence
  Description of Artificial Sequence: Synthetic oligonucleotide
  Antisense strand to SEQ ID NO: 1075268
gaaugacucacacuuaauc

SEQ ID NO: 1075270 - RNA, 19 nt, Artificial Sequence
  Description of Artificial Sequence: Synthetic oligonucleotide
  Sense strand starting at position 164 of SEQ ID NO: 915378
ucagcaaaugcucacguua

SEQ ID NO: 1075271 - RNA, 19 nt, Artificial Sequence
  Description of Artificial Sequence: Synthetic oligonucleotide
  Antisense strand to SEQ ID NO: 1075270
uaacgugagcauuugcuga

SEQ ID NO: 1075272 - RNA, 19 nt, Artificial Sequence
  Description of Artificial Sequence: Synthetic oligonucleotide
  Sense strand starting at position 209 of SEQ ID NO: 915378
uggcucagagccuguucua

SEQ ID NO: 1075273 - RNA, 19 nt, Artificial Sequence
  Description of Artificial Sequence: Synthetic oligonucleotide
  Antisense strand to SEQ ID NO: 1075272
uagaacaggcucugagcca

SEQ ID NO: 1075274 - RNA, 19 nt, Artificial Sequence
  Description of Artificial Sequence: Synthetic oligonucleotide
  Sense strand starting at position 310 of SEQ ID NO: 915378
ugaagucguccuuaaguuc

SEQ ID NO: 1075275 - RNA, 19 nt, Artificial Sequence
  Description of Artificial Sequence: Synthetic oligonucleotide
  Antisense strand to SEQ ID NO: 1075274
gaacuuaaggacgacuuca

SEQ ID NO: 1075276 - RNA, 19 nt, Artificial Sequence
  Description of Artificial Sequence: Synthetic oligonucleotide
  Sense strand starting at position 496 of SEQ ID NO: 915378
agccacugauccuguuaaa

SEQ ID NO: 1075277 - RNA, 19 nt, Artificial Sequence
  Description of Artificial Sequence: Synthetic oligonucleotide
  Antisense strand to SEQ ID NO: 1075276
uuuaacaggaucaguggcu

SEQ ID NO: 1075278 - RNA, 19 nt, Artificial Sequence
  Description of Artificial Sequence: Synthetic oligonucleotide
  Sense strand starting at position 692 of SEQ ID NO: 915378
gucuuugccuucuuuggaa

SEQ ID NO: 1075279 - RNA, 19 nt, Artificial Sequence
  Description of Artificial Sequence: Synthetic oligonucleotide
  Antisense strand to SEQ ID NO: 1075278
uuccaaagaaggcaaagac

SEQ ID NO: 1075280 - RNA, 19 nt, Artificial Sequence
  Description of Artificial Sequence: Synthetic oligonucleotide
  Sense strand starting at position 749 of SEQ ID NO: 915378
ccuggucuuugcucaaauu

SEQ ID NO: 1075281 - RNA, 19 nt, Artificial Sequence
  Description of Artificial Sequence: Synthetic oligonucleotide
  Antisense strand to SEQ ID NO: 1075280
aauuugagcaaagaccagg

SEQ ID NO: 1075282 - RNA, 19 nt, Artificial Sequence
  Description of Artificial Sequence: Synthetic oligonucleotide
  Sense strand starting at position 811 of SEQ ID NO: 915378
gcaauugugcgucccuuga

SEQ ID NO: 1075283 - RNA, 19 nt, Artificial Sequence
  Description of Artificial Sequence: Synthetic oligonucleotide
  Antisense strand to SEQ ID NO: 1075282
ucaagggacgcacaauugc

SEQ ID NO: 1075284 - RNA, 19 nt, Artificial Sequence
  Description of Artificial Sequence: Synthetic oligonucleotide
  Sense strand starting at position 813 of SEQ ID NO: 915378
aauugugcgucccuugaua

SEQ ID NO: 1075285 - RNA, 19 nt, Artificial Sequence
  Description of Artificial Sequence: Synthetic oligonucleotide
  Antisense strand to SEQ ID NO: 1075284
uaucaagggacgcacaauu

SEQ ID NO: 1075286 - RNA, 19 nt, Artificial Sequence
  Description of Artificial Sequence: Synthetic oligonucleotide
  Sense strand starting at position 815 of SEQ ID NO: 915378
uugugcgucccuugauacu

SEQ ID NO: 1075287 - RNA, 19 nt, Artificial Sequence
  Description of Artificial Sequence: Synthetic oligonucleotide
  Antisense strand to SEQ ID NO: 1075286
aguaucaagggacgcacaa

SEQ ID NO: 1075288 - RNA, 19 nt, Artificial Sequence
  Description of Artificial Sequence: Synthetic oligonucleotide
  Sense strand starting at position 821 of SEQ ID NO: 915378
gucccuugauacuacuuau

SEQ ID NO: 1075289 - RNA, 19 nt, Artificial Sequence
  Description of Artificial Sequence: Synthetic oligonucleotide
  Antisense strand to SEQ ID NO: 1075288
auaaguaguaucaagggac

SEQ ID NO: 1075290 - RNA, 19 nt, Artificial Sequence
  Description of Artificial Sequence: Synthetic oligonucleotide
  Sense strand starting at position 1163 of SEQ ID NO: 915378
gcacauaguaggcauugau

SEQ ID NO: 1075291 - RNA, 19 nt, Artificial Sequence
  Description of Artificial Sequence: Synthetic oligonucleotide
  Antisense strand to SEQ ID NO: 1075290
aucaaugccuacuaugugc

SEQ ID NO: 1075292 - RNA, 19 nt, Artificial Sequence
  Description of Artificial Sequence: Synthetic oligonucleotide
  Sense strand starting at position 1278 of SEQ ID NO: 915378
ggguuauccgaaggaagag

SEQ ID NO: 1075293 - RNA, 19 nt, Artificial Sequence
  Description of Artificial Sequence: Synthetic oligonucleotide
  Antisense strand to SEQ ID NO: 1075292
cucuuccuucggauaaccc

SEQ ID NO: 1075294 - RNA, 19 nt, Artificial Sequence
  Description of Artificial Sequence: Synthetic oligonucleotide
  Sense strand starting at position 1323 of SEQ ID NO: 915378
acgcguacacccucuguua

SEQ ID NO: 1075295 - RNA, 19 nt, Artificial Sequence
  Description of Artificial Sequence: Synthetic oligonucleotide
  Antisense strand to SEQ ID NO: 1075294
uaacagaggguguacgcgu

SEQ ID NO: 1075296 - RNA, 19 nt, Artificial Sequence
  Description of Artificial Sequence: Synthetic oligonucleotide
  Sense strand starting at position 1324 of SEQ ID NO: 915378
cgcguacacccucuguuau

SEQ ID NO: 1075297 - RNA, 19 nt, Artificial Sequence
  Description of Artificial Sequence: Synthetic oligonucleotide
  Antisense strand to SEQ ID NO: 1075296
auaacagaggguguacgcg

SEQ ID NO: 1075298 - RNA, 19 nt, Artificial Sequence
  Description of Artificial Sequence: Synthetic oligonucleotide
  Sense strand starting at position 1426 of SEQ ID NO: 915378
gaaagcaguugcgaugaga

SEQ ID NO: 1075299 - RNA, 19 nt, Artificial Sequence
  Description of Artificial Sequence: Synthetic oligonucleotide
  Antisense strand to SEQ ID NO: 1075298
ucucaucgcaacugcuuuc

SEQ ID NO: 1075300 - RNA, 19 nt, Artificial Sequence
  Description of Artificial Sequence: Synthetic oligonucleotide
  Sense strand starting at position 1429 of SEQ ID NO: 915378
agcaguugcgaugagauga

SEQ ID NO: 1075301 - RNA, 19 nt, Artificial Sequence
  Description of Artificial Sequence: Synthetic oligonucleotide
  Antisense strand to SEQ ID NO: 1075300
ucaucucaucgcaacugcu

SEQ ID NO: 1075302 - RNA, 19 nt, Artificial Sequence
  Description of Artificial Sequence: Synthetic oligonucleotide
  Sense strand starting at position 3394 of SEQ ID NO: 915378
acuugacuuucgguccgau

SEQ ID NO: 1075303 - RNA, 19 nt, Artificial Sequence
  Description of Artificial Sequence: Synthetic oligonucleotide
  Antisense strand to SEQ ID NO: 1075302
aucggaccgaaagucaagu

SEQ ID NO: 1075304 - RNA, 19 nt, Artificial Sequence
  Description of Artificial Sequence: Synthetic oligonucleotide
  Sense strand starting at position 3397 of SEQ ID NO: 915378
ugacuuucgguccgaucuu

SEQ ID NO: 1075305 - RNA, 19 nt, Artificial Sequence
  Description of Artificial Sequence: Synthetic oligonucleotide
  Antisense strand to SEQ ID NO: 1075304
aagaucggaccgaaaguca

SEQ ID NO: 1075306 - RNA, 19 nt, Artificial Sequence
  Description of Artificial Sequence: Synthetic oligonucleotide
  Sense strand starting at position 3434 of SEQ ID NO: 915378
aauagcucauguuugagga

SEQ ID NO: 1075307 - RNA, 19 nt, Artificial Sequence
  Description of Artificial Sequence: Synthetic oligonucleotide
  Antisense strand to SEQ ID NO: 1075306
uccucaaacaugagcuauu

SEQ ID NO: 1075308 - RNA, 19 nt, Artificial Sequence
  Description of Artificial Sequence: Synthetic oligonucleotide
  Sense strand starting at position 3435 of SEQ ID NO: 915378
auagcucauguuugaggaa

SEQ ID NO: 1075309 - RNA, 19 nt, Artificial Sequence
  Description of Artificial Sequence: Synthetic oligonucleotide
  Antisense strand to SEQ ID NO: 1075308
uuccucaaacaugagcuau

SEQ ID NO: 1075310 - RNA, 19 nt, Artificial Sequence
  Description of Artificial Sequence: Synthetic oligonucleotide
  Sense strand starting at position 3436 of SEQ ID NO: 915378
uagcucauguuugaggaaa

SEQ ID NO: 1075311 - RNA, 19 nt, Artificial Sequence
  Description of Artificial Sequence: Synthetic oligonucleotide
  Antisense strand to SEQ ID NO: 1075310
uuuccucaaacaugagcua

SEQ ID NO: 1075312 - RNA, 19 nt, Artificial Sequence
  Description of Artificial Sequence: Synthetic oligonucleotide
  Sense strand starting at position 3457 of SEQ ID NO: 915378
gguaacagguucugaaaca

SEQ ID NO: 1075313 - RNA, 19 nt, Artificial Sequence
  Description of Artificial Sequence: Synthetic oligonucleotide
  Antisense strand to SEQ ID NO: 1075312
uguuucagaaccuguuacc

SEQ ID NO: 1075314 - RNA, 19 nt, Artificial Sequence
  Description of Artificial Sequence: Synthetic oligonucleotide
  Sense strand starting at position 3458 of SEQ ID NO: 915378
guaacagguucugaaacau

SEQ ID NO: 1075315 - RNA, 19 nt, Artificial Sequence
  Description of Artificial Sequence: Synthetic oligonucleotide
  Antisense strand to SEQ ID NO: 1075314
auguuucagaaccuguuac

SEQ ID NO: 1075316 - RNA, 19 nt, Artificial Sequence
  Description of Artificial Sequence: Synthetic oligonucleotide
  Sense strand starting at position 3464 of SEQ ID NO: 915378
gguucugaaacauggaguu

SEQ ID NO: 1075317 - RNA, 19 nt, Artificial Sequence
  Description of Artificial Sequence: Synthetic oligonucleotide
  Antisense strand to SEQ ID NO: 1075316
aacuccauguuucagaacc

SEQ ID NO: 1075318 - RNA, 19 nt, Artificial Sequence
  Description of Artificial Sequence: Synthetic oligonucleotide
  Sense strand starting at position 3476 of SEQ ID NO: 915378
uggaguuaucuccagggug

SEQ ID NO: 1075319 - RNA, 19 nt, Artificial Sequence
  Description of Artificial Sequence: Synthetic oligonucleotide
  Antisense strand to SEQ ID NO: 1075318
cacccuggagauaacucca

SEQ ID NO: 1075320 - RNA, 19 nt, Artificial Sequence
  Description of Artificial Sequence: Synthetic oligonucleotide
  Sense strand starting at position 3478 of SEQ ID NO: 915378
gaguuaucuccagggugaa

SEQ ID NO: 1075321 - RNA, 19 nt, Artificial Sequence
  Description of Artificial Sequence: Synthetic oligonucleotide
  Antisense strand to SEQ ID NO: 1075320
uucacccuggagauaacuc

SEQ ID NO: 1075322 - RNA, 19 nt, Artificial Sequence
  Description of Artificial Sequence: Synthetic oligonucleotide
  Sense strand starting at position 3479 of SEQ ID NO: 915378
aguuaucuccagggugaag

SEQ ID NO: 1075323 - RNA, 19 nt, Artificial Sequence
  Description of Artificial Sequence: Synthetic oligonucleotide
  Antisense strand to SEQ ID NO: 1075322
cuucacccuggagauaacu

SEQ ID NO: 1075324 - RNA, 19 nt, Artificial Sequence
  Description of Artificial Sequence: Synthetic oligonucleotide
  Sense strand starting at position 3620 of SEQ ID NO: 915378
uggugagaggaaugugagu

SEQ ID NO: 1075325 - RNA, 19 nt, Artificial Sequence
  Description of Artificial Sequence: Synthetic oligonucleotide
  Antisense strand to SEQ ID NO: 1075324
acucacauuccucucacca

SEQ ID NO: 1075326 - RNA, 19 nt, Artificial Sequence
  Description of Artificial Sequence: Synthetic oligonucleotide
  Sense strand starting at position 3622 of SEQ ID NO: 915378
gugagaggaaugugaguua

SEQ ID NO: 1075327 - RNA, 19 nt, Artificial Sequence
  Description of Artificial Sequence: Synthetic oligonucleotide
  Antisense strand to SEQ ID NO: 1075326
uaacucacauuccucucac

SEQ ID NO: 1075328 - RNA, 19 nt, Artificial Sequence
  Description of Artificial Sequence: Synthetic oligonucleotide
  Sense strand starting at position 3625 of SEQ ID NO: 915378
agaggaaugugaguuagcu

SEQ ID NO: 1075329 - RNA, 19 nt, Artificial Sequence
  Description of Artificial Sequence: Synthetic oligonucleotide
  Antisense strand to SEQ ID NO: 1075328
agcuaacucacauuccucu

SEQ ID NO: 1075330 - RNA, 19 nt, Artificial Sequence
  Description of Artificial Sequence: Synthetic oligonucleotide
  Sense strand starting at position 3629 of SEQ ID NO: 915378
gaaugugaguuagcugaac

SEQ ID NO: 1075331 - RNA, 19 nt, Artificial Sequence
  Description of Artificial Sequence: Synthetic oligonucleotide
  Antisense strand to SEQ ID NO: 1075330
guucagcuaacucacauuc

SEQ ID NO: 1075332 - RNA, 19 nt, Artificial Sequence
  Description of Artificial Sequence: Synthetic oligonucleotide
  Sense strand starting at position 3631 of SEQ ID NO: 915378
augugaguuagcugaacca

SEQ ID NO: 1075333 - RNA, 19 nt, Artificial Sequence
  Description of Artificial Sequence: Synthetic oligonucleotide
  Antisense strand to SEQ ID NO: 1075332
ugguucagcuaacucacau

SEQ ID NO: 1075334 - RNA, 19 nt, Artificial Sequence
  Description of Artificial Sequence: Synthetic oligonucleotide
  Sense strand starting at position 3742 of SEQ ID NO: 915378
cucauuacucuuugcugga

SEQ ID NO: 1075335 - RNA, 19 nt, Artificial Sequence
  Description of Artificial Sequence: Synthetic oligonucleotide
  Antisense strand to SEQ ID NO: 1075334
uccagcaaagaguaaugag

SEQ ID NO: 1075336 - RNA, 19 nt, Artificial Sequence
  Description of Artificial Sequence: Synthetic oligonucleotide
  Sense strand starting at position 3755 of SEQ ID NO: 915378
gcuggacucuuggaccauu

SEQ ID NO: 1075337 - RNA, 19 nt, Artificial Sequence
  Description of Artificial Sequence: Synthetic oligonucleotide
  Antisense strand to SEQ ID NO: 1075336
aaugguccaagaguccagc

SEQ ID NO: 1075338 - RNA, 19 nt, Artificial Sequence
  Description of Artificial Sequence: Synthetic oligonucleotide
  Sense strand starting at position 3821 of SEQ ID NO: 915378
cugguauuugcuuguucuu

SEQ ID NO: 1075339 - RNA, 19 nt, Artificial Sequence
  Description of Artificial Sequence: Synthetic oligonucleotide
  Antisense strand to SEQ ID NO: 1075338
aagaacaagcaaauaccag

SEQ ID NO: 1075340 - RNA, 19 nt, Artificial Sequence
  Description of Artificial Sequence: Synthetic oligonucleotide
  Sense strand starting at position 3823 of SEQ ID NO: 915378
gguauuugcuuguucuuga

SEQ ID NO: 1075341 - RNA, 19 nt, Artificial Sequence
  Description of Artificial Sequence: Synthetic oligonucleotide
  Antisense strand to SEQ ID NO: 1075340
ucaagaacaagcaaauacc

SEQ ID NO: 1075342 - RNA, 19 nt, Artificial Sequence
  Description of Artificial Sequence: Synthetic oligonucleotide
  Sense strand starting at position 3824 of SEQ ID NO: 915378
guauuugcuuguucuugau

SEQ ID NO: 1075343 - RNA, 19 nt, Artificial Sequence
  Description of Artificial Sequence: Synthetic oligonucleotide
  Antisense strand to SEQ ID NO: 1075342
aucaagaacaagcaaauac

SEQ ID NO: 1075344 - RNA, 19 nt, Artificial Sequence
  Description of Artificial Sequence: Synthetic oligonucleotide
  Sense strand starting at position 3830 of SEQ ID NO: 915378
gcuuguucuugauuucuuu

SEQ ID NO: 1075345 - RNA, 19 nt, Artificial Sequence
  Description of Artificial Sequence: Synthetic oligonucleotide
  Antisense strand to SEQ ID NO: 1075344
aaagaaaucaagaacaagc

SEQ ID NO: 1075346 - RNA, 19 nt, Artificial Sequence
  Description of Artificial Sequence: Synthetic oligonucleotide
  Sense strand starting at position 3936 of SEQ ID NO: 915378
ggaucaugccagugagaag

SEQ ID NO: 1075347 - RNA, 19 nt, Artificial Sequence
  Description of Artificial Sequence: Synthetic oligonucleotide
  Antisense strand to SEQ ID NO: 1075346
cuucucacuggcaugaucc

SEQ ID NO: 1075348 - RNA, 19 nt, Artificial Sequence
  Description of Artificial Sequence: Synthetic oligonucleotide
  Sense strand starting at position 3961 of SEQ ID NO: 915378
acaggaucuccuggaaucu

SEQ ID NO: 1075349 - RNA, 19 nt, Artificial Sequence
  Description of Artificial Sequence: Synthetic oligonucleotide
  Antisense strand to SEQ ID NO: 1075348
agauuccaggagauccugu

SEQ ID NO: 1075350 - RNA, 19 nt, Artificial Sequence
  Description of Artificial Sequence: Synthetic oligonucleotide
  Sense strand starting at position 71 of SEQ ID NO: 915379
uuaagagaguucccuuuga

SEQ ID NO: 1075351 - RNA, 19 nt, Artificial Sequence
  Description of Artificial Sequence: Synthetic oligonucleotide
  Antisense strand to SEQ ID NO: 1075350
ucaaagggaacucucuuaa

SEQ ID NO: 1075352 - RNA, 19 nt, Artificial Sequence
  Description of Artificial Sequence: Synthetic oligonucleotide
  Sense strand starting at position 75 of SEQ ID NO: 915379
gagaguucccuuugauaga

SEQ ID NO: 1075353 - RNA, 19 nt, Artificial Sequence
  Description of Artificial Sequence: Synthetic oligonucleotide
  Antisense strand to SEQ ID NO: 1075352
ucuaucaaagggaacucuc

SEQ ID NO: 1075354 - RNA, 19 nt, Artificial Sequence
  Description of Artificial Sequence: Synthetic oligonucleotide
  Sense strand starting at position 85 of SEQ ID NO: 915379
uuugauagagucuguuucu

SEQ ID NO: 1075355 - RNA, 19 nt, Artificial Sequence
  Description of Artificial Sequence: Synthetic oligonucleotide
  Antisense strand to SEQ ID NO: 1075354
agaaacagacucuaucaaa

SEQ ID NO: 1075356 - RNA, 19 nt, Artificial Sequence
  Description of Artificial Sequence: Synthetic oligonucleotide
  Sense strand starting at position 317 of SEQ ID NO: 915379
ccucuuuauuaugugacau

SEQ ID NO: 1075357 - RNA, 19 nt, Artificial Sequence
  Description of Artificial Sequence: Synthetic oligonucleotide
  Antisense strand to SEQ ID NO: 1075356
augucacauaauaaagagg

SEQ ID NO: 1075358 - RNA, 19 nt, Artificial Sequence
  Description of Artificial Sequence: Synthetic oligonucleotide
  Sense strand starting at position 341 of SEQ ID NO: 915379
ucugaaggcuacuuaaaga

SEQ ID NO: 1075359 - RNA, 19 nt, Artificial Sequence
  Description of Artificial Sequence: Synthetic oligonucleotide
  Antisense strand to SEQ ID NO: 1075358
ucuuuaaguagccuucaga

SEQ ID NO: 1075360 - RNA, 19 nt, Artificial Sequence
  Description of Artificial Sequence: Synthetic oligonucleotide
  Sense strand starting at position 374 of SEQ ID NO: 915379
agagaagcuguauaccuua

SEQ ID NO: 1075361 - RNA, 19 nt, Artificial Sequence
  Description of Artificial Sequence: Synthetic oligonucleotide
  Antisense strand to SEQ ID NO: 1075360
uaagguauacagcuucucu

SEQ ID NO: 1075362 - RNA, 19 nt, Artificial Sequence
  Description of Artificial Sequence: Synthetic oligonucleotide
  Sense strand starting at position 379 of SEQ ID NO: 915379
agcuguauaccuuaucuau

SEQ ID NO: 1075363 - RNA, 19 nt, Artificial Sequence
  Description of Artificial Sequence: Synthetic oligonucleotide
  Antisense strand to SEQ ID NO: 1075362
auagauaagguauacagcu

SEQ ID NO: 1075364 - RNA, 19 nt, Artificial Sequence
  Description of Artificial Sequence: Synthetic oligonucleotide
  Sense strand starting at position 428 of SEQ ID NO: 915379
cacaaauguuuaccgagau

SEQ ID NO: 1075365 - RNA, 19 nt, Artificial Sequence
  Description of Artificial Sequence: Synthetic oligonucleotide
  Antisense strand to SEQ ID NO: 1075364
aucucgguaaacauuugug

SEQ ID NO: 1075366 - RNA, 19 nt, Artificial Sequence
  Description of Artificial Sequence: Synthetic oligonucleotide
  Sense strand starting at position 432 of SEQ ID NO: 915379
aauguuuaccgagauaggu

SEQ ID NO: 1075367 - RNA, 19 nt, Artificial Sequence
  Description of Artificial Sequence: Synthetic oligonucleotide
  Antisense strand to SEQ ID NO: 1075366
accuaucucgguaaacauu

SEQ ID NO: 1075368 - RNA, 19 nt, Artificial Sequence
  Description of Artificial Sequence: Synthetic oligonucleotide
  Sense strand starting at position 434 of SEQ ID NO: 915379
uguuuaccgagauagguua

SEQ ID NO: 1075369 - RNA, 19 nt, Artificial Sequence
  Description of Artificial Sequence: Synthetic oligonucleotide
  Antisense strand to SEQ ID NO: 1075368
uaaccuaucucgguaaaca

SEQ ID NO: 1075370 - RNA, 19 nt, Artificial Sequence
  Description of Artificial Sequence: Synthetic oligonucleotide
  Sense strand starting at position 442 of SEQ ID NO: 915379
gagauagguuaugucgacu

SEQ ID NO: 1075371 - RNA, 19 nt, Artificial Sequence
  Description of Artificial Sequence: Synthetic oligonucleotide
  Antisense strand to SEQ ID NO: 1075370
agucgacauaaccuaucuc

SEQ ID NO: 1075372 - RNA, 19 nt, Artificial Sequence
  Description of Artificial Sequence: Synthetic oligonucleotide
  Sense strand starting at position 445 of SEQ ID NO: 915379
auagguuaugucgacuauu

SEQ ID NO: 1075373 - RNA, 19 nt, Artificial Sequence
  Description of Artificial Sequence: Synthetic oligonucleotide
  Antisense strand to SEQ ID NO: 1075372
aauagucgacauaaccuau

SEQ ID NO: 1075374 - RNA, 19 nt, Artificial Sequence
  Description of Artificial Sequence: Synthetic oligonucleotide
  Sense strand starting at position 727 of SEQ ID NO: 915379
gcaagaaugugaguuugga

SEQ ID NO: 1075375 - RNA, 19 nt, Artificial Sequence
  Description of Artificial Sequence: Synthetic oligonucleotide
  Antisense strand to SEQ ID NO: 1075374
uccaaacucacauucuugc

SEQ ID NO: 1075376 - RNA, 19 nt, Artificial Sequence
  Description of Artificial Sequence: Synthetic oligonucleotide
  Sense strand starting at position 830 of SEQ ID NO: 915379
aggugaacuuccuucuuag

SEQ ID NO: 1075377 - RNA, 19 nt, Artificial Sequence
  Description of Artificial Sequence: Synthetic oligonucleotide
  Antisense strand to SEQ ID NO: 1075376
cuaagaaggaaguucaccu

SEQ ID NO: 1075378 - RNA, 19 nt, Artificial Sequence
  Description of Artificial Sequence: Synthetic oligonucleotide
  Sense strand starting at position 841 of SEQ ID NO: 915379
cuucuuagacuauggaaac

SEQ ID NO: 1075379 - RNA, 19 nt, Artificial Sequence
  Description of Artificial Sequence: Synthetic oligonucleotide
  Antisense strand to SEQ ID NO: 1075378
guuuccauagucuaagaag

SEQ ID NO: 1075380 - RNA, 19 nt, Artificial Sequence
  Description of Artificial Sequence: Synthetic oligonucleotide
  Sense strand starting at position 888 of SEQ ID NO: 915379
ugagaagcucuguacuggu

SEQ ID NO: 1075381 - RNA, 19 nt, Artificial Sequence
  Description of Artificial Sequence: Synthetic oligonucleotide
  Antisense strand to SEQ ID NO: 1075380
accaguacagagcuucuca

SEQ ID NO: 1075382 - RNA, 19 nt, Artificial Sequence
  Description of Artificial Sequence: Synthetic oligonucleotide
  Sense strand starting at position 895 of SEQ ID NO: 915379
cucuguacuggucaaagaa

SEQ ID NO: 1075383 - RNA, 19 nt, Artificial Sequence
  Description of Artificial Sequence: Synthetic oligonucleotide
  Antisense strand to SEQ ID NO: 1075382
uucuuugaccaguacagag

SEQ ID NO: 1075384 - RNA, 19 nt, Artificial Sequence
  Description of Artificial Sequence: Synthetic oligonucleotide
  Sense strand starting at position 909 of SEQ ID NO: 915379
aagaauuagcaugguaaag

SEQ ID NO: 1075385 - RNA, 19 nt, Artificial Sequence
  Description of Artificial Sequence: Synthetic oligonucleotide
  Antisense strand to SEQ ID NO: 1075384
cuuuaccaugcuaauucuu

SEQ ID NO: 1075386 - RNA, 19 nt, Artificial Sequence
  Description of Artificial Sequence: Synthetic oligonucleotide
  Sense strand starting at position 931 of SEQ ID NO: 915379
gaaggcuccguagggauua

SEQ ID NO: 1075387 - RNA, 19 nt, Artificial Sequence
  Description of Artificial Sequence: Synthetic oligonucleotide
  Antisense strand to SEQ ID NO: 1075386
uaaucccuacggagccuuc

SEQ ID NO: 1075388 - RNA, 19 nt, Artificial Sequence
  Description of Artificial Sequence: Synthetic oligonucleotide
  Sense strand starting at position 961 of SEQ ID NO: 915379
guggcugccaaauauguua

SEQ ID NO: 1075389 - RNA, 19 nt, Artificial Sequence
  Description of Artificial Sequence: Synthetic oligonucleotide
  Antisense strand to SEQ ID NO: 1075388
uaacauauuuggcagccac

SEQ ID NO: 1075390 - RNA, 19 nt, Artificial Sequence
  Description of Artificial Sequence: Synthetic oligonucleotide
  Sense strand starting at position 968 of SEQ ID NO: 915379
ccaaauauguuacucguua

SEQ ID NO: 1075391 - RNA, 19 nt, Artificial Sequence
  Description of Artificial Sequence: Synthetic oligonucleotide
  Antisense strand to SEQ ID NO: 1075390
uaacgaguaacauauuugg

SEQ ID NO: 1075392 - RNA, 19 nt, Artificial Sequence
  Description of Artificial Sequence: Synthetic oligonucleotide
  Sense strand starting at position 969 of SEQ ID NO: 915379
caaauauguuacucguuag

SEQ ID NO: 1075393 - RNA, 19 nt, Artificial Sequence
  Description of Artificial Sequence: Synthetic oligonucleotide
  Antisense strand to SEQ ID NO: 1075392
cuaacgaguaacauauuug

SEQ ID NO: 1075394 - RNA, 19 nt, Artificial Sequence
  Description of Artificial Sequence: Synthetic oligonucleotide
  Sense strand starting at position 987 of SEQ ID NO: 915379
guaguaacucguuaguaac

SEQ ID NO: 1075395 - RNA, 19 nt, Artificial Sequence
  Description of Artificial Sequence: Synthetic oligonucleotide
  Antisense strand to SEQ ID NO: 1075394
guuacuaacgaguuacuac

SEQ ID NO: 1075396 - RNA, 19 nt, Artificial Sequence
  Description of Artificial Sequence: Synthetic oligonucleotide
  Sense strand starting at position 1019 of SEQ ID NO: 915379
ccgaucuuguccucauaaa

SEQ ID NO: 1075397 - RNA, 19 nt, Artificial Sequence
  Description of Artificial Sequence: Synthetic oligonucleotide
  Antisense strand to SEQ ID NO: 1075396
uuuaugaggacaagaucgg

SEQ ID NO: 1075398 - RNA, 19 nt, Artificial Sequence
  Description of Artificial Sequence: Synthetic oligonucleotide
  Sense strand starting at position 1073 of SEQ ID NO: 915379
aggauucaggugcagaguu

SEQ ID NO: 1075399 - RNA, 19 nt, Artificial Sequence
  Description of Artificial Sequence: Synthetic oligonucleotide
  Antisense strand to SEQ ID NO: 1075398
aacucugcaccugaauccu

SEQ ID NO: 1075400 - RNA, 19 nt, Artificial Sequence
  Description of Artificial Sequence: Synthetic oligonucleotide
  Sense strand starting at position 2079 of SEQ ID NO: 915379
gcugaugacgguuaauguu

SEQ ID NO: 1075401 - RNA, 19 nt, Artificial Sequence
  Description of Artificial Sequence: Synthetic oligonucleotide
  Antisense strand to SEQ ID NO: 1075400
aacauuaaccgucaucagc

SEQ ID NO: 1075402 - RNA, 19 nt, Artificial Sequence
  Description of Artificial Sequence: Synthetic oligonucleotide
  Sense strand starting at position 2406 of SEQ ID NO: 915379
gggacagauaggugucaaa

SEQ ID NO: 1075403 - RNA, 19 nt, Artificial Sequence
  Description of Artificial Sequence: Synthetic oligonucleotide
  Antisense strand to SEQ ID NO: 1075402
uuugacaccuaucuguccc

SEQ ID NO: 1075404 - RNA, 19 nt, Artificial Sequence
  Description of Artificial Sequence: Synthetic oligonucleotide
  Sense strand starting at position 2441 of SEQ ID NO: 915379
uuaaucuuugguuaaguga

SEQ ID NO: 1075405 - RNA, 19 nt, Artificial Sequence
  Description of Artificial Sequence: Synthetic oligonucleotide
  Antisense strand to SEQ ID NO: 1075404
ucacuuaaccaaagauuaa

SEQ ID NO: 1075406 - RNA, 19 nt, Artificial Sequence
  Description of Artificial Sequence: Synthetic oligonucleotide
  Sense strand starting at position 2444 of SEQ ID NO: 915379
aucuuugguuaagugagaa

SEQ ID NO: 1075407 - RNA, 19 nt, Artificial Sequence
  Description of Artificial Sequence: Synthetic oligonucleotide
  Antisense strand to SEQ ID NO: 1075406
uucucacuuaaccaaagau

SEQ ID NO: 1075408 - RNA, 19 nt, Artificial Sequence
  Description of Artificial Sequence: Synthetic oligonucleotide
  Sense strand starting at position 2951 of SEQ ID NO: 915379
cauguaaagugcucagaca

SEQ ID NO: 1075409 - RNA, 19 nt, Artificial Sequence
  Description of Artificial Sequence: Synthetic oligonucleotide
  Antisense strand to SEQ ID NO: 1075408
ugucugagcacuuuacaug

SEQ ID NO: 1075410 - RNA, 19 nt, Artificial Sequence
  Description of Artificial Sequence: Synthetic oligonucleotide
  Sense strand starting at position 2952 of SEQ ID NO: 915379
auguaaagugcucagacau

SEQ ID NO: 1075411 - RNA, 19 nt, Artificial Sequence
  Description of Artificial Sequence: Synthetic oligonucleotide
  Antisense strand to SEQ ID NO: 1075410
augucugagcacuuuacau

SEQ ID NO: 1075412 - RNA, 19 nt, Artificial Sequence
  Description of Artificial Sequence: Synthetic oligonucleotide
  Sense strand starting at position 2994 of SEQ ID NO: 915379
gcucucagauguguugaga

SEQ ID NO: 1075413 - RNA, 19 nt, Artificial Sequence
  Description of Artificial Sequence: Synthetic oligonucleotide
  Antisense strand to SEQ ID NO: 1075412
ucucaacacaucugagagc

SEQ ID NO: 1075414 - RNA, 19 nt, Artificial Sequence
  Description of Artificial Sequence: Synthetic oligonucleotide
  Sense strand starting at position 3385 of SEQ ID NO: 915379
ggcccagaauucuugcuua

SEQ ID NO: 1075415 - RNA, 19 nt, Artificial Sequence
  Description of Artificial Sequence: Synthetic oligonucleotide
  Antisense strand to SEQ ID NO: 1075414
uaagcaagaauucugggcc

SEQ ID NO: 1075416 - RNA, 19 nt, Artificial Sequence
  Description of Artificial Sequence: Synthetic oligonucleotide
  Sense strand starting at position 3388 of SEQ ID NO: 915379
ccagaauucuugcuuagga

SEQ ID NO: 1075417 - RNA, 19 nt, Artificial Sequence
  Description of Artificial Sequence: Synthetic oligonucleotide
  Antisense strand to SEQ ID NO: 1075416
uccuaagcaagaauucugg

SEQ ID NO: 1075418 - RNA, 19 nt, Artificial Sequence
  Description of Artificial Sequence: Synthetic oligonucleotide
  Sense strand starting at position 3389 of SEQ ID NO: 915379
cagaauucuugcuuaggag

SEQ ID NO: 1075419 - RNA, 19 nt, Artificial Sequence
  Description of Artificial Sequence: Synthetic oligonucleotide
  Antisense strand to SEQ ID NO: 1075418
cuccuaagcaagaauucug

SEQ ID NO: 1075420 - RNA, 19 nt, Artificial Sequence
  Description of Artificial Sequence: Synthetic oligonucleotide
  Sense strand starting at position 3417 of SEQ ID NO: 915379
caggcucuagcagaguuua

SEQ ID NO: 1075421 - RNA, 19 nt, Artificial Sequence
  Description of Artificial Sequence: Synthetic oligonucleotide
  Antisense strand to SEQ ID NO: 1075420
uaaacucugcuagagccug

SEQ ID NO: 1075422 - RNA, 19 nt, Artificial Sequence
  Description of Artificial Sequence: Synthetic oligonucleotide
  Sense strand starting at position 3422 of SEQ ID NO: 915379
ucuagcagaguuuaucuaa

SEQ ID NO: 1075423 - RNA, 19 nt, Artificial Sequence
  Description of Artificial Sequence: Synthetic oligonucleotide
  Antisense strand to SEQ ID NO: 1075422
uuagauaaacucugcuaga

SEQ ID NO: 1075424 - RNA, 19 nt, Artificial Sequence
  Description of Artificial Sequence: Synthetic oligonucleotide
  Sense strand starting at position 3429 of SEQ ID NO: 915379
gaguuuaucuaauuggccu

SEQ ID NO: 1075425 - RNA, 19 nt, Artificial Sequence
  Description of Artificial Sequence: Synthetic oligonucleotide
  Antisense strand to SEQ ID NO: 1075424
aggccaauuagauaaacuc

SEQ ID NO: 1075426 - RNA, 19 nt, Artificial Sequence
  Description of Artificial Sequence: Synthetic oligonucleotide
  Sense strand starting at position 3522 of SEQ ID NO: 915379
acugcuaaucauugaaugu

SEQ ID NO: 1075427 - RNA, 19 nt, Artificial Sequence
  Description of Artificial Sequence: Synthetic oligonucleotide
  Antisense strand to SEQ ID NO: 1075426
acauucaaugauuagcagu

SEQ ID NO: 1075428 - RNA, 19 nt, Artificial Sequence
  Description of Artificial Sequence: Synthetic oligonucleotide
  Sense strand starting at position 3765 of SEQ ID NO: 915379
uggccuggcccauaguauu

SEQ ID NO: 1075429 - RNA, 19 nt, Artificial Sequence
  Description of Artificial Sequence: Synthetic oligonucleotide
  Antisense strand to SEQ ID NO: 1075428
aauacuaugggccaggcca

SEQ ID NO: 1075430 - RNA, 19 nt, Artificial Sequence
  Description of Artificial Sequence: Synthetic oligonucleotide
  Sense strand starting at position 16 of SEQ ID NO: 915380
gugggaaacacuuauguuu

SEQ ID NO: 1075431 - RNA, 19 nt, Artificial Sequence
  Description of Artificial Sequence: Synthetic oligonucleotide
  Antisense strand to SEQ ID NO: 1075430
aaacauaaguguuucccac

SEQ ID NO: 1075432 - RNA, 19 nt, Artificial Sequence
  Description of Artificial Sequence: Synthetic oligonucleotide
  Sense strand starting at position 383 of SEQ ID NO: 915380
cagucaacugauuagcgua

SEQ ID NO: 1075433 - RNA, 19 nt, Artificial Sequence
  Description of Artificial Sequence: Synthetic oligonucleotide
  Antisense strand to SEQ ID NO: 1075432
uacgcuaaucaguugacug

SEQ ID NO: 1075434 - RNA, 19 nt, Artificial Sequence
  Description of Artificial Sequence: Synthetic oligonucleotide
  Sense strand starting at position 388 of SEQ ID NO: 915380
aacugauuagcguacagac

SEQ ID NO: 1075435 - RNA, 19 nt, Artificial Sequence
  Description of Artificial Sequence: Synthetic oligonucleotide
  Antisense strand to SEQ ID NO: 1075434
gucuguacgcuaaucaguu

SEQ ID NO: 1075436 - RNA, 19 nt, Artificial Sequence
  Description of Artificial Sequence: Synthetic oligonucleotide
  Sense strand starting at position 437 of SEQ ID NO: 915380
aguggcaaucgcuacaaua

SEQ ID NO: 1075437 - RNA, 19 nt, Artificial Sequence
  Description of Artificial Sequence: Synthetic oligonucleotide
  Antisense strand to SEQ ID NO: 1075436
uauuguagcgauugccacu

SEQ ID NO: 1075438 - RNA, 19 nt, Artificial Sequence
  Description of Artificial Sequence: Synthetic oligonucleotide
  Sense strand starting at position 439 of SEQ ID NO: 915380
uggcaaucgcuacaauaaa

SEQ ID NO: 1075439 - RNA, 19 nt, Artificial Sequence
  Description of Artificial Sequence: Synthetic oligonucleotide
  Antisense strand to SEQ ID NO: 1075438
uuuauuguagcgauugcca

SEQ ID NO: 1075440 - RNA, 19 nt, Artificial Sequence
  Description of Artificial Sequence: Synthetic oligonucleotide
  Sense strand starting at position 479 of SEQ ID NO: 915380
ggcacauuugcauggcaca

SEQ ID NO: 1075441 - RNA, 19 nt, Artificial Sequence
  Description of Artificial Sequence: Synthetic oligonucleotide
  Antisense strand to SEQ ID NO: 1075440
ugugccaugcaaaugugcc

SEQ ID NO: 1075442 - RNA, 19 nt, Artificial Sequence
  Description of Artificial Sequence: Synthetic oligonucleotide
  Sense strand starting at position 480 of SEQ ID NO: 915380
gcacauuugcauggcacau

SEQ ID NO: 1075443 - RNA, 19 nt, Artificial Sequence
  Description of Artificial Sequence: Synthetic oligonucleotide
  Antisense strand to SEQ ID NO: 1075442
augugccaugcaaaugugc

SEQ ID NO: 1075444 - RNA, 19 nt, Artificial Sequence
  Description of Artificial Sequence: Synthetic oligonucleotide
  Sense strand starting at position 492 of SEQ ID NO: 915380
ggcacauuucuaugugcca

SEQ ID NO: 1075445 - RNA, 19 nt, Artificial Sequence
  Description of Artificial Sequence: Synthetic oligonucleotide
  Antisense strand to SEQ ID NO: 1075444
uggcacauagaaaugugcc

SEQ ID NO: 1075446 - RNA, 19 nt, Artificial Sequence
  Description of Artificial Sequence: Synthetic oligonucleotide
  Sense strand starting at position 493 of SEQ ID NO: 915380
gcacauuucuaugugccaa

SEQ ID NO: 1075447 - RNA, 19 nt, Artificial Sequence
  Description of Artificial Sequence: Synthetic oligonucleotide
  Antisense strand to SEQ ID NO: 1075446
uuggcacauagaaaugugc

SEQ ID NO: 1075448 - RNA, 19 nt, Artificial Sequence
  Description of Artificial Sequence: Synthetic oligonucleotide
  Sense strand starting at position 512 of SEQ ID NO: 915380
gcacaauucuaggcauaca

SEQ ID NO: 1075449 - RNA, 19 nt, Artificial Sequence
  Description of Artificial Sequence: Synthetic oligonucleotide
  Antisense strand to SEQ ID NO: 1075448
uguaugccuagaauugugc

SEQ ID NO: 1075450 - RNA, 19 nt, Artificial Sequence
  Description of Artificial Sequence: Synthetic oligonucleotide
  Sense strand starting at position 557 of SEQ ID NO: 915380
ccgcaauagagguaucauu

SEQ ID NO: 1075451 - RNA, 19 nt, Artificial Sequence
  Description of Artificial Sequence: Synthetic oligonucleotide
  Antisense strand to SEQ ID NO: 1075450
aaugauaccucuauugcgg

SEQ ID NO: 1075452 - RNA, 19 nt, Artificial Sequence
  Description of Artificial Sequence: Synthetic oligonucleotide
  Sense strand starting at position 661 of SEQ ID NO: 915380
cagggcacucgguaaacau

SEQ ID NO: 1075453 - RNA, 19 nt, Artificial Sequence
  Description of Artificial Sequence: Synthetic oligonucleotide
  Antisense strand to SEQ ID NO: 1075452
auguuuaccgagugcccug

SEQ ID NO: 1075454 - RNA, 19 nt, Artificial Sequence
  Description of Artificial Sequence: Synthetic oligonucleotide
  Sense strand starting at position 733 of SEQ ID NO: 915380
gagcuucccgaagauugga

SEQ ID NO: 1075455 - RNA, 19 nt, Artificial Sequence
  Description of Artificial Sequence: Synthetic oligonucleotide
  Antisense strand to SEQ ID NO: 1075454
uccaaucuucgggaagcuc

SEQ ID NO: 1075456 - RNA, 19 nt, Artificial Sequence
  Description of Artificial Sequence: Synthetic oligonucleotide
  Sense strand starting at position 772 of SEQ ID NO: 915380
guacuuugcgagcuguaau

SEQ ID NO: 1075457 - RNA, 19 nt, Artificial Sequence
  Description of Artificial Sequence: Synthetic oligonucleotide
  Antisense strand to SEQ ID NO: 1075456
auuacagcucgcaaaguac

SEQ ID NO: 1075458 - RNA, 19 nt, Artificial Sequence
  Description of Artificial Sequence: Synthetic oligonucleotide
  Sense strand starting at position 839 of SEQ ID NO: 915380
cccucuuuggaucaaugua

SEQ ID NO: 1075459 - RNA, 19 nt, Artificial Sequence
  Description of Artificial Sequence: Synthetic oligonucleotide
  Antisense strand to SEQ ID NO: 1075458
uacauugauccaaagaggg

SEQ ID NO: 1075460 - RNA, 19 nt, Artificial Sequence
  Description of Artificial Sequence: Synthetic oligonucleotide
  Sense strand starting at position 899 of SEQ ID NO: 915380
ggaaacgaguaaucugaug

SEQ ID NO: 1075461 - RNA, 19 nt, Artificial Sequence
  Description of Artificial Sequence: Synthetic oligonucleotide
  Antisense strand to SEQ ID NO: 1075460
caucagauuacucguuucc

SEQ ID NO: 1075462 - RNA, 19 nt, Artificial Sequence
  Description of Artificial Sequence: Synthetic oligonucleotide
  Sense strand starting at position 941 of SEQ ID NO: 915380
augucuguacgucaugaua

SEQ ID NO: 1075463 - RNA, 19 nt, Artificial Sequence
  Description of Artificial Sequence: Synthetic oligonucleotide
  Antisense strand to SEQ ID NO: 1075462
uaucaugacguacagacau

SEQ ID NO: 1075464 - RNA, 19 nt, Artificial Sequence
  Description of Artificial Sequence: Synthetic oligonucleotide
  Sense strand starting at position 1176 of SEQ ID NO: 915380
cuuggaagcgcguuguaaa

SEQ ID NO: 1075465 - RNA, 19 nt, Artificial Sequence
  Description of Artificial Sequence: Synthetic oligonucleotide
  Antisense strand to SEQ ID NO: 1075464
uuuacaacgcgcuuccaag

SEQ ID NO: 1075466 - RNA, 19 nt, Artificial Sequence
  Description of Artificial Sequence: Synthetic oligonucleotide
  Sense strand starting at position 1441 of SEQ ID NO: 915380
uggacaagaccucgaguuu

SEQ ID NO: 1075467 - RNA, 19 nt, Artificial Sequence
  Description of Artificial Sequence: Synthetic oligonucleotide
  Antisense strand to SEQ ID NO: 1075466
aaacucgaggucuugucca

SEQ ID NO: 1075468 - RNA, 19 nt, Artificial Sequence
  Description of Artificial Sequence: Synthetic oligonucleotide
  Sense strand starting at position 1543 of SEQ ID NO: 915380
gccucaguaaugucugcga

SEQ ID NO: 1075469 - RNA, 19 nt, Artificial Sequence
  Description of Artificial Sequence: Synthetic oligonucleotide
  Antisense strand to SEQ ID NO: 1075468
ucgcagacauuacugaggc

SEQ ID NO: 1075470 - RNA, 19 nt, Artificial Sequence
  Description of Artificial Sequence: Synthetic oligonucleotide
  Sense strand starting at position 1996 of SEQ ID NO: 915380
ugcccuuucccagaaugca

SEQ ID NO: 1075471 - RNA, 19 nt, Artificial Sequence
  Description of Artificial Sequence: Synthetic oligonucleotide
  Antisense strand to SEQ ID NO: 1075470
ugcauucugggaaagggca

SEQ ID NO: 1075472 - RNA, 19 nt, Artificial Sequence
  Description of Artificial Sequence: Synthetic oligonucleotide
  Sense strand starting at position 2036 of SEQ ID NO: 915380
cacgaacacucgguuauuu

SEQ ID NO: 1075473 - RNA, 19 nt, Artificial Sequence
  Description of Artificial Sequence: Synthetic oligonucleotide
  Antisense strand to SEQ ID NO: 1075472
aaauaaccgaguguucgug

SEQ ID NO: 1075474 - RNA, 19 nt, Artificial Sequence
  Description of Artificial Sequence: Synthetic oligonucleotide
  Sense strand starting at position 2280 of SEQ ID NO: 915380
ucgggucugcguagacaga

SEQ ID NO: 1075475 - RNA, 19 nt, Artificial Sequence
  Description of Artificial Sequence: Synthetic oligonucleotide
  Antisense strand to SEQ ID NO: 1075474
ucugucuacgcagacccga

SEQ ID NO: 1075476 - RNA, 19 nt, Artificial Sequence
  Description of Artificial Sequence: Synthetic oligonucleotide
  Sense strand starting at position 2333 of SEQ ID NO: 915380
cgggcuacccuuuaagaga

SEQ ID NO: 1075477 - RNA, 19 nt, Artificial Sequence
  Description of Artificial Sequence: Synthetic oligonucleotide
  Antisense strand to SEQ ID NO: 1075476
ucucuuaaaggguagcccg

SEQ ID NO: 1075478 - RNA, 19 nt, Artificial Sequence
  Description of Artificial Sequence: Synthetic oligonucleotide
  Sense strand starting at position 2443 of SEQ ID NO: 915380
accauuucgcucugugauu

SEQ ID NO: 1075479 - RNA, 19 nt, Artificial Sequence
  Description of Artificial Sequence: Synthetic oligonucleotide
  Antisense strand to SEQ ID NO: 1075478
aaucacagagcgaaauggu

SEQ ID NO: 1075480 - RNA, 19 nt, Artificial Sequence
  Description of Artificial Sequence: Synthetic oligonucleotide
  Sense strand starting at position 2606 of SEQ ID NO: 915380
agcaaucauggcuaucaca

SEQ ID NO: 1075481 - RNA, 19 nt, Artificial Sequence
  Description of Artificial Sequence: Synthetic oligonucleotide
  Antisense strand to SEQ ID NO: 1075480
ugugauagccaugauugcu

SEQ ID NO: 1075482 - RNA, 19 nt, Artificial Sequence
  Description of Artificial Sequence: Synthetic oligonucleotide
  Sense strand starting at position 2711 of SEQ ID NO: 915380
ugggcagugccucauacua

SEQ ID NO: 1075483 - RNA, 19 nt, Artificial Sequence
  Description of Artificial Sequence: Synthetic oligonucleotide
  Antisense strand to SEQ ID NO: 1075482
uaguaugaggcacugccca

SEQ ID NO: 1075484 - RNA, 19 nt, Artificial Sequence
  Description of Artificial Sequence: Synthetic oligonucleotide
  Sense strand starting at position 2734 of SEQ ID NO: 915380
auauaaugguuguuccaau

SEQ ID NO: 1075485 - RNA, 19 nt, Artificial Sequence
  Description of Artificial Sequence: Synthetic oligonucleotide
  Antisense strand to SEQ ID NO: 1075484
auuggaacaaccauuauau

SEQ ID NO: 1075486 - RNA, 19 nt, Artificial Sequence
  Description of Artificial Sequence: Synthetic oligonucleotide
  Sense strand starting at position 2735 of SEQ ID NO: 915380
uauaaugguuguuccaaug

SEQ ID NO: 1075487 - RNA, 19 nt, Artificial Sequence
  Description of Artificial Sequence: Synthetic oligonucleotide
  Antisense strand to SEQ ID NO: 1075486
cauuggaacaaccauuaua

SEQ ID NO: 1075488 - RNA, 19 nt, Artificial Sequence
  Description of Artificial Sequence: Synthetic oligonucleotide
  Sense strand starting at position 2741 of SEQ ID NO: 915380
gguuguuccaaugagcuga

SEQ ID NO: 1075489 - RNA, 19 nt, Artificial Sequence
  Description of Artificial Sequence: Synthetic oligonucleotide
  Antisense strand to SEQ ID NO: 1075488
ucagcucauuggaacaacc

SEQ ID NO: 1075490 - RNA, 19 nt, Artificial Sequence
  Description of Artificial Sequence: Synthetic oligonucleotide
  Sense strand starting at position 2822 of SEQ ID NO: 915380
gcggauuggucauuuggua

SEQ ID NO: 1075491 - RNA, 19 nt, Artificial Sequence
  Description of Artificial Sequence: Synthetic oligonucleotide
  Antisense strand to SEQ ID NO: 1075490
uaccaaaugaccaauccgc

SEQ ID NO: 1075492 - RNA, 19 nt, Artificial Sequence
  Description of Artificial Sequence: Synthetic oligonucleotide
  Sense strand starting at position 2899 of SEQ ID NO: 915380
aaacuugccuguuugggaa

SEQ ID NO: 1075493 - RNA, 19 nt, Artificial Sequence
  Description of Artificial Sequence: Synthetic oligonucleotide
  Antisense strand to SEQ ID NO: 1075492
uucccaaacaggcaaguuu

SEQ ID NO: 1075494 - RNA, 19 nt, Artificial Sequence
  Description of Artificial Sequence: Synthetic oligonucleotide
  Sense strand starting at position 3150 of SEQ ID NO: 915380
ucagauaguguaugauucu

SEQ ID NO: 1075495 - RNA, 19 nt, Artificial Sequence
  Description of Artificial Sequence: Synthetic oligonucleotide
  Antisense strand to SEQ ID NO: 1075494
agaaucauacacuaucuga

SEQ ID NO: 1075496 - RNA, 19 nt, Artificial Sequence
  Description of Artificial Sequence: Synthetic oligonucleotide
  Sense strand starting at position 3159 of SEQ ID NO: 915380
guaugauucuuuguggaua

SEQ ID NO: 1075497 - RNA, 19 nt, Artificial Sequence
  Description of Artificial Sequence: Synthetic oligonucleotide
  Antisense strand to SEQ ID NO: 1075496
uauccacaaagaaucauac

SEQ ID NO: 1075498 - RNA, 19 nt, Artificial Sequence
  Description of Artificial Sequence: Synthetic oligonucleotide
  Sense strand starting at position 3162 of SEQ ID NO: 915380
ugauucuuuguggauaucu

SEQ ID NO: 1075499 - RNA, 19 nt, Artificial Sequence
  Description of Artificial Sequence: Synthetic oligonucleotide
  Antisense strand to SEQ ID NO: 1075498
agauauccacaaagaauca

SEQ ID NO: 1075500 - RNA, 19 nt, Artificial Sequence
  Description of Artificial Sequence: Synthetic oligonucleotide
  Sense strand starting at position 3218 of SEQ ID NO: 915380
ugguguggacuguaaggua

SEQ ID NO: 1075501 - RNA, 19 nt, Artificial Sequence
  Description of Artificial Sequence: Synthetic oligonucleotide
  Antisense strand to SEQ ID NO: 1075500
uaccuuacaguccacacca

SEQ ID NO: 1075502 - RNA, 19 nt, Artificial Sequence
  Description of Artificial Sequence: Synthetic oligonucleotide
  Sense strand starting at position 3462 of SEQ ID NO: 915380
ggugauuggcaguaugaac

SEQ ID NO: 1075503 - RNA, 19 nt, Artificial Sequence
  Description of Artificial Sequence: Synthetic oligonucleotide
  Antisense strand to SEQ ID NO: 1075502
guucauacugccaaucacc

SEQ ID NO: 1075504 - RNA, 19 nt, Artificial Sequence
  Description of Artificial Sequence: Synthetic oligonucleotide
  Sense strand starting at position 3678 of SEQ ID NO: 915380
agugauccacuuugaacga

SEQ ID NO: 1075505 - RNA, 19 nt, Artificial Sequence
  Description of Artificial Sequence: Synthetic oligonucleotide
  Antisense strand to SEQ ID NO: 1075504
ucguucaaaguggaucacu

SEQ ID NO: 1075506 - RNA, 19 nt, Artificial Sequence
  Description of Artificial Sequence: Synthetic oligonucleotide
  Sense strand starting at position 3682 of SEQ ID NO: 915380
auccacuuugaacgaaaua

SEQ ID NO: 1075507 - RNA, 19 nt, Artificial Sequence
  Description of Artificial Sequence: Synthetic oligonucleotide
  Antisense strand to SEQ ID NO: 1075506
uauuucguucaaaguggau

SEQ ID NO: 1075508 - RNA, 19 nt, Artificial Sequence
  Description of Artificial Sequence: Synthetic oligonucleotide
  Sense strand starting at position 3902 of SEQ ID NO: 915380
uaguaagugcuaugaauac

SEQ ID NO: 1075509 - RNA, 19 nt, Artificial Sequence
  Description of Artificial Sequence: Synthetic oligonucleotide
  Antisense strand to SEQ ID NO: 1075508
guauucauagcacuuacua

SEQ ID NO: 1075510 - RNA, 19 nt, Artificial Sequence
  Description of Artificial Sequence: Synthetic oligonucleotide
  Sense strand starting at position 38 of SEQ ID NO: 915381
cuuagaugccagggaacua

SEQ ID NO: 1075511 - RNA, 19 nt, Artificial Sequence
  Description of Artificial Sequence: Synthetic oligonucleotide
  Antisense strand to SEQ ID NO: 1075510
uaguucccuggcaucuaag

SEQ ID NO: 1075512 - RNA, 19 nt, Artificial Sequence
  Description of Artificial Sequence: Synthetic oligonucleotide
  Sense strand starting at position 59 of SEQ ID NO: 915381
gaaggagucuuauuaggca

SEQ ID NO: 1075513 - RNA, 19 nt, Artificial Sequence
  Description of Artificial Sequence: Synthetic oligonucleotide
  Antisense strand to SEQ ID NO: 1075512
ugccuaauaagacuccuuc

SEQ ID NO: 1075514 - RNA, 19 nt, Artificial Sequence
  Description of Artificial Sequence: Synthetic oligonucleotide
  Sense strand starting at position 63 of SEQ ID NO: 915381
gagucuuauuaggcaacca

SEQ ID NO: 1075515 - RNA, 19 nt, Artificial Sequence
  Description of Artificial Sequence: Synthetic oligonucleotide
  Antisense strand to SEQ ID NO: 1075514
ugguugccuaauaagacuc

SEQ ID NO: 1075516 - RNA, 19 nt, Artificial Sequence
  Description of Artificial Sequence: Synthetic oligonucleotide
  Sense strand starting at position 122 of SEQ ID NO: 915381
aaauaauggugcucucuga

SEQ ID NO: 1075517 - RNA, 19 nt, Artificial Sequence
  Description of Artificial Sequence: Synthetic oligonucleotide
  Antisense strand to SEQ ID NO: 1075516
ucagagagcaccauuauuu

SEQ ID NO: 1075518 - RNA, 19 nt, Artificial Sequence
  Description of Artificial Sequence: Synthetic oligonucleotide
  Sense strand starting at position 146 of SEQ ID NO: 915381
ccacaagauugugccuaga

SEQ ID NO: 1075519 - RNA, 19 nt, Artificial Sequence
  Description of Artificial Sequence: Synthetic oligonucleotide
  Antisense strand to SEQ ID NO: 1075518
ucuaggcacaaucuugugg

SEQ ID NO: 1075520 - RNA, 19 nt, Artificial Sequence
  Description of Artificial Sequence: Synthetic oligonucleotide
  Sense strand starting at position 148 of SEQ ID NO: 915381
acaagauugugccuagaga

SEQ ID NO: 1075521 - RNA, 19 nt, Artificial Sequence
  Description of Artificial Sequence: Synthetic oligonucleotide
  Antisense strand to SEQ ID NO: 1075520
ucucuaggcacaaucuugu

SEQ ID NO: 1075522 - RNA, 19 nt, Artificial Sequence
  Description of Artificial Sequence: Synthetic oligonucleotide
  Sense strand starting at position 291 of SEQ ID NO: 915381
gagucagaaucaucaguaa

SEQ ID NO: 1075523 - RNA, 19 nt, Artificial Sequence
  Description of Artificial Sequence: Synthetic oligonucleotide
  Antisense strand to SEQ ID NO: 1075522
uuacugaugauucugacuc

SEQ ID NO: 1075524 - RNA, 19 nt, Artificial Sequence
  Description of Artificial Sequence: Synthetic oligonucleotide
  Sense strand starting at position 328 of SEQ ID NO: 915381
ggaagcuuaacgugggaaa

SEQ ID NO: 1075525 - RNA, 19 nt, Artificial Sequence
  Description of Artificial Sequence: Synthetic oligonucleotide
  Antisense strand to SEQ ID NO: 1075524
uuucccacguuaagcuucc

SEQ ID NO: 1075526 - RNA, 19 nt, Artificial Sequence
  Description of Artificial Sequence: Synthetic oligonucleotide
  Sense strand starting at position 329 of SEQ ID NO: 915381
gaagcuuaacgugggaaau

SEQ ID NO: 1075527 - RNA, 19 nt, Artificial Sequence
  Description of Artificial Sequence: Synthetic oligonucleotide
  Antisense strand to SEQ ID NO: 1075526
auuucccacguuaagcuuc

SEQ ID NO: 1075528 - RNA, 19 nt, Artificial Sequence
  Description of Artificial Sequence: Synthetic oligonucleotide
  Sense strand starting at position 330 of SEQ ID NO: 915381
aagcuuaacgugggaaaug

SEQ ID NO: 1075529 - RNA, 19 nt, Artificial Sequence
  Description of Artificial Sequence: Synthetic oligonucleotide
  Antisense strand to SEQ ID NO: 1075528
cauuucccacguuaagcuu

SEQ ID NO: 1075530 - RNA, 19 nt, Artificial Sequence
  Description of Artificial Sequence: Synthetic oligonucleotide
  Sense strand starting at position 437 of SEQ ID NO: 915381
ggcugauucccugggacug

SEQ ID NO: 1075531 - RNA, 19 nt, Artificial Sequence
  Description of Artificial Sequence: Synthetic oligonucleotide
  Antisense strand to SEQ ID NO: 1075530
cagucccagggaaucagcc

SEQ ID NO: 1075532 - RNA, 19 nt, Artificial Sequence
  Description of Artificial Sequence: Synthetic oligonucleotide
  Sense strand starting at position 645 of SEQ ID NO: 915381
ccaugaguccuguguauuu

SEQ ID NO: 1075533 - RNA, 19 nt, Artificial Sequence
  Description of Artificial Sequence: Synthetic oligonucleotide
  Antisense strand to SEQ ID NO: 1075532
aaauacacaggacucaugg

SEQ ID NO: 1075534 - RNA, 19 nt, Artificial Sequence
  Description of Artificial Sequence: Synthetic oligonucleotide
  Sense strand starting at position 656 of SEQ ID NO: 915381
guguauuugacguauguuc

SEQ ID NO: 1075535 - RNA, 19 nt, Artificial Sequence
  Description of Artificial Sequence: Synthetic oligonucleotide
  Antisense strand to SEQ ID NO: 1075534
gaacauacgucaaauacac

SEQ ID NO: 1075536 - RNA, 19 nt, Artificial Sequence
  Description of Artificial Sequence: Synthetic oligonucleotide
  Sense strand starting at position 965 of SEQ ID NO: 915381
ggucuaagauucccauacu

SEQ ID NO: 1075537 - RNA, 19 nt, Artificial Sequence
  Description of Artificial Sequence: Synthetic oligonucleotide
  Antisense strand to SEQ ID NO: 1075536
aguaugggaaucuuagacc

SEQ ID NO: 1075538 - RNA, 19 nt, Artificial Sequence
  Description of Artificial Sequence: Synthetic oligonucleotide
  Sense strand starting at position 1040 of SEQ ID NO: 915381
ccgggugaaugacuuaaau

SEQ ID NO: 1075539 - RNA, 19 nt, Artificial Sequence
  Description of Artificial Sequence: Synthetic oligonucleotide
  Antisense strand to SEQ ID NO: 1075538
auuuaagucauucacccgg

SEQ ID NO: 1075540 - RNA, 19 nt, Artificial Sequence
  Description of Artificial Sequence: Synthetic oligonucleotide
  Sense strand starting at position 1219 of SEQ ID NO: 915381
ugaugaccuugguuuauua

SEQ ID NO: 1075541 - RNA, 19 nt, Artificial Sequence
  Description of Artificial Sequence: Synthetic oligonucleotide
  Antisense strand to SEQ ID NO: 1075540
uaauaaaccaaggucauca

SEQ ID NO: 1075542 - RNA, 19 nt, Artificial Sequence
  Description of Artificial Sequence: Synthetic oligonucleotide
  Sense strand starting at position 1306 of SEQ ID NO: 915381
acucccuggguuugaaaga

SEQ ID NO: 1075543 - RNA, 19 nt, Artificial Sequence
  Description of Artificial Sequence: Synthetic oligonucleotide
  Antisense strand to SEQ ID NO: 1075542
ucuuucaaacccagggagu

SEQ ID NO: 1075544 - RNA, 19 nt, Artificial Sequence
  Description of Artificial Sequence: Synthetic oligonucleotide
  Sense strand starting at position 1631 of SEQ ID NO: 915381
aucggaugucuugaagcca

SEQ ID NO: 1075545 - RNA, 19 nt, Artificial Sequence
  Description of Artificial Sequence: Synthetic oligonucleotide
  Antisense strand to SEQ ID NO: 1075544
uggcuucaagacauccgau

SEQ ID NO: 1075546 - RNA, 19 nt, Artificial Sequence
  Description of Artificial Sequence: Synthetic oligonucleotide
  Sense strand starting at position 2211 of SEQ ID NO: 915381
acauuuagcccauggcauu

SEQ ID NO: 1075547 - RNA, 19 nt, Artificial Sequence
  Description of Artificial Sequence: Synthetic oligonucleotide
  Antisense strand to SEQ ID NO: 1075546
aaugccaugggcuaaaugu

SEQ ID NO: 1075548 - RNA, 19 nt, Artificial Sequence
  Description of Artificial Sequence: Synthetic oligonucleotide
  Sense strand starting at position 2281 of SEQ ID NO: 915381
guuagucuucuauacauga

SEQ ID NO: 1075549 - RNA, 19 nt, Artificial Sequence
  Description of Artificial Sequence: Synthetic oligonucleotide
  Antisense strand to SEQ ID NO: 1075548
ucauguauagaagacuaac

SEQ ID NO: 1075550 - RNA, 19 nt, Artificial Sequence
  Description of Artificial Sequence: Synthetic oligonucleotide
  Sense strand starting at position 2433 of SEQ ID NO: 915381
gggacaucuggcugggacu

SEQ ID NO: 1075551 - RNA, 19 nt, Artificial Sequence
  Description of Artificial Sequence: Synthetic oligonucleotide
  Antisense strand to SEQ ID NO: 1075550
agucccagccagauguccc

SEQ ID NO: 1075552 - RNA, 19 nt, Artificial Sequence
  Description of Artificial Sequence: Synthetic oligonucleotide
  Sense strand starting at position 2434 of SEQ ID NO: 915381
ggacaucuggcugggacua

SEQ ID NO: 1075553 - RNA, 19 nt, Artificial Sequence
  Description of Artificial Sequence: Synthetic oligonucleotide
  Antisense strand to SEQ ID NO: 1075552
uagucccagccagaugucc

SEQ ID NO: 1075554 - RNA, 19 nt, Artificial Sequence
  Description of Artificial Sequence: Synthetic oligonucleotide
  Sense strand starting at position 2435 of SEQ ID NO: 915381
gacaucuggcugggacuaa

SEQ ID NO: 1075555 - RNA, 19 nt, Artificial Sequence
  Description of Artificial Sequence: Synthetic oligonucleotide
  Antisense strand to SEQ ID NO: 1075554
uuagucccagccagauguc

SEQ ID NO: 1075556 - RNA, 19 nt, Artificial Sequence
  Description of Artificial Sequence: Synthetic oligonucleotide
  Sense strand starting at position 2478 of SEQ ID NO: 915381
agcaguuggcaagacuaga

SEQ ID NO: 1075557 - RNA, 19 nt, Artificial Sequence
  Description of Artificial Sequence: Synthetic oligonucleotide
  Antisense strand to SEQ ID NO: 1075556
ucuagucuugccaacugcu

SEQ ID NO: 1075558 - RNA, 19 nt, Artificial Sequence
  Description of Artificial Sequence: Synthetic oligonucleotide
  Sense strand starting at position 2662 of SEQ ID NO: 915381
aucuguaaaccgggauuau

SEQ ID NO: 1075559 - RNA, 19 nt, Artificial Sequence
  Description of Artificial Sequence: Synthetic oligonucleotide
  Antisense strand to SEQ ID NO: 1075558
auaaucccgguuuacagau

SEQ ID NO: 1075560 - RNA, 19 nt, Artificial Sequence
  Description of Artificial Sequence: Synthetic oligonucleotide
  Sense strand starting at position 2663 of SEQ ID NO: 915381
ucuguaaaccgggauuaug

SEQ ID NO: 1075561 - RNA, 19 nt, Artificial Sequence
  Description of Artificial Sequence: Synthetic oligonucleotide
  Antisense strand to SEQ ID NO: 1075560
cauaaucccgguuuacaga

SEQ ID NO: 1075562 - RNA, 19 nt, Artificial Sequence
  Description of Artificial Sequence: Synthetic oligonucleotide
  Sense strand starting at position 2671 of SEQ ID NO: 915381
ccgggauuaugauuggguu

SEQ ID NO: 1075563 - RNA, 19 nt, Artificial Sequence
  Description of Artificial Sequence: Synthetic oligonucleotide
  Antisense strand to SEQ ID NO: 1075562
aacccaaucauaaucccgg

SEQ ID NO: 1075564 - RNA, 19 nt, Artificial Sequence
  Description of Artificial Sequence: Synthetic oligonucleotide
  Sense strand starting at position 2675 of SEQ ID NO: 915381
gauuaugauuggguuccua

SEQ ID NO: 1075565 - RNA, 19 nt, Artificial Sequence
  Description of Artificial Sequence: Synthetic oligonucleotide
  Antisense strand to SEQ ID NO: 1075564
uaggaacccaaucauaauc

SEQ ID NO: 1075566 - RNA, 19 nt, Artificial Sequence
  Description of Artificial Sequence: Synthetic oligonucleotide
  Sense strand starting at position 2685 of SEQ ID NO: 915381
ggguuccuaggaggauuaa

SEQ ID NO: 1075567 - RNA, 19 nt, Artificial Sequence
  Description of Artificial Sequence: Synthetic oligonucleotide
  Antisense strand to SEQ ID NO: 1075566
uuaauccuccuaggaaccc

SEQ ID NO: 1075568 - RNA, 19 nt, Artificial Sequence
  Description of Artificial Sequence: Synthetic oligonucleotide
  Sense strand starting at position 2805 of SEQ ID NO: 915381
gcuuguacucaugaggaga

SEQ ID NO: 1075569 - RNA, 19 nt, Artificial Sequence
  Description of Artificial Sequence: Synthetic oligonucleotide
  Antisense strand to SEQ ID NO: 1075568
ucuccucaugaguacaagc

SEQ ID NO: 1075570 - RNA, 19 nt, Artificial Sequence
  Description of Artificial Sequence: Synthetic oligonucleotide
  Sense strand starting at position 2851 of SEQ ID NO: 915381
aucccaagugucuguauuu

SEQ ID NO: 1075571 - RNA, 19 nt, Artificial Sequence
  Description of Artificial Sequence: Synthetic oligonucleotide
  Antisense strand to SEQ ID NO: 1075570
aaauacagacacuugggau

SEQ ID NO: 1075572 - RNA, 19 nt, Artificial Sequence
  Description of Artificial Sequence: Synthetic oligonucleotide
  Sense strand starting at position 2852 of SEQ ID NO: 915381
ucccaagugucuguauuua

SEQ ID NO: 1075573 - RNA, 19 nt, Artificial Sequence
  Description of Artificial Sequence: Synthetic oligonucleotide
  Antisense strand to SEQ ID NO: 1075572
uaaauacagacacuuggga

SEQ ID NO: 1075574 - RNA, 19 nt, Artificial Sequence
  Description of Artificial Sequence: Synthetic oligonucleotide
  Sense strand starting at position 2902 of SEQ ID NO: 915381
cuguuaggucccugaagga

SEQ ID NO: 1075575 - RNA, 19 nt, Artificial Sequence
  Description of Artificial Sequence: Synthetic oligonucleotide
  Antisense strand to SEQ ID NO: 1075574
uccuucagggaccuaacag

SEQ ID NO: 1075576 - RNA, 19 nt, Artificial Sequence
  Description of Artificial Sequence: Synthetic oligonucleotide
  Sense strand starting at position 3204 of SEQ ID NO: 915381
caaugugagcccuagauca

SEQ ID NO: 1075577 - RNA, 19 nt, Artificial Sequence
  Description of Artificial Sequence: Synthetic oligonucleotide
  Antisense strand to SEQ ID NO: 1075576
ugaucuagggcucacauug

SEQ ID NO: 1075578 - RNA, 19 nt, Artificial Sequence
  Description of Artificial Sequence: Synthetic oligonucleotide
  Sense strand starting at position 3206 of SEQ ID NO: 915381
augugagcccuagaucaug

SEQ ID NO: 1075579 - RNA, 19 nt, Artificial Sequence
  Description of Artificial Sequence: Synthetic oligonucleotide
  Antisense strand to SEQ ID NO: 1075578
caugaucuagggcucacau

SEQ ID NO: 1075580 - RNA, 19 nt, Artificial Sequence
  Description of Artificial Sequence: Synthetic oligonucleotide
  Sense strand starting at position 3232 of SEQ ID NO: 915381
ugaugccugaucuggaaau

SEQ ID NO: 1075581 - RNA, 19 nt, Artificial Sequence
  Description of Artificial Sequence: Synthetic oligonucleotide
  Antisense strand to SEQ ID NO: 1075580
auuuccagaucaggcauca

SEQ ID NO: 1075582 - RNA, 19 nt, Artificial Sequence
  Description of Artificial Sequence: Synthetic oligonucleotide
  Sense strand starting at position 3409 of SEQ ID NO: 915381
gggugauuaggucaugagu

SEQ ID NO: 1075583 - RNA, 19 nt, Artificial Sequence
  Description of Artificial Sequence: Synthetic oligonucleotide
  Antisense strand to SEQ ID NO: 1075582
acucaugaccuaaucaccc

SEQ ID NO: 1075584 - RNA, 19 nt, Artificial Sequence
  Description of Artificial Sequence: Synthetic oligonucleotide
  Sense strand starting at position 3536 of SEQ ID NO: 915381
aggaaaccguccucaucaa

SEQ ID NO: 1075585 - RNA, 19 nt, Artificial Sequence
  Description of Artificial Sequence: Synthetic oligonucleotide
  Antisense strand to SEQ ID NO: 1075584
uugaugaggacgguuuccu

SEQ ID NO: 1075586 - RNA, 19 nt, Artificial Sequence
  Description of Artificial Sequence: Synthetic oligonucleotide
  Sense strand starting at position 3537 of SEQ ID NO: 915381
ggaaaccguccucaucaaa

SEQ ID NO: 1075587 - RNA, 19 nt, Artificial Sequence
  Description of Artificial Sequence: Synthetic oligonucleotide
  Antisense strand to SEQ ID NO: 1075586
uuugaugaggacgguuucc

SEQ ID NO: 1075588 - RNA, 19 nt, Artificial Sequence
  Description of Artificial Sequence: Synthetic oligonucleotide
  Sense strand starting at position 3772 of SEQ ID NO: 915381
ucaucucuggacugagaca

SEQ ID NO: 1075589 - RNA, 19 nt, Artificial Sequence
  Description of Artificial Sequence: Synthetic oligonucleotide
  Antisense strand to SEQ ID NO: 1075588
ugucucaguccagagauga

SEQ ID NO: 1075590 - RNA, 19 nt, Artificial Sequence
  Description of Artificial Sequence: Synthetic oligonucleotide
  Sense strand starting at position 25 of SEQ ID NO: 915382
ucccuuugguccuuagcau

SEQ ID NO: 1075591 - RNA, 19 nt, Artificial Sequence
  Description of Artificial Sequence: Synthetic oligonucleotide
  Antisense strand to SEQ ID NO: 1075590
augcuaaggaccaaaggga

SEQ ID NO: 1075592 - RNA, 19 nt, Artificial Sequence
  Description of Artificial Sequence: Synthetic oligonucleotide
  Sense strand starting at position 38 of SEQ ID NO: 915382
uagcaugggucaucugaau

SEQ ID NO: 1075593 - RNA, 19 nt, Artificial Sequence
  Description of Artificial Sequence: Synthetic oligonucleotide
  Antisense strand to SEQ ID NO: 1075592
auucagaugacccaugcua

SEQ ID NO: 1075594 - RNA, 19 nt, Artificial Sequence
  Description of Artificial Sequence: Synthetic oligonucleotide
  Sense strand starting at position 61 of SEQ ID NO: 915382
acgugucgucugggcaaca

SEQ ID NO: 1075595 - RNA, 19 nt, Artificial Sequence
  Description of Artificial Sequence: Synthetic oligonucleotide
  Antisense strand to SEQ ID NO: 1075594
uguugcccagacgacacgu

SEQ ID NO: 1075596 - RNA, 19 nt, Artificial Sequence
  Description of Artificial Sequence: Synthetic oligonucleotide
  Sense strand starting at position 74 of SEQ ID NO: 915382
gcaacagguccagaauucu

SEQ ID NO: 1075597 - RNA, 19 nt, Artificial Sequence
  Description of Artificial Sequence: Synthetic oligonucleotide
  Antisense strand to SEQ ID NO: 1075596
agaauucuggaccuguugc

SEQ ID NO: 1075598 - RNA, 19 nt, Artificial Sequence
  Description of Artificial Sequence: Synthetic oligonucleotide
  Sense strand starting at position 83 of SEQ ID NO: 915382
ccagaauucugcccaagca

SEQ ID NO: 1075599 - RNA, 19 nt, Artificial Sequence
  Description of Artificial Sequence: Synthetic oligonucleotide
  Antisense strand to SEQ ID NO: 1075598
ugcuugggcagaauucugg

SEQ ID NO: 1075600 - RNA, 19 nt, Artificial Sequence
  Description of Artificial Sequence: Synthetic oligonucleotide
  Sense strand starting at position 198 of SEQ ID NO: 915382
ggcgcaucgcaguaauuga

SEQ ID NO: 1075601 - RNA, 19 nt, Artificial Sequence
  Description of Artificial Sequence: Synthetic oligonucleotide
  Antisense strand to SEQ ID NO: 1075600
ucaauuacugcgaugcgcc

SEQ ID NO: 1075602 - RNA, 19 nt, Artificial Sequence
  Description of Artificial Sequence: Synthetic oligonucleotide
  Sense strand starting at position 237 of SEQ ID NO: 915382
ugccguggcgucuauaaau

SEQ ID NO: 1075603 - RNA, 19 nt, Artificial Sequence
  Description of Artificial Sequence: Synthetic oligonucleotide
  Antisense strand to SEQ ID NO: 1075602
auuuauagacgccacggca

SEQ ID NO: 1075604 - RNA, 19 nt, Artificial Sequence
  Description of Artificial Sequence: Synthetic oligonucleotide
  Sense strand starting at position 838 of SEQ ID NO: 915382
gcgcgaaaucucccgugcu

SEQ ID NO: 1075605 - RNA, 19 nt, Artificial Sequence
  Description of Artificial Sequence: Synthetic oligonucleotide
  Antisense strand to SEQ ID NO: 1075604
agcacgggagauuucgcgc

SEQ ID NO: 1075606 - RNA, 19 nt, Artificial Sequence
  Description of Artificial Sequence: Synthetic oligonucleotide
  Sense strand starting at position 840 of SEQ ID NO: 915382
gcgaaaucucccgugcuua

SEQ ID NO: 1075607 - RNA, 19 nt, Artificial Sequence
  Description of Artificial Sequence: Synthetic oligonucleotide
  Antisense strand to SEQ ID NO: 1075606
uaagcacgggagauuucgc

SEQ ID NO: 1075608 - RNA, 19 nt, Artificial Sequence
  Description of Artificial Sequence: Synthetic oligonucleotide
  Sense strand starting at position 841 of SEQ ID NO: 915382
cgaaaucucccgugcuuaa

SEQ ID NO: 1075609 - RNA, 19 nt, Artificial Sequence
  Description of Artificial Sequence: Synthetic oligonucleotide
  Antisense strand to SEQ ID NO: 1075608
uuaagcacgggagauuucg

SEQ ID NO: 1075610 - RNA, 19 nt, Artificial Sequence
  Description of Artificial Sequence: Synthetic oligonucleotide
  Sense strand starting at position 951 of SEQ ID NO: 915382
gucccaugaucaccagcau

SEQ ID NO: 1075611 - RNA, 19 nt, Artificial Sequence
  Description of Artificial Sequence: Synthetic oligonucleotide
  Antisense strand to SEQ ID NO: 1075610
augcuggugaucaugggac

SEQ ID NO: 1075612 - RNA, 19 nt, Artificial Sequence
  Description of Artificial Sequence: Synthetic oligonucleotide
  Sense strand starting at position 1045 of SEQ ID NO: 915382
caugguggucucgaguaag

SEQ ID NO: 1075613 - RNA, 19 nt, Artificial Sequence
  Description of Artificial Sequence: Synthetic oligonucleotide
  Antisense strand to SEQ ID NO: 1075612
cuuacucgagaccaccaug

SEQ ID NO: 1075614 - RNA, 19 nt, Artificial Sequence
  Description of Artificial Sequence: Synthetic oligonucleotide
  Sense strand starting at position 1048 of SEQ ID NO: 915382
gguggucucgaguaagauc

SEQ ID NO: 1075615 - RNA, 19 nt, Artificial Sequence
  Description of Artificial Sequence: Synthetic oligonucleotide
  Antisense strand to SEQ ID NO: 1075614
gaucuuacucgagaccacc

SEQ ID NO: 1075616 - RNA, 19 nt, Artificial Sequence
  Description of Artificial Sequence: Synthetic oligonucleotide
  Sense strand starting at position 1187 of SEQ ID NO: 915382
ucagauuagcgcgcgguaa

SEQ ID NO: 1075617 - RNA, 19 nt, Artificial Sequence
  Description of Artificial Sequence: Synthetic oligonucleotide
  Antisense strand to SEQ ID NO: 1075616
uuaccgcgcgcuaaucuga

SEQ ID NO: 1075618 - RNA, 19 nt, Artificial Sequence
  Description of Artificial Sequence: Synthetic oligonucleotide
  Sense strand starting at position 1372 of SEQ ID NO: 915382
ccggucuucccgaggaagu

SEQ ID NO: 1075619 - RNA, 19 nt, Artificial Sequence
  Description of Artificial Sequence: Synthetic oligonucleotide
  Antisense strand to SEQ ID NO: 1075618
acuuccucgggaagaccgg

SEQ ID NO: 1075620 - RNA, 19 nt, Artificial Sequence
  Description of Artificial Sequence: Synthetic oligonucleotide
  Sense strand starting at position 1373 of SEQ ID NO: 915382
cggucuucccgaggaaguu

SEQ ID NO: 1075621 - RNA, 19 nt, Artificial Sequence
  Description of Artificial Sequence: Synthetic oligonucleotide
  Antisense strand to SEQ ID NO: 1075620
aacuuccucgggaagaccg

SEQ ID NO: 1075622 - RNA, 19 nt, Artificial Sequence
  Description of Artificial Sequence: Synthetic oligonucleotide
  Sense strand starting at position 1374 of SEQ ID NO: 915382
ggucuucccgaggaaguuu

SEQ ID NO: 1075623 - RNA, 19 nt, Artificial Sequence
  Description of Artificial Sequence: Synthetic oligonucleotide
  Antisense strand to SEQ ID NO: 1075622
aaacuuccucgggaagacc

SEQ ID NO: 1075624 - RNA, 19 nt, Artificial Sequence
  Description of Artificial Sequence: Synthetic oligonucleotide
  Sense strand starting at position 1716 of SEQ ID NO: 915382
gcuuuagugucucuccaau

SEQ ID NO: 1075625 - RNA, 19 nt, Artificial Sequence
  Description of Artificial Sequence: Synthetic oligonucleotide
  Antisense strand to SEQ ID NO: 1075624
auuggagagacacuaaagc

SEQ ID NO: 1075626 - RNA, 19 nt, Artificial Sequence
  Description of Artificial Sequence: Synthetic oligonucleotide
  Sense strand starting at position 1718 of SEQ ID NO: 915382
uuuagugucucuccaaugu

SEQ ID NO: 1075627 - RNA, 19 nt, Artificial Sequence
  Description of Artificial Sequence: Synthetic oligonucleotide
  Antisense strand to SEQ ID NO: 1075626
acauuggagagacacuaaa

SEQ ID NO: 1075628 - RNA, 19 nt, Artificial Sequence
  Description of Artificial Sequence: Synthetic oligonucleotide
  Sense strand starting at position 2122 of SEQ ID NO: 915382
agugaaaucuuucccuugu

SEQ ID NO: 1075629 - RNA, 19 nt, Artificial Sequence
  Description of Artificial Sequence: Synthetic oligonucleotide
  Antisense strand to SEQ ID NO: 1075628
acaagggaaagauuucacu

SEQ ID NO: 1075630 - RNA, 19 nt, Artificial Sequence
  Description of Artificial Sequence: Synthetic oligonucleotide
  Sense strand starting at position 2123 of SEQ ID NO: 915382
gugaaaucuuucccuuguu

SEQ ID NO: 1075631 - RNA, 19 nt, Artificial Sequence
  Description of Artificial Sequence: Synthetic oligonucleotide
  Antisense strand to SEQ ID NO: 1075630
aacaagggaaagauuucac

SEQ ID NO: 1075632 - RNA, 19 nt, Artificial Sequence
  Description of Artificial Sequence: Synthetic oligonucleotide
  Sense strand starting at position 2189 of SEQ ID NO: 915382
caugaauuagaggguccuu

SEQ ID NO: 1075633 - RNA, 19 nt, Artificial Sequence
  Description of Artificial Sequence: Synthetic oligonucleotide
  Antisense strand to SEQ ID NO: 1075632
aaggacccucuaauucaug

SEQ ID NO: 1075634 - RNA, 19 nt, Artificial Sequence
  Description of Artificial Sequence: Synthetic oligonucleotide
  Sense strand starting at position 2320 of SEQ ID NO: 915382
uuaagaauuuagugcagcu

SEQ ID NO: 1075635 - RNA, 19 nt, Artificial Sequence
  Description of Artificial Sequence: Synthetic oligonucleotide
  Antisense strand to SEQ ID NO: 1075634
agcugcacuaaauucuuaa

SEQ ID NO: 1075636 - RNA, 19 nt, Artificial Sequence
  Description of Artificial Sequence: Synthetic oligonucleotide
  Sense strand starting at position 2373 of SEQ ID NO: 915382
uaugguugagcaggaaaua

SEQ ID NO: 1075637 - RNA, 19 nt, Artificial Sequence
  Description of Artificial Sequence: Synthetic oligonucleotide
  Antisense strand to SEQ ID NO: 1075636
uauuuccugcucaaccaua

SEQ ID NO: 1075638 - RNA, 19 nt, Artificial Sequence
  Description of Artificial Sequence: Synthetic oligonucleotide
  Sense strand starting at position 2431 of SEQ ID NO: 915382
uugaaaccacagugacauu

SEQ ID NO: 1075639 - RNA, 19 nt, Artificial Sequence
  Description of Artificial Sequence: Synthetic oligonucleotide
  Antisense strand to SEQ ID NO: 1075638
aaugucacugugguuucaa

SEQ ID NO: 1075640 - RNA, 19 nt, Artificial Sequence
  Description of Artificial Sequence: Synthetic oligonucleotide
  Sense strand starting at position 2441 of SEQ ID NO: 915382
agugacauuugcugaagaa

SEQ ID NO: 1075641 - RNA, 19 nt, Artificial Sequence
  Description of Artificial Sequence: Synthetic oligonucleotide
  Antisense strand to SEQ ID NO: 1075640
uucuucagcaaaugucacu

SEQ ID NO: 1075642 - RNA, 19 nt, Artificial Sequence
  Description of Artificial Sequence: Synthetic oligonucleotide
  Sense strand starting at position 2581 of SEQ ID NO: 915382
agaaguucugggugucuca

SEQ ID NO: 1075643 - RNA, 19 nt, Artificial Sequence
  Description of Artificial Sequence: Synthetic oligonucleotide
  Antisense strand to SEQ ID NO: 1075642
ugagacacccagaacuucu

SEQ ID NO: 1075644 - RNA, 19 nt, Artificial Sequence
  Description of Artificial Sequence: Synthetic oligonucleotide
  Sense strand starting at position 2597 of SEQ ID NO: 915382
ucauuuguccugcgauauu

SEQ ID NO: 1075645 - RNA, 19 nt, Artificial Sequence
  Description of Artificial Sequence: Synthetic oligonucleotide
  Antisense strand to SEQ ID NO: 1075644
aauaucgcaggacaaauga

SEQ ID NO: 1075646 - RNA, 19 nt, Artificial Sequence
  Description of Artificial Sequence: Synthetic oligonucleotide
  Sense strand starting at position 2607 of SEQ ID NO: 915382
ugcgauauuagguaaagcu

SEQ ID NO: 1075647 - RNA, 19 nt, Artificial Sequence
  Description of Artificial Sequence: Synthetic oligonucleotide
  Antisense strand to SEQ ID NO: 1075646
agcuuuaccuaauaucgca

SEQ ID NO: 1075648 - RNA, 19 nt, Artificial Sequence
  Description of Artificial Sequence: Synthetic oligonucleotide
  Sense strand starting at position 2711 of SEQ ID NO: 915382
gggacacaugccugggaaa

SEQ ID NO: 1075649 - RNA, 19 nt, Artificial Sequence
  Description of Artificial Sequence: Synthetic oligonucleotide
  Antisense strand to SEQ ID NO: 1075648
uuucccaggcauguguccc

SEQ ID NO: 1075650 - RNA, 19 nt, Artificial Sequence
  Description of Artificial Sequence: Synthetic oligonucleotide
  Sense strand starting at position 2714 of SEQ ID NO: 915382
acacaugccugggaaacaa

SEQ ID NO: 1075651 - RNA, 19 nt, Artificial Sequence
  Description of Artificial Sequence: Synthetic oligonucleotide
  Antisense strand to SEQ ID NO: 1075650
uuguuucccaggcaugugu

SEQ ID NO: 1075652 - RNA, 19 nt, Artificial Sequence
  Description of Artificial Sequence: Synthetic oligonucleotide
  Sense strand starting at position 3072 of SEQ ID NO: 915382
agaggcucgucuaagggau

SEQ ID NO: 1075653 - RNA, 19 nt, Artificial Sequence
  Description of Artificial Sequence: Synthetic oligonucleotide
  Antisense strand to SEQ ID NO: 1075652
aucccuuagacgagccucu

SEQ ID NO: 1075654 - RNA, 19 nt, Artificial Sequence
  Description of Artificial Sequence: Synthetic oligonucleotide
  Sense strand starting at position 3076 of SEQ ID NO: 915382
gcucgucuaagggauuaag

SEQ ID NO: 1075655 - RNA, 19 nt, Artificial Sequence
  Description of Artificial Sequence: Synthetic oligonucleotide
  Antisense strand to SEQ ID NO: 1075654
cuuaaucccuuagacgagc

SEQ ID NO: 1075656 - RNA, 19 nt, Artificial Sequence
  Description of Artificial Sequence: Synthetic oligonucleotide
  Sense strand starting at position 3147 of SEQ ID NO: 915382
cccauacucugguuauuag

SEQ ID NO: 1075657 - RNA, 19 nt, Artificial Sequence
  Description of Artificial Sequence: Synthetic oligonucleotide
  Antisense strand to SEQ ID NO: 1075656
cuaauaaccagaguauggg

SEQ ID NO: 1075658 - RNA, 19 nt, Artificial Sequence
  Description of Artificial Sequence: Synthetic oligonucleotide
  Sense strand starting at position 3154 of SEQ ID NO: 915382
ucugguuauuagccaaguu

SEQ ID NO: 1075659 - RNA, 19 nt, Artificial Sequence
  Description of Artificial Sequence: Synthetic oligonucleotide
  Antisense strand to SEQ ID NO: 1075658
aacuuggcuaauaaccaga

SEQ ID NO: 1075660 - RNA, 19 nt, Artificial Sequence
  Description of Artificial Sequence: Synthetic oligonucleotide
  Sense strand starting at position 3385 of SEQ ID NO: 915382
ggagaucaguuugggaaca

SEQ ID NO: 1075661 - RNA, 19 nt, Artificial Sequence
  Description of Artificial Sequence: Synthetic oligonucleotide
  Antisense strand to SEQ ID NO: 1075660
uguucccaaacugaucucc

SEQ ID NO: 1075662 - RNA, 19 nt, Artificial Sequence
  Description of Artificial Sequence: Synthetic oligonucleotide
  Sense strand starting at position 3386 of SEQ ID NO: 915382
gagaucaguuugggaacau

SEQ ID NO: 1075663 - RNA, 19 nt, Artificial Sequence
  Description of Artificial Sequence: Synthetic oligonucleotide
  Antisense strand to SEQ ID NO: 1075662
auguucccaaacugaucuc

SEQ ID NO: 1075664 - RNA, 19 nt, Artificial Sequence
  Description of Artificial Sequence: Synthetic oligonucleotide
  Sense strand starting at position 3387 of SEQ ID NO: 915382
agaucaguuugggaacauc

SEQ ID NO: 1075665 - RNA, 19 nt, Artificial Sequence
  Description of Artificial Sequence: Synthetic oligonucleotide
  Antisense strand to SEQ ID NO: 1075664
gauguucccaaacugaucu

SEQ ID NO: 1075666 - RNA, 19 nt, Artificial Sequence
  Description of Artificial Sequence: Synthetic oligonucleotide
  Sense strand starting at position 3808 of SEQ ID NO: 915382
ggauauagugagcacugca

SEQ ID NO: 1075667 - RNA, 19 nt, Artificial Sequence
  Description of Artificial Sequence: Synthetic oligonucleotide
  Antisense strand to SEQ ID NO: 1075666
ugcagugcucacuauaucc

SEQ ID NO: 1075668 - RNA, 19 nt, Artificial Sequence
  Description of Artificial Sequence: Synthetic oligonucleotide
  Sense strand starting at position 3981 of SEQ ID NO: 915382
gguagaacaucagcucuau

SEQ ID NO: 1075669 - RNA, 19 nt, Artificial Sequence
  Description of Artificial Sequence: Synthetic oligonucleotide
  Antisense strand to SEQ ID NO: 1075668
auagagcugauguucuacc

SEQ ID NO: 1075670 - RNA, 19 nt, Artificial Sequence
  Description of Artificial Sequence: Synthetic oligonucleotide
  Sense strand starting at position 14 of SEQ ID NO: 915383
ggagauuccaaauggcauu

SEQ ID NO: 1075671 - RNA, 19 nt, Artificial Sequence
  Description of Artificial Sequence: Synthetic oligonucleotide
  Antisense strand to SEQ ID NO: 1075670
aaugccauuuggaaucucc

SEQ ID NO: 1075672 - RNA, 19 nt, Artificial Sequence
  Description of Artificial Sequence: Synthetic oligonucleotide
  Sense strand starting at position 111 of SEQ ID NO: 915383
cuaacaugaaccgguaagu

SEQ ID NO: 1075673 - RNA, 19 nt, Artificial Sequence
  Description of Artificial Sequence: Synthetic oligonucleotide
  Antisense strand to SEQ ID NO: 1075672
acuuaccgguucauguuag

SEQ ID NO: 1075674 - RNA, 19 nt, Artificial Sequence
  Description of Artificial Sequence: Synthetic oligonucleotide
  Sense strand starting at position 145 of SEQ ID NO: 915383
agcacuuuccuuggaagaa

SEQ ID NO: 1075675 - RNA, 19 nt, Artificial Sequence
  Description of Artificial Sequence: Synthetic oligonucleotide
  Antisense strand to SEQ ID NO: 1075674
uucuuccaaggaaagugcu

SEQ ID NO: 1075676 - RNA, 19 nt, Artificial Sequence
  Description of Artificial Sequence: Synthetic oligonucleotide
  Sense strand starting at position 225 of SEQ ID NO: 915383
uagaguuagucccuugaga

SEQ ID NO: 1075677 - RNA, 19 nt, Artificial Sequence
  Description of Artificial Sequence: Synthetic oligonucleotide
  Antisense strand to SEQ ID NO: 1075676
ucucaagggacuaacucua

SEQ ID NO: 1075678 - RNA, 19 nt, Artificial Sequence
  Description of Artificial Sequence: Synthetic oligonucleotide
  Sense strand starting at position 227 of SEQ ID NO: 915383
gaguuagucccuugagagg

SEQ ID NO: 1075679 - RNA, 19 nt, Artificial Sequence
  Description of Artificial Sequence: Synthetic oligonucleotide
  Antisense strand to SEQ ID NO: 1075678
ccucucaagggacuaacuc

SEQ ID NO: 1075680 - RNA, 19 nt, Artificial Sequence
  Description of Artificial Sequence: Synthetic oligonucleotide
  Sense strand starting at position 336 of SEQ ID NO: 915383
uggccuuuccuuuaaagaa

SEQ ID NO: 1075681 - RNA, 19 nt, Artificial Sequence
  Description of Artificial Sequence: Synthetic oligonucleotide
  Antisense strand to SEQ ID NO: 1075680
uucuuuaaaggaaaggcca

SEQ ID NO: 1075682 - RNA, 19 nt, Artificial Sequence
  Description of Artificial Sequence: Synthetic oligonucleotide
  Sense strand starting at position 823 of SEQ ID NO: 915383
caaacagugucugcaaaga

SEQ ID NO: 1075683 - RNA, 19 nt, Artificial Sequence
  Description of Artificial Sequence: Synthetic oligonucleotide
  Antisense strand to SEQ ID NO: 1075682
ucuuugcagacacuguuug

SEQ ID NO: 1075684 - RNA, 19 nt, Artificial Sequence
  Description of Artificial Sequence: Synthetic oligonucleotide
  Sense strand starting at position 979 of SEQ ID NO: 915383
ucauaaucuuggguuuaug

SEQ ID NO: 1075685 - RNA, 19 nt, Artificial Sequence
  Description of Artificial Sequence: Synthetic oligonucleotide
  Antisense strand to SEQ ID NO: 1075684
cauaaacccaagauuauga

SEQ ID NO: 1075686 - RNA, 19 nt, Artificial Sequence
  Description of Artificial Sequence: Synthetic oligonucleotide
  Sense strand starting at position 1043 of SEQ ID NO: 915383
gaaguagguuacuuaaggu

SEQ ID NO: 1075687 - RNA, 19 nt, Artificial Sequence
  Description of Artificial Sequence: Synthetic oligonucleotide
  Antisense strand to SEQ ID NO: 1075686
accuuaaguaaccuacuuc

SEQ ID NO: 1075688 - RNA, 19 nt, Artificial Sequence
  Description of Artificial Sequence: Synthetic oligonucleotide
  Sense strand starting at position 1053 of SEQ ID NO: 915383
acuuaagguuucuuauaga

SEQ ID NO: 1075689 - RNA, 19 nt, Artificial Sequence
  Description of Artificial Sequence: Synthetic oligonucleotide
  Antisense strand to SEQ ID NO: 1075688
ucuauaagaaaccuuaagu

SEQ ID NO: 1075690 - RNA, 19 nt, Artificial Sequence
  Description of Artificial Sequence: Synthetic oligonucleotide
  Sense strand starting at position 1117 of SEQ ID NO: 915383
caugaauagugaccguaaa

SEQ ID NO: 1075691 - RNA, 19 nt, Artificial Sequence
  Description of Artificial Sequence: Synthetic oligonucleotide
  Antisense strand to SEQ ID NO: 1075690
uuuacggucacuauucaug

SEQ ID NO: 1075692 - RNA, 19 nt, Artificial Sequence
  Description of Artificial Sequence: Synthetic oligonucleotide
  Sense strand starting at position 1118 of SEQ ID NO: 915383
augaauagugaccguaaau

SEQ ID NO: 1075693 - RNA, 19 nt, Artificial Sequence
  Description of Artificial Sequence: Synthetic oligonucleotide
  Antisense strand to SEQ ID NO: 1075692
auuuacggucacuauucau

SEQ ID NO: 1075694 - RNA, 19 nt, Artificial Sequence
  Description of Artificial Sequence: Synthetic oligonucleotide
  Sense strand starting at position 1184 of SEQ ID NO: 915383
ggcccucaguggucuauuu

SEQ ID NO: 1075695 - RNA, 19 nt, Artificial Sequence
  Description of Artificial Sequence: Synthetic oligonucleotide
  Antisense strand to SEQ ID NO: 1075694
aaauagaccacugagggcc

SEQ ID NO: 1075696 - RNA, 19 nt, Artificial Sequence
  Description of Artificial Sequence: Synthetic oligonucleotide
  Sense strand starting at position 1228 of SEQ ID NO: 915383
aacagacacgcuggauauu

SEQ ID NO: 1075697 - RNA, 19 nt, Artificial Sequence
  Description of Artificial Sequence: Synthetic oligonucleotide
  Antisense strand to SEQ ID NO: 1075696
aauauccagcgugucuguu

SEQ ID NO: 1075698 - RNA, 19 nt, Artificial Sequence
  Description of Artificial Sequence: Synthetic oligonucleotide
  Sense strand starting at position 1229 of SEQ ID NO: 915383
acagacacgcuggauauua

SEQ ID NO: 1075699 - RNA, 19 nt, Artificial Sequence
  Description of Artificial Sequence: Synthetic oligonucleotide
  Antisense strand to SEQ ID NO: 1075698
uaauauccagcgugucugu

SEQ ID NO: 1075700 - RNA, 19 nt, Artificial Sequence
  Description of Artificial Sequence: Synthetic oligonucleotide
  Sense strand starting at position 1321 of SEQ ID NO: 915383
gagugaucccuugaggcca

SEQ ID NO: 1075701 - RNA, 19 nt, Artificial Sequence
  Description of Artificial Sequence: Synthetic oligonucleotide
  Antisense strand to SEQ ID NO: 1075700
uggccucaagggaucacuc

SEQ ID NO: 1075702 - RNA, 19 nt, Artificial Sequence
  Description of Artificial Sequence: Synthetic oligonucleotide
  Sense strand starting at position 1503 of SEQ ID NO: 915383
cuauaauugcacgacugca

SEQ ID NO: 1075703 - RNA, 19 nt, Artificial Sequence
  Description of Artificial Sequence: Synthetic oligonucleotide
  Antisense strand to SEQ ID NO: 1075702
ugcagucgugcaauuauag

SEQ ID NO: 1075704 - RNA, 19 nt, Artificial Sequence
  Description of Artificial Sequence: Synthetic oligonucleotide
  Sense strand starting at position 1577 of SEQ ID NO: 915383
auuugcucucgucauuauu

SEQ ID NO: 1075705 - RNA, 19 nt, Artificial Sequence
  Description of Artificial Sequence: Synthetic oligonucleotide
  Antisense strand to SEQ ID NO: 1075704
aauaaugacgagagcaaau

SEQ ID NO: 1075706 - RNA, 19 nt, Artificial Sequence
  Description of Artificial Sequence: Synthetic oligonucleotide
  Sense strand starting at position 1579 of SEQ ID NO: 915383
uugcucucgucauuauuua

SEQ ID NO: 1075707 - RNA, 19 nt, Artificial Sequence
  Description of Artificial Sequence: Synthetic oligonucleotide
  Antisense strand to SEQ ID NO: 1075706
uaaauaaugacgagagcaa

SEQ ID NO: 1075708 - RNA, 19 nt, Artificial Sequence
  Description of Artificial Sequence: Synthetic oligonucleotide
  Sense strand starting at position 2025 of SEQ ID NO: 915383
uugagaacuccuggccuga

SEQ ID NO: 1075709 - RNA, 19 nt, Artificial Sequence
  Description of Artificial Sequence: Synthetic oligonucleotide
  Antisense strand to SEQ ID NO: 1075708
ucaggccaggaguucucaa

SEQ ID NO: 1075710 - RNA, 19 nt, Artificial Sequence
  Description of Artificial Sequence: Synthetic oligonucleotide
  Sense strand starting at position 2027 of SEQ ID NO: 915383
gagaacuccuggccugaga

SEQ ID NO: 1075711 - RNA, 19 nt, Artificial Sequence
  Description of Artificial Sequence: Synthetic oligonucleotide
  Antisense strand to SEQ ID NO: 1075710
ucucaggccaggaguucuc

SEQ ID NO: 1075712 - RNA, 19 nt, Artificial Sequence
  Description of Artificial Sequence: Synthetic oligonucleotide
  Sense strand starting at position 2029 of SEQ ID NO: 915383
gaacuccuggccugagaac

SEQ ID NO: 1075713 - RNA, 19 nt, Artificial Sequence
  Description of Artificial Sequence: Synthetic oligonucleotide
  Antisense strand to SEQ ID NO: 1075712
guucucaggccaggaguuc

SEQ ID NO: 1075714 - RNA, 19 nt, Artificial Sequence
  Description of Artificial Sequence: Synthetic oligonucleotide
  Sense strand starting at position 2197 of SEQ ID NO: 915383
gugggaagacagugacaau

SEQ ID NO: 1075715 - RNA, 19 nt, Artificial Sequence
  Description of Artificial Sequence: Synthetic oligonucleotide
  Antisense strand to SEQ ID NO: 1075714
auugucacugucuucccac

SEQ ID NO: 1075716 - RNA, 19 nt, Artificial Sequence
  Description of Artificial Sequence: Synthetic oligonucleotide
  Sense strand starting at position 2250 of SEQ ID NO: 915383
auuucuaagcugugcuaga

SEQ ID NO: 1075717 - RNA, 19 nt, Artificial Sequence
  Description of Artificial Sequence: Synthetic oligonucleotide
  Antisense strand to SEQ ID NO: 1075716
ucuagcacagcuuagaaau

SEQ ID NO: 1075718 - RNA, 19 nt, Artificial Sequence
  Description of Artificial Sequence: Synthetic oligonucleotide
  Sense strand starting at position 2326 of SEQ ID NO: 915383
gauguugugcaguaagaga

SEQ ID NO: 1075719 - RNA, 19 nt, Artificial Sequence
  Description of Artificial Sequence: Synthetic oligonucleotide
  Antisense strand to SEQ ID NO: 1075718
ucucuuacugcacaacauc

SEQ ID NO: 1075720 - RNA, 19 nt, Artificial Sequence
  Description of Artificial Sequence: Synthetic oligonucleotide
  Sense strand starting at position 2393 of SEQ ID NO: 915383
ggcauugaugaccauccau

SEQ ID NO: 1075721 - RNA, 19 nt, Artificial Sequence
  Description of Artificial Sequence: Synthetic oligonucleotide
  Antisense strand to SEQ ID NO: 1075720
auggauggucaucaaugcc

SEQ ID NO: 1075722 - RNA, 19 nt, Artificial Sequence
  Description of Artificial Sequence: Synthetic oligonucleotide
  Sense strand starting at position 2410 of SEQ ID NO: 915383
augauaugcccuuaccaag

SEQ ID NO: 1075723 - RNA, 19 nt, Artificial Sequence
  Description of Artificial Sequence: Synthetic oligonucleotide
  Antisense strand to SEQ ID NO: 1075722
cuugguaagggcauaucau

SEQ ID NO: 1075724 - RNA, 19 nt, Artificial Sequence
  Description of Artificial Sequence: Synthetic oligonucleotide
  Sense strand starting at position 2556 of SEQ ID NO: 915383
uuuauuaaccacugugagu

SEQ ID NO: 1075725 - RNA, 19 nt, Artificial Sequence
  Description of Artificial Sequence: Synthetic oligonucleotide
  Antisense strand to SEQ ID NO: 1075724
acucacagugguuaauaaa

SEQ ID NO: 1075726 - RNA, 19 nt, Artificial Sequence
  Description of Artificial Sequence: Synthetic oligonucleotide
  Sense strand starting at position 2567 of SEQ ID NO: 915383
cugugaguugcagaacauc

SEQ ID NO: 1075727 - RNA, 19 nt, Artificial Sequence
  Description of Artificial Sequence: Synthetic oligonucleotide
  Antisense strand to SEQ ID NO: 1075726
gauguucugcaacucacag

SEQ ID NO: 1075728 - RNA, 19 nt, Artificial Sequence
  Description of Artificial Sequence: Synthetic oligonucleotide
  Sense strand starting at position 2620 of SEQ ID NO: 915383
guacucagccuauggagaa

SEQ ID NO: 1075729 - RNA, 19 nt, Artificial Sequence
  Description of Artificial Sequence: Synthetic oligonucleotide
  Antisense strand to SEQ ID NO: 1075728
uucuccauaggcugaguac

SEQ ID NO: 1075730 - RNA, 19 nt, Artificial Sequence
  Description of Artificial Sequence: Synthetic oligonucleotide
  Sense strand starting at position 2720 of SEQ ID NO: 915383
gauauaagauggcuccaga

SEQ ID NO: 1075731 - RNA, 19 nt, Artificial Sequence
  Description of Artificial Sequence: Synthetic oligonucleotide
  Antisense strand to SEQ ID NO: 1075730
ucuggagccaucuuauauc

SEQ ID NO: 1075732 - RNA, 19 nt, Artificial Sequence
  Description of Artificial Sequence: Synthetic oligonucleotide
  Sense strand starting at position 3002 of SEQ ID NO: 915383
caaguugugugacuuugaa

SEQ ID NO: 1075733 - RNA, 19 nt, Artificial Sequence
  Description of Artificial Sequence: Synthetic oligonucleotide
  Antisense strand to SEQ ID NO: 1075732
uucaaagucacacaacuug

SEQ ID NO: 1075734 - RNA, 19 nt, Artificial Sequence
  Description of Artificial Sequence: Synthetic oligonucleotide
  Sense strand starting at position 3198 of SEQ ID NO: 915383
ucucuuauucuuuagugac

SEQ ID NO: 1075735 - RNA, 19 nt, Artificial Sequence
  Description of Artificial Sequence: Synthetic oligonucleotide
  Antisense strand to SEQ ID NO: 1075734
gucacuaaagaauaagaga

SEQ ID NO: 1075736 - RNA, 19 nt, Artificial Sequence
  Description of Artificial Sequence: Synthetic oligonucleotide
  Sense strand starting at position 3324 of SEQ ID NO: 915383
guagguuuagcccagaagu

SEQ ID NO: 1075737 - RNA, 19 nt, Artificial Sequence
  Description of Artificial Sequence: Synthetic oligonucleotide
  Antisense strand to SEQ ID NO: 1075736
acuucugggcuaaaccuac

SEQ ID NO: 1075738 - RNA, 19 nt, Artificial Sequence
  Description of Artificial Sequence: Synthetic oligonucleotide
  Sense strand starting at position 3326 of SEQ ID NO: 915383
agguuuagcccagaagugu

SEQ ID NO: 1075739 - RNA, 19 nt, Artificial Sequence
  Description of Artificial Sequence: Synthetic oligonucleotide
  Antisense strand to SEQ ID NO: 1075738
acacuucugggcuaaaccu

SEQ ID NO: 1075740 - RNA, 19 nt, Artificial Sequence
  Description of Artificial Sequence: Synthetic oligonucleotide
  Sense strand starting at position 3470 of SEQ ID NO: 915383
cugguuagcacuugaagaa

SEQ ID NO: 1075741 - RNA, 19 nt, Artificial Sequence
  Description of Artificial Sequence: Synthetic oligonucleotide
  Antisense strand to SEQ ID NO: 1075740
uucuucaagugcuaaccag

SEQ ID NO: 1075742 - RNA, 19 nt, Artificial Sequence
  Description of Artificial Sequence: Synthetic oligonucleotide
  Sense strand starting at position 3522 of SEQ ID NO: 915383
ugcuguuguggucagaaga

SEQ ID NO: 1075743 - RNA, 19 nt, Artificial Sequence
  Description of Artificial Sequence: Synthetic oligonucleotide
  Antisense strand to SEQ ID NO: 1075742
ucuucugaccacaacagca

SEQ ID NO: 1075744 - RNA, 19 nt, Artificial Sequence
  Description of Artificial Sequence: Synthetic oligonucleotide
  Sense strand starting at position 3530 of SEQ ID NO: 915383
uggucagaagagugaguua

SEQ ID NO: 1075745 - RNA, 19 nt, Artificial Sequence
  Description of Artificial Sequence: Synthetic oligonucleotide
  Antisense strand to SEQ ID NO: 1075744
uaacucacucuucugacca

SEQ ID NO: 1075746 - RNA, 19 nt, Artificial Sequence
  Description of Artificial Sequence: Synthetic oligonucleotide
  Sense strand starting at position 3660 of SEQ ID NO: 915383
aaagaaauggcuuguccug

SEQ ID NO: 1075747 - RNA, 19 nt, Artificial Sequence
  Description of Artificial Sequence: Synthetic oligonucleotide
  Antisense strand to SEQ ID NO: 1075746
caggacaagccauuucuuu

SEQ ID NO: 1075748 - RNA, 19 nt, Artificial Sequence
  Description of Artificial Sequence: Synthetic oligonucleotide
  Sense strand starting at position 3929 of SEQ ID NO: 915383
ccuuaaauuggcuagcuuu

SEQ ID NO: 1075749 - RNA, 19 nt, Artificial Sequence
  Description of Artificial Sequence: Synthetic oligonucleotide
  Antisense strand to SEQ ID NO: 1075748
aaagcuagccaauuuaagg

SEQ ID NO: 1075750 - RNA, 19 nt, Artificial Sequence
  Description of Artificial Sequence: Synthetic oligonucleotide
  Sense strand starting at position 215 of SEQ ID NO: 915384
gugucaugugaaugaauga

SEQ ID NO: 1075751 - RNA, 19 nt, Artificial Sequence
  Description of Artificial Sequence: Synthetic oligonucleotide
  Antisense strand to SEQ ID NO: 1075750
ucauucauucacaugacac

SEQ ID NO: 1075752 - RNA, 19 nt, Artificial Sequence
  Description of Artificial Sequence: Synthetic oligonucleotide
  Sense strand starting at position 222 of SEQ ID NO: 915384
gugaaugaaugauugcacu

SEQ ID NO: 1075753 - RNA, 19 nt, Artificial Sequence
  Description of Artificial Sequence: Synthetic oligonucleotide
  Antisense strand to SEQ ID NO: 1075752
agugcaaucauucauucac

SEQ ID NO: 1075754 - RNA, 19 nt, Artificial Sequence
  Description of Artificial Sequence: Synthetic oligonucleotide
  Sense strand starting at position 257 of SEQ ID NO: 915384
aagagcaucugauuaugga

SEQ ID NO: 1075755 - RNA, 19 nt, Artificial Sequence
  Description of Artificial Sequence: Synthetic oligonucleotide
  Antisense strand to SEQ ID NO: 1075754
uccauaaucagaugcucuu

SEQ ID NO: 1075756 - RNA, 19 nt, Artificial Sequence
  Description of Artificial Sequence: Synthetic oligonucleotide
  Sense strand starting at position 393 of SEQ ID NO: 915384
agaauucugucaucagagu

SEQ ID NO: 1075757 - RNA, 19 nt, Artificial Sequence
  Description of Artificial Sequence: Synthetic oligonucleotide
  Antisense strand to SEQ ID NO: 1075756
acucugaugacagaauucu

SEQ ID NO: 1075758 - RNA, 19 nt, Artificial Sequence
  Description of Artificial Sequence: Synthetic oligonucleotide
  Sense strand starting at position 394 of SEQ ID NO: 915384
gaauucugucaucagaguu

SEQ ID NO: 1075759 - RNA, 19 nt, Artificial Sequence
  Description of Artificial Sequence: Synthetic oligonucleotide
  Antisense strand to SEQ ID NO: 1075758
aacucugaugacagaauuc

SEQ ID NO: 1075760 - RNA, 19 nt, Artificial Sequence
  Description of Artificial Sequence: Synthetic oligonucleotide
  Sense strand starting at position 415 of SEQ ID NO: 915384
acgccuuuggguuaaugga

SEQ ID NO: 1075761 - RNA, 19 nt, Artificial Sequence
  Description of Artificial Sequence: Synthetic oligonucleotide
  Antisense strand to SEQ ID NO: 1075760
uccauuaacccaaaggcgu

SEQ ID NO: 1075762 - RNA, 19 nt, Artificial Sequence
  Description of Artificial Sequence: Synthetic oligonucleotide
  Sense strand starting at position 423 of SEQ ID NO: 915384
ggguuaauggauuguucua

SEQ ID NO: 1075763 - RNA, 19 nt, Artificial Sequence
  Description of Artificial Sequence: Synthetic oligonucleotide
  Antisense strand to SEQ ID NO: 1075762
uagaacaauccauuaaccc

SEQ ID NO: 1075764 - RNA, 19 nt, Artificial Sequence
  Description of Artificial Sequence: Synthetic oligonucleotide
  Sense strand starting at position 475 of SEQ ID NO: 915384
uuaauaaagucaguuagga

SEQ ID NO: 1075765 - RNA, 19 nt, Artificial Sequence
  Description of Artificial Sequence: Synthetic oligonucleotide
  Antisense strand to SEQ ID NO: 1075764
uccuaacugacuuuauuaa

SEQ ID NO: 1075766 - RNA, 19 nt, Artificial Sequence
  Description of Artificial Sequence: Synthetic oligonucleotide
  Sense strand starting at position 483 of SEQ ID NO: 915384
gucaguuaggaguacuagu

SEQ ID NO: 1075767 - RNA, 19 nt, Artificial Sequence
  Description of Artificial Sequence: Synthetic oligonucleotide
  Antisense strand to SEQ ID NO: 1075766
acuaguacuccuaacugac

SEQ ID NO: 1075768 - RNA, 19 nt, Artificial Sequence
  Description of Artificial Sequence: Synthetic oligonucleotide
  Sense strand starting at position 491 of SEQ ID NO: 915384
ggaguacuaguguaacaga

SEQ ID NO: 1075769 - RNA, 19 nt, Artificial Sequence
  Description of Artificial Sequence: Synthetic oligonucleotide
  Antisense strand to SEQ ID NO: 1075768
ucuguuacacuaguacucc

SEQ ID NO: 1075770 - RNA, 19 nt, Artificial Sequence
  Description of Artificial Sequence: Synthetic oligonucleotide
  Sense strand starting at position 888 of SEQ ID NO: 915384
gccaaacgggauuaaguua

SEQ ID NO: 1075771 - RNA, 19 nt, Artificial Sequence
  Description of Artificial Sequence: Synthetic oligonucleotide
  Antisense strand to SEQ ID NO: 1075770
uaacuuaaucccguuuggc

SEQ ID NO: 1075772 - RNA, 19 nt, Artificial Sequence
  Description of Artificial Sequence: Synthetic oligonucleotide
  Sense strand starting at position 1013 of SEQ ID NO: 915384
agagaaaugucacucacug

SEQ ID NO: 1075773 - RNA, 19 nt, Artificial Sequence
  Description of Artificial Sequence: Synthetic oligonucleotide
  Antisense strand to SEQ ID NO: 1075772
cagugagugacauuucucu

SEQ ID NO: 1075774 - RNA, 19 nt, Artificial Sequence
  Description of Artificial Sequence: Synthetic oligonucleotide
  Sense strand starting at position 1078 of SEQ ID NO: 915384
aggucuuacguauauacuu

SEQ ID NO: 1075775 - RNA, 19 nt, Artificial Sequence
  Description of Artificial Sequence: Synthetic oligonucleotide
  Antisense strand to SEQ ID NO: 1075774
aaguauauacguaagaccu

SEQ ID NO: 1075776 - RNA, 19 nt, Artificial Sequence
  Description of Artificial Sequence: Synthetic oligonucleotide
  Sense strand starting at position 1086 of SEQ ID NO: 915384
cguauauacuuauuaaagg

SEQ ID NO: 1075777 - RNA, 19 nt, Artificial Sequence
  Description of Artificial Sequence: Synthetic oligonucleotide
  Antisense strand to SEQ ID NO: 1075776
ccuuuaauaaguauauacg

SEQ ID NO: 1075778 - RNA, 19 nt, Artificial Sequence
  Description of Artificial Sequence: Synthetic oligonucleotide
  Sense strand starting at position 1241 of SEQ ID NO: 915384
ugcacuuucucacugagau

SEQ ID NO: 1075779 - RNA, 19 nt, Artificial Sequence
  Description of Artificial Sequence: Synthetic oligonucleotide
  Antisense strand to SEQ ID NO: 1075778
aucucagugagaaagugca

SEQ ID NO: 1075780 - RNA, 19 nt, Artificial Sequence
  Description of Artificial Sequence: Synthetic oligonucleotide
  Sense strand starting at position 1242 of SEQ ID NO: 915384
gcacuuucucacugagauc

SEQ ID NO: 1075781 - RNA, 19 nt, Artificial Sequence
  Description of Artificial Sequence: Synthetic oligonucleotide
  Antisense strand to SEQ ID NO: 1075780
gaucucagugagaaagugc

SEQ ID NO: 1075782 - RNA, 19 nt, Artificial Sequence
  Description of Artificial Sequence: Synthetic oligonucleotide
  Sense strand starting at position 1251 of SEQ ID NO: 915384
cacugagaucugugcuaug

SEQ ID NO: 1075783 - RNA, 19 nt, Artificial Sequence
  Description of Artificial Sequence: Synthetic oligonucleotide
  Antisense strand to SEQ ID NO: 1075782
cauagcacagaucucagug

SEQ ID NO: 1075784 - RNA, 19 nt, Artificial Sequence
  Description of Artificial Sequence: Synthetic oligonucleotide
  Sense strand starting at position 1482 of SEQ ID NO: 915384
ugaguuucugucgaacuga

SEQ ID NO: 1075785 - RNA, 19 nt, Artificial Sequence
  Description of Artificial Sequence: Synthetic oligonucleotide
  Antisense strand to SEQ ID NO: 1075784
ucaguucgacagaaacuca

SEQ ID NO: 1075786 - RNA, 19 nt, Artificial Sequence
  Description of Artificial Sequence: Synthetic oligonucleotide
  Sense strand starting at position 1670 of SEQ ID NO: 915384
ccucgcuauguguucgaau

SEQ ID NO: 1075787 - RNA, 19 nt, Artificial Sequence
  Description of Artificial Sequence: Synthetic oligonucleotide
  Antisense strand to SEQ ID NO: 1075786
auucgaacacauagcgagg

SEQ ID NO: 1075788 - RNA, 19 nt, Artificial Sequence
  Description of Artificial Sequence: Synthetic oligonucleotide
  Sense strand starting at position 2219 of SEQ ID NO: 915384
uucgauuugugucugcacu

SEQ ID NO: 1075789 - RNA, 19 nt, Artificial Sequence
  Description of Artificial Sequence: Synthetic oligonucleotide
  Antisense strand to SEQ ID NO: 1075788
agugcagacacaaaucgaa

SEQ ID NO: 1075790 - RNA, 19 nt, Artificial Sequence
  Description of Artificial Sequence: Synthetic oligonucleotide
  Sense strand starting at position 2239 of SEQ ID NO: 915384
ggcguucucaaugauccua

SEQ ID NO: 1075791 - RNA, 19 nt, Artificial Sequence
  Description of Artificial Sequence: Synthetic oligonucleotide
  Antisense strand to SEQ ID NO: 1075790
uaggaucauugagaacgcc

SEQ ID NO: 1075792 - RNA, 19 nt, Artificial Sequence
  Description of Artificial Sequence: Synthetic oligonucleotide
  Sense strand starting at position 2241 of SEQ ID NO: 915384
cguucucaaugauccuaau

SEQ ID NO: 1075793 - RNA, 19 nt, Artificial Sequence
  Description of Artificial Sequence: Synthetic oligonucleotide
  Antisense strand to SEQ ID NO: 1075792
auuaggaucauugagaacg

SEQ ID NO: 1075794 - RNA, 19 nt, Artificial Sequence
  Description of Artificial Sequence: Synthetic oligonucleotide
  Sense strand starting at position 2263 of SEQ ID NO: 915384
ggaagcauuucgguucuca

SEQ ID NO: 1075795 - RNA, 19 nt, Artificial Sequence
  Description of Artificial Sequence: Synthetic oligonucleotide
  Antisense strand to SEQ ID NO: 1075794
ugagaaccgaaaugcuucc

SEQ ID NO: 1075796 - RNA, 19 nt, Artificial Sequence
  Description of Artificial Sequence: Synthetic oligonucleotide
  Sense strand starting at position 2343 of SEQ ID NO: 915384
gaguccugugguuaccuua

SEQ ID NO: 1075797 - RNA, 19 nt, Artificial Sequence
  Description of Artificial Sequence: Synthetic oligonucleotide
  Antisense strand to SEQ ID NO: 1075796
uaagguaaccacaggacuc

SEQ ID NO: 1075798 - RNA, 19 nt, Artificial Sequence
  Description of Artificial Sequence: Synthetic oligonucleotide
  Sense strand starting at position 2423 of SEQ ID NO: 915384
cccuuuauucgugauaaga

SEQ ID NO: 1075799 - RNA, 19 nt, Artificial Sequence
  Description of Artificial Sequence: Synthetic oligonucleotide
  Antisense strand to SEQ ID NO: 1075798
ucuuaucacgaauaaaggg

SEQ ID NO: 1075800 - RNA, 19 nt, Artificial Sequence
  Description of Artificial Sequence: Synthetic oligonucleotide
  Sense strand starting at position 2469 of SEQ ID NO: 915384
uuacauugguucuccaaug

SEQ ID NO: 1075801 - RNA, 19 nt, Artificial Sequence
  Description of Artificial Sequence: Synthetic oligonucleotide
  Antisense strand to SEQ ID NO: 1075800
cauuggagaaccaauguaa

SEQ ID NO: 1075802 - RNA, 19 nt, Artificial Sequence
  Description of Artificial Sequence: Synthetic oligonucleotide
  Sense strand starting at position 2601 of SEQ ID NO: 915384
aagaguguacaguggaaau

SEQ ID NO: 1075803 - RNA, 19 nt, Artificial Sequence
  Description of Artificial Sequence: Synthetic oligonucleotide
  Antisense strand to SEQ ID NO: 1075802
auuuccacuguacacucuu

SEQ ID NO: 1075804 - RNA, 19 nt, Artificial Sequence
  Description of Artificial Sequence: Synthetic oligonucleotide
  Sense strand starting at position 2638 of SEQ ID NO: 915384
guguaauaacgucaucauu

SEQ ID NO: 1075805 - RNA, 19 nt, Artificial Sequence
  Description of Artificial Sequence: Synthetic oligonucleotide
  Antisense strand to SEQ ID NO: 1075804
aaugaugacguuauuacac

SEQ ID NO: 1075806 - RNA, 19 nt, Artificial Sequence
  Description of Artificial Sequence: Synthetic oligonucleotide
  Sense strand starting at position 2676 of SEQ ID NO: 915384
cugagugagcgugcuugua

SEQ ID NO: 1075807 - RNA, 19 nt, Artificial Sequence
  Description of Artificial Sequence: Synthetic oligonucleotide
  Antisense strand to SEQ ID NO: 1075806
uacaagcacgcucacucag

SEQ ID NO: 1075808 - RNA, 19 nt, Artificial Sequence
  Description of Artificial Sequence: Synthetic oligonucleotide
  Sense strand starting at position 2717 of SEQ ID NO: 915384
guauguuuacauuaucagu

SEQ ID NO: 1075809 - RNA, 19 nt, Artificial Sequence
  Description of Artificial Sequence: Synthetic oligonucleotide
  Antisense strand to SEQ ID NO: 1075808
acugauaauguaaacauac

SEQ ID NO: 1075810 - RNA, 19 nt, Artificial Sequence
  Description of Artificial Sequence: Synthetic oligonucleotide
  Sense strand starting at position 2723 of SEQ ID NO: 915384
uuacauuaucaguauguac

SEQ ID NO: 1075811 - RNA, 19 nt, Artificial Sequence
  Description of Artificial Sequence: Synthetic oligonucleotide
  Antisense strand to SEQ ID NO: 1075810
guacauacugauaauguaa

SEQ ID NO: 1075812 - RNA, 19 nt, Artificial Sequence
  Description of Artificial Sequence: Synthetic oligonucleotide
  Sense strand starting at position 2725 of SEQ ID NO: 915384
acauuaucaguauguacau

SEQ ID NO: 1075813 - RNA, 19 nt, Artificial Sequence
  Description of Artificial Sequence: Synthetic oligonucleotide
  Antisense strand to SEQ ID NO: 1075812
auguacauacugauaaugu

SEQ ID NO: 1075814 - RNA, 19 nt, Artificial Sequence
  Description of Artificial Sequence: Synthetic oligonucleotide
  Sense strand starting at position 3040 of SEQ ID NO: 915384
uuuccuugagucuaugcau

SEQ ID NO: 1075815 - RNA, 19 nt, Artificial Sequence
  Description of Artificial Sequence: Synthetic oligonucleotide
  Antisense strand to SEQ ID NO: 1075814
augcauagacucaaggaaa

SEQ ID NO: 1075816 - RNA, 19 nt, Artificial Sequence
  Description of Artificial Sequence: Synthetic oligonucleotide
  Sense strand starting at position 3043 of SEQ ID NO: 915384
ccuugagucuaugcauaaa

SEQ ID NO: 1075817 - RNA, 19 nt, Artificial Sequence
  Description of Artificial Sequence: Synthetic oligonucleotide
  Antisense strand to SEQ ID NO: 1075816
uuuaugcauagacucaagg

SEQ ID NO: 1075818 - RNA, 19 nt, Artificial Sequence
  Description of Artificial Sequence: Synthetic oligonucleotide
  Sense strand starting at position 3046 of SEQ ID NO: 915384
ugagucuaugcauaaacau

SEQ ID NO: 1075819 - RNA, 19 nt, Artificial Sequence
  Description of Artificial Sequence: Synthetic oligonucleotide
  Antisense strand to SEQ ID NO: 1075818
auguuuaugcauagacuca

SEQ ID NO: 1075820 - RNA, 19 nt, Artificial Sequence
  Description of Artificial Sequence: Synthetic oligonucleotide
  Sense strand starting at position 3287 of SEQ ID NO: 915384
auggucacauccuucuuua

SEQ ID NO: 1075821 - RNA, 19 nt, Artificial Sequence
  Description of Artificial Sequence: Synthetic oligonucleotide
  Antisense strand to SEQ ID NO: 1075820
uaaagaaggaugugaccau

SEQ ID NO: 1075822 - RNA, 19 nt, Artificial Sequence
  Description of Artificial Sequence: Synthetic oligonucleotide
  Sense strand starting at position 3309 of SEQ ID NO: 915384
aaagaacgugcuuaacagu

SEQ ID NO: 1075823 - RNA, 19 nt, Artificial Sequence
  Description of Artificial Sequence: Synthetic oligonucleotide
  Antisense strand to SEQ ID NO: 1075822
acuguuaagcacguucuuu

SEQ ID NO: 1075824 - RNA, 19 nt, Artificial Sequence
  Description of Artificial Sequence: Synthetic oligonucleotide
  Sense strand starting at position 3318 of SEQ ID NO: 915384
gcuuaacaguucuuugaaa

SEQ ID NO: 1075825 - RNA, 19 nt, Artificial Sequence
  Description of Artificial Sequence: Synthetic oligonucleotide
  Antisense strand to SEQ ID NO: 1075824
uuucaaagaacuguuaagc

SEQ ID NO: 1075826 - RNA, 19 nt, Artificial Sequence
  Description of Artificial Sequence: Synthetic oligonucleotide
  Sense strand starting at position 3339 of SEQ ID NO: 915384
cuauuuaugcuuuggucga

SEQ ID NO: 1075827 - RNA, 19 nt, Artificial Sequence
  Description of Artificial Sequence: Synthetic oligonucleotide
  Antisense strand to SEQ ID NO: 1075826
ucgaccaaagcauaaauag

SEQ ID NO: 1075828 - RNA, 19 nt, Artificial Sequence
  Description of Artificial Sequence: Synthetic oligonucleotide
  Sense strand starting at position 3909 of SEQ ID NO: 915384
uaccucguggucuaaacua

SEQ ID NO: 1075829 - RNA, 19 nt, Artificial Sequence
  Description of Artificial Sequence: Synthetic oligonucleotide
  Antisense strand to SEQ ID NO: 1075828
uaguuuagaccacgaggua

SEQ ID NO: 1075830 - RNA, 19 nt, Artificial Sequence
  Description of Artificial Sequence: Synthetic oligonucleotide
  Sense strand starting at position 67 of SEQ ID NO: 915385
gugggaguuaggcaugaau

SEQ ID NO: 1075831 - RNA, 19 nt, Artificial Sequence
  Description of Artificial Sequence: Synthetic oligonucleotide
  Antisense strand to SEQ ID NO: 1075830
auucaugccuaacucccac

SEQ ID NO: 1075832 - RNA, 19 nt, Artificial Sequence
  Description of Artificial Sequence: Synthetic oligonucleotide
  Sense strand starting at position 69 of SEQ ID NO: 915385
gggaguuaggcaugaauaa

SEQ ID NO: 1075833 - RNA, 19 nt, Artificial Sequence
  Description of Artificial Sequence: Synthetic oligonucleotide
  Antisense strand to SEQ ID NO: 1075832
uuauucaugccuaacuccc

SEQ ID NO: 1075834 - RNA, 19 nt, Artificial Sequence
  Description of Artificial Sequence: Synthetic oligonucleotide
  Sense strand starting at position 80 of SEQ ID NO: 915385
augaauaaugccuggugga

SEQ ID NO: 1075835 - RNA, 19 nt, Artificial Sequence
  Description of Artificial Sequence: Synthetic oligonucleotide
  Antisense strand to SEQ ID NO: 1075834
uccaccaggcauuauucau

SEQ ID NO: 1075836 - RNA, 19 nt, Artificial Sequence
  Description of Artificial Sequence: Synthetic oligonucleotide
  Sense strand starting at position 81 of SEQ ID NO: 915385
ugaauaaugccugguggau

SEQ ID NO: 1075837 - RNA, 19 nt, Artificial Sequence
  Description of Artificial Sequence: Synthetic oligonucleotide
  Antisense strand to SEQ ID NO: 1075836
auccaccaggcauuauuca

SEQ ID NO: 1075838 - RNA, 19 nt, Artificial Sequence
  Description of Artificial Sequence: Synthetic oligonucleotide
  Sense strand starting at position 109 of SEQ ID NO: 915385
agggaucuaugagaagagu

SEQ ID NO: 1075839 - RNA, 19 nt, Artificial Sequence
  Description of Artificial Sequence: Synthetic oligonucleotide
  Antisense strand to SEQ ID NO: 1075838
acucuucucauagaucccu

SEQ ID NO: 1075840 - RNA, 19 nt, Artificial Sequence
  Description of Artificial Sequence: Synthetic oligonucleotide
  Sense strand starting at position 132 of SEQ ID NO: 915385
gggagaaccugagacuauu

SEQ ID NO: 1075841 - RNA, 19 nt, Artificial Sequence
  Description of Artificial Sequence: Synthetic oligonucleotide
  Antisense strand to SEQ ID NO: 1075840
aauagucucagguucuccc

SEQ ID NO: 1075842 - RNA, 19 nt, Artificial Sequence
  Description of Artificial Sequence: Synthetic oligonucleotide
  Sense strand starting at position 186 of SEQ ID NO: 915385
ugcauuaauggacacuuau

SEQ ID NO: 1075843 - RNA, 19 nt, Artificial Sequence
  Description of Artificial Sequence: Synthetic oligonucleotide
  Antisense strand to SEQ ID NO: 1075842
auaaguguccauuaaugca

SEQ ID NO: 1075844 - RNA, 19 nt, Artificial Sequence
  Description of Artificial Sequence: Synthetic oligonucleotide
  Sense strand starting at position 243 of SEQ ID NO: 915385
ugaauaagucgucaguguu

SEQ ID NO: 1075845 - RNA, 19 nt, Artificial Sequence
  Description of Artificial Sequence: Synthetic oligonucleotide
  Antisense strand to SEQ ID NO: 1075844
aacacugacgacuuauuca

SEQ ID NO: 1075846 - RNA, 19 nt, Artificial Sequence
  Description of Artificial Sequence: Synthetic oligonucleotide
  Sense strand starting at position 331 of SEQ ID NO: 915385
aaguuaccgcuugacuuua

SEQ ID NO: 1075847 - RNA, 19 nt, Artificial Sequence
  Description of Artificial Sequence: Synthetic oligonucleotide
  Antisense strand to SEQ ID NO: 1075846
uaaagucaagcgguaacuu

SEQ ID NO: 1075848 - RNA, 19 nt, Artificial Sequence
  Description of Artificial Sequence: Synthetic oligonucleotide
  Sense strand starting at position 494 of SEQ ID NO: 915385
caugguaggcacgguuaua

SEQ ID NO: 1075849 - RNA, 19 nt, Artificial Sequence
  Description of Artificial Sequence: Synthetic oligonucleotide
  Antisense strand to SEQ ID NO: 1075848
uauaaccgugccuaccaug

SEQ ID NO: 1075850 - RNA, 19 nt, Artificial Sequence
  Description of Artificial Sequence: Synthetic oligonucleotide
  Sense strand starting at position 636 of SEQ ID NO: 915385
cucacaugaccaugugaug

SEQ ID NO: 1075851 - RNA, 19 nt, Artificial Sequence
  Description of Artificial Sequence: Synthetic oligonucleotide
  Antisense strand to SEQ ID NO: 1075850
caucacauggucaugugag

SEQ ID NO: 1075852 - RNA, 19 nt, Artificial Sequence
  Description of Artificial Sequence: Synthetic oligonucleotide
  Sense strand starting at position 852 of SEQ ID NO: 915385
uaauuuguauucuggagag

SEQ ID NO: 1075853 - RNA, 19 nt, Artificial Sequence
  Description of Artificial Sequence: Synthetic oligonucleotide
  Antisense strand to SEQ ID NO: 1075852
cucuccagaauacaaauua

SEQ ID NO: 1075854 - RNA, 19 nt, Artificial Sequence
  Description of Artificial Sequence: Synthetic oligonucleotide
  Sense strand starting at position 941 of SEQ ID NO: 915385
aaguuaacucgugaugaau

SEQ ID NO: 1075855 - RNA, 19 nt, Artificial Sequence
  Description of Artificial Sequence: Synthetic oligonucleotide
  Antisense strand to SEQ ID NO: 1075854
auucaucacgaguuaacuu

SEQ ID NO: 1075856 - RNA, 19 nt, Artificial Sequence
  Description of Artificial Sequence: Synthetic oligonucleotide
  Sense strand starting at position 1008 of SEQ ID NO: 915385
gacuguagugucuaggguu

SEQ ID NO: 1075857 - RNA, 19 nt, Artificial Sequence
  Description of Artificial Sequence: Synthetic oligonucleotide
  Antisense strand to SEQ ID NO: 1075856
aacccuagacacuacaguc

SEQ ID NO: 1075858 - RNA, 19 nt, Artificial Sequence
  Description of Artificial Sequence: Synthetic oligonucleotide
  Sense strand starting at position 1135 of SEQ ID NO: 915385
aucacaugcccaggguuaa

SEQ ID NO: 1075859 - RNA, 19 nt, Artificial Sequence
  Description of Artificial Sequence: Synthetic oligonucleotide
  Antisense strand to SEQ ID NO: 1075858
uuaacccugggcaugugau

SEQ ID NO: 1075860 - RNA, 19 nt, Artificial Sequence
  Description of Artificial Sequence: Synthetic oligonucleotide
  Sense strand starting at position 1136 of SEQ ID NO: 915385
ucacaugcccaggguuaaa

SEQ ID NO: 1075861 - RNA, 19 nt, Artificial Sequence
  Description of Artificial Sequence: Synthetic oligonucleotide
  Antisense strand to SEQ ID NO: 1075860
uuuaacccugggcauguga

SEQ ID NO: 1075862 - RNA, 19 nt, Artificial Sequence
  Description of Artificial Sequence: Synthetic oligonucleotide
  Sense strand starting at position 1170 of SEQ ID NO: 915385
cuugauggaauccgguaua

SEQ ID NO: 1075863 - RNA, 19 nt, Artificial Sequence
  Description of Artificial Sequence: Synthetic oligonucleotide
  Antisense strand to SEQ ID NO: 1075862
uauaccggauuccaucaag

SEQ ID NO: 1075864 - RNA, 19 nt, Artificial Sequence
  Description of Artificial Sequence: Synthetic oligonucleotide
  Sense strand starting at position 1173 of SEQ ID NO: 915385
gauggaauccgguauaugc

SEQ ID NO: 1075865 - RNA, 19 nt, Artificial Sequence
  Description of Artificial Sequence: Synthetic oligonucleotide
  Antisense strand to SEQ ID NO: 1075864
gcauauaccggauuccauc

SEQ ID NO: 1075866 - RNA, 19 nt, Artificial Sequence
  Description of Artificial Sequence: Synthetic oligonucleotide
  Sense strand starting at position 1348 of SEQ ID NO: 915385
ccguuucaugggugacacu

SEQ ID NO: 1075867 - RNA, 19 nt, Artificial Sequence
  Description of Artificial Sequence: Synthetic oligonucleotide
  Antisense strand to SEQ ID NO: 1075866
agugucacccaugaaacgg

SEQ ID NO: 1075868 - RNA, 19 nt, Artificial Sequence
  Description of Artificial Sequence: Synthetic oligonucleotide
  Sense strand starting at position 2187 of SEQ ID NO: 915385
cugggcaaauuugaagaau

SEQ ID NO: 1075869 - RNA, 19 nt, Artificial Sequence
  Description of Artificial Sequence: Synthetic oligonucleotide
  Antisense strand to SEQ ID NO: 1075868
auucuucaaauuugcccag

SEQ ID NO: 1075870 - RNA, 19 nt, Artificial Sequence
  Description of Artificial Sequence: Synthetic oligonucleotide
  Sense strand starting at position 2485 of SEQ ID NO: 915385
ggccuacuucccugaauca

SEQ ID NO: 1075871 - RNA, 19 nt, Artificial Sequence
  Description of Artificial Sequence: Synthetic oligonucleotide
  Antisense strand to SEQ ID NO: 1075870
ugauucagggaaguaggcc

SEQ ID NO: 1075872 - RNA, 19 nt, Artificial Sequence
  Description of Artificial Sequence: Synthetic oligonucleotide
  Sense strand starting at position 2584 of SEQ ID NO: 915385
uggagaccuugccauuuaa

SEQ ID NO: 1075873 - RNA, 19 nt, Artificial Sequence
  Description of Artificial Sequence: Synthetic oligonucleotide
  Antisense strand to SEQ ID NO: 1075872
uuaaauggcaaggucucca

SEQ ID NO: 1075874 - RNA, 19 nt, Artificial Sequence
  Description of Artificial Sequence: Synthetic oligonucleotide
  Sense strand starting at position 2612 of SEQ ID NO: 915385
guuagagccuuccuauuua

SEQ ID NO: 1075875 - RNA, 19 nt, Artificial Sequence
  Description of Artificial Sequence: Synthetic oligonucleotide
  Antisense strand to SEQ ID NO: 1075874
uaaauaggaaggcucuaac

SEQ ID NO: 1075876 - RNA, 19 nt, Artificial Sequence
  Description of Artificial Sequence: Synthetic oligonucleotide
  Sense strand starting at position 2620 of SEQ ID NO: 915385
cuuccuauuuaguauagau

SEQ ID NO: 1075877 - RNA, 19 nt, Artificial Sequence
  Description of Artificial Sequence: Synthetic oligonucleotide
  Antisense strand to SEQ ID NO: 1075876
aucuauacuaaauaggaag

SEQ ID NO: 1075878 - RNA, 19 nt, Artificial Sequence
  Description of Artificial Sequence: Synthetic oligonucleotide
  Sense strand starting at position 2629 of SEQ ID NO: 915385
uaguauagauuacugugua

SEQ ID NO: 1075879 - RNA, 19 nt, Artificial Sequence
  Description of Artificial Sequence: Synthetic oligonucleotide
  Antisense strand to SEQ ID NO: 1075878
uacacaguaaucuauacua

SEQ ID NO: 1075880 - RNA, 19 nt, Artificial Sequence
  Description of Artificial Sequence: Synthetic oligonucleotide
  Sense strand starting at position 2632 of SEQ ID NO: 915385
uauagauuacuguguauug

SEQ ID NO: 1075881 - RNA, 19 nt, Artificial Sequence
  Description of Artificial Sequence: Synthetic oligonucleotide
  Antisense strand to SEQ ID NO: 1075880
caauacacaguaaucuaua

SEQ ID NO: 1075882 - RNA, 19 nt, Artificial Sequence
  Description of Artificial Sequence: Synthetic oligonucleotide
  Sense strand starting at position 2633 of SEQ ID NO: 915385
auagauuacuguguauuga

SEQ ID NO: 1075883 - RNA, 19 nt, Artificial Sequence
  Description of Artificial Sequence: Synthetic oligonucleotide
  Antisense strand to SEQ ID NO: 1075882
ucaauacacaguaaucuau

SEQ ID NO: 1075884 - RNA, 19 nt, Artificial Sequence
  Description of Artificial Sequence: Synthetic oligonucleotide
  Sense strand starting at position 2634 of SEQ ID NO: 915385
uagauuacuguguauugag

SEQ ID NO: 1075885 - RNA, 19 nt, Artificial Sequence
  Description of Artificial Sequence: Synthetic oligonucleotide
  Antisense strand to SEQ ID NO: 1075884
cucaauacacaguaaucua

SEQ ID NO: 1075886 - RNA, 19 nt, Artificial Sequence
  Description of Artificial Sequence: Synthetic oligonucleotide
  Sense strand starting at position 2680 of SEQ ID NO: 915385
ggccauuguggugaagaag

SEQ ID NO: 1075887 - RNA, 19 nt, Artificial Sequence
  Description of Artificial Sequence: Synthetic oligonucleotide
  Antisense strand to SEQ ID NO: 1075886
cuucuucaccacaauggcc

SEQ ID NO: 1075888 - RNA, 19 nt, Artificial Sequence
  Description of Artificial Sequence: Synthetic oligonucleotide
  Sense strand starting at position 2776 of SEQ ID NO: 915385
acugaaugguaggacaaga

SEQ ID NO: 1075889 - RNA, 19 nt, Artificial Sequence
  Description of Artificial Sequence: Synthetic oligonucleotide
  Antisense strand to SEQ ID NO: 1075888
ucuuguccuaccauucagu

SEQ ID NO: 1075890 - RNA, 19 nt, Artificial Sequence
  Description of Artificial Sequence: Synthetic oligonucleotide
  Sense strand starting at position 2899 of SEQ ID NO: 915385
uguuacugauaugccuaau

SEQ ID NO: 1075891 - RNA, 19 nt, Artificial Sequence
  Description of Artificial Sequence: Synthetic oligonucleotide
  Antisense strand to SEQ ID NO: 1075890
auuaggcauaucaguaaca

SEQ ID NO: 1075892 - RNA, 19 nt, Artificial Sequence
  Description of Artificial Sequence: Synthetic oligonucleotide
  Sense strand starting at position 3129 of SEQ ID NO: 915385
ccugguauuucuuaaauag

SEQ ID NO: 1075893 - RNA, 19 nt, Artificial Sequence
  Description of Artificial Sequence: Synthetic oligonucleotide
  Antisense strand to SEQ ID NO: 1075892
cuauuuaagaaauaccagg

SEQ ID NO: 1075894 - RNA, 19 nt, Artificial Sequence
  Description of Artificial Sequence: Synthetic oligonucleotide
  Sense strand starting at position 3648 of SEQ ID NO: 915385
uaacguuuccuggacuacu

SEQ ID NO: 1075895 - RNA, 19 nt, Artificial Sequence
  Description of Artificial Sequence: Synthetic oligonucleotide
  Antisense strand to SEQ ID NO: 1075894
aguaguccaggaaacguua

SEQ ID NO: 1075896 - RNA, 19 nt, Artificial Sequence
  Description of Artificial Sequence: Synthetic oligonucleotide
  Sense strand starting at position 3816 of SEQ ID NO: 915385
accauaugucauugcaaug

SEQ ID NO: 1075897 - RNA, 19 nt, Artificial Sequence
  Description of Artificial Sequence: Synthetic oligonucleotide
  Antisense strand to SEQ ID NO: 1075896
cauugcaaugacauauggu

SEQ ID NO: 1075898 - RNA, 19 nt, Artificial Sequence
  Description of Artificial Sequence: Synthetic oligonucleotide
  Sense strand starting at position 3821 of SEQ ID NO: 915385
augucauugcaauggguuu

SEQ ID NO: 1075899 - RNA, 19 nt, Artificial Sequence
  Description of Artificial Sequence: Synthetic oligonucleotide
  Antisense strand to SEQ ID NO: 1075898
aaacccauugcaaugacau

SEQ ID NO: 1075900 - RNA, 19 nt, Artificial Sequence
  Description of Artificial Sequence: Synthetic oligonucleotide
  Sense strand starting at position 3835 of SEQ ID NO: 915385
gguuucucuugacucuaau

SEQ ID NO: 1075901 - RNA, 19 nt, Artificial Sequence
  Description of Artificial Sequence: Synthetic oligonucleotide
  Antisense strand to SEQ ID NO: 1075900
auuagagucaagagaaacc

SEQ ID NO: 1075902 - RNA, 19 nt, Artificial Sequence
  Description of Artificial Sequence: Synthetic oligonucleotide
  Sense strand starting at position 3958 of SEQ ID NO: 915385
caguacuuggcaugagaug

SEQ ID NO: 1075903 - RNA, 19 nt, Artificial Sequence
  Description of Artificial Sequence: Synthetic oligonucleotide
  Antisense strand to SEQ ID NO: 1075902
caucucaugccaaguacug

SEQ ID NO: 1075904 - RNA, 19 nt, Artificial Sequence
  Description of Artificial Sequence: Synthetic oligonucleotide
  Sense strand starting at position 3967 of SEQ ID NO: 915385
gcaugagauggucauccca

SEQ ID NO: 1075905 - RNA, 19 nt, Artificial Sequence
  Description of Artificial Sequence: Synthetic oligonucleotide
  Antisense strand to SEQ ID NO: 1075904
ugggaugaccaucucaugc

SEQ ID NO: 1075906 - RNA, 19 nt, Artificial Sequence
  Description of Artificial Sequence: Synthetic oligonucleotide
  Sense strand starting at position 3969 of SEQ ID NO: 915385
augagauggucaucccaau

SEQ ID NO: 1075907 - RNA, 19 nt, Artificial Sequence
  Description of Artificial Sequence: Synthetic oligonucleotide
  Antisense strand to SEQ ID NO: 1075906
auugggaugaccaucucau

SEQ ID NO: 1075908 - RNA, 19 nt, Artificial Sequence
  Description of Artificial Sequence: Synthetic oligonucleotide
  Sense strand starting at position 3975 of SEQ ID NO: 915385
uggucaucccaaugaucca

SEQ ID NO: 1075909 - RNA, 19 nt, Artificial Sequence
  Description of Artificial Sequence: Synthetic oligonucleotide
  Antisense strand to SEQ ID NO: 1075908
uggaucauugggaugacca

SEQ ID NO: 1075910 - RNA, 19 nt, Artificial Sequence
  Description of Artificial Sequence: Synthetic oligonucleotide
  Sense strand starting at position 339 of SEQ ID NO: 915386
ggccuaacacaauguuaca

SEQ ID NO: 1075911 - RNA, 19 nt, Artificial Sequence
  Description of Artificial Sequence: Synthetic oligonucleotide
  Antisense strand to SEQ ID NO: 1075910
uguaacauuguguuaggcc

SEQ ID NO: 1075912 - RNA, 19 nt, Artificial Sequence
  Description of Artificial Sequence: Synthetic oligonucleotide
  Sense strand starting at position 473 of SEQ ID NO: 915386
uguugaauaccaugaguuu

SEQ ID NO: 1075913 - RNA, 19 nt, Artificial Sequence
  Description of Artificial Sequence: Synthetic oligonucleotide
  Antisense strand to SEQ ID NO: 1075912
aaacucaugguauucaaca

SEQ ID NO: 1075914 - RNA, 19 nt, Artificial Sequence
  Description of Artificial Sequence: Synthetic oligonucleotide
  Sense strand starting at position 474 of SEQ ID NO: 915386
guugaauaccaugaguuug

SEQ ID NO: 1075915 - RNA, 19 nt, Artificial Sequence
  Description of Artificial Sequence: Synthetic oligonucleotide
  Antisense strand to SEQ ID NO: 1075914
caaacucaugguauucaac

SEQ ID NO: 1075916 - RNA, 19 nt, Artificial Sequence
  Description of Artificial Sequence: Synthetic oligonucleotide
  Sense strand starting at position 534 of SEQ ID NO: 915386
gggucuuggcaauagcaca

SEQ ID NO: 1075917 - RNA, 19 nt, Artificial Sequence
  Description of Artificial Sequence: Synthetic oligonucleotide
  Antisense strand to SEQ ID NO: 1075916
ugugcuauugccaagaccc

SEQ ID NO: 1075918 - RNA, 19 nt, Artificial Sequence
  Description of Artificial Sequence: Synthetic oligonucleotide
  Sense strand starting at position 574 of SEQ ID NO: 915386
uaaugaaguggcuacuuau

SEQ ID NO: 1075919 - RNA, 19 nt, Artificial Sequence
  Description of Artificial Sequence: Synthetic oligonucleotide
  Antisense strand to SEQ ID NO: 1075918
auaaguagccacuucauua

SEQ ID NO: 1075920 - RNA, 19 nt, Artificial Sequence
  Description of Artificial Sequence: Synthetic oligonucleotide
  Sense strand starting at position 577 of SEQ ID NO: 915386
ugaaguggcuacuuaugga

SEQ ID NO: 1075921 - RNA, 19 nt, Artificial Sequence
  Description of Artificial Sequence: Synthetic oligonucleotide
  Antisense strand to SEQ ID NO: 1075920
uccauaaguagccacuuca

SEQ ID NO: 1075922 - RNA, 19 nt, Artificial Sequence
  Description of Artificial Sequence: Synthetic oligonucleotide
  Sense strand starting at position 584 of SEQ ID NO: 915386
gcuacuuauggaggugaag

SEQ ID NO: 1075923 - RNA, 19 nt, Artificial Sequence
  Description of Artificial Sequence: Synthetic oligonucleotide
  Antisense strand to SEQ ID NO: 1075922
cuucaccuccauaaguagc

SEQ ID NO: 1075924 - RNA, 19 nt, Artificial Sequence
  Description of Artificial Sequence: Synthetic oligonucleotide
  Sense strand starting at position 654 of SEQ ID NO: 915386
gugggaagccaucacucau

SEQ ID NO: 1075925 - RNA, 19 nt, Artificial Sequence
  Description of Artificial Sequence: Synthetic oligonucleotide
  Antisense strand to SEQ ID NO: 1075924
augagugauggcuucccac

SEQ ID NO: 1075926 - RNA, 19 nt, Artificial Sequence
  Description of Artificial Sequence: Synthetic oligonucleotide
  Sense strand starting at position 735 of SEQ ID NO: 915386
agggaagccugcuuccaau

SEQ ID NO: 1075927 - RNA, 19 nt, Artificial Sequence
  Description of Artificial Sequence: Synthetic oligonucleotide
  Antisense strand to SEQ ID NO: 1075926
auuggaagcaggcuucccu

SEQ ID NO: 1075928 - RNA, 19 nt, Artificial Sequence
  Description of Artificial Sequence: Synthetic oligonucleotide
  Sense strand starting at position 756 of SEQ ID NO: 915386
ccgaguaguccauggagag

SEQ ID NO: 1075929 - RNA, 19 nt, Artificial Sequence
  Description of Artificial Sequence: Synthetic oligonucleotide
  Antisense strand to SEQ ID NO: 1075928
cucuccauggacuacucgg

SEQ ID NO: 1075930 - RNA, 19 nt, Artificial Sequence
  Description of Artificial Sequence: Synthetic oligonucleotide
  Sense strand starting at position 893 of SEQ ID NO: 915386
ucagguugugcugucugua

SEQ ID NO: 1075931 - RNA, 19 nt, Artificial Sequence
  Description of Artificial Sequence: Synthetic oligonucleotide
  Antisense strand to SEQ ID NO: 1075930
uacagacagcacaaccuga

SEQ ID NO: 1075932 - RNA, 19 nt, Artificial Sequence
  Description of Artificial Sequence: Synthetic oligonucleotide
  Sense strand starting at position 1107 of SEQ ID NO: 915386
agagccugauucucaaauu

SEQ ID NO: 1075933 - RNA, 19 nt, Artificial Sequence
  Description of Artificial Sequence: Synthetic oligonucleotide
  Antisense strand to SEQ ID NO: 1075932
aauuugagaaucaggcucu

SEQ ID NO: 1075934 - RNA, 19 nt, Artificial Sequence
  Description of Artificial Sequence: Synthetic oligonucleotide
  Sense strand starting at position 1137 of SEQ ID NO: 915386
ucauaagaacccugugaau

SEQ ID NO: 1075935 - RNA, 19 nt, Artificial Sequence
  Description of Artificial Sequence: Synthetic oligonucleotide
  Antisense strand to SEQ ID NO: 1075934
auucacaggguucuuauga

SEQ ID NO: 1075936 - RNA, 19 nt, Artificial Sequence
  Description of Artificial Sequence: Synthetic oligonucleotide
  Sense strand starting at position 1371 of SEQ ID NO: 915386
gugagcugacuuuaagacu

SEQ ID NO: 1075937 - RNA, 19 nt, Artificial Sequence
  Description of Artificial Sequence: Synthetic oligonucleotide
  Antisense strand to SEQ ID NO: 1075936
agucuuaaagucagcucac

SEQ ID NO: 1075938 - RNA, 19 nt, Artificial Sequence
  Description of Artificial Sequence: Synthetic oligonucleotide
  Sense strand starting at position 1459 of SEQ ID NO: 915386
ucucuuuguggaggugaga

SEQ ID NO: 1075939 - RNA, 19 nt, Artificial Sequence
  Description of Artificial Sequence: Synthetic oligonucleotide
  Antisense strand to SEQ ID NO: 1075938
ucucaccuccacaaagaga

SEQ ID NO: 1075940 - RNA, 19 nt, Artificial Sequence
  Description of Artificial Sequence: Synthetic oligonucleotide
  Sense strand starting at position 1468 of SEQ ID NO: 915386
ggaggugagagcugcugaa

SEQ ID NO: 1075941 - RNA, 19 nt, Artificial Sequence
  Description of Artificial Sequence: Synthetic oligonucleotide
  Antisense strand to SEQ ID NO: 1075940
uucagcagcucucaccucc

SEQ ID NO: 1075942 - RNA, 19 nt, Artificial Sequence
  Description of Artificial Sequence: Synthetic oligonucleotide
  Sense strand starting at position 1632 of SEQ ID NO: 915386
ucagaagaguaaccuguuu

SEQ ID NO: 1075943 - RNA, 19 nt, Artificial Sequence
  Description of Artificial Sequence: Synthetic oligonucleotide
  Antisense strand to SEQ ID NO: 1075942
aaacagguuacucuucuga

SEQ ID NO: 1075944 - RNA, 19 nt, Artificial Sequence
  Description of Artificial Sequence: Synthetic oligonucleotide
  Sense strand starting at position 2006 of SEQ ID NO: 915386
gucacacugggaugagauu

SEQ ID NO: 1075945 - RNA, 19 nt, Artificial Sequence
  Description of Artificial Sequence: Synthetic oligonucleotide
  Antisense strand to SEQ ID NO: 1075944
aaucucaucccagugugac

SEQ ID NO: 1075946 - RNA, 19 nt, Artificial Sequence
  Description of Artificial Sequence: Synthetic oligonucleotide
  Sense strand starting at position 2087 of SEQ ID NO: 915386
cggguuuccggcagacuaa

SEQ ID NO: 1075947 - RNA, 19 nt, Artificial Sequence
  Description of Artificial Sequence: Synthetic oligonucleotide
  Antisense strand to SEQ ID NO: 1075946
uuagucugccggaaacccg

SEQ ID NO: 1075948 - RNA, 19 nt, Artificial Sequence
  Description of Artificial Sequence: Synthetic oligonucleotide
  Sense strand starting at position 2088 of SEQ ID NO: 915386
ggguuuccggcagacuaaa

SEQ ID NO: 1075949 - RNA, 19 nt, Artificial Sequence
  Description of Artificial Sequence: Synthetic oligonucleotide
  Antisense strand to SEQ ID NO: 1075948
uuuagucugccggaaaccc

SEQ ID NO: 1075950 - RNA, 19 nt, Artificial Sequence
  Description of Artificial Sequence: Synthetic oligonucleotide
  Sense strand starting at position 2100 of SEQ ID NO: 915386
gacuaaauuuagugggaaa

SEQ ID NO: 1075951 - RNA, 19 nt, Artificial Sequence
  Description of Artificial Sequence: Synthetic oligonucleotide
  Antisense strand to SEQ ID NO: 1075950
uuucccacuaaauuuaguc

SEQ ID NO: 1075952 - RNA, 19 nt, Artificial Sequence
  Description of Artificial Sequence: Synthetic oligonucleotide
  Sense strand starting at position 2203 of SEQ ID NO: 915386
guuaauaaauggcucugau

SEQ ID NO: 1075953 - RNA, 19 nt, Artificial Sequence
  Description of Artificial Sequence: Synthetic oligonucleotide
  Antisense strand to SEQ ID NO: 1075952
aucagagccauuuauuaac

SEQ ID NO: 1075954 - RNA, 19 nt, Artificial Sequence
  Description of Artificial Sequence: Synthetic oligonucleotide
  Sense strand starting at position 2206 of SEQ ID NO: 915386
aauaaauggcucugauguc

SEQ ID NO: 1075955 - RNA, 19 nt, Artificial Sequence
  Description of Artificial Sequence: Synthetic oligonucleotide
  Antisense strand to SEQ ID NO: 1075954
gacaucagagccauuuauu

SEQ ID NO: 1075956 - RNA, 19 nt, Artificial Sequence
  Description of Artificial Sequence: Synthetic oligonucleotide
  Sense strand starting at position 2414 of SEQ ID NO: 915386
agguaauacagugguuuga

SEQ ID NO: 1075957 - RNA, 19 nt, Artificial Sequence
  Description of Artificial Sequence: Synthetic oligonucleotide
  Antisense strand to SEQ ID NO: 1075956
ucaaaccacuguauuaccu

SEQ ID NO: 1075958 - RNA, 19 nt, Artificial Sequence
  Description of Artificial Sequence: Synthetic oligonucleotide
  Sense strand starting at position 2614 of SEQ ID NO: 915386
aaaugagguuauccaagcu

SEQ ID NO: 1075959 - RNA, 19 nt, Artificial Sequence
  Description of Artificial Sequence: Synthetic oligonucleotide
  Antisense strand to SEQ ID NO: 1075958
agcuuggauaaccucauuu

SEQ ID NO: 1075960 - RNA, 19 nt, Artificial Sequence
  Description of Artificial Sequence: Synthetic oligonucleotide
  Sense strand starting at position 2672 of SEQ ID NO: 915386
ccucucucaguguaauaaa

SEQ ID NO: 1075961 - RNA, 19 nt, Artificial Sequence
  Description of Artificial Sequence: Synthetic oligonucleotide
  Antisense strand to SEQ ID NO: 1075960
uuuauuacacugagagagg

SEQ ID NO: 1075962 - RNA, 19 nt, Artificial Sequence
  Description of Artificial Sequence: Synthetic oligonucleotide
  Sense strand starting at position 2752 of SEQ ID NO: 915386
gccuuugauuucuuagccu

SEQ ID NO: 1075963 - RNA, 19 nt, Artificial Sequence
  Description of Artificial Sequence: Synthetic oligonucleotide
  Antisense strand to SEQ ID NO: 1075962
aggcuaagaaaucaaaggc

SEQ ID NO: 1075964 - RNA, 19 nt, Artificial Sequence
  Description of Artificial Sequence: Synthetic oligonucleotide
  Sense strand starting at position 2769 of SEQ ID NO: 915386
cuagcuuugaaggguugau

SEQ ID NO: 1075965 - RNA, 19 nt, Artificial Sequence
  Description of Artificial Sequence: Synthetic oligonucleotide
  Antisense strand to SEQ ID NO: 1075964
aucaacccuucaaagcuag

SEQ ID NO: 1075966 - RNA, 19 nt, Artificial Sequence
  Description of Artificial Sequence: Synthetic oligonucleotide
  Sense strand starting at position 2911 of SEQ ID NO: 915386
ucacucagagauuggguau

SEQ ID NO: 1075967 - RNA, 19 nt, Artificial Sequence
  Description of Artificial Sequence: Synthetic oligonucleotide
  Antisense strand to SEQ ID NO: 1075966
auacccaaucucugaguga

SEQ ID NO: 1075968 - RNA, 19 nt, Artificial Sequence
  Description of Artificial Sequence: Synthetic oligonucleotide
  Sense strand starting at position 2918 of SEQ ID NO: 915386
gagauuggguauucuugau

SEQ ID NO: 1075969 - RNA, 19 nt, Artificial Sequence
  Description of Artificial Sequence: Synthetic oligonucleotide
  Antisense strand to SEQ ID NO: 1075968
aucaagaauacccaaucuc

SEQ ID NO: 1075970 - RNA, 19 nt, Artificial Sequence
  Description of Artificial Sequence: Synthetic oligonucleotide
  Sense strand starting at position 2922 of SEQ ID NO: 915386
uuggguauucuugaucuaa

SEQ ID NO: 1075971 - RNA, 19 nt, Artificial Sequence
  Description of Artificial Sequence: Synthetic oligonucleotide
  Antisense strand to SEQ ID NO: 1075970
uuagaucaagaauacccaa

SEQ ID NO: 1075972 - RNA, 19 nt, Artificial Sequence
  Description of Artificial Sequence: Synthetic oligonucleotide
  Sense strand starting at position 2933 of SEQ ID NO: 915386
ugaucuaagcaugauaggu

SEQ ID NO: 1075973 - RNA, 19 nt, Artificial Sequence
  Description of Artificial Sequence: Synthetic oligonucleotide
  Antisense strand to SEQ ID NO: 1075972
accuaucaugcuuagauca

SEQ ID NO: 1075974 - RNA, 19 nt, Artificial Sequence
  Description of Artificial Sequence: Synthetic oligonucleotide
  Sense strand starting at position 2938 of SEQ ID NO: 915386
uaagcaugauaggugucaa

SEQ ID NO: 1075975 - RNA, 19 nt, Artificial Sequence
  Description of Artificial Sequence: Synthetic oligonucleotide
  Antisense strand to SEQ ID NO: 1075974
uugacaccuaucaugcuua

SEQ ID NO: 1075976 - RNA, 19 nt, Artificial Sequence
  Description of Artificial Sequence: Synthetic oligonucleotide
  Sense strand starting at position 2949 of SEQ ID NO: 915386
ggugucaaccuuugcauuu

SEQ ID NO: 1075977 - RNA, 19 nt, Artificial Sequence
  Description of Artificial Sequence: Synthetic oligonucleotide
  Antisense strand to SEQ ID NO: 1075976
aaaugcaaagguugacacc

SEQ ID NO: 1075978 - RNA, 19 nt, Artificial Sequence
  Description of Artificial Sequence: Synthetic oligonucleotide
  Sense strand starting at position 2950 of SEQ ID NO: 915386
gugucaaccuuugcauuua

SEQ ID NO: 1075979 - RNA, 19 nt, Artificial Sequence
  Description of Artificial Sequence: Synthetic oligonucleotide
  Antisense strand to SEQ ID NO: 1075978
uaaaugcaaagguugacac

SEQ ID NO: 1075980 - RNA, 19 nt, Artificial Sequence
  Description of Artificial Sequence: Synthetic oligonucleotide
  Sense strand starting at position 2996 of SEQ ID NO: 915386
aaggaugaguuagcuauaa

SEQ ID NO: 1075981 - RNA, 19 nt, Artificial Sequence
  Description of Artificial Sequence: Synthetic oligonucleotide
  Antisense strand to SEQ ID NO: 1075980
uuauagcuaacucauccuu

SEQ ID NO: 1075982 - RNA, 19 nt, Artificial Sequence
  Description of Artificial Sequence: Synthetic oligonucleotide
  Sense strand starting at position 3830 of SEQ ID NO: 915386
cggugaagccauuacaucu

SEQ ID NO: 1075983 - RNA, 19 nt, Artificial Sequence
  Description of Artificial Sequence: Synthetic oligonucleotide
  Antisense strand to SEQ ID NO: 1075982
agauguaauggcuucaccg

SEQ ID NO: 1075984 - RNA, 19 nt, Artificial Sequence
  Description of Artificial Sequence: Synthetic oligonucleotide
  Sense strand starting at position 3867 of SEQ ID NO: 915386
auugaugagaugugucaaa

SEQ ID NO: 1075985 - RNA, 19 nt, Artificial Sequence
  Description of Artificial Sequence: Synthetic oligonucleotide
  Antisense strand to SEQ ID NO: 1075984
uuugacacaucucaucaau

SEQ ID NO: 1075986 - RNA, 19 nt, Artificial Sequence
  Description of Artificial Sequence: Synthetic oligonucleotide
  Sense strand starting at position 3975 of SEQ ID NO: 915386
cuuccauaaguugagcaaa

SEQ ID NO: 1075987 - RNA, 19 nt, Artificial Sequence
  Description of Artificial Sequence: Synthetic oligonucleotide
  Antisense strand to SEQ ID NO: 1075986
uuugcucaacuuauggaag

SEQ ID NO: 1075988 - RNA, 19 nt, Artificial Sequence
  Description of Artificial Sequence: Synthetic oligonucleotide
  Sense strand starting at position 3977 of SEQ ID NO: 915386
uccauaaguugagcaaacu

SEQ ID NO: 1075989 - RNA, 19 nt, Artificial Sequence
  Description of Artificial Sequence: Synthetic oligonucleotide
  Antisense strand to SEQ ID NO: 1075988
aguuugcucaacuuaugga

SEQ ID NO: 1075990 - RNA, 19 nt, Artificial Sequence
  Description of Artificial Sequence: Synthetic oligonucleotide
  Sense strand starting at position 35 of SEQ ID NO: 915387
gucacuaucgcagaaugaa

SEQ ID NO: 1075991 - RNA, 19 nt, Artificial Sequence
  Description of Artificial Sequence: Synthetic oligonucleotide
  Antisense strand to SEQ ID NO: 1075990
uucauucugcgauagugac

SEQ ID NO: 1075992 - RNA, 19 nt, Artificial Sequence
  Description of Artificial Sequence: Synthetic oligonucleotide
  Sense strand starting at position 95 of SEQ ID NO: 915387
uggcaagggcuauaaacua

SEQ ID NO: 1075993 - RNA, 19 nt, Artificial Sequence
  Description of Artificial Sequence: Synthetic oligonucleotide
  Antisense strand to SEQ ID NO: 1075992
uaguuuauagcccuugcca

SEQ ID NO: 1075994 - RNA, 19 nt, Artificial Sequence
  Description of Artificial Sequence: Synthetic oligonucleotide
  Sense strand starting at position 711 of SEQ ID NO: 915387
ugcagucuuacuggaagau

SEQ ID NO: 1075995 - RNA, 19 nt, Artificial Sequence
  Description of Artificial Sequence: Synthetic oligonucleotide
  Antisense strand to SEQ ID NO: 1075994
aucuuccaguaagacugca

SEQ ID NO: 1075996 - RNA, 19 nt, Artificial Sequence
  Description of Artificial Sequence: Synthetic oligonucleotide
  Sense strand starting at position 712 of SEQ ID NO: 915387
gcagucuuacuggaagauu

SEQ ID NO: 1075997 - RNA, 19 nt, Artificial Sequence
  Description of Artificial Sequence: Synthetic oligonucleotide
  Antisense strand to SEQ ID NO: 1075996
aaucuuccaguaagacugc

SEQ ID NO: 1075998 - RNA, 19 nt, Artificial Sequence
  Description of Artificial Sequence: Synthetic oligonucleotide
  Sense strand starting at position 729 of SEQ ID NO: 915387
uuacuacuguacucagaug

SEQ ID NO: 1075999 - RNA, 19 nt, Artificial Sequence
  Description of Artificial Sequence: Synthetic oligonucleotide
  Antisense strand to SEQ ID NO: 1075998
caucugaguacaguaguaa

SEQ ID NO: 1076000 - RNA, 19 nt, Artificial Sequence
  Description of Artificial Sequence: Synthetic oligonucleotide
  Sense strand starting at position 764 of SEQ ID NO: 915387
uuaccauaaacucguggga

SEQ ID NO: 1076001 - RNA, 19 nt, Artificial Sequence
  Description of Artificial Sequence: Synthetic oligonucleotide
  Antisense strand to SEQ ID NO: 1076000
ucccacgaguuuaugguaa

SEQ ID NO: 1076002 - RNA, 19 nt, Artificial Sequence
  Description of Artificial Sequence: Synthetic oligonucleotide
  Sense strand starting at position 917 of SEQ ID NO: 915387
uuuauugggcccuaauaaa

SEQ ID NO: 1076003 - RNA, 19 nt, Artificial Sequence
  Description of Artificial Sequence: Synthetic oligonucleotide
  Antisense strand to SEQ ID NO: 1076002
uuuauuagggcccaauaaa

SEQ ID NO: 1076004 - RNA, 19 nt, Artificial Sequence
  Description of Artificial Sequence: Synthetic oligonucleotide
  Sense strand starting at position 955 of SEQ ID NO: 915387
ucuuuaagguagcuuaaau

SEQ ID NO: 1076005 - RNA, 19 nt, Artificial Sequence
  Description of Artificial Sequence: Synthetic oligonucleotide
  Antisense strand to SEQ ID NO: 1076004
auuuaagcuaccuuaaaga

SEQ ID NO: 1076006 - RNA, 19 nt, Artificial Sequence
  Description of Artificial Sequence: Synthetic oligonucleotide
  Sense strand starting at position 1069 of SEQ ID NO: 915387
uagggacauguaugacuua

SEQ ID NO: 1076007 - RNA, 19 nt, Artificial Sequence
  Description of Artificial Sequence: Synthetic oligonucleotide
  Antisense strand to SEQ ID NO: 1076006
uaagucauacaugucccua

SEQ ID NO: 1076008 - RNA, 19 nt, Artificial Sequence
  Description of Artificial Sequence: Synthetic oligonucleotide
  Sense strand starting at position 1211 of SEQ ID NO: 915387
ggcuauuacgacuauuaua

SEQ ID NO: 1076009 - RNA, 19 nt, Artificial Sequence
  Description of Artificial Sequence: Synthetic oligonucleotide
  Antisense strand to SEQ ID NO: 1076008
uauaauagucguaauagcc

SEQ ID NO: 1076010 - RNA, 19 nt, Artificial Sequence
  Description of Artificial Sequence: Synthetic oligonucleotide
  Sense strand starting at position 1230 of SEQ ID NO: 915387
auaauagucaugggaguga

SEQ ID NO: 1076011 - RNA, 19 nt, Artificial Sequence
  Description of Artificial Sequence: Synthetic oligonucleotide
  Antisense strand to SEQ ID NO: 1076010
ucacucccaugacuauuau

SEQ ID NO: 1076012 - RNA, 19 nt, Artificial Sequence
  Description of Artificial Sequence: Synthetic oligonucleotide
  Sense strand starting at position 1234 of SEQ ID NO: 915387
uagucaugggagugagauu

SEQ ID NO: 1076013 - RNA, 19 nt, Artificial Sequence
  Description of Artificial Sequence: Synthetic oligonucleotide
  Antisense strand to SEQ ID NO: 1076012
aaucucacucccaugacua

SEQ ID NO: 1076014 - RNA, 19 nt, Artificial Sequence
  Description of Artificial Sequence: Synthetic oligonucleotide
  Sense strand starting at position 1393 of SEQ ID NO: 915387
cgaagucuaggcgagagau

SEQ ID NO: 1076015 - RNA, 19 nt, Artificial Sequence
  Description of Artificial Sequence: Synthetic oligonucleotide
  Antisense strand to SEQ ID NO: 1076014
aucucucgccuagacuucg

SEQ ID NO: 1076016 - RNA, 19 nt, Artificial Sequence
  Description of Artificial Sequence: Synthetic oligonucleotide
  Sense strand starting at position 1590 of SEQ ID NO: 915387
ggcgaacucaucuagcuga

SEQ ID NO: 1076017 - RNA, 19 nt, Artificial Sequence
  Description of Artificial Sequence: Synthetic oligonucleotide
  Antisense strand to SEQ ID NO: 1076016
ucagcuagaugaguucgcc

SEQ ID NO: 1076018 - RNA, 19 nt, Artificial Sequence
  Description of Artificial Sequence: Synthetic oligonucleotide
  Sense strand starting at position 1809 of SEQ ID NO: 915387
agagcucugcccuaaaccu

SEQ ID NO: 1076019 - RNA, 19 nt, Artificial Sequence
  Description of Artificial Sequence: Synthetic oligonucleotide
  Antisense strand to SEQ ID NO: 1076018
agguuuagggcagagcucu

SEQ ID NO: 1076020 - RNA, 19 nt, Artificial Sequence
  Description of Artificial Sequence: Synthetic oligonucleotide
  Sense strand starting at position 1925 of SEQ ID NO: 915387
cucagcgaucuacagagaa

SEQ ID NO: 1076021 - RNA, 19 nt, Artificial Sequence
  Description of Artificial Sequence: Synthetic oligonucleotide
  Antisense strand to SEQ ID NO: 1076020
uucucuguagaucgcugag

SEQ ID NO: 1076022 - RNA, 19 nt, Artificial Sequence
  Description of Artificial Sequence: Synthetic oligonucleotide
  Sense strand starting at position 1929 of SEQ ID NO: 915387
gcgaucuacagagaagucu

SEQ ID NO: 1076023 - RNA, 19 nt, Artificial Sequence
  Description of Artificial Sequence: Synthetic oligonucleotide
  Antisense strand to SEQ ID NO: 1076022
agacuucucuguagaucgc

SEQ ID NO: 1076024 - RNA, 19 nt, Artificial Sequence
  Description of Artificial Sequence: Synthetic oligonucleotide
  Sense strand starting at position 1983 of SEQ ID NO: 915387
gucuauuccagagauaucg

SEQ ID NO: 1076025 - RNA, 19 nt, Artificial Sequence
  Description of Artificial Sequence: Synthetic oligonucleotide
  Antisense strand to SEQ ID NO: 1076024
cgauaucucuggaauagac

SEQ ID NO: 1076026 - RNA, 19 nt, Artificial Sequence
  Description of Artificial Sequence: Synthetic oligonucleotide
  Sense strand starting at position 1991 of SEQ ID NO: 915387
cagagauaucgauaggcuu

SEQ ID NO: 1076027 - RNA, 19 nt, Artificial Sequence
  Description of Artificial Sequence: Synthetic oligonucleotide
  Antisense strand to SEQ ID NO: 1076026
aagccuaucgauaucucug

SEQ ID NO: 1076028 - RNA, 19 nt, Artificial Sequence
  Description of Artificial Sequence: Synthetic oligonucleotide
  Sense strand starting at position 2234 of SEQ ID NO: 915387
gugacucugggugauacua

SEQ ID NO: 1076029 - RNA, 19 nt, Artificial Sequence
  Description of Artificial Sequence: Synthetic oligonucleotide
  Antisense strand to SEQ ID NO: 1076028
uaguaucacccagagucac

SEQ ID NO: 1076030 - RNA, 19 nt, Artificial Sequence
  Description of Artificial Sequence: Synthetic oligonucleotide
  Sense strand starting at position 2257 of SEQ ID NO: 915387
ucauuaaccguccacagau

SEQ ID NO: 1076031 - RNA, 19 nt, Artificial Sequence
  Description of Artificial Sequence: Synthetic oligonucleotide
  Antisense strand to SEQ ID NO: 1076030
aucuguggacgguuaauga

SEQ ID NO: 1076032 - RNA, 19 nt, Artificial Sequence
  Description of Artificial Sequence: Synthetic oligonucleotide
  Sense strand starting at position 2280 of SEQ ID NO: 915387
gguguuaugugacugaaag

SEQ ID NO: 1076033 - RNA, 19 nt, Artificial Sequence
  Description of Artificial Sequence: Synthetic oligonucleotide
  Antisense strand to SEQ ID NO: 1076032
cuuucagucacauaacacc

SEQ ID NO: 1076034 - RNA, 19 nt, Artificial Sequence
  Description of Artificial Sequence: Synthetic oligonucleotide
  Sense strand starting at position 2281 of SEQ ID NO: 915387
guguuaugugacugaaagg

SEQ ID NO: 1076035 - RNA, 19 nt, Artificial Sequence
  Description of Artificial Sequence: Synthetic oligonucleotide
  Antisense strand to SEQ ID NO: 1076034
ccuuucagucacauaacac

SEQ ID NO: 1076036 - RNA, 19 nt, Artificial Sequence
  Description of Artificial Sequence: Synthetic oligonucleotide
  Sense strand starting at position 2326 of SEQ ID NO: 915387
uaacgauccguuucugugu

SEQ ID NO: 1076037 - RNA, 19 nt, Artificial Sequence
  Description of Artificial Sequence: Synthetic oligonucleotide
  Antisense strand to SEQ ID NO: 1076036
acacagaaacggaucguua

SEQ ID NO: 1076038 - RNA, 19 nt, Artificial Sequence
  Description of Artificial Sequence: Synthetic oligonucleotide
  Sense strand starting at position 2458 of SEQ ID NO: 915387
cuuccuuauucccuggaga

SEQ ID NO: 1076039 - RNA, 19 nt, Artificial Sequence
  Description of Artificial Sequence: Synthetic oligonucleotide
  Antisense strand to SEQ ID NO: 1076038
ucuccagggaauaaggaag

SEQ ID NO: 1076040 - RNA, 19 nt, Artificial Sequence
  Description of Artificial Sequence: Synthetic oligonucleotide
  Sense strand starting at position 2459 of SEQ ID NO: 915387
uuccuuauucccuggagau

SEQ ID NO: 1076041 - RNA, 19 nt, Artificial Sequence
  Description of Artificial Sequence: Synthetic oligonucleotide
  Antisense strand to SEQ ID NO: 1076040
aucuccagggaauaaggaa

SEQ ID NO: 1076042 - RNA, 19 nt, Artificial Sequence
  Description of Artificial Sequence: Synthetic oligonucleotide
  Sense strand starting at position 2460 of SEQ ID NO: 915387
uccuuauucccuggagaug

SEQ ID NO: 1076043 - RNA, 19 nt, Artificial Sequence
  Description of Artificial Sequence: Synthetic oligonucleotide
  Antisense strand to SEQ ID NO: 1076042
caucuccagggaauaagga

SEQ ID NO: 1076044 - RNA, 19 nt, Artificial Sequence
  Description of Artificial Sequence: Synthetic oligonucleotide
  Sense strand starting at position 2461 of SEQ ID NO: 915387
ccuuauucccuggagaugu

SEQ ID NO: 1076045 - RNA, 19 nt, Artificial Sequence
  Description of Artificial Sequence: Synthetic oligonucleotide
  Antisense strand to SEQ ID NO: 1076044
acaucuccagggaauaagg

SEQ ID NO: 1076046 - RNA, 19 nt, Artificial Sequence
  Description of Artificial Sequence: Synthetic oligonucleotide
  Sense strand starting at position 2463 of SEQ ID NO: 915387
uuauucccuggagauguua

SEQ ID NO: 1076047 - RNA, 19 nt, Artificial Sequence
  Description of Artificial Sequence: Synthetic oligonucleotide
  Antisense strand to SEQ ID NO: 1076046
uaacaucuccagggaauaa

SEQ ID NO: 1076048 - RNA, 19 nt, Artificial Sequence
  Description of Artificial Sequence: Synthetic oligonucleotide
  Sense strand starting at position 2508 of SEQ ID NO: 915387
cccucauuguuauuaugau

SEQ ID NO: 1076049 - RNA, 19 nt, Artificial Sequence
  Description of Artificial Sequence: Synthetic oligonucleotide
  Antisense strand to SEQ ID NO: 1076048
aucauaauaacaaugaggg

SEQ ID NO: 1076050 - RNA, 19 nt, Artificial Sequence
  Description of Artificial Sequence: Synthetic oligonucleotide
  Sense strand starting at position 2560 of SEQ ID NO: 915387
ggcgcuaaugucuuucuau

SEQ ID NO: 1076051 - RNA, 19 nt, Artificial Sequence
  Description of Artificial Sequence: Synthetic oligonucleotide
  Antisense strand to SEQ ID NO: 1076050
auagaaagacauuagcgcc

SEQ ID NO: 1076052 - RNA, 19 nt, Artificial Sequence
  Description of Artificial Sequence: Synthetic oligonucleotide
  Sense strand starting at position 2663 of SEQ ID NO: 915387
uugagagcaucuuuccaua

SEQ ID NO: 1076053 - RNA, 19 nt, Artificial Sequence
  Description of Artificial Sequence: Synthetic oligonucleotide
  Antisense strand to SEQ ID NO: 1076052
uauggaaagaugcucucaa

SEQ ID NO: 1076054 - RNA, 19 nt, Artificial Sequence
  Description of Artificial Sequence: Synthetic oligonucleotide
  Sense strand starting at position 2668 of SEQ ID NO: 915387
agcaucuuuccauaacgaa

SEQ ID NO: 1076055 - RNA, 19 nt, Artificial Sequence
  Description of Artificial Sequence: Synthetic oligonucleotide
  Antisense strand to SEQ ID NO: 1076054
uucguuauggaaagaugcu

SEQ ID NO: 1076056 - RNA, 19 nt, Artificial Sequence
  Description of Artificial Sequence: Synthetic oligonucleotide
  Sense strand starting at position 2681 of SEQ ID NO: 915387
aacgaaauagucugacauc

SEQ ID NO: 1076057 - RNA, 19 nt, Artificial Sequence
  Description of Artificial Sequence: Synthetic oligonucleotide
  Antisense strand to SEQ ID NO: 1076056
gaugucagacuauuucguu

SEQ ID NO: 1076058 - RNA, 19 nt, Artificial Sequence
  Description of Artificial Sequence: Synthetic oligonucleotide
  Sense strand starting at position 2704 of SEQ ID NO: 915387
ggcuauuuauauucuuugu

SEQ ID NO: 1076059 - RNA, 19 nt, Artificial Sequence
  Description of Artificial Sequence: Synthetic oligonucleotide
  Antisense strand to SEQ ID NO: 1076058
acaaagaauauaaauagcc

SEQ ID NO: 1076060 - RNA, 19 nt, Artificial Sequence
  Description of Artificial Sequence: Synthetic oligonucleotide
  Sense strand starting at position 3379 of SEQ ID NO: 915387
auauacucucaacaguagu

SEQ ID NO: 1076061 - RNA, 19 nt, Artificial Sequence
  Description of Artificial Sequence: Synthetic oligonucleotide
  Antisense strand to SEQ ID NO: 1076060
acuacuguugagaguauau

SEQ ID NO: 1076062 - RNA, 19 nt, Artificial Sequence
  Description of Artificial Sequence: Synthetic oligonucleotide
  Sense strand starting at position 3563 of SEQ ID NO: 915387
gugcuaacugauuaaauaa

SEQ ID NO: 1076063 - RNA, 19 nt, Artificial Sequence
  Description of Artificial Sequence: Synthetic oligonucleotide
  Antisense strand to SEQ ID NO: 1076062
uuauuuaaucaguuagcac

SEQ ID NO: 1076064 - RNA, 19 nt, Artificial Sequence
  Description of Artificial Sequence: Synthetic oligonucleotide
  Sense strand starting at position 3660 of SEQ ID NO: 915387
ucacacagauguguaauaa

SEQ ID NO: 1076065 - RNA, 19 nt, Artificial Sequence
  Description of Artificial Sequence: Synthetic oligonucleotide
  Antisense strand to SEQ ID NO: 1076064
uuauuacacaucuguguga

SEQ ID NO: 1076066 - RNA, 19 nt, Artificial Sequence
  Description of Artificial Sequence: Synthetic oligonucleotide
  Sense strand starting at position 3738 of SEQ ID NO: 915387
gcuaucauauguccauaag

SEQ ID NO: 1076067 - RNA, 19 nt, Artificial Sequence
  Description of Artificial Sequence: Synthetic oligonucleotide
  Antisense strand to SEQ ID NO: 1076066
cuuauggacauaugauagc

SEQ ID NO: 1076068 - RNA, 19 nt, Artificial Sequence
  Description of Artificial Sequence: Synthetic oligonucleotide
  Sense strand starting at position 3739 of SEQ ID NO: 915387
cuaucauauguccauaagu

SEQ ID NO: 1076069 - RNA, 19 nt, Artificial Sequence
  Description of Artificial Sequence: Synthetic oligonucleotide
  Antisense strand to SEQ ID NO: 1076068
acuuauggacauaugauag

SEQ ID NO: 1076070 - RNA, 19 nt, Artificial Sequence
  Description of Artificial Sequence: Synthetic oligonucleotide
  Sense strand starting at position 95 of SEQ ID NO: 915388
acuugucaacacugagacu

SEQ ID NO: 1076071 - RNA, 19 nt, Artificial Sequence
  Description of Artificial Sequence: Synthetic oligonucleotide
  Antisense strand to SEQ ID NO: 1076070
agucucaguguugacaagu

SEQ ID NO: 1076072 - RNA, 19 nt, Artificial Sequence
  Description of Artificial Sequence: Synthetic oligonucleotide
  Sense strand starting at position 106 of SEQ ID NO: 915388
cugagacuuugguuuaguu

SEQ ID NO: 1076073 - RNA, 19 nt, Artificial Sequence
  Description of Artificial Sequence: Synthetic oligonucleotide
  Antisense strand to SEQ ID NO: 1076072
aacuaaaccaaagucucag

SEQ ID NO: 1076074 - RNA, 19 nt, Artificial Sequence
  Description of Artificial Sequence: Synthetic oligonucleotide
  Sense strand starting at position 186 of SEQ ID NO: 915388
ccugaaaggugagucuuaa

SEQ ID NO: 1076075 - RNA, 19 nt, Artificial Sequence
  Description of Artificial Sequence: Synthetic oligonucleotide
  Antisense strand to SEQ ID NO: 1076074
uuaagacucaccuuucagg

SEQ ID NO: 1076076 - RNA, 19 nt, Artificial Sequence
  Description of Artificial Sequence: Synthetic oligonucleotide
  Sense strand starting at position 196 of SEQ ID NO: 915388
gagucuuaaggaugccuau

SEQ ID NO: 1076077 - RNA, 19 nt, Artificial Sequence
  Description of Artificial Sequence: Synthetic oligonucleotide
  Antisense strand to SEQ ID NO: 1076076
auaggcauccuuaagacuc

SEQ ID NO: 1076078 - RNA, 19 nt, Artificial Sequence
  Description of Artificial Sequence: Synthetic oligonucleotide
  Sense strand starting at position 199 of SEQ ID NO: 915388
ucuuaaggaugccuaugua

SEQ ID NO: 1076079 - RNA, 19 nt, Artificial Sequence
  Description of Artificial Sequence: Synthetic oligonucleotide
  Antisense strand to SEQ ID NO: 1076078
uacauaggcauccuuaaga

SEQ ID NO: 1076080 - RNA, 19 nt, Artificial Sequence
  Description of Artificial Sequence: Synthetic oligonucleotide
  Sense strand starting at position 321 of SEQ ID NO: 915388
aaguuauaggauugcuuaa

SEQ ID NO: 1076081 - RNA, 19 nt, Artificial Sequence
  Description of Artificial Sequence: Synthetic oligonucleotide
  Antisense strand to SEQ ID NO: 1076080
uuaagcaauccuauaacuu

SEQ ID NO: 1076082 - RNA, 19 nt, Artificial Sequence
  Description of Artificial Sequence: Synthetic oligonucleotide
  Sense strand starting at position 323 of SEQ ID NO: 915388
guuauaggauugcuuaaug

SEQ ID NO: 1076083 - RNA, 19 nt, Artificial Sequence
  Description of Artificial Sequence: Synthetic oligonucleotide
  Antisense strand to SEQ ID NO: 1076082
cauuaagcaauccuauaac

SEQ ID NO: 1076084 - RNA, 19 nt, Artificial Sequence
  Description of Artificial Sequence: Synthetic oligonucleotide
  Sense strand starting at position 333 of SEQ ID NO: 915388
ugcuuaauggcagaguaug

SEQ ID NO: 1076085 - RNA, 19 nt, Artificial Sequence
  Description of Artificial Sequence: Synthetic oligonucleotide
  Antisense strand to SEQ ID NO: 1076084
cauacucugccauuaagca

SEQ ID NO: 1076086 - RNA, 19 nt, Artificial Sequence
  Description of Artificial Sequence: Synthetic oligonucleotide
  Sense strand starting at position 489 of SEQ ID NO: 915388
accuguuaaucugaauuug

SEQ ID NO: 1076087 - RNA, 19 nt, Artificial Sequence
  Description of Artificial Sequence: Synthetic oligonucleotide
  Antisense strand to SEQ ID NO: 1076086
caaauucagauuaacaggu

SEQ ID NO: 1076088 - RNA, 19 nt, Artificial Sequence
  Description of Artificial Sequence: Synthetic oligonucleotide
  Sense strand starting at position 540 of SEQ ID NO: 915388
uggaauuuauaacgggaau

SEQ ID NO: 1076089 - RNA, 19 nt, Artificial Sequence
  Description of Artificial Sequence: Synthetic oligonucleotide
  Antisense strand to SEQ ID NO: 1076088
auucccguuauaaauucca

SEQ ID NO: 1076090 - RNA, 19 nt, Artificial Sequence
  Description of Artificial Sequence: Synthetic oligonucleotide
  Sense strand starting at position 867 of SEQ ID NO: 915388
gcaugugaacuaugaccau

SEQ ID NO: 1076091 - RNA, 19 nt, Artificial Sequence
  Description of Artificial Sequence: Synthetic oligonucleotide
  Antisense strand to SEQ ID NO: 1076090
auggucauaguucacaugc

SEQ ID NO: 1076092 - RNA, 19 nt, Artificial Sequence
  Description of Artificial Sequence: Synthetic oligonucleotide
  Sense strand starting at position 920 of SEQ ID NO: 915388
ggcagagauuaauugguga

SEQ ID NO: 1076093 - RNA, 19 nt, Artificial Sequence
  Description of Artificial Sequence: Synthetic oligonucleotide
  Antisense strand to SEQ ID NO: 1076092
ucaccaauuaaucucugcc

SEQ ID NO: 1076094 - RNA, 19 nt, Artificial Sequence
  Description of Artificial Sequence: Synthetic oligonucleotide
  Sense strand starting at position 968 of SEQ ID NO: 915388
acaguaagguuucucaucu

SEQ ID NO: 1076095 - RNA, 19 nt, Artificial Sequence
  Description of Artificial Sequence: Synthetic oligonucleotide
  Antisense strand to SEQ ID NO: 1076094
agaugagaaaccuuacugu

SEQ ID NO: 1076096 - RNA, 19 nt, Artificial Sequence
  Description of Artificial Sequence: Synthetic oligonucleotide
  Sense strand starting at position 969 of SEQ ID NO: 915388
caguaagguuucucaucug

SEQ ID NO: 1076097 - RNA, 19 nt, Artificial Sequence
  Description of Artificial Sequence: Synthetic oligonucleotide
  Antisense strand to SEQ ID NO: 1076096
cagaugagaaaccuuacug

SEQ ID NO: 1076098 - RNA, 19 nt, Artificial Sequence
  Description of Artificial Sequence: Synthetic oligonucleotide
  Sense strand starting at position 977 of SEQ ID NO: 915388
uuucucaucugccuggaaa

SEQ ID NO: 1076099 - RNA, 19 nt, Artificial Sequence
  Description of Artificial Sequence: Synthetic oligonucleotide
  Antisense strand to SEQ ID NO: 1076098
uuuccaggcagaugagaaa

SEQ ID NO: 1076100 - RNA, 19 nt, Artificial Sequence
  Description of Artificial Sequence: Synthetic oligonucleotide
  Sense strand starting at position 1001 of SEQ ID NO: 915388
ggaauuagcucuuugagaa

SEQ ID NO: 1076101 - RNA, 19 nt, Artificial Sequence
  Description of Artificial Sequence: Synthetic oligonucleotide
  Antisense strand to SEQ ID NO: 1076100
uucucaaagagcuaauucc

SEQ ID NO: 1076102 - RNA, 19 nt, Artificial Sequence
  Description of Artificial Sequence: Synthetic oligonucleotide
  Sense strand starting at position 1083 of SEQ ID NO: 915388
gcaguuaugauugguuaga

SEQ ID NO: 1076103 - RNA, 19 nt, Artificial Sequence
  Description of Artificial Sequence: Synthetic oligonucleotide
  Antisense strand to SEQ ID NO: 1076102
ucuaaccaaucauaacugc

SEQ ID NO: 1076104 - RNA, 19 nt, Artificial Sequence
  Description of Artificial Sequence: Synthetic oligonucleotide
  Sense strand starting at position 1084 of SEQ ID NO: 915388
caguuaugauugguuagau

SEQ ID NO: 1076105 - RNA, 19 nt, Artificial Sequence
  Description of Artificial Sequence: Synthetic oligonucleotide
  Antisense strand to SEQ ID NO: 1076104
aucuaaccaaucauaacug

SEQ ID NO: 1076106 - RNA, 19 nt, Artificial Sequence
  Description of Artificial Sequence: Synthetic oligonucleotide
  Sense strand starting at position 1085 of SEQ ID NO: 915388
aguuaugauugguuagauu

SEQ ID NO: 1076107 - RNA, 19 nt, Artificial Sequence
  Description of Artificial Sequence: Synthetic oligonucleotide
  Antisense strand to SEQ ID NO: 1076106
aaucuaaccaaucauaacu

SEQ ID NO: 1076108 - RNA, 19 nt, Artificial Sequence
  Description of Artificial Sequence: Synthetic oligonucleotide
  Sense strand starting at position 1328 of SEQ ID NO: 915388
gaccaauugcgacagcaaa

SEQ ID NO: 1076109 - RNA, 19 nt, Artificial Sequence
  Description of Artificial Sequence: Synthetic oligonucleotide
  Antisense strand to SEQ ID NO: 1076108
uuugcugucgcaauugguc

SEQ ID NO: 1076110 - RNA, 19 nt, Artificial Sequence
  Description of Artificial Sequence: Synthetic oligonucleotide
  Sense strand starting at position 1383 of SEQ ID NO: 915388
ggcggauauguaugacaag

SEQ ID NO: 1076111 - RNA, 19 nt, Artificial Sequence
  Description of Artificial Sequence: Synthetic oligonucleotide
  Antisense strand to SEQ ID NO: 1076110
cuugucauacauauccgcc

SEQ ID NO: 1076112 - RNA, 19 nt, Artificial Sequence
  Description of Artificial Sequence: Synthetic oligonucleotide
  Sense strand starting at position 1390 of SEQ ID NO: 915388
auguaugacaaggguacaa

SEQ ID NO: 1076113 - RNA, 19 nt, Artificial Sequence
  Description of Artificial Sequence: Synthetic oligonucleotide
  Antisense strand to SEQ ID NO: 1076112
uuguacccuugucauacau

SEQ ID NO: 1076114 - RNA, 19 nt, Artificial Sequence
  Description of Artificial Sequence: Synthetic oligonucleotide
  Sense strand starting at position 1415 of SEQ ID NO: 915388
aggcgagacguuaguucuu

SEQ ID NO: 1076115 - RNA, 19 nt, Artificial Sequence
  Description of Artificial Sequence: Synthetic oligonucleotide
  Antisense strand to SEQ ID NO: 1076114
aagaacuaacgucucgccu

SEQ ID NO: 1076116 - RNA, 19 nt, Artificial Sequence
  Description of Artificial Sequence: Synthetic oligonucleotide
  Sense strand starting at position 1437 of SEQ ID NO: 915388
cugugaagaugguucuuga

SEQ ID NO: 1076117 - RNA, 19 nt, Artificial Sequence
  Description of Artificial Sequence: Synthetic oligonucleotide
  Antisense strand to SEQ ID NO: 1076116
ucaagaaccaucuucacag

SEQ ID NO: 1076118 - RNA, 19 nt, Artificial Sequence
  Description of Artificial Sequence: Synthetic oligonucleotide
  Sense strand starting at position 1440 of SEQ ID NO: 915388
ugaagaugguucuugagca

SEQ ID NO: 1076119 - RNA, 19 nt, Artificial Sequence
  Description of Artificial Sequence: Synthetic oligonucleotide
  Antisense strand to SEQ ID NO: 1076118
ugcucaagaaccaucuuca

SEQ ID NO: 1076120 - RNA, 19 nt, Artificial Sequence
  Description of Artificial Sequence: Synthetic oligonucleotide
  Sense strand starting at position 1448 of SEQ ID NO: 915388
guucuugagcaacacucaa

SEQ ID NO: 1076121 - RNA, 19 nt, Artificial Sequence
  Description of Artificial Sequence: Synthetic oligonucleotide
  Antisense strand to SEQ ID NO: 1076120
uugaguguugcucaagaac

SEQ ID NO: 1076122 - RNA, 19 nt, Artificial Sequence
  Description of Artificial Sequence: Synthetic oligonucleotide
  Sense strand starting at position 1777 of SEQ ID NO: 915388
ccaguagugaccuguggga

SEQ ID NO: 1076123 - RNA, 19 nt, Artificial Sequence
  Description of Artificial Sequence: Synthetic oligonucleotide
  Antisense strand to SEQ ID NO: 1076122
ucccacaggucacuacugg

SEQ ID NO: 1076124 - RNA, 19 nt, Artificial Sequence
  Description of Artificial Sequence: Synthetic oligonucleotide
  Sense strand starting at position 3416 of SEQ ID NO: 915388
acagguauguuagcuggaa

SEQ ID NO: 1076125 - RNA, 19 nt, Artificial Sequence
  Description of Artificial Sequence: Synthetic oligonucleotide
  Antisense strand to SEQ ID NO: 1076124
uuccagcuaacauaccugu

SEQ ID NO: 1076126 - RNA, 19 nt, Artificial Sequence
  Description of Artificial Sequence: Synthetic oligonucleotide
  Sense strand starting at position 3688 of SEQ ID NO: 915388
guauaugcaauagaugagu

SEQ ID NO: 1076127 - RNA, 19 nt, Artificial Sequence
  Description of Artificial Sequence: Synthetic oligonucleotide
  Antisense strand to SEQ ID NO: 1076126
acucaucuauugcauauac

SEQ ID NO: 1076128 - RNA, 19 nt, Artificial Sequence
  Description of Artificial Sequence: Synthetic oligonucleotide
  Sense strand starting at position 3696 of SEQ ID NO: 915388
aauagaugaguucgcagaa

SEQ ID NO: 1076129 - RNA, 19 nt, Artificial Sequence
  Description of Artificial Sequence: Synthetic oligonucleotide
  Antisense strand to SEQ ID NO: 1076128
uucugcgaacucaucuauu

SEQ ID NO: 1076130 - RNA, 19 nt, Artificial Sequence
  Description of Artificial Sequence: Synthetic oligonucleotide
  Sense strand starting at position 3697 of SEQ ID NO: 915388
auagaugaguucgcagaag

SEQ ID NO: 1076131 - RNA, 19 nt, Artificial Sequence
  Description of Artificial Sequence: Synthetic oligonucleotide
  Antisense strand to SEQ ID NO: 1076130
cuucugcgaacucaucuau

SEQ ID NO: 1076132 - RNA, 19 nt, Artificial Sequence
  Description of Artificial Sequence: Synthetic oligonucleotide
  Sense strand starting at position 3735 of SEQ ID NO: 915388
gguugaauagauugacuac

SEQ ID NO: 1076133 - RNA, 19 nt, Artificial Sequence
  Description of Artificial Sequence: Synthetic oligonucleotide
  Antisense strand to SEQ ID NO: 1076132
guagucaaucuauucaacc

SEQ ID NO: 1076134 - RNA, 19 nt, Artificial Sequence
  Description of Artificial Sequence: Synthetic oligonucleotide
  Sense strand starting at position 3761 of SEQ ID NO: 915388
uuuggcauccucugauaug

SEQ ID NO: 1076135 - RNA, 19 nt, Artificial Sequence
  Description of Artificial Sequence: Synthetic oligonucleotide
  Antisense strand to SEQ ID NO: 1076134
cauaucagaggaugccaaa

SEQ ID NO: 1076136 - RNA, 19 nt, Artificial Sequence
  Description of Artificial Sequence: Synthetic oligonucleotide
  Sense strand starting at position 3793 of SEQ ID NO: 915388
ccauuuaucuguuugcugu

SEQ ID NO: 1076137 - RNA, 19 nt, Artificial Sequence
  Description of Artificial Sequence: Synthetic oligonucleotide
  Antisense strand to SEQ ID NO: 1076136
acagcaaacagauaaaugg

SEQ ID NO: 1076138 - RNA, 19 nt, Artificial Sequence
  Description of Artificial Sequence: Synthetic oligonucleotide
  Sense strand starting at position 3795 of SEQ ID NO: 915388
auuuaucuguuugcuguua

SEQ ID NO: 1076139 - RNA, 19 nt, Artificial Sequence
  Description of Artificial Sequence: Synthetic oligonucleotide
  Antisense strand to SEQ ID NO: 1076138
uaacagcaaacagauaaau

SEQ ID NO: 1076140 - RNA, 19 nt, Artificial Sequence
  Description of Artificial Sequence: Synthetic oligonucleotide
  Sense strand starting at position 3857 of SEQ ID NO: 915388
aggauacaucuaugaguuu

SEQ ID NO: 1076141 - RNA, 19 nt, Artificial Sequence
  Description of Artificial Sequence: Synthetic oligonucleotide
  Antisense strand to SEQ ID NO: 1076140
aaacucauagauguauccu

SEQ ID NO: 1076142 - RNA, 19 nt, Artificial Sequence
  Description of Artificial Sequence: Synthetic oligonucleotide
  Sense strand starting at position 3936 of SEQ ID NO: 915388
agacaugagcuuugcaaau

SEQ ID NO: 1076143 - RNA, 19 nt, Artificial Sequence
  Description of Artificial Sequence: Synthetic oligonucleotide
  Antisense strand to SEQ ID NO: 1076142
auuugcaaagcucaugucu

SEQ ID NO: 1076144 - RNA, 19 nt, Artificial Sequence
  Description of Artificial Sequence: Synthetic oligonucleotide
  Sense strand starting at position 3943 of SEQ ID NO: 915388
agcuuugcaaaugagagua

SEQ ID NO: 1076145 - RNA, 19 nt, Artificial Sequence
  Description of Artificial Sequence: Synthetic oligonucleotide
  Antisense strand to SEQ ID NO: 1076144
uacucucauuugcaaagcu

SEQ ID NO: 1076146 - RNA, 19 nt, Artificial Sequence
  Description of Artificial Sequence: Synthetic oligonucleotide
  Sense strand starting at position 3976 of SEQ ID NO: 915388
acagcaguauaggugaaua

SEQ ID NO: 1076147 - RNA, 19 nt, Artificial Sequence
  Description of Artificial Sequence: Synthetic oligonucleotide
  Antisense strand to SEQ ID NO: 1076146
uauucaccuauacugcugu

SEQ ID NO: 1076148 - RNA, 19 nt, Artificial Sequence
  Description of Artificial Sequence: Synthetic oligonucleotide
  Sense strand starting at position 3978 of SEQ ID NO: 915388
agcaguauaggugaauaua

SEQ ID NO: 1076149 - RNA, 19 nt, Artificial Sequence
  Description of Artificial Sequence: Synthetic oligonucleotide
  Antisense strand to SEQ ID NO: 1076148
uauauucaccuauacugcu

SEQ ID NO: 1076150 - RNA, 19 nt, Artificial Sequence
  Description of Artificial Sequence: Synthetic oligonucleotide
  Sense strand starting at position 9 of SEQ ID NO: 915389
ggaaguacgucuguggaca

SEQ ID NO: 1076151 - RNA, 19 nt, Artificial Sequence
  Description of Artificial Sequence: Synthetic oligonucleotide
  Antisense strand to SEQ ID NO: 1076150
uguccacagacguacuucc

SEQ ID NO: 1076152 - RNA, 19 nt, Artificial Sequence
  Description of Artificial Sequence: Synthetic oligonucleotide
  Sense strand starting at position 10 of SEQ ID NO: 915389
gaaguacgucuguggacaa

SEQ ID NO: 1076153 - RNA, 19 nt, Artificial Sequence
  Description of Artificial Sequence: Synthetic oligonucleotide
  Antisense strand to SEQ ID NO: 1076152
uuguccacagacguacuuc

SEQ ID NO: 1076154 - RNA, 19 nt, Artificial Sequence
  Description of Artificial Sequence: Synthetic oligonucleotide
  Sense strand starting at position 13 of SEQ ID NO: 915389
guacgucuguggacaaguu

SEQ ID NO: 1076155 - RNA, 19 nt, Artificial Sequence
  Description of Artificial Sequence: Synthetic oligonucleotide
  Antisense strand to SEQ ID NO: 1076154
aacuuguccacagacguac

SEQ ID NO: 1076156 - RNA, 19 nt, Artificial Sequence
  Description of Artificial Sequence: Synthetic oligonucleotide
  Sense strand starting at position 14 of SEQ ID NO: 915389
uacgucuguggacaaguua

SEQ ID NO: 1076157 - RNA, 19 nt, Artificial Sequence
  Description of Artificial Sequence: Synthetic oligonucleotide
  Antisense strand to SEQ ID NO: 1076156
uaacuuguccacagacgua

SEQ ID NO: 1076158 - RNA, 19 nt, Artificial Sequence
  Description of Artificial Sequence: Synthetic oligonucleotide
  Sense strand starting at position 45 of SEQ ID NO: 915389
caguuaguguccucaggga

SEQ ID NO: 1076159 - RNA, 19 nt, Artificial Sequence
  Description of Artificial Sequence: Synthetic oligonucleotide
  Antisense strand to SEQ ID NO: 1076158
ucccugaggacacuaacug

SEQ ID NO: 1076160 - RNA, 19 nt, Artificial Sequence
  Description of Artificial Sequence: Synthetic oligonucleotide
  Sense strand starting at position 178 of SEQ ID NO: 915389
gggaguccaggucaauauu

SEQ ID NO: 1076161 - RNA, 19 nt, Artificial Sequence
  Description of Artificial Sequence: Synthetic oligonucleotide
  Antisense strand to SEQ ID NO: 1076160
aauauugaccuggacuccc

SEQ ID NO: 1076162 - RNA, 19 nt, Artificial Sequence
  Description of Artificial Sequence: Synthetic oligonucleotide
  Sense strand starting at position 207 of SEQ ID NO: 915389
uccucuuggucauuaggau

SEQ ID NO: 1076163 - RNA, 19 nt, Artificial Sequence
  Description of Artificial Sequence: Synthetic oligonucleotide
  Antisense strand to SEQ ID NO: 1076162
auccuaaugaccaagagga

SEQ ID NO: 1076164 - RNA, 19 nt, Artificial Sequence
  Description of Artificial Sequence: Synthetic oligonucleotide
  Sense strand starting at position 386 of SEQ ID NO: 915389
agggauugaucucugugua

SEQ ID NO: 1076165 - RNA, 19 nt, Artificial Sequence
  Description of Artificial Sequence: Synthetic oligonucleotide
  Antisense strand to SEQ ID NO: 1076164
uacacagagaucaaucccu

SEQ ID NO: 1076166 - RNA, 19 nt, Artificial Sequence
  Description of Artificial Sequence: Synthetic oligonucleotide
  Sense strand starting at position 387 of SEQ ID NO: 915389
gggauugaucucuguguag

SEQ ID NO: 1076167 - RNA, 19 nt, Artificial Sequence
  Description of Artificial Sequence: Synthetic oligonucleotide
  Antisense strand to SEQ ID NO: 1076166
cuacacagagaucaauccc

SEQ ID NO: 1076168 - RNA, 19 nt, Artificial Sequence
  Description of Artificial Sequence: Synthetic oligonucleotide
  Sense strand starting at position 824 of SEQ ID NO: 915389
gcuagagcccuguaacuag

SEQ ID NO: 1076169 - RNA, 19 nt, Artificial Sequence
  Description of Artificial Sequence: Synthetic oligonucleotide
  Antisense strand to SEQ ID NO: 1076168
cuaguuacagggcucuagc

SEQ ID NO: 1076170 - RNA, 19 nt, Artificial Sequence
  Description of Artificial Sequence: Synthetic oligonucleotide
  Sense strand starting at position 922 of SEQ ID NO: 915389
guccacauccugcagaagu

SEQ ID NO: 1076171 - RNA, 19 nt, Artificial Sequence
  Description of Artificial Sequence: Synthetic oligonucleotide
  Antisense strand to SEQ ID NO: 1076170
acuucugcaggauguggac

SEQ ID NO: 1076172 - RNA, 19 nt, Artificial Sequence
  Description of Artificial Sequence: Synthetic oligonucleotide
  Sense strand starting at position 959 of SEQ ID NO: 915389
uggaaaccuccuggugaaa

SEQ ID NO: 1076173 - RNA, 19 nt, Artificial Sequence
  Description of Artificial Sequence: Synthetic oligonucleotide
  Antisense strand to SEQ ID NO: 1076172
uuucaccaggagguuucca

SEQ ID NO: 1076174 - RNA, 19 nt, Artificial Sequence
  Description of Artificial Sequence: Synthetic oligonucleotide
  Sense strand starting at position 970 of SEQ ID NO: 915389
uggugaaauagugguagua

SEQ ID NO: 1076175 - RNA, 19 nt, Artificial Sequence
  Description of Artificial Sequence: Synthetic oligonucleotide
  Antisense strand to SEQ ID NO: 1076174
uacuaccacuauuucacca

SEQ ID NO: 1076176 - RNA, 19 nt, Artificial Sequence
  Description of Artificial Sequence: Synthetic oligonucleotide
  Sense strand starting at position 979 of SEQ ID NO: 915389
agugguaguauuggaauaa

SEQ ID NO: 1076177 - RNA, 19 nt, Artificial Sequence
  Description of Artificial Sequence: Synthetic oligonucleotide
  Antisense strand to SEQ ID NO: 1076176
uuauuccaauacuaccacu

SEQ ID NO: 1076178 - RNA, 19 nt, Artificial Sequence
  Description of Artificial Sequence: Synthetic oligonucleotide
  Sense strand starting at position 1031 of SEQ ID NO: 915389
uagguucugccucauagua

SEQ ID NO: 1076179 - RNA, 19 nt, Artificial Sequence
  Description of Artificial Sequence: Synthetic oligonucleotide
  Antisense strand to SEQ ID NO: 1076178
uacuaugaggcagaaccua

SEQ ID NO: 1076180 - RNA, 19 nt, Artificial Sequence
  Description of Artificial Sequence: Synthetic oligonucleotide
  Sense strand starting at position 1045 of SEQ ID NO: 915389
uaguaagaacugggugcuu

SEQ ID NO: 1076181 - RNA, 19 nt, Artificial Sequence
  Description of Artificial Sequence: Synthetic oligonucleotide
  Antisense strand to SEQ ID NO: 1076180
aagcacccaguucuuacua

SEQ ID NO: 1076182 - RNA, 19 nt, Artificial Sequence
  Description of Artificial Sequence: Synthetic oligonucleotide
  Sense strand starting at position 1047 of SEQ ID NO: 915389
guaagaacugggugcuuua

SEQ ID NO: 1076183 - RNA, 19 nt, Artificial Sequence
  Description of Artificial Sequence: Synthetic oligonucleotide
  Antisense strand to SEQ ID NO: 1076182
uaaagcacccaguucuuac

SEQ ID NO: 1076184 - RNA, 19 nt, Artificial Sequence
  Description of Artificial Sequence: Synthetic oligonucleotide
  Sense strand starting at position 1138 of SEQ ID NO: 915389
agaggauuauucccaguuc

SEQ ID NO: 1076185 - RNA, 19 nt, Artificial Sequence
  Description of Artificial Sequence: Synthetic oligonucleotide
  Antisense strand to SEQ ID NO: 1076184
gaacugggaauaauccucu

SEQ ID NO: 1076186 - RNA, 19 nt, Artificial Sequence
  Description of Artificial Sequence: Synthetic oligonucleotide
  Sense strand starting at position 1149 of SEQ ID NO: 915389
cccaguucucacugggaaa

SEQ ID NO: 1076187 - RNA, 19 nt, Artificial Sequence
  Description of Artificial Sequence: Synthetic oligonucleotide
  Antisense strand to SEQ ID NO: 1076186
uuucccagugagaacuggg

SEQ ID NO: 1076188 - RNA, 19 nt, Artificial Sequence
  Description of Artificial Sequence: Synthetic oligonucleotide
  Sense strand starting at position 1150 of SEQ ID NO: 915389
ccaguucucacugggaaag

SEQ ID NO: 1076189 - RNA, 19 nt, Artificial Sequence
  Description of Artificial Sequence: Synthetic oligonucleotide
  Antisense strand to SEQ ID NO: 1076188
cuuucccagugagaacugg

SEQ ID NO: 1076190 - RNA, 19 nt, Artificial Sequence
  Description of Artificial Sequence: Synthetic oligonucleotide
  Sense strand starting at position 1783 of SEQ ID NO: 915389
cucaauauucggcagcaga

SEQ ID NO: 1076191 - RNA, 19 nt, Artificial Sequence
  Description of Artificial Sequence: Synthetic oligonucleotide
  Antisense strand to SEQ ID NO: 1076190
ucugcugccgaauauugag

SEQ ID NO: 1076192 - RNA, 19 nt, Artificial Sequence
  Description of Artificial Sequence: Synthetic oligonucleotide
  Sense strand starting at position 1845 of SEQ ID NO: 915389
gccgcaacgggagauuaau

SEQ ID NO: 1076193 - RNA, 19 nt, Artificial Sequence
  Description of Artificial Sequence: Synthetic oligonucleotide
  Antisense strand to SEQ ID NO: 1076192
auuaaucucccguugcggc

SEQ ID NO: 1076194 - RNA, 19 nt, Artificial Sequence
  Description of Artificial Sequence: Synthetic oligonucleotide
  Sense strand starting at position 1959 of SEQ ID NO: 915389
gcgaaucugccucuccgau

SEQ ID NO: 1076195 - RNA, 19 nt, Artificial Sequence
  Description of Artificial Sequence: Synthetic oligonucleotide
  Antisense strand to SEQ ID NO: 1076194
aucggagaggcagauucgc

SEQ ID NO: 1076196 - RNA, 19 nt, Artificial Sequence
  Description of Artificial Sequence: Synthetic oligonucleotide
  Sense strand starting at position 2383 of SEQ ID NO: 915389
gggaaucauuaaccagcuu

SEQ ID NO: 1076197 - RNA, 19 nt, Artificial Sequence
  Description of Artificial Sequence: Synthetic oligonucleotide
  Antisense strand to SEQ ID NO: 1076196
aagcugguuaaugauuccc

SEQ ID NO: 1076198 - RNA, 19 nt, Artificial Sequence
  Description of Artificial Sequence: Synthetic oligonucleotide
  Sense strand starting at position 2448 of SEQ ID NO: 915389
aauuguccacgugggaaga

SEQ ID NO: 1076199 - RNA, 19 nt, Artificial Sequence
  Description of Artificial Sequence: Synthetic oligonucleotide
  Antisense strand to SEQ ID NO: 1076198
ucuucccacguggacaauu

SEQ ID NO: 1076200 - RNA, 19 nt, Artificial Sequence
  Description of Artificial Sequence: Synthetic oligonucleotide
  Sense strand starting at position 2686 of SEQ ID NO: 915389
cgggcugagccaggagaau

SEQ ID NO: 1076201 - RNA, 19 nt, Artificial Sequence
  Description of Artificial Sequence: Synthetic oligonucleotide
  Antisense strand to SEQ ID NO: 1076200
auucuccuggcucagcccg

SEQ ID NO: 1076202 - RNA, 19 nt, Artificial Sequence
  Description of Artificial Sequence: Synthetic oligonucleotide
  Sense strand starting at position 2829 of SEQ ID NO: 915389
cucugaccaugguuaguaa

SEQ ID NO: 1076203 - RNA, 19 nt, Artificial Sequence
  Description of Artificial Sequence: Synthetic oligonucleotide
  Antisense strand to SEQ ID NO: 1076202
uuacuaaccauggucagag

SEQ ID NO: 1076204 - RNA, 19 nt, Artificial Sequence
  Description of Artificial Sequence: Synthetic oligonucleotide
  Sense strand starting at position 2832 of SEQ ID NO: 915389
ugaccaugguuaguaaucu

SEQ ID NO: 1076205 - RNA, 19 nt, Artificial Sequence
  Description of Artificial Sequence: Synthetic oligonucleotide
  Antisense strand to SEQ ID NO: 1076204
agauuacuaaccaugguca

SEQ ID NO: 1076206 - RNA, 19 nt, Artificial Sequence
  Description of Artificial Sequence: Synthetic oligonucleotide
  Sense strand starting at position 2836 of SEQ ID NO: 915389
caugguuaguaaucucagu

SEQ ID NO: 1076207 - RNA, 19 nt, Artificial Sequence
  Description of Artificial Sequence: Synthetic oligonucleotide
  Antisense strand to SEQ ID NO: 1076206
acugagauuacuaaccaug

SEQ ID NO: 1076208 - RNA, 19 nt, Artificial Sequence
  Description of Artificial Sequence: Synthetic oligonucleotide
  Sense strand starting at position 2841 of SEQ ID NO: 915389
uuaguaaucucagugagca

SEQ ID NO: 1076209 - RNA, 19 nt, Artificial Sequence
  Description of Artificial Sequence: Synthetic oligonucleotide
  Antisense strand to SEQ ID NO: 1076208
ugcucacugagauuacuaa

SEQ ID NO: 1076210 - RNA, 19 nt, Artificial Sequence
  Description of Artificial Sequence: Synthetic oligonucleotide
  Sense strand starting at position 2842 of SEQ ID NO: 915389
uaguaaucucagugagcag

SEQ ID NO: 1076211 - RNA, 19 nt, Artificial Sequence
  Description of Artificial Sequence: Synthetic oligonucleotide
  Antisense strand to SEQ ID NO: 1076210
cugcucacugagauuacua

SEQ ID NO: 1076212 - RNA, 19 nt, Artificial Sequence
  Description of Artificial Sequence: Synthetic oligonucleotide
  Sense strand starting at position 2843 of SEQ ID NO: 915389
aguaaucucagugagcaga

SEQ ID NO: 1076213 - RNA, 19 nt, Artificial Sequence
  Description of Artificial Sequence: Synthetic oligonucleotide
  Antisense strand to SEQ ID NO: 1076212
ucugcucacugagauuacu

SEQ ID NO: 1076214 - RNA, 19 nt, Artificial Sequence
  Description of Artificial Sequence: Synthetic oligonucleotide
  Sense strand starting at position 2879 of SEQ ID NO: 915389
gggagacucauucguugua

SEQ ID NO: 1076215 - RNA, 19 nt, Artificial Sequence
  Description of Artificial Sequence: Synthetic oligonucleotide
  Antisense strand to SEQ ID NO: 1076214
uacaacgaaugagucuccc

SEQ ID NO: 1076216 - RNA, 19 nt, Artificial Sequence
  Description of Artificial Sequence: Synthetic oligonucleotide
  Sense strand starting at position 3327 of SEQ ID NO: 915389
ccuaaaguguugguacuau

SEQ ID NO: 1076217 - RNA, 19 nt, Artificial Sequence
  Description of Artificial Sequence: Synthetic oligonucleotide
  Antisense strand to SEQ ID NO: 1076216
auaguaccaacacuuuagg

SEQ ID NO: 1076218 - RNA, 19 nt, Artificial Sequence
  Description of Artificial Sequence: Synthetic oligonucleotide
  Sense strand starting at position 3339 of SEQ ID NO: 915389
guacuauaggcaugaacca

SEQ ID NO: 1076219 - RNA, 19 nt, Artificial Sequence
  Description of Artificial Sequence: Synthetic oligonucleotide
  Antisense strand to SEQ ID NO: 1076218
ugguucaugccuauaguac

SEQ ID NO: 1076220 - RNA, 19 nt, Artificial Sequence
  Description of Artificial Sequence: Synthetic oligonucleotide
  Sense strand starting at position 3440 of SEQ ID NO: 915389
gcucacucaggcugacaaa

SEQ ID NO: 1076221 - RNA, 19 nt, Artificial Sequence
  Description of Artificial Sequence: Synthetic oligonucleotide
  Antisense strand to SEQ ID NO: 1076220
uuugucagccugagugagc

SEQ ID NO: 1076222 - RNA, 19 nt, Artificial Sequence
  Description of Artificial Sequence: Synthetic oligonucleotide
  Sense strand starting at position 3471 of SEQ ID NO: 915389
guaacagugcuuuauucca

SEQ ID NO: 1076223 - RNA, 19 nt, Artificial Sequence
  Description of Artificial Sequence: Synthetic oligonucleotide
  Antisense strand to SEQ ID NO: 1076222
uggaauaaagcacuguuac

SEQ ID NO: 1076224 - RNA, 19 nt, Artificial Sequence
  Description of Artificial Sequence: Synthetic oligonucleotide
  Sense strand starting at position 3580 of SEQ ID NO: 915389
gcuggagguuauucaguga

SEQ ID NO: 1076225 - RNA, 19 nt, Artificial Sequence
  Description of Artificial Sequence: Synthetic oligonucleotide
  Antisense strand to SEQ ID NO: 1076224
ucacugaauaaccuccagc

SEQ ID NO: 1076226 - RNA, 19 nt, Artificial Sequence
  Description of Artificial Sequence: Synthetic oligonucleotide
  Sense strand starting at position 3583 of SEQ ID NO: 915389
ggagguuauucagugaguc

SEQ ID NO: 1076227 - RNA, 19 nt, Artificial Sequence
  Description of Artificial Sequence: Synthetic oligonucleotide
  Antisense strand to SEQ ID NO: 1076226
gacucacugaauaaccucc

SEQ ID NO: 1076228 - RNA, 19 nt, Artificial Sequence
  Description of Artificial Sequence: Synthetic oligonucleotide
  Sense strand starting at position 3674 of SEQ ID NO: 915389
gggaaagacuguccaaucu

SEQ ID NO: 1076229 - RNA, 19 nt, Artificial Sequence
  Description of Artificial Sequence: Synthetic oligonucleotide
  Antisense strand to SEQ ID NO: 1076228
agauuggacagucuuuccc

SEQ ID NO: 1076230 - RNA, 19 nt, Artificial Sequence
  Description of Artificial Sequence: Synthetic oligonucleotide
  Sense strand starting at position 47 of SEQ ID NO: 915390
cggguaaguauauaucgca

SEQ ID NO: 1076231 - RNA, 19 nt, Artificial Sequence
  Description of Artificial Sequence: Synthetic oligonucleotide
  Antisense strand to SEQ ID NO: 1076230
ugcgauauauacuuacccg

SEQ ID NO: 1076232 - RNA, 19 nt, Artificial Sequence
  Description of Artificial Sequence: Synthetic oligonucleotide
  Sense strand starting at position 336 of SEQ ID NO: 915390
uacgguguagcagaaagaa

SEQ ID NO: 1076233 - RNA, 19 nt, Artificial Sequence
  Description of Artificial Sequence: Synthetic oligonucleotide
  Antisense strand to SEQ ID NO: 1076232
uucuuucugcuacaccgua

SEQ ID NO: 1076234 - RNA, 19 nt, Artificial Sequence
  Description of Artificial Sequence: Synthetic oligonucleotide
  Sense strand starting at position 367 of SEQ ID NO: 915390
ugugauaaaccugaguucu

SEQ ID NO: 1076235 - RNA, 19 nt, Artificial Sequence
  Description of Artificial Sequence: Synthetic oligonucleotide
  Antisense strand to SEQ ID NO: 1076234
agaacucagguuuaucaca

SEQ ID NO: 1076236 - RNA, 19 nt, Artificial Sequence
  Description of Artificial Sequence: Synthetic oligonucleotide
  Sense strand starting at position 369 of SEQ ID NO: 915390
ugauaaaccugaguucuuu

SEQ ID NO: 1076237 - RNA, 19 nt, Artificial Sequence
  Description of Artificial Sequence: Synthetic oligonucleotide
  Antisense strand to SEQ ID NO: 1076236
aaagaacucagguuuauca

SEQ ID NO: 1076238 - RNA, 19 nt, Artificial Sequence
  Description of Artificial Sequence: Synthetic oligonucleotide
  Sense strand starting at position 401 of SEQ ID NO: 915390
auugaauggcuaugucacu

SEQ ID NO: 1076239 - RNA, 19 nt, Artificial Sequence
  Description of Artificial Sequence: Synthetic oligonucleotide
  Antisense strand to SEQ ID NO: 1076238
agugacauagccauucaau

SEQ ID NO: 1076240 - RNA, 19 nt, Artificial Sequence
  Description of Artificial Sequence: Synthetic oligonucleotide
  Sense strand starting at position 521 of SEQ ID NO: 915390
acgagaacuuuggaaucau

SEQ ID NO: 1076241 - RNA, 19 nt, Artificial Sequence
  Description of Artificial Sequence: Synthetic oligonucleotide
  Antisense strand to SEQ ID NO: 1076240
augauuccaaaguucucgu

SEQ ID NO: 1076242 - RNA, 19 nt, Artificial Sequence
  Description of Artificial Sequence: Synthetic oligonucleotide
  Sense strand starting at position 712 of SEQ ID NO: 915390
gcuaauauuuaauaacgca

SEQ ID NO: 1076243 - RNA, 19 nt, Artificial Sequence
  Description of Artificial Sequence: Synthetic oligonucleotide
  Antisense strand to SEQ ID NO: 1076242
ugcguuauuaaauauuagc

SEQ ID NO: 1076244 - RNA, 19 nt, Artificial Sequence
  Description of Artificial Sequence: Synthetic oligonucleotide
  Sense strand starting at position 882 of SEQ ID NO: 915390
uauuaaaugcuaggguuaa

SEQ ID NO: 1076245 - RNA, 19 nt, Artificial Sequence
  Description of Artificial Sequence: Synthetic oligonucleotide
  Antisense strand to SEQ ID NO: 1076244
uuaacccuagcauuuaaua

SEQ ID NO: 1076246 - RNA, 19 nt, Artificial Sequence
  Description of Artificial Sequence: Synthetic oligonucleotide
  Sense strand starting at position 982 of SEQ ID NO: 915390
ggagguuagugcuuagcaa

SEQ ID NO: 1076247 - RNA, 19 nt, Artificial Sequence
  Description of Artificial Sequence: Synthetic oligonucleotide
  Antisense strand to SEQ ID NO: 1076246
uugcuaagcacuaaccucc

SEQ ID NO: 1076248 - RNA, 19 nt, Artificial Sequence
  Description of Artificial Sequence: Synthetic oligonucleotide
  Sense strand starting at position 983 of SEQ ID NO: 915390
gagguuagugcuuagcaag

SEQ ID NO: 1076249 - RNA, 19 nt, Artificial Sequence
  Description of Artificial Sequence: Synthetic oligonucleotide
  Antisense strand to SEQ ID NO: 1076248
cuugcuaagcacuaaccuc

SEQ ID NO: 1076250 - RNA, 19 nt, Artificial Sequence
  Description of Artificial Sequence: Synthetic oligonucleotide
  Sense strand starting at position 1172 of SEQ ID NO: 915390
uguacuagccucugguuua

SEQ ID NO: 1076251 - RNA, 19 nt, Artificial Sequence
  Description of Artificial Sequence: Synthetic oligonucleotide
  Antisense strand to SEQ ID NO: 1076250
uaaaccagaggcuaguaca

SEQ ID NO: 1076252 - RNA, 19 nt, Artificial Sequence
  Description of Artificial Sequence: Synthetic oligonucleotide
  Sense strand starting at position 1251 of SEQ ID NO: 915390
acgaaucaccaacauguuu

SEQ ID NO: 1076253 - RNA, 19 nt, Artificial Sequence
  Description of Artificial Sequence: Synthetic oligonucleotide
  Antisense strand to SEQ ID NO: 1076252
aaacauguuggugauucgu

SEQ ID NO: 1076254 - RNA, 19 nt, Artificial Sequence
  Description of Artificial Sequence: Synthetic oligonucleotide
  Sense strand starting at position 1278 of SEQ ID NO: 915390
gggugguggcccugaaagu

SEQ ID NO: 1076255 - RNA, 19 nt, Artificial Sequence
  Description of Artificial Sequence: Synthetic oligonucleotide
  Antisense strand to SEQ ID NO: 1076254
acuuucagggccaccaccc

SEQ ID NO: 1076256 - RNA, 19 nt, Artificial Sequence
  Description of Artificial Sequence: Synthetic oligonucleotide
  Sense strand starting at position 1295 of SEQ ID NO: 915390
guguguuugcuuguuagau

SEQ ID NO: 1076257 - RNA, 19 nt, Artificial Sequence
  Description of Artificial Sequence: Synthetic oligonucleotide
  Antisense strand to SEQ ID NO: 1076256
aucuaacaagcaaacacac

SEQ ID NO: 1076258 - RNA, 19 nt, Artificial Sequence
  Description of Artificial Sequence: Synthetic oligonucleotide
  Sense strand starting at position 1301 of SEQ ID NO: 915390
uugcuuguuagauggaauc

SEQ ID NO: 1076259 - RNA, 19 nt, Artificial Sequence
  Description of Artificial Sequence: Synthetic oligonucleotide
  Antisense strand to SEQ ID NO: 1076258
gauuccaucuaacaagcaa

SEQ ID NO: 1076260 - RNA, 19 nt, Artificial Sequence
  Description of Artificial Sequence: Synthetic oligonucleotide
  Sense strand starting at position 1303 of SEQ ID NO: 915390
gcuuguuagauggaaucaa

SEQ ID NO: 1076261 - RNA, 19 nt, Artificial Sequence
  Description of Artificial Sequence: Synthetic oligonucleotide
  Antisense strand to SEQ ID NO: 1076260
uugauuccaucuaacaagc

SEQ ID NO: 1076262 - RNA, 19 nt, Artificial Sequence
  Description of Artificial Sequence: Synthetic oligonucleotide
  Sense strand starting at position 1353 of SEQ ID NO: 915390
uuuaguaagacccgaggua

SEQ ID NO: 1076263 - RNA, 19 nt, Artificial Sequence
  Description of Artificial Sequence: Synthetic oligonucleotide
  Antisense strand to SEQ ID NO: 1076262
uaccucgggucuuacuaaa

SEQ ID NO: 1076264 - RNA, 19 nt, Artificial Sequence
  Description of Artificial Sequence: Synthetic oligonucleotide
  Sense strand starting at position 1426 of SEQ ID NO: 915390
ccgaaacauccuggcuaca

SEQ ID NO: 1076265 - RNA, 19 nt, Artificial Sequence
  Description of Artificial Sequence: Synthetic oligonucleotide
  Antisense strand to SEQ ID NO: 1076264
uguagccaggauguuucgg

SEQ ID NO: 1076266 - RNA, 19 nt, Artificial Sequence
  Description of Artificial Sequence: Synthetic oligonucleotide
  Sense strand starting at position 1493 of SEQ ID NO: 915390
acucaagguuccucagcaa

SEQ ID NO: 1076267 - RNA, 19 nt, Artificial Sequence
  Description of Artificial Sequence: Synthetic oligonucleotide
  Antisense strand to SEQ ID NO: 1076266
uugcugaggaaccuugagu

SEQ ID NO: 1076268 - RNA, 19 nt, Artificial Sequence
  Description of Artificial Sequence: Synthetic oligonucleotide
  Sense strand starting at position 2051 of SEQ ID NO: 915390
cagccuuugugacccggaa

SEQ ID NO: 1076269 - RNA, 19 nt, Artificial Sequence
  Description of Artificial Sequence: Synthetic oligonucleotide
  Antisense strand to SEQ ID NO: 1076268
uuccgggucacaaaggcug

SEQ ID NO: 1076270 - RNA, 19 nt, Artificial Sequence
  Description of Artificial Sequence: Synthetic oligonucleotide
  Sense strand starting at position 2053 of SEQ ID NO: 915390
gccuuugugacccggaauu

SEQ ID NO: 1076271 - RNA, 19 nt, Artificial Sequence
  Description of Artificial Sequence: Synthetic oligonucleotide
  Antisense strand to SEQ ID NO: 1076270
aauuccgggucacaaaggc

SEQ ID NO: 1076272 - RNA, 19 nt, Artificial Sequence
  Description of Artificial Sequence: Synthetic oligonucleotide
  Sense strand starting at position 2072 of SEQ ID NO: 915390
gcuccugucaaaugaggau

SEQ ID NO: 1076273 - RNA, 19 nt, Artificial Sequence
  Description of Artificial Sequence: Synthetic oligonucleotide
  Antisense strand to SEQ ID NO: 1076272
auccucauuugacaggagc

SEQ ID NO: 1076274 - RNA, 19 nt, Artificial Sequence
  Description of Artificial Sequence: Synthetic oligonucleotide
  Sense strand starting at position 2081 of SEQ ID NO: 915390
aaaugaggaucuucccagu

SEQ ID NO: 1076275 - RNA, 19 nt, Artificial Sequence
  Description of Artificial Sequence: Synthetic oligonucleotide
  Antisense strand to SEQ ID NO: 1076274
acugggaagauccucauuu

SEQ ID NO: 1076276 - RNA, 19 nt, Artificial Sequence
  Description of Artificial Sequence: Synthetic oligonucleotide
  Sense strand starting at position 2087 of SEQ ID NO: 915390
ggaucuucccaguaguguu

SEQ ID NO: 1076277 - RNA, 19 nt, Artificial Sequence
  Description of Artificial Sequence: Synthetic oligonucleotide
  Antisense strand to SEQ ID NO: 1076276
aacacuacugggaagaucc

SEQ ID NO: 1076278 - RNA, 19 nt, Artificial Sequence
  Description of Artificial Sequence: Synthetic oligonucleotide
  Sense strand starting at position 2789 of SEQ ID NO: 915390
ugcguguucguugucgaca

SEQ ID NO: 1076279 - RNA, 19 nt, Artificial Sequence
  Description of Artificial Sequence: Synthetic oligonucleotide
  Antisense strand to SEQ ID NO: 1076278
ugucgacaacgaacacgca

SEQ ID NO: 1076280 - RNA, 19 nt, Artificial Sequence
  Description of Artificial Sequence: Synthetic oligonucleotide
  Sense strand starting at position 2860 of SEQ ID NO: 915390
guuuacgugcguuccaaca

SEQ ID NO: 1076281 - RNA, 19 nt, Artificial Sequence
  Description of Artificial Sequence: Synthetic oligonucleotide
  Antisense strand to SEQ ID NO: 1076280
uguuggaacgcacguaaac

SEQ ID NO: 1076282 - RNA, 19 nt, Artificial Sequence
  Description of Artificial Sequence: Synthetic oligonucleotide
  Sense strand starting at position 2962 of SEQ ID NO: 915390
cguucuaaccuuuaguuau

SEQ ID NO: 1076283 - RNA, 19 nt, Artificial Sequence
  Description of Artificial Sequence: Synthetic oligonucleotide
  Antisense strand to SEQ ID NO: 1076282
auaacuaaagguuagaacg

SEQ ID NO: 1076284 - RNA, 19 nt, Artificial Sequence
  Description of Artificial Sequence: Synthetic oligonucleotide
  Sense strand starting at position 2972 of SEQ ID NO: 915390
uuuaguuauugugcaucau

SEQ ID NO: 1076285 - RNA, 19 nt, Artificial Sequence
  Description of Artificial Sequence: Synthetic oligonucleotide
  Antisense strand to SEQ ID NO: 1076284
augaugcacaauaacuaaa

SEQ ID NO: 1076286 - RNA, 19 nt, Artificial Sequence
  Description of Artificial Sequence: Synthetic oligonucleotide
  Sense strand starting at position 2973 of SEQ ID NO: 915390
uuaguuauugugcaucaug

SEQ ID NO: 1076287 - RNA, 19 nt, Artificial Sequence
  Description of Artificial Sequence: Synthetic oligonucleotide
  Antisense strand to SEQ ID NO: 1076286
caugaugcacaauaacuaa

SEQ ID NO: 1076288 - RNA, 19 nt, Artificial Sequence
  Description of Artificial Sequence: Synthetic oligonucleotide
  Sense strand starting at position 3043 of SEQ ID NO: 915390
cugggauugcuagguccaa

SEQ ID NO: 1076289 - RNA, 19 nt, Artificial Sequence
  Description of Artificial Sequence: Synthetic oligonucleotide
  Antisense strand to SEQ ID NO: 1076288
uuggaccuagcaaucccag

SEQ ID NO: 1076290 - RNA, 19 nt, Artificial Sequence
  Description of Artificial Sequence: Synthetic oligonucleotide
  Sense strand starting at position 3044 of SEQ ID NO: 915390
ugggauugcuagguccaaa

SEQ ID NO: 1076291 - RNA, 19 nt, Artificial Sequence
  Description of Artificial Sequence: Synthetic oligonucleotide
  Antisense strand to SEQ ID NO: 1076290
uuuggaccuagcaauccca

SEQ ID NO: 1076292 - RNA, 19 nt, Artificial Sequence
  Description of Artificial Sequence: Synthetic oligonucleotide
  Sense strand starting at position 3077 of SEQ ID NO: 915390
acgcuuuaaugaucccuca

SEQ ID NO: 1076293 - RNA, 19 nt, Artificial Sequence
  Description of Artificial Sequence: Synthetic oligonucleotide
  Antisense strand to SEQ ID NO: 1076292
ugagggaucauuaaagcgu

SEQ ID NO: 1076294 - RNA, 19 nt, Artificial Sequence
  Description of Artificial Sequence: Synthetic oligonucleotide
  Sense strand starting at position 3194 of SEQ ID NO: 915390
gguccaugguuguuaggua

SEQ ID NO: 1076295 - RNA, 19 nt, Artificial Sequence
  Description of Artificial Sequence: Synthetic oligonucleotide
  Antisense strand to SEQ ID NO: 1076294
uaccuaacaaccauggacc

SEQ ID NO: 1076296 - RNA, 19 nt, Artificial Sequence
  Description of Artificial Sequence: Synthetic oligonucleotide
  Sense strand starting at position 3199 of SEQ ID NO: 915390
augguuguuagguaucaga

SEQ ID NO: 1076297 - RNA, 19 nt, Artificial Sequence
  Description of Artificial Sequence: Synthetic oligonucleotide
  Antisense strand to SEQ ID NO: 1076296
ucugauaccuaacaaccau

SEQ ID NO: 1076298 - RNA, 19 nt, Artificial Sequence
  Description of Artificial Sequence: Synthetic oligonucleotide
  Sense strand starting at position 3209 of SEQ ID NO: 915390
gguaucagaugcccuauaa

SEQ ID NO: 1076299 - RNA, 19 nt, Artificial Sequence
  Description of Artificial Sequence: Synthetic oligonucleotide
  Antisense strand to SEQ ID NO: 1076298
uuauagggcaucugauacc

SEQ ID NO: 1076300 - RNA, 19 nt, Artificial Sequence
  Description of Artificial Sequence: Synthetic oligonucleotide
  Sense strand starting at position 3259 of SEQ ID NO: 915390
ugacuugcugucugacaca

SEQ ID NO: 1076301 - RNA, 19 nt, Artificial Sequence
  Description of Artificial Sequence: Synthetic oligonucleotide
  Antisense strand to SEQ ID NO: 1076300
ugugucagacagcaaguca

SEQ ID NO: 1076302 - RNA, 19 nt, Artificial Sequence
  Description of Artificial Sequence: Synthetic oligonucleotide
  Sense strand starting at position 3469 of SEQ ID NO: 915390
ccaguuacuccugagacua

SEQ ID NO: 1076303 - RNA, 19 nt, Artificial Sequence
  Description of Artificial Sequence: Synthetic oligonucleotide
  Antisense strand to SEQ ID NO: 1076302
uagucucaggaguaacugg

SEQ ID NO: 1076304 - RNA, 19 nt, Artificial Sequence
  Description of Artificial Sequence: Synthetic oligonucleotide
  Sense strand starting at position 3579 of SEQ ID NO: 915390
cuuaucuaccugugggaaa

SEQ ID NO: 1076305 - RNA, 19 nt, Artificial Sequence
  Description of Artificial Sequence: Synthetic oligonucleotide
  Antisense strand to SEQ ID NO: 1076304
uuucccacagguagauaag

SEQ ID NO: 1076306 - RNA, 19 nt, Artificial Sequence
  Description of Artificial Sequence: Synthetic oligonucleotide
  Sense strand starting at position 3958 of SEQ ID NO: 915390
agcccugacugagcucuua

SEQ ID NO: 1076307 - RNA, 19 nt, Artificial Sequence
  Description of Artificial Sequence: Synthetic oligonucleotide
  Antisense strand to SEQ ID NO: 1076306
uaagagcucagucagggcu

SEQ ID NO: 1076308 - RNA, 19 nt, Artificial Sequence
  Description of Artificial Sequence: Synthetic oligonucleotide
  Sense strand starting at position 3971 of SEQ ID NO: 915390
cucuuauucugugccagac

SEQ ID NO: 1076309 - RNA, 19 nt, Artificial Sequence
  Description of Artificial Sequence: Synthetic oligonucleotide
  Antisense strand to SEQ ID NO: 1076308
gucuggcacagaauaagag

SEQ ID NO: 1076310 - RNA, 19 nt, Artificial Sequence
  Description of Artificial Sequence: Synthetic oligonucleotide
  Sense strand starting at position 620 of SEQ ID NO: 915391
cagauuugcucuccgacca

SEQ ID NO: 1076311 - RNA, 19 nt, Artificial Sequence
  Description of Artificial Sequence: Synthetic oligonucleotide
  Antisense strand to SEQ ID NO: 1076310
uggucggagagcaaaucug

SEQ ID NO: 1076312 - RNA, 19 nt, Artificial Sequence
  Description of Artificial Sequence: Synthetic oligonucleotide
  Sense strand starting at position 621 of SEQ ID NO: 915391
agauuugcucuccgaccau

SEQ ID NO: 1076313 - RNA, 19 nt, Artificial Sequence
  Description of Artificial Sequence: Synthetic oligonucleotide
  Antisense strand to SEQ ID NO: 1076312
auggucggagagcaaaucu

SEQ ID NO: 1076314 - RNA, 19 nt, Artificial Sequence
  Description of Artificial Sequence: Synthetic oligonucleotide
  Sense strand starting at position 644 of SEQ ID NO: 915391
cagcaugguucucuuggaa

SEQ ID NO: 1076315 - RNA, 19 nt, Artificial Sequence
  Description of Artificial Sequence: Synthetic oligonucleotide
  Antisense strand to SEQ ID NO: 1076314
uuccaagagaaccaugcug

SEQ ID NO: 1076316 - RNA, 19 nt, Artificial Sequence
  Description of Artificial Sequence: Synthetic oligonucleotide
  Sense strand starting at position 656 of SEQ ID NO: 915391
cuuggaagcguccauaaag

SEQ ID NO: 1076317 - RNA, 19 nt, Artificial Sequence
  Description of Artificial Sequence: Synthetic oligonucleotide
  Antisense strand to SEQ ID NO: 1076316
cuuuauggacgcuuccaag

SEQ ID NO: 1076318 - RNA, 19 nt, Artificial Sequence
  Description of Artificial Sequence: Synthetic oligonucleotide
  Sense strand starting at position 784 of SEQ ID NO: 915391
gcaccuugcagucaagaag

SEQ ID NO: 1076319 - RNA, 19 nt, Artificial Sequence
  Description of Artificial Sequence: Synthetic oligonucleotide
  Antisense strand to SEQ ID NO: 1076318
cuucuugacugcaaggugc

SEQ ID NO: 1076320 - RNA, 19 nt, Artificial Sequence
  Description of Artificial Sequence: Synthetic oligonucleotide
  Sense strand starting at position 844 of SEQ ID NO: 915391
gcuugauccuucucacaga

SEQ ID NO: 1076321 - RNA, 19 nt, Artificial Sequence
  Description of Artificial Sequence: Synthetic oligonucleotide
  Antisense strand to SEQ ID NO: 1076320
ucugugagaaggaucaagc

SEQ ID NO: 1076322 - RNA, 19 nt, Artificial Sequence
  Description of Artificial Sequence: Synthetic oligonucleotide
  Sense strand starting at position 847 of SEQ ID NO: 915391
ugauccuucucacagagga

SEQ ID NO: 1076323 - RNA, 19 nt, Artificial Sequence
  Description of Artificial Sequence: Synthetic oligonucleotide
  Antisense strand to SEQ ID NO: 1076322
uccucugugagaaggauca

SEQ ID NO: 1076324 - RNA, 19 nt, Artificial Sequence
  Description of Artificial Sequence: Synthetic oligonucleotide
  Sense strand starting at position 893 of SEQ ID NO: 915391
gcagcugucgggaguagga

SEQ ID NO: 1076325 - RNA, 19 nt, Artificial Sequence
  Description of Artificial Sequence: Synthetic oligonucleotide
  Antisense strand to SEQ ID NO: 1076324
uccuacucccgacagcugc

SEQ ID NO: 1076326 - RNA, 19 nt, Artificial Sequence
  Description of Artificial Sequence: Synthetic oligonucleotide
  Sense strand starting at position 1035 of SEQ ID NO: 915391
cugaguugugcagggagga

SEQ ID NO: 1076327 - RNA, 19 nt, Artificial Sequence
  Description of Artificial Sequence: Synthetic oligonucleotide
  Antisense strand to SEQ ID NO: 1076326
uccucccugcacaacucag

SEQ ID NO: 1076328 - RNA, 19 nt, Artificial Sequence
  Description of Artificial Sequence: Synthetic oligonucleotide
  Sense strand starting at position 1132 of SEQ ID NO: 915391
cgcacaacacucugcuaau

SEQ ID NO: 1076329 - RNA, 19 nt, Artificial Sequence
  Description of Artificial Sequence: Synthetic oligonucleotide
  Antisense strand to SEQ ID NO: 1076328
auuagcagaguguugugcg

SEQ ID NO: 1076330 - RNA, 19 nt, Artificial Sequence
  Description of Artificial Sequence: Synthetic oligonucleotide
  Sense strand starting at position 2063 of SEQ ID NO: 915391
cagugcuugcugggaagga

SEQ ID NO: 1076331 - RNA, 19 nt, Artificial Sequence
  Description of Artificial Sequence: Synthetic oligonucleotide
  Antisense strand to SEQ ID NO: 1076330
uccuucccagcaagcacug

SEQ ID NO: 1076332 - RNA, 19 nt, Artificial Sequence
  Description of Artificial Sequence: Synthetic oligonucleotide
  Sense strand starting at position 2428 of SEQ ID NO: 915391
gucucaagcuucccgagua

SEQ ID NO: 1076333 - RNA, 19 nt, Artificial Sequence
  Description of Artificial Sequence: Synthetic oligonucleotide
  Antisense strand to SEQ ID NO: 1076332
uacucgggaagcuugagac

SEQ ID NO: 1076334 - RNA, 19 nt, Artificial Sequence
  Description of Artificial Sequence: Synthetic oligonucleotide
  Sense strand starting at position 2515 of SEQ ID NO: 915391
cuauguuggccaggccaau

SEQ ID NO: 1076335 - RNA, 19 nt, Artificial Sequence
  Description of Artificial Sequence: Synthetic oligonucleotide
  Antisense strand to SEQ ID NO: 1076334
auuggccuggccaacauag

SEQ ID NO: 1076336 - RNA, 19 nt, Artificial Sequence
  Description of Artificial Sequence: Synthetic oligonucleotide
  Sense strand starting at position 2621 of SEQ ID NO: 915391
ggucauucuuucgcaggau

SEQ ID NO: 1076337 - RNA, 19 nt, Artificial Sequence
  Description of Artificial Sequence: Synthetic oligonucleotide
  Antisense strand to SEQ ID NO: 1076336
auccugcgaaagaaugacc

SEQ ID NO: 1076338 - RNA, 19 nt, Artificial Sequence
  Description of Artificial Sequence: Synthetic oligonucleotide
  Sense strand starting at position 2633 of SEQ ID NO: 915391
gcaggaucgcgugaaauug

SEQ ID NO: 1076339 - RNA, 19 nt, Artificial Sequence
  Description of Artificial Sequence: Synthetic oligonucleotide
  Antisense strand to SEQ ID NO: 1076338
caauuucacgcgauccugc

SEQ ID NO: 1076340 - RNA, 19 nt, Artificial Sequence
  Description of Artificial Sequence: Synthetic oligonucleotide
  Sense strand starting at position 2644 of SEQ ID NO: 915391
ugaaauugggcgggcgaaa

SEQ ID NO: 1076341 - RNA, 19 nt, Artificial Sequence
  Description of Artificial Sequence: Synthetic oligonucleotide
  Antisense strand to SEQ ID NO: 1076340
uuucgcccgcccaauuuca

SEQ ID NO: 1076342 - RNA, 19 nt, Artificial Sequence
  Description of Artificial Sequence: Synthetic oligonucleotide
  Sense strand starting at position 2692 of SEQ ID NO: 915391
ccaaauuguugacauggua

SEQ ID NO: 1076343 - RNA, 19 nt, Artificial Sequence
  Description of Artificial Sequence: Synthetic oligonucleotide
  Antisense strand to SEQ ID NO: 1076342
uaccaugucaacaauuugg

SEQ ID NO: 1076344 - RNA, 19 nt, Artificial Sequence
  Description of Artificial Sequence: Synthetic oligonucleotide
  Sense strand starting at position 2826 of SEQ ID NO: 915391
ugauaauagcggcauguua

SEQ ID NO: 1076345 - RNA, 19 nt, Artificial Sequence
  Description of Artificial Sequence: Synthetic oligonucleotide
  Antisense strand to SEQ ID NO: 1076344
uaacaugccgcuauuauca

SEQ ID NO: 1076346 - RNA, 19 nt, Artificial Sequence
  Description of Artificial Sequence: Synthetic oligonucleotide
  Sense strand starting at position 2828 of SEQ ID NO: 915391
auaauagcggcauguuauu

SEQ ID NO: 1076347 - RNA, 19 nt, Artificial Sequence
  Description of Artificial Sequence: Synthetic oligonucleotide
  Antisense strand to SEQ ID NO: 1076346
aauaacaugccgcuauuau

SEQ ID NO: 1076348 - RNA, 19 nt, Artificial Sequence
  Description of Artificial Sequence: Synthetic oligonucleotide
  Sense strand starting at position 2837 of SEQ ID NO: 915391
gcauguuauuagccauaga

SEQ ID NO: 1076349 - RNA, 19 nt, Artificial Sequence
  Description of Artificial Sequence: Synthetic oligonucleotide
  Antisense strand to SEQ ID NO: 1076348
ucuauggcuaauaacaugc

SEQ ID NO: 1076350 - RNA, 19 nt, Artificial Sequence
  Description of Artificial Sequence: Synthetic oligonucleotide
  Sense strand starting at position 2840 of SEQ ID NO: 915391
uguuauuagccauagagga

SEQ ID NO: 1076351 - RNA, 19 nt, Artificial Sequence
  Description of Artificial Sequence: Synthetic oligonucleotide
  Antisense strand to SEQ ID NO: 1076350
uccucuauggcuaauaaca

SEQ ID NO: 1076352 - RNA, 19 nt, Artificial Sequence
  Description of Artificial Sequence: Synthetic oligonucleotide
  Sense strand starting at position 3100 of SEQ ID NO: 915391
gugggagaaucccuuaaau

SEQ ID NO: 1076353 - RNA, 19 nt, Artificial Sequence
  Description of Artificial Sequence: Synthetic oligonucleotide
  Antisense strand to SEQ ID NO: 1076352
auuuaagggauucucccac

SEQ ID NO: 1076354 - RNA, 19 nt, Artificial Sequence
  Description of Artificial Sequence: Synthetic oligonucleotide
  Sense strand starting at position 3235 of SEQ ID NO: 915391
acaggagacuacgcauuau

SEQ ID NO: 1076355 - RNA, 19 nt, Artificial Sequence
  Description of Artificial Sequence: Synthetic oligonucleotide
  Antisense strand to SEQ ID NO: 1076354
auaaugcguagucuccugu

SEQ ID NO: 1076356 - RNA, 19 nt, Artificial Sequence
  Description of Artificial Sequence: Synthetic oligonucleotide
  Sense strand starting at position 3239 of SEQ ID NO: 915391
gagacuacgcauuauguga

SEQ ID NO: 1076357 - RNA, 19 nt, Artificial Sequence
  Description of Artificial Sequence: Synthetic oligonucleotide
  Antisense strand to SEQ ID NO: 1076356
ucacauaaugcguagucuc

SEQ ID NO: 1076358 - RNA, 19 nt, Artificial Sequence
  Description of Artificial Sequence: Synthetic oligonucleotide
  Sense strand starting at position 3246 of SEQ ID NO: 915391
cgcauuaugugauccauuu

SEQ ID NO: 1076359 - RNA, 19 nt, Artificial Sequence
  Description of Artificial Sequence: Synthetic oligonucleotide
  Antisense strand to SEQ ID NO: 1076358
aaauggaucacauaaugcg

SEQ ID NO: 1076360 - RNA, 19 nt, Artificial Sequence
  Description of Artificial Sequence: Synthetic oligonucleotide
  Sense strand starting at position 3254 of SEQ ID NO: 915391
gugauccauuuguaugaaa

SEQ ID NO: 1076361 - RNA, 19 nt, Artificial Sequence
  Description of Artificial Sequence: Synthetic oligonucleotide
  Antisense strand to SEQ ID NO: 1076360
uuucauacaaauggaucac

SEQ ID NO: 1076362 - RNA, 19 nt, Artificial Sequence
  Description of Artificial Sequence: Synthetic oligonucleotide
  Sense strand starting at position 3283 of SEQ ID NO: 915391
augcaaaucuaugaagaca

SEQ ID NO: 1076363 - RNA, 19 nt, Artificial Sequence
  Description of Artificial Sequence: Synthetic oligonucleotide
  Antisense strand to SEQ ID NO: 1076362
ugucuucauagauuugcau

SEQ ID NO: 1076364 - RNA, 19 nt, Artificial Sequence
  Description of Artificial Sequence: Synthetic oligonucleotide
  Sense strand starting at position 3379 of SEQ ID NO: 915391
gggcgaugaaagugcugua

SEQ ID NO: 1076365 - RNA, 19 nt, Artificial Sequence
  Description of Artificial Sequence: Synthetic oligonucleotide
  Antisense strand to SEQ ID NO: 1076364
uacagcacuuucaucgccc

SEQ ID NO: 1076366 - RNA, 19 nt, Artificial Sequence
  Description of Artificial Sequence: Synthetic oligonucleotide
  Sense strand starting at position 3384 of SEQ ID NO: 915391
augaaagugcuguaauauu

SEQ ID NO: 1076367 - RNA, 19 nt, Artificial Sequence
  Description of Artificial Sequence: Synthetic oligonucleotide
  Antisense strand to SEQ ID NO: 1076366
aauauuacagcacuuucau

SEQ ID NO: 1076368 - RNA, 19 nt, Artificial Sequence
  Description of Artificial Sequence: Synthetic oligonucleotide
  Sense strand starting at position 3409 of SEQ ID NO: 915391
agcuccuaucugugaaugu

SEQ ID NO: 1076369 - RNA, 19 nt, Artificial Sequence
  Description of Artificial Sequence: Synthetic oligonucleotide
  Antisense strand to SEQ ID NO: 1076368
acauucacagauaggagcu

SEQ ID NO: 1076370 - RNA, 19 nt, Artificial Sequence
  Description of Artificial Sequence: Synthetic oligonucleotide
  Sense strand starting at position 3413 of SEQ ID NO: 915391
ccuaucugugaauguccua

SEQ ID NO: 1076371 - RNA, 19 nt, Artificial Sequence
  Description of Artificial Sequence: Synthetic oligonucleotide
  Antisense strand to SEQ ID NO: 1076370
uaggacauucacagauagg

SEQ ID NO: 1076372 - RNA, 19 nt, Artificial Sequence
  Description of Artificial Sequence: Synthetic oligonucleotide
  Sense strand starting at position 3455 of SEQ ID NO: 915391
aaacgaguugaauggguga

SEQ ID NO: 1076373 - RNA, 19 nt, Artificial Sequence
  Description of Artificial Sequence: Synthetic oligonucleotide
  Antisense strand to SEQ ID NO: 1076372
ucacccauucaacucguuu

SEQ ID NO: 1076374 - RNA, 19 nt, Artificial Sequence
  Description of Artificial Sequence: Synthetic oligonucleotide
  Sense strand starting at position 3458 of SEQ ID NO: 915391
cgaguugaaugggugaacu

SEQ ID NO: 1076375 - RNA, 19 nt, Artificial Sequence
  Description of Artificial Sequence: Synthetic oligonucleotide
  Antisense strand to SEQ ID NO: 1076374
aguucacccauucaacucg

SEQ ID NO: 1076376 - RNA, 19 nt, Artificial Sequence
  Description of Artificial Sequence: Synthetic oligonucleotide
  Sense strand starting at position 3468 of SEQ ID NO: 915391
gggugaacugcaugauaug

SEQ ID NO: 1076377 - RNA, 19 nt, Artificial Sequence
  Description of Artificial Sequence: Synthetic oligonucleotide
  Antisense strand to SEQ ID NO: 1076376
cauaucaugcaguucaccc

SEQ ID NO: 1076378 - RNA, 19 nt, Artificial Sequence
  Description of Artificial Sequence: Synthetic oligonucleotide
  Sense strand starting at position 3469 of SEQ ID NO: 915391
ggugaacugcaugauaugu

SEQ ID NO: 1076379 - RNA, 19 nt, Artificial Sequence
  Description of Artificial Sequence: Synthetic oligonucleotide
  Antisense strand to SEQ ID NO: 1076378
acauaucaugcaguucacc

SEQ ID NO: 1076380 - RNA, 19 nt, Artificial Sequence
  Description of Artificial Sequence: Synthetic oligonucleotide
  Sense strand starting at position 3474 of SEQ ID NO: 915391
acugcaugauaugugaagu

SEQ ID NO: 1076381 - RNA, 19 nt, Artificial Sequence
  Description of Artificial Sequence: Synthetic oligonucleotide
  Antisense strand to SEQ ID NO: 1076380
acuucacauaucaugcagu

SEQ ID NO: 1076382 - RNA, 19 nt, Artificial Sequence
  Description of Artificial Sequence: Synthetic oligonucleotide
  Sense strand starting at position 3475 of SEQ ID NO: 915391
cugcaugauaugugaagua

SEQ ID NO: 1076383 - RNA, 19 nt, Artificial Sequence
  Description of Artificial Sequence: Synthetic oligonucleotide
  Antisense strand to SEQ ID NO: 1076382
uacuucacauaucaugcag

SEQ ID NO: 1076384 - RNA, 19 nt, Artificial Sequence
  Description of Artificial Sequence: Synthetic oligonucleotide
  Sense strand starting at position 3485 of SEQ ID NO: 915391
ugugaaguauaucucauau

SEQ ID NO: 1076385 - RNA, 19 nt, Artificial Sequence
  Description of Artificial Sequence: Synthetic oligonucleotide
  Antisense strand to SEQ ID NO: 1076384
auaugagauauacuucaca

SEQ ID NO: 1076386 - RNA, 19 nt, Artificial Sequence
  Description of Artificial Sequence: Synthetic oligonucleotide
  Sense strand starting at position 3789 of SEQ ID NO: 915391
aggccugguucccugugaa

SEQ ID NO: 1076387 - RNA, 19 nt, Artificial Sequence
  Description of Artificial Sequence: Synthetic oligonucleotide
  Antisense strand to SEQ ID NO: 1076386
uucacagggaaccaggccu

SEQ ID NO: 1076388 - RNA, 19 nt, Artificial Sequence
  Description of Artificial Sequence: Synthetic oligonucleotide
  Sense strand starting at position 3792 of SEQ ID NO: 915391
ccugguucccugugaacca

SEQ ID NO: 1076389 - RNA, 19 nt, Artificial Sequence
  Description of Artificial Sequence: Synthetic oligonucleotide
  Antisense strand to SEQ ID NO: 1076388
ugguucacagggaaccagg

SEQ ID NO: 1076390 - RNA, 19 nt, Artificial Sequence
  Description of Artificial Sequence: Synthetic oligonucleotide
  Sense strand starting at position 9 of SEQ ID NO: 915392
gggagaauuaagugaguuu

SEQ ID NO: 1076391 - RNA, 19 nt, Artificial Sequence
  Description of Artificial Sequence: Synthetic oligonucleotide
  Antisense strand to SEQ ID NO: 1076390
aaacucacuuaauucuccc

SEQ ID NO: 1076392 - RNA, 19 nt, Artificial Sequence
  Description of Artificial Sequence: Synthetic oligonucleotide
  Sense strand starting at position 63 of SEQ ID NO: 915392
gagcaagcacuuuaucagu

SEQ ID NO: 1076393 - RNA, 19 nt, Artificial Sequence
  Description of Artificial Sequence: Synthetic oligonucleotide
  Antisense strand to SEQ ID NO: 1076392
acugauaaagugcuugcuc

SEQ ID NO: 1076394 - RNA, 19 nt, Artificial Sequence
  Description of Artificial Sequence: Synthetic oligonucleotide
  Sense strand starting at position 81 of SEQ ID NO: 915392
ugucauugugaugauuaug

SEQ ID NO: 1076395 - RNA, 19 nt, Artificial Sequence
  Description of Artificial Sequence: Synthetic oligonucleotide
  Antisense strand to SEQ ID NO: 1076394
cauaaucaucacaaugaca

SEQ ID NO: 1076396 - RNA, 19 nt, Artificial Sequence
  Description of Artificial Sequence: Synthetic oligonucleotide
  Sense strand starting at position 98 of SEQ ID NO: 915392
uggagcaaauggucuaaga

SEQ ID NO: 1076397 - RNA, 19 nt, Artificial Sequence
  Description of Artificial Sequence: Synthetic oligonucleotide
  Antisense strand to SEQ ID NO: 1076396
ucuuagaccauuugcucca

SEQ ID NO: 1076398 - RNA, 19 nt, Artificial Sequence
  Description of Artificial Sequence: Synthetic oligonucleotide
  Sense strand starting at position 368 of SEQ ID NO: 915392
cuccucugaugguuggaga

SEQ ID NO: 1076399 - RNA, 19 nt, Artificial Sequence
  Description of Artificial Sequence: Synthetic oligonucleotide
  Antisense strand to SEQ ID NO: 1076398
ucuccaaccaucagaggag

SEQ ID NO: 1076400 - RNA, 19 nt, Artificial Sequence
  Description of Artificial Sequence: Synthetic oligonucleotide
  Sense strand starting at position 372 of SEQ ID NO: 915392
ucugaugguuggagaggaa

SEQ ID NO: 1076401 - RNA, 19 nt, Artificial Sequence
  Description of Artificial Sequence: Synthetic oligonucleotide
  Antisense strand to SEQ ID NO: 1076400
uuccucuccaaccaucaga

SEQ ID NO: 1076402 - RNA, 19 nt, Artificial Sequence
  Description of Artificial Sequence: Synthetic oligonucleotide
  Sense strand starting at position 640 of SEQ ID NO: 915392
gaggaaauuccaugaggcu

SEQ ID NO: 1076403 - RNA, 19 nt, Artificial Sequence
  Description of Artificial Sequence: Synthetic oligonucleotide
  Antisense strand to SEQ ID NO: 1076402
agccucauggaauuuccuc

SEQ ID NO: 1076404 - RNA, 19 nt, Artificial Sequence
  Description of Artificial Sequence: Synthetic oligonucleotide
  Sense strand starting at position 899 of SEQ ID NO: 915392
gccugugcucuuuccucua

SEQ ID NO: 1076405 - RNA, 19 nt, Artificial Sequence
  Description of Artificial Sequence: Synthetic oligonucleotide
  Antisense strand to SEQ ID NO: 1076404
uagaggaaagagcacaggc

SEQ ID NO: 1076406 - RNA, 19 nt, Artificial Sequence
  Description of Artificial Sequence: Synthetic oligonucleotide
  Sense strand starting at position 986 of SEQ ID NO: 915392
guacucaucuuucuaggga

SEQ ID NO: 1076407 - RNA, 19 nt, Artificial Sequence
  Description of Artificial Sequence: Synthetic oligonucleotide
  Antisense strand to SEQ ID NO: 1076406
ucccuagaaagaugaguac

SEQ ID NO: 1076408 - RNA, 19 nt, Artificial Sequence
  Description of Artificial Sequence: Synthetic oligonucleotide
  Sense strand starting at position 1009 of SEQ ID NO: 915392
acuguuggccaggaugaga

SEQ ID NO: 1076409 - RNA, 19 nt, Artificial Sequence
  Description of Artificial Sequence: Synthetic oligonucleotide
  Antisense strand to SEQ ID NO: 1076408
ucucauccuggccaacagu

SEQ ID NO: 1076410 - RNA, 19 nt, Artificial Sequence
  Description of Artificial Sequence: Synthetic oligonucleotide
  Sense strand starting at position 1048 of SEQ ID NO: 915392
accacaguccuuuguagag

SEQ ID NO: 1076411 - RNA, 19 nt, Artificial Sequence
  Description of Artificial Sequence: Synthetic oligonucleotide
  Antisense strand to SEQ ID NO: 1076410
cucuacaaaggacuguggu

SEQ ID NO: 1076412 - RNA, 19 nt, Artificial Sequence
  Description of Artificial Sequence: Synthetic oligonucleotide
  Sense strand starting at position 1158 of SEQ ID NO: 915392
uccugagaauggucauacu

SEQ ID NO: 1076413 - RNA, 19 nt, Artificial Sequence
  Description of Artificial Sequence: Synthetic oligonucleotide
  Antisense strand to SEQ ID NO: 1076412
aguaugaccauucucagga

SEQ ID NO: 1076414 - RNA, 19 nt, Artificial Sequence
  Description of Artificial Sequence: Synthetic oligonucleotide
  Sense strand starting at position 1175 of SEQ ID NO: 915392
cuuccuaggcuuuagaaug

SEQ ID NO: 1076415 - RNA, 19 nt, Artificial Sequence
  Description of Artificial Sequence: Synthetic oligonucleotide
  Antisense strand to SEQ ID NO: 1076414
cauucuaaagccuaggaag

SEQ ID NO: 1076416 - RNA, 19 nt, Artificial Sequence
  Description of Artificial Sequence: Synthetic oligonucleotide
  Sense strand starting at position 1186 of SEQ ID NO: 915392
uuagaaugugcagagcagu

SEQ ID NO: 1076417 - RNA, 19 nt, Artificial Sequence
  Description of Artificial Sequence: Synthetic oligonucleotide
  Antisense strand to SEQ ID NO: 1076416
acugcucugcacauucuaa

SEQ ID NO: 1076418 - RNA, 19 nt, Artificial Sequence
  Description of Artificial Sequence: Synthetic oligonucleotide
  Sense strand starting at position 1338 of SEQ ID NO: 915392
cugaaacauucccugcaga

SEQ ID NO: 1076419 - RNA, 19 nt, Artificial Sequence
  Description of Artificial Sequence: Synthetic oligonucleotide
  Antisense strand to SEQ ID NO: 1076418
ucugcagggaauguuucag

SEQ ID NO: 1076420 - RNA, 19 nt, Artificial Sequence
  Description of Artificial Sequence: Synthetic oligonucleotide
  Sense strand starting at position 1339 of SEQ ID NO: 915392
ugaaacauucccugcagac

SEQ ID NO: 1076421 - RNA, 19 nt, Artificial Sequence
  Description of Artificial Sequence: Synthetic oligonucleotide
  Antisense strand to SEQ ID NO: 1076420
gucugcagggaauguuuca

SEQ ID NO: 1076422 - RNA, 19 nt, Artificial Sequence
  Description of Artificial Sequence: Synthetic oligonucleotide
  Sense strand starting at position 1652 of SEQ ID NO: 915392
cacccagacugcuugugaa

SEQ ID NO: 1076423 - RNA, 19 nt, Artificial Sequence
  Description of Artificial Sequence: Synthetic oligonucleotide
  Antisense strand to SEQ ID NO: 1076422
uucacaagcagucugggug

SEQ ID NO: 1076424 - RNA, 19 nt, Artificial Sequence
  Description of Artificial Sequence: Synthetic oligonucleotide
  Sense strand starting at position 1712 of SEQ ID NO: 915392
cuaguuaaugccuaagaga

SEQ ID NO: 1076425 - RNA, 19 nt, Artificial Sequence
  Description of Artificial Sequence: Synthetic oligonucleotide
  Antisense strand to SEQ ID NO: 1076424
ucucuuaggcauuaacuag

SEQ ID NO: 1076426 - RNA, 19 nt, Artificial Sequence
  Description of Artificial Sequence: Synthetic oligonucleotide
  Sense strand starting at position 2072 of SEQ ID NO: 915392
gagagugaguugccacaca

SEQ ID NO: 1076427 - RNA, 19 nt, Artificial Sequence
  Description of Artificial Sequence: Synthetic oligonucleotide
  Antisense strand to SEQ ID NO: 1076426
uguguggcaacucacucuc

SEQ ID NO: 1076428 - RNA, 19 nt, Artificial Sequence
  Description of Artificial Sequence: Synthetic oligonucleotide
  Sense strand starting at position 2203 of SEQ ID NO: 915392
aaucgaugugugcaagaga

SEQ ID NO: 1076429 - RNA, 19 nt, Artificial Sequence
  Description of Artificial Sequence: Synthetic oligonucleotide
  Antisense strand to SEQ ID NO: 1076428
ucucuugcacacaucgauu

SEQ ID NO: 1076430 - RNA, 19 nt, Artificial Sequence
  Description of Artificial Sequence: Synthetic oligonucleotide
  Sense strand starting at position 2260 of SEQ ID NO: 915392
gugaccaguguguaggaua

SEQ ID NO: 1076431 - RNA, 19 nt, Artificial Sequence
  Description of Artificial Sequence: Synthetic oligonucleotide
  Antisense strand to SEQ ID NO: 1076430
uauccuacacacuggucac

SEQ ID NO: 1076432 - RNA, 19 nt, Artificial Sequence
  Description of Artificial Sequence: Synthetic oligonucleotide
  Sense strand starting at position 2272 of SEQ ID NO: 915392
uaggauaagugcgugagaa

SEQ ID NO: 1076433 - RNA, 19 nt, Artificial Sequence
  Description of Artificial Sequence: Synthetic oligonucleotide
  Antisense strand to SEQ ID NO: 1076432
uucucacgcacuuauccua

SEQ ID NO: 1076434 - RNA, 19 nt, Artificial Sequence
  Description of Artificial Sequence: Synthetic oligonucleotide
  Sense strand starting at position 2273 of SEQ ID NO: 915392
aggauaagugcgugagaag

SEQ ID NO: 1076435 - RNA, 19 nt, Artificial Sequence
  Description of Artificial Sequence: Synthetic oligonucleotide
  Antisense strand to SEQ ID NO: 1076434
cuucucacgcacuuauccu

SEQ ID NO: 1076436 - RNA, 19 nt, Artificial Sequence
  Description of Artificial Sequence: Synthetic oligonucleotide
  Sense strand starting at position 2560 of SEQ ID NO: 915392
ugugguaaggguugaauga

SEQ ID NO: 1076437 - RNA, 19 nt, Artificial Sequence
  Description of Artificial Sequence: Synthetic oligonucleotide
  Antisense strand to SEQ ID NO: 1076436
ucauucaacccuuaccaca

SEQ ID NO: 1076438 - RNA, 19 nt, Artificial Sequence
  Description of Artificial Sequence: Synthetic oligonucleotide
  Sense strand starting at position 2562 of SEQ ID NO: 915392
ugguaaggguugaaugaga

SEQ ID NO: 1076439 - RNA, 19 nt, Artificial Sequence
  Description of Artificial Sequence: Synthetic oligonucleotide
  Antisense strand to SEQ ID NO: 1076438
ucucauucaacccuuacca

SEQ ID NO: 1076440 - RNA, 19 nt, Artificial Sequence
  Description of Artificial Sequence: Synthetic oligonucleotide
  Sense strand starting at position 2630 of SEQ ID NO: 915392
uuccuucuccucugaggga

SEQ ID NO: 1076441 - RNA, 19 nt, Artificial Sequence
  Description of Artificial Sequence: Synthetic oligonucleotide
  Antisense strand to SEQ ID NO: 1076440
ucccucagaggagaaggaa

SEQ ID NO: 1076442 - RNA, 19 nt, Artificial Sequence
  Description of Artificial Sequence: Synthetic oligonucleotide
  Sense strand starting at position 2654 of SEQ ID NO: 915392
gaauauaggcucuaaggca

SEQ ID NO: 1076443 - RNA, 19 nt, Artificial Sequence
  Description of Artificial Sequence: Synthetic oligonucleotide
  Antisense strand to SEQ ID NO: 1076442
ugccuuagagccuauauuc

SEQ ID NO: 1076444 - RNA, 19 nt, Artificial Sequence
  Description of Artificial Sequence: Synthetic oligonucleotide
  Sense strand starting at position 3016 of SEQ ID NO: 915392
ggcucaaagcccuaggaua

SEQ ID NO: 1076445 - RNA, 19 nt, Artificial Sequence
  Description of Artificial Sequence: Synthetic oligonucleotide
  Antisense strand to SEQ ID NO: 1076444
uauccuagggcuuugagcc

SEQ ID NO: 1076446 - RNA, 19 nt, Artificial Sequence
  Description of Artificial Sequence: Synthetic oligonucleotide
  Sense strand starting at position 3167 of SEQ ID NO: 915392
ucaauaucccuguaucgag

SEQ ID NO: 1076447 - RNA, 19 nt, Artificial Sequence
  Description of Artificial Sequence: Synthetic oligonucleotide
  Antisense strand to SEQ ID NO: 1076446
cucgauacagggauauuga

SEQ ID NO: 1076448 - RNA, 19 nt, Artificial Sequence
  Description of Artificial Sequence: Synthetic oligonucleotide
  Sense strand starting at position 3238 of SEQ ID NO: 915392
agucuuaacgcagagacua

SEQ ID NO: 1076449 - RNA, 19 nt, Artificial Sequence
  Description of Artificial Sequence: Synthetic oligonucleotide
  Antisense strand to SEQ ID NO: 1076448
uagucucugcguuaagacu

SEQ ID NO: 1076450 - RNA, 19 nt, Artificial Sequence
  Description of Artificial Sequence: Synthetic oligonucleotide
  Sense strand starting at position 3278 of SEQ ID NO: 915392
agaggcuaccaucaugagu

SEQ ID NO: 1076451 - RNA, 19 nt, Artificial Sequence
  Description of Artificial Sequence: Synthetic oligonucleotide
  Antisense strand to SEQ ID NO: 1076450
acucaugaugguagccucu

SEQ ID NO: 1076452 - RNA, 19 nt, Artificial Sequence
  Description of Artificial Sequence: Synthetic oligonucleotide
  Sense strand starting at position 3283 of SEQ ID NO: 915392
cuaccaucaugaguggaaa

SEQ ID NO: 1076453 - RNA, 19 nt, Artificial Sequence
  Description of Artificial Sequence: Synthetic oligonucleotide
  Antisense strand to SEQ ID NO: 1076452
uuuccacucaugaugguag

SEQ ID NO: 1076454 - RNA, 19 nt, Artificial Sequence
  Description of Artificial Sequence: Synthetic oligonucleotide
  Sense strand starting at position 3352 of SEQ ID NO: 915392
cccaauauggcagaucagu

SEQ ID NO: 1076455 - RNA, 19 nt, Artificial Sequence
  Description of Artificial Sequence: Synthetic oligonucleotide
  Antisense strand to SEQ ID NO: 1076454
acugaucugccauauuggg

SEQ ID NO: 1076456 - RNA, 19 nt, Artificial Sequence
  Description of Artificial Sequence: Synthetic oligonucleotide
  Sense strand starting at position 3373 of SEQ ID NO: 915392
gagccuuggugauccaaau

SEQ ID NO: 1076457 - RNA, 19 nt, Artificial Sequence
  Description of Artificial Sequence: Synthetic oligonucleotide
  Antisense strand to SEQ ID NO: 1076456
auuuggaucaccaaggcuc

SEQ ID NO: 1076458 - RNA, 19 nt, Artificial Sequence
  Description of Artificial Sequence: Synthetic oligonucleotide
  Sense strand starting at position 3434 of SEQ ID NO: 915392
aggcuugauuuccaaagac

SEQ ID NO: 1076459 - RNA, 19 nt, Artificial Sequence
  Description of Artificial Sequence: Synthetic oligonucleotide
  Antisense strand to SEQ ID NO: 1076458
gucuuuggaaaucaagccu

SEQ ID NO: 1076460 - RNA, 19 nt, Artificial Sequence
  Description of Artificial Sequence: Synthetic oligonucleotide
  Sense strand starting at position 3769 of SEQ ID NO: 915392
agauuuaucuuuggacuaa

SEQ ID NO: 1076461 - RNA, 19 nt, Artificial Sequence
  Description of Artificial Sequence: Synthetic oligonucleotide
  Antisense strand to SEQ ID NO: 1076460
uuaguccaaagauaaaucu

SEQ ID NO: 1076462 - RNA, 19 nt, Artificial Sequence
  Description of Artificial Sequence: Synthetic oligonucleotide
  Sense strand starting at position 3843 of SEQ ID NO: 915392
gggcaucaggcuugagaua

SEQ ID NO: 1076463 - RNA, 19 nt, Artificial Sequence
  Description of Artificial Sequence: Synthetic oligonucleotide
  Antisense strand to SEQ ID NO: 1076462
uaucucaagccugaugccc

SEQ ID NO: 1076464 - RNA, 19 nt, Artificial Sequence
  Description of Artificial Sequence: Synthetic oligonucleotide
  Sense strand starting at position 3844 of SEQ ID NO: 915392
ggcaucaggcuugagauaa

SEQ ID NO: 1076465 - RNA, 19 nt, Artificial Sequence
  Description of Artificial Sequence: Synthetic oligonucleotide
  Antisense strand to SEQ ID NO: 1076464
uuaucucaagccugaugcc

SEQ ID NO: 1076466 - RNA, 19 nt, Artificial Sequence
  Description of Artificial Sequence: Synthetic oligonucleotide
  Sense strand starting at position 3910 of SEQ ID NO: 915392
gguauccuuguacagugaa

SEQ ID NO: 1076467 - RNA, 19 nt, Artificial Sequence
  Description of Artificial Sequence: Synthetic oligonucleotide
  Antisense strand to SEQ ID NO: 1076466
uucacuguacaaggauacc

SEQ ID NO: 1076468 - RNA, 19 nt, Artificial Sequence
  Description of Artificial Sequence: Synthetic oligonucleotide
  Sense strand starting at position 3913 of SEQ ID NO: 915392
auccuuguacagugaacau

SEQ ID NO: 1076469 - RNA, 19 nt, Artificial Sequence
  Description of Artificial Sequence: Synthetic oligonucleotide
  Antisense strand to SEQ ID NO: 1076468
auguucacuguacaaggau

SEQ ID NO: 1076470 - RNA, 19 nt, Artificial Sequence
  Description of Artificial Sequence: Synthetic oligonucleotide
  Sense strand starting at position 299 of SEQ ID NO: 915393
cucgcuuucuuagcaauuu

SEQ ID NO: 1076471 - RNA, 19 nt, Artificial Sequence
  Description of Artificial Sequence: Synthetic oligonucleotide
  Antisense strand to SEQ ID NO: 1076470
aaauugcuaagaaagcgag

SEQ ID NO: 1076472 - RNA, 19 nt, Artificial Sequence
  Description of Artificial Sequence: Synthetic oligonucleotide
  Sense strand starting at position 642 of SEQ ID NO: 915393
ggguaaugcgccagugaaa

SEQ ID NO: 1076473 - RNA, 19 nt, Artificial Sequence
  Description of Artificial Sequence: Synthetic oligonucleotide
  Antisense strand to SEQ ID NO: 1076472
uuucacuggcgcauuaccc

SEQ ID NO: 1076474 - RNA, 19 nt, Artificial Sequence
  Description of Artificial Sequence: Synthetic oligonucleotide
  Sense strand starting at position 746 of SEQ ID NO: 915393
ucugucacacugcagaaau

SEQ ID NO: 1076475 - RNA, 19 nt, Artificial Sequence
  Description of Artificial Sequence: Synthetic oligonucleotide
  Antisense strand to SEQ ID NO: 1076474
auuucugcagugugacaga

SEQ ID NO: 1076476 - RNA, 19 nt, Artificial Sequence
  Description of Artificial Sequence: Synthetic oligonucleotide
  Sense strand starting at position 826 of SEQ ID NO: 915393
uguugauuauaccuaaaug

SEQ ID NO: 1076477 - RNA, 19 nt, Artificial Sequence
  Description of Artificial Sequence: Synthetic oligonucleotide
  Antisense strand to SEQ ID NO: 1076476
cauuuagguauaaucaaca

SEQ ID NO: 1076478 - RNA, 19 nt, Artificial Sequence
  Description of Artificial Sequence: Synthetic oligonucleotide
  Sense strand starting at position 844 of SEQ ID NO: 915393
guuuauaacuugcuugaaa

SEQ ID NO: 1076479 - RNA, 19 nt, Artificial Sequence
  Description of Artificial Sequence: Synthetic oligonucleotide
  Antisense strand to SEQ ID NO: 1076478
uuucaagcaaguuauaaac

SEQ ID NO: 1076480 - RNA, 19 nt, Artificial Sequence
  Description of Artificial Sequence: Synthetic oligonucleotide
  Sense strand starting at position 1057 of SEQ ID NO: 915393
cugauuaauuacuugugau

SEQ ID NO: 1076481 - RNA, 19 nt, Artificial Sequence
  Description of Artificial Sequence: Synthetic oligonucleotide
  Antisense strand to SEQ ID NO: 1076480
aucacaaguaauuaaucag

SEQ ID NO: 1076482 - RNA, 19 nt, Artificial Sequence
  Description of Artificial Sequence: Synthetic oligonucleotide
  Sense strand starting at position 1085 of SEQ ID NO: 915393
gagcuuuaucucugaaugg

SEQ ID NO: 1076483 - RNA, 19 nt, Artificial Sequence
  Description of Artificial Sequence: Synthetic oligonucleotide
  Antisense strand to SEQ ID NO: 1076482
ccauucagagauaaagcuc

SEQ ID NO: 1076484 - RNA, 19 nt, Artificial Sequence
  Description of Artificial Sequence: Synthetic oligonucleotide
  Sense strand starting at position 1196 of SEQ ID NO: 915393
aggauauucuugccuuaau

SEQ ID NO: 1076485 - RNA, 19 nt, Artificial Sequence
  Description of Artificial Sequence: Synthetic oligonucleotide
  Antisense strand to SEQ ID NO: 1076484
auuaaggcaagaauauccu

SEQ ID NO: 1076486 - RNA, 19 nt, Artificial Sequence
  Description of Artificial Sequence: Synthetic oligonucleotide
  Sense strand starting at position 1292 of SEQ ID NO: 915393
cacauagaguaguuaugua

SEQ ID NO: 1076487 - RNA, 19 nt, Artificial Sequence
  Description of Artificial Sequence: Synthetic oligonucleotide
  Antisense strand to SEQ ID NO: 1076486
uacauaacuacucuaugug

SEQ ID NO: 1076488 - RNA, 19 nt, Artificial Sequence
  Description of Artificial Sequence: Synthetic oligonucleotide
  Sense strand starting at position 1330 of SEQ ID NO: 915393
cugcaucauuuagaaauag

SEQ ID NO: 1076489 - RNA, 19 nt, Artificial Sequence
  Description of Artificial Sequence: Synthetic oligonucleotide
  Antisense strand to SEQ ID NO: 1076488
cuauuucuaaaugaugcag

SEQ ID NO: 1076490 - RNA, 19 nt, Artificial Sequence
  Description of Artificial Sequence: Synthetic oligonucleotide
  Sense strand starting at position 1481 of SEQ ID NO: 915393
auaagaauacucugcagga

SEQ ID NO: 1076491 - RNA, 19 nt, Artificial Sequence
  Description of Artificial Sequence: Synthetic oligonucleotide
  Antisense strand to SEQ ID NO: 1076490
uccugcagaguauucuuau

SEQ ID NO: 1076492 - RNA, 19 nt, Artificial Sequence
  Description of Artificial Sequence: Synthetic oligonucleotide
  Sense strand starting at position 1671 of SEQ ID NO: 915393
aaggcaagguaucucagaa

SEQ ID NO: 1076493 - RNA, 19 nt, Artificial Sequence
  Description of Artificial Sequence: Synthetic oligonucleotide
  Antisense strand to SEQ ID NO: 1076492
uucugagauaccuugccuu

SEQ ID NO: 1076494 - RNA, 19 nt, Artificial Sequence
  Description of Artificial Sequence: Synthetic oligonucleotide
  Sense strand starting at position 1794 of SEQ ID NO: 915393
gaaacaacaugguauuugu

SEQ ID NO: 1076495 - RNA, 19 nt, Artificial Sequence
  Description of Artificial Sequence: Synthetic oligonucleotide
  Antisense strand to SEQ ID NO: 1076494
acaaauaccauguuguuuc

SEQ ID NO: 1076496 - RNA, 19 nt, Artificial Sequence
  Description of Artificial Sequence: Synthetic oligonucleotide
  Sense strand starting at position 1935 of SEQ ID NO: 915393
gcugaugcugaguaaacua

SEQ ID NO: 1076497 - RNA, 19 nt, Artificial Sequence
  Description of Artificial Sequence: Synthetic oligonucleotide
  Antisense strand to SEQ ID NO: 1076496
uaguuuacucagcaucagc

SEQ ID NO: 1076498 - RNA, 19 nt, Artificial Sequence
  Description of Artificial Sequence: Synthetic oligonucleotide
  Sense strand starting at position 1963 of SEQ ID NO: 915393
gaugaauuggacugcagac

SEQ ID NO: 1076499 - RNA, 19 nt, Artificial Sequence
  Description of Artificial Sequence: Synthetic oligonucleotide
  Antisense strand to SEQ ID NO: 1076498
gucugcaguccaauucauc

SEQ ID NO: 1076500 - RNA, 19 nt, Artificial Sequence
  Description of Artificial Sequence: Synthetic oligonucleotide
  Sense strand starting at position 2473 of SEQ ID NO: 915393
ucuuaaaggaaguguuaag

SEQ ID NO: 1076501 - RNA, 19 nt, Artificial Sequence
  Description of Artificial Sequence: Synthetic oligonucleotide
  Antisense strand to SEQ ID NO: 1076500
cuuaacacuuccuuuaaga

SEQ ID NO: 1076502 - RNA, 19 nt, Artificial Sequence
  Description of Artificial Sequence: Synthetic oligonucleotide
  Sense strand starting at position 2663 of SEQ ID NO: 915393
acagcaguccuuuaaaguu

SEQ ID NO: 1076503 - RNA, 19 nt, Artificial Sequence
  Description of Artificial Sequence: Synthetic oligonucleotide
  Antisense strand to SEQ ID NO: 1076502
aacuuuaaaggacugcugu

SEQ ID NO: 1076504 - RNA, 19 nt, Artificial Sequence
  Description of Artificial Sequence: Synthetic oligonucleotide
  Sense strand starting at position 2671 of SEQ ID NO: 915393
ccuuuaaaguuaguacuua

SEQ ID NO: 1076505 - RNA, 19 nt, Artificial Sequence
  Description of Artificial Sequence: Synthetic oligonucleotide
  Antisense strand to SEQ ID NO: 1076504
uaaguacuaacuuuaaagg

SEQ ID NO: 1076506 - RNA, 19 nt, Artificial Sequence
  Description of Artificial Sequence: Synthetic oligonucleotide
  Sense strand starting at position 2801 of SEQ ID NO: 915393
ucaguuucugccuagaaau

SEQ ID NO: 1076507 - RNA, 19 nt, Artificial Sequence
  Description of Artificial Sequence: Synthetic oligonucleotide
  Antisense strand to SEQ ID NO: 1076506
auuucuaggcagaaacuga

SEQ ID NO: 1076508 - RNA, 19 nt, Artificial Sequence
  Description of Artificial Sequence: Synthetic oligonucleotide
  Sense strand starting at position 2803 of SEQ ID NO: 915393
aguuucugccuagaaauac

SEQ ID NO: 1076509 - RNA, 19 nt, Artificial Sequence
  Description of Artificial Sequence: Synthetic oligonucleotide
  Antisense strand to SEQ ID NO: 1076508
guauuucuaggcagaaacu

SEQ ID NO: 1076510 - RNA, 19 nt, Artificial Sequence
  Description of Artificial Sequence: Synthetic oligonucleotide
  Sense strand starting at position 2837 of SEQ ID NO: 915393
uccagucuucuugacuuua

SEQ ID NO: 1076511 - RNA, 19 nt, Artificial Sequence
  Description of Artificial Sequence: Synthetic oligonucleotide
  Antisense strand to SEQ ID NO: 1076510
uaaagucaagaagacugga

SEQ ID NO: 1076512 - RNA, 19 nt, Artificial Sequence
  Description of Artificial Sequence: Synthetic oligonucleotide
  Sense strand starting at position 2857 of SEQ ID NO: 915393
uuugcaaagucaucugaaa

SEQ ID NO: 1076513 - RNA, 19 nt, Artificial Sequence
  Description of Artificial Sequence: Synthetic oligonucleotide
  Antisense strand to SEQ ID NO: 1076512
uuucagaugacuuugcaaa

SEQ ID NO: 1076514 - RNA, 19 nt, Artificial Sequence
  Description of Artificial Sequence: Synthetic oligonucleotide
  Sense strand starting at position 2911 of SEQ ID NO: 915393
ggguuaggucuuuauucuc

SEQ ID NO: 1076515 - RNA, 19 nt, Artificial Sequence
  Description of Artificial Sequence: Synthetic oligonucleotide
  Antisense strand to SEQ ID NO: 1076514
gagaauaaagaccuaaccc

SEQ ID NO: 1076516 - RNA, 19 nt, Artificial Sequence
  Description of Artificial Sequence: Synthetic oligonucleotide
  Sense strand starting at position 2926 of SEQ ID NO: 915393
ucucauguucccuaaggga

SEQ ID NO: 1076517 - RNA, 19 nt, Artificial Sequence
  Description of Artificial Sequence: Synthetic oligonucleotide
  Antisense strand to SEQ ID NO: 1076516
ucccuuagggaacaugaga

SEQ ID NO: 1076518 - RNA, 19 nt, Artificial Sequence
  Description of Artificial Sequence: Synthetic oligonucleotide
  Sense strand starting at position 3047 of SEQ ID NO: 915393
cccugaaugucuuugauau

SEQ ID NO: 1076519 - RNA, 19 nt, Artificial Sequence
  Description of Artificial Sequence: Synthetic oligonucleotide
  Antisense strand to SEQ ID NO: 1076518
auaucaaagacauucaggg

SEQ ID NO: 1076520 - RNA, 19 nt, Artificial Sequence
  Description of Artificial Sequence: Synthetic oligonucleotide
  Sense strand starting at position 3048 of SEQ ID NO: 915393
ccugaaugucuuugauaua

SEQ ID NO: 1076521 - RNA, 19 nt, Artificial Sequence
  Description of Artificial Sequence: Synthetic oligonucleotide
  Antisense strand to SEQ ID NO: 1076520
uauaucaaagacauucagg

SEQ ID NO: 1076522 - RNA, 19 nt, Artificial Sequence
  Description of Artificial Sequence: Synthetic oligonucleotide
  Sense strand starting at position 3194 of SEQ ID NO: 915393
uugacucuaccuuagguaa

SEQ ID NO: 1076523 - RNA, 19 nt, Artificial Sequence
  Description of Artificial Sequence: Synthetic oligonucleotide
  Antisense strand to SEQ ID NO: 1076522
uuaccuaagguagagucaa

SEQ ID NO: 1076524 - RNA, 19 nt, Artificial Sequence
  Description of Artificial Sequence: Synthetic oligonucleotide
  Sense strand starting at position 3238 of SEQ ID NO: 915393
ccguauggaguuuauaaug

SEQ ID NO: 1076525 - RNA, 19 nt, Artificial Sequence
  Description of Artificial Sequence: Synthetic oligonucleotide
  Antisense strand to SEQ ID NO: 1076524
cauuauaaacuccauacgg

SEQ ID NO: 1076526 - RNA, 19 nt, Artificial Sequence
  Description of Artificial Sequence: Synthetic oligonucleotide
  Sense strand starting at position 3279 of SEQ ID NO: 915393
cuaggagauucuccacucu

SEQ ID NO: 1076527 - RNA, 19 nt, Artificial Sequence
  Description of Artificial Sequence: Synthetic oligonucleotide
  Antisense strand to SEQ ID NO: 1076526
agaguggagaaucuccuag

SEQ ID NO: 1076528 - RNA, 19 nt, Artificial Sequence
  Description of Artificial Sequence: Synthetic oligonucleotide
  Sense strand starting at position 3298 of SEQ ID NO: 915393
ggguuaaccucacuuagag

SEQ ID NO: 1076529 - RNA, 19 nt, Artificial Sequence
  Description of Artificial Sequence: Synthetic oligonucleotide
  Antisense strand to SEQ ID NO: 1076528
cucuaagugagguuaaccc

SEQ ID NO: 1076530 - RNA, 19 nt, Artificial Sequence
  Description of Artificial Sequence: Synthetic oligonucleotide
  Sense strand starting at position 3372 of SEQ ID NO: 915393
ggauaucaaucaguuuggu

SEQ ID NO: 1076531 - RNA, 19 nt, Artificial Sequence
  Description of Artificial Sequence: Synthetic oligonucleotide
  Antisense strand to SEQ ID NO: 1076530
accaaacugauugauaucc

SEQ ID NO: 1076532 - RNA, 19 nt, Artificial Sequence
  Description of Artificial Sequence: Synthetic oligonucleotide
  Sense strand starting at position 3375 of SEQ ID NO: 915393
uaucaaucaguuuggugaa

SEQ ID NO: 1076533 - RNA, 19 nt, Artificial Sequence
  Description of Artificial Sequence: Synthetic oligonucleotide
  Antisense strand to SEQ ID NO: 1076532
uucaccaaacugauugaua

SEQ ID NO: 1076534 - RNA, 19 nt, Artificial Sequence
  Description of Artificial Sequence: Synthetic oligonucleotide
  Sense strand starting at position 3416 of SEQ ID NO: 915393
gaaguaguugaaugaaacu

SEQ ID NO: 1076535 - RNA, 19 nt, Artificial Sequence
  Description of Artificial Sequence: Synthetic oligonucleotide
  Antisense strand to SEQ ID NO: 1076534
aguuucauucaacuacuuc

SEQ ID NO: 1076536 - RNA, 19 nt, Artificial Sequence
  Description of Artificial Sequence: Synthetic oligonucleotide
  Sense strand starting at position 3457 of SEQ ID NO: 915393
acgggaugacuuuauagcu

SEQ ID NO: 1076537 - RNA, 19 nt, Artificial Sequence
  Description of Artificial Sequence: Synthetic oligonucleotide
  Antisense strand to SEQ ID NO: 1076536
agcuauaaagucaucccgu

SEQ ID NO: 1076538 - RNA, 19 nt, Artificial Sequence
  Description of Artificial Sequence: Synthetic oligonucleotide
  Sense strand starting at position 3518 of SEQ ID NO: 915393
uucucugugguuuaagaag

SEQ ID NO: 1076539 - RNA, 19 nt, Artificial Sequence
  Description of Artificial Sequence: Synthetic oligonucleotide
  Antisense strand to SEQ ID NO: 1076538
cuucuuaaaccacagagaa

SEQ ID NO: 1076540 - RNA, 19 nt, Artificial Sequence
  Description of Artificial Sequence: Synthetic oligonucleotide
  Sense strand starting at position 3552 of SEQ ID NO: 915393
uuggguuuaacuuggacau

SEQ ID NO: 1076541 - RNA, 19 nt, Artificial Sequence
  Description of Artificial Sequence: Synthetic oligonucleotide
  Antisense strand to SEQ ID NO: 1076540
auguccaaguuaaacccaa

SEQ ID NO: 1076542 - RNA, 19 nt, Artificial Sequence
  Description of Artificial Sequence: Synthetic oligonucleotide
  Sense strand starting at position 3553 of SEQ ID NO: 915393
uggguuuaacuuggacauu

SEQ ID NO: 1076543 - RNA, 19 nt, Artificial Sequence
  Description of Artificial Sequence: Synthetic oligonucleotide
  Antisense strand to SEQ ID NO: 1076542
aauguccaaguuaaaccca

SEQ ID NO: 1076544 - RNA, 19 nt, Artificial Sequence
  Description of Artificial Sequence: Synthetic oligonucleotide
  Sense strand starting at position 3564 of SEQ ID NO: 915393
uggacauuauaauugucaa

SEQ ID NO: 1076545 - RNA, 19 nt, Artificial Sequence
  Description of Artificial Sequence: Synthetic oligonucleotide
  Antisense strand to SEQ ID NO: 1076544
uugacaauuauaaugucca

SEQ ID NO: 1076546 - RNA, 19 nt, Artificial Sequence
  Description of Artificial Sequence: Synthetic oligonucleotide
  Sense strand starting at position 3772 of SEQ ID NO: 915393
augcaaacucuacauguga

SEQ ID NO: 1076547 - RNA, 19 nt, Artificial Sequence
  Description of Artificial Sequence: Synthetic oligonucleotide
  Antisense strand to SEQ ID NO: 1076546
ucacauguagaguuugcau

SEQ ID NO: 1076548 - RNA, 19 nt, Artificial Sequence
  Description of Artificial Sequence: Synthetic oligonucleotide
  Sense strand starting at position 3788 of SEQ ID NO: 915393
ugauguuugugugucauuu

SEQ ID NO: 1076549 - RNA, 19 nt, Artificial Sequence
  Description of Artificial Sequence: Synthetic oligonucleotide
  Antisense strand to SEQ ID NO: 1076548
aaaugacacacaaacauca

SEQ ID NO: 1076550 - RNA, 19 nt, Artificial Sequence
  Description of Artificial Sequence: Synthetic oligonucleotide
  Sense strand starting at position 308 of SEQ ID NO: 915394
cuggccaagucacaaauau

SEQ ID NO: 1076551 - RNA, 19 nt, Artificial Sequence
  Description of Artificial Sequence: Synthetic oligonucleotide
  Antisense strand to SEQ ID NO: 1076550
auauuugugacuuggccag

SEQ ID NO: 1076552 - RNA, 19 nt, Artificial Sequence
  Description of Artificial Sequence: Synthetic oligonucleotide
  Sense strand starting at position 402 of SEQ ID NO: 915394
aagauaauuguuuagugcu

SEQ ID NO: 1076553 - RNA, 19 nt, Artificial Sequence
  Description of Artificial Sequence: Synthetic oligonucleotide
  Antisense strand to SEQ ID NO: 1076552
agcacuaaacaauuaucuu

SEQ ID NO: 1076554 - RNA, 19 nt, Artificial Sequence
  Description of Artificial Sequence: Synthetic oligonucleotide
  Sense strand starting at position 404 of SEQ ID NO: 915394
gauaauuguuuagugcuau

SEQ ID NO: 1076555 - RNA, 19 nt, Artificial Sequence
  Description of Artificial Sequence: Synthetic oligonucleotide
  Antisense strand to SEQ ID NO: 1076554
auagcacuaaacaauuauc

SEQ ID NO: 1076556 - RNA, 19 nt, Artificial Sequence
  Description of Artificial Sequence: Synthetic oligonucleotide
  Sense strand starting at position 408 of SEQ ID NO: 915394
auuguuuagugcuauuaga

SEQ ID NO: 1076557 - RNA, 19 nt, Artificial Sequence
  Description of Artificial Sequence: Synthetic oligonucleotide
  Antisense strand to SEQ ID NO: 1076556
ucuaauagcacuaaacaau

SEQ ID NO: 1076558 - RNA, 19 nt, Artificial Sequence
  Description of Artificial Sequence: Synthetic oligonucleotide
  Sense strand starting at position 427 of SEQ ID NO: 915394
ugccaaacgcuauaaagau

SEQ ID NO: 1076559 - RNA, 19 nt, Artificial Sequence
  Description of Artificial Sequence: Synthetic oligonucleotide
  Antisense strand to SEQ ID NO: 1076558
aucuuuauagcguuuggca

SEQ ID NO: 1076560 - RNA, 19 nt, Artificial Sequence
  Description of Artificial Sequence: Synthetic oligonucleotide
  Sense strand starting at position 469 of SEQ ID NO: 915394
aauagcucagauuguagau

SEQ ID NO: 1076561 - RNA, 19 nt, Artificial Sequence
  Description of Artificial Sequence: Synthetic oligonucleotide
  Antisense strand to SEQ ID NO: 1076560
aucuacaaucugagcuauu

SEQ ID NO: 1076562 - RNA, 19 nt, Artificial Sequence
  Description of Artificial Sequence: Synthetic oligonucleotide
  Sense strand starting at position 471 of SEQ ID NO: 915394
uagcucagauuguagauaa

SEQ ID NO: 1076563 - RNA, 19 nt, Artificial Sequence
  Description of Artificial Sequence: Synthetic oligonucleotide
  Antisense strand to SEQ ID NO: 1076562
uuaucuacaaucugagcua

SEQ ID NO: 1076564 - RNA, 19 nt, Artificial Sequence
  Description of Artificial Sequence: Synthetic oligonucleotide
  Sense strand starting at position 495 of SEQ ID NO: 915394
ucuaauaaccauuguggaa

SEQ ID NO: 1076565 - RNA, 19 nt, Artificial Sequence
  Description of Artificial Sequence: Synthetic oligonucleotide
  Antisense strand to SEQ ID NO: 1076564
uuccacaaugguuauuaga

SEQ ID NO: 1076566 - RNA, 19 nt, Artificial Sequence
  Description of Artificial Sequence: Synthetic oligonucleotide
  Sense strand starting at position 507 of SEQ ID NO: 915394
uguggaagauuccacaaac

SEQ ID NO: 1076567 - RNA, 19 nt, Artificial Sequence
  Description of Artificial Sequence: Synthetic oligonucleotide
  Antisense strand to SEQ ID NO: 1076566
guuuguggaaucuuccaca

SEQ ID NO: 1076568 - RNA, 19 nt, Artificial Sequence
  Description of Artificial Sequence: Synthetic oligonucleotide
  Sense strand starting at position 524 of SEQ ID NO: 915394
acaggccagucacauuuaa

SEQ ID NO: 1076569 - RNA, 19 nt, Artificial Sequence
  Description of Artificial Sequence: Synthetic oligonucleotide
  Antisense strand to SEQ ID NO: 1076568
uuaaaugugacuggccugu

SEQ ID NO: 1076570 - RNA, 19 nt, Artificial Sequence
  Description of Artificial Sequence: Synthetic oligonucleotide
  Sense strand starting at position 531 of SEQ ID NO: 915394
agucacauuuaaugaaagu

SEQ ID NO: 1076571 - RNA, 19 nt, Artificial Sequence
  Description of Artificial Sequence: Synthetic oligonucleotide
  Antisense strand to SEQ ID NO: 1076570
acuuucauuaaaugugacu

SEQ ID NO: 1076572 - RNA, 19 nt, Artificial Sequence
  Description of Artificial Sequence: Synthetic oligonucleotide
  Sense strand starting at position 559 of SEQ ID NO: 915394
ggccuaaacuuuguuauga

SEQ ID NO: 1076573 - RNA, 19 nt, Artificial Sequence
  Description of Artificial Sequence: Synthetic oligonucleotide
  Antisense strand to SEQ ID NO: 1076572
ucauaacaaaguuuaggcc

SEQ ID NO: 1076574 - RNA, 19 nt, Artificial Sequence
  Description of Artificial Sequence: Synthetic oligonucleotide
  Sense strand starting at position 560 of SEQ ID NO: 915394
gccuaaacuuuguuaugag

SEQ ID NO: 1076575 - RNA, 19 nt, Artificial Sequence
  Description of Artificial Sequence: Synthetic oligonucleotide
  Antisense strand to SEQ ID NO: 1076574
cucauaacaaaguuuaggc

SEQ ID NO: 1076576 - RNA, 19 nt, Artificial Sequence
  Description of Artificial Sequence: Synthetic oligonucleotide
  Sense strand starting at position 561 of SEQ ID NO: 915394
ccuaaacuuuguuaugaga

SEQ ID NO: 1076577 - RNA, 19 nt, Artificial Sequence
  Description of Artificial Sequence: Synthetic oligonucleotide
  Antisense strand to SEQ ID NO: 1076576
ucucauaacaaaguuuagg

SEQ ID NO: 1076578 - RNA, 19 nt, Artificial Sequence
  Description of Artificial Sequence: Synthetic oligonucleotide
  Sense strand starting at position 563 of SEQ ID NO: 915394
uaaacuuuguuaugagaga

SEQ ID NO: 1076579 - RNA, 19 nt, Artificial Sequence
  Description of Artificial Sequence: Synthetic oligonucleotide
  Antisense strand to SEQ ID NO: 1076578
ucucucauaacaaaguuua

SEQ ID NO: 1076580 - RNA, 19 nt, Artificial Sequence
  Description of Artificial Sequence: Synthetic oligonucleotide
  Sense strand starting at position 773 of SEQ ID NO: 915394
auacucagagcucaaagua

SEQ ID NO: 1076581 - RNA, 19 nt, Artificial Sequence
  Description of Artificial Sequence: Synthetic oligonucleotide
  Antisense strand to SEQ ID NO: 1076580
uacuuugagcucugaguau

SEQ ID NO: 1076582 - RNA, 19 nt, Artificial Sequence
  Description of Artificial Sequence: Synthetic oligonucleotide
  Sense strand starting at position 898 of SEQ ID NO: 915394
gaaaucaggcuuugucaac

SEQ ID NO: 1076583 - RNA, 19 nt, Artificial Sequence
  Description of Artificial Sequence: Synthetic oligonucleotide
  Antisense strand to SEQ ID NO: 1076582
guugacaaagccugauuuc

SEQ ID NO: 1076584 - RNA, 19 nt, Artificial Sequence
  Description of Artificial Sequence: Synthetic oligonucleotide
  Sense strand starting at position 2009 of SEQ ID NO: 915394
cgagguuuccugggcggga

SEQ ID NO: 1076585 - RNA, 19 nt, Artificial Sequence
  Description of Artificial Sequence: Synthetic oligonucleotide
  Antisense strand to SEQ ID NO: 1076584
ucccgcccaggaaaccucg

SEQ ID NO: 1076586 - RNA, 19 nt, Artificial Sequence
  Description of Artificial Sequence: Synthetic oligonucleotide
  Sense strand starting at position 2010 of SEQ ID NO: 915394
gagguuuccugggcgggaa

SEQ ID NO: 1076587 - RNA, 19 nt, Artificial Sequence
  Description of Artificial Sequence: Synthetic oligonucleotide
  Antisense strand to SEQ ID NO: 1076586
uucccgcccaggaaaccuc

SEQ ID NO: 1076588 - RNA, 19 nt, Artificial Sequence
  Description of Artificial Sequence: Synthetic oligonucleotide
  Sense strand starting at position 2011 of SEQ ID NO: 915394
agguuuccugggcgggaaa

SEQ ID NO: 1076589 - RNA, 19 nt, Artificial Sequence
  Description of Artificial Sequence: Synthetic oligonucleotide
  Antisense strand to SEQ ID NO: 1076588
uuucccgcccaggaaaccu

SEQ ID NO: 1076590 - RNA, 19 nt, Artificial Sequence
  Description of Artificial Sequence: Synthetic oligonucleotide
  Sense strand starting at position 2077 of SEQ ID NO: 915394
agcccuguagcgugggaaa

SEQ ID NO: 1076591 - RNA, 19 nt, Artificial Sequence
  Description of Artificial Sequence: Synthetic oligonucleotide
  Antisense strand to SEQ ID NO: 1076590
uuucccacgcuacagggcu

SEQ ID NO: 1076592 - RNA, 19 nt, Artificial Sequence
  Description of Artificial Sequence: Synthetic oligonucleotide
  Sense strand starting at position 2384 of SEQ ID NO: 915394
gccugaucccagggugaac

SEQ ID NO: 1076593 - RNA, 19 nt, Artificial Sequence
  Description of Artificial Sequence: Synthetic oligonucleotide
  Antisense strand to SEQ ID NO: 1076592
guucacccugggaucaggc

SEQ ID NO: 1076594 - RNA, 19 nt, Artificial Sequence
  Description of Artificial Sequence: Synthetic oligonucleotide
  Sense strand starting at position 2591 of SEQ ID NO: 915394
uaagaagaaugguuguaau

SEQ ID NO: 1076595 - RNA, 19 nt, Artificial Sequence
  Description of Artificial Sequence: Synthetic oligonucleotide
  Antisense strand to SEQ ID NO: 1076594
auuacaaccauucuucuua

SEQ ID NO: 1076596 - RNA, 19 nt, Artificial Sequence
  Description of Artificial Sequence: Synthetic oligonucleotide
  Sense strand starting at position 2913 of SEQ ID NO: 915394
ccaagcaucugguggaguu

SEQ ID NO: 1076597 - RNA, 19 nt, Artificial Sequence
  Description of Artificial Sequence: Synthetic oligonucleotide
  Antisense strand to SEQ ID NO: 1076596
aacuccaccagaugcuugg

SEQ ID NO: 1076598 - RNA, 19 nt, Artificial Sequence
  Description of Artificial Sequence: Synthetic oligonucleotide
  Sense strand starting at position 2914 of SEQ ID NO: 915394
caagcaucugguggaguuu

SEQ ID NO: 1076599 - RNA, 19 nt, Artificial Sequence
  Description of Artificial Sequence: Synthetic oligonucleotide
  Antisense strand to SEQ ID NO: 1076598
aaacuccaccagaugcuug

SEQ ID NO: 1076600 - RNA, 19 nt, Artificial Sequence
  Description of Artificial Sequence: Synthetic oligonucleotide
  Sense strand starting at position 3119 of SEQ ID NO: 915394
gugagauggcuucaacaug

SEQ ID NO: 1076601 - RNA, 19 nt, Artificial Sequence
  Description of Artificial Sequence: Synthetic oligonucleotide
  Antisense strand to SEQ ID NO: 1076600
cauguugaagccaucucac

SEQ ID NO: 1076602 - RNA, 19 nt, Artificial Sequence
  Description of Artificial Sequence: Synthetic oligonucleotide
  Sense strand starting at position 3316 of SEQ ID NO: 915394
gaccuauggugaucugcca

SEQ ID NO: 1076603 - RNA, 19 nt, Artificial Sequence
  Description of Artificial Sequence: Synthetic oligonucleotide
  Antisense strand to SEQ ID NO: 1076602
uggcagaucaccauagguc

SEQ ID NO: 1076604 - RNA, 19 nt, Artificial Sequence
  Description of Artificial Sequence: Synthetic oligonucleotide
  Sense strand starting at position 3386 of SEQ ID NO: 915394
ccaagcaucugguggagau

SEQ ID NO: 1076605 - RNA, 19 nt, Artificial Sequence
  Description of Artificial Sequence: Synthetic oligonucleotide
  Antisense strand to SEQ ID NO: 1076604
aucuccaccagaugcuugg

SEQ ID NO: 1076606 - RNA, 19 nt, Artificial Sequence
  Description of Artificial Sequence: Synthetic oligonucleotide
  Sense strand starting at position 3387 of SEQ ID NO: 915394
caagcaucugguggagauu

SEQ ID NO: 1076607 - RNA, 19 nt, Artificial Sequence
  Description of Artificial Sequence: Synthetic oligonucleotide
  Antisense strand to SEQ ID NO: 1076606
aaucuccaccagaugcuug

SEQ ID NO: 1076608 - RNA, 19 nt, Artificial Sequence
  Description of Artificial Sequence: Synthetic oligonucleotide
  Sense strand starting at position 3748 of SEQ ID NO: 915394
ggagucuccuucuauugac

SEQ ID NO: 1076609 - RNA, 19 nt, Artificial Sequence
  Description of Artificial Sequence: Synthetic oligonucleotide
  Antisense strand to SEQ ID NO: 1076608
gucaauagaaggagacucc

SEQ ID NO: 1076610 - RNA, 19 nt, Artificial Sequence
  Description of Artificial Sequence: Synthetic oligonucleotide
  Sense strand starting at position 114 of SEQ ID NO: 915395
ggaaguucuugagaccaga

SEQ ID NO: 1076611 - RNA, 19 nt, Artificial Sequence
  Description of Artificial Sequence: Synthetic oligonucleotide
  Antisense strand to SEQ ID NO: 1076610
ucuggucucaagaacuucc

SEQ ID NO: 1076612 - RNA, 19 nt, Artificial Sequence
  Description of Artificial Sequence: Synthetic oligonucleotide
  Sense strand starting at position 462 of SEQ ID NO: 915395
gggccugguuggaguagaa

SEQ ID NO: 1076613 - RNA, 19 nt, Artificial Sequence
  Description of Artificial Sequence: Synthetic oligonucleotide
  Antisense strand to SEQ ID NO: 1076612
uucuacuccaaccaggccc

SEQ ID NO: 1076614 - RNA, 19 nt, Artificial Sequence
  Description of Artificial Sequence: Synthetic oligonucleotide
  Sense strand starting at position 549 of SEQ ID NO: 915395
gacgaauccugggaugcca

SEQ ID NO: 1076615 - RNA, 19 nt, Artificial Sequence
  Description of Artificial Sequence: Synthetic oligonucleotide
  Antisense strand to SEQ ID NO: 1076614
uggcaucccaggauucguc

SEQ ID NO: 1076616 - RNA, 19 nt, Artificial Sequence
  Description of Artificial Sequence: Synthetic oligonucleotide
  Sense strand starting at position 600 of SEQ ID NO: 915395
caguguguccuggguggau

SEQ ID NO: 1076617 - RNA, 19 nt, Artificial Sequence
  Description of Artificial Sequence: Synthetic oligonucleotide
  Antisense strand to SEQ ID NO: 1076616
auccacccaggacacacug

SEQ ID NO: 1076618 - RNA, 19 nt, Artificial Sequence
  Description of Artificial Sequence: Synthetic oligonucleotide
  Sense strand starting at position 620 of SEQ ID NO: 915395
aggacuaacgccugggaau

SEQ ID NO: 1076619 - RNA, 19 nt, Artificial Sequence
  Description of Artificial Sequence: Synthetic oligonucleotide
  Antisense strand to SEQ ID NO: 1076618
auucccaggcguuaguccu

SEQ ID NO: 1076620 - RNA, 19 nt, Artificial Sequence
  Description of Artificial Sequence: Synthetic oligonucleotide
  Sense strand starting at position 621 of SEQ ID NO: 915395
ggacuaacgccugggaauc

SEQ ID NO: 1076621 - RNA, 19 nt, Artificial Sequence
  Description of Artificial Sequence: Synthetic oligonucleotide
  Antisense strand to SEQ ID NO: 1076620
gauucccaggcguuagucc

SEQ ID NO: 1076622 - RNA, 19 nt, Artificial Sequence
  Description of Artificial Sequence: Synthetic oligonucleotide
  Sense strand starting at position 688 of SEQ ID NO: 915395
cggaguguuugaguguuau

SEQ ID NO: 1076623 - RNA, 19 nt, Artificial Sequence
  Description of Artificial Sequence: Synthetic oligonucleotide
  Antisense strand to SEQ ID NO: 1076622
auaacacucaaacacuccg

SEQ ID NO: 1076624 - RNA, 19 nt, Artificial Sequence
  Description of Artificial Sequence: Synthetic oligonucleotide
  Sense strand starting at position 692 of SEQ ID NO: 915395
guguuugaguguuaugaga

SEQ ID NO: 1076625 - RNA, 19 nt, Artificial Sequence
  Description of Artificial Sequence: Synthetic oligonucleotide
  Antisense strand to SEQ ID NO: 1076624
ucucauaacacucaaacac

SEQ ID NO: 1076626 - RNA, 19 nt, Artificial Sequence
  Description of Artificial Sequence: Synthetic oligonucleotide
  Sense strand starting at position 708 of SEQ ID NO: 915395
agagcucuccuuugagguu

SEQ ID NO: 1076627 - RNA, 19 nt, Artificial Sequence
  Description of Artificial Sequence: Synthetic oligonucleotide
  Antisense strand to SEQ ID NO: 1076626
aaccucaaaggagagcucu

SEQ ID NO: 1076628 - RNA, 19 nt, Artificial Sequence
  Description of Artificial Sequence: Synthetic oligonucleotide
  Sense strand starting at position 714 of SEQ ID NO: 915395
cuccuuugagguugaagga

SEQ ID NO: 1076629 - RNA, 19 nt, Artificial Sequence
  Description of Artificial Sequence: Synthetic oligonucleotide
  Antisense strand to SEQ ID NO: 1076628
uccuucaaccucaaaggag

SEQ ID NO: 1076630 - RNA, 19 nt, Artificial Sequence
  Description of Artificial Sequence: Synthetic oligonucleotide
  Sense strand starting at position 842 of SEQ ID NO: 915395
gugguacacucaggugaau

SEQ ID NO: 1076631 - RNA, 19 nt, Artificial Sequence
  Description of Artificial Sequence: Synthetic oligonucleotide
  Antisense strand to SEQ ID NO: 1076630
auucaccugaguguaccac

SEQ ID NO: 1076632 - RNA, 19 nt, Artificial Sequence
  Description of Artificial Sequence: Synthetic oligonucleotide
  Sense strand starting at position 875 of SEQ ID NO: 915395
gcuucaaugugggugggau

SEQ ID NO: 1076633 - RNA, 19 nt, Artificial Sequence
  Description of Artificial Sequence: Synthetic oligonucleotide
  Antisense strand to SEQ ID NO: 1076632
aucccacccacauugaagc

SEQ ID NO: 1076634 - RNA, 19 nt, Artificial Sequence
  Description of Artificial Sequence: Synthetic oligonucleotide
  Sense strand starting at position 887 of SEQ ID NO: 915395
gugggaucuaguuguguag

SEQ ID NO: 1076635 - RNA, 19 nt, Artificial Sequence
  Description of Artificial Sequence: Synthetic oligonucleotide
  Antisense strand to SEQ ID NO: 1076634
cuacacaacuagaucccac

SEQ ID NO: 1076636 - RNA, 19 nt, Artificial Sequence
  Description of Artificial Sequence: Synthetic oligonucleotide
  Sense strand starting at position 889 of SEQ ID NO: 915395
gggaucuaguuguguagga

SEQ ID NO: 1076637 - RNA, 19 nt, Artificial Sequence
  Description of Artificial Sequence: Synthetic oligonucleotide
  Antisense strand to SEQ ID NO: 1076636
uccuacacaacuagauccc

SEQ ID NO: 1076638 - RNA, 19 nt, Artificial Sequence
  Description of Artificial Sequence: Synthetic oligonucleotide
  Sense strand starting at position 936 of SEQ ID NO: 915395
ccuagauucuaaugaaagc

SEQ ID NO: 1076639 - RNA, 19 nt, Artificial Sequence
  Description of Artificial Sequence: Synthetic oligonucleotide
  Antisense strand to SEQ ID NO: 1076638
gcuuucauuagaaucuagg

SEQ ID NO: 1076640 - RNA, 19 nt, Artificial Sequence
  Description of Artificial Sequence: Synthetic oligonucleotide
  Sense strand starting at position 1031 of SEQ ID NO: 915395
uugaauaaguucccaggau

SEQ ID NO: 1076641 - RNA, 19 nt, Artificial Sequence
  Description of Artificial Sequence: Synthetic oligonucleotide
  Antisense strand to SEQ ID NO: 1076640
auccugggaacuuauucaa

SEQ ID NO: 1076642 - RNA, 19 nt, Artificial Sequence
  Description of Artificial Sequence: Synthetic oligonucleotide
  Sense strand starting at position 1032 of SEQ ID NO: 915395
ugaauaaguucccaggauu

SEQ ID NO: 1076643 - RNA, 19 nt, Artificial Sequence
  Description of Artificial Sequence: Synthetic oligonucleotide
  Antisense strand to SEQ ID NO: 1076642
aauccugggaacuuauuca

SEQ ID NO: 1076644 - RNA, 19 nt, Artificial Sequence
  Description of Artificial Sequence: Synthetic oligonucleotide
  Sense strand starting at position 1035 of SEQ ID NO: 915395
auaaguucccaggauucgu

SEQ ID NO: 1076645 - RNA, 19 nt, Artificial Sequence
  Description of Artificial Sequence: Synthetic oligonucleotide
  Antisense strand to SEQ ID NO: 1076644
acgaauccugggaacuuau

SEQ ID NO: 1076646 - RNA, 19 nt, Artificial Sequence
  Description of Artificial Sequence: Synthetic oligonucleotide
  Sense strand starting at position 1046 of SEQ ID NO: 915395
ggauucgucuggcccugau

SEQ ID NO: 1076647 - RNA, 19 nt, Artificial Sequence
  Description of Artificial Sequence: Synthetic oligonucleotide
  Antisense strand to SEQ ID NO: 1076646
aucagggccagacgaaucc

SEQ ID NO: 1076648 - RNA, 19 nt, Artificial Sequence
  Description of Artificial Sequence: Synthetic oligonucleotide
  Sense strand starting at position 1064 of SEQ ID NO: 915395
ucuucuaagcccugugauc

SEQ ID NO: 1076649 - RNA, 19 nt, Artificial Sequence
  Description of Artificial Sequence: Synthetic oligonucleotide
  Antisense strand to SEQ ID NO: 1076648
gaucacagggcuuagaaga

SEQ ID NO: 1076650 - RNA, 19 nt, Artificial Sequence
  Description of Artificial Sequence: Synthetic oligonucleotide
  Sense strand starting at position 1073 of SEQ ID NO: 915395
cccugugauccuugauaag

SEQ ID NO: 1076651 - RNA, 19 nt, Artificial Sequence
  Description of Artificial Sequence: Synthetic oligonucleotide
  Antisense strand to SEQ ID NO: 1076650
cuuaucaaggaucacaggg

SEQ ID NO: 1076652 - RNA, 19 nt, Artificial Sequence
  Description of Artificial Sequence: Synthetic oligonucleotide
  Sense strand starting at position 1076 of SEQ ID NO: 915395
ugugauccuugauaaggua

SEQ ID NO: 1076653 - RNA, 19 nt, Artificial Sequence
  Description of Artificial Sequence: Synthetic oligonucleotide
  Antisense strand to SEQ ID NO: 1076652
uaccuuaucaaggaucaca

SEQ ID NO: 1076654 - RNA, 19 nt, Artificial Sequence
  Description of Artificial Sequence: Synthetic oligonucleotide
  Sense strand starting at position 1778 of SEQ ID NO: 915395
gugucugugccagugugua

SEQ ID NO: 1076655 - RNA, 19 nt, Artificial Sequence
  Description of Artificial Sequence: Synthetic oligonucleotide
  Antisense strand to SEQ ID NO: 1076654
uacacacuggcacagacac

SEQ ID NO: 1076656 - RNA, 19 nt, Artificial Sequence
  Description of Artificial Sequence: Synthetic oligonucleotide
  Sense strand starting at position 2735 of SEQ ID NO: 915395
cguauucuccaggcugcua

SEQ ID NO: 1076657 - RNA, 19 nt, Artificial Sequence
  Description of Artificial Sequence: Synthetic oligonucleotide
  Antisense strand to SEQ ID NO: 1076656
uagcagccuggagaauacg

SEQ ID NO: 1076658 - RNA, 19 nt, Artificial Sequence
  Description of Artificial Sequence: Synthetic oligonucleotide
  Sense strand starting at position 2765 of SEQ ID NO: 915395
agagguuuccggcauucca

SEQ ID NO: 1076659 - RNA, 19 nt, Artificial Sequence
  Description of Artificial Sequence: Synthetic oligonucleotide
  Antisense strand to SEQ ID NO: 1076658
uggaaugccggaaaccucu

SEQ ID NO: 1076660 - RNA, 19 nt, Artificial Sequence
  Description of Artificial Sequence: Synthetic oligonucleotide
  Sense strand starting at position 2973 of SEQ ID NO: 915395
gcagcugauucucuacaca

SEQ ID NO: 1076661 - RNA, 19 nt, Artificial Sequence
  Description of Artificial Sequence: Synthetic oligonucleotide
  Antisense strand to SEQ ID NO: 1076660
uguguagagaaucagcugc

SEQ ID NO: 1076662 - RNA, 19 nt, Artificial Sequence
  Description of Artificial Sequence: Synthetic oligonucleotide
  Sense strand starting at position 2976 of SEQ ID NO: 915395
gcugauucucuacacagca

SEQ ID NO: 1076663 - RNA, 19 nt, Artificial Sequence
  Description of Artificial Sequence: Synthetic oligonucleotide
  Antisense strand to SEQ ID NO: 1076662
ugcuguguagagaaucagc

SEQ ID NO: 1076664 - RNA, 19 nt, Artificial Sequence
  Description of Artificial Sequence: Synthetic oligonucleotide
  Sense strand starting at position 3030 of SEQ ID NO: 915395
gucguuccuuuacuggaaa

SEQ ID NO: 1076665 - RNA, 19 nt, Artificial Sequence
  Description of Artificial Sequence: Synthetic oligonucleotide
  Antisense strand to SEQ ID NO: 1076664
uuuccaguaaaggaacgac

SEQ ID NO: 1076666 - RNA, 19 nt, Artificial Sequence
  Description of Artificial Sequence: Synthetic oligonucleotide
  Sense strand starting at position 3249 of SEQ ID NO: 915395
uggucugucugccuggaaa

SEQ ID NO: 1076667 - RNA, 19 nt, Artificial Sequence
  Description of Artificial Sequence: Synthetic oligonucleotide
  Antisense strand to SEQ ID NO: 1076666
uuuccaggcagacagacca

SEQ ID NO: 1076668 - RNA, 19 nt, Artificial Sequence
  Description of Artificial Sequence: Synthetic oligonucleotide
  Sense strand starting at position 3251 of SEQ ID NO: 915395
gucugucugccuggaaacu

SEQ ID NO: 1076669 - RNA, 19 nt, Artificial Sequence
  Description of Artificial Sequence: Synthetic oligonucleotide
  Antisense strand to SEQ ID NO: 1076668
aguuuccaggcagacagac

SEQ ID NO: 1076670 - RNA, 19 nt, Artificial Sequence
  Description of Artificial Sequence: Synthetic oligonucleotide
  Sense strand starting at position 3262 of SEQ ID NO: 915395
uggaaacucuucccucuga

SEQ ID NO: 1076671 - RNA, 19 nt, Artificial Sequence
  Description of Artificial Sequence: Synthetic oligonucleotide
  Antisense strand to SEQ ID NO: 1076670
ucagagggaagaguuucca

SEQ ID NO: 1076672 - RNA, 19 nt, Artificial Sequence
  Description of Artificial Sequence: Synthetic oligonucleotide
  Sense strand starting at position 3263 of SEQ ID NO: 915395
ggaaacucuucccucugau

SEQ ID NO: 1076673 - RNA, 19 nt, Artificial Sequence
  Description of Artificial Sequence: Synthetic oligonucleotide
  Antisense strand to SEQ ID NO: 1076672
aucagagggaagaguuucc

SEQ ID NO: 1076674 - RNA, 19 nt, Artificial Sequence
  Description of Artificial Sequence: Synthetic oligonucleotide
  Sense strand starting at position 3619 of SEQ ID NO: 915395
gcucaaugugucgcuucua

SEQ ID NO: 1076675 - RNA, 19 nt, Artificial Sequence
  Description of Artificial Sequence: Synthetic oligonucleotide
  Antisense strand to SEQ ID NO: 1076674
uagaagcgacacauugagc

SEQ ID NO: 1076676 - RNA, 19 nt, Artificial Sequence
  Description of Artificial Sequence: Synthetic oligonucleotide
  Sense strand starting at position 3620 of SEQ ID NO: 915395
cucaaugugucgcuucuaa

SEQ ID NO: 1076677 - RNA, 19 nt, Artificial Sequence
  Description of Artificial Sequence: Synthetic oligonucleotide
  Antisense strand to SEQ ID NO: 1076676
uuagaagcgacacauugag

SEQ ID NO: 1076678 - RNA, 19 nt, Artificial Sequence
  Description of Artificial Sequence: Synthetic oligonucleotide
  Sense strand starting at position 3627 of SEQ ID NO: 915395
ugucgcuucuaagauaauu

SEQ ID NO: 1076679 - RNA, 19 nt, Artificial Sequence
  Description of Artificial Sequence: Synthetic oligonucleotide
  Antisense strand to SEQ ID NO: 1076678
aauuaucuuagaagcgaca

SEQ ID NO: 1076680 - RNA, 19 nt, Artificial Sequence
  Description of Artificial Sequence: Synthetic oligonucleotide
  Sense strand starting at position 3635 of SEQ ID NO: 915395
cuaagauaauugcuguaac

SEQ ID NO: 1076681 - RNA, 19 nt, Artificial Sequence
  Description of Artificial Sequence: Synthetic oligonucleotide
  Antisense strand to SEQ ID NO: 1076680
guuacagcaauuaucuuag

SEQ ID NO: 1076682 - RNA, 19 nt, Artificial Sequence
  Description of Artificial Sequence: Synthetic oligonucleotide
  Sense strand starting at position 3638 of SEQ ID NO: 915395
agauaauugcuguaacuau

SEQ ID NO: 1076683 - RNA, 19 nt, Artificial Sequence
  Description of Artificial Sequence: Synthetic oligonucleotide
  Antisense strand to SEQ ID NO: 1076682
auaguuacagcaauuaucu

SEQ ID NO: 1076684 - RNA, 19 nt, Artificial Sequence
  Description of Artificial Sequence: Synthetic oligonucleotide
  Sense strand starting at position 3645 of SEQ ID NO: 915395
ugcuguaacuauccuguuu

SEQ ID NO: 1076685 - RNA, 19 nt, Artificial Sequence
  Description of Artificial Sequence: Synthetic oligonucleotide
  Antisense strand to SEQ ID NO: 1076684
aaacaggauaguuacagca

SEQ ID NO: 1076686 - RNA, 19 nt, Artificial Sequence
  Description of Artificial Sequence: Synthetic oligonucleotide
  Sense strand starting at position 3974 of SEQ ID NO: 915395
uucugucugcugugauagu

SEQ ID NO: 1076687 - RNA, 19 nt, Artificial Sequence
  Description of Artificial Sequence: Synthetic oligonucleotide
  Antisense strand to SEQ ID NO: 1076686
acuaucacagcagacagaa

SEQ ID NO: 1076688 - RNA, 19 nt, Artificial Sequence
  Description of Artificial Sequence: Synthetic oligonucleotide
  Sense strand starting at position 3978 of SEQ ID NO: 915395
gucugcugugauagugguu

SEQ ID NO: 1076689 - RNA, 19 nt, Artificial Sequence
  Description of Artificial Sequence: Synthetic oligonucleotide
  Antisense strand to SEQ ID NO: 1076688
aaccacuaucacagcagac

SEQ ID NO: 1076690 - RNA, 19 nt, Artificial Sequence
  Description of Artificial Sequence: Synthetic oligonucleotide
  Sense strand starting at position 8 of SEQ ID NO: 915396
gugggaucuaguuguguag

SEQ ID NO: 1076691 - RNA, 19 nt, Artificial Sequence
  Description of Artificial Sequence: Synthetic oligonucleotide
  Antisense strand to SEQ ID NO: 1076690
cuacacaacuagaucccac

SEQ ID NO: 1076692 - RNA, 19 nt, Artificial Sequence
  Description of Artificial Sequence: Synthetic oligonucleotide
  Sense strand starting at position 152 of SEQ ID NO: 915396
uugaauaaguucccaggau

SEQ ID NO: 1076693 - RNA, 19 nt, Artificial Sequence
  Description of Artificial Sequence: Synthetic oligonucleotide
  Antisense strand to SEQ ID NO: 1076692
auccugggaacuuauucaa

SEQ ID NO: 1076694 - RNA, 19 nt, Artificial Sequence
  Description of Artificial Sequence: Synthetic oligonucleotide
  Sense strand starting at position 153 of SEQ ID NO: 915396
ugaauaaguucccaggauu

SEQ ID NO: 1076695 - RNA, 19 nt, Artificial Sequence
  Description of Artificial Sequence: Synthetic oligonucleotide
  Antisense strand to SEQ ID NO: 1076694
aauccugggaacuuauuca

SEQ ID NO: 1076696 - RNA, 19 nt, Artificial Sequence
  Description of Artificial Sequence: Synthetic oligonucleotide
  Sense strand starting at position 156 of SEQ ID NO: 915396
auaaguucccaggauucgu

SEQ ID NO: 1076697 - RNA, 19 nt, Artificial Sequence
  Description of Artificial Sequence: Synthetic oligonucleotide
  Antisense strand to SEQ ID NO: 1076696
acgaauccugggaacuuau

SEQ ID NO: 1076698 - RNA, 19 nt, Artificial Sequence
  Description of Artificial Sequence: Synthetic oligonucleotide
  Sense strand starting at position 167 of SEQ ID NO: 915396
ggauucgucuggcccugau

SEQ ID NO: 1076699 - RNA, 19 nt, Artificial Sequence
  Description of Artificial Sequence: Synthetic oligonucleotide
  Antisense strand to SEQ ID NO: 1076698
aucagggccagacgaaucc

SEQ ID NO: 1076700 - RNA, 19 nt, Artificial Sequence
  Description of Artificial Sequence: Synthetic oligonucleotide
  Sense strand starting at position 185 of SEQ ID NO: 915396
ucuucuaagcccugugauc

SEQ ID NO: 1076701 - RNA, 19 nt, Artificial Sequence
  Description of Artificial Sequence: Synthetic oligonucleotide
  Antisense strand to SEQ ID NO: 1076700
gaucacagggcuuagaaga

SEQ ID NO: 1076702 - RNA, 19 nt, Artificial Sequence
  Description of Artificial Sequence: Synthetic oligonucleotide
  Sense strand starting at position 194 of SEQ ID NO: 915396
cccugugauccuugauaag

SEQ ID NO: 1076703 - RNA, 19 nt, Artificial Sequence
  Description of Artificial Sequence: Synthetic oligonucleotide
  Antisense strand to SEQ ID NO: 1076702
cuuaucaaggaucacaggg

SEQ ID NO: 1076704 - RNA, 19 nt, Artificial Sequence
  Description of Artificial Sequence: Synthetic oligonucleotide
  Sense strand starting at position 899 of SEQ ID NO: 915396
gugucugugccagugugua

SEQ ID NO: 1076705 - RNA, 19 nt, Artificial Sequence
  Description of Artificial Sequence: Synthetic oligonucleotide
  Antisense strand to SEQ ID NO: 1076704
uacacacuggcacagacac

SEQ ID NO: 1076706 - RNA, 19 nt, Artificial Sequence
  Description of Artificial Sequence: Synthetic oligonucleotide
  Sense strand starting at position 1856 of SEQ ID NO: 915396
cguauucuccaggcugcua

SEQ ID NO: 1076707 - RNA, 19 nt, Artificial Sequence
  Description of Artificial Sequence: Synthetic oligonucleotide
  Antisense strand to SEQ ID NO: 1076706
uagcagccuggagaauacg

SEQ ID NO: 1076708 - RNA, 19 nt, Artificial Sequence
  Description of Artificial Sequence: Synthetic oligonucleotide
  Sense strand starting at position 1886 of SEQ ID NO: 915396
agagguuuccggcauucca

SEQ ID NO: 1076709 - RNA, 19 nt, Artificial Sequence
  Description of Artificial Sequence: Synthetic oligonucleotide
  Antisense strand to SEQ ID NO: 1076708
uggaaugccggaaaccucu

SEQ ID NO: 1076710 - RNA, 19 nt, Artificial Sequence
  Description of Artificial Sequence: Synthetic oligonucleotide
  Sense strand starting at position 2094 of SEQ ID NO: 915396
gcagcugauucucuacaca

SEQ ID NO: 1076711 - RNA, 19 nt, Artificial Sequence
  Description of Artificial Sequence: Synthetic oligonucleotide
  Antisense strand to SEQ ID NO: 1076710
uguguagagaaucagcugc

SEQ ID NO: 1076712 - RNA, 19 nt, Artificial Sequence
  Description of Artificial Sequence: Synthetic oligonucleotide
  Sense strand starting at position 2097 of SEQ ID NO: 915396
gcugauucucuacacagca

SEQ ID NO: 1076713 - RNA, 19 nt, Artificial Sequence
  Description of Artificial Sequence: Synthetic oligonucleotide
  Antisense strand to SEQ ID NO: 1076712
ugcuguguagagaaucagc

SEQ ID NO: 1076714 - RNA, 19 nt, Artificial Sequence
  Description of Artificial Sequence: Synthetic oligonucleotide
  Sense strand starting at position 2151 of SEQ ID NO: 915396
gucguuccuuuacuggaaa

SEQ ID NO: 1076715 - RNA, 19 nt, Artificial Sequence
  Description of Artificial Sequence: Synthetic oligonucleotide
  Antisense strand to SEQ ID NO: 1076714
uuuccaguaaaggaacgac

SEQ ID NO: 1076716 - RNA, 19 nt, Artificial Sequence
  Description of Artificial Sequence: Synthetic oligonucleotide
  Sense strand starting at position 2370 of SEQ ID NO: 915396
uggucugucugccuggaaa

SEQ ID NO: 1076717 - RNA, 19 nt, Artificial Sequence
  Description of Artificial Sequence: Synthetic oligonucleotide
  Antisense strand to SEQ ID NO: 1076716
uuuccaggcagacagacca

SEQ ID NO: 1076718 - RNA, 19 nt, Artificial Sequence
  Description of Artificial Sequence: Synthetic oligonucleotide
  Sense strand starting at position 2372 of SEQ ID NO: 915396
gucugucugccuggaaacu

SEQ ID NO: 1076719 - RNA, 19 nt, Artificial Sequence
  Description of Artificial Sequence: Synthetic oligonucleotide
  Antisense strand to SEQ ID NO: 1076718
aguuuccaggcagacagac

SEQ ID NO: 1076720 - RNA, 19 nt, Artificial Sequence
  Description of Artificial Sequence: Synthetic oligonucleotide
  Sense strand starting at position 2383 of SEQ ID NO: 915396
uggaaacucuucccucuga

SEQ ID NO: 1076721 - RNA, 19 nt, Artificial Sequence
  Description of Artificial Sequence: Synthetic oligonucleotide
  Antisense strand to SEQ ID NO: 1076720
ucagagggaagaguuucca

SEQ ID NO: 1076722 - RNA, 19 nt, Artificial Sequence
  Description of Artificial Sequence: Synthetic oligonucleotide
  Sense strand starting at position 2384 of SEQ ID NO: 915396
ggaaacucuucccucugau

SEQ ID NO: 1076723 - RNA, 19 nt, Artificial Sequence
  Description of Artificial Sequence: Synthetic oligonucleotide
  Antisense strand to SEQ ID NO: 1076722
aucagagggaagaguuucc

SEQ ID NO: 1076724 - RNA, 19 nt, Artificial Sequence
  Description of Artificial Sequence: Synthetic oligonucleotide
  Sense strand starting at position 2740 of SEQ ID NO: 915396
gcucaaugugucgcuucua

SEQ ID NO: 1076725 - RNA, 19 nt, Artificial Sequence
  Description of Artificial Sequence: Synthetic oligonucleotide
  Antisense strand to SEQ ID NO: 1076724
uagaagcgacacauugagc

SEQ ID NO: 1076726 - RNA, 19 nt, Artificial Sequence
  Description of Artificial Sequence: Synthetic oligonucleotide
  Sense strand starting at position 2741 of SEQ ID NO: 915396
cucaaugugucgcuucuaa

SEQ ID NO: 1076727 - RNA, 19 nt, Artificial Sequence
  Description of Artificial Sequence: Synthetic oligonucleotide
  Antisense strand to SEQ ID NO: 1076726
uuagaagcgacacauugag

SEQ ID NO: 1076728 - RNA, 19 nt, Artificial Sequence
  Description of Artificial Sequence: Synthetic oligonucleotide
  Sense strand starting at position 2756 of SEQ ID NO: 915396
cuaagauaauugcuguaac

SEQ ID NO: 1076729 - RNA, 19 nt, Artificial Sequence
  Description of Artificial Sequence: Synthetic oligonucleotide
  Antisense strand to SEQ ID NO: 1076728
guuacagcaauuaucuuag

SEQ ID NO: 1076730 - RNA, 19 nt, Artificial Sequence
  Description of Artificial Sequence: Synthetic oligonucleotide
  Sense strand starting at position 2759 of SEQ ID NO: 915396
agauaauugcuguaacuau

SEQ ID NO: 1076731 - RNA, 19 nt, Artificial Sequence
  Description of Artificial Sequence: Synthetic oligonucleotide
  Antisense strand to SEQ ID NO: 1076730
auaguuacagcaauuaucu

SEQ ID NO: 1076732 - RNA, 19 nt, Artificial Sequence
  Description of Artificial Sequence: Synthetic oligonucleotide
  Sense strand starting at position 2766 of SEQ ID NO: 915396
ugcuguaacuauccuguuu

SEQ ID NO: 1076733 - RNA, 19 nt, Artificial Sequence
  Description of Artificial Sequence: Synthetic oligonucleotide
  Antisense strand to SEQ ID NO: 1076732
aaacaggauaguuacagca

SEQ ID NO: 1076734 - RNA, 19 nt, Artificial Sequence
  Description of Artificial Sequence: Synthetic oligonucleotide
  Sense strand starting at position 3095 of SEQ ID NO: 915396
uucugucugcugugauagu

SEQ ID NO: 1076735 - RNA, 19 nt, Artificial Sequence
  Description of Artificial Sequence: Synthetic oligonucleotide
  Antisense strand to SEQ ID NO: 1076734
acuaucacagcagacagaa

SEQ ID NO: 1076736 - RNA, 19 nt, Artificial Sequence
  Description of Artificial Sequence: Synthetic oligonucleotide
  Sense strand starting at position 3099 of SEQ ID NO: 915396
gucugcugugauagugguu

SEQ ID NO: 1076737 - RNA, 19 nt, Artificial Sequence
  Description of Artificial Sequence: Synthetic oligonucleotide
  Antisense strand to SEQ ID NO: 1076736
aaccacuaucacagcagac

SEQ ID NO: 1076738 - RNA, 19 nt, Artificial Sequence
  Description of Artificial Sequence: Synthetic oligonucleotide
  Sense strand starting at position 3108 of SEQ ID NO: 915396
gauagugguuccuucucuu

SEQ ID NO: 1076739 - RNA, 19 nt, Artificial Sequence
  Description of Artificial Sequence: Synthetic oligonucleotide
  Antisense strand to SEQ ID NO: 1076738
aagagaaggaaccacuauc

SEQ ID NO: 1076740 - RNA, 19 nt, Artificial Sequence
  Description of Artificial Sequence: Synthetic oligonucleotide
  Sense strand starting at position 3141 of SEQ ID NO: 915396
cuaugaacuccuggaaagu

SEQ ID NO: 1076741 - RNA, 19 nt, Artificial Sequence
  Description of Artificial Sequence: Synthetic oligonucleotide
  Antisense strand to SEQ ID NO: 1076740
acuuuccaggaguucauag

SEQ ID NO: 1076742 - RNA, 19 nt, Artificial Sequence
  Description of Artificial Sequence: Synthetic oligonucleotide
  Sense strand starting at position 3316 of SEQ ID NO: 915396
ccaauuaggucccuguguu

SEQ ID NO: 1076743 - RNA, 19 nt, Artificial Sequence
  Description of Artificial Sequence: Synthetic oligonucleotide
  Antisense strand to SEQ ID NO: 1076742
aacacagggaccuaauugg

SEQ ID NO: 1076744 - RNA, 19 nt, Artificial Sequence
  Description of Artificial Sequence: Synthetic oligonucleotide
  Sense strand starting at position 3317 of SEQ ID NO: 915396
caauuaggucccuguguug

SEQ ID NO: 1076745 - RNA, 19 nt, Artificial Sequence
  Description of Artificial Sequence: Synthetic oligonucleotide
  Antisense strand to SEQ ID NO: 1076744
caacacagggaccuaauug

SEQ ID NO: 1076746 - RNA, 19 nt, Artificial Sequence
  Description of Artificial Sequence: Synthetic oligonucleotide
  Sense strand starting at position 3365 of SEQ ID NO: 915396
aggauuauauauuggguaa

SEQ ID NO: 1076747 - RNA, 19 nt, Artificial Sequence
  Description of Artificial Sequence: Synthetic oligonucleotide
  Antisense strand to SEQ ID NO: 1076746
uuacccaauauauaauccu

SEQ ID NO: 1076748 - RNA, 19 nt, Artificial Sequence
  Description of Artificial Sequence: Synthetic oligonucleotide
  Sense strand starting at position 3396 of SEQ ID NO: 915396
gcuuggguuguguggaagu

SEQ ID NO: 1076749 - RNA, 19 nt, Artificial Sequence
  Description of Artificial Sequence: Synthetic oligonucleotide
  Antisense strand to SEQ ID NO: 1076748
acuuccacacaacccaagc

SEQ ID NO: 1076750 - RNA, 19 nt, Artificial Sequence
  Description of Artificial Sequence: Synthetic oligonucleotide
  Sense strand starting at position 3407 of SEQ ID NO: 915396
guggaagugugaguagaca

SEQ ID NO: 1076751 - RNA, 19 nt, Artificial Sequence
  Description of Artificial Sequence: Synthetic oligonucleotide
  Antisense strand to SEQ ID NO: 1076750
ugucuacucacacuuccac

SEQ ID NO: 1076752 - RNA, 19 nt, Artificial Sequence
  Description of Artificial Sequence: Synthetic oligonucleotide
  Sense strand starting at position 3461 of SEQ ID NO: 915396
ccgagagcaucaucaccau

SEQ ID NO: 1076753 - RNA, 19 nt, Artificial Sequence
  Description of Artificial Sequence: Synthetic oligonucleotide
  Antisense strand to SEQ ID NO: 1076752
auggugaugaugcucucgg

SEQ ID NO: 1076754 - RNA, 19 nt, Artificial Sequence
  Description of Artificial Sequence: Synthetic oligonucleotide
  Sense strand starting at position 3494 of SEQ ID NO: 915396
cugauuucuccaggcugca

SEQ ID NO: 1076755 - RNA, 19 nt, Artificial Sequence
  Description of Artificial Sequence: Synthetic oligonucleotide
  Antisense strand to SEQ ID NO: 1076754
ugcagccuggagaaaucag

SEQ ID NO: 1076756 - RNA, 19 nt, Artificial Sequence
  Description of Artificial Sequence: Synthetic oligonucleotide
  Sense strand starting at position 3507 of SEQ ID NO: 915396
gcugcaucaguugaacaau

SEQ ID NO: 1076757 - RNA, 19 nt, Artificial Sequence
  Description of Artificial Sequence: Synthetic oligonucleotide
  Antisense strand to SEQ ID NO: 1076756
auuguucaacugaugcagc

SEQ ID NO: 1076758 - RNA, 19 nt, Artificial Sequence
  Description of Artificial Sequence: Synthetic oligonucleotide
  Sense strand starting at position 3552 of SEQ ID NO: 915396
guaugugccagguaguguu

SEQ ID NO: 1076759 - RNA, 19 nt, Artificial Sequence
  Description of Artificial Sequence: Synthetic oligonucleotide
  Antisense strand to SEQ ID NO: 1076758
aacacuaccuggcacauac

SEQ ID NO: 1076760 - RNA, 19 nt, Artificial Sequence
  Description of Artificial Sequence: Synthetic oligonucleotide
  Sense strand starting at position 3607 of SEQ ID NO: 915396
augacaucugugggaggua

SEQ ID NO: 1076761 - RNA, 19 nt, Artificial Sequence
  Description of Artificial Sequence: Synthetic oligonucleotide
  Antisense strand to SEQ ID NO: 1076760
uaccucccacagaugucau

SEQ ID NO: 1076762 - RNA, 19 nt, Artificial Sequence
  Description of Artificial Sequence: Synthetic oligonucleotide
  Sense strand starting at position 3664 of SEQ ID NO: 915396
aggaauaagugaguuacuu

SEQ ID NO: 1076763 - RNA, 19 nt, Artificial Sequence
  Description of Artificial Sequence: Synthetic oligonucleotide
  Antisense strand to SEQ ID NO: 1076762
aaguaacucacuuauuccu

SEQ ID NO: 1076764 - RNA, 19 nt, Artificial Sequence
  Description of Artificial Sequence: Synthetic oligonucleotide
  Sense strand starting at position 3676 of SEQ ID NO: 915396
guuacuuaaggucacuuaa

SEQ ID NO: 1076765 - RNA, 19 nt, Artificial Sequence
  Description of Artificial Sequence: Synthetic oligonucleotide
  Antisense strand to SEQ ID NO: 1076764
uuaagugaccuuaaguaac

SEQ ID NO: 1076766 - RNA, 19 nt, Artificial Sequence
  Description of Artificial Sequence: Synthetic oligonucleotide
  Sense strand starting at position 3772 of SEQ ID NO: 915396
gcccuuugggcugauggaa

SEQ ID NO: 1076767 - RNA, 19 nt, Artificial Sequence
  Description of Artificial Sequence: Synthetic oligonucleotide
  Antisense strand to SEQ ID NO: 1076766
uuccaucagcccaaagggc

SEQ ID NO: 1076768 - RNA, 19 nt, Artificial Sequence
  Description of Artificial Sequence: Synthetic oligonucleotide
  Sense strand starting at position 3866 of SEQ ID NO: 915396
gggucacagagucauggua

SEQ ID NO: 1076769 - RNA, 19 nt, Artificial Sequence
  Description of Artificial Sequence: Synthetic oligonucleotide
  Antisense strand to SEQ ID NO: 1076768
uaccaugacucugugaccc

SEQ ID NO: 1076770 - RNA, 19 nt, Artificial Sequence
  Description of Artificial Sequence: Synthetic oligonucleotide
  Sense strand starting at position 328 of SEQ ID NO: 915397
uagucuguguccugcucau

SEQ ID NO: 1076771 - RNA, 19 nt, Artificial Sequence
  Description of Artificial Sequence: Synthetic oligonucleotide
  Antisense strand to SEQ ID NO: 1076770
augagcaggacacagacua

SEQ ID NO: 1076772 - RNA, 19 nt, Artificial Sequence
  Description of Artificial Sequence: Synthetic oligonucleotide
  Sense strand starting at position 767 of SEQ ID NO: 915397
uugggauccucuugggaca

SEQ ID NO: 1076773 - RNA, 19 nt, Artificial Sequence
  Description of Artificial Sequence: Synthetic oligonucleotide
  Antisense strand to SEQ ID NO: 1076772
ugucccaagaggaucccaa

SEQ ID NO: 1076774 - RNA, 19 nt, Artificial Sequence
  Description of Artificial Sequence: Synthetic oligonucleotide
  Sense strand starting at position 823 of SEQ ID NO: 915397
aggcucuggcccugugaga

SEQ ID NO: 1076775 - RNA, 19 nt, Artificial Sequence
  Description of Artificial Sequence: Synthetic oligonucleotide
  Antisense strand to SEQ ID NO: 1076774
ucucacagggccagagccu

SEQ ID NO: 1076776 - RNA, 19 nt, Artificial Sequence
  Description of Artificial Sequence: Synthetic oligonucleotide
  Sense strand starting at position 1040 of SEQ ID NO: 915397
ccucuacccugaugucuau

SEQ ID NO: 1076777 - RNA, 19 nt, Artificial Sequence
  Description of Artificial Sequence: Synthetic oligonucleotide
  Antisense strand to SEQ ID NO: 1076776
auagacaucaggguagagg

SEQ ID NO: 1076778 - RNA, 19 nt, Artificial Sequence
  Description of Artificial Sequence: Synthetic oligonucleotide
  Sense strand starting at position 1112 of SEQ ID NO: 915397
ucaccuaacgcaggagaua

SEQ ID NO: 1076779 - RNA, 19 nt, Artificial Sequence
  Description of Artificial Sequence: Synthetic oligonucleotide
  Antisense strand to SEQ ID NO: 1076778
uaucuccugcguuagguga

SEQ ID NO: 1076780 - RNA, 19 nt, Artificial Sequence
  Description of Artificial Sequence: Synthetic oligonucleotide
  Sense strand starting at position 1148 of SEQ ID NO: 915397
ugucuauugucuuaucuac

SEQ ID NO: 1076781 - RNA, 19 nt, Artificial Sequence
  Description of Artificial Sequence: Synthetic oligonucleotide
  Antisense strand to SEQ ID NO: 1076780
guagauaagacaauagaca

SEQ ID NO: 1076782 - RNA, 19 nt, Artificial Sequence
  Description of Artificial Sequence: Synthetic oligonucleotide
  Sense strand starting at position 1172 of SEQ ID NO: 915397
acaauaagcugcuaggaaa

SEQ ID NO: 1076783 - RNA, 19 nt, Artificial Sequence
  Description of Artificial Sequence: Synthetic oligonucleotide
  Antisense strand to SEQ ID NO: 1076782
uuuccuagcagcuuauugu

SEQ ID NO: 1076784 - RNA, 19 nt, Artificial Sequence
  Description of Artificial Sequence: Synthetic oligonucleotide
  Sense strand starting at position 1201 of SEQ ID NO: 915397
uugggucaagcauguuagu

SEQ ID NO: 1076785 - RNA, 19 nt, Artificial Sequence
  Description of Artificial Sequence: Synthetic oligonucleotide
  Antisense strand to SEQ ID NO: 1076784
acuaacaugcuugacccaa

SEQ ID NO: 1076786 - RNA, 19 nt, Artificial Sequence
  Description of Artificial Sequence: Synthetic oligonucleotide
  Sense strand starting at position 1222 of SEQ ID NO: 915397
gugcucaauaaguauggau

SEQ ID NO: 1076787 - RNA, 19 nt, Artificial Sequence
  Description of Artificial Sequence: Synthetic oligonucleotide
  Antisense strand to SEQ ID NO: 1076786
auccauacuuauugagcac

SEQ ID NO: 1076788 - RNA, 19 nt, Artificial Sequence
  Description of Artificial Sequence: Synthetic oligonucleotide
  Sense strand starting at position 1224 of SEQ ID NO: 915397
gcucaauaaguauggauua

SEQ ID NO: 1076789 - RNA, 19 nt, Artificial Sequence
  Description of Artificial Sequence: Synthetic oligonucleotide
  Antisense strand to SEQ ID NO: 1076788
uaauccauacuuauugagc

SEQ ID NO: 1076790 - RNA, 19 nt, Artificial Sequence
  Description of Artificial Sequence: Synthetic oligonucleotide
  Sense strand starting at position 1225 of SEQ ID NO: 915397
cucaauaaguauggauuaa

SEQ ID NO: 1076791 - RNA, 19 nt, Artificial Sequence
  Description of Artificial Sequence: Synthetic oligonucleotide
  Antisense strand to SEQ ID NO: 1076790
uuaauccauacuuauugag

SEQ ID NO: 1076792 - RNA, 19 nt, Artificial Sequence
  Description of Artificial Sequence: Synthetic oligonucleotide
  Sense strand starting at position 1238 of SEQ ID NO: 915397
gauuaaaugugucuaggcu

SEQ ID NO: 1076793 - RNA, 19 nt, Artificial Sequence
  Description of Artificial Sequence: Synthetic oligonucleotide
  Antisense strand to SEQ ID NO: 1076792
agccuagacacauuuaauc

SEQ ID NO: 1076794 - RNA, 19 nt, Artificial Sequence
  Description of Artificial Sequence: Synthetic oligonucleotide
  Sense strand starting at position 1980 of SEQ ID NO: 915397
uggcugugucgagcgagaa

SEQ ID NO: 1076795 - RNA, 19 nt, Artificial Sequence
  Description of Artificial Sequence: Synthetic oligonucleotide
  Antisense strand to SEQ ID NO: 1076794
uucucgcucgacacagcca

SEQ ID NO: 1076796 - RNA, 19 nt, Artificial Sequence
  Description of Artificial Sequence: Synthetic oligonucleotide
  Sense strand starting at position 1981 of SEQ ID NO: 915397
ggcugugucgagcgagaag

SEQ ID NO: 1076797 - RNA, 19 nt, Artificial Sequence
  Description of Artificial Sequence: Synthetic oligonucleotide
  Antisense strand to SEQ ID NO: 1076796
cuucucgcucgacacagcc

SEQ ID NO: 1076798 - RNA, 19 nt, Artificial Sequence
  Description of Artificial Sequence: Synthetic oligonucleotide
  Sense strand starting at position 2007 of SEQ ID NO: 915397
agugcucgucugcagugaa

SEQ ID NO: 1076799 - RNA, 19 nt, Artificial Sequence
  Description of Artificial Sequence: Synthetic oligonucleotide
  Antisense strand to SEQ ID NO: 1076798
uucacugcagacgagcacu

SEQ ID NO: 1076800 - RNA, 19 nt, Artificial Sequence
  Description of Artificial Sequence: Synthetic oligonucleotide
  Sense strand starting at position 2139 of SEQ ID NO: 915397
gggccuguccuccaaggaa

SEQ ID NO: 1076801 - RNA, 19 nt, Artificial Sequence
  Description of Artificial Sequence: Synthetic oligonucleotide
  Antisense strand to SEQ ID NO: 1076800
uuccuuggaggacaggccc

SEQ ID NO: 1076802 - RNA, 19 nt, Artificial Sequence
  Description of Artificial Sequence: Synthetic oligonucleotide
  Sense strand starting at position 2218 of SEQ ID NO: 915397
aguuucccugccugacaau

SEQ ID NO: 1076803 - RNA, 19 nt, Artificial Sequence
  Description of Artificial Sequence: Synthetic oligonucleotide
  Antisense strand to SEQ ID NO: 1076802
auugucaggcagggaaacu

SEQ ID NO: 1076804 - RNA, 19 nt, Artificial Sequence
  Description of Artificial Sequence: Synthetic oligonucleotide
  Sense strand starting at position 2288 of SEQ ID NO: 915397
augugugacuccugugaca

SEQ ID NO: 1076805 - RNA, 19 nt, Artificial Sequence
  Description of Artificial Sequence: Synthetic oligonucleotide
  Antisense strand to SEQ ID NO: 1076804
ugucacaggagucacacau

SEQ ID NO: 1076806 - RNA, 19 nt, Artificial Sequence
  Description of Artificial Sequence: Synthetic oligonucleotide
  Sense strand starting at position 2290 of SEQ ID NO: 915397
gugugacuccugugacauc

SEQ ID NO: 1076807 - RNA, 19 nt, Artificial Sequence
  Description of Artificial Sequence: Synthetic oligonucleotide
  Antisense strand to SEQ ID NO: 1076806
gaugucacaggagucacac

SEQ ID NO: 1076808 - RNA, 19 nt, Artificial Sequence
  Description of Artificial Sequence: Synthetic oligonucleotide
  Sense strand starting at position 2459 of SEQ ID NO: 915397
gggagauggucccucagag

SEQ ID NO: 1076809 - RNA, 19 nt, Artificial Sequence
  Description of Artificial Sequence: Synthetic oligonucleotide
  Antisense strand to SEQ ID NO: 1076808
cucugagggaccaucuccc

SEQ ID NO: 1076810 - RNA, 19 nt, Artificial Sequence
  Description of Artificial Sequence: Synthetic oligonucleotide
  Sense strand starting at position 3343 of SEQ ID NO: 915397
aggcuugcacucuguuaac

SEQ ID NO: 1076811 - RNA, 19 nt, Artificial Sequence
  Description of Artificial Sequence: Synthetic oligonucleotide
  Antisense strand to SEQ ID NO: 1076810
guuaacagagugcaagccu

SEQ ID NO: 1076812 - RNA, 19 nt, Artificial Sequence
  Description of Artificial Sequence: Synthetic oligonucleotide
  Sense strand starting at position 3384 of SEQ ID NO: 915397
gcucaaaucuggccuuuaa

SEQ ID NO: 1076813 - RNA, 19 nt, Artificial Sequence
  Description of Artificial Sequence: Synthetic oligonucleotide
  Antisense strand to SEQ ID NO: 1076812
uuaaaggccagauuugagc

SEQ ID NO: 1076814 - RNA, 19 nt, Artificial Sequence
  Description of Artificial Sequence: Synthetic oligonucleotide
  Sense strand starting at position 3599 of SEQ ID NO: 915397
gaaagagcagucggcaaau

SEQ ID NO: 1076815 - RNA, 19 nt, Artificial Sequence
  Description of Artificial Sequence: Synthetic oligonucleotide
  Antisense strand to SEQ ID NO: 1076814
auuugccgacugcucuuuc

SEQ ID NO: 1076816 - RNA, 19 nt, Artificial Sequence
  Description of Artificial Sequence: Synthetic oligonucleotide
  Sense strand starting at position 3611 of SEQ ID NO: 915397
ggcaaaugcuggccagaga

SEQ ID NO: 1076817 - RNA, 19 nt, Artificial Sequence
  Description of Artificial Sequence: Synthetic oligonucleotide
  Antisense strand to SEQ ID NO: 1076816
ucucuggccagcauuugcc

SEQ ID NO: 1076818 - RNA, 19 nt, Artificial Sequence
  Description of Artificial Sequence: Synthetic oligonucleotide
  Sense strand starting at position 3612 of SEQ ID NO: 915397
gcaaaugcuggccagagaa

SEQ ID NO: 1076819 - RNA, 19 nt, Artificial Sequence
  Description of Artificial Sequence: Synthetic oligonucleotide
  Antisense strand to SEQ ID NO: 1076818
uucucuggccagcauuugc

SEQ ID NO: 1076820 - RNA, 19 nt, Artificial Sequence
  Description of Artificial Sequence: Synthetic oligonucleotide
  Sense strand starting at position 3819 of SEQ ID NO: 915397
caggaagaucuguguggcu

SEQ ID NO: 1076821 - RNA, 19 nt, Artificial Sequence
  Description of Artificial Sequence: Synthetic oligonucleotide
  Antisense strand to SEQ ID NO: 1076820
agccacacagaucuuccug

SEQ ID NO: 1076822 - RNA, 19 nt, Artificial Sequence
  Description of Artificial Sequence: Synthetic oligonucleotide
  Sense strand starting at position 35 of SEQ ID NO: 915398
agacacugcuucccugaau

SEQ ID NO: 1076823 - RNA, 19 nt, Artificial Sequence
  Description of Artificial Sequence: Synthetic oligonucleotide
  Antisense strand to SEQ ID NO: 1076822
auucagggaagcagugucu

SEQ ID NO: 1076824 - RNA, 19 nt, Artificial Sequence
  Description of Artificial Sequence: Synthetic oligonucleotide
  Sense strand starting at position 89 of SEQ ID NO: 915398
ggcacuguaccuuaauaau

SEQ ID NO: 1076825 - RNA, 19 nt, Artificial Sequence
  Description of Artificial Sequence: Synthetic oligonucleotide
  Antisense strand to SEQ ID NO: 1076824
auuauuaagguacagugcc

SEQ ID NO: 1076826 - RNA, 19 nt, Artificial Sequence
  Description of Artificial Sequence: Synthetic oligonucleotide
  Sense strand starting at position 95 of SEQ ID NO: 915398
guaccuuaauaaugagaau

SEQ ID NO: 1076827 - RNA, 19 nt, Artificial Sequence
  Description of Artificial Sequence: Synthetic oligonucleotide
  Antisense strand to SEQ ID NO: 1076826
auucucauuauuaagguac

SEQ ID NO: 1076828 - RNA, 19 nt, Artificial Sequence
  Description of Artificial Sequence: Synthetic oligonucleotide
  Sense strand starting at position 198 of SEQ ID NO: 915398
gugcuauacucauucuaca

SEQ ID NO: 1076829 - RNA, 19 nt, Artificial Sequence
  Description of Artificial Sequence: Synthetic oligonucleotide
  Antisense strand to SEQ ID NO: 1076828
uguagaaugaguauagcac

SEQ ID NO: 1076830 - RNA, 19 nt, Artificial Sequence
  Description of Artificial Sequence: Synthetic oligonucleotide
  Sense strand starting at position 213 of SEQ ID NO: 915398
uacagaugcgguuaacuga

SEQ ID NO: 1076831 - RNA, 19 nt, Artificial Sequence
  Description of Artificial Sequence: Synthetic oligonucleotide
  Antisense strand to SEQ ID NO: 1076830
ucaguuaaccgcaucugua

SEQ ID NO: 1076832 - RNA, 19 nt, Artificial Sequence
  Description of Artificial Sequence: Synthetic oligonucleotide
  Sense strand starting at position 487 of SEQ ID NO: 915398
ccuguauucgcgcuggaga

SEQ ID NO: 1076833 - RNA, 19 nt, Artificial Sequence
  Description of Artificial Sequence: Synthetic oligonucleotide
  Antisense strand to SEQ ID NO: 1076832
ucuccagcgcgaauacagg

SEQ ID NO: 1076834 - RNA, 19 nt, Artificial Sequence
  Description of Artificial Sequence: Synthetic oligonucleotide
  Sense strand starting at position 488 of SEQ ID NO: 915398
cuguauucgcgcuggagaa

SEQ ID NO: 1076835 - RNA, 19 nt, Artificial Sequence
  Description of Artificial Sequence: Synthetic oligonucleotide
  Antisense strand to SEQ ID NO: 1076834
uucuccagcgcgaauacag

SEQ ID NO: 1076836 - RNA, 19 nt, Artificial Sequence
  Description of Artificial Sequence: Synthetic oligonucleotide
  Sense strand starting at position 489 of SEQ ID NO: 915398
uguauucgcgcuggagaag

SEQ ID NO: 1076837 - RNA, 19 nt, Artificial Sequence
  Description of Artificial Sequence: Synthetic oligonucleotide
  Antisense strand to SEQ ID NO: 1076836
cuucuccagcgcgaauaca

SEQ ID NO: 1076838 - RNA, 19 nt, Artificial Sequence
  Description of Artificial Sequence: Synthetic oligonucleotide
  Sense strand starting at position 490 of SEQ ID NO: 915398
guauucgcgcuggagaagu

SEQ ID NO: 1076839 - RNA, 19 nt, Artificial Sequence
  Description of Artificial Sequence: Synthetic oligonucleotide
  Antisense strand to SEQ ID NO: 1076838
acuucuccagcgcgaauac

SEQ ID NO: 1076840 - RNA, 19 nt, Artificial Sequence
  Description of Artificial Sequence: Synthetic oligonucleotide
  Sense strand starting at position 555 of SEQ ID NO: 915398
agagauggugucuguauaa

SEQ ID NO: 1076841 - RNA, 19 nt, Artificial Sequence
  Description of Artificial Sequence: Synthetic oligonucleotide
  Antisense strand to SEQ ID NO: 1076840
uuauacagacaccaucucu

SEQ ID NO: 1076842 - RNA, 19 nt, Artificial Sequence
  Description of Artificial Sequence: Synthetic oligonucleotide
  Sense strand starting at position 583 of SEQ ID NO: 915398
gauggucauuugcagaaac

SEQ ID NO: 1076843 - RNA, 19 nt, Artificial Sequence
  Description of Artificial Sequence: Synthetic oligonucleotide
  Antisense strand to SEQ ID NO: 1076842
guuucugcaaaugaccauc

SEQ ID NO: 1076844 - RNA, 19 nt, Artificial Sequence
  Description of Artificial Sequence: Synthetic oligonucleotide
  Sense strand starting at position 834 of SEQ ID NO: 915398
gggacagcauuaucugaaa

SEQ ID NO: 1076845 - RNA, 19 nt, Artificial Sequence
  Description of Artificial Sequence: Synthetic oligonucleotide
  Antisense strand to SEQ ID NO: 1076844
uuucagauaaugcuguccc

SEQ ID NO: 1076846 - RNA, 19 nt, Artificial Sequence
  Description of Artificial Sequence: Synthetic oligonucleotide
  Sense strand starting at position 1124 of SEQ ID NO: 915398
gucggaggucugucggcaa

SEQ ID NO: 1076847 - RNA, 19 nt, Artificial Sequence
  Description of Artificial Sequence: Synthetic oligonucleotide
  Antisense strand to SEQ ID NO: 1076846
uugccgacagaccuccgac

SEQ ID NO: 1076848 - RNA, 19 nt, Artificial Sequence
  Description of Artificial Sequence: Synthetic oligonucleotide
  Sense strand starting at position 2368 of SEQ ID NO: 915398
gcagccaagccugauugua

SEQ ID NO: 1076849 - RNA, 19 nt, Artificial Sequence
  Description of Artificial Sequence: Synthetic oligonucleotide
  Antisense strand to SEQ ID NO: 1076848
uacaaucaggcuuggcugc

SEQ ID NO: 1076850 - RNA, 19 nt, Artificial Sequence
  Description of Artificial Sequence: Synthetic oligonucleotide
  Sense strand starting at position 2370 of SEQ ID NO: 915398
agccaagccugauuguaga

SEQ ID NO: 1076851 - RNA, 19 nt, Artificial Sequence
  Description of Artificial Sequence: Synthetic oligonucleotide
  Antisense strand to SEQ ID NO: 1076850
ucuacaaucaggcuuggcu

SEQ ID NO: 1076852 - RNA, 19 nt, Artificial Sequence
  Description of Artificial Sequence: Synthetic oligonucleotide
  Sense strand starting at position 2652 of SEQ ID NO: 915398
ccucuccucccgugugaaa

SEQ ID NO: 1076853 - RNA, 19 nt, Artificial Sequence
  Description of Artificial Sequence: Synthetic oligonucleotide
  Antisense strand to SEQ ID NO: 1076852
uuucacacgggaggagagg

SEQ ID NO: 1076854 - RNA, 19 nt, Artificial Sequence
  Description of Artificial Sequence: Synthetic oligonucleotide
  Sense strand starting at position 2654 of SEQ ID NO: 915398
ucuccucccgugugaaaua

SEQ ID NO: 1076855 - RNA, 19 nt, Artificial Sequence
  Description of Artificial Sequence: Synthetic oligonucleotide
  Antisense strand to SEQ ID NO: 1076854
uauuucacacgggaggaga

SEQ ID NO: 1076856 - RNA, 19 nt, Artificial Sequence
  Description of Artificial Sequence: Synthetic oligonucleotide
  Sense strand starting at position 2655 of SEQ ID NO: 915398
cuccucccgugugaaauaa

SEQ ID NO: 1076857 - RNA, 19 nt, Artificial Sequence
  Description of Artificial Sequence: Synthetic oligonucleotide
  Antisense strand to SEQ ID NO: 1076856
uuauuucacacgggaggag

SEQ ID NO: 1076858 - RNA, 19 nt, Artificial Sequence
  Description of Artificial Sequence: Synthetic oligonucleotide
  Sense strand starting at position 2659 of SEQ ID NO: 915398
ucccgugugaaauaaagau

SEQ ID NO: 1076859 - RNA, 19 nt, Artificial Sequence
  Description of Artificial Sequence: Synthetic oligonucleotide
  Antisense strand to SEQ ID NO: 1076858
aucuuuauuucacacggga

SEQ ID NO: 1076860 - RNA, 19 nt, Artificial Sequence
  Description of Artificial Sequence: Synthetic oligonucleotide
  Sense strand starting at position 2663 of SEQ ID NO: 915398
gugugaaauaaagaucgua

SEQ ID NO: 1076861 - RNA, 19 nt, Artificial Sequence
  Description of Artificial Sequence: Synthetic oligonucleotide
  Antisense strand to SEQ ID NO: 1076860
uacgaucuuuauuucacac

SEQ ID NO: 1076862 - RNA, 19 nt, Artificial Sequence
  Description of Artificial Sequence: Synthetic oligonucleotide
  Sense strand starting at position 2666 of SEQ ID NO: 915398
ugaaauaaagaucguacua

SEQ ID NO: 1076863 - RNA, 19 nt, Artificial Sequence
  Description of Artificial Sequence: Synthetic oligonucleotide
  Antisense strand to SEQ ID NO: 1076862
uaguacgaucuuuauuuca

SEQ ID NO: 1076864 - RNA, 19 nt, Artificial Sequence
  Description of Artificial Sequence: Synthetic oligonucleotide
  Sense strand starting at position 2706 of SEQ ID NO: 915398
cacugcauucgcgauuaaa

SEQ ID NO: 1076865 - RNA, 19 nt, Artificial Sequence
  Description of Artificial Sequence: Synthetic oligonucleotide
  Antisense strand to SEQ ID NO: 1076864
uuuaaucgcgaaugcagug

SEQ ID NO: 1076866 - RNA, 19 nt, Artificial Sequence
  Description of Artificial Sequence: Synthetic oligonucleotide
  Sense strand starting at position 2708 of SEQ ID NO: 915398
cugcauucgcgauuaaacg

SEQ ID NO: 1076867 - RNA, 19 nt, Artificial Sequence
  Description of Artificial Sequence: Synthetic oligonucleotide
  Antisense strand to SEQ ID NO: 1076866
cguuuaaucgcgaaugcag

SEQ ID NO: 1076868 - RNA, 19 nt, Artificial Sequence
  Description of Artificial Sequence: Synthetic oligonucleotide
  Sense strand starting at position 2709 of SEQ ID NO: 915398
ugcauucgcgauuaaacga

SEQ ID NO: 1076869 - RNA, 19 nt, Artificial Sequence
  Description of Artificial Sequence: Synthetic oligonucleotide
  Antisense strand to SEQ ID NO: 1076868
ucguuuaaucgcgaaugca

SEQ ID NO: 1076870 - RNA, 19 nt, Artificial Sequence
  Description of Artificial Sequence: Synthetic oligonucleotide
  Sense strand starting at position 2716 of SEQ ID NO: 915398
gcgauuaaacgagacagua

SEQ ID NO: 1076871 - RNA, 19 nt, Artificial Sequence
  Description of Artificial Sequence: Synthetic oligonucleotide
  Antisense strand to SEQ ID NO: 1076870
uacugucucguuuaaucgc

SEQ ID NO: 1076872 - RNA, 19 nt, Artificial Sequence
  Description of Artificial Sequence: Synthetic oligonucleotide
  Sense strand starting at position 2724 of SEQ ID NO: 915398
acgagacaguaguuaguaa

SEQ ID NO: 1076873 - RNA, 19 nt, Artificial Sequence
  Description of Artificial Sequence: Synthetic oligonucleotide
  Antisense strand to SEQ ID NO: 1076872
uuacuaacuacugucucgu

SEQ ID NO: 1076874 - RNA, 19 nt, Artificial Sequence
  Description of Artificial Sequence: Synthetic oligonucleotide
  Sense strand starting at position 2725 of SEQ ID NO: 915398
cgagacaguaguuaguaaa

SEQ ID NO: 1076875 - RNA, 19 nt, Artificial Sequence
  Description of Artificial Sequence: Synthetic oligonucleotide
  Antisense strand to SEQ ID NO: 1076874
uuuacuaacuacugucucg

SEQ ID NO: 1076876 - RNA, 19 nt, Artificial Sequence
  Description of Artificial Sequence: Synthetic oligonucleotide
  Sense strand starting at position 2728 of SEQ ID NO: 915398
gacaguaguuaguaaaguc

SEQ ID NO: 1076877 - RNA, 19 nt, Artificial Sequence
  Description of Artificial Sequence: Synthetic oligonucleotide
  Antisense strand to SEQ ID NO: 1076876
gacuuuacuaacuacuguc

SEQ ID NO: 1076878 - RNA, 19 nt, Artificial Sequence
  Description of Artificial Sequence: Synthetic oligonucleotide
  Sense strand starting at position 2736 of SEQ ID NO: 915398
uuaguaaaguccuaaacac

SEQ ID NO: 1076879 - RNA, 19 nt, Artificial Sequence
  Description of Artificial Sequence: Synthetic oligonucleotide
  Antisense strand to SEQ ID NO: 1076878
guguuuaggacuuuacuaa

SEQ ID NO: 1076880 - RNA, 19 nt, Artificial Sequence
  Description of Artificial Sequence: Synthetic oligonucleotide
  Sense strand starting at position 2812 of SEQ ID NO: 915398
cguuguuaaagaggucaau

SEQ ID NO: 1076881 - RNA, 19 nt, Artificial Sequence
  Description of Artificial Sequence: Synthetic oligonucleotide
  Antisense strand to SEQ ID NO: 1076880
auugaccucuuuaacaacg

SEQ ID NO: 1076882 - RNA, 19 nt, Artificial Sequence
  Description of Artificial Sequence: Synthetic oligonucleotide
  Sense strand starting at position 2842 of SEQ ID NO: 915398
aguuaaagaucacagcaga

SEQ ID NO: 1076883 - RNA, 19 nt, Artificial Sequence
  Description of Artificial Sequence: Synthetic oligonucleotide
  Antisense strand to SEQ ID NO: 1076882
ucugcugugaucuuuaacu

SEQ ID NO: 1076884 - RNA, 19 nt, Artificial Sequence
  Description of Artificial Sequence: Synthetic oligonucleotide
  Sense strand starting at position 2860 of SEQ ID NO: 915398
auauuacuccugugcccau

SEQ ID NO: 1076885 - RNA, 19 nt, Artificial Sequence
  Description of Artificial Sequence: Synthetic oligonucleotide
  Antisense strand to SEQ ID NO: 1076884
augggcacaggaguaauau

SEQ ID NO: 1076886 - RNA, 19 nt, Artificial Sequence
  Description of Artificial Sequence: Synthetic oligonucleotide
  Sense strand starting at position 3019 of SEQ ID NO: 915398
gaaggauguguugaguuuc

SEQ ID NO: 1076887 - RNA, 19 nt, Artificial Sequence
  Description of Artificial Sequence: Synthetic oligonucleotide
  Antisense strand to SEQ ID NO: 1076886
gaaacucaacacauccuuc

SEQ ID NO: 1076888 - RNA, 19 nt, Artificial Sequence
  Description of Artificial Sequence: Synthetic oligonucleotide
  Sense strand starting at position 3111 of SEQ ID NO: 915398
gagcuuggccuucggagaa

SEQ ID NO: 1076889 - RNA, 19 nt, Artificial Sequence
  Description of Artificial Sequence: Synthetic oligonucleotide
  Antisense strand to SEQ ID NO: 1076888
uucuccgaaggccaagcuc

SEQ ID NO: 1076890 - RNA, 19 nt, Artificial Sequence
  Description of Artificial Sequence: Synthetic oligonucleotide
  Sense strand starting at position 3183 of SEQ ID NO: 915398
uaaugagucuaggcuggau

SEQ ID NO: 1076891 - RNA, 19 nt, Artificial Sequence
  Description of Artificial Sequence: Synthetic oligonucleotide
  Antisense strand to SEQ ID NO: 1076890
auccagccuagacucauua

SEQ ID NO: 1076892 - RNA, 19 nt, Artificial Sequence
  Description of Artificial Sequence: Synthetic oligonucleotide
  Sense strand starting at position 3196 of SEQ ID NO: 915398
cuggauucugugugcagca

SEQ ID NO: 1076893 - RNA, 19 nt, Artificial Sequence
  Description of Artificial Sequence: Synthetic oligonucleotide
  Antisense strand to SEQ ID NO: 1076892
ugcugcacacagaauccag

SEQ ID NO: 1076894 - RNA, 19 nt, Artificial Sequence
  Description of Artificial Sequence: Synthetic oligonucleotide
  Sense strand starting at position 3197 of SEQ ID NO: 915398
uggauucugugugcagcaa

SEQ ID NO: 1076895 - RNA, 19 nt, Artificial Sequence
  Description of Artificial Sequence: Synthetic oligonucleotide
  Antisense strand to SEQ ID NO: 1076894
uugcugcacacagaaucca

SEQ ID NO: 1076896 - RNA, 19 nt, Artificial Sequence
  Description of Artificial Sequence: Synthetic oligonucleotide
  Sense strand starting at position 3224 of SEQ ID NO: 915398
ccacgagguguccaacacu

SEQ ID NO: 1076897 - RNA, 19 nt, Artificial Sequence
  Description of Artificial Sequence: Synthetic oligonucleotide
  Antisense strand to SEQ ID NO: 1076896
aguguuggacaccucgugg

SEQ ID NO: 1076898 - RNA, 19 nt, Artificial Sequence
  Description of Artificial Sequence: Synthetic oligonucleotide
  Sense strand starting at position 3311 of SEQ ID NO: 915398
cuaagugguucccaccaga

SEQ ID NO: 1076899 - RNA, 19 nt, Artificial Sequence
  Description of Artificial Sequence: Synthetic oligonucleotide
  Antisense strand to SEQ ID NO: 1076898
ucuggugggaaccacuuag

SEQ ID NO: 1076900 - RNA, 19 nt, Artificial Sequence
  Description of Artificial Sequence: Synthetic oligonucleotide
  Sense strand starting at position 3314 of SEQ ID NO: 915398
agugguucccaccagacaa

SEQ ID NO: 1076901 - RNA, 19 nt, Artificial Sequence
  Description of Artificial Sequence: Synthetic oligonucleotide
  Antisense strand to SEQ ID NO: 1076900
uugucuggugggaaccacu

SEQ ID NO: 1076902 - RNA, 19 nt, Artificial Sequence
  Description of Artificial Sequence: Synthetic oligonucleotide
  Sense strand starting at position 81 of SEQ ID NO: 915399
gagugccuacaauguaaca

SEQ ID NO: 1076903 - RNA, 19 nt, Artificial Sequence
  Description of Artificial Sequence: Synthetic oligonucleotide
  Antisense strand to SEQ ID NO: 1076902
uguuacauuguaggcacuc

SEQ ID NO: 1076904 - RNA, 19 nt, Artificial Sequence
  Description of Artificial Sequence: Synthetic oligonucleotide
  Sense strand starting at position 98 of SEQ ID NO: 915399
caggcaagugcugaaugaa

SEQ ID NO: 1076905 - RNA, 19 nt, Artificial Sequence
  Description of Artificial Sequence: Synthetic oligonucleotide
  Antisense strand to SEQ ID NO: 1076904
uucauucagcacuugccug

SEQ ID NO: 1076906 - RNA, 19 nt, Artificial Sequence
  Description of Artificial Sequence: Synthetic oligonucleotide
  Sense strand starting at position 101 of SEQ ID NO: 915399
gcaagugcugaaugaaaua

SEQ ID NO: 1076907 - RNA, 19 nt, Artificial Sequence
  Description of Artificial Sequence: Synthetic oligonucleotide
  Antisense strand to SEQ ID NO: 1076906
uauuucauucagcacuugc

SEQ ID NO: 1076908 - RNA, 19 nt, Artificial Sequence
  Description of Artificial Sequence: Synthetic oligonucleotide
  Sense strand starting at position 138 of SEQ ID NO: 915399
cauagauggugauccgcaa

SEQ ID NO: 1076909 - RNA, 19 nt, Artificial Sequence
  Description of Artificial Sequence: Synthetic oligonucleotide
  Antisense strand to SEQ ID NO: 1076908
uugcggaucaccaucuaug

SEQ ID NO: 1076910 - RNA, 19 nt, Artificial Sequence
  Description of Artificial Sequence: Synthetic oligonucleotide
  Sense strand starting at position 142 of SEQ ID NO: 915399
gauggugauccgcaaagug

SEQ ID NO: 1076911 - RNA, 19 nt, Artificial Sequence
  Description of Artificial Sequence: Synthetic oligonucleotide
  Antisense strand to SEQ ID NO: 1076910
cacuuugcggaucaccauc

SEQ ID NO: 1076912 - RNA, 19 nt, Artificial Sequence
  Description of Artificial Sequence: Synthetic oligonucleotide
  Sense strand starting at position 152 of SEQ ID NO: 915399
cgcaaaguggcuuacuauc

SEQ ID NO: 1076913 - RNA, 19 nt, Artificial Sequence
  Description of Artificial Sequence: Synthetic oligonucleotide
  Antisense strand to SEQ ID NO: 1076912
gauaguaagccacuuugcg

SEQ ID NO: 1076914 - RNA, 19 nt, Artificial Sequence
  Description of Artificial Sequence: Synthetic oligonucleotide
  Sense strand starting at position 158 of SEQ ID NO: 915399
guggcuuacuaucucauuu

SEQ ID NO: 1076915 - RNA, 19 nt, Artificial Sequence
  Description of Artificial Sequence: Synthetic oligonucleotide
  Antisense strand to SEQ ID NO: 1076914
aaaugagauaguaagccac

SEQ ID NO: 1076916 - RNA, 19 nt, Artificial Sequence
  Description of Artificial Sequence: Synthetic oligonucleotide
  Sense strand starting at position 222 of SEQ ID NO: 915399
auuacaugaccugguaagu

SEQ ID NO: 1076917 - RNA, 19 nt, Artificial Sequence
  Description of Artificial Sequence: Synthetic oligonucleotide
  Antisense strand to SEQ ID NO: 1076916
acuuaccaggucauguaau

SEQ ID NO: 1076918 - RNA, 19 nt, Artificial Sequence
  Description of Artificial Sequence: Synthetic oligonucleotide
  Sense strand starting at position 231 of SEQ ID NO: 915399
ccugguaagucuccuauuu

SEQ ID NO: 1076919 - RNA, 19 nt, Artificial Sequence
  Description of Artificial Sequence: Synthetic oligonucleotide
  Antisense strand to SEQ ID NO: 1076918
aaauaggagacuuaccagg

SEQ ID NO: 1076920 - RNA, 19 nt, Artificial Sequence
  Description of Artificial Sequence: Synthetic oligonucleotide
  Sense strand starting at position 233 of SEQ ID NO: 915399
ugguaagucuccuauuuag

SEQ ID NO: 1076921 - RNA, 19 nt, Artificial Sequence
  Description of Artificial Sequence: Synthetic oligonucleotide
  Antisense strand to SEQ ID NO: 1076920
cuaaauaggagacuuacca

SEQ ID NO: 1076922 - RNA, 19 nt, Artificial Sequence
  Description of Artificial Sequence: Synthetic oligonucleotide
  Sense strand starting at position 258 of SEQ ID NO: 915399
ugcuuuauacuaugucuca

SEQ ID NO: 1076923 - RNA, 19 nt, Artificial Sequence
  Description of Artificial Sequence: Synthetic oligonucleotide
  Antisense strand to SEQ ID NO: 1076922
ugagacauaguauaaagca

SEQ ID NO: 1076924 - RNA, 19 nt, Artificial Sequence
  Description of Artificial Sequence: Synthetic oligonucleotide
  Sense strand starting at position 410 of SEQ ID NO: 915399
ucaauuucgcaucgucuau

SEQ ID NO: 1076925 - RNA, 19 nt, Artificial Sequence
  Description of Artificial Sequence: Synthetic oligonucleotide
  Antisense strand to SEQ ID NO: 1076924
auagacgaugcgaaauuga

SEQ ID NO: 1076926 - RNA, 19 nt, Artificial Sequence
  Description of Artificial Sequence: Synthetic oligonucleotide
  Sense strand starting at position 414 of SEQ ID NO: 915399
uuucgcaucgucuaugaga

SEQ ID NO: 1076927 - RNA, 19 nt, Artificial Sequence
  Description of Artificial Sequence: Synthetic oligonucleotide
  Antisense strand to SEQ ID NO: 1076926
ucucauagacgaugcgaaa

SEQ ID NO: 1076928 - RNA, 19 nt, Artificial Sequence
  Description of Artificial Sequence: Synthetic oligonucleotide
  Sense strand starting at position 444 of SEQ ID NO: 915399
ucagguguuuaagcuuauu

SEQ ID NO: 1076929 - RNA, 19 nt, Artificial Sequence
  Description of Artificial Sequence: Synthetic oligonucleotide
  Antisense strand to SEQ ID NO: 1076928
aauaagcuuaaacaccuga

SEQ ID NO: 1076930 - RNA, 19 nt, Artificial Sequence
  Description of Artificial Sequence: Synthetic oligonucleotide
  Sense strand starting at position 447 of SEQ ID NO: 915399
gguguuuaagcuuauuaua

SEQ ID NO: 1076931 - RNA, 19 nt, Artificial Sequence
  Description of Artificial Sequence: Synthetic oligonucleotide
  Antisense strand to SEQ ID NO: 1076930
uauaauaagcuuaaacacc

SEQ ID NO: 1076932 - RNA, 19 nt, Artificial Sequence
  Description of Artificial Sequence: Synthetic oligonucleotide
  Sense strand starting at position 532 of SEQ ID NO: 915399
aauugucauguugaaaugu

SEQ ID NO: 1076933 - RNA, 19 nt, Artificial Sequence
  Description of Artificial Sequence: Synthetic oligonucleotide
  Antisense strand to SEQ ID NO: 1076932
acauuucaacaugacaauu

SEQ ID NO: 1076934 - RNA, 19 nt, Artificial Sequence
  Description of Artificial Sequence: Synthetic oligonucleotide
  Sense strand starting at position 583 of SEQ ID NO: 915399
agauguuuggcucauggaa

SEQ ID NO: 1076935 - RNA, 19 nt, Artificial Sequence
  Description of Artificial Sequence: Synthetic oligonucleotide
  Antisense strand to SEQ ID NO: 1076934
uuccaugagccaaacaucu

SEQ ID NO: 1076936 - RNA, 19 nt, Artificial Sequence
  Description of Artificial Sequence: Synthetic oligonucleotide
  Sense strand starting at position 658 of SEQ ID NO: 915399
ucuauuagucaaugggcga

SEQ ID NO: 1076937 - RNA, 19 nt, Artificial Sequence
  Description of Artificial Sequence: Synthetic oligonucleotide
  Antisense strand to SEQ ID NO: 1076936
ucgcccauugacuaauaga

SEQ ID NO: 1076938 - RNA, 19 nt, Artificial Sequence
  Description of Artificial Sequence: Synthetic oligonucleotide
  Sense strand starting at position 880 of SEQ ID NO: 915399
caguauuccuuuguggcaa

SEQ ID NO: 1076939 - RNA, 19 nt, Artificial Sequence
  Description of Artificial Sequence: Synthetic oligonucleotide
  Antisense strand to SEQ ID NO: 1076938
uugccacaaaggaauacug

SEQ ID NO: 1076940 - RNA, 19 nt, Artificial Sequence
  Description of Artificial Sequence: Synthetic oligonucleotide
  Sense strand starting at position 1025 of SEQ ID NO: 915399
auacaagaucccugaugca

SEQ ID NO: 1076941 - RNA, 19 nt, Artificial Sequence
  Description of Artificial Sequence: Synthetic oligonucleotide
  Antisense strand to SEQ ID NO: 1076940
ugcaucagggaucuuguau

SEQ ID NO: 1076942 - RNA, 19 nt, Artificial Sequence
  Description of Artificial Sequence: Synthetic oligonucleotide
  Sense strand starting at position 1114 of SEQ ID NO: 915399
guuagauagcgauggucau

SEQ ID NO: 1076943 - RNA, 19 nt, Artificial Sequence
  Description of Artificial Sequence: Synthetic oligonucleotide
  Antisense strand to SEQ ID NO: 1076942
augaccaucgcuaucuaac

SEQ ID NO: 1076944 - RNA, 19 nt, Artificial Sequence
  Description of Artificial Sequence: Synthetic oligonucleotide
  Sense strand starting at position 1120 of SEQ ID NO: 915399
uagcgauggucauccucau

SEQ ID NO: 1076945 - RNA, 19 nt, Artificial Sequence
  Description of Artificial Sequence: Synthetic oligonucleotide
  Antisense strand to SEQ ID NO: 1076944
augaggaugaccaucgcua

SEQ ID NO: 1076946 - RNA, 19 nt, Artificial Sequence
  Description of Artificial Sequence: Synthetic oligonucleotide
  Sense strand starting at position 1218 of SEQ ID NO: 915399
gcaugcaagcaguauguau

SEQ ID NO: 1076947 - RNA, 19 nt, Artificial Sequence
  Description of Artificial Sequence: Synthetic oligonucleotide
  Antisense strand to SEQ ID NO: 1076946
auacauacugcuugcaugc

SEQ ID NO: 1076948 - RNA, 19 nt, Artificial Sequence
  Description of Artificial Sequence: Synthetic oligonucleotide
  Sense strand starting at position 1227 of SEQ ID NO: 915399
caguauguaugaucgggau

SEQ ID NO: 1076949 - RNA, 19 nt, Artificial Sequence
  Description of Artificial Sequence: Synthetic oligonucleotide
  Antisense strand to SEQ ID NO: 1076948
aucccgaucauacauacug

SEQ ID NO: 1076950 - RNA, 19 nt, Artificial Sequence
  Description of Artificial Sequence: Synthetic oligonucleotide
  Sense strand starting at position 1229 of SEQ ID NO: 915399
guauguaugaucgggauuc

SEQ ID NO: 1076951 - RNA, 19 nt, Artificial Sequence
  Description of Artificial Sequence: Synthetic oligonucleotide
  Antisense strand to SEQ ID NO: 1076950
gaaucccgaucauacauac

SEQ ID NO: 1076952 - RNA, 19 nt, Artificial Sequence
  Description of Artificial Sequence: Synthetic oligonucleotide
  Sense strand starting at position 1254 of SEQ ID NO: 915399
caacuaugcugcuucggaa

SEQ ID NO: 1076953 - RNA, 19 nt, Artificial Sequence
  Description of Artificial Sequence: Synthetic oligonucleotide
  Antisense strand to SEQ ID NO: 1076952
uuccgaagcagcauaguug

SEQ ID NO: 1076954 - RNA, 19 nt, Artificial Sequence
  Description of Artificial Sequence: Synthetic oligonucleotide
  Sense strand starting at position 1337 of SEQ ID NO: 915399
ucauccagucuuugguaaa

SEQ ID NO: 1076955 - RNA, 19 nt, Artificial Sequence
  Description of Artificial Sequence: Synthetic oligonucleotide
  Antisense strand to SEQ ID NO: 1076954
uuuaccaaagacuggauga

SEQ ID NO: 1076956 - RNA, 19 nt, Artificial Sequence
  Description of Artificial Sequence: Synthetic oligonucleotide
  Sense strand starting at position 1385 of SEQ ID NO: 915399
auuagauaugguggccaau

SEQ ID NO: 1076957 - RNA, 19 nt, Artificial Sequence
  Description of Artificial Sequence: Synthetic oligonucleotide
  Antisense strand to SEQ ID NO: 1076956
auuggccaccauaucuaau

SEQ ID NO: 1076958 - RNA, 19 nt, Artificial Sequence
  Description of Artificial Sequence: Synthetic oligonucleotide
  Sense strand starting at position 1410 of SEQ ID NO: 915399
ggcauacaagauuagcuaa

SEQ ID NO: 1076959 - RNA, 19 nt, Artificial Sequence
  Description of Artificial Sequence: Synthetic oligonucleotide
  Antisense strand to SEQ ID NO: 1076958
uuagcuaaucuuguaugcc

SEQ ID NO: 1076960 - RNA, 19 nt, Artificial Sequence
  Description of Artificial Sequence: Synthetic oligonucleotide
  Sense strand starting at position 1453 of SEQ ID NO: 915399
ccagguacuguguaacaua

SEQ ID NO: 1076961 - RNA, 19 nt, Artificial Sequence
  Description of Artificial Sequence: Synthetic oligonucleotide
  Antisense strand to SEQ ID NO: 1076960
uauguuacacaguaccugg

SEQ ID NO: 1076962 - RNA, 19 nt, Artificial Sequence
  Description of Artificial Sequence: Synthetic oligonucleotide
  Sense strand starting at position 1463 of SEQ ID NO: 915399
uguaacauaggcgaguuua

SEQ ID NO: 1076963 - RNA, 19 nt, Artificial Sequence
  Description of Artificial Sequence: Synthetic oligonucleotide
  Antisense strand to SEQ ID NO: 1076962
uaaacucgccuauguuaca

SEQ ID NO: 1076964 - RNA, 19 nt, Artificial Sequence
  Description of Artificial Sequence: Synthetic oligonucleotide
  Sense strand starting at position 1536 of SEQ ID NO: 915399
cagagacguuucuucgagu

SEQ ID NO: 1076965 - RNA, 19 nt, Artificial Sequence
  Description of Artificial Sequence: Synthetic oligonucleotide
  Antisense strand to SEQ ID NO: 1076964
acucgaagaaacgucucug

SEQ ID NO: 1076966 - RNA, 19 nt, Artificial Sequence
  Description of Artificial Sequence: Synthetic oligonucleotide
  Sense strand starting at position 1542 of SEQ ID NO: 915399
cguuucuucgagucgcaga

SEQ ID NO: 1076967 - RNA, 19 nt, Artificial Sequence
  Description of Artificial Sequence: Synthetic oligonucleotide
  Antisense strand to SEQ ID NO: 1076966
ucugcgacucgaagaaacg

SEQ ID NO: 1076968 - RNA, 19 nt, Artificial Sequence
  Description of Artificial Sequence: Synthetic oligonucleotide
  Sense strand starting at position 2080 of SEQ ID NO: 915399
ggugucucucgcuaucuga

SEQ ID NO: 1076969 - RNA, 19 nt, Artificial Sequence
  Description of Artificial Sequence: Synthetic oligonucleotide
  Antisense strand to SEQ ID NO: 1076968
ucagauagcgagagacacc

SEQ ID NO: 1076970 - RNA, 19 nt, Artificial Sequence
  Description of Artificial Sequence: Synthetic oligonucleotide
  Sense strand starting at position 2093 of SEQ ID NO: 915399
aucugaaucucuucggaga

SEQ ID NO: 1076971 - RNA, 19 nt, Artificial Sequence
  Description of Artificial Sequence: Synthetic oligonucleotide
  Antisense strand to SEQ ID NO: 1076970
ucuccgaagagauucagau

SEQ ID NO: 1076972 - RNA, 19 nt, Artificial Sequence
  Description of Artificial Sequence: Synthetic oligonucleotide
  Sense strand starting at position 2242 of SEQ ID NO: 915399
gagugaccucucugagccu

SEQ ID NO: 1076973 - RNA, 19 nt, Artificial Sequence
  Description of Artificial Sequence: Synthetic oligonucleotide
  Antisense strand to SEQ ID NO: 1076972
aggcucagagaggucacuc

SEQ ID NO: 1076974 - RNA, 19 nt, Artificial Sequence
  Description of Artificial Sequence: Synthetic oligonucleotide
  Sense strand starting at position 2295 of SEQ ID NO: 915399
uggugacucaaucggauga

SEQ ID NO: 1076975 - RNA, 19 nt, Artificial Sequence
  Description of Artificial Sequence: Synthetic oligonucleotide
  Antisense strand to SEQ ID NO: 1076974
ucauccgauugagucacca

SEQ ID NO: 1076976 - RNA, 19 nt, Artificial Sequence
  Description of Artificial Sequence: Synthetic oligonucleotide
  Sense strand starting at position 2296 of SEQ ID NO: 915399
ggugacucaaucggaugaa

SEQ ID NO: 1076977 - RNA, 19 nt, Artificial Sequence
  Description of Artificial Sequence: Synthetic oligonucleotide
  Antisense strand to SEQ ID NO: 1076976
uucauccgauugagucacc

SEQ ID NO: 1076978 - RNA, 19 nt, Artificial Sequence
  Description of Artificial Sequence: Synthetic oligonucleotide
  Sense strand starting at position 2548 of SEQ ID NO: 915399
agguauucauguguuaugu

SEQ ID NO: 1076979 - RNA, 19 nt, Artificial Sequence
  Description of Artificial Sequence: Synthetic oligonucleotide
  Antisense strand to SEQ ID NO: 1076978
acauaacacaugaauaccu

SEQ ID NO: 1076980 - RNA, 19 nt, Artificial Sequence
  Description of Artificial Sequence: Synthetic oligonucleotide
  Sense strand starting at position 2944 of SEQ ID NO: 915399
aggugcaugugucuuuaaa

SEQ ID NO: 1076981 - RNA, 19 nt, Artificial Sequence
  Description of Artificial Sequence: Synthetic oligonucleotide
  Antisense strand to SEQ ID NO: 1076980
uuuaaagacacaugcaccu

SEQ ID NO: 1076982 - RNA, 19 nt, Artificial Sequence
  Description of Artificial Sequence: Synthetic oligonucleotide
  Sense strand starting at position 186 of SEQ ID NO: 915400
aggaauucugcucaccuua

SEQ ID NO: 1076983 - RNA, 19 nt, Artificial Sequence
  Description of Artificial Sequence: Synthetic oligonucleotide
  Antisense strand to SEQ ID NO: 1076982
uaaggugagcagaauuccu

SEQ ID NO: 1076984 - RNA, 19 nt, Artificial Sequence
  Description of Artificial Sequence: Synthetic oligonucleotide
  Sense strand starting at position 285 of SEQ ID NO: 915400
aggccagaagaaugauagu

SEQ ID NO: 1076985 - RNA, 19 nt, Artificial Sequence
  Description of Artificial Sequence: Synthetic oligonucleotide
  Antisense strand to SEQ ID NO: 1076984
acuaucauucuucuggccu

SEQ ID NO: 1076986 - RNA, 19 nt, Artificial Sequence
  Description of Artificial Sequence: Synthetic oligonucleotide
  Sense strand starting at position 344 of SEQ ID NO: 915400
gugaaugaccuugaccguu

SEQ ID NO: 1076987 - RNA, 19 nt, Artificial Sequence
  Description of Artificial Sequence: Synthetic oligonucleotide
  Antisense strand to SEQ ID NO: 1076986
aacggucaaggucauucac

SEQ ID NO: 1076988 - RNA, 19 nt, Artificial Sequence
  Description of Artificial Sequence: Synthetic oligonucleotide
  Sense strand starting at position 350 of SEQ ID NO: 915400
gaccuugaccguuacuauc

SEQ ID NO: 1076989 - RNA, 19 nt, Artificial Sequence
  Description of Artificial Sequence: Synthetic oligonucleotide
  Antisense strand to SEQ ID NO: 1076988
gauaguaacggucaagguc

SEQ ID NO: 1076990 - RNA, 19 nt, Artificial Sequence
  Description of Artificial Sequence: Synthetic oligonucleotide
  Sense strand starting at position 423 of SEQ ID NO: 915400
caguucuauuuguuaggca

SEQ ID NO: 1076991 - RNA, 19 nt, Artificial Sequence
  Description of Artificial Sequence: Synthetic oligonucleotide
  Antisense strand to SEQ ID NO: 1076990
ugccuaacaaauagaacug

SEQ ID NO: 1076992 - RNA, 19 nt, Artificial Sequence
  Description of Artificial Sequence: Synthetic oligonucleotide
  Sense strand starting at position 471 of SEQ ID NO: 915400
cagguacauguaggauaua

SEQ ID NO: 1076993 - RNA, 19 nt, Artificial Sequence
  Description of Artificial Sequence: Synthetic oligonucleotide
  Antisense strand to SEQ ID NO: 1076992
uauauccuacauguaccug

SEQ ID NO: 1076994 - RNA, 19 nt, Artificial Sequence
  Description of Artificial Sequence: Synthetic oligonucleotide
  Sense strand starting at position 480 of SEQ ID NO: 915400
guaggauauacucaccgca

SEQ ID NO: 1076995 - RNA, 19 nt, Artificial Sequence
  Description of Artificial Sequence: Synthetic oligonucleotide
  Antisense strand to SEQ ID NO: 1076994
ugcggugaguauauccuac

SEQ ID NO: 1076996 - RNA, 19 nt, Artificial Sequence
  Description of Artificial Sequence: Synthetic oligonucleotide
  Sense strand starting at position 482 of SEQ ID NO: 915400
aggauauacucaccgcaaa

SEQ ID NO: 1076997 - RNA, 19 nt, Artificial Sequence
  Description of Artificial Sequence: Synthetic oligonucleotide
  Antisense strand to SEQ ID NO: 1076996
uuugcggugaguauauccu

SEQ ID NO: 1076998 - RNA, 19 nt, Artificial Sequence
  Description of Artificial Sequence: Synthetic oligonucleotide
  Sense strand starting at position 566 of SEQ ID NO: 915400
uuaaauagucauugggaau

SEQ ID NO: 1076999 - RNA, 19 nt, Artificial Sequence
  Description of Artificial Sequence: Synthetic oligonucleotide
  Antisense strand to SEQ ID NO: 1076998
auucccaaugacuauuuaa

SEQ ID NO: 1077000 - RNA, 19 nt, Artificial Sequence
  Description of Artificial Sequence: Synthetic oligonucleotide
  Sense strand starting at position 605 of SEQ ID NO: 915400
aggugaaauuaagugacau

SEQ ID NO: 1077001 - RNA, 19 nt, Artificial Sequence
  Description of Artificial Sequence: Synthetic oligonucleotide
  Antisense strand to SEQ ID NO: 1077000
augucacuuaauuucaccu

SEQ ID NO: 1077002 - RNA, 19 nt, Artificial Sequence
  Description of Artificial Sequence: Synthetic oligonucleotide
  Sense strand starting at position 606 of SEQ ID NO: 915400
ggugaaauuaagugacaug

SEQ ID NO: 1077003 - RNA, 19 nt, Artificial Sequence
  Description of Artificial Sequence: Synthetic oligonucleotide
  Antisense strand to SEQ ID NO: 1077002
caugucacuuaauuucacc

SEQ ID NO: 1077004 - RNA, 19 nt, Artificial Sequence
  Description of Artificial Sequence: Synthetic oligonucleotide
  Sense strand starting at position 615 of SEQ ID NO: 915400
aagugacaugaauguauca

SEQ ID NO: 1077005 - RNA, 19 nt, Artificial Sequence
  Description of Artificial Sequence: Synthetic oligonucleotide
  Antisense strand to SEQ ID NO: 1077004
ugauacauucaugucacuu

SEQ ID NO: 1077006 - RNA, 19 nt, Artificial Sequence
  Description of Artificial Sequence: Synthetic oligonucleotide
  Sense strand starting at position 681 of SEQ ID NO: 915400
uaacgaguagugggauuaa

SEQ ID NO: 1077007 - RNA, 19 nt, Artificial Sequence
  Description of Artificial Sequence: Synthetic oligonucleotide
  Antisense strand to SEQ ID NO: 1077006
uuaaucccacuacucguua

SEQ ID NO: 1077008 - RNA, 19 nt, Artificial Sequence
  Description of Artificial Sequence: Synthetic oligonucleotide
  Sense strand starting at position 709 of SEQ ID NO: 915400
guauuuauaccucgacuuu

SEQ ID NO: 1077009 - RNA, 19 nt, Artificial Sequence
  Description of Artificial Sequence: Synthetic oligonucleotide
  Antisense strand to SEQ ID NO: 1077008
aaagucgagguauaaauac

SEQ ID NO: 1077010 - RNA, 19 nt, Artificial Sequence
  Description of Artificial Sequence: Synthetic oligonucleotide
  Sense strand starting at position 804 of SEQ ID NO: 915400
uuaccaaagucuccaaagu

SEQ ID NO: 1077011 - RNA, 19 nt, Artificial Sequence
  Description of Artificial Sequence: Synthetic oligonucleotide
  Antisense strand to SEQ ID NO: 1077010
acuuuggagacuuugguaa

SEQ ID NO: 1077012 - RNA, 19 nt, Artificial Sequence
  Description of Artificial Sequence: Synthetic oligonucleotide
  Sense strand starting at position 940 of SEQ ID NO: 915400
ccuaauucagggugaagug

SEQ ID NO: 1077013 - RNA, 19 nt, Artificial Sequence
  Description of Artificial Sequence: Synthetic oligonucleotide
  Antisense strand to SEQ ID NO: 1077012
cacuucacccugaauuagg

SEQ ID NO: 1077014 - RNA, 19 nt, Artificial Sequence
  Description of Artificial Sequence: Synthetic oligonucleotide
  Sense strand starting at position 969 of SEQ ID NO: 915400
caagcagacguuuaaagua

SEQ ID NO: 1077015 - RNA, 19 nt, Artificial Sequence
  Description of Artificial Sequence: Synthetic oligonucleotide
  Antisense strand to SEQ ID NO: 1077014
uacuuuaaacgucugcuug

SEQ ID NO: 1077016 - RNA, 19 nt, Artificial Sequence
  Description of Artificial Sequence: Synthetic oligonucleotide
  Sense strand starting at position 1073 of SEQ ID NO: 915400
ccagauguuccauacauug

SEQ ID NO: 1077017 - RNA, 19 nt, Artificial Sequence
  Description of Artificial Sequence: Synthetic oligonucleotide
  Antisense strand to SEQ ID NO: 1077016
caauguauggaacaucugg

SEQ ID NO: 1077018 - RNA, 19 nt, Artificial Sequence
  Description of Artificial Sequence: Synthetic oligonucleotide
  Sense strand starting at position 1509 of SEQ ID NO: 915400
gcacuaugaucacuagaaa

SEQ ID NO: 1077019 - RNA, 19 nt, Artificial Sequence
  Description of Artificial Sequence: Synthetic oligonucleotide
  Antisense strand to SEQ ID NO: 1077018
uuucuagugaucauagugc

SEQ ID NO: 1077020 - RNA, 19 nt, Artificial Sequence
  Description of Artificial Sequence: Synthetic oligonucleotide
  Sense strand starting at position 1727 of SEQ ID NO: 915400
cggcgaguuuccaccgaga

SEQ ID NO: 1077021 - RNA, 19 nt, Artificial Sequence
  Description of Artificial Sequence: Synthetic oligonucleotide
  Antisense strand to SEQ ID NO: 1077020
ucucgguggaaacucgccg

SEQ ID NO: 1077022 - RNA, 19 nt, Artificial Sequence
  Description of Artificial Sequence: Synthetic oligonucleotide
  Sense strand starting at position 1740 of SEQ ID NO: 915400
ccgagagcuccagaaagua

SEQ ID NO: 1077023 - RNA, 19 nt, Artificial Sequence
  Description of Artificial Sequence: Synthetic oligonucleotide
  Antisense strand to SEQ ID NO: 1077022
uacuuucuggagcucucgg

SEQ ID NO: 1077024 - RNA, 19 nt, Artificial Sequence
  Description of Artificial Sequence: Synthetic oligonucleotide
  Sense strand starting at position 2051 of SEQ ID NO: 915400
ugggaaauguaguucugag

SEQ ID NO: 1077025 - RNA, 19 nt, Artificial Sequence
  Description of Artificial Sequence: Synthetic oligonucleotide
  Antisense strand to SEQ ID NO: 1077024
cucagaacuacauuuccca

SEQ ID NO: 1077026 - RNA, 19 nt, Artificial Sequence
  Description of Artificial Sequence: Synthetic oligonucleotide
  Sense strand starting at position 2080 of SEQ ID NO: 915400
ggugcuagaaucuaccuga

SEQ ID NO: 1077027 - RNA, 19 nt, Artificial Sequence
  Description of Artificial Sequence: Synthetic oligonucleotide
  Antisense strand to SEQ ID NO: 1077026
ucagguagauucuagcacc

SEQ ID NO: 1077028 - RNA, 19 nt, Artificial Sequence
  Description of Artificial Sequence: Synthetic oligonucleotide
  Sense strand starting at position 2083 of SEQ ID NO: 915400
gcuagaaucuaccugaggu

SEQ ID NO: 1077029 - RNA, 19 nt, Artificial Sequence
  Description of Artificial Sequence: Synthetic oligonucleotide
  Antisense strand to SEQ ID NO: 1077028
accucagguagauucuagc

SEQ ID NO: 1077030 - RNA, 19 nt, Artificial Sequence
  Description of Artificial Sequence: Synthetic oligonucleotide
  Sense strand starting at position 2434 of SEQ ID NO: 915400
gagagaucaugacugcagu

SEQ ID NO: 1077031 - RNA, 19 nt, Artificial Sequence
  Description of Artificial Sequence: Synthetic oligonucleotide
  Antisense strand to SEQ ID NO: 1077030
acugcagucaugaucucuc

SEQ ID NO: 1077032 - RNA, 19 nt, Artificial Sequence
  Description of Artificial Sequence: Synthetic oligonucleotide
  Sense strand starting at position 2435 of SEQ ID NO: 915400
agagaucaugacugcaguu

SEQ ID NO: 1077033 - RNA, 19 nt, Artificial Sequence
  Description of Artificial Sequence: Synthetic oligonucleotide
  Antisense strand to SEQ ID NO: 1077032
aacugcagucaugaucucu

SEQ ID NO: 1077034 - RNA, 19 nt, Artificial Sequence
  Description of Artificial Sequence: Synthetic oligonucleotide
  Sense strand starting at position 2570 of SEQ ID NO: 915400
uugagcggucauuaaauca

SEQ ID NO: 1077035 - RNA, 19 nt, Artificial Sequence
  Description of Artificial Sequence: Synthetic oligonucleotide
  Antisense strand to SEQ ID NO: 1077034
ugauuuaaugaccgcucaa

SEQ ID NO: 1077036 - RNA, 19 nt, Artificial Sequence
  Description of Artificial Sequence: Synthetic oligonucleotide
  Sense strand starting at position 2577 of SEQ ID NO: 915400
gucauuaaaucauuaguac

SEQ ID NO: 1077037 - RNA, 19 nt, Artificial Sequence
  Description of Artificial Sequence: Synthetic oligonucleotide
  Antisense strand to SEQ ID NO: 1077036
guacuaaugauuuaaugac

SEQ ID NO: 1077038 - RNA, 19 nt, Artificial Sequence
  Description of Artificial Sequence: Synthetic oligonucleotide
  Sense strand starting at position 2606 of SEQ ID NO: 915400
gggaucuauaccggauuau

SEQ ID NO: 1077039 - RNA, 19 nt, Artificial Sequence
  Description of Artificial Sequence: Synthetic oligonucleotide
  Antisense strand to SEQ ID NO: 1077038
auaauccgguauagauccc

SEQ ID NO: 1077040 - RNA, 19 nt, Artificial Sequence
  Description of Artificial Sequence: Synthetic oligonucleotide
  Sense strand starting at position 2610 of SEQ ID NO: 915400
ucuauaccggauuaugcaa

SEQ ID NO: 1077041 - RNA, 19 nt, Artificial Sequence
  Description of Artificial Sequence: Synthetic oligonucleotide
  Antisense strand to SEQ ID NO: 1077040
uugcauaauccgguauaga

SEQ ID NO: 1077042 - RNA, 19 nt, Artificial Sequence
  Description of Artificial Sequence: Synthetic oligonucleotide
  Sense strand starting at position 2644 of SEQ ID NO: 915400
agagguuauaccgaaaggu

SEQ ID NO: 1077043 - RNA, 19 nt, Artificial Sequence
  Description of Artificial Sequence: Synthetic oligonucleotide
  Antisense strand to SEQ ID NO: 1077042
accuuucgguauaaccucu

SEQ ID NO: 1077044 - RNA, 19 nt, Artificial Sequence
  Description of Artificial Sequence: Synthetic oligonucleotide
  Sense strand starting at position 2648 of SEQ ID NO: 915400
guuauaccgaaagguaaug

SEQ ID NO: 1077045 - RNA, 19 nt, Artificial Sequence
  Description of Artificial Sequence: Synthetic oligonucleotide
  Antisense strand to SEQ ID NO: 1077044
cauuaccuuucgguauaac

SEQ ID NO: 1077046 - RNA, 19 nt, Artificial Sequence
  Description of Artificial Sequence: Synthetic oligonucleotide
  Sense strand starting at position 2748 of SEQ ID NO: 915400
caguuagagcuugaacagu

SEQ ID NO: 1077047 - RNA, 19 nt, Artificial Sequence
  Description of Artificial Sequence: Synthetic oligonucleotide
  Antisense strand to SEQ ID NO: 1077046
acuguucaagcucuaacug

SEQ ID NO: 1077048 - RNA, 19 nt, Artificial Sequence
  Description of Artificial Sequence: Synthetic oligonucleotide
  Sense strand starting at position 3489 of SEQ ID NO: 915400
gcgggaaggguuuggaaga

SEQ ID NO: 1077049 - RNA, 19 nt, Artificial Sequence
  Description of Artificial Sequence: Synthetic oligonucleotide
  Antisense strand to SEQ ID NO: 1077048
ucuuccaaacccuucccgc

SEQ ID NO: 1077050 - RNA, 19 nt, Artificial Sequence
  Description of Artificial Sequence: Synthetic oligonucleotide
  Sense strand starting at position 3547 of SEQ ID NO: 915400
gcaagaccuuugguuagaa

SEQ ID NO: 1077051 - RNA, 19 nt, Artificial Sequence
  Description of Artificial Sequence: Synthetic oligonucleotide
  Antisense strand to SEQ ID NO: 1077050
uucuaaccaaaggucuugc

SEQ ID NO: 1077052 - RNA, 19 nt, Artificial Sequence
  Description of Artificial Sequence: Synthetic oligonucleotide
  Sense strand starting at position 3548 of SEQ ID NO: 915400
caagaccuuugguuagaaa

SEQ ID NO: 1077053 - RNA, 19 nt, Artificial Sequence
  Description of Artificial Sequence: Synthetic oligonucleotide
  Antisense strand to SEQ ID NO: 1077052
uuucuaaccaaaggucuug

SEQ ID NO: 1077054 - RNA, 19 nt, Artificial Sequence
  Description of Artificial Sequence: Synthetic oligonucleotide
  Sense strand starting at position 3777 of SEQ ID NO: 915400
acugcauguacagggaaua

SEQ ID NO: 1077055 - RNA, 19 nt, Artificial Sequence
  Description of Artificial Sequence: Synthetic oligonucleotide
  Antisense strand to SEQ ID NO: 1077054
uauucccuguacaugcagu

SEQ ID NO: 1077056 - RNA, 19 nt, Artificial Sequence
  Description of Artificial Sequence: Synthetic oligonucleotide
  Sense strand starting at position 3955 of SEQ ID NO: 915400
auccuaauauugguugaaa

SEQ ID NO: 1077057 - RNA, 19 nt, Artificial Sequence
  Description of Artificial Sequence: Synthetic oligonucleotide
  Antisense strand to SEQ ID NO: 1077056
uuucaaccaauauuaggau

SEQ ID NO: 1077058 - RNA, 19 nt, Artificial Sequence
  Description of Artificial Sequence: Synthetic oligonucleotide
  Sense strand starting at position 3956 of SEQ ID NO: 915400
uccuaauauugguugaaau

SEQ ID NO: 1077059 - RNA, 19 nt, Artificial Sequence
  Description of Artificial Sequence: Synthetic oligonucleotide
  Antisense strand to SEQ ID NO: 1077058
auuucaaccaauauuagga

SEQ ID NO: 1077060 - RNA, 19 nt, Artificial Sequence
  Description of Artificial Sequence: Synthetic oligonucleotide
  Sense strand starting at position 3957 of SEQ ID NO: 915400
ccuaauauugguugaaauu

SEQ ID NO: 1077061 - RNA, 19 nt, Artificial Sequence
  Description of Artificial Sequence: Synthetic oligonucleotide
  Antisense strand to SEQ ID NO: 1077060
aauuucaaccaauauuagg

SEQ ID NO: 1077062 - RNA, 19 nt, Artificial Sequence
  Description of Artificial Sequence: Synthetic oligonucleotide
  Sense strand starting at position 196 of SEQ ID NO: 915401
caggccauccagugugaga

SEQ ID NO: 1077063 - RNA, 19 nt, Artificial Sequence
  Description of Artificial Sequence: Synthetic oligonucleotide
  Antisense strand to SEQ ID NO: 1077062
ucucacacuggauggccug

SEQ ID NO: 1077064 - RNA, 19 nt, Artificial Sequence
  Description of Artificial Sequence: Synthetic oligonucleotide
  Sense strand starting at position 499 of SEQ ID NO: 915401
gccagacuguucccucgau

SEQ ID NO: 1077065 - RNA, 19 nt, Artificial Sequence
  Description of Artificial Sequence: Synthetic oligonucleotide
  Antisense strand to SEQ ID NO: 1077064
aucgagggaacagucuggc

SEQ ID NO: 1077066 - RNA, 19 nt, Artificial Sequence
  Description of Artificial Sequence: Synthetic oligonucleotide
  Sense strand starting at position 500 of SEQ ID NO: 915401
ccagacuguucccucgaua

SEQ ID NO: 1077067 - RNA, 19 nt, Artificial Sequence
  Description of Artificial Sequence: Synthetic oligonucleotide
  Antisense strand to SEQ ID NO: 1077066
uaucgagggaacagucugg

SEQ ID NO: 1077068 - RNA, 19 nt, Artificial Sequence
  Description of Artificial Sequence: Synthetic oligonucleotide
  Sense strand starting at position 503 of SEQ ID NO: 915401
gacuguucccucgauaaca

SEQ ID NO: 1077069 - RNA, 19 nt, Artificial Sequence
  Description of Artificial Sequence: Synthetic oligonucleotide
  Antisense strand to SEQ ID NO: 1077068
uguuaucgagggaacaguc

SEQ ID NO: 1077070 - RNA, 19 nt, Artificial Sequence
  Description of Artificial Sequence: Synthetic oligonucleotide
  Sense strand starting at position 505 of SEQ ID NO: 915401
cuguucccucgauaacaaa

SEQ ID NO: 1077071 - RNA, 19 nt, Artificial Sequence
  Description of Artificial Sequence: Synthetic oligonucleotide
  Antisense strand to SEQ ID NO: 1077070
uuuguuaucgagggaacag

SEQ ID NO: 1077072 - RNA, 19 nt, Artificial Sequence
  Description of Artificial Sequence: Synthetic oligonucleotide
  Sense strand starting at position 588 of SEQ ID NO: 915401
aggagauggucucuguaca

SEQ ID NO: 1077073 - RNA, 19 nt, Artificial Sequence
  Description of Artificial Sequence: Synthetic oligonucleotide
  Antisense strand to SEQ ID NO: 1077072
uguacagagaccaucuccu

SEQ ID NO: 1077074 - RNA, 19 nt, Artificial Sequence
  Description of Artificial Sequence: Synthetic oligonucleotide
  Sense strand starting at position 589 of SEQ ID NO: 915401
ggagauggucucuguacac

SEQ ID NO: 1077075 - RNA, 19 nt, Artificial Sequence
  Description of Artificial Sequence: Synthetic oligonucleotide
  Antisense strand to SEQ ID NO: 1077074
guguacagagaccaucucc

SEQ ID NO: 1077076 - RNA, 19 nt, Artificial Sequence
  Description of Artificial Sequence: Synthetic oligonucleotide
  Sense strand starting at position 706 of SEQ ID NO: 915401
ucugguuucuacccagaga

SEQ ID NO: 1077077 - RNA, 19 nt, Artificial Sequence
  Description of Artificial Sequence: Synthetic oligonucleotide
  Antisense strand to SEQ ID NO: 1077076
ucucuggguagaaaccaga

SEQ ID NO: 1077078 - RNA, 19 nt, Artificial Sequence
  Description of Artificial Sequence: Synthetic oligonucleotide
  Sense strand starting at position 709 of SEQ ID NO: 915401
gguuucuacccagagagcu

SEQ ID NO: 1077079 - RNA, 19 nt, Artificial Sequence
  Description of Artificial Sequence: Synthetic oligonucleotide
  Antisense strand to SEQ ID NO: 1077078
agcucucuggguagaaacc

SEQ ID NO: 1077080 - RNA, 19 nt, Artificial Sequence
  Description of Artificial Sequence: Synthetic oligonucleotide
  Sense strand starting at position 1266 of SEQ ID NO: 915401
uccugagccgucuggcaaa

SEQ ID NO: 1077081 - RNA, 19 nt, Artificial Sequence
  Description of Artificial Sequence: Synthetic oligonucleotide
  Antisense strand to SEQ ID NO: 1077080
uuugccagacggcucagga

SEQ ID NO: 1077082 - RNA, 19 nt, Artificial Sequence
  Description of Artificial Sequence: Synthetic oligonucleotide
  Sense strand starting at position 1383 of SEQ ID NO: 915401
cggugauuacggugauuau

SEQ ID NO: 1077083 - RNA, 19 nt, Artificial Sequence
  Description of Artificial Sequence: Synthetic oligonucleotide
  Antisense strand to SEQ ID NO: 1077082
auaaucaccguaaucaccg

SEQ ID NO: 1077084 - RNA, 19 nt, Artificial Sequence
  Description of Artificial Sequence: Synthetic oligonucleotide
  Sense strand starting at position 1384 of SEQ ID NO: 915401
ggugauuacggugauuauu

SEQ ID NO: 1077085 - RNA, 19 nt, Artificial Sequence
  Description of Artificial Sequence: Synthetic oligonucleotide
  Antisense strand to SEQ ID NO: 1077084
aauaaucaccguaaucacc

SEQ ID NO: 1077086 - RNA, 19 nt, Artificial Sequence
  Description of Artificial Sequence: Synthetic oligonucleotide
  Sense strand starting at position 1409 of SEQ ID NO: 915401
uuauguaacacgcaguguu

SEQ ID NO: 1077087 - RNA, 19 nt, Artificial Sequence
  Description of Artificial Sequence: Synthetic oligonucleotide
  Antisense strand to SEQ ID NO: 1077086
aacacugcguguuacauaa

SEQ ID NO: 1077088 - RNA, 19 nt, Artificial Sequence
  Description of Artificial Sequence: Synthetic oligonucleotide
  Sense strand starting at position 1417 of SEQ ID NO: 915401
cacgcaguguuuccaaacu

SEQ ID NO: 1077089 - RNA, 19 nt, Artificial Sequence
  Description of Artificial Sequence: Synthetic oligonucleotide
  Antisense strand to SEQ ID NO: 1077088
aguuuggaaacacugcgug

SEQ ID NO: 1077090 - RNA, 19 nt, Artificial Sequence
  Description of Artificial Sequence: Synthetic oligonucleotide
  Sense strand starting at position 1442 of SEQ ID NO: 915401
cgagcagagagcugguuau

SEQ ID NO: 1077091 - RNA, 19 nt, Artificial Sequence
  Description of Artificial Sequence: Synthetic oligonucleotide
  Antisense strand to SEQ ID NO: 1077090
auaaccagcucucugcucg

SEQ ID NO: 1077092 - RNA, 19 nt, Artificial Sequence
  Description of Artificial Sequence: Synthetic oligonucleotide
  Sense strand starting at position 1449 of SEQ ID NO: 915401
agagcugguuauuaaauaa

SEQ ID NO: 1077093 - RNA, 19 nt, Artificial Sequence
  Description of Artificial Sequence: Synthetic oligonucleotide
  Antisense strand to SEQ ID NO: 1077092
uuauuuaauaaccagcucu

SEQ ID NO: 1077094 - RNA, 19 nt, Artificial Sequence
  Description of Artificial Sequence: Synthetic oligonucleotide
  Sense strand starting at position 1511 of SEQ ID NO: 915401
cggagaaagugcuuucaug

SEQ ID NO: 1077095 - RNA, 19 nt, Artificial Sequence
  Description of Artificial Sequence: Synthetic oligonucleotide
  Antisense strand to SEQ ID NO: 1077094
caugaaagcacuuucuccg

SEQ ID NO: 1077096 - RNA, 19 nt, Artificial Sequence
  Description of Artificial Sequence: Synthetic oligonucleotide
  Sense strand starting at position 1741 of SEQ ID NO: 915401
cgcucuuaccugggaggaa

SEQ ID NO: 1077097 - RNA, 19 nt, Artificial Sequence
  Description of Artificial Sequence: Synthetic oligonucleotide
  Antisense strand to SEQ ID NO: 1077096
uuccucccagguaagagcg

SEQ ID NO: 1077098 - RNA, 19 nt, Artificial Sequence
  Description of Artificial Sequence: Synthetic oligonucleotide
  Sense strand starting at position 2425 of SEQ ID NO: 915401
gccggcgauccgcaacaau

SEQ ID NO: 1077099 - RNA, 19 nt, Artificial Sequence
  Description of Artificial Sequence: Synthetic oligonucleotide
  Antisense strand to SEQ ID NO: 1077098
auuguugcggaucgccggc

SEQ ID NO: 1077100 - RNA, 19 nt, Artificial Sequence
  Description of Artificial Sequence: Synthetic oligonucleotide
  Sense strand starting at position 3206 of SEQ ID NO: 915401
gcccaaacauagccugaaa

SEQ ID NO: 1077101 - RNA, 19 nt, Artificial Sequence
  Description of Artificial Sequence: Synthetic oligonucleotide
  Antisense strand to SEQ ID NO: 1077100
uuucaggcuauguuugggc

SEQ ID NO: 1077102 - RNA, 19 nt, Artificial Sequence
  Description of Artificial Sequence: Synthetic oligonucleotide
  Sense strand starting at position 3236 of SEQ ID NO: 915401
uccaguuuccaggaccuua

SEQ ID NO: 1077103 - RNA, 19 nt, Artificial Sequence
  Description of Artificial Sequence: Synthetic oligonucleotide
  Antisense strand to SEQ ID NO: 1077102
uaagguccuggaaacugga

SEQ ID NO: 1077104 - RNA, 19 nt, Artificial Sequence
  Description of Artificial Sequence: Synthetic oligonucleotide
  Sense strand starting at position 3258 of SEQ ID NO: 915401
uugagagauuugugggauu

SEQ ID NO: 1077105 - RNA, 19 nt, Artificial Sequence
  Description of Artificial Sequence: Synthetic oligonucleotide
  Antisense strand to SEQ ID NO: 1077104
aaucccacaaaucucucaa

SEQ ID NO: 1077106 - RNA, 19 nt, Artificial Sequence
  Description of Artificial Sequence: Synthetic oligonucleotide
  Sense strand starting at position 3269 of SEQ ID NO: 915401
gugggauucccgcgaaagu

SEQ ID NO: 1077107 - RNA, 19 nt, Artificial Sequence
  Description of Artificial Sequence: Synthetic oligonucleotide
  Antisense strand to SEQ ID NO: 1077106
acuuucgcgggaaucccac

SEQ ID NO: 1077108 - RNA, 19 nt, Artificial Sequence
  Description of Artificial Sequence: Synthetic oligonucleotide
  Sense strand starting at position 3270 of SEQ ID NO: 915401
ugggauucccgcgaaagug

SEQ ID NO: 1077109 - RNA, 19 nt, Artificial Sequence
  Description of Artificial Sequence: Synthetic oligonucleotide
  Antisense strand to SEQ ID NO: 1077108
cacuuucgcgggaauccca

SEQ ID NO: 1077110 - RNA, 19 nt, Artificial Sequence
  Description of Artificial Sequence: Synthetic oligonucleotide
  Sense strand starting at position 3350 of SEQ ID NO: 915401
acuacauccggguguggua

SEQ ID NO: 1077111 - RNA, 19 nt, Artificial Sequence
  Description of Artificial Sequence: Synthetic oligonucleotide
  Antisense strand to SEQ ID NO: 1077110
uaccacacccggauguagu

SEQ ID NO: 1077112 - RNA, 19 nt, Artificial Sequence
  Description of Artificial Sequence: Synthetic oligonucleotide
  Sense strand starting at position 3465 of SEQ ID NO: 915401
gacagaguuucccacuaag

SEQ ID NO: 1077113 - RNA, 19 nt, Artificial Sequence
  Description of Artificial Sequence: Synthetic oligonucleotide
  Antisense strand to SEQ ID NO: 1077112
cuuagugggaaacucuguc

SEQ ID NO: 1077114 - RNA, 19 nt, Artificial Sequence
  Description of Artificial Sequence: Synthetic oligonucleotide
  Sense strand starting at position 3567 of SEQ ID NO: 915401
ggaaguggcuguuucugau

SEQ ID NO: 1077115 - RNA, 19 nt, Artificial Sequence
  Description of Artificial Sequence: Synthetic oligonucleotide
  Antisense strand to SEQ ID NO: 1077114
aucagaaacagccacuucc

SEQ ID NO: 1077116 - RNA, 19 nt, Artificial Sequence
  Description of Artificial Sequence: Synthetic oligonucleotide
  Sense strand starting at position 3590 of SEQ ID NO: 915401
cguaaauucugguuccuca

SEQ ID NO: 1077117 - RNA, 19 nt, Artificial Sequence
  Description of Artificial Sequence: Synthetic oligonucleotide
  Antisense strand to SEQ ID NO: 1077116
ugaggaaccagaauuuacg

SEQ ID NO: 1077118 - RNA, 19 nt, Artificial Sequence
  Description of Artificial Sequence: Synthetic oligonucleotide
  Sense strand starting at position 3597 of SEQ ID NO: 915401
ucugguuccucacuggaga

SEQ ID NO: 1077119 - RNA, 19 nt, Artificial Sequence
  Description of Artificial Sequence: Synthetic oligonucleotide
  Antisense strand to SEQ ID NO: 1077118
ucuccagugaggaaccaga

SEQ ID NO: 1077120 - RNA, 19 nt, Artificial Sequence
  Description of Artificial Sequence: Synthetic oligonucleotide
  Sense strand starting at position 3598 of SEQ ID NO: 915401
cugguuccucacuggagaa

SEQ ID NO: 1077121 - RNA, 19 nt, Artificial Sequence
  Description of Artificial Sequence: Synthetic oligonucleotide
  Antisense strand to SEQ ID NO: 1077120
uucuccagugaggaaccag

SEQ ID NO: 1077122 - RNA, 19 nt, Artificial Sequence
  Description of Artificial Sequence: Synthetic oligonucleotide
  Sense strand starting at position 3672 of SEQ ID NO: 915401
gguuucucgcggaaguagu

SEQ ID NO: 1077123 - RNA, 19 nt, Artificial Sequence
  Description of Artificial Sequence: Synthetic oligonucleotide
  Antisense strand to SEQ ID NO: 1077122
acuacuuccgcgagaaacc

SEQ ID NO: 1077124 - RNA, 19 nt, Artificial Sequence
  Description of Artificial Sequence: Synthetic oligonucleotide
  Sense strand starting at position 3679 of SEQ ID NO: 915401
cgcggaaguagucagaucu

SEQ ID NO: 1077125 - RNA, 19 nt, Artificial Sequence
  Description of Artificial Sequence: Synthetic oligonucleotide
  Antisense strand to SEQ ID NO: 1077124
agaucugacuacuuccgcg

SEQ ID NO: 1077126 - RNA, 19 nt, Artificial Sequence
  Description of Artificial Sequence: Synthetic oligonucleotide
  Sense strand starting at position 3685 of SEQ ID NO: 915401
aguagucagaucuggcauu

SEQ ID NO: 1077127 - RNA, 19 nt, Artificial Sequence
  Description of Artificial Sequence: Synthetic oligonucleotide
  Antisense strand to SEQ ID NO: 1077126
aaugccagaucugacuacu

SEQ ID NO: 1077128 - RNA, 19 nt, Artificial Sequence
  Description of Artificial Sequence: Synthetic oligonucleotide
  Sense strand starting at position 3697 of SEQ ID NO: 915401
uggcauugucaugaacacu

SEQ ID NO: 1077129 - RNA, 19 nt, Artificial Sequence
  Description of Artificial Sequence: Synthetic oligonucleotide
  Antisense strand to SEQ ID NO: 1077128
aguguucaugacaaugcca

SEQ ID NO: 1077130 - RNA, 19 nt, Artificial Sequence
  Description of Artificial Sequence: Synthetic oligonucleotide
  Sense strand starting at position 3758 of SEQ ID NO: 915401
cugggcuuucuuuguguca

SEQ ID NO: 1077131 - RNA, 19 nt, Artificial Sequence
  Description of Artificial Sequence: Synthetic oligonucleotide
  Antisense strand to SEQ ID NO: 1077130
ugacacaaagaaagcccag

SEQ ID NO: 1077132 - RNA, 19 nt, Artificial Sequence
  Description of Artificial Sequence: Synthetic oligonucleotide
  Sense strand starting at position 3759 of SEQ ID NO: 915401
ugggcuuucuuugugucaa

SEQ ID NO: 1077133 - RNA, 19 nt, Artificial Sequence
  Description of Artificial Sequence: Synthetic oligonucleotide
  Antisense strand to SEQ ID NO: 1077132
uugacacaaagaaagccca

SEQ ID NO: 1077134 - RNA, 19 nt, Artificial Sequence
  Description of Artificial Sequence: Synthetic oligonucleotide
  Sense strand starting at position 3862 of SEQ ID NO: 915401
cauagaaacggaugucgua

SEQ ID NO: 1077135 - RNA, 19 nt, Artificial Sequence
  Description of Artificial Sequence: Synthetic oligonucleotide
  Antisense strand to SEQ ID NO: 1077134
uacgacauccguuucuaug

SEQ ID NO: 1077136 - RNA, 19 nt, Artificial Sequence
  Description of Artificial Sequence: Synthetic oligonucleotide
  Sense strand starting at position 3871 of SEQ ID NO: 915401
ggaugucguaaacaaauau

SEQ ID NO: 1077137 - RNA, 19 nt, Artificial Sequence
  Description of Artificial Sequence: Synthetic oligonucleotide
  Antisense strand to SEQ ID NO: 1077136
auauuuguuuacgacaucc

SEQ ID NO: 1077138 - RNA, 19 nt, Artificial Sequence
  Description of Artificial Sequence: Synthetic oligonucleotide
  Sense strand starting at position 3905 of SEQ ID NO: 915401
guggguuuggugggucaca

SEQ ID NO: 1077139 - RNA, 19 nt, Artificial Sequence
  Description of Artificial Sequence: Synthetic oligonucleotide
  Antisense strand to SEQ ID NO: 1077138
ugugacccaccaaacccac

SEQ ID NO: 1077140 - RNA, 19 nt, Artificial Sequence
  Description of Artificial Sequence: Synthetic oligonucleotide
  Sense strand starting at position 3958 of SEQ ID NO: 915401
guguaaaggcuucagggaa

SEQ ID NO: 1077141 - RNA, 19 nt, Artificial Sequence
  Description of Artificial Sequence: Synthetic oligonucleotide
  Antisense strand to SEQ ID NO: 1077140
uucccugaagccuuuacac

SEQ ID NO: 1077142 - RNA, 19 nt, Artificial Sequence
  Description of Artificial Sequence: Synthetic oligonucleotide
  Sense strand starting at position 172 of SEQ ID NO: 915402
uccucugacuuuggacaaa

SEQ ID NO: 1077143 - RNA, 19 nt, Artificial Sequence
  Description of Artificial Sequence: Synthetic oligonucleotide
  Antisense strand to SEQ ID NO: 1077142
uuuguccaaagucagagga

SEQ ID NO: 1077144 - RNA, 19 nt, Artificial Sequence
  Description of Artificial Sequence: Synthetic oligonucleotide
  Sense strand starting at position 210 of SEQ ID NO: 915402
ucuccucaucugggaaaua

SEQ ID NO: 1077145 - RNA, 19 nt, Artificial Sequence
  Description of Artificial Sequence: Synthetic oligonucleotide
  Antisense strand to SEQ ID NO: 1077144
uauuucccagaugaggaga

SEQ ID NO: 1077146 - RNA, 19 nt, Artificial Sequence
  Description of Artificial Sequence: Synthetic oligonucleotide
  Sense strand starting at position 221 of SEQ ID NO: 915402
gggaaauagcgcuggccau

SEQ ID NO: 1077147 - RNA, 19 nt, Artificial Sequence
  Description of Artificial Sequence: Synthetic oligonucleotide
  Antisense strand to SEQ ID NO: 1077146
auggccagcgcuauuuccc

SEQ ID NO: 1077148 - RNA, 19 nt, Artificial Sequence
  Description of Artificial Sequence: Synthetic oligonucleotide
  Sense strand starting at position 222 of SEQ ID NO: 915402
ggaaauagcgcuggccaua

SEQ ID NO: 1077149 - RNA, 19 nt, Artificial Sequence
  Description of Artificial Sequence: Synthetic oligonucleotide
  Antisense strand to SEQ ID NO: 1077148
uauggccagcgcuauuucc

SEQ ID NO: 1077150 - RNA, 19 nt, Artificial Sequence
  Description of Artificial Sequence: Synthetic oligonucleotide
  Sense strand starting at position 776 of SEQ ID NO: 915402
ccagguuucucccucagau

SEQ ID NO: 1077151 - RNA, 19 nt, Artificial Sequence
  Description of Artificial Sequence: Synthetic oligonucleotide
  Antisense strand to SEQ ID NO: 1077150
aucugagggagaaaccugg

SEQ ID NO: 1077152 - RNA, 19 nt, Artificial Sequence
  Description of Artificial Sequence: Synthetic oligonucleotide
  Sense strand starting at position 778 of SEQ ID NO: 915402
agguuucucccucagauug

SEQ ID NO: 1077153 - RNA, 19 nt, Artificial Sequence
  Description of Artificial Sequence: Synthetic oligonucleotide
  Antisense strand to SEQ ID NO: 1077152
caaucugagggagaaaccu

SEQ ID NO: 1077154 - RNA, 19 nt, Artificial Sequence
  Description of Artificial Sequence: Synthetic oligonucleotide
  Sense strand starting at position 945 of SEQ ID NO: 915402
ggguccuucucauaguagu

SEQ ID NO: 1077155 - RNA, 19 nt, Artificial Sequence
  Description of Artificial Sequence: Synthetic oligonucleotide
  Antisense strand to SEQ ID NO: 1077154
acuacuaugagaaggaccc

SEQ ID NO: 1077156 - RNA, 19 nt, Artificial Sequence
  Description of Artificial Sequence: Synthetic oligonucleotide
  Sense strand starting at position 1006 of SEQ ID NO: 915402
cgguaugggccagagcaaa

SEQ ID NO: 1077157 - RNA, 19 nt, Artificial Sequence
  Description of Artificial Sequence: Synthetic oligonucleotide
  Antisense strand to SEQ ID NO: 1077156
uuugcucuggcccauaccg

SEQ ID NO: 1077158 - RNA, 19 nt, Artificial Sequence
  Description of Artificial Sequence: Synthetic oligonucleotide
  Sense strand starting at position 1044 of SEQ ID NO: 915402
gccacauugcgguccuuua

SEQ ID NO: 1077159 - RNA, 19 nt, Artificial Sequence
  Description of Artificial Sequence: Synthetic oligonucleotide
  Antisense strand to SEQ ID NO: 1077158
uaaaggaccgcaauguggc

SEQ ID NO: 1077160 - RNA, 19 nt, Artificial Sequence
  Description of Artificial Sequence: Synthetic oligonucleotide
  Sense strand starting at position 1055 of SEQ ID NO: 915402
guccuuuacgagugugaaa

SEQ ID NO: 1077161 - RNA, 19 nt, Artificial Sequence
  Description of Artificial Sequence: Synthetic oligonucleotide
  Antisense strand to SEQ ID NO: 1077160
uuucacacucguaaaggac

SEQ ID NO: 1077162 - RNA, 19 nt, Artificial Sequence
  Description of Artificial Sequence: Synthetic oligonucleotide
  Sense strand starting at position 1057 of SEQ ID NO: 915402
ccuuuacgagugugaaaug

SEQ ID NO: 1077163 - RNA, 19 nt, Artificial Sequence
  Description of Artificial Sequence: Synthetic oligonucleotide
  Antisense strand to SEQ ID NO: 1077162
cauuucacacucguaaagg

SEQ ID NO: 1077164 - RNA, 19 nt, Artificial Sequence
  Description of Artificial Sequence: Synthetic oligonucleotide
  Sense strand starting at position 1685 of SEQ ID NO: 915402
acuggaugucuuugagaaa

SEQ ID NO: 1077165 - RNA, 19 nt, Artificial Sequence
  Description of Artificial Sequence: Synthetic oligonucleotide
  Antisense strand to SEQ ID NO: 1077164
uuucucaaagacauccagu

SEQ ID NO: 1077166 - RNA, 19 nt, Artificial Sequence
  Description of Artificial Sequence: Synthetic oligonucleotide
  Sense strand starting at position 1686 of SEQ ID NO: 915402
cuggaugucuuugagaaag

SEQ ID NO: 1077167 - RNA, 19 nt, Artificial Sequence
  Description of Artificial Sequence: Synthetic oligonucleotide
  Antisense strand to SEQ ID NO: 1077166
cuuucucaaagacauccag

SEQ ID NO: 1077168 - RNA, 19 nt, Artificial Sequence
  Description of Artificial Sequence: Synthetic oligonucleotide
  Sense strand starting at position 1851 of SEQ ID NO: 915402
gagggaugcucagguuacu

SEQ ID NO: 1077169 - RNA, 19 nt, Artificial Sequence
  Description of Artificial Sequence: Synthetic oligonucleotide
  Antisense strand to SEQ ID NO: 1077168
aguaaccugagcaucccuc

SEQ ID NO: 1077170 - RNA, 19 nt, Artificial Sequence
  Description of Artificial Sequence: Synthetic oligonucleotide
  Sense strand starting at position 1913 of SEQ ID NO: 915402
ugggaacuguaguccuaua

SEQ ID NO: 1077171 - RNA, 19 nt, Artificial Sequence
  Description of Artificial Sequence: Synthetic oligonucleotide
  Antisense strand to SEQ ID NO: 1077170
uauaggacuacaguuccca

SEQ ID NO: 1077172 - RNA, 19 nt, Artificial Sequence
  Description of Artificial Sequence: Synthetic oligonucleotide
  Sense strand starting at position 1970 of SEQ ID NO: 915402
ccaucaucauacugguuua

SEQ ID NO: 1077173 - RNA, 19 nt, Artificial Sequence
  Description of Artificial Sequence: Synthetic oligonucleotide
  Antisense strand to SEQ ID NO: 1077172
uaaaccaguaugaugaugg

SEQ ID NO: 1077174 - RNA, 19 nt, Artificial Sequence
  Description of Artificial Sequence: Synthetic oligonucleotide
  Sense strand starting at position 1973 of SEQ ID NO: 915402
ucaucauacugguuuaaug

SEQ ID NO: 1077175 - RNA, 19 nt, Artificial Sequence
  Description of Artificial Sequence: Synthetic oligonucleotide
  Antisense strand to SEQ ID NO: 1077174
cauuaaaccaguaugauga

SEQ ID NO: 1077176 - RNA, 19 nt, Artificial Sequence
  Description of Artificial Sequence: Synthetic oligonucleotide
  Sense strand starting at position 1984 of SEQ ID NO: 915402
guuuaaugacaguaaguuc

SEQ ID NO: 1077177 - RNA, 19 nt, Artificial Sequence
  Description of Artificial Sequence: Synthetic oligonucleotide
  Antisense strand to SEQ ID NO: 1077176
gaacuuacugucauuaaac

SEQ ID NO: 1077178 - RNA, 19 nt, Artificial Sequence
  Description of Artificial Sequence: Synthetic oligonucleotide
  Sense strand starting at position 1991 of SEQ ID NO: 915402
gacaguaaguucucccugu

SEQ ID NO: 1077179 - RNA, 19 nt, Artificial Sequence
  Description of Artificial Sequence: Synthetic oligonucleotide
  Antisense strand to SEQ ID NO: 1077178
acagggagaacuuacuguc

SEQ ID NO: 1077180 - RNA, 19 nt, Artificial Sequence
  Description of Artificial Sequence: Synthetic oligonucleotide
  Sense strand starting at position 1995 of SEQ ID NO: 915402
guaaguucucccugugauu

SEQ ID NO: 1077181 - RNA, 19 nt, Artificial Sequence
  Description of Artificial Sequence: Synthetic oligonucleotide
  Antisense strand to SEQ ID NO: 1077180
aaucacagggagaacuuac

SEQ ID NO: 1077182 - RNA, 19 nt, Artificial Sequence
  Description of Artificial Sequence: Synthetic oligonucleotide
  Sense strand starting at position 2006 of SEQ ID NO: 915402
cugugauuccacugcuuag

SEQ ID NO: 1077183 - RNA, 19 nt, Artificial Sequence
  Description of Artificial Sequence: Synthetic oligonucleotide
  Antisense strand to SEQ ID NO: 1077182
cuaagcaguggaaucacag

SEQ ID NO: 1077184 - RNA, 19 nt, Artificial Sequence
  Description of Artificial Sequence: Synthetic oligonucleotide
  Sense strand starting at position 2009 of SEQ ID NO: 915402
ugauuccacugcuuaggaa

SEQ ID NO: 1077185 - RNA, 19 nt, Artificial Sequence
  Description of Artificial Sequence: Synthetic oligonucleotide
  Antisense strand to SEQ ID NO: 1077184
uuccuaagcaguggaauca

SEQ ID NO: 1077186 - RNA, 19 nt, Artificial Sequence
  Description of Artificial Sequence: Synthetic oligonucleotide
  Sense strand starting at position 2069 of SEQ ID NO: 915402
ccacacucugagcaggauu

SEQ ID NO: 1077187 - RNA, 19 nt, Artificial Sequence
  Description of Artificial Sequence: Synthetic oligonucleotide
  Antisense strand to SEQ ID NO: 1077186
aauccugcucagagugugg

SEQ ID NO: 1077188 - RNA, 19 nt, Artificial Sequence
  Description of Artificial Sequence: Synthetic oligonucleotide
  Sense strand starting at position 2383 of SEQ ID NO: 915402
ggauccugcuguucuuuaa

SEQ ID NO: 1077189 - RNA, 19 nt, Artificial Sequence
  Description of Artificial Sequence: Synthetic oligonucleotide
  Antisense strand to SEQ ID NO: 1077188
uuaaagaacagcaggaucc

SEQ ID NO: 1077190 - RNA, 19 nt, Artificial Sequence
  Description of Artificial Sequence: Synthetic oligonucleotide
  Sense strand starting at position 2387 of SEQ ID NO: 915402
ccugcuguucuuuaagaga

SEQ ID NO: 1077191 - RNA, 19 nt, Artificial Sequence
  Description of Artificial Sequence: Synthetic oligonucleotide
  Antisense strand to SEQ ID NO: 1077190
ucucuuaaagaacagcagg

SEQ ID NO: 1077192 - RNA, 19 nt, Artificial Sequence
  Description of Artificial Sequence: Synthetic oligonucleotide
  Sense strand starting at position 2390 of SEQ ID NO: 915402
gcuguucuuuaagagaaag

SEQ ID NO: 1077193 - RNA, 19 nt, Artificial Sequence
  Description of Artificial Sequence: Synthetic oligonucleotide
  Antisense strand to SEQ ID NO: 1077192
cuuucucuuaaagaacagc

SEQ ID NO: 1077194 - RNA, 19 nt, Artificial Sequence
  Description of Artificial Sequence: Synthetic oligonucleotide
  Sense strand starting at position 2531 of SEQ ID NO: 915402
gcaggauacuauugagagc

SEQ ID NO: 1077195 - RNA, 19 nt, Artificial Sequence
  Description of Artificial Sequence: Synthetic oligonucleotide
  Antisense strand to SEQ ID NO: 1077194
gcucucaauaguauccugc

SEQ ID NO: 1077196 - RNA, 19 nt, Artificial Sequence
  Description of Artificial Sequence: Synthetic oligonucleotide
  Sense strand starting at position 2545 of SEQ ID NO: 915402
agagccugguucggagaaa

SEQ ID NO: 1077197 - RNA, 19 nt, Artificial Sequence
  Description of Artificial Sequence: Synthetic oligonucleotide
  Antisense strand to SEQ ID NO: 1077196
uuucuccgaaccaggcucu

SEQ ID NO: 1077198 - RNA, 19 nt, Artificial Sequence
  Description of Artificial Sequence: Synthetic oligonucleotide
  Sense strand starting at position 2546 of SEQ ID NO: 915402
gagccugguucggagaaag

SEQ ID NO: 1077199 - RNA, 19 nt, Artificial Sequence
  Description of Artificial Sequence: Synthetic oligonucleotide
  Antisense strand to SEQ ID NO: 1077198
cuuucuccgaaccaggcuc

SEQ ID NO: 1077200 - RNA, 19 nt, Artificial Sequence
  Description of Artificial Sequence: Synthetic oligonucleotide
  Sense strand starting at position 2566 of SEQ ID NO: 915402
caagcuguuucugagaacu

SEQ ID NO: 1077201 - RNA, 19 nt, Artificial Sequence
  Description of Artificial Sequence: Synthetic oligonucleotide
  Antisense strand to SEQ ID NO: 1077200
aguucucagaaacagcuug

SEQ ID NO: 1077202 - RNA, 19 nt, Artificial Sequence
  Description of Artificial Sequence: Synthetic oligonucleotide
  Sense strand starting at position 2568 of SEQ ID NO: 915402
agcuguuucugagaacuuu

SEQ ID NO: 1077203 - RNA, 19 nt, Artificial Sequence
  Description of Artificial Sequence: Synthetic oligonucleotide
  Antisense strand to SEQ ID NO: 1077202
aaaguucucagaaacagcu

SEQ ID NO: 1077204 - RNA, 19 nt, Artificial Sequence
  Description of Artificial Sequence: Synthetic oligonucleotide
  Sense strand starting at position 2885 of SEQ ID NO: 915402
cgaucacuuucugagccau

SEQ ID NO: 1077205 - RNA, 19 nt, Artificial Sequence
  Description of Artificial Sequence: Synthetic oligonucleotide
  Antisense strand to SEQ ID NO: 1077204
auggcucagaaagugaucg

SEQ ID NO: 1077206 - RNA, 19 nt, Artificial Sequence
  Description of Artificial Sequence: Synthetic oligonucleotide
  Sense strand starting at position 2891 of SEQ ID NO: 915402
cuuucugagccauggcaga

SEQ ID NO: 1077207 - RNA, 19 nt, Artificial Sequence
  Description of Artificial Sequence: Synthetic oligonucleotide
  Antisense strand to SEQ ID NO: 1077206
ucugccauggcucagaaag

SEQ ID NO: 1077208 - RNA, 19 nt, Artificial Sequence
  Description of Artificial Sequence: Synthetic oligonucleotide
  Sense strand starting at position 2932 of SEQ ID NO: 915402
uaguaugugggccaaacuu

SEQ ID NO: 1077209 - RNA, 19 nt, Artificial Sequence
  Description of Artificial Sequence: Synthetic oligonucleotide
  Antisense strand to SEQ ID NO: 1077208
aaguuuggcccacauacua

SEQ ID NO: 1077210 - RNA, 19 nt, Artificial Sequence
  Description of Artificial Sequence: Synthetic oligonucleotide
  Sense strand starting at position 3635 of SEQ ID NO: 915402
ggaggguugcugugaguag

SEQ ID NO: 1077211 - RNA, 19 nt, Artificial Sequence
  Description of Artificial Sequence: Synthetic oligonucleotide
  Antisense strand to SEQ ID NO: 1077210
cuacucacagcaacccucc

SEQ ID NO: 1077212 - RNA, 19 nt, Artificial Sequence
  Description of Artificial Sequence: Synthetic oligonucleotide
  Sense strand starting at position 3636 of SEQ ID NO: 915402
gaggguugcugugaguaga

SEQ ID NO: 1077213 - RNA, 19 nt, Artificial Sequence
  Description of Artificial Sequence: Synthetic oligonucleotide
  Antisense strand to SEQ ID NO: 1077212
ucuacucacagcaacccuc

SEQ ID NO: 1077214 - RNA, 19 nt, Artificial Sequence
  Description of Artificial Sequence: Synthetic oligonucleotide
  Sense strand starting at position 3646 of SEQ ID NO: 915402
gugaguagagcugagacuu

SEQ ID NO: 1077215 - RNA, 19 nt, Artificial Sequence
  Description of Artificial Sequence: Synthetic oligonucleotide
  Antisense strand to SEQ ID NO: 1077214
aagucucagcucuacucac

SEQ ID NO: 1077216 - RNA, 19 nt, Artificial Sequence
  Description of Artificial Sequence: Synthetic oligonucleotide
  Sense strand starting at position 3658 of SEQ ID NO: 915402
gagacuucuuggcagucca

SEQ ID NO: 1077217 - RNA, 19 nt, Artificial Sequence
  Description of Artificial Sequence: Synthetic oligonucleotide
  Antisense strand to SEQ ID NO: 1077216
uggacugccaagaagucuc

SEQ ID NO: 1077218 - RNA, 19 nt, Artificial Sequence
  Description of Artificial Sequence: Synthetic oligonucleotide
  Sense strand starting at position 3687 of SEQ ID NO: 915402
ggcaguagcuuguuaacca

SEQ ID NO: 1077219 - RNA, 19 nt, Artificial Sequence
  Description of Artificial Sequence: Synthetic oligonucleotide
  Antisense strand to SEQ ID NO: 1077218
ugguuaacaagcuacugcc

SEQ ID NO: 1077220 - RNA, 19 nt, Artificial Sequence
  Description of Artificial Sequence: Synthetic oligonucleotide
  Sense strand starting at position 3904 of SEQ ID NO: 915402
gcuugcucucaggaacauu

SEQ ID NO: 1077221 - RNA, 19 nt, Artificial Sequence
  Description of Artificial Sequence: Synthetic oligonucleotide
  Antisense strand to SEQ ID NO: 1077220
aauguuccugagagcaagc

SEQ ID NO: 1077222 - RNA, 19 nt, Artificial Sequence
  Description of Artificial Sequence: Synthetic oligonucleotide
  Sense strand starting at position 18 of SEQ ID NO: 915403
uuucaaguguguuugggaa

SEQ ID NO: 1077223 - RNA, 19 nt, Artificial Sequence
  Description of Artificial Sequence: Synthetic oligonucleotide
  Antisense strand to SEQ ID NO: 1077222
uucccaaacacacuugaaa

SEQ ID NO: 1077224 - RNA, 19 nt, Artificial Sequence
  Description of Artificial Sequence: Synthetic oligonucleotide
  Sense strand starting at position 24 of SEQ ID NO: 915403
guguguuugggaagucauu

SEQ ID NO: 1077225 - RNA, 19 nt, Artificial Sequence
  Description of Artificial Sequence: Synthetic oligonucleotide
  Antisense strand to SEQ ID NO: 1077224
aaugacuucccaaacacac

SEQ ID NO: 1077226 - RNA, 19 nt, Artificial Sequence
  Description of Artificial Sequence: Synthetic oligonucleotide
  Sense strand starting at position 33 of SEQ ID NO: 915403
ggaagucauuucguguuac

SEQ ID NO: 1077227 - RNA, 19 nt, Artificial Sequence
  Description of Artificial Sequence: Synthetic oligonucleotide
  Antisense strand to SEQ ID NO: 1077226
guaacacgaaaugacuucc

SEQ ID NO: 1077228 - RNA, 19 nt, Artificial Sequence
  Description of Artificial Sequence: Synthetic oligonucleotide
  Sense strand starting at position 90 of SEQ ID NO: 915403
uuaguuucuugccucagaa

SEQ ID NO: 1077229 - RNA, 19 nt, Artificial Sequence
  Description of Artificial Sequence: Synthetic oligonucleotide
  Antisense strand to SEQ ID NO: 1077228
uucugaggcaagaaacuaa

SEQ ID NO: 1077230 - RNA, 19 nt, Artificial Sequence
  Description of Artificial Sequence: Synthetic oligonucleotide
  Sense strand starting at position 122 of SEQ ID NO: 915403
agaaguaacuagguaguau

SEQ ID NO: 1077231 - RNA, 19 nt, Artificial Sequence
  Description of Artificial Sequence: Synthetic oligonucleotide
  Antisense strand to SEQ ID NO: 1077230
auacuaccuaguuacuucu

SEQ ID NO: 1077232 - RNA, 19 nt, Artificial Sequence
  Description of Artificial Sequence: Synthetic oligonucleotide
  Sense strand starting at position 589 of SEQ ID NO: 915403
uugcucaaucaugaacgua

SEQ ID NO: 1077233 - RNA, 19 nt, Artificial Sequence
  Description of Artificial Sequence: Synthetic oligonucleotide
  Antisense strand to SEQ ID NO: 1077232
uacguucaugauugagcaa

SEQ ID NO: 1077234 - RNA, 19 nt, Artificial Sequence
  Description of Artificial Sequence: Synthetic oligonucleotide
  Sense strand starting at position 592 of SEQ ID NO: 915403
cucaaucaugaacguagaa

SEQ ID NO: 1077235 - RNA, 19 nt, Artificial Sequence
  Description of Artificial Sequence: Synthetic oligonucleotide
  Antisense strand to SEQ ID NO: 1077234
uucuacguucaugauugag

SEQ ID NO: 1077236 - RNA, 19 nt, Artificial Sequence
  Description of Artificial Sequence: Synthetic oligonucleotide
  Sense strand starting at position 635 of SEQ ID NO: 915403
ccuggaacacgguaaugua

SEQ ID NO: 1077237 - RNA, 19 nt, Artificial Sequence
  Description of Artificial Sequence: Synthetic oligonucleotide
  Antisense strand to SEQ ID NO: 1077236
uacauuaccguguuccagg

SEQ ID NO: 1077238 - RNA, 19 nt, Artificial Sequence
  Description of Artificial Sequence: Synthetic oligonucleotide
  Sense strand starting at position 642 of SEQ ID NO: 915403
cacgguaauguauaaacuu

SEQ ID NO: 1077239 - RNA, 19 nt, Artificial Sequence
  Description of Artificial Sequence: Synthetic oligonucleotide
  Antisense strand to SEQ ID NO: 1077238
aaguuuauacauuaccgug

SEQ ID NO: 1077240 - RNA, 19 nt, Artificial Sequence
  Description of Artificial Sequence: Synthetic oligonucleotide
  Sense strand starting at position 765 of SEQ ID NO: 915403
ccaggauucccugguccau

SEQ ID NO: 1077241 - RNA, 19 nt, Artificial Sequence
  Description of Artificial Sequence: Synthetic oligonucleotide
  Antisense strand to SEQ ID NO: 1077240
auggaccagggaauccugg

SEQ ID NO: 1077242 - RNA, 19 nt, Artificial Sequence
  Description of Artificial Sequence: Synthetic oligonucleotide
  Sense strand starting at position 801 of SEQ ID NO: 915403
cuaccagauucuguauugu

SEQ ID NO: 1077243 - RNA, 19 nt, Artificial Sequence
  Description of Artificial Sequence: Synthetic oligonucleotide
  Antisense strand to SEQ ID NO: 1077242
acaauacagaaucugguag

SEQ ID NO: 1077244 - RNA, 19 nt, Artificial Sequence
  Description of Artificial Sequence: Synthetic oligonucleotide
  Sense strand starting at position 812 of SEQ ID NO: 915403
uguauuguucgggagaggu

SEQ ID NO: 1077245 - RNA, 19 nt, Artificial Sequence
  Description of Artificial Sequence: Synthetic oligonucleotide
  Antisense strand to SEQ ID NO: 1077244
accucucccgaacaauaca

SEQ ID NO: 1077246 - RNA, 19 nt, Artificial Sequence
  Description of Artificial Sequence: Synthetic oligonucleotide
  Sense strand starting at position 923 of SEQ ID NO: 915403
acacauuucccgcgagcuu

SEQ ID NO: 1077247 - RNA, 19 nt, Artificial Sequence
  Description of Artificial Sequence: Synthetic oligonucleotide
  Antisense strand to SEQ ID NO: 1077246
aagcucgcgggaaaugugu

SEQ ID NO: 1077248 - RNA, 19 nt, Artificial Sequence
  Description of Artificial Sequence: Synthetic oligonucleotide
  Sense strand starting at position 924 of SEQ ID NO: 915403
cacauuucccgcgagcuua

SEQ ID NO: 1077249 - RNA, 19 nt, Artificial Sequence
  Description of Artificial Sequence: Synthetic oligonucleotide
  Antisense strand to SEQ ID NO: 1077248
uaagcucgcgggaaaugug

SEQ ID NO: 1077250 - RNA, 19 nt, Artificial Sequence
  Description of Artificial Sequence: Synthetic oligonucleotide
  Sense strand starting at position 965 of SEQ ID NO: 915403
uuuagauucccuuggucau

SEQ ID NO: 1077251 - RNA, 19 nt, Artificial Sequence
  Description of Artificial Sequence: Synthetic oligonucleotide
  Antisense strand to SEQ ID NO: 1077250
augaccaagggaaucuaaa

SEQ ID NO: 1077252 - RNA, 19 nt, Artificial Sequence
  Description of Artificial Sequence: Synthetic oligonucleotide
  Sense strand starting at position 966 of SEQ ID NO: 915403
uuagauucccuuggucaug

SEQ ID NO: 1077253 - RNA, 19 nt, Artificial Sequence
  Description of Artificial Sequence: Synthetic oligonucleotide
  Antisense strand to SEQ ID NO: 1077252
caugaccaagggaaucuaa

SEQ ID NO: 1077254 - RNA, 19 nt, Artificial Sequence
  Description of Artificial Sequence: Synthetic oligonucleotide
  Sense strand starting at position 1043 of SEQ ID NO: 915403
ggagaagcaugcuuugguu

SEQ ID NO: 1077255 - RNA, 19 nt, Artificial Sequence
  Description of Artificial Sequence: Synthetic oligonucleotide
  Antisense strand to SEQ ID NO: 1077254
aaccaaagcaugcuucucc

SEQ ID NO: 1077256 - RNA, 19 nt, Artificial Sequence
  Description of Artificial Sequence: Synthetic oligonucleotide
  Sense strand starting at position 1321 of SEQ ID NO: 915403
gggauucucccguagccca

SEQ ID NO: 1077257 - RNA, 19 nt, Artificial Sequence
  Description of Artificial Sequence: Synthetic oligonucleotide
  Antisense strand to SEQ ID NO: 1077256
ugggcuacgggagaauccc

SEQ ID NO: 1077258 - RNA, 19 nt, Artificial Sequence
  Description of Artificial Sequence: Synthetic oligonucleotide
  Sense strand starting at position 2476 of SEQ ID NO: 915403
ggacgcuucgcgagggaca

SEQ ID NO: 1077259 - RNA, 19 nt, Artificial Sequence
  Description of Artificial Sequence: Synthetic oligonucleotide
  Antisense strand to SEQ ID NO: 1077258
ugucccucgcgaagcgucc

SEQ ID NO: 1077260 - RNA, 19 nt, Artificial Sequence
  Description of Artificial Sequence: Synthetic oligonucleotide
  Sense strand starting at position 2738 of SEQ ID NO: 915403
uugcuuggagcucacuauu

SEQ ID NO: 1077261 - RNA, 19 nt, Artificial Sequence
  Description of Artificial Sequence: Synthetic oligonucleotide
  Antisense strand to SEQ ID NO: 1077260
aauagugagcuccaagcaa

SEQ ID NO: 1077262 - RNA, 19 nt, Artificial Sequence
  Description of Artificial Sequence: Synthetic oligonucleotide
  Sense strand starting at position 2961 of SEQ ID NO: 915403
uuccaauccucgcugaaag

SEQ ID NO: 1077263 - RNA, 19 nt, Artificial Sequence
  Description of Artificial Sequence: Synthetic oligonucleotide
  Antisense strand to SEQ ID NO: 1077262
cuuucagcgaggauuggaa

SEQ ID NO: 1077264 - RNA, 19 nt, Artificial Sequence
  Description of Artificial Sequence: Synthetic oligonucleotide
  Sense strand starting at position 3099 of SEQ ID NO: 915403
cuaccaucuggaugacuuu

SEQ ID NO: 1077265 - RNA, 19 nt, Artificial Sequence
  Description of Artificial Sequence: Synthetic oligonucleotide
  Antisense strand to SEQ ID NO: 1077264
aaagucauccagaugguag

SEQ ID NO: 1077266 - RNA, 19 nt, Artificial Sequence
  Description of Artificial Sequence: Synthetic oligonucleotide
  Sense strand starting at position 3102 of SEQ ID NO: 915403
ccaucuggaugacuuuaau

SEQ ID NO: 1077267 - RNA, 19 nt, Artificial Sequence
  Description of Artificial Sequence: Synthetic oligonucleotide
  Antisense strand to SEQ ID NO: 1077266
auuaaagucauccagaugg

SEQ ID NO: 1077268 - RNA, 19 nt, Artificial Sequence
  Description of Artificial Sequence: Synthetic oligonucleotide
  Sense strand starting at position 3165 of SEQ ID NO: 915403
uuguuugagacuuggaacu

SEQ ID NO: 1077269 - RNA, 19 nt, Artificial Sequence
  Description of Artificial Sequence: Synthetic oligonucleotide
  Antisense strand to SEQ ID NO: 1077268
aguuccaagucucaaacaa

SEQ ID NO: 1077270 - RNA, 19 nt, Artificial Sequence
  Description of Artificial Sequence: Synthetic oligonucleotide
  Sense strand starting at position 3231 of SEQ ID NO: 915403
cuuggugugcgguaauuua

SEQ ID NO: 1077271 - RNA, 19 nt, Artificial Sequence
  Description of Artificial Sequence: Synthetic oligonucleotide
  Antisense strand to SEQ ID NO: 1077270
uaaauuaccgcacaccaag

SEQ ID NO: 1077272 - RNA, 19 nt, Artificial Sequence
  Description of Artificial Sequence: Synthetic oligonucleotide
  Sense strand starting at position 3260 of SEQ ID NO: 915403
gcgguucuucuguugcaua

SEQ ID NO: 1077273 - RNA, 19 nt, Artificial Sequence
  Description of Artificial Sequence: Synthetic oligonucleotide
  Antisense strand to SEQ ID NO: 1077272
uaugcaacagaagaaccgc

SEQ ID NO: 1077274 - RNA, 19 nt, Artificial Sequence
  Description of Artificial Sequence: Synthetic oligonucleotide
  Sense strand starting at position 3265 of SEQ ID NO: 915403
ucuucuguugcauagcaga

SEQ ID NO: 1077275 - RNA, 19 nt, Artificial Sequence
  Description of Artificial Sequence: Synthetic oligonucleotide
  Antisense strand to SEQ ID NO: 1077274
ucugcuaugcaacagaaga

SEQ ID NO: 1077276 - RNA, 19 nt, Artificial Sequence
  Description of Artificial Sequence: Synthetic oligonucleotide
  Sense strand starting at position 3344 of SEQ ID NO: 915403
uggcccuugggccauaaau

SEQ ID NO: 1077277 - RNA, 19 nt, Artificial Sequence
  Description of Artificial Sequence: Synthetic oligonucleotide
  Antisense strand to SEQ ID NO: 1077276
auuuauggcccaagggcca

SEQ ID NO: 1077278 - RNA, 19 nt, Artificial Sequence
  Description of Artificial Sequence: Synthetic oligonucleotide
  Sense strand starting at position 3436 of SEQ ID NO: 915403
cuauuaugugcuuagcaca

SEQ ID NO: 1077279 - RNA, 19 nt, Artificial Sequence
  Description of Artificial Sequence: Synthetic oligonucleotide
  Antisense strand to SEQ ID NO: 1077278
ugugcuaagcacauaauag

SEQ ID NO: 1077280 - RNA, 19 nt, Artificial Sequence
  Description of Artificial Sequence: Synthetic oligonucleotide
  Sense strand starting at position 3441 of SEQ ID NO: 915403
augugcuuagcacagaaau

SEQ ID NO: 1077281 - RNA, 19 nt, Artificial Sequence
  Description of Artificial Sequence: Synthetic oligonucleotide
  Antisense strand to SEQ ID NO: 1077280
auuucugugcuaagcacau

SEQ ID NO: 1077282 - RNA, 19 nt, Artificial Sequence
  Description of Artificial Sequence: Synthetic oligonucleotide
  Sense strand starting at position 3495 of SEQ ID NO: 915403
gcaaaucagccguagugaa

SEQ ID NO: 1077283 - RNA, 19 nt, Artificial Sequence
  Description of Artificial Sequence: Synthetic oligonucleotide
  Antisense strand to SEQ ID NO: 1077282
uucacuacggcugauuugc

SEQ ID NO: 1077284 - RNA, 19 nt, Artificial Sequence
  Description of Artificial Sequence: Synthetic oligonucleotide
  Sense strand starting at position 3527 of SEQ ID NO: 915403
uugauacgcuaucucugau

SEQ ID NO: 1077285 - RNA, 19 nt, Artificial Sequence
  Description of Artificial Sequence: Synthetic oligonucleotide
  Antisense strand to SEQ ID NO: 1077284
aucagagauagcguaucaa

SEQ ID NO: 1077286 - RNA, 19 nt, Artificial Sequence
  Description of Artificial Sequence: Synthetic oligonucleotide
  Sense strand starting at position 3534 of SEQ ID NO: 915403
gcuaucucugaugaccauu

SEQ ID NO: 1077287 - RNA, 19 nt, Artificial Sequence
  Description of Artificial Sequence: Synthetic oligonucleotide
  Antisense strand to SEQ ID NO: 1077286
aauggucaucagagauagc

SEQ ID NO: 1077288 - RNA, 19 nt, Artificial Sequence
  Description of Artificial Sequence: Synthetic oligonucleotide
  Sense strand starting at position 3568 of SEQ ID NO: 915403
uugguaauaaucugguguu

SEQ ID NO: 1077289 - RNA, 19 nt, Artificial Sequence
  Description of Artificial Sequence: Synthetic oligonucleotide
  Antisense strand to SEQ ID NO: 1077288
aacaccagauuauuaccaa

SEQ ID NO: 1077290 - RNA, 19 nt, Artificial Sequence
  Description of Artificial Sequence: Synthetic oligonucleotide
  Sense strand starting at position 3591 of SEQ ID NO: 915403
cugcuaugccuugcgagau

SEQ ID NO: 1077291 - RNA, 19 nt, Artificial Sequence
  Description of Artificial Sequence: Synthetic oligonucleotide
  Antisense strand to SEQ ID NO: 1077290
aucucgcaaggcauagcag

SEQ ID NO: 1077292 - RNA, 19 nt, Artificial Sequence
  Description of Artificial Sequence: Synthetic oligonucleotide
  Sense strand starting at position 3595 of SEQ ID NO: 915403
uaugccuugcgagauuaau

SEQ ID NO: 1077293 - RNA, 19 nt, Artificial Sequence
  Description of Artificial Sequence: Synthetic oligonucleotide
  Antisense strand to SEQ ID NO: 1077292
auuaaucucgcaaggcaua

SEQ ID NO: 1077294 - RNA, 19 nt, Artificial Sequence
  Description of Artificial Sequence: Synthetic oligonucleotide
  Sense strand starting at position 3739 of SEQ ID NO: 915403
gugaguagucguuauuuac

SEQ ID NO: 1077295 - RNA, 19 nt, Artificial Sequence
  Description of Artificial Sequence: Synthetic oligonucleotide
  Antisense strand to SEQ ID NO: 1077294
guaaauaacgacuacucac

SEQ ID NO: 1077296 - RNA, 19 nt, Artificial Sequence
  Description of Artificial Sequence: Synthetic oligonucleotide
  Sense strand starting at position 3742 of SEQ ID NO: 915403
aguagucguuauuuacaca

SEQ ID NO: 1077297 - RNA, 19 nt, Artificial Sequence
  Description of Artificial Sequence: Synthetic oligonucleotide
  Antisense strand to SEQ ID NO: 1077296
uguguaaauaacgacuacu

SEQ ID NO: 1077298 - RNA, 19 nt, Artificial Sequence
  Description of Artificial Sequence: Synthetic oligonucleotide
  Sense strand starting at position 3857 of SEQ ID NO: 915403
aaaggaauuugcgaacuaa

SEQ ID NO: 1077299 - RNA, 19 nt, Artificial Sequence
  Description of Artificial Sequence: Synthetic oligonucleotide
  Antisense strand to SEQ ID NO: 1077298
uuaguucgcaaauuccuuu

SEQ ID NO: 1077300 - RNA, 19 nt, Artificial Sequence
  Description of Artificial Sequence: Synthetic oligonucleotide
  Sense strand starting at position 3878 of SEQ ID NO: 915403
ugaguucaugcagagaagu

SEQ ID NO: 1077301 - RNA, 19 nt, Artificial Sequence
  Description of Artificial Sequence: Synthetic oligonucleotide
  Antisense strand to SEQ ID NO: 1077300
acuucucugcaugaacuca

SEQ ID NO: 1077302 - RNA, 19 nt, Artificial Sequence
  Description of Artificial Sequence: Synthetic oligonucleotide
  Sense strand starting at position 292 of SEQ ID NO: 915404
cccaucucuuuggagacaa

SEQ ID NO: 1077303 - RNA, 19 nt, Artificial Sequence
  Description of Artificial Sequence: Synthetic oligonucleotide
  Antisense strand to SEQ ID NO: 1077302
uugucuccaaagagauggg

SEQ ID NO: 1077304 - RNA, 19 nt, Artificial Sequence
  Description of Artificial Sequence: Synthetic oligonucleotide
  Sense strand starting at position 513 of SEQ ID NO: 915404
ucgagacccugucuuuaca

SEQ ID NO: 1077305 - RNA, 19 nt, Artificial Sequence
  Description of Artificial Sequence: Synthetic oligonucleotide
  Antisense strand to SEQ ID NO: 1077304
uguaaagacagggucucga

SEQ ID NO: 1077306 - RNA, 19 nt, Artificial Sequence
  Description of Artificial Sequence: Synthetic oligonucleotide
  Sense strand starting at position 557 of SEQ ID NO: 915404
gguggugugccucuguauu

SEQ ID NO: 1077307 - RNA, 19 nt, Artificial Sequence
  Description of Artificial Sequence: Synthetic oligonucleotide
  Antisense strand to SEQ ID NO: 1077306
aauacagaggcacaccacc

SEQ ID NO: 1077308 - RNA, 19 nt, Artificial Sequence
  Description of Artificial Sequence: Synthetic oligonucleotide
  Sense strand starting at position 762 of SEQ ID NO: 915404
cccugugugaaguacuuua

SEQ ID NO: 1077309 - RNA, 19 nt, Artificial Sequence
  Description of Artificial Sequence: Synthetic oligonucleotide
  Antisense strand to SEQ ID NO: 1077308
uaaaguacuucacacaggg

SEQ ID NO: 1077310 - RNA, 19 nt, Artificial Sequence
  Description of Artificial Sequence: Synthetic oligonucleotide
  Sense strand starting at position 833 of SEQ ID NO: 915404
auugucaacuaaugaggaa

SEQ ID NO: 1077311 - RNA, 19 nt, Artificial Sequence
  Description of Artificial Sequence: Synthetic oligonucleotide
  Antisense strand to SEQ ID NO: 1077310
uuccucauuaguugacaau

SEQ ID NO: 1077312 - RNA, 19 nt, Artificial Sequence
  Description of Artificial Sequence: Synthetic oligonucleotide
  Sense strand starting at position 867 of SEQ ID NO: 915404
agggaagugacuugcccua

SEQ ID NO: 1077313 - RNA, 19 nt, Artificial Sequence
  Description of Artificial Sequence: Synthetic oligonucleotide
  Antisense strand to SEQ ID NO: 1077312
uagggcaagucacuucccu

SEQ ID NO: 1077314 - RNA, 19 nt, Artificial Sequence
  Description of Artificial Sequence: Synthetic oligonucleotide
  Sense strand starting at position 869 of SEQ ID NO: 915404
ggaagugacuugcccuaac

SEQ ID NO: 1077315 - RNA, 19 nt, Artificial Sequence
  Description of Artificial Sequence: Synthetic oligonucleotide
  Antisense strand to SEQ ID NO: 1077314
guuagggcaagucacuucc

SEQ ID NO: 1077316 - RNA, 19 nt, Artificial Sequence
  Description of Artificial Sequence: Synthetic oligonucleotide
  Sense strand starting at position 872 of SEQ ID NO: 915404
agugacuugcccuaacuua

SEQ ID NO: 1077317 - RNA, 19 nt, Artificial Sequence
  Description of Artificial Sequence: Synthetic oligonucleotide
  Antisense strand to SEQ ID NO: 1077316
uaaguuagggcaagucacu

SEQ ID NO: 1077318 - RNA, 19 nt, Artificial Sequence
  Description of Artificial Sequence: Synthetic oligonucleotide
  Sense strand starting at position 891 of SEQ ID NO: 915404
cacaguuuaucgcuuuaag

SEQ ID NO: 1077319 - RNA, 19 nt, Artificial Sequence
  Description of Artificial Sequence: Synthetic oligonucleotide
  Antisense strand to SEQ ID NO: 1077318
cuuaaagcgauaaacugug

SEQ ID NO: 1077320 - RNA, 19 nt, Artificial Sequence
  Description of Artificial Sequence: Synthetic oligonucleotide
  Sense strand starting at position 894 of SEQ ID NO: 915404
aguuuaucgcuuuaagacu

SEQ ID NO: 1077321 - RNA, 19 nt, Artificial Sequence
  Description of Artificial Sequence: Synthetic oligonucleotide
  Antisense strand to SEQ ID NO: 1077320
agucuuaaagcgauaaacu

SEQ ID NO: 1077322 - RNA, 19 nt, Artificial Sequence
  Description of Artificial Sequence: Synthetic oligonucleotide
  Sense strand starting at position 917 of SEQ ID NO: 915404
ccagguuucucagacucca

SEQ ID NO: 1077323 - RNA, 19 nt, Artificial Sequence
  Description of Artificial Sequence: Synthetic oligonucleotide
  Antisense strand to SEQ ID NO: 1077322
uggagucugagaaaccugg

SEQ ID NO: 1077324 - RNA, 19 nt, Artificial Sequence
  Description of Artificial Sequence: Synthetic oligonucleotide
  Sense strand starting at position 1086 of SEQ ID NO: 915404
aacuauuaguccugggcau

SEQ ID NO: 1077325 - RNA, 19 nt, Artificial Sequence
  Description of Artificial Sequence: Synthetic oligonucleotide
  Antisense strand to SEQ ID NO: 1077324
augcccaggacuaauaguu

SEQ ID NO: 1077326 - RNA, 19 nt, Artificial Sequence
  Description of Artificial Sequence: Synthetic oligonucleotide
  Sense strand starting at position 1088 of SEQ ID NO: 915404
cuauuaguccugggcauga

SEQ ID NO: 1077327 - RNA, 19 nt, Artificial Sequence
  Description of Artificial Sequence: Synthetic oligonucleotide
  Antisense strand to SEQ ID NO: 1077326
ucaugcccaggacuaauag

SEQ ID NO: 1077328 - RNA, 19 nt, Artificial Sequence
  Description of Artificial Sequence: Synthetic oligonucleotide
  Sense strand starting at position 1090 of SEQ ID NO: 915404
auuaguccugggcaugaga

SEQ ID NO: 1077329 - RNA, 19 nt, Artificial Sequence
  Description of Artificial Sequence: Synthetic oligonucleotide
  Antisense strand to SEQ ID NO: 1077328
ucucaugcccaggacuaau

SEQ ID NO: 1077330 - RNA, 19 nt, Artificial Sequence
  Description of Artificial Sequence: Synthetic oligonucleotide
  Sense strand starting at position 1603 of SEQ ID NO: 915404
gggucaucugaccgauaag

SEQ ID NO: 1077331 - RNA, 19 nt, Artificial Sequence
  Description of Artificial Sequence: Synthetic oligonucleotide
  Antisense strand to SEQ ID NO: 1077330
cuuaucggucagaugaccc

SEQ ID NO: 1077332 - RNA, 19 nt, Artificial Sequence
  Description of Artificial Sequence: Synthetic oligonucleotide
  Sense strand starting at position 1604 of SEQ ID NO: 915404
ggucaucugaccgauaagg

SEQ ID NO: 1077333 - RNA, 19 nt, Artificial Sequence
  Description of Artificial Sequence: Synthetic oligonucleotide
  Antisense strand to SEQ ID NO: 1077332
ccuuaucggucagaugacc

SEQ ID NO: 1077334 - RNA, 19 nt, Artificial Sequence
  Description of Artificial Sequence: Synthetic oligonucleotide
  Sense strand starting at position 1614 of SEQ ID NO: 915404
ccgauaaggccugguagga

SEQ ID NO: 1077335 - RNA, 19 nt, Artificial Sequence
  Description of Artificial Sequence: Synthetic oligonucleotide
  Antisense strand to SEQ ID NO: 1077334
uccuaccaggccuuaucgg

SEQ ID NO: 1077336 - RNA, 19 nt, Artificial Sequence
  Description of Artificial Sequence: Synthetic oligonucleotide
  Sense strand starting at position 1840 of SEQ ID NO: 915404
cccuguauucgggaucgag

SEQ ID NO: 1077337 - RNA, 19 nt, Artificial Sequence
  Description of Artificial Sequence: Synthetic oligonucleotide
  Antisense strand to SEQ ID NO: 1077336
cucgaucccgaauacaggg

SEQ ID NO: 1077338 - RNA, 19 nt, Artificial Sequence
  Description of Artificial Sequence: Synthetic oligonucleotide
  Sense strand starting at position 2041 of SEQ ID NO: 915404
cgcugauucccggaacuug

SEQ ID NO: 1077339 - RNA, 19 nt, Artificial Sequence
  Description of Artificial Sequence: Synthetic oligonucleotide
  Antisense strand to SEQ ID NO: 1077338
caaguuccgggaaucagcg

SEQ ID NO: 1077340 - RNA, 19 nt, Artificial Sequence
  Description of Artificial Sequence: Synthetic oligonucleotide
  Sense strand starting at position 2051 of SEQ ID NO: 915404
cggaacuuguagucuaaga

SEQ ID NO: 1077341 - RNA, 19 nt, Artificial Sequence
  Description of Artificial Sequence: Synthetic oligonucleotide
  Antisense strand to SEQ ID NO: 1077340
ucuuagacuacaaguuccg

SEQ ID NO: 1077342 - RNA, 19 nt, Artificial Sequence
  Description of Artificial Sequence: Synthetic oligonucleotide
  Sense strand starting at position 2219 of SEQ ID NO: 915404
ccgcgacucgguguuuaga

SEQ ID NO: 1077343 - RNA, 19 nt, Artificial Sequence
  Description of Artificial Sequence: Synthetic oligonucleotide
  Antisense strand to SEQ ID NO: 1077342
ucuaaacaccgagucgcgg

SEQ ID NO: 1077344 - RNA, 19 nt, Artificial Sequence
  Description of Artificial Sequence: Synthetic oligonucleotide
  Sense strand starting at position 2220 of SEQ ID NO: 915404
cgcgacucgguguuuagaa

SEQ ID NO: 1077345 - RNA, 19 nt, Artificial Sequence
  Description of Artificial Sequence: Synthetic oligonucleotide
  Antisense strand to SEQ ID NO: 1077344
uucuaaacaccgagucgcg

SEQ ID NO: 1077346 - RNA, 19 nt, Artificial Sequence
  Description of Artificial Sequence: Synthetic oligonucleotide
  Sense strand starting at position 2221 of SEQ ID NO: 915404
gcgacucgguguuuagaaa

SEQ ID NO: 1077347 - RNA, 19 nt, Artificial Sequence
  Description of Artificial Sequence: Synthetic oligonucleotide
  Antisense strand to SEQ ID NO: 1077346
uuucuaaacaccgagucgc

SEQ ID NO: 1077348 - RNA, 19 nt, Artificial Sequence
  Description of Artificial Sequence: Synthetic oligonucleotide
  Sense strand starting at position 2310 of SEQ ID NO: 915404
uacccacguugugaacauu

SEQ ID NO: 1077349 - RNA, 19 nt, Artificial Sequence
  Description of Artificial Sequence: Synthetic oligonucleotide
  Antisense strand to SEQ ID NO: 1077348
aauguucacaacgugggua

SEQ ID NO: 1077350 - RNA, 19 nt, Artificial Sequence
  Description of Artificial Sequence: Synthetic oligonucleotide
  Sense strand starting at position 2313 of SEQ ID NO: 915404
ccacguugugaacauuaaa

SEQ ID NO: 1077351 - RNA, 19 nt, Artificial Sequence
  Description of Artificial Sequence: Synthetic oligonucleotide
  Antisense strand to SEQ ID NO: 1077350
uuuaauguucacaacgugg

SEQ ID NO: 1077352 - RNA, 19 nt, Artificial Sequence
  Description of Artificial Sequence: Synthetic oligonucleotide
  Sense strand starting at position 2335 of SEQ ID NO: 915404
gaauguggguucuaguaag

SEQ ID NO: 1077353 - RNA, 19 nt, Artificial Sequence
  Description of Artificial Sequence: Synthetic oligonucleotide
  Antisense strand to SEQ ID NO: 1077352
cuuacuagaacccacauuc

SEQ ID NO: 1077354 - RNA, 19 nt, Artificial Sequence
  Description of Artificial Sequence: Synthetic oligonucleotide
  Sense strand starting at position 2341 of SEQ ID NO: 915404
ggguucuaguaagacuaau

SEQ ID NO: 1077355 - RNA, 19 nt, Artificial Sequence
  Description of Artificial Sequence: Synthetic oligonucleotide
  Antisense strand to SEQ ID NO: 1077354
auuagucuuacuagaaccc

SEQ ID NO: 1077356 - RNA, 19 nt, Artificial Sequence
  Description of Artificial Sequence: Synthetic oligonucleotide
  Sense strand starting at position 2375 of SEQ ID NO: 915404
caggguucuucguguacug

SEQ ID NO: 1077357 - RNA, 19 nt, Artificial Sequence
  Description of Artificial Sequence: Synthetic oligonucleotide
  Antisense strand to SEQ ID NO: 1077356
caguacacgaagaacccug

SEQ ID NO: 1077358 - RNA, 19 nt, Artificial Sequence
  Description of Artificial Sequence: Synthetic oligonucleotide
  Sense strand starting at position 2446 of SEQ ID NO: 915404
aacugagucucgggaaacu

SEQ ID NO: 1077359 - RNA, 19 nt, Artificial Sequence
  Description of Artificial Sequence: Synthetic oligonucleotide
  Antisense strand to SEQ ID NO: 1077358
aguuucccgagacucaguu

SEQ ID NO: 1077360 - RNA, 19 nt, Artificial Sequence
  Description of Artificial Sequence: Synthetic oligonucleotide
  Sense strand starting at position 2542 of SEQ ID NO: 915404
uagggaaagccugacuugu

SEQ ID NO: 1077361 - RNA, 19 nt, Artificial Sequence
  Description of Artificial Sequence: Synthetic oligonucleotide
  Antisense strand to SEQ ID NO: 1077360
acaagucaggcuuucccua

SEQ ID NO: 1077362 - RNA, 19 nt, Artificial Sequence
  Description of Artificial Sequence: Synthetic oligonucleotide
  Sense strand starting at position 2617 of SEQ ID NO: 915404
agcgguugagcgagacaca

SEQ ID NO: 1077363 - RNA, 19 nt, Artificial Sequence
  Description of Artificial Sequence: Synthetic oligonucleotide
  Antisense strand to SEQ ID NO: 1077362
ugugucucgcucaaccgcu

SEQ ID NO: 1077364 - RNA, 19 nt, Artificial Sequence
  Description of Artificial Sequence: Synthetic oligonucleotide
  Sense strand starting at position 48 of SEQ ID NO: 915405
acugcaucuggucacaauu

SEQ ID NO: 1077365 - RNA, 19 nt, Artificial Sequence
  Description of Artificial Sequence: Synthetic oligonucleotide
  Antisense strand to SEQ ID NO: 1077364
aauugugaccagaugcagu

SEQ ID NO: 1077366 - RNA, 19 nt, Artificial Sequence
  Description of Artificial Sequence: Synthetic oligonucleotide
  Sense strand starting at position 216 of SEQ ID NO: 915405
aagaguguacucuaaaggu

SEQ ID NO: 1077367 - RNA, 19 nt, Artificial Sequence
  Description of Artificial Sequence: Synthetic oligonucleotide
  Antisense strand to SEQ ID NO: 1077366
accuuuagaguacacucuu

SEQ ID NO: 1077368 - RNA, 19 nt, Artificial Sequence
  Description of Artificial Sequence: Synthetic oligonucleotide
  Sense strand starting at position 274 of SEQ ID NO: 915405
agggaacauuuauacccaa

SEQ ID NO: 1077369 - RNA, 19 nt, Artificial Sequence
  Description of Artificial Sequence: Synthetic oligonucleotide
  Antisense strand to SEQ ID NO: 1077368
uuggguauaaauguucccu

SEQ ID NO: 1077370 - RNA, 19 nt, Artificial Sequence
  Description of Artificial Sequence: Synthetic oligonucleotide
  Sense strand starting at position 464 of SEQ ID NO: 915405
gggaacauguuugccucaa

SEQ ID NO: 1077371 - RNA, 19 nt, Artificial Sequence
  Description of Artificial Sequence: Synthetic oligonucleotide
  Antisense strand to SEQ ID NO: 1077370
uugaggcaaacauguuccc

SEQ ID NO: 1077372 - RNA, 19 nt, Artificial Sequence
  Description of Artificial Sequence: Synthetic oligonucleotide
  Sense strand starting at position 465 of SEQ ID NO: 915405
ggaacauguuugccucaaa

SEQ ID NO: 1077373 - RNA, 19 nt, Artificial Sequence
  Description of Artificial Sequence: Synthetic oligonucleotide
  Antisense strand to SEQ ID NO: 1077372
uuugaggcaaacauguucc

SEQ ID NO: 1077374 - RNA, 19 nt, Artificial Sequence
  Description of Artificial Sequence: Synthetic oligonucleotide
  Sense strand starting at position 881 of SEQ ID NO: 915405
gcuagagugacaggucaaa

SEQ ID NO: 1077375 - RNA, 19 nt, Artificial Sequence
  Description of Artificial Sequence: Synthetic oligonucleotide
  Antisense strand to SEQ ID NO: 1077374
uuugaccugucacucuagc

SEQ ID NO: 1077376 - RNA, 19 nt, Artificial Sequence
  Description of Artificial Sequence: Synthetic oligonucleotide
  Sense strand starting at position 925 of SEQ ID NO: 915405
cccauuuguugagaacacu

SEQ ID NO: 1077377 - RNA, 19 nt, Artificial Sequence
  Description of Artificial Sequence: Synthetic oligonucleotide
  Antisense strand to SEQ ID NO: 1077376
aguguucucaacaaauggg

SEQ ID NO: 1077378 - RNA, 19 nt, Artificial Sequence
  Description of Artificial Sequence: Synthetic oligonucleotide
  Sense strand starting at position 935 of SEQ ID NO: 915405
gagaacacucgauaugcca

SEQ ID NO: 1077379 - RNA, 19 nt, Artificial Sequence
  Description of Artificial Sequence: Synthetic oligonucleotide
  Antisense strand to SEQ ID NO: 1077378
uggcauaucgaguguucuc

SEQ ID NO: 1077380 - RNA, 19 nt, Artificial Sequence
  Description of Artificial Sequence: Synthetic oligonucleotide
  Sense strand starting at position 943 of SEQ ID NO: 915405
ucgauaugccaagagcuuu

SEQ ID NO: 1077381 - RNA, 19 nt, Artificial Sequence
  Description of Artificial Sequence: Synthetic oligonucleotide
  Antisense strand to SEQ ID NO: 1077380
aaagcucuuggcauaucga

SEQ ID NO: 1077382 - RNA, 19 nt, Artificial Sequence
  Description of Artificial Sequence: Synthetic oligonucleotide
  Sense strand starting at position 949 of SEQ ID NO: 915405
ugccaagagcuuuacauaa

SEQ ID NO: 1077383 - RNA, 19 nt, Artificial Sequence
  Description of Artificial Sequence: Synthetic oligonucleotide
  Antisense strand to SEQ ID NO: 1077382
uuauguaaagcucuuggca

SEQ ID NO: 1077384 - RNA, 19 nt, Artificial Sequence
  Description of Artificial Sequence: Synthetic oligonucleotide
  Sense strand starting at position 1002 of SEQ ID NO: 915405
agcugaaauccaggaaagu

SEQ ID NO: 1077385 - RNA, 19 nt, Artificial Sequence
  Description of Artificial Sequence: Synthetic oligonucleotide
  Antisense strand to SEQ ID NO: 1077384
acuuuccuggauuucagcu

SEQ ID NO: 1077386 - RNA, 19 nt, Artificial Sequence
  Description of Artificial Sequence: Synthetic oligonucleotide
  Sense strand starting at position 1055 of SEQ ID NO: 915405
gaguuaugauuugaaccua

SEQ ID NO: 1077387 - RNA, 19 nt, Artificial Sequence
  Description of Artificial Sequence: Synthetic oligonucleotide
  Antisense strand to SEQ ID NO: 1077386
uagguucaaaucauaacuc

SEQ ID NO: 1077388 - RNA, 19 nt, Artificial Sequence
  Description of Artificial Sequence: Synthetic oligonucleotide
  Sense strand starting at position 1272 of SEQ ID NO: 915405
gguaucaaguaccuccaaa

SEQ ID NO: 1077389 - RNA, 19 nt, Artificial Sequence
  Description of Artificial Sequence: Synthetic oligonucleotide
  Antisense strand to SEQ ID NO: 1077388
uuuggagguacuugauacc

SEQ ID NO: 1077390 - RNA, 19 nt, Artificial Sequence
  Description of Artificial Sequence: Synthetic oligonucleotide
  Sense strand starting at position 1396 of SEQ ID NO: 915405
ccaggaaaccuccaucugu

SEQ ID NO: 1077391 - RNA, 19 nt, Artificial Sequence
  Description of Artificial Sequence: Synthetic oligonucleotide
  Antisense strand to SEQ ID NO: 1077390
acagauggagguuuccugg

SEQ ID NO: 1077392 - RNA, 19 nt, Artificial Sequence
  Description of Artificial Sequence: Synthetic oligonucleotide
  Sense strand starting at position 1451 of SEQ ID NO: 915405
acaggauucucucugcaac

SEQ ID NO: 1077393 - RNA, 19 nt, Artificial Sequence
  Description of Artificial Sequence: Synthetic oligonucleotide
  Antisense strand to SEQ ID NO: 1077392
guugcagagagaauccugu

SEQ ID NO: 1077394 - RNA, 19 nt, Artificial Sequence
  Description of Artificial Sequence: Synthetic oligonucleotide
  Sense strand starting at position 1561 of SEQ ID NO: 915405
aaagauugcugagcaagag

SEQ ID NO: 1077395 - RNA, 19 nt, Artificial Sequence
  Description of Artificial Sequence: Synthetic oligonucleotide
  Antisense strand to SEQ ID NO: 1077394
cucuugcucagcaaucuuu

SEQ ID NO: 1077396 - RNA, 19 nt, Artificial Sequence
  Description of Artificial Sequence: Synthetic oligonucleotide
  Sense strand starting at position 1632 of SEQ ID NO: 915405
ugugauuugaugggugugu

SEQ ID NO: 1077397 - RNA, 19 nt, Artificial Sequence
  Description of Artificial Sequence: Synthetic oligonucleotide
  Antisense strand to SEQ ID NO: 1077396
acacacccaucaaaucaca

SEQ ID NO: 1077398 - RNA, 19 nt, Artificial Sequence
  Description of Artificial Sequence: Synthetic oligonucleotide
  Sense strand starting at position 1633 of SEQ ID NO: 915405
gugauuugaugggugugua

SEQ ID NO: 1077399 - RNA, 19 nt, Artificial Sequence
  Description of Artificial Sequence: Synthetic oligonucleotide
  Antisense strand to SEQ ID NO: 1077398
uacacacccaucaaaucac

SEQ ID NO: 1077400 - RNA, 19 nt, Artificial Sequence
  Description of Artificial Sequence: Synthetic oligonucleotide
  Sense strand starting at position 1645 of SEQ ID NO: 915405
guguguacagcugagagaa

SEQ ID NO: 1077401 - RNA, 19 nt, Artificial Sequence
  Description of Artificial Sequence: Synthetic oligonucleotide
  Antisense strand to SEQ ID NO: 1077400
uucucucagcuguacacac

SEQ ID NO: 1077402 - RNA, 19 nt, Artificial Sequence
  Description of Artificial Sequence: Synthetic oligonucleotide
  Sense strand starting at position 1687 of SEQ ID NO: 915405
agucauauccaauggagcu

SEQ ID NO: 1077403 - RNA, 19 nt, Artificial Sequence
  Description of Artificial Sequence: Synthetic oligonucleotide
  Antisense strand to SEQ ID NO: 1077402
agcuccauuggauaugacu

SEQ ID NO: 1077404 - RNA, 19 nt, Artificial Sequence
  Description of Artificial Sequence: Synthetic oligonucleotide
  Sense strand starting at position 1887 of SEQ ID NO: 915405
uucgcagagucauuuaggu

SEQ ID NO: 1077405 - RNA, 19 nt, Artificial Sequence
  Description of Artificial Sequence: Synthetic oligonucleotide
  Antisense strand to SEQ ID NO: 1077404
accuaaaugacucugcgaa

SEQ ID NO: 1077406 - RNA, 19 nt, Artificial Sequence
  Description of Artificial Sequence: Synthetic oligonucleotide
  Sense strand starting at position 1909 of SEQ ID NO: 915405
aggugaggcauaugauaac

SEQ ID NO: 1077407 - RNA, 19 nt, Artificial Sequence
  Description of Artificial Sequence: Synthetic oligonucleotide
  Antisense strand to SEQ ID NO: 1077406
guuaucauaugccucaccu

SEQ ID NO: 1077408 - RNA, 19 nt, Artificial Sequence
  Description of Artificial Sequence: Synthetic oligonucleotide
  Sense strand starting at position 2184 of SEQ ID NO: 915405
ucauccucacugugagaug

SEQ ID NO: 1077409 - RNA, 19 nt, Artificial Sequence
  Description of Artificial Sequence: Synthetic oligonucleotide
  Antisense strand to SEQ ID NO: 1077408
caucucacagugaggauga

SEQ ID NO: 1077410 - RNA, 19 nt, Artificial Sequence
  Description of Artificial Sequence: Synthetic oligonucleotide
  Sense strand starting at position 2251 of SEQ ID NO: 915405
uccauaacuuguccaagga

SEQ ID NO: 1077411 - RNA, 19 nt, Artificial Sequence
  Description of Artificial Sequence: Synthetic oligonucleotide
  Antisense strand to SEQ ID NO: 1077410
uccuuggacaaguuaugga

SEQ ID NO: 1077412 - RNA, 19 nt, Artificial Sequence
  Description of Artificial Sequence: Synthetic oligonucleotide
  Sense strand starting at position 2310 of SEQ ID NO: 915405
gugggugaggcucaucaga

SEQ ID NO: 1077413 - RNA, 19 nt, Artificial Sequence
  Description of Artificial Sequence: Synthetic oligonucleotide
  Antisense strand to SEQ ID NO: 1077412
ucugaugagccucacccac

SEQ ID NO: 1077414 - RNA, 19 nt, Artificial Sequence
  Description of Artificial Sequence: Synthetic oligonucleotide
  Sense strand starting at position 2312 of SEQ ID NO: 915405
gggugaggcucaucagaag

SEQ ID NO: 1077415 - RNA, 19 nt, Artificial Sequence
  Description of Artificial Sequence: Synthetic oligonucleotide
  Antisense strand to SEQ ID NO: 1077414
cuucugaugagccucaccc

SEQ ID NO: 1077416 - RNA, 19 nt, Artificial Sequence
  Description of Artificial Sequence: Synthetic oligonucleotide
  Sense strand starting at position 2520 of SEQ ID NO: 915405
aggucauuauuaccuccau

SEQ ID NO: 1077417 - RNA, 19 nt, Artificial Sequence
  Description of Artificial Sequence: Synthetic oligonucleotide
  Antisense strand to SEQ ID NO: 1077416
auggagguaauaaugaccu

SEQ ID NO: 1077418 - RNA, 19 nt, Artificial Sequence
  Description of Artificial Sequence: Synthetic oligonucleotide
  Sense strand starting at position 2521 of SEQ ID NO: 915405
ggucauuauuaccuccauu

SEQ ID NO: 1077419 - RNA, 19 nt, Artificial Sequence
  Description of Artificial Sequence: Synthetic oligonucleotide
  Antisense strand to SEQ ID NO: 1077418
aauggagguaauaaugacc

SEQ ID NO: 1077420 - RNA, 19 nt, Artificial Sequence
  Description of Artificial Sequence: Synthetic oligonucleotide
  Sense strand starting at position 2613 of SEQ ID NO: 915405
aggucuaccuaauucuaga

SEQ ID NO: 1077421 - RNA, 19 nt, Artificial Sequence
  Description of Artificial Sequence: Synthetic oligonucleotide
  Antisense strand to SEQ ID NO: 1077420
ucuagaauuagguagaccu

SEQ ID NO: 1077422 - RNA, 19 nt, Artificial Sequence
  Description of Artificial Sequence: Synthetic oligonucleotide
  Sense strand starting at position 2735 of SEQ ID NO: 915405
gcagguaaugcauauucca

SEQ ID NO: 1077423 - RNA, 19 nt, Artificial Sequence
  Description of Artificial Sequence: Synthetic oligonucleotide
  Antisense strand to SEQ ID NO: 1077422
uggaauaugcauuaccugc

SEQ ID NO: 1077424 - RNA, 19 nt, Artificial Sequence
  Description of Artificial Sequence: Synthetic oligonucleotide
  Sense strand starting at position 2815 of SEQ ID NO: 915405
gaaggugauagcuaugucu

SEQ ID NO: 1077425 - RNA, 19 nt, Artificial Sequence
  Description of Artificial Sequence: Synthetic oligonucleotide
  Antisense strand to SEQ ID NO: 1077424
agacauagcuaucaccuuc

SEQ ID NO: 1077426 - RNA, 19 nt, Artificial Sequence
  Description of Artificial Sequence: Synthetic oligonucleotide
  Sense strand starting at position 2856 of SEQ ID NO: 915405
cucaguugucccgacauga

SEQ ID NO: 1077427 - RNA, 19 nt, Artificial Sequence
  Description of Artificial Sequence: Synthetic oligonucleotide
  Antisense strand to SEQ ID NO: 1077426
ucaugucgggacaacugag

SEQ ID NO: 1077428 - RNA, 19 nt, Artificial Sequence
  Description of Artificial Sequence: Synthetic oligonucleotide
  Sense strand starting at position 3118 of SEQ ID NO: 915405
acacgauguuagguuugau

SEQ ID NO: 1077429 - RNA, 19 nt, Artificial Sequence
  Description of Artificial Sequence: Synthetic oligonucleotide
  Antisense strand to SEQ ID NO: 1077428
aucaaaccuaacaucgugu

SEQ ID NO: 1077430 - RNA, 19 nt, Artificial Sequence
  Description of Artificial Sequence: Synthetic oligonucleotide
  Sense strand starting at position 3196 of SEQ ID NO: 915405
ggguaaucagaucgaguau

SEQ ID NO: 1077431 - RNA, 19 nt, Artificial Sequence
  Description of Artificial Sequence: Synthetic oligonucleotide
  Antisense strand to SEQ ID NO: 1077430
auacucgaucugauuaccc

SEQ ID NO: 1077432 - RNA, 19 nt, Artificial Sequence
  Description of Artificial Sequence: Synthetic oligonucleotide
  Sense strand starting at position 3197 of SEQ ID NO: 915405
gguaaucagaucgaguauc

SEQ ID NO: 1077433 - RNA, 19 nt, Artificial Sequence
  Description of Artificial Sequence: Synthetic oligonucleotide
  Antisense strand to SEQ ID NO: 1077432
gauacucgaucugauuacc

SEQ ID NO: 1077434 - RNA, 19 nt, Artificial Sequence
  Description of Artificial Sequence: Synthetic oligonucleotide
  Sense strand starting at position 3281 of SEQ ID NO: 915405
ggaagucacaggcaucuua

SEQ ID NO: 1077435 - RNA, 19 nt, Artificial Sequence
  Description of Artificial Sequence: Synthetic oligonucleotide
  Antisense strand to SEQ ID NO: 1077434
uaagaugccugugacuucc

SEQ ID NO: 1077436 - RNA, 19 nt, Artificial Sequence
  Description of Artificial Sequence: Synthetic oligonucleotide
  Sense strand starting at position 3496 of SEQ ID NO: 915405
gguagauagaacugcuauu

SEQ ID NO: 1077437 - RNA, 19 nt, Artificial Sequence
  Description of Artificial Sequence: Synthetic oligonucleotide
  Antisense strand to SEQ ID NO: 1077436
aauagcaguucuaucuacc

SEQ ID NO: 1077438 - RNA, 19 nt, Artificial Sequence
  Description of Artificial Sequence: Synthetic oligonucleotide
  Sense strand starting at position 3935 of SEQ ID NO: 915405
agucaauuaugaguccauu

SEQ ID NO: 1077439 - RNA, 19 nt, Artificial Sequence
  Description of Artificial Sequence: Synthetic oligonucleotide
  Antisense strand to SEQ ID NO: 1077438
aauggacucauaauugacu

SEQ ID NO: 1077440 - RNA, 19 nt, Artificial Sequence
  Description of Artificial Sequence: Synthetic oligonucleotide
  Sense strand starting at position 3960 of SEQ ID NO: 915405
uuccucagauaguuauuga

SEQ ID NO: 1077441 - RNA, 19 nt, Artificial Sequence
  Description of Artificial Sequence: Synthetic oligonucleotide
  Antisense strand to SEQ ID NO: 1077440
ucaauaacuaucugaggaa

SEQ ID NO: 1077442 - RNA, 19 nt, Artificial Sequence
  Description of Artificial Sequence: Synthetic oligonucleotide
  Sense strand starting at position 3967 of SEQ ID NO: 915405
gauaguuauugagcacuuu

SEQ ID NO: 1077443 - RNA, 19 nt, Artificial Sequence
  Description of Artificial Sequence: Synthetic oligonucleotide
  Antisense strand to SEQ ID NO: 1077442
aaagugcucaauaacuauc

SEQ ID NO: 1077444 - RNA, 19 nt, Artificial Sequence
  Description of Artificial Sequence: Synthetic oligonucleotide
  Sense strand starting at position 40 of SEQ ID NO: 915406
aggaguuccuaguugaagu

SEQ ID NO: 1077445 - RNA, 19 nt, Artificial Sequence
  Description of Artificial Sequence: Synthetic oligonucleotide
  Antisense strand to SEQ ID NO: 1077444
acuucaacuaggaacuccu

SEQ ID NO: 1077446 - RNA, 19 nt, Artificial Sequence
  Description of Artificial Sequence: Synthetic oligonucleotide
  Sense strand starting at position 41 of SEQ ID NO: 915406
ggaguuccuaguugaagug

SEQ ID NO: 1077447 - RNA, 19 nt, Artificial Sequence
  Description of Artificial Sequence: Synthetic oligonucleotide
  Antisense strand to SEQ ID NO: 1077446
cacuucaacuaggaacucc

SEQ ID NO: 1077448 - RNA, 19 nt, Artificial Sequence
  Description of Artificial Sequence: Synthetic oligonucleotide
  Sense strand starting at position 66 of SEQ ID NO: 915406
cagggaguguguucuaaga

SEQ ID NO: 1077449 - RNA, 19 nt, Artificial Sequence
  Description of Artificial Sequence: Synthetic oligonucleotide
  Antisense strand to SEQ ID NO: 1077448
ucuuagaacacacucccug

SEQ ID NO: 1077450 - RNA, 19 nt, Artificial Sequence
  Description of Artificial Sequence: Synthetic oligonucleotide
  Sense strand starting at position 74 of SEQ ID NO: 915406
guguucuaagauugaagag

SEQ ID NO: 1077451 - RNA, 19 nt, Artificial Sequence
  Description of Artificial Sequence: Synthetic oligonucleotide
  Antisense strand to SEQ ID NO: 1077450
cucuucaaucuuagaacac

SEQ ID NO: 1077452 - RNA, 19 nt, Artificial Sequence
  Description of Artificial Sequence: Synthetic oligonucleotide
  Sense strand starting at position 99 of SEQ ID NO: 915406
augugauaugcuggugaua

SEQ ID NO: 1077453 - RNA, 19 nt, Artificial Sequence
  Description of Artificial Sequence: Synthetic oligonucleotide
  Antisense strand to SEQ ID NO: 1077452
uaucaccagcauaucacau

SEQ ID NO: 1077454 - RNA, 19 nt, Artificial Sequence
  Description of Artificial Sequence: Synthetic oligonucleotide
  Sense strand starting at position 301 of SEQ ID NO: 915406
aggcuaacuguugaucuuu

SEQ ID NO: 1077455 - RNA, 19 nt, Artificial Sequence
  Description of Artificial Sequence: Synthetic oligonucleotide
  Antisense strand to SEQ ID NO: 1077454
aaagaucaacaguuagccu

SEQ ID NO: 1077456 - RNA, 19 nt, Artificial Sequence
  Description of Artificial Sequence: Synthetic oligonucleotide
  Sense strand starting at position 381 of SEQ ID NO: 915406
aauggacuguccuuugcau

SEQ ID NO: 1077457 - RNA, 19 nt, Artificial Sequence
  Description of Artificial Sequence: Synthetic oligonucleotide
  Antisense strand to SEQ ID NO: 1077456
augcaaaggacaguccauu

SEQ ID NO: 1077458 - RNA, 19 nt, Artificial Sequence
  Description of Artificial Sequence: Synthetic oligonucleotide
  Sense strand starting at position 450 of SEQ ID NO: 915406
accuaaggaucugaauuua

SEQ ID NO: 1077459 - RNA, 19 nt, Artificial Sequence
  Description of Artificial Sequence: Synthetic oligonucleotide
  Antisense strand to SEQ ID NO: 1077458
uaaauucagauccuuaggu

SEQ ID NO: 1077460 - RNA, 19 nt, Artificial Sequence
  Description of Artificial Sequence: Synthetic oligonucleotide
  Sense strand starting at position 492 of SEQ ID NO: 915406
gcagaagacagccaguaaa

SEQ ID NO: 1077461 - RNA, 19 nt, Artificial Sequence
  Description of Artificial Sequence: Synthetic oligonucleotide
  Antisense strand to SEQ ID NO: 1077460
uuuacuggcugucuucugc

SEQ ID NO: 1077462 - RNA, 19 nt, Artificial Sequence
  Description of Artificial Sequence: Synthetic oligonucleotide
  Sense strand starting at position 511 of SEQ ID NO: 915406
gaauuucgcccaugucuga

SEQ ID NO: 1077463 - RNA, 19 nt, Artificial Sequence
  Description of Artificial Sequence: Synthetic oligonucleotide
  Antisense strand to SEQ ID NO: 1077462
ucagacaugggcgaaauuc

SEQ ID NO: 1077464 - RNA, 19 nt, Artificial Sequence
  Description of Artificial Sequence: Synthetic oligonucleotide
  Sense strand starting at position 524 of SEQ ID NO: 915406
gucugacucagcuaggaaa

SEQ ID NO: 1077465 - RNA, 19 nt, Artificial Sequence
  Description of Artificial Sequence: Synthetic oligonucleotide
  Antisense strand to SEQ ID NO: 1077464
uuuccuagcugagucagac

SEQ ID NO: 1077466 - RNA, 19 nt, Artificial Sequence
  Description of Artificial Sequence: Synthetic oligonucleotide
  Sense strand starting at position 546 of SEQ ID NO: 915406
uuuagcauucuagaguuaa

SEQ ID NO: 1077467 - RNA, 19 nt, Artificial Sequence
  Description of Artificial Sequence: Synthetic oligonucleotide
  Antisense strand to SEQ ID NO: 1077466
uuaacucuagaaugcuaaa

SEQ ID NO: 1077468 - RNA, 19 nt, Artificial Sequence
  Description of Artificial Sequence: Synthetic oligonucleotide
  Sense strand starting at position 646 of SEQ ID NO: 915406
guagaucucucagccaaga

SEQ ID NO: 1077469 - RNA, 19 nt, Artificial Sequence
  Description of Artificial Sequence: Synthetic oligonucleotide
  Antisense strand to SEQ ID NO: 1077468
ucuuggcugagagaucuac

SEQ ID NO: 1077470 - RNA, 19 nt, Artificial Sequence
  Description of Artificial Sequence: Synthetic oligonucleotide
  Sense strand starting at position 744 of SEQ ID NO: 915406
uuacaagagcaucauguaa

SEQ ID NO: 1077471 - RNA, 19 nt, Artificial Sequence
  Description of Artificial Sequence: Synthetic oligonucleotide
  Antisense strand to SEQ ID NO: 1077470
uuacaugaugcucuuguaa

SEQ ID NO: 1077472 - RNA, 19 nt, Artificial Sequence
  Description of Artificial Sequence: Synthetic oligonucleotide
  Sense strand starting at position 751 of SEQ ID NO: 915406
agcaucauguaagucagaa

SEQ ID NO: 1077473 - RNA, 19 nt, Artificial Sequence
  Description of Artificial Sequence: Synthetic oligonucleotide
  Antisense strand to SEQ ID NO: 1077472
uucugacuuacaugaugcu

SEQ ID NO: 1077474 - RNA, 19 nt, Artificial Sequence
  Description of Artificial Sequence: Synthetic oligonucleotide
  Sense strand starting at position 948 of SEQ ID NO: 915406
cguuauuugugaguaguga

SEQ ID NO: 1077475 - RNA, 19 nt, Artificial Sequence
  Description of Artificial Sequence: Synthetic oligonucleotide
  Antisense strand to SEQ ID NO: 1077474
ucacuacucacaaauaacg

SEQ ID NO: 1077476 - RNA, 19 nt, Artificial Sequence
  Description of Artificial Sequence: Synthetic oligonucleotide
  Sense strand starting at position 963 of SEQ ID NO: 915406
gugacuaugccucaggaaa

SEQ ID NO: 1077477 - RNA, 19 nt, Artificial Sequence
  Description of Artificial Sequence: Synthetic oligonucleotide
  Antisense strand to SEQ ID NO: 1077476
uuuccugaggcauagucac

SEQ ID NO: 1077478 - RNA, 19 nt, Artificial Sequence
  Description of Artificial Sequence: Synthetic oligonucleotide
  Sense strand starting at position 998 of SEQ ID NO: 915406
uaccauugucaguggcaaa

SEQ ID NO: 1077479 - RNA, 19 nt, Artificial Sequence
  Description of Artificial Sequence: Synthetic oligonucleotide
  Antisense strand to SEQ ID NO: 1077478
uuugccacugacaauggua

SEQ ID NO: 1077480 - RNA, 19 nt, Artificial Sequence
  Description of Artificial Sequence: Synthetic oligonucleotide
  Sense strand starting at position 1160 of SEQ ID NO: 915406
cgugaaauguuucugacug

SEQ ID NO: 1077481 - RNA, 19 nt, Artificial Sequence
  Description of Artificial Sequence: Synthetic oligonucleotide
  Antisense strand to SEQ ID NO: 1077480
cagucagaaacauuucacg

SEQ ID NO: 1077482 - RNA, 19 nt, Artificial Sequence
  Description of Artificial Sequence: Synthetic oligonucleotide
  Sense strand starting at position 1180 of SEQ ID NO: 915406
cacggagugcaccauuaaa

SEQ ID NO: 1077483 - RNA, 19 nt, Artificial Sequence
  Description of Artificial Sequence: Synthetic oligonucleotide
  Antisense strand to SEQ ID NO: 1077482
uuuaauggugcacuccgug

SEQ ID NO: 1077484 - RNA, 19 nt, Artificial Sequence
  Description of Artificial Sequence: Synthetic oligonucleotide
  Sense strand starting at position 1198 of SEQ ID NO: 915406
aggacacugucaccucaaa

SEQ ID NO: 1077485 - RNA, 19 nt, Artificial Sequence
  Description of Artificial Sequence: Synthetic oligonucleotide
  Antisense strand to SEQ ID NO: 1077484
uuugaggugacaguguccu

SEQ ID NO: 1077486 - RNA, 19 nt, Artificial Sequence
  Description of Artificial Sequence: Synthetic oligonucleotide
  Sense strand starting at position 1534 of SEQ ID NO: 915406
aggaguugcgacuagggaa

SEQ ID NO: 1077487 - RNA, 19 nt, Artificial Sequence
  Description of Artificial Sequence: Synthetic oligonucleotide
  Antisense strand to SEQ ID NO: 1077486
uucccuagucgcaacuccu

SEQ ID NO: 1077488 - RNA, 19 nt, Artificial Sequence
  Description of Artificial Sequence: Synthetic oligonucleotide
  Sense strand starting at position 1735 of SEQ ID NO: 915406
guagaagcauuugaauaaa

SEQ ID NO: 1077489 - RNA, 19 nt, Artificial Sequence
  Description of Artificial Sequence: Synthetic oligonucleotide
  Antisense strand to SEQ ID NO: 1077488
uuuauucaaaugcuucuac

SEQ ID NO: 1077490 - RNA, 19 nt, Artificial Sequence
  Description of Artificial Sequence: Synthetic oligonucleotide
  Sense strand starting at position 1804 of SEQ ID NO: 915406
cagaaauggaugugcgaau

SEQ ID NO: 1077491 - RNA, 19 nt, Artificial Sequence
  Description of Artificial Sequence: Synthetic oligonucleotide
  Antisense strand to SEQ ID NO: 1077490
auucgcacauccauuucug

SEQ ID NO: 1077492 - RNA, 19 nt, Artificial Sequence
  Description of Artificial Sequence: Synthetic oligonucleotide
  Sense strand starting at position 1819 of SEQ ID NO: 915406
gaaugagucacgcacgcaa

SEQ ID NO: 1077493 - RNA, 19 nt, Artificial Sequence
  Description of Artificial Sequence: Synthetic oligonucleotide
  Antisense strand to SEQ ID NO: 1077492
uugcgugcgugacucauuc

SEQ ID NO: 1077494 - RNA, 19 nt, Artificial Sequence
  Description of Artificial Sequence: Synthetic oligonucleotide
  Sense strand starting at position 2054 of SEQ ID NO: 915406
ugggaacuguagucuucuu

SEQ ID NO: 1077495 - RNA, 19 nt, Artificial Sequence
  Description of Artificial Sequence: Synthetic oligonucleotide
  Antisense strand to SEQ ID NO: 1077494
aagaagacuacaguuccca

SEQ ID NO: 1077496 - RNA, 19 nt, Artificial Sequence
  Description of Artificial Sequence: Synthetic oligonucleotide
  Sense strand starting at position 2269 of SEQ ID NO: 915406
ggacgaucuggucggauag

SEQ ID NO: 1077497 - RNA, 19 nt, Artificial Sequence
  Description of Artificial Sequence: Synthetic oligonucleotide
  Antisense strand to SEQ ID NO: 1077496
cuauccgaccagaucgucc

SEQ ID NO: 1077498 - RNA, 19 nt, Artificial Sequence
  Description of Artificial Sequence: Synthetic oligonucleotide
  Sense strand starting at position 2451 of SEQ ID NO: 915406
gauugagagagucgguuua

SEQ ID NO: 1077499 - RNA, 19 nt, Artificial Sequence
  Description of Artificial Sequence: Synthetic oligonucleotide
  Antisense strand to SEQ ID NO: 1077498
uaaaccgacucucucaauc

SEQ ID NO: 1077500 - RNA, 19 nt, Artificial Sequence
  Description of Artificial Sequence: Synthetic oligonucleotide
  Sense strand starting at position 2453 of SEQ ID NO: 915406
uugagagagucgguuuacu

SEQ ID NO: 1077501 - RNA, 19 nt, Artificial Sequence
  Description of Artificial Sequence: Synthetic oligonucleotide
  Antisense strand to SEQ ID NO: 1077500
aguaaaccgacucucucaa

SEQ ID NO: 1077502 - RNA, 19 nt, Artificial Sequence
  Description of Artificial Sequence: Synthetic oligonucleotide
  Sense strand starting at position 2473 of SEQ ID NO: 915406
uugggcuuggaguaucauu

SEQ ID NO: 1077503 - RNA, 19 nt, Artificial Sequence
  Description of Artificial Sequence: Synthetic oligonucleotide
  Antisense strand to SEQ ID NO: 1077502
aaugauacuccaagcccaa

SEQ ID NO: 1077504 - RNA, 19 nt, Artificial Sequence
  Description of Artificial Sequence: Synthetic oligonucleotide
  Sense strand starting at position 2495 of SEQ ID NO: 915406
aucuguuaacaguacaguu

SEQ ID NO: 1077505 - RNA, 19 nt, Artificial Sequence
  Description of Artificial Sequence: Synthetic oligonucleotide
  Antisense strand to SEQ ID NO: 1077504
aacuguacuguuaacagau

SEQ ID NO: 1077506 - RNA, 19 nt, Artificial Sequence
  Description of Artificial Sequence: Synthetic oligonucleotide
  Sense strand starting at position 2512 of SEQ ID NO: 915406
uugagagaguuggugucuu

SEQ ID NO: 1077507 - RNA, 19 nt, Artificial Sequence
  Description of Artificial Sequence: Synthetic oligonucleotide
  Antisense strand to SEQ ID NO: 1077506
aagacaccaacucucucaa

SEQ ID NO: 1077508 - RNA, 19 nt, Artificial Sequence
  Description of Artificial Sequence: Synthetic oligonucleotide
  Sense strand starting at position 2929 of SEQ ID NO: 915406
gggagauagcgugauucua

SEQ ID NO: 1077509 - RNA, 19 nt, Artificial Sequence
  Description of Artificial Sequence: Synthetic oligonucleotide
  Antisense strand to SEQ ID NO: 1077508
uagaaucacgcuaucuccc

SEQ ID NO: 1077510 - RNA, 19 nt, Artificial Sequence
  Description of Artificial Sequence: Synthetic oligonucleotide
  Sense strand starting at position 3229 of SEQ ID NO: 915406
cagaguaacaucggucaug

SEQ ID NO: 1077511 - RNA, 19 nt, Artificial Sequence
  Description of Artificial Sequence: Synthetic oligonucleotide
  Antisense strand to SEQ ID NO: 1077510
caugaccgauguuacucug

SEQ ID NO: 1077512 - RNA, 19 nt, Artificial Sequence
  Description of Artificial Sequence: Synthetic oligonucleotide
  Sense strand starting at position 3232 of SEQ ID NO: 915406
aguaacaucggucauggau

SEQ ID NO: 1077513 - RNA, 19 nt, Artificial Sequence
  Description of Artificial Sequence: Synthetic oligonucleotide
  Antisense strand to SEQ ID NO: 1077512
auccaugaccgauguuacu

SEQ ID NO: 1077514 - RNA, 19 nt, Artificial Sequence
  Description of Artificial Sequence: Synthetic oligonucleotide
  Sense strand starting at position 3235 of SEQ ID NO: 915406
aacaucggucauggauaaa

SEQ ID NO: 1077515 - RNA, 19 nt, Artificial Sequence
  Description of Artificial Sequence: Synthetic oligonucleotide
  Antisense strand to SEQ ID NO: 1077514
uuuauccaugaccgauguu

SEQ ID NO: 1077516 - RNA, 19 nt, Artificial Sequence
  Description of Artificial Sequence: Synthetic oligonucleotide
  Sense strand starting at position 3339 of SEQ ID NO: 915406
uuucuugugucacugaaac

SEQ ID NO: 1077517 - RNA, 19 nt, Artificial Sequence
  Description of Artificial Sequence: Synthetic oligonucleotide
  Antisense strand to SEQ ID NO: 1077516
guuucagugacacaagaaa

SEQ ID NO: 1077518 - RNA, 19 nt, Artificial Sequence
  Description of Artificial Sequence: Synthetic oligonucleotide
  Sense strand starting at position 3815 of SEQ ID NO: 915406
ucucuaaguaaugguggua

SEQ ID NO: 1077519 - RNA, 19 nt, Artificial Sequence
  Description of Artificial Sequence: Synthetic oligonucleotide
  Antisense strand to SEQ ID NO: 1077518
uaccaccauuacuuagaga

SEQ ID NO: 1077520 - RNA, 19 nt, Artificial Sequence
  Description of Artificial Sequence: Synthetic oligonucleotide
  Sense strand starting at position 3818 of SEQ ID NO: 915406
cuaaguaauggugguaagu

SEQ ID NO: 1077521 - RNA, 19 nt, Artificial Sequence
  Description of Artificial Sequence: Synthetic oligonucleotide
  Antisense strand to SEQ ID NO: 1077520
acuuaccaccauuacuuag

SEQ ID NO: 1077522 - RNA, 19 nt, Artificial Sequence
  Description of Artificial Sequence: Synthetic oligonucleotide
  Sense strand starting at position 3845 of SEQ ID NO: 915406
aggagcaaugucuaccauu

SEQ ID NO: 1077523 - RNA, 19 nt, Artificial Sequence
  Description of Artificial Sequence: Synthetic oligonucleotide
  Antisense strand to SEQ ID NO: 1077522
aaugguagacauugcuccu

SEQ ID NO: 1077524 - RNA, 19 nt, Artificial Sequence
  Description of Artificial Sequence: Synthetic oligonucleotide
  Sense strand starting at position 27 of SEQ ID NO: 915407
gggaacuguuguccuccaa

SEQ ID NO: 1077525 - RNA, 19 nt, Artificial Sequence
  Description of Artificial Sequence: Synthetic oligonucleotide
  Antisense strand to SEQ ID NO: 1077524
uuggaggacaacaguuccc

SEQ ID NO: 1077526 - RNA, 19 nt, Artificial Sequence
  Description of Artificial Sequence: Synthetic oligonucleotide
  Sense strand starting at position 31 of SEQ ID NO: 915407
acuguuguccuccaaguau

SEQ ID NO: 1077527 - RNA, 19 nt, Artificial Sequence
  Description of Artificial Sequence: Synthetic oligonucleotide
  Antisense strand to SEQ ID NO: 1077526
auacuuggaggacaacagu

SEQ ID NO: 1077528 - RNA, 19 nt, Artificial Sequence
  Description of Artificial Sequence: Synthetic oligonucleotide
  Sense strand starting at position 81 of SEQ ID NO: 915407
cuggauugcuacucagcaa

SEQ ID NO: 1077529 - RNA, 19 nt, Artificial Sequence
  Description of Artificial Sequence: Synthetic oligonucleotide
  Antisense strand to SEQ ID NO: 1077528
uugcugaguagcaauccag

SEQ ID NO: 1077530 - RNA, 19 nt, Artificial Sequence
  Description of Artificial Sequence: Synthetic oligonucleotide
  Sense strand starting at position 177 of SEQ ID NO: 915407
aaauguauuguauaaggca

SEQ ID NO: 1077531 - RNA, 19 nt, Artificial Sequence
  Description of Artificial Sequence: Synthetic oligonucleotide
  Antisense strand to SEQ ID NO: 1077530
ugccuuauacaauacauuu

SEQ ID NO: 1077532 - RNA, 19 nt, Artificial Sequence
  Description of Artificial Sequence: Synthetic oligonucleotide
  Sense strand starting at position 207 of SEQ ID NO: 915407
gacuacuuauuccuuggga

SEQ ID NO: 1077533 - RNA, 19 nt, Artificial Sequence
  Description of Artificial Sequence: Synthetic oligonucleotide
  Antisense strand to SEQ ID NO: 1077532
ucccaaggaauaaguaguc

SEQ ID NO: 1077534 - RNA, 19 nt, Artificial Sequence
  Description of Artificial Sequence: Synthetic oligonucleotide
  Sense strand starting at position 208 of SEQ ID NO: 915407
acuacuuauuccuugggaa

SEQ ID NO: 1077535 - RNA, 19 nt, Artificial Sequence
  Description of Artificial Sequence: Synthetic oligonucleotide
  Antisense strand to SEQ ID NO: 1077534
uucccaaggaauaaguagu

SEQ ID NO: 1077536 - RNA, 19 nt, Artificial Sequence
  Description of Artificial Sequence: Synthetic oligonucleotide
  Sense strand starting at position 209 of SEQ ID NO: 915407
cuacuuauuccuugggaau

SEQ ID NO: 1077537 - RNA, 19 nt, Artificial Sequence
  Description of Artificial Sequence: Synthetic oligonucleotide
  Antisense strand to SEQ ID NO: 1077536
auucccaaggaauaaguag

SEQ ID NO: 1077538 - RNA, 19 nt, Artificial Sequence
  Description of Artificial Sequence: Synthetic oligonucleotide
  Sense strand starting at position 346 of SEQ ID NO: 915407
cuaaauuaugucugucaca

SEQ ID NO: 1077539 - RNA, 19 nt, Artificial Sequence
  Description of Artificial Sequence: Synthetic oligonucleotide
  Antisense strand to SEQ ID NO: 1077538
ugugacagacauaauuuag

SEQ ID NO: 1077540 - RNA, 19 nt, Artificial Sequence
  Description of Artificial Sequence: Synthetic oligonucleotide
  Sense strand starting at position 501 of SEQ ID NO: 915407
aggaguuccuaguugaagu

SEQ ID NO: 1077541 - RNA, 19 nt, Artificial Sequence
  Description of Artificial Sequence: Synthetic oligonucleotide
  Antisense strand to SEQ ID NO: 1077540
acuucaacuaggaacuccu

SEQ ID NO: 1077542 - RNA, 19 nt, Artificial Sequence
  Description of Artificial Sequence: Synthetic oligonucleotide
  Sense strand starting at position 502 of SEQ ID NO: 915407
ggaguuccuaguugaagug

SEQ ID NO: 1077543 - RNA, 19 nt, Artificial Sequence
  Description of Artificial Sequence: Synthetic oligonucleotide
  Antisense strand to SEQ ID NO: 1077542
cacuucaacuaggaacucc

SEQ ID NO: 1077544 - RNA, 19 nt, Artificial Sequence
  Description of Artificial Sequence: Synthetic oligonucleotide
  Sense strand starting at position 527 of SEQ ID NO: 915407
cagggaguguguucuaaga

SEQ ID NO: 1077545 - RNA, 19 nt, Artificial Sequence
  Description of Artificial Sequence: Synthetic oligonucleotide
  Antisense strand to SEQ ID NO: 1077544
ucuuagaacacacucccug

SEQ ID NO: 1077546 - RNA, 19 nt, Artificial Sequence
  Description of Artificial Sequence: Synthetic oligonucleotide
  Sense strand starting at position 535 of SEQ ID NO: 915407
guguucuaagauugaagag

SEQ ID NO: 1077547 - RNA, 19 nt, Artificial Sequence
  Description of Artificial Sequence: Synthetic oligonucleotide
  Antisense strand to SEQ ID NO: 1077546
cucuucaaucuuagaacac

SEQ ID NO: 1077548 - RNA, 19 nt, Artificial Sequence
  Description of Artificial Sequence: Synthetic oligonucleotide
  Sense strand starting at position 560 of SEQ ID NO: 915407
augugauaugcuggugaua

SEQ ID NO: 1077549 - RNA, 19 nt, Artificial Sequence
  Description of Artificial Sequence: Synthetic oligonucleotide
  Antisense strand to SEQ ID NO: 1077548
uaucaccagcauaucacau

SEQ ID NO: 1077550 - RNA, 19 nt, Artificial Sequence
  Description of Artificial Sequence: Synthetic oligonucleotide
  Sense strand starting at position 762 of SEQ ID NO: 915407
aggcuaacuguugaucuuu

SEQ ID NO: 1077551 - RNA, 19 nt, Artificial Sequence
  Description of Artificial Sequence: Synthetic oligonucleotide
  Antisense strand to SEQ ID NO: 1077550
aaagaucaacaguuagccu

SEQ ID NO: 1077552 - RNA, 19 nt, Artificial Sequence
  Description of Artificial Sequence: Synthetic oligonucleotide
  Sense strand starting at position 911 of SEQ ID NO: 915407
accuaaggaucugaauuua

SEQ ID NO: 1077553 - RNA, 19 nt, Artificial Sequence
  Description of Artificial Sequence: Synthetic oligonucleotide
  Antisense strand to SEQ ID NO: 1077552
uaaauucagauccuuaggu

SEQ ID NO: 1077554 - RNA, 19 nt, Artificial Sequence
  Description of Artificial Sequence: Synthetic oligonucleotide
  Sense strand starting at position 953 of SEQ ID NO: 915407
gcagaagacagccaguaaa

SEQ ID NO: 1077555 - RNA, 19 nt, Artificial Sequence
  Description of Artificial Sequence: Synthetic oligonucleotide
  Antisense strand to SEQ ID NO: 1077554
uuuacuggcugucuucugc

SEQ ID NO: 1077556 - RNA, 19 nt, Artificial Sequence
  Description of Artificial Sequence: Synthetic oligonucleotide
  Sense strand starting at position 972 of SEQ ID NO: 915407
gaauuucgcccaugucuga

SEQ ID NO: 1077557 - RNA, 19 nt, Artificial Sequence
  Description of Artificial Sequence: Synthetic oligonucleotide
  Antisense strand to SEQ ID NO: 1077556
ucagacaugggcgaaauuc

SEQ ID NO: 1077558 - RNA, 19 nt, Artificial Sequence
  Description of Artificial Sequence: Synthetic oligonucleotide
  Sense strand starting at position 985 of SEQ ID NO: 915407
gucugacucagcuaggaaa

SEQ ID NO: 1077559 - RNA, 19 nt, Artificial Sequence
  Description of Artificial Sequence: Synthetic oligonucleotide
  Antisense strand to SEQ ID NO: 1077558
uuuccuagcugagucagac

SEQ ID NO: 1077560 - RNA, 19 nt, Artificial Sequence
  Description of Artificial Sequence: Synthetic oligonucleotide
  Sense strand starting at position 1007 of SEQ ID NO: 915407
uuuagcauucuagaguuaa

SEQ ID NO: 1077561 - RNA, 19 nt, Artificial Sequence
  Description of Artificial Sequence: Synthetic oligonucleotide
  Antisense strand to SEQ ID NO: 1077560
uuaacucuagaaugcuaaa

SEQ ID NO: 1077562 - RNA, 19 nt, Artificial Sequence
  Description of Artificial Sequence: Synthetic oligonucleotide
  Sense strand starting at position 1107 of SEQ ID NO: 915407
guagaucucucagccaaga

SEQ ID NO: 1077563 - RNA, 19 nt, Artificial Sequence
  Description of Artificial Sequence: Synthetic oligonucleotide
  Antisense strand to SEQ ID NO: 1077562
ucuuggcugagagaucuac

SEQ ID NO: 1077564 - RNA, 19 nt, Artificial Sequence
  Description of Artificial Sequence: Synthetic oligonucleotide
  Sense strand starting at position 1205 of SEQ ID NO: 915407
uuacaagagcaucauguaa

SEQ ID NO: 1077565 - RNA, 19 nt, Artificial Sequence
  Description of Artificial Sequence: Synthetic oligonucleotide
  Antisense strand to SEQ ID NO: 1077564
uuacaugaugcucuuguaa

SEQ ID NO: 1077566 - RNA, 19 nt, Artificial Sequence
  Description of Artificial Sequence: Synthetic oligonucleotide
  Sense strand starting at position 1212 of SEQ ID NO: 915407
agcaucauguaagucagaa

SEQ ID NO: 1077567 - RNA, 19 nt, Artificial Sequence
  Description of Artificial Sequence: Synthetic oligonucleotide
  Antisense strand to SEQ ID NO: 1077566
uucugacuuacaugaugcu

SEQ ID NO: 1077568 - RNA, 19 nt, Artificial Sequence
  Description of Artificial Sequence: Synthetic oligonucleotide
  Sense strand starting at position 1409 of SEQ ID NO: 915407
cguuauuugugaguaguga

SEQ ID NO: 1077569 - RNA, 19 nt, Artificial Sequence
  Description of Artificial Sequence: Synthetic oligonucleotide
  Antisense strand to SEQ ID NO: 1077568
ucacuacucacaaauaacg

SEQ ID NO: 1077570 - RNA, 19 nt, Artificial Sequence
  Description of Artificial Sequence: Synthetic oligonucleotide
  Sense strand starting at position 1424 of SEQ ID NO: 915407
gugacuaugccucaggaaa

SEQ ID NO: 1077571 - RNA, 19 nt, Artificial Sequence
  Description of Artificial Sequence: Synthetic oligonucleotide
  Antisense strand to SEQ ID NO: 1077570
uuuccugaggcauagucac

SEQ ID NO: 1077572 - RNA, 19 nt, Artificial Sequence
  Description of Artificial Sequence: Synthetic oligonucleotide
  Sense strand starting at position 1641 of SEQ ID NO: 915407
cacggagugcaccauuaaa

SEQ ID NO: 1077573 - RNA, 19 nt, Artificial Sequence
  Description of Artificial Sequence: Synthetic oligonucleotide
  Antisense strand to SEQ ID NO: 1077572
uuuaauggugcacuccgug

SEQ ID NO: 1077574 - RNA, 19 nt, Artificial Sequence
  Description of Artificial Sequence: Synthetic oligonucleotide
  Sense strand starting at position 1659 of SEQ ID NO: 915407
aggacacugucaccucaaa

SEQ ID NO: 1077575 - RNA, 19 nt, Artificial Sequence
  Description of Artificial Sequence: Synthetic oligonucleotide
  Antisense strand to SEQ ID NO: 1077574
uuugaggugacaguguccu

SEQ ID NO: 1077576 - RNA, 19 nt, Artificial Sequence
  Description of Artificial Sequence: Synthetic oligonucleotide
  Sense strand starting at position 1995 of SEQ ID NO: 915407
aggaguugcgacuagggaa

SEQ ID NO: 1077577 - RNA, 19 nt, Artificial Sequence
  Description of Artificial Sequence: Synthetic oligonucleotide
  Antisense strand to SEQ ID NO: 1077576
uucccuagucgcaacuccu

SEQ ID NO: 1077578 - RNA, 19 nt, Artificial Sequence
  Description of Artificial Sequence: Synthetic oligonucleotide
  Sense strand starting at position 2196 of SEQ ID NO: 915407
guagaagcauuugaauaaa

SEQ ID NO: 1077579 - RNA, 19 nt, Artificial Sequence
  Description of Artificial Sequence: Synthetic oligonucleotide
  Antisense strand to SEQ ID NO: 1077578
uuuauucaaaugcuucuac

SEQ ID NO: 1077580 - RNA, 19 nt, Artificial Sequence
  Description of Artificial Sequence: Synthetic oligonucleotide
  Sense strand starting at position 2265 of SEQ ID NO: 915407
cagaaauggaugugcgaau

SEQ ID NO: 1077581 - RNA, 19 nt, Artificial Sequence
  Description of Artificial Sequence: Synthetic oligonucleotide
  Antisense strand to SEQ ID NO: 1077580
auucgcacauccauuucug

SEQ ID NO: 1077582 - RNA, 19 nt, Artificial Sequence
  Description of Artificial Sequence: Synthetic oligonucleotide
  Sense strand starting at position 2515 of SEQ ID NO: 915407
ugggaacuguagucuucuu

SEQ ID NO: 1077583 - RNA, 19 nt, Artificial Sequence
  Description of Artificial Sequence: Synthetic oligonucleotide
  Antisense strand to SEQ ID NO: 1077582
aagaagacuacaguuccca

SEQ ID NO: 1077584 - RNA, 19 nt, Artificial Sequence
  Description of Artificial Sequence: Synthetic oligonucleotide
  Sense strand starting at position 2730 of SEQ ID NO: 915407
ggacgaucuggucggauag

SEQ ID NO: 1077585 - RNA, 19 nt, Artificial Sequence
  Description of Artificial Sequence: Synthetic oligonucleotide
  Antisense strand to SEQ ID NO: 1077584
cuauccgaccagaucgucc

SEQ ID NO: 1077586 - RNA, 19 nt, Artificial Sequence
  Description of Artificial Sequence: Synthetic oligonucleotide
  Sense strand starting at position 2912 of SEQ ID NO: 915407
gauugagagagucgguuua

SEQ ID NO: 1077587 - RNA, 19 nt, Artificial Sequence
  Description of Artificial Sequence: Synthetic oligonucleotide
  Antisense strand to SEQ ID NO: 1077586
uaaaccgacucucucaauc

SEQ ID NO: 1077588 - RNA, 19 nt, Artificial Sequence
  Description of Artificial Sequence: Synthetic oligonucleotide
  Sense strand starting at position 2914 of SEQ ID NO: 915407
uugagagagucgguuuacu

SEQ ID NO: 1077589 - RNA, 19 nt, Artificial Sequence
  Description of Artificial Sequence: Synthetic oligonucleotide
  Antisense strand to SEQ ID NO: 1077588
aguaaaccgacucucucaa

SEQ ID NO: 1077590 - RNA, 19 nt, Artificial Sequence
  Description of Artificial Sequence: Synthetic oligonucleotide
  Sense strand starting at position 2934 of SEQ ID NO: 915407
uugggcuuggaguaucauu

SEQ ID NO: 1077591 - RNA, 19 nt, Artificial Sequence
  Description of Artificial Sequence: Synthetic oligonucleotide
  Antisense strand to SEQ ID NO: 1077590
aaugauacuccaagcccaa

SEQ ID NO: 1077592 - RNA, 19 nt, Artificial Sequence
  Description of Artificial Sequence: Synthetic oligonucleotide
  Sense strand starting at position 2956 of SEQ ID NO: 915407
aucuguuaacaguacaguu

SEQ ID NO: 1077593 - RNA, 19 nt, Artificial Sequence
  Description of Artificial Sequence: Synthetic oligonucleotide
  Antisense strand to SEQ ID NO: 1077592
aacuguacuguuaacagau

SEQ ID NO: 1077594 - RNA, 19 nt, Artificial Sequence
  Description of Artificial Sequence: Synthetic oligonucleotide
  Sense strand starting at position 3390 of SEQ ID NO: 915407
gggagauagcgugauucua

SEQ ID NO: 1077595 - RNA, 19 nt, Artificial Sequence
  Description of Artificial Sequence: Synthetic oligonucleotide
  Antisense strand to SEQ ID NO: 1077594
uagaaucacgcuaucuccc

SEQ ID NO: 1077596 - RNA, 19 nt, Artificial Sequence
  Description of Artificial Sequence: Synthetic oligonucleotide
  Sense strand starting at position 3690 of SEQ ID NO: 915407
cagaguaacaucggucaug

SEQ ID NO: 1077597 - RNA, 19 nt, Artificial Sequence
  Description of Artificial Sequence: Synthetic oligonucleotide
  Antisense strand to SEQ ID NO: 1077596
caugaccgauguuacucug

SEQ ID NO: 1077598 - RNA, 19 nt, Artificial Sequence
  Description of Artificial Sequence: Synthetic oligonucleotide
  Sense strand starting at position 3693 of SEQ ID NO: 915407
aguaacaucggucauggau

SEQ ID NO: 1077599 - RNA, 19 nt, Artificial Sequence
  Description of Artificial Sequence: Synthetic oligonucleotide
  Antisense strand to SEQ ID NO: 1077598
auccaugaccgauguuacu

SEQ ID NO: 1077600 - RNA, 19 nt, Artificial Sequence
  Description of Artificial Sequence: Synthetic oligonucleotide
  Sense strand starting at position 3696 of SEQ ID NO: 915407
aacaucggucauggauaaa

SEQ ID NO: 1077601 - RNA, 19 nt, Artificial Sequence
  Description of Artificial Sequence: Synthetic oligonucleotide
  Antisense strand to SEQ ID NO: 1077600
uuuauccaugaccgauguu

SEQ ID NO: 1077602 - RNA, 19 nt, Artificial Sequence
  Description of Artificial Sequence: Synthetic oligonucleotide
  Sense strand starting at position 3800 of SEQ ID NO: 915407
uuucuugugucacugaaac

SEQ ID NO: 1077603 - RNA, 19 nt, Artificial Sequence
  Description of Artificial Sequence: Synthetic oligonucleotide
  Antisense strand to SEQ ID NO: 1077602
guuucagugacacaagaaa

SEQ ID NO: 1077604 - RNA, 19 nt, Artificial Sequence
  Description of Artificial Sequence: Synthetic oligonucleotide
  Sense strand starting at position 40 of SEQ ID NO: 915408
ucuucuguuuaugugagga

SEQ ID NO: 1077605 - RNA, 19 nt, Artificial Sequence
  Description of Artificial Sequence: Synthetic oligonucleotide
  Antisense strand to SEQ ID NO: 1077604
uccucacauaaacagaaga

SEQ ID NO: 1077606 - RNA, 19 nt, Artificial Sequence
  Description of Artificial Sequence: Synthetic oligonucleotide
  Sense strand starting at position 96 of SEQ ID NO: 915408
ugcuguuaccuggauugua

SEQ ID NO: 1077607 - RNA, 19 nt, Artificial Sequence
  Description of Artificial Sequence: Synthetic oligonucleotide
  Antisense strand to SEQ ID NO: 1077606
uacaauccagguaacagca

SEQ ID NO: 1077608 - RNA, 19 nt, Artificial Sequence
  Description of Artificial Sequence: Synthetic oligonucleotide
  Sense strand starting at position 451 of SEQ ID NO: 915408
uuccacauuuguucuaguu

SEQ ID NO: 1077609 - RNA, 19 nt, Artificial Sequence
  Description of Artificial Sequence: Synthetic oligonucleotide
  Antisense strand to SEQ ID NO: 1077608
aacuagaacaaauguggaa

SEQ ID NO: 1077610 - RNA, 19 nt, Artificial Sequence
  Description of Artificial Sequence: Synthetic oligonucleotide
  Sense strand starting at position 554 of SEQ ID NO: 915408
agcacuuauaacgaaaggu

SEQ ID NO: 1077611 - RNA, 19 nt, Artificial Sequence
  Description of Artificial Sequence: Synthetic oligonucleotide
  Antisense strand to SEQ ID NO: 1077610
accuuucguuauaagugcu

SEQ ID NO: 1077612 - RNA, 19 nt, Artificial Sequence
  Description of Artificial Sequence: Synthetic oligonucleotide
  Sense strand starting at position 593 of SEQ ID NO: 915408
aaauaagacuguuugaagu

SEQ ID NO: 1077613 - RNA, 19 nt, Artificial Sequence
  Description of Artificial Sequence: Synthetic oligonucleotide
  Antisense strand to SEQ ID NO: 1077612
acuucaaacagucuuauuu

SEQ ID NO: 1077614 - RNA, 19 nt, Artificial Sequence
  Description of Artificial Sequence: Synthetic oligonucleotide
  Sense strand starting at position 609 of SEQ ID NO: 915408
aguuguucccauggagaau

SEQ ID NO: 1077615 - RNA, 19 nt, Artificial Sequence
  Description of Artificial Sequence: Synthetic oligonucleotide
  Antisense strand to SEQ ID NO: 1077614
auucuccaugggaacaacu

SEQ ID NO: 1077616 - RNA, 19 nt, Artificial Sequence
  Description of Artificial Sequence: Synthetic oligonucleotide
  Sense strand starting at position 610 of SEQ ID NO: 915408
guuguucccauggagaauc

SEQ ID NO: 1077617 - RNA, 19 nt, Artificial Sequence
  Description of Artificial Sequence: Synthetic oligonucleotide
  Antisense strand to SEQ ID NO: 1077616
gauucuccaugggaacaac

SEQ ID NO: 1077618 - RNA, 19 nt, Artificial Sequence
  Description of Artificial Sequence: Synthetic oligonucleotide
  Sense strand starting at position 643 of SEQ ID NO: 915408
aacuucugagcaggaagau

SEQ ID NO: 1077619 - RNA, 19 nt, Artificial Sequence
  Description of Artificial Sequence: Synthetic oligonucleotide
  Antisense strand to SEQ ID NO: 1077618
aucuuccugcucagaaguu

SEQ ID NO: 1077620 - RNA, 19 nt, Artificial Sequence
  Description of Artificial Sequence: Synthetic oligonucleotide
  Sense strand starting at position 709 of SEQ ID NO: 915408
gcugaagagacuuguccaa

SEQ ID NO: 1077621 - RNA, 19 nt, Artificial Sequence
  Description of Artificial Sequence: Synthetic oligonucleotide
  Antisense strand to SEQ ID NO: 1077620
uuggacaagucucuucagc

SEQ ID NO: 1077622 - RNA, 19 nt, Artificial Sequence
  Description of Artificial Sequence: Synthetic oligonucleotide
  Sense strand starting at position 1125 of SEQ ID NO: 915408
aaguacuuggcuuacugua

SEQ ID NO: 1077623 - RNA, 19 nt, Artificial Sequence
  Description of Artificial Sequence: Synthetic oligonucleotide
  Antisense strand to SEQ ID NO: 1077622
uacaguaagccaaguacuu

SEQ ID NO: 1077624 - RNA, 19 nt, Artificial Sequence
  Description of Artificial Sequence: Synthetic oligonucleotide
  Sense strand starting at position 1130 of SEQ ID NO: 915408
cuuggcuuacuguaagcaa

SEQ ID NO: 1077625 - RNA, 19 nt, Artificial Sequence
  Description of Artificial Sequence: Synthetic oligonucleotide
  Antisense strand to SEQ ID NO: 1077624
uugcuuacaguaagccaag

SEQ ID NO: 1077626 - RNA, 19 nt, Artificial Sequence
  Description of Artificial Sequence: Synthetic oligonucleotide
  Sense strand starting at position 1273 of SEQ ID NO: 915408
ccagcuagccuggaacuau

SEQ ID NO: 1077627 - RNA, 19 nt, Artificial Sequence
  Description of Artificial Sequence: Synthetic oligonucleotide
  Antisense strand to SEQ ID NO: 1077626
auaguuccaggcuagcugg

SEQ ID NO: 1077628 - RNA, 19 nt, Artificial Sequence
  Description of Artificial Sequence: Synthetic oligonucleotide
  Sense strand starting at position 1435 of SEQ ID NO: 915408
agacaaucuuccucugguu

SEQ ID NO: 1077629 - RNA, 19 nt, Artificial Sequence
  Description of Artificial Sequence: Synthetic oligonucleotide
  Antisense strand to SEQ ID NO: 1077628
aaccagaggaagauugucu

SEQ ID NO: 1077630 - RNA, 19 nt, Artificial Sequence
  Description of Artificial Sequence: Synthetic oligonucleotide
  Sense strand starting at position 1533 of SEQ ID NO: 915408
agggaaugcacuugaaguu

SEQ ID NO: 1077631 - RNA, 19 nt, Artificial Sequence
  Description of Artificial Sequence: Synthetic oligonucleotide
  Antisense strand to SEQ ID NO: 1077630
aacuucaagugcauucccu

SEQ ID NO: 1077632 - RNA, 19 nt, Artificial Sequence
  Description of Artificial Sequence: Synthetic oligonucleotide
  Sense strand starting at position 1534 of SEQ ID NO: 915408
gggaaugcacuugaaguuu

SEQ ID NO: 1077633 - RNA, 19 nt, Artificial Sequence
  Description of Artificial Sequence: Synthetic oligonucleotide
  Antisense strand to SEQ ID NO: 1077632
aaacuucaagugcauuccc

SEQ ID NO: 1077634 - RNA, 19 nt, Artificial Sequence
  Description of Artificial Sequence: Synthetic oligonucleotide
  Sense strand starting at position 2159 of SEQ ID NO: 915408
gccuguugcagcgcuuauu

SEQ ID NO: 1077635 - RNA, 19 nt, Artificial Sequence
  Description of Artificial Sequence: Synthetic oligonucleotide
  Antisense strand to SEQ ID NO: 1077634
aauaagcgcugcaacaggc

SEQ ID NO: 1077636 - RNA, 19 nt, Artificial Sequence
  Description of Artificial Sequence: Synthetic oligonucleotide
  Sense strand starting at position 2162 of SEQ ID NO: 915408
uguugcagcgcuuauuuau

SEQ ID NO: 1077637 - RNA, 19 nt, Artificial Sequence
  Description of Artificial Sequence: Synthetic oligonucleotide
  Antisense strand to SEQ ID NO: 1077636
auaaauaagcgcugcaaca

SEQ ID NO: 1077638 - RNA, 19 nt, Artificial Sequence
  Description of Artificial Sequence: Synthetic oligonucleotide
  Sense strand starting at position 2183 of SEQ ID NO: 915408
ggcgcuuuagaguuuccga

SEQ ID NO: 1077639 - RNA, 19 nt, Artificial Sequence
  Description of Artificial Sequence: Synthetic oligonucleotide
  Antisense strand to SEQ ID NO: 1077638
ucggaaacucuaaagcgcc

SEQ ID NO: 1077640 - RNA, 19 nt, Artificial Sequence
  Description of Artificial Sequence: Synthetic oligonucleotide
  Sense strand starting at position 2184 of SEQ ID NO: 915408
gcgcuuuagaguuuccgaa

SEQ ID NO: 1077641 - RNA, 19 nt, Artificial Sequence
  Description of Artificial Sequence: Synthetic oligonucleotide
  Antisense strand to SEQ ID NO: 1077640
uucggaaacucuaaagcgc

SEQ ID NO: 1077642 - RNA, 19 nt, Artificial Sequence
  Description of Artificial Sequence: Synthetic oligonucleotide
  Sense strand starting at position 2191 of SEQ ID NO: 915408
agaguuuccgaagagcugu

SEQ ID NO: 1077643 - RNA, 19 nt, Artificial Sequence
  Description of Artificial Sequence: Synthetic oligonucleotide
  Antisense strand to SEQ ID NO: 1077642
acagcucuucggaaacucu

SEQ ID NO: 1077644 - RNA, 19 nt, Artificial Sequence
  Description of Artificial Sequence: Synthetic oligonucleotide
  Sense strand starting at position 2232 of SEQ ID NO: 915408
aaacuugugagguguggau

SEQ ID NO: 1077645 - RNA, 19 nt, Artificial Sequence
  Description of Artificial Sequence: Synthetic oligonucleotide
  Antisense strand to SEQ ID NO: 1077644
auccacaccucacaaguuu

SEQ ID NO: 1077646 - RNA, 19 nt, Artificial Sequence
  Description of Artificial Sequence: Synthetic oligonucleotide
  Sense strand starting at position 2236 of SEQ ID NO: 915408
uugugagguguggaucuua

SEQ ID NO: 1077647 - RNA, 19 nt, Artificial Sequence
  Description of Artificial Sequence: Synthetic oligonucleotide
  Antisense strand to SEQ ID NO: 1077646
uaagauccacaccucacaa

SEQ ID NO: 1077648 - RNA, 19 nt, Artificial Sequence
  Description of Artificial Sequence: Synthetic oligonucleotide
  Sense strand starting at position 2303 of SEQ ID NO: 915408
cgggagauggccggugaaa

SEQ ID NO: 1077649 - RNA, 19 nt, Artificial Sequence
  Description of Artificial Sequence: Synthetic oligonucleotide
  Antisense strand to SEQ ID NO: 1077648
uuucaccggccaucucccg

SEQ ID NO: 1077650 - RNA, 19 nt, Artificial Sequence
  Description of Artificial Sequence: Synthetic oligonucleotide
  Sense strand starting at position 2481 of SEQ ID NO: 915408
gccuguuauuucucaauga

SEQ ID NO: 1077651 - RNA, 19 nt, Artificial Sequence
  Description of Artificial Sequence: Synthetic oligonucleotide
  Antisense strand to SEQ ID NO: 1077650
ucauugagaaauaacaggc

SEQ ID NO: 1077652 - RNA, 19 nt, Artificial Sequence
  Description of Artificial Sequence: Synthetic oligonucleotide
  Sense strand starting at position 2674 of SEQ ID NO: 915408
uuaacaaucggucagauua

SEQ ID NO: 1077653 - RNA, 19 nt, Artificial Sequence
  Description of Artificial Sequence: Synthetic oligonucleotide
  Antisense strand to SEQ ID NO: 1077652
uaaucugaccgauuguuaa

SEQ ID NO: 1077654 - RNA, 19 nt, Artificial Sequence
  Description of Artificial Sequence: Synthetic oligonucleotide
  Sense strand starting at position 2681 of SEQ ID NO: 915408
ucggucagauuauuacaaa

SEQ ID NO: 1077655 - RNA, 19 nt, Artificial Sequence
  Description of Artificial Sequence: Synthetic oligonucleotide
  Antisense strand to SEQ ID NO: 1077654
uuuguaauaaucugaccga

SEQ ID NO: 1077656 - RNA, 19 nt, Artificial Sequence
  Description of Artificial Sequence: Synthetic oligonucleotide
  Sense strand starting at position 2733 of SEQ ID NO: 915408
cuauaugccagaggguuua

SEQ ID NO: 1077657 - RNA, 19 nt, Artificial Sequence
  Description of Artificial Sequence: Synthetic oligonucleotide
  Antisense strand to SEQ ID NO: 1077656
uaaacccucuggcauauag

SEQ ID NO: 1077658 - RNA, 19 nt, Artificial Sequence
  Description of Artificial Sequence: Synthetic oligonucleotide
  Sense strand starting at position 2891 of SEQ ID NO: 915408
aaacauaggucuuuagguu

SEQ ID NO: 1077659 - RNA, 19 nt, Artificial Sequence
  Description of Artificial Sequence: Synthetic oligonucleotide
  Antisense strand to SEQ ID NO: 1077658
aaccuaaagaccuauguuu

SEQ ID NO: 1077660 - RNA, 19 nt, Artificial Sequence
  Description of Artificial Sequence: Synthetic oligonucleotide
  Sense strand starting at position 3277 of SEQ ID NO: 915408
gagacaauuuaguaaagac

SEQ ID NO: 1077661 - RNA, 19 nt, Artificial Sequence
  Description of Artificial Sequence: Synthetic oligonucleotide
  Antisense strand to SEQ ID NO: 1077660
gucuuuacuaaauugucuc

SEQ ID NO: 1077662 - RNA, 19 nt, Artificial Sequence
  Description of Artificial Sequence: Synthetic oligonucleotide
  Sense strand starting at position 3332 of SEQ ID NO: 915408
gggugagcaguuuauacca

SEQ ID NO: 1077663 - RNA, 19 nt, Artificial Sequence
  Description of Artificial Sequence: Synthetic oligonucleotide
  Antisense strand to SEQ ID NO: 1077662
ugguauaaacugcucaccc

SEQ ID NO: 1077664 - RNA, 19 nt, Artificial Sequence
  Description of Artificial Sequence: Synthetic oligonucleotide
  Sense strand starting at position 3369 of SEQ ID NO: 915408
cugaaugugcugugaagga

SEQ ID NO: 1077665 - RNA, 19 nt, Artificial Sequence
  Description of Artificial Sequence: Synthetic oligonucleotide
  Antisense strand to SEQ ID NO: 1077664
uccuucacagcacauucag

SEQ ID NO: 1077666 - RNA, 19 nt, Artificial Sequence
  Description of Artificial Sequence: Synthetic oligonucleotide
  Sense strand starting at position 3416 of SEQ ID NO: 915408
ucucaauugcuuuaugaag

SEQ ID NO: 1077667 - RNA, 19 nt, Artificial Sequence
  Description of Artificial Sequence: Synthetic oligonucleotide
  Antisense strand to SEQ ID NO: 1077666
cuucauaaagcaauugaga

SEQ ID NO: 1077668 - RNA, 19 nt, Artificial Sequence
  Description of Artificial Sequence: Synthetic oligonucleotide
  Sense strand starting at position 3425 of SEQ ID NO: 915408
cuuuaugaaguggguuauu

SEQ ID NO: 1077669 - RNA, 19 nt, Artificial Sequence
  Description of Artificial Sequence: Synthetic oligonucleotide
  Antisense strand to SEQ ID NO: 1077668
aauaacccacuucauaaag

SEQ ID NO: 1077670 - RNA, 19 nt, Artificial Sequence
  Description of Artificial Sequence: Synthetic oligonucleotide
  Sense strand starting at position 3501 of SEQ ID NO: 915408
auaacuaguauguguuaga

SEQ ID NO: 1077671 - RNA, 19 nt, Artificial Sequence
  Description of Artificial Sequence: Synthetic oligonucleotide
  Antisense strand to SEQ ID NO: 1077670
ucuaacacauacuaguuau

SEQ ID NO: 1077672 - RNA, 19 nt, Artificial Sequence
  Description of Artificial Sequence: Synthetic oligonucleotide
  Sense strand starting at position 3502 of SEQ ID NO: 915408
uaacuaguauguguuagaa

SEQ ID NO: 1077673 - RNA, 19 nt, Artificial Sequence
  Description of Artificial Sequence: Synthetic oligonucleotide
  Antisense strand to SEQ ID NO: 1077672
uucuaacacauacuaguua

SEQ ID NO: 1077674 - RNA, 19 nt, Artificial Sequence
  Description of Artificial Sequence: Synthetic oligonucleotide
  Sense strand starting at position 3512 of SEQ ID NO: 915408
guguuagaacuaggacuua

SEQ ID NO: 1077675 - RNA, 19 nt, Artificial Sequence
  Description of Artificial Sequence: Synthetic oligonucleotide
  Antisense strand to SEQ ID NO: 1077674
uaaguccuaguucuaacac

SEQ ID NO: 1077676 - RNA, 19 nt, Artificial Sequence
  Description of Artificial Sequence: Synthetic oligonucleotide
  Sense strand starting at position 3531 of SEQ ID NO: 915408
aacacaggccugugugaaa

SEQ ID NO: 1077677 - RNA, 19 nt, Artificial Sequence
  Description of Artificial Sequence: Synthetic oligonucleotide
  Antisense strand to SEQ ID NO: 1077676
uuucacacaggccuguguu

SEQ ID NO: 1077678 - RNA, 19 nt, Artificial Sequence
  Description of Artificial Sequence: Synthetic oligonucleotide
  Sense strand starting at position 3658 of SEQ ID NO: 915408
agauguguacccgggacaa

SEQ ID NO: 1077679 - RNA, 19 nt, Artificial Sequence
  Description of Artificial Sequence: Synthetic oligonucleotide
  Antisense strand to SEQ ID NO: 1077678
uugucccggguacacaucu

SEQ ID NO: 1077680 - RNA, 19 nt, Artificial Sequence
  Description of Artificial Sequence: Synthetic oligonucleotide
  Sense strand starting at position 3660 of SEQ ID NO: 915408
auguguacccgggacaagu

SEQ ID NO: 1077681 - RNA, 19 nt, Artificial Sequence
  Description of Artificial Sequence: Synthetic oligonucleotide
  Antisense strand to SEQ ID NO: 1077680
acuugucccggguacacau

SEQ ID NO: 1077682 - RNA, 19 nt, Artificial Sequence
  Description of Artificial Sequence: Synthetic oligonucleotide
  Sense strand starting at position 3744 of SEQ ID NO: 915408
augguugcucaugauugua

SEQ ID NO: 1077683 - RNA, 19 nt, Artificial Sequence
  Description of Artificial Sequence: Synthetic oligonucleotide
  Antisense strand to SEQ ID NO: 1077682
uacaaucaugagcaaccau

SEQ ID NO: 1077684 - RNA, 19 nt, Artificial Sequence
  Description of Artificial Sequence: Synthetic oligonucleotide
  Sense strand starting at position 161 of SEQ ID NO: 915409
guuuaccucugauugagau

SEQ ID NO: 1077685 - RNA, 19 nt, Artificial Sequence
  Description of Artificial Sequence: Synthetic oligonucleotide
  Antisense strand to SEQ ID NO: 1077684
aucucaaucagagguaaac

SEQ ID NO: 1077686 - RNA, 19 nt, Artificial Sequence
  Description of Artificial Sequence: Synthetic oligonucleotide
  Sense strand starting at position 162 of SEQ ID NO: 915409
uuuaccucugauugagauc

SEQ ID NO: 1077687 - RNA, 19 nt, Artificial Sequence
  Description of Artificial Sequence: Synthetic oligonucleotide
  Antisense strand to SEQ ID NO: 1077686
gaucucaaucagagguaaa

SEQ ID NO: 1077688 - RNA, 19 nt, Artificial Sequence
  Description of Artificial Sequence: Synthetic oligonucleotide
  Sense strand starting at position 175 of SEQ ID NO: 915409
gagaucacaugugaaggaa

SEQ ID NO: 1077689 - RNA, 19 nt, Artificial Sequence
  Description of Artificial Sequence: Synthetic oligonucleotide
  Antisense strand to SEQ ID NO: 1077688
uuccuucacaugugaucuc

SEQ ID NO: 1077690 - RNA, 19 nt, Artificial Sequence
  Description of Artificial Sequence: Synthetic oligonucleotide
  Sense strand starting at position 183 of SEQ ID NO: 915409
augugaaggaauuggcaau

SEQ ID NO: 1077691 - RNA, 19 nt, Artificial Sequence
  Description of Artificial Sequence: Synthetic oligonucleotide
  Antisense strand to SEQ ID NO: 1077690
auugccaauuccuucacau

SEQ ID NO: 1077692 - RNA, 19 nt, Artificial Sequence
  Description of Artificial Sequence: Synthetic oligonucleotide
  Sense strand starting at position 223 of SEQ ID NO: 915409
gaaggaauguuagagauca

SEQ ID NO: 1077693 - RNA, 19 nt, Artificial Sequence
  Description of Artificial Sequence: Synthetic oligonucleotide
  Antisense strand to SEQ ID NO: 1077692
ugaucucuaacauuccuuc

SEQ ID NO: 1077694 - RNA, 19 nt, Artificial Sequence
  Description of Artificial Sequence: Synthetic oligonucleotide
  Sense strand starting at position 231 of SEQ ID NO: 915409
guuagagaucacgacgacu

SEQ ID NO: 1077695 - RNA, 19 nt, Artificial Sequence
  Description of Artificial Sequence: Synthetic oligonucleotide
  Antisense strand to SEQ ID NO: 1077694
agucgucgugaucucuaac

SEQ ID NO: 1077696 - RNA, 19 nt, Artificial Sequence
  Description of Artificial Sequence: Synthetic oligonucleotide
  Sense strand starting at position 233 of SEQ ID NO: 915409
uagagaucacgacgacuuu

SEQ ID NO: 1077697 - RNA, 19 nt, Artificial Sequence
  Description of Artificial Sequence: Synthetic oligonucleotide
  Antisense strand to SEQ ID NO: 1077696
aaagucgucgugaucucua

SEQ ID NO: 1077698 - RNA, 19 nt, Artificial Sequence
  Description of Artificial Sequence: Synthetic oligonucleotide
  Sense strand starting at position 330 of SEQ ID NO: 915409
cauggaauucuacguguug

SEQ ID NO: 1077699 - RNA, 19 nt, Artificial Sequence
  Description of Artificial Sequence: Synthetic oligonucleotide
  Antisense strand to SEQ ID NO: 1077698
caacacguagaauuccaug

SEQ ID NO: 1077700 - RNA, 19 nt, Artificial Sequence
  Description of Artificial Sequence: Synthetic oligonucleotide
  Sense strand starting at position 472 of SEQ ID NO: 915409
ucagcaucauugcuaggaa

SEQ ID NO: 1077701 - RNA, 19 nt, Artificial Sequence
  Description of Artificial Sequence: Synthetic oligonucleotide
  Antisense strand to SEQ ID NO: 1077700
uuccuagcaaugaugcuga

SEQ ID NO: 1077702 - RNA, 19 nt, Artificial Sequence
  Description of Artificial Sequence: Synthetic oligonucleotide
  Sense strand starting at position 511 of SEQ ID NO: 915409
guuggaccauucucacaga

SEQ ID NO: 1077703 - RNA, 19 nt, Artificial Sequence
  Description of Artificial Sequence: Synthetic oligonucleotide
  Antisense strand to SEQ ID NO: 1077702
ucugugagaaugguccaac

SEQ ID NO: 1077704 - RNA, 19 nt, Artificial Sequence
  Description of Artificial Sequence: Synthetic oligonucleotide
  Sense strand starting at position 528 of SEQ ID NO: 915409
gauguaggcugaucucauu

SEQ ID NO: 1077705 - RNA, 19 nt, Artificial Sequence
  Description of Artificial Sequence: Synthetic oligonucleotide
  Antisense strand to SEQ ID NO: 1077704
aaugagaucagccuacauc

SEQ ID NO: 1077706 - RNA, 19 nt, Artificial Sequence
  Description of Artificial Sequence: Synthetic oligonucleotide
  Sense strand starting at position 622 of SEQ ID NO: 915409
agaguacuugcugacuaac

SEQ ID NO: 1077707 - RNA, 19 nt, Artificial Sequence
  Description of Artificial Sequence: Synthetic oligonucleotide
  Antisense strand to SEQ ID NO: 1077706
guuagucagcaaguacucu

SEQ ID NO: 1077708 - RNA, 19 nt, Artificial Sequence
  Description of Artificial Sequence: Synthetic oligonucleotide
  Sense strand starting at position 868 of SEQ ID NO: 915409
gcggauauuuaggaggaga

SEQ ID NO: 1077709 - RNA, 19 nt, Artificial Sequence
  Description of Artificial Sequence: Synthetic oligonucleotide
  Antisense strand to SEQ ID NO: 1077708
ucuccuccuaaauauccgc

SEQ ID NO: 1077710 - RNA, 19 nt, Artificial Sequence
  Description of Artificial Sequence: Synthetic oligonucleotide
  Sense strand starting at position 901 of SEQ ID NO: 915409
cccuccuucugucuuuaga

SEQ ID NO: 1077711 - RNA, 19 nt, Artificial Sequence
  Description of Artificial Sequence: Synthetic oligonucleotide
  Antisense strand to SEQ ID NO: 1077710
ucuaaagacagaaggaggg

SEQ ID NO: 1077712 - RNA, 19 nt, Artificial Sequence
  Description of Artificial Sequence: Synthetic oligonucleotide
  Sense strand starting at position 962 of SEQ ID NO: 915409
auuaaaguuccuggcgaau

SEQ ID NO: 1077713 - RNA, 19 nt, Artificial Sequence
  Description of Artificial Sequence: Synthetic oligonucleotide
  Antisense strand to SEQ ID NO: 1077712
auucgccaggaacuuuaau

SEQ ID NO: 1077714 - RNA, 19 nt, Artificial Sequence
  Description of Artificial Sequence: Synthetic oligonucleotide
  Sense strand starting at position 974 of SEQ ID NO: 915409
ggcgaaucucaauauaugu

SEQ ID NO: 1077715 - RNA, 19 nt, Artificial Sequence
  Description of Artificial Sequence: Synthetic oligonucleotide
  Antisense strand to SEQ ID NO: 1077714
acauauauugagauucgcc

SEQ ID NO: 1077716 - RNA, 19 nt, Artificial Sequence
  Description of Artificial Sequence: Synthetic oligonucleotide
  Sense strand starting at position 1126 of SEQ ID NO: 915409
cgggucaugacccaguauu

SEQ ID NO: 1077717 - RNA, 19 nt, Artificial Sequence
  Description of Artificial Sequence: Synthetic oligonucleotide
  Antisense strand to SEQ ID NO: 1077716
aauacugggucaugacccg

SEQ ID NO: 1077718 - RNA, 19 nt, Artificial Sequence
  Description of Artificial Sequence: Synthetic oligonucleotide
  Sense strand starting at position 1331 of SEQ ID NO: 915409
gcuggguuaggguaggaaa

SEQ ID NO: 1077719 - RNA, 19 nt, Artificial Sequence
  Description of Artificial Sequence: Synthetic oligonucleotide
  Antisense strand to SEQ ID NO: 1077718
uuuccuacccuaacccagc

SEQ ID NO: 1077720 - RNA, 19 nt, Artificial Sequence
  Description of Artificial Sequence: Synthetic oligonucleotide
  Sense strand starting at position 1539 of SEQ ID NO: 915409
ggaaaugggcgccaaagaa

SEQ ID NO: 1077721 - RNA, 19 nt, Artificial Sequence
  Description of Artificial Sequence: Synthetic oligonucleotide
  Antisense strand to SEQ ID NO: 1077720
uucuuuggcgcccauuucc

SEQ ID NO: 1077722 - RNA, 19 nt, Artificial Sequence
  Description of Artificial Sequence: Synthetic oligonucleotide
  Sense strand starting at position 1580 of SEQ ID NO: 915409
ggaagucgucccuggaaga

SEQ ID NO: 1077723 - RNA, 19 nt, Artificial Sequence
  Description of Artificial Sequence: Synthetic oligonucleotide
  Antisense strand to SEQ ID NO: 1077722
ucuuccagggacgacuucc

SEQ ID NO: 1077724 - RNA, 19 nt, Artificial Sequence
  Description of Artificial Sequence: Synthetic oligonucleotide
  Sense strand starting at position 1581 of SEQ ID NO: 915409
gaagucgucccuggaagag

SEQ ID NO: 1077725 - RNA, 19 nt, Artificial Sequence
  Description of Artificial Sequence: Synthetic oligonucleotide
  Antisense strand to SEQ ID NO: 1077724
cucuuccagggacgacuuc

SEQ ID NO: 1077726 - RNA, 19 nt, Artificial Sequence
  Description of Artificial Sequence: Synthetic oligonucleotide
  Sense strand starting at position 1621 of SEQ ID NO: 915409
aauggaguguuugcacuuu

SEQ ID NO: 1077727 - RNA, 19 nt, Artificial Sequence
  Description of Artificial Sequence: Synthetic oligonucleotide
  Antisense strand to SEQ ID NO: 1077726
aaagugcaaacacuccauu

SEQ ID NO: 1077728 - RNA, 19 nt, Artificial Sequence
  Description of Artificial Sequence: Synthetic oligonucleotide
  Sense strand starting at position 1631 of SEQ ID NO: 915409
uugcacuuucgagagggaa

SEQ ID NO: 1077729 - RNA, 19 nt, Artificial Sequence
  Description of Artificial Sequence: Synthetic oligonucleotide
  Antisense strand to SEQ ID NO: 1077728
uucccucucgaaagugcaa

SEQ ID NO: 1077730 - RNA, 19 nt, Artificial Sequence
  Description of Artificial Sequence: Synthetic oligonucleotide
  Sense strand starting at position 2219 of SEQ ID NO: 915409
gcagguuugcugccgcgaa

SEQ ID NO: 1077731 - RNA, 19 nt, Artificial Sequence
  Description of Artificial Sequence: Synthetic oligonucleotide
  Antisense strand to SEQ ID NO: 1077730
uucgcggcagcaaaccugc

SEQ ID NO: 1077732 - RNA, 19 nt, Artificial Sequence
  Description of Artificial Sequence: Synthetic oligonucleotide
  Sense strand starting at position 2413 of SEQ ID NO: 915409
gggcggguuggucagauua

SEQ ID NO: 1077733 - RNA, 19 nt, Artificial Sequence
  Description of Artificial Sequence: Synthetic oligonucleotide
  Antisense strand to SEQ ID NO: 1077732
uaaucugaccaacccgccc

SEQ ID NO: 1077734 - RNA, 19 nt, Artificial Sequence
  Description of Artificial Sequence: Synthetic oligonucleotide
  Sense strand starting at position 2466 of SEQ ID NO: 915409
uugggucauugcuuugauu

SEQ ID NO: 1077735 - RNA, 19 nt, Artificial Sequence
  Description of Artificial Sequence: Synthetic oligonucleotide
  Antisense strand to SEQ ID NO: 1077734
aaucaaagcaaugacccaa

SEQ ID NO: 1077736 - RNA, 19 nt, Artificial Sequence
  Description of Artificial Sequence: Synthetic oligonucleotide
  Sense strand starting at position 2508 of SEQ ID NO: 915409
gcuggauugauguggugag

SEQ ID NO: 1077737 - RNA, 19 nt, Artificial Sequence
  Description of Artificial Sequence: Synthetic oligonucleotide
  Antisense strand to SEQ ID NO: 1077736
cucaccacaucaauccagc

SEQ ID NO: 1077738 - RNA, 19 nt, Artificial Sequence
  Description of Artificial Sequence: Synthetic oligonucleotide
  Sense strand starting at position 2512 of SEQ ID NO: 915409
gauugauguggugagaucu

SEQ ID NO: 1077739 - RNA, 19 nt, Artificial Sequence
  Description of Artificial Sequence: Synthetic oligonucleotide
  Antisense strand to SEQ ID NO: 1077738
agaucucaccacaucaauc

SEQ ID NO: 1077740 - RNA, 19 nt, Artificial Sequence
  Description of Artificial Sequence: Synthetic oligonucleotide
  Sense strand starting at position 2897 of SEQ ID NO: 915409
cuuucuugucuugaugaga

SEQ ID NO: 1077741 - RNA, 19 nt, Artificial Sequence
  Description of Artificial Sequence: Synthetic oligonucleotide
  Antisense strand to SEQ ID NO: 1077740
ucucaucaagacaagaaag

SEQ ID NO: 1077742 - RNA, 19 nt, Artificial Sequence
  Description of Artificial Sequence: Synthetic oligonucleotide
  Sense strand starting at position 3190 of SEQ ID NO: 915409
cuuggucuccauuguuuaa

SEQ ID NO: 1077743 - RNA, 19 nt, Artificial Sequence
  Description of Artificial Sequence: Synthetic oligonucleotide
  Antisense strand to SEQ ID NO: 1077742
uuaaacaauggagaccaag

SEQ ID NO: 1077744 - RNA, 19 nt, Artificial Sequence
  Description of Artificial Sequence: Synthetic oligonucleotide
  Sense strand starting at position 3194 of SEQ ID NO: 915409
gucuccauuguuuaaguca

SEQ ID NO: 1077745 - RNA, 19 nt, Artificial Sequence
  Description of Artificial Sequence: Synthetic oligonucleotide
  Antisense strand to SEQ ID NO: 1077744
ugacuuaaacaauggagac

SEQ ID NO: 1077746 - RNA, 19 nt, Artificial Sequence
  Description of Artificial Sequence: Synthetic oligonucleotide
  Sense strand starting at position 3197 of SEQ ID NO: 915409
uccauuguuuaagucagaa

SEQ ID NO: 1077747 - RNA, 19 nt, Artificial Sequence
  Description of Artificial Sequence: Synthetic oligonucleotide
  Antisense strand to SEQ ID NO: 1077746
uucugacuuaaacaaugga

SEQ ID NO: 1077748 - RNA, 19 nt, Artificial Sequence
  Description of Artificial Sequence: Synthetic oligonucleotide
  Sense strand starting at position 3235 of SEQ ID NO: 915409
cuuagcucaugucugauua

SEQ ID NO: 1077749 - RNA, 19 nt, Artificial Sequence
  Description of Artificial Sequence: Synthetic oligonucleotide
  Antisense strand to SEQ ID NO: 1077748
uaaucagacaugagcuaag

SEQ ID NO: 1077750 - RNA, 19 nt, Artificial Sequence
  Description of Artificial Sequence: Synthetic oligonucleotide
  Sense strand starting at position 3236 of SEQ ID NO: 915409
uuagcucaugucugauuaa

SEQ ID NO: 1077751 - RNA, 19 nt, Artificial Sequence
  Description of Artificial Sequence: Synthetic oligonucleotide
  Antisense strand to SEQ ID NO: 1077750
uuaaucagacaugagcuaa

SEQ ID NO: 1077752 - RNA, 19 nt, Artificial Sequence
  Description of Artificial Sequence: Synthetic oligonucleotide
  Sense strand starting at position 3239 of SEQ ID NO: 915409
gcucaugucugauuaauga

SEQ ID NO: 1077753 - RNA, 19 nt, Artificial Sequence
  Description of Artificial Sequence: Synthetic oligonucleotide
  Antisense strand to SEQ ID NO: 1077752
ucauuaaucagacaugagc

SEQ ID NO: 1077754 - RNA, 19 nt, Artificial Sequence
  Description of Artificial Sequence: Synthetic oligonucleotide
  Sense strand starting at position 3317 of SEQ ID NO: 915409
uccucaaauugaguaauag

SEQ ID NO: 1077755 - RNA, 19 nt, Artificial Sequence
  Description of Artificial Sequence: Synthetic oligonucleotide
  Antisense strand to SEQ ID NO: 1077754
cuauuacucaauuugagga

SEQ ID NO: 1077756 - RNA, 19 nt, Artificial Sequence
  Description of Artificial Sequence: Synthetic oligonucleotide
  Sense strand starting at position 3318 of SEQ ID NO: 915409
ccucaaauugaguaauagu

SEQ ID NO: 1077757 - RNA, 19 nt, Artificial Sequence
  Description of Artificial Sequence: Synthetic oligonucleotide
  Antisense strand to SEQ ID NO: 1077756
acuauuacucaauuugagg

SEQ ID NO: 1077758 - RNA, 19 nt, Artificial Sequence
  Description of Artificial Sequence: Synthetic oligonucleotide
  Sense strand starting at position 3325 of SEQ ID NO: 915409
uugaguaauagugacguca

SEQ ID NO: 1077759 - RNA, 19 nt, Artificial Sequence
  Description of Artificial Sequence: Synthetic oligonucleotide
  Antisense strand to SEQ ID NO: 1077758
ugacgucacuauuacucaa

SEQ ID NO: 1077760 - RNA, 19 nt, Artificial Sequence
  Description of Artificial Sequence: Synthetic oligonucleotide
  Sense strand starting at position 3337 of SEQ ID NO: 915409
gacgucaagguuuaucuuu

SEQ ID NO: 1077761 - RNA, 19 nt, Artificial Sequence
  Description of Artificial Sequence: Synthetic oligonucleotide
  Antisense strand to SEQ ID NO: 1077760
aaagauaaaccuugacguc

SEQ ID NO: 1077762 - RNA, 19 nt, Artificial Sequence
  Description of Artificial Sequence: Synthetic oligonucleotide
  Sense strand starting at position 3339 of SEQ ID NO: 915409
cgucaagguuuaucuuuaa

SEQ ID NO: 1077763 - RNA, 19 nt, Artificial Sequence
  Description of Artificial Sequence: Synthetic oligonucleotide
  Antisense strand to SEQ ID NO: 1077762
uuaaagauaaaccuugacg

SEQ ID NO: 1077764 - RNA, 19 nt, Artificial Sequence
  Description of Artificial Sequence: Synthetic oligonucleotide
  Sense strand starting at position 191 of SEQ ID NO: 915410
ggcucaaguuagucagauc

SEQ ID NO: 1077765 - RNA, 19 nt, Artificial Sequence
  Description of Artificial Sequence: Synthetic oligonucleotide
  Antisense strand to SEQ ID NO: 1077764
gaucugacuaacuugagcc

SEQ ID NO: 1077766 - RNA, 19 nt, Artificial Sequence
  Description of Artificial Sequence: Synthetic oligonucleotide
  Sense strand starting at position 194 of SEQ ID NO: 915410
ucaaguuagucagaucuuc

SEQ ID NO: 1077767 - RNA, 19 nt, Artificial Sequence
  Description of Artificial Sequence: Synthetic oligonucleotide
  Antisense strand to SEQ ID NO: 1077766
gaagaucugacuaacuuga

SEQ ID NO: 1077768 - RNA, 19 nt, Artificial Sequence
  Description of Artificial Sequence: Synthetic oligonucleotide
  Sense strand starting at position 200 of SEQ ID NO: 915410
uagucagaucuucguuuga

SEQ ID NO: 1077769 - RNA, 19 nt, Artificial Sequence
  Description of Artificial Sequence: Synthetic oligonucleotide
  Antisense strand to SEQ ID NO: 1077768
ucaaacgaagaucugacua

SEQ ID NO: 1077770 - RNA, 19 nt, Artificial Sequence
  Description of Artificial Sequence: Synthetic oligonucleotide
  Sense strand starting at position 202 of SEQ ID NO: 915410
gucagaucuucguuugagg

SEQ ID NO: 1077771 - RNA, 19 nt, Artificial Sequence
  Description of Artificial Sequence: Synthetic oligonucleotide
  Antisense strand to SEQ ID NO: 1077770
ccucaaacgaagaucugac

SEQ ID NO: 1077772 - RNA, 19 nt, Artificial Sequence
  Description of Artificial Sequence: Synthetic oligonucleotide
  Sense strand starting at position 204 of SEQ ID NO: 915410
cagaucuucguuugaggau

SEQ ID NO: 1077773 - RNA, 19 nt, Artificial Sequence
  Description of Artificial Sequence: Synthetic oligonucleotide
  Antisense strand to SEQ ID NO: 1077772
auccucaaacgaagaucug

SEQ ID NO: 1077774 - RNA, 19 nt, Artificial Sequence
  Description of Artificial Sequence: Synthetic oligonucleotide
  Sense strand starting at position 205 of SEQ ID NO: 915410
agaucuucguuugaggaua

SEQ ID NO: 1077775 - RNA, 19 nt, Artificial Sequence
  Description of Artificial Sequence: Synthetic oligonucleotide
  Antisense strand to SEQ ID NO: 1077774
uauccucaaacgaagaucu

SEQ ID NO: 1077776 - RNA, 19 nt, Artificial Sequence
  Description of Artificial Sequence: Synthetic oligonucleotide
  Sense strand starting at position 207 of SEQ ID NO: 915410
aucuucguuugaggauaca

SEQ ID NO: 1077777 - RNA, 19 nt, Artificial Sequence
  Description of Artificial Sequence: Synthetic oligonucleotide
  Antisense strand to SEQ ID NO: 1077776
uguauccucaaacgaagau

SEQ ID NO: 1077778 - RNA, 19 nt, Artificial Sequence
  Description of Artificial Sequence: Synthetic oligonucleotide
  Sense strand starting at position 379 of SEQ ID NO: 915410
ggacguauucucuaagacc

SEQ ID NO: 1077779 - RNA, 19 nt, Artificial Sequence
  Description of Artificial Sequence: Synthetic oligonucleotide
  Antisense strand to SEQ ID NO: 1077778
ggucuuagagaauacgucc

SEQ ID NO: 1077780 - RNA, 19 nt, Artificial Sequence
  Description of Artificial Sequence: Synthetic oligonucleotide
  Sense strand starting at position 541 of SEQ ID NO: 915410
uaggcaguucuccauagca

SEQ ID NO: 1077781 - RNA, 19 nt, Artificial Sequence
  Description of Artificial Sequence: Synthetic oligonucleotide
  Antisense strand to SEQ ID NO: 1077780
ugcuauggagaacugccua

SEQ ID NO: 1077782 - RNA, 19 nt, Artificial Sequence
  Description of Artificial Sequence: Synthetic oligonucleotide
  Sense strand starting at position 543 of SEQ ID NO: 915410
ggcaguucuccauagcauc

SEQ ID NO: 1077783 - RNA, 19 nt, Artificial Sequence
  Description of Artificial Sequence: Synthetic oligonucleotide
  Antisense strand to SEQ ID NO: 1077782
gaugcuauggagaacugcc

SEQ ID NO: 1077784 - RNA, 19 nt, Artificial Sequence
  Description of Artificial Sequence: Synthetic oligonucleotide
  Sense strand starting at position 726 of SEQ ID NO: 915410
agcagauguccacaugugu

SEQ ID NO: 1077785 - RNA, 19 nt, Artificial Sequence
  Description of Artificial Sequence: Synthetic oligonucleotide
  Antisense strand to SEQ ID NO: 1077784
acacauguggacaucugcu

SEQ ID NO: 1077786 - RNA, 19 nt, Artificial Sequence
  Description of Artificial Sequence: Synthetic oligonucleotide
  Sense strand starting at position 740 of SEQ ID NO: 915410
uguguuugcuggcuugaau

SEQ ID NO: 1077787 - RNA, 19 nt, Artificial Sequence
  Description of Artificial Sequence: Synthetic oligonucleotide
  Antisense strand to SEQ ID NO: 1077786
auucaagccagcaaacaca

SEQ ID NO: 1077788 - RNA, 19 nt, Artificial Sequence
  Description of Artificial Sequence: Synthetic oligonucleotide
  Sense strand starting at position 749 of SEQ ID NO: 915410
uggcuugaaucccucauca

SEQ ID NO: 1077789 - RNA, 19 nt, Artificial Sequence
  Description of Artificial Sequence: Synthetic oligonucleotide
  Antisense strand to SEQ ID NO: 1077788
ugaugagggauucaagcca

SEQ ID NO: 1077790 - RNA, 19 nt, Artificial Sequence
  Description of Artificial Sequence: Synthetic oligonucleotide
  Sense strand starting at position 751 of SEQ ID NO: 915410
gcuugaaucccucaucagu

SEQ ID NO: 1077791 - RNA, 19 nt, Artificial Sequence
  Description of Artificial Sequence: Synthetic oligonucleotide
  Antisense strand to SEQ ID NO: 1077790
acugaugagggauucaagc

SEQ ID NO: 1077792 - RNA, 19 nt, Artificial Sequence
  Description of Artificial Sequence: Synthetic oligonucleotide
  Sense strand starting at position 764 of SEQ ID NO: 915410
aucaguuggucuugagcaa

SEQ ID NO: 1077793 - RNA, 19 nt, Artificial Sequence
  Description of Artificial Sequence: Synthetic oligonucleotide
  Antisense strand to SEQ ID NO: 1077792
uugcucaagaccaacugau

SEQ ID NO: 1077794 - RNA, 19 nt, Artificial Sequence
  Description of Artificial Sequence: Synthetic oligonucleotide
  Sense strand starting at position 895 of SEQ ID NO: 915410
ggagauaagucauggcaac

SEQ ID NO: 1077795 - RNA, 19 nt, Artificial Sequence
  Description of Artificial Sequence: Synthetic oligonucleotide
  Antisense strand to SEQ ID NO: 1077794
guugccaugacuuaucucc

SEQ ID NO: 1077796 - RNA, 19 nt, Artificial Sequence
  Description of Artificial Sequence: Synthetic oligonucleotide
  Sense strand starting at position 956 of SEQ ID NO: 915410
gggcuaugucccuggagga

SEQ ID NO: 1077797 - RNA, 19 nt, Artificial Sequence
  Description of Artificial Sequence: Synthetic oligonucleotide
  Antisense strand to SEQ ID NO: 1077796
uccuccagggacauagccc

SEQ ID NO: 1077798 - RNA, 19 nt, Artificial Sequence
  Description of Artificial Sequence: Synthetic oligonucleotide
  Sense strand starting at position 957 of SEQ ID NO: 915410
ggcuaugucccuggaggaa

SEQ ID NO: 1077799 - RNA, 19 nt, Artificial Sequence
  Description of Artificial Sequence: Synthetic oligonucleotide
  Antisense strand to SEQ ID NO: 1077798
uuccuccagggacauagcc

SEQ ID NO: 1077800 - RNA, 19 nt, Artificial Sequence
  Description of Artificial Sequence: Synthetic oligonucleotide
  Sense strand starting at position 970 of SEQ ID NO: 915410
gaggaagaguccucagccu

SEQ ID NO: 1077801 - RNA, 19 nt, Artificial Sequence
  Description of Artificial Sequence: Synthetic oligonucleotide
  Antisense strand to SEQ ID NO: 1077800
aggcugaggacucuuccuc

SEQ ID NO: 1077802 - RNA, 19 nt, Artificial Sequence
  Description of Artificial Sequence: Synthetic oligonucleotide
  Sense strand starting at position 1172 of SEQ ID NO: 915410
gaacuugcuccucaguuga

SEQ ID NO: 1077803 - RNA, 19 nt, Artificial Sequence
  Description of Artificial Sequence: Synthetic oligonucleotide
  Antisense strand to SEQ ID NO: 1077802
ucaacugaggagcaaguuc

SEQ ID NO: 1077804 - RNA, 19 nt, Artificial Sequence
  Description of Artificial Sequence: Synthetic oligonucleotide
  Sense strand starting at position 1191 of SEQ ID NO: 915410
aaaggaugggcucggagaa

SEQ ID NO: 1077805 - RNA, 19 nt, Artificial Sequence
  Description of Artificial Sequence: Synthetic oligonucleotide
  Antisense strand to SEQ ID NO: 1077804
uucuccgagcccauccuuu

SEQ ID NO: 1077806 - RNA, 19 nt, Artificial Sequence
  Description of Artificial Sequence: Synthetic oligonucleotide
  Sense strand starting at position 1338 of SEQ ID NO: 915410
gcaagagguuccugagcac

SEQ ID NO: 1077807 - RNA, 19 nt, Artificial Sequence
  Description of Artificial Sequence: Synthetic oligonucleotide
  Antisense strand to SEQ ID NO: 1077806
gugcucaggaaccucuugc

SEQ ID NO: 1077808 - RNA, 19 nt, Artificial Sequence
  Description of Artificial Sequence: Synthetic oligonucleotide
  Sense strand starting at position 1549 of SEQ ID NO: 915410
ggcccugauucuggacuua

SEQ ID NO: 1077809 - RNA, 19 nt, Artificial Sequence
  Description of Artificial Sequence: Synthetic oligonucleotide
  Antisense strand to SEQ ID NO: 1077808
uaaguccagaaucagggcc

SEQ ID NO: 1077810 - RNA, 19 nt, Artificial Sequence
  Description of Artificial Sequence: Synthetic oligonucleotide
  Sense strand starting at position 1599 of SEQ ID NO: 915410
ggaugagugucuugcccuc

SEQ ID NO: 1077811 - RNA, 19 nt, Artificial Sequence
  Description of Artificial Sequence: Synthetic oligonucleotide
  Antisense strand to SEQ ID NO: 1077810
gagggcaagacacucaucc

SEQ ID NO: 1077812 - RNA, 19 nt, Artificial Sequence
  Description of Artificial Sequence: Synthetic oligonucleotide
  Sense strand starting at position 1899 of SEQ ID NO: 915410
cagcgugcuccucagaaga

SEQ ID NO: 1077813 - RNA, 19 nt, Artificial Sequence
  Description of Artificial Sequence: Synthetic oligonucleotide
  Antisense strand to SEQ ID NO: 1077812
ucuucugaggagcacgcug

SEQ ID NO: 1077814 - RNA, 19 nt, Artificial Sequence
  Description of Artificial Sequence: Synthetic oligonucleotide
  Sense strand starting at position 1901 of SEQ ID NO: 915410
gcgugcuccucagaagagu

SEQ ID NO: 1077815 - RNA, 19 nt, Artificial Sequence
  Description of Artificial Sequence: Synthetic oligonucleotide
  Antisense strand to SEQ ID NO: 1077814
acucuucugaggagcacgc

SEQ ID NO: 1077816 - RNA, 19 nt, Artificial Sequence
  Description of Artificial Sequence: Synthetic oligonucleotide
  Sense strand starting at position 2273 of SEQ ID NO: 915410
ccuugauccugucauagcu

SEQ ID NO: 1077817 - RNA, 19 nt, Artificial Sequence
  Description of Artificial Sequence: Synthetic oligonucleotide
  Antisense strand to SEQ ID NO: 1077816
agcuaugacaggaucaagg

SEQ ID NO: 1077818 - RNA, 19 nt, Artificial Sequence
  Description of Artificial Sequence: Synthetic oligonucleotide
  Sense strand starting at position 2282 of SEQ ID NO: 915410
ugucauagcugucauagcu

SEQ ID NO: 1077819 - RNA, 19 nt, Artificial Sequence
  Description of Artificial Sequence: Synthetic oligonucleotide
  Antisense strand to SEQ ID NO: 1077818
agcuaugacagcuaugaca

SEQ ID NO: 1077820 - RNA, 19 nt, Artificial Sequence
  Description of Artificial Sequence: Synthetic oligonucleotide
  Sense strand starting at position 2291 of SEQ ID NO: 915410
ugucauagcuggcugugua

SEQ ID NO: 1077821 - RNA, 19 nt, Artificial Sequence
  Description of Artificial Sequence: Synthetic oligonucleotide
  Antisense strand to SEQ ID NO: 1077820
uacacagccagcuaugaca

SEQ ID NO: 1077822 - RNA, 19 nt, Artificial Sequence
  Description of Artificial Sequence: Synthetic oligonucleotide
  Sense strand starting at position 2929 of SEQ ID NO: 915410
gggucucacuacccuuaaa

SEQ ID NO: 1077823 - RNA, 19 nt, Artificial Sequence
  Description of Artificial Sequence: Synthetic oligonucleotide
  Antisense strand to SEQ ID NO: 1077822
uuuaaggguagugagaccc

SEQ ID NO: 1077824 - RNA, 19 nt, Artificial Sequence
  Description of Artificial Sequence: Synthetic oligonucleotide
  Sense strand starting at position 3205 of SEQ ID NO: 915410
cugccucugcuaguaaguu

SEQ ID NO: 1077825 - RNA, 19 nt, Artificial Sequence
  Description of Artificial Sequence: Synthetic oligonucleotide
  Antisense strand to SEQ ID NO: 1077824
aacuuacuagcagaggcag

SEQ ID NO: 1077826 - RNA, 19 nt, Artificial Sequence
  Description of Artificial Sequence: Synthetic oligonucleotide
  Sense strand starting at position 3206 of SEQ ID NO: 915410
ugccucugcuaguaaguuu

SEQ ID NO: 1077827 - RNA, 19 nt, Artificial Sequence
  Description of Artificial Sequence: Synthetic oligonucleotide
  Antisense strand to SEQ ID NO: 1077826
aaacuuacuagcagaggca

SEQ ID NO: 1077828 - RNA, 19 nt, Artificial Sequence
  Description of Artificial Sequence: Synthetic oligonucleotide
  Sense strand starting at position 3308 of SEQ ID NO: 915410
caugguuagcccugcguca

SEQ ID NO: 1077829 - RNA, 19 nt, Artificial Sequence
  Description of Artificial Sequence: Synthetic oligonucleotide
  Antisense strand to SEQ ID NO: 1077828
ugacgcagggcuaaccaug

SEQ ID NO: 1077830 - RNA, 19 nt, Artificial Sequence
  Description of Artificial Sequence: Synthetic oligonucleotide
  Sense strand starting at position 3309 of SEQ ID NO: 915410
augguuagcccugcgucau

SEQ ID NO: 1077831 - RNA, 19 nt, Artificial Sequence
  Description of Artificial Sequence: Synthetic oligonucleotide
  Antisense strand to SEQ ID NO: 1077830
augacgcagggcuaaccau

SEQ ID NO: 1077832 - RNA, 19 nt, Artificial Sequence
  Description of Artificial Sequence: Synthetic oligonucleotide
  Sense strand starting at position 3315 of SEQ ID NO: 915410
agcccugcgucaugacaaa

SEQ ID NO: 1077833 - RNA, 19 nt, Artificial Sequence
  Description of Artificial Sequence: Synthetic oligonucleotide
  Antisense strand to SEQ ID NO: 1077832
uuugucaugacgcagggcu

SEQ ID NO: 1077834 - RNA, 19 nt, Artificial Sequence
  Description of Artificial Sequence: Synthetic oligonucleotide
  Sense strand starting at position 3452 of SEQ ID NO: 915410
ugugggauggugugaaugu

SEQ ID NO: 1077835 - RNA, 19 nt, Artificial Sequence
  Description of Artificial Sequence: Synthetic oligonucleotide
  Antisense strand to SEQ ID NO: 1077834
acauucacaccaucccaca

SEQ ID NO: 1077836 - RNA, 19 nt, Artificial Sequence
  Description of Artificial Sequence: Synthetic oligonucleotide
  Sense strand starting at position 3601 of SEQ ID NO: 915410
cugugaaauagugaguauu

SEQ ID NO: 1077837 - RNA, 19 nt, Artificial Sequence
  Description of Artificial Sequence: Synthetic oligonucleotide
  Antisense strand to SEQ ID NO: 1077836
aauacucacuauuucacag

SEQ ID NO: 1077838 - RNA, 19 nt, Artificial Sequence
  Description of Artificial Sequence: Synthetic oligonucleotide
  Sense strand starting at position 3603 of SEQ ID NO: 915410
gugaaauagugaguauuaa

SEQ ID NO: 1077839 - RNA, 19 nt, Artificial Sequence
  Description of Artificial Sequence: Synthetic oligonucleotide
  Antisense strand to SEQ ID NO: 1077838
uuaauacucacuauuucac

SEQ ID NO: 1077840 - RNA, 19 nt, Artificial Sequence
  Description of Artificial Sequence: Synthetic oligonucleotide
  Sense strand starting at position 3607 of SEQ ID NO: 915410
aauagugaguauuaaagca

SEQ ID NO: 1077841 - RNA, 19 nt, Artificial Sequence
  Description of Artificial Sequence: Synthetic oligonucleotide
  Antisense strand to SEQ ID NO: 1077840
ugcuuuaauacucacuauu

SEQ ID NO: 1077842 - RNA, 19 nt, Artificial Sequence
  Description of Artificial Sequence: Synthetic oligonucleotide
  Sense strand starting at position 16 of SEQ ID NO: 915411
gcccuaaccucuccaggua

SEQ ID NO: 1077843 - RNA, 19 nt, Artificial Sequence
  Description of Artificial Sequence: Synthetic oligonucleotide
  Antisense strand to SEQ ID NO: 1077842
uaccuggagagguuagggc

SEQ ID NO: 1077844 - RNA, 19 nt, Artificial Sequence
  Description of Artificial Sequence: Synthetic oligonucleotide
  Sense strand starting at position 643 of SEQ ID NO: 915411
aggcgaauugcuuguacuc

SEQ ID NO: 1077845 - RNA, 19 nt, Artificial Sequence
  Description of Artificial Sequence: Synthetic oligonucleotide
  Antisense strand to SEQ ID NO: 1077844
gaguacaagcaauucgccu

SEQ ID NO: 1077846 - RNA, 19 nt, Artificial Sequence
  Description of Artificial Sequence: Synthetic oligonucleotide
  Sense strand starting at position 645 of SEQ ID NO: 915411
gcgaauugcuuguacucag

SEQ ID NO: 1077847 - RNA, 19 nt, Artificial Sequence
  Description of Artificial Sequence: Synthetic oligonucleotide
  Antisense strand to SEQ ID NO: 1077846
cugaguacaagcaauucgc

SEQ ID NO: 1077848 - RNA, 19 nt, Artificial Sequence
  Description of Artificial Sequence: Synthetic oligonucleotide
  Sense strand starting at position 1041 of SEQ ID NO: 915411
agaggaaguguuugcccaa

SEQ ID NO: 1077849 - RNA, 19 nt, Artificial Sequence
  Description of Artificial Sequence: Synthetic oligonucleotide
  Antisense strand to SEQ ID NO: 1077848
uugggcaaacacuuccucu

SEQ ID NO: 1077850 - RNA, 19 nt, Artificial Sequence
  Description of Artificial Sequence: Synthetic oligonucleotide
  Sense strand starting at position 1042 of SEQ ID NO: 915411
gaggaaguguuugcccaac

SEQ ID NO: 1077851 - RNA, 19 nt, Artificial Sequence
  Description of Artificial Sequence: Synthetic oligonucleotide
  Antisense strand to SEQ ID NO: 1077850
guugggcaaacacuuccuc

SEQ ID NO: 1077852 - RNA, 19 nt, Artificial Sequence
  Description of Artificial Sequence: Synthetic oligonucleotide
  Sense strand starting at position 1044 of SEQ ID NO: 915411
ggaaguguuugcccaacuc

SEQ ID NO: 1077853 - RNA, 19 nt, Artificial Sequence
  Description of Artificial Sequence: Synthetic oligonucleotide
  Antisense strand to SEQ ID NO: 1077852
gaguugggcaaacacuucc

SEQ ID NO: 1077854 - RNA, 19 nt, Artificial Sequence
  Description of Artificial Sequence: Synthetic oligonucleotide
  Sense strand starting at position 2235 of SEQ ID NO: 915411
gcucuucgauucucacaca

SEQ ID NO: 1077855 - RNA, 19 nt, Artificial Sequence
  Description of Artificial Sequence: Synthetic oligonucleotide
  Antisense strand to SEQ ID NO: 1077854
ugugugagaaucgaagagc

SEQ ID NO: 1077856 - RNA, 19 nt, Artificial Sequence
  Description of Artificial Sequence: Synthetic oligonucleotide
  Sense strand starting at position 2238 of SEQ ID NO: 915411
cuucgauucucacacagau

SEQ ID NO: 1077857 - RNA, 19 nt, Artificial Sequence
  Description of Artificial Sequence: Synthetic oligonucleotide
  Antisense strand to SEQ ID NO: 1077856
aucugugugagaaucgaag

SEQ ID NO: 1077858 - RNA, 19 nt, Artificial Sequence
  Description of Artificial Sequence: Synthetic oligonucleotide
  Sense strand starting at position 2250 of SEQ ID NO: 915411
cacagauugucacuuaagg

SEQ ID NO: 1077859 - RNA, 19 nt, Artificial Sequence
  Description of Artificial Sequence: Synthetic oligonucleotide
  Antisense strand to SEQ ID NO: 1077858
ccuuaagugacaaucugug

SEQ ID NO: 1077860 - RNA, 19 nt, Artificial Sequence
  Description of Artificial Sequence: Synthetic oligonucleotide
  Sense strand starting at position 2393 of SEQ ID NO: 915411
gaguccuacucucugaguu

SEQ ID NO: 1077861 - RNA, 19 nt, Artificial Sequence
  Description of Artificial Sequence: Synthetic oligonucleotide
  Antisense strand to SEQ ID NO: 1077860
aacucagagaguaggacuc

SEQ ID NO: 1077862 - RNA, 19 nt, Artificial Sequence
  Description of Artificial Sequence: Synthetic oligonucleotide
  Sense strand starting at position 2394 of SEQ ID NO: 915411
aguccuacucucugaguuu

SEQ ID NO: 1077863 - RNA, 19 nt, Artificial Sequence
  Description of Artificial Sequence: Synthetic oligonucleotide
  Antisense strand to SEQ ID NO: 1077862
aaacucagagaguaggacu

SEQ ID NO: 1077864 - RNA, 19 nt, Artificial Sequence
  Description of Artificial Sequence: Synthetic oligonucleotide
  Sense strand starting at position 2506 of SEQ ID NO: 915411
cugcccucuggauaguauu

SEQ ID NO: 1077865 - RNA, 19 nt, Artificial Sequence
  Description of Artificial Sequence: Synthetic oligonucleotide
  Antisense strand to SEQ ID NO: 1077864
aauacuauccagagggcag

SEQ ID NO: 1077866 - RNA, 19 nt, Artificial Sequence
  Description of Artificial Sequence: Synthetic oligonucleotide
  Sense strand starting at position 2572 of SEQ ID NO: 915411
ucccacauccuccgugaaa

SEQ ID NO: 1077867 - RNA, 19 nt, Artificial Sequence
  Description of Artificial Sequence: Synthetic oligonucleotide
  Antisense strand to SEQ ID NO: 1077866
uuucacggaggauguggga

SEQ ID NO: 1077868 - RNA, 19 nt, Artificial Sequence
  Description of Artificial Sequence: Synthetic oligonucleotide
  Sense strand starting at position 2585 of SEQ ID NO: 915411
gugaaaccuucccugaauc

SEQ ID NO: 1077869 - RNA, 19 nt, Artificial Sequence
  Description of Artificial Sequence: Synthetic oligonucleotide
  Antisense strand to SEQ ID NO: 1077868
gauucagggaagguuucac

SEQ ID NO: 1077870 - RNA, 19 nt, Artificial Sequence
  Description of Artificial Sequence: Synthetic oligonucleotide
  Sense strand starting at position 2595 of SEQ ID NO: 915411
cccugaaucccagacgacu

SEQ ID NO: 1077871 - RNA, 19 nt, Artificial Sequence
  Description of Artificial Sequence: Synthetic oligonucleotide
  Antisense strand to SEQ ID NO: 1077870
agucgucugggauucaggg

SEQ ID NO: 1077872 - RNA, 19 nt, Artificial Sequence
  Description of Artificial Sequence: Synthetic oligonucleotide
  Sense strand starting at position 2656 of SEQ ID NO: 915411
uccugaucauucgucucaa

SEQ ID NO: 1077873 - RNA, 19 nt, Artificial Sequence
  Description of Artificial Sequence: Synthetic oligonucleotide
  Antisense strand to SEQ ID NO: 1077872
uugagacgaaugaucagga

SEQ ID NO: 1077874 - RNA, 19 nt, Artificial Sequence
  Description of Artificial Sequence: Synthetic oligonucleotide
  Sense strand starting at position 2657 of SEQ ID NO: 915411
ccugaucauucgucucaac

SEQ ID NO: 1077875 - RNA, 19 nt, Artificial Sequence
  Description of Artificial Sequence: Synthetic oligonucleotide
  Antisense strand to SEQ ID NO: 1077874
guugagacgaaugaucagg

SEQ ID NO: 1077876 - RNA, 19 nt, Artificial Sequence
  Description of Artificial Sequence: Synthetic oligonucleotide
  Sense strand starting at position 2851 of SEQ ID NO: 915411
ggcucaaguuagucagauc

SEQ ID NO: 1077877 - RNA, 19 nt, Artificial Sequence
  Description of Artificial Sequence: Synthetic oligonucleotide
  Antisense strand to SEQ ID NO: 1077876
gaucugacuaacuugagcc

SEQ ID NO: 1077878 - RNA, 19 nt, Artificial Sequence
  Description of Artificial Sequence: Synthetic oligonucleotide
  Sense strand starting at position 2854 of SEQ ID NO: 915411
ucaaguuagucagaucuuc

SEQ ID NO: 1077879 - RNA, 19 nt, Artificial Sequence
  Description of Artificial Sequence: Synthetic oligonucleotide
  Antisense strand to SEQ ID NO: 1077878
gaagaucugacuaacuuga

SEQ ID NO: 1077880 - RNA, 19 nt, Artificial Sequence
  Description of Artificial Sequence: Synthetic oligonucleotide
  Sense strand starting at position 2860 of SEQ ID NO: 915411
uagucagaucuucguuuga

SEQ ID NO: 1077881 - RNA, 19 nt, Artificial Sequence
  Description of Artificial Sequence: Synthetic oligonucleotide
  Antisense strand to SEQ ID NO: 1077880
ucaaacgaagaucugacua

SEQ ID NO: 1077882 - RNA, 19 nt, Artificial Sequence
  Description of Artificial Sequence: Synthetic oligonucleotide
  Sense strand starting at position 2862 of SEQ ID NO: 915411
gucagaucuucguuugagg

SEQ ID NO: 1077883 - RNA, 19 nt, Artificial Sequence
  Description of Artificial Sequence: Synthetic oligonucleotide
  Antisense strand to SEQ ID NO: 1077882
ccucaaacgaagaucugac

SEQ ID NO: 1077884 - RNA, 19 nt, Artificial Sequence
  Description of Artificial Sequence: Synthetic oligonucleotide
  Sense strand starting at position 2864 of SEQ ID NO: 915411
cagaucuucguuugaggau

SEQ ID NO: 1077885 - RNA, 19 nt, Artificial Sequence
  Description of Artificial Sequence: Synthetic oligonucleotide
  Antisense strand to SEQ ID NO: 1077884
auccucaaacgaagaucug

SEQ ID NO: 1077886 - RNA, 19 nt, Artificial Sequence
  Description of Artificial Sequence: Synthetic oligonucleotide
  Sense strand starting at position 2865 of SEQ ID NO: 915411
agaucuucguuugaggaua

SEQ ID NO: 1077887 - RNA, 19 nt, Artificial Sequence
  Description of Artificial Sequence: Synthetic oligonucleotide
  Antisense strand to SEQ ID NO: 1077886
uauccucaaacgaagaucu

SEQ ID NO: 1077888 - RNA, 19 nt, Artificial Sequence
  Description of Artificial Sequence: Synthetic oligonucleotide
  Sense strand starting at position 2867 of SEQ ID NO: 915411
aucuucguuugaggauaca

SEQ ID NO: 1077889 - RNA, 19 nt, Artificial Sequence
  Description of Artificial Sequence: Synthetic oligonucleotide
  Antisense strand to SEQ ID NO: 1077888
uguauccucaaacgaagau

SEQ ID NO: 1077890 - RNA, 19 nt, Artificial Sequence
  Description of Artificial Sequence: Synthetic oligonucleotide
  Sense strand starting at position 3039 of SEQ ID NO: 915411
ggacguauucucuaagacc

SEQ ID NO: 1077891 - RNA, 19 nt, Artificial Sequence
  Description of Artificial Sequence: Synthetic oligonucleotide
  Antisense strand to SEQ ID NO: 1077890
ggucuuagagaauacgucc

SEQ ID NO: 1077892 - RNA, 19 nt, Artificial Sequence
  Description of Artificial Sequence: Synthetic oligonucleotide
  Sense strand starting at position 3201 of SEQ ID NO: 915411
uaggcaguucuccauagca

SEQ ID NO: 1077893 - RNA, 19 nt, Artificial Sequence
  Description of Artificial Sequence: Synthetic oligonucleotide
  Antisense strand to SEQ ID NO: 1077892
ugcuauggagaacugccua

SEQ ID NO: 1077894 - RNA, 19 nt, Artificial Sequence
  Description of Artificial Sequence: Synthetic oligonucleotide
  Sense strand starting at position 3203 of SEQ ID NO: 915411
ggcaguucuccauagcauc

SEQ ID NO: 1077895 - RNA, 19 nt, Artificial Sequence
  Description of Artificial Sequence: Synthetic oligonucleotide
  Antisense strand to SEQ ID NO: 1077894
gaugcuauggagaacugcc

SEQ ID NO: 1077896 - RNA, 19 nt, Artificial Sequence
  Description of Artificial Sequence: Synthetic oligonucleotide
  Sense strand starting at position 3386 of SEQ ID NO: 915411
agcagauguccacaugugu

SEQ ID NO: 1077897 - RNA, 19 nt, Artificial Sequence
  Description of Artificial Sequence: Synthetic oligonucleotide
  Antisense strand to SEQ ID NO: 1077896
acacauguggacaucugcu

SEQ ID NO: 1077898 - RNA, 19 nt, Artificial Sequence
  Description of Artificial Sequence: Synthetic oligonucleotide
  Sense strand starting at position 3400 of SEQ ID NO: 915411
uguguuugcuggcuugaau

SEQ ID NO: 1077899 - RNA, 19 nt, Artificial Sequence
  Description of Artificial Sequence: Synthetic oligonucleotide
  Antisense strand to SEQ ID NO: 1077898
auucaagccagcaaacaca

SEQ ID NO: 1077900 - RNA, 19 nt, Artificial Sequence
  Description of Artificial Sequence: Synthetic oligonucleotide
  Sense strand starting at position 3409 of SEQ ID NO: 915411
uggcuugaaucccucauca

SEQ ID NO: 1077901 - RNA, 19 nt, Artificial Sequence
  Description of Artificial Sequence: Synthetic oligonucleotide
  Antisense strand to SEQ ID NO: 1077900
ugaugagggauucaagcca

SEQ ID NO: 1077902 - RNA, 19 nt, Artificial Sequence
  Description of Artificial Sequence: Synthetic oligonucleotide
  Sense strand starting at position 3411 of SEQ ID NO: 915411
gcuugaaucccucaucagu

SEQ ID NO: 1077903 - RNA, 19 nt, Artificial Sequence
  Description of Artificial Sequence: Synthetic oligonucleotide
  Antisense strand to SEQ ID NO: 1077902
acugaugagggauucaagc

SEQ ID NO: 1077904 - RNA, 19 nt, Artificial Sequence
  Description of Artificial Sequence: Synthetic oligonucleotide
  Sense strand starting at position 3424 of SEQ ID NO: 915411
aucaguuggucuugagcaa

SEQ ID NO: 1077905 - RNA, 19 nt, Artificial Sequence
  Description of Artificial Sequence: Synthetic oligonucleotide
  Antisense strand to SEQ ID NO: 1077904
uugcucaagaccaacugau

SEQ ID NO: 1077906 - RNA, 19 nt, Artificial Sequence
  Description of Artificial Sequence: Synthetic oligonucleotide
  Sense strand starting at position 3555 of SEQ ID NO: 915411
ggagauaagucauggcaac

SEQ ID NO: 1077907 - RNA, 19 nt, Artificial Sequence
  Description of Artificial Sequence: Synthetic oligonucleotide
  Antisense strand to SEQ ID NO: 1077906
guugccaugacuuaucucc

SEQ ID NO: 1077908 - RNA, 19 nt, Artificial Sequence
  Description of Artificial Sequence: Synthetic oligonucleotide
  Sense strand starting at position 3616 of SEQ ID NO: 915411
gggcuaugucccuggagga

SEQ ID NO: 1077909 - RNA, 19 nt, Artificial Sequence
  Description of Artificial Sequence: Synthetic oligonucleotide
  Antisense strand to SEQ ID NO: 1077908
uccuccagggacauagccc

SEQ ID NO: 1077910 - RNA, 19 nt, Artificial Sequence
  Description of Artificial Sequence: Synthetic oligonucleotide
  Sense strand starting at position 3617 of SEQ ID NO: 915411
ggcuaugucccuggaggaa

SEQ ID NO: 1077911 - RNA, 19 nt, Artificial Sequence
  Description of Artificial Sequence: Synthetic oligonucleotide
  Antisense strand to SEQ ID NO: 1077910
uuccuccagggacauagcc

SEQ ID NO: 1077912 - RNA, 19 nt, Artificial Sequence
  Description of Artificial Sequence: Synthetic oligonucleotide
  Sense strand starting at position 3630 of SEQ ID NO: 915411
gaggaagaguccucagccu

SEQ ID NO: 1077913 - RNA, 19 nt, Artificial Sequence
  Description of Artificial Sequence: Synthetic oligonucleotide
  Antisense strand to SEQ ID NO: 1077912
aggcugaggacucuuccuc

SEQ ID NO: 1077914 - RNA, 19 nt, Artificial Sequence
  Description of Artificial Sequence: Synthetic oligonucleotide
  Sense strand starting at position 3832 of SEQ ID NO: 915411
gaacuugcuccucaguuga

SEQ ID NO: 1077915 - RNA, 19 nt, Artificial Sequence
  Description of Artificial Sequence: Synthetic oligonucleotide
  Antisense strand to SEQ ID NO: 1077914
ucaacugaggagcaaguuc

SEQ ID NO: 1077916 - RNA, 19 nt, Artificial Sequence
  Description of Artificial Sequence: Synthetic oligonucleotide
  Sense strand starting at position 3851 of SEQ ID NO: 915411
aaaggaugggcucggagaa

SEQ ID NO: 1077917 - RNA, 19 nt, Artificial Sequence
  Description of Artificial Sequence: Synthetic oligonucleotide
  Antisense strand to SEQ ID NO: 1077916
uucuccgagcccauccuuu

SEQ ID NO: 1077918 - RNA, 19 nt, Artificial Sequence
  Description of Artificial Sequence: Synthetic oligonucleotide
  Sense strand starting at position 34 of SEQ ID NO: 915412
cuaguagguacucaauguu

SEQ ID NO: 1077919 - RNA, 19 nt, Artificial Sequence
  Description of Artificial Sequence: Synthetic oligonucleotide
  Antisense strand to SEQ ID NO: 1077918
aacauugaguaccuacuag

SEQ ID NO: 1077920 - RNA, 19 nt, Artificial Sequence
  Description of Artificial Sequence: Synthetic oligonucleotide
  Sense strand starting at position 37 of SEQ ID NO: 915412
guagguacucaauguuuga

SEQ ID NO: 1077921 - RNA, 19 nt, Artificial Sequence
  Description of Artificial Sequence: Synthetic oligonucleotide
  Antisense strand to SEQ ID NO: 1077920
ucaaacauugaguaccuac

SEQ ID NO: 1077922 - RNA, 19 nt, Artificial Sequence
  Description of Artificial Sequence: Synthetic oligonucleotide
  Sense strand starting at position 40 of SEQ ID NO: 915412
gguacucaauguuugauga

SEQ ID NO: 1077923 - RNA, 19 nt, Artificial Sequence
  Description of Artificial Sequence: Synthetic oligonucleotide
  Antisense strand to SEQ ID NO: 1077922
ucaucaaacauugaguacc

SEQ ID NO: 1077924 - RNA, 19 nt, Artificial Sequence
  Description of Artificial Sequence: Synthetic oligonucleotide
  Sense strand starting at position 47 of SEQ ID NO: 915412
aauguuugaugacucagaa

SEQ ID NO: 1077925 - RNA, 19 nt, Artificial Sequence
  Description of Artificial Sequence: Synthetic oligonucleotide
  Antisense strand to SEQ ID NO: 1077924
uucugagucaucaaacauu

SEQ ID NO: 1077926 - RNA, 19 nt, Artificial Sequence
  Description of Artificial Sequence: Synthetic oligonucleotide
  Sense strand starting at position 96 of SEQ ID NO: 915412
gggcaugcaaaguaugaga

SEQ ID NO: 1077927 - RNA, 19 nt, Artificial Sequence
  Description of Artificial Sequence: Synthetic oligonucleotide
  Antisense strand to SEQ ID NO: 1077926
ucucauacuuugcaugccc

SEQ ID NO: 1077928 - RNA, 19 nt, Artificial Sequence
  Description of Artificial Sequence: Synthetic oligonucleotide
  Sense strand starting at position 98 of SEQ ID NO: 915412
gcaugcaaaguaugagaaa

SEQ ID NO: 1077929 - RNA, 19 nt, Artificial Sequence
  Description of Artificial Sequence: Synthetic oligonucleotide
  Antisense strand to SEQ ID NO: 1077928
uuucucauacuuugcaugc

SEQ ID NO: 1077930 - RNA, 19 nt, Artificial Sequence
  Description of Artificial Sequence: Synthetic oligonucleotide
  Sense strand starting at position 126 of SEQ ID NO: 915412
ggguaaucaucucugaauu

SEQ ID NO: 1077931 - RNA, 19 nt, Artificial Sequence
  Description of Artificial Sequence: Synthetic oligonucleotide
  Antisense strand to SEQ ID NO: 1077930
aauucagagaugauuaccc

SEQ ID NO: 1077932 - RNA, 19 nt, Artificial Sequence
  Description of Artificial Sequence: Synthetic oligonucleotide
  Sense strand starting at position 127 of SEQ ID NO: 915412
gguaaucaucucugaauug

SEQ ID NO: 1077933 - RNA, 19 nt, Artificial Sequence
  Description of Artificial Sequence: Synthetic oligonucleotide
  Antisense strand to SEQ ID NO: 1077932
caauucagagaugauuacc

SEQ ID NO: 1077934 - RNA, 19 nt, Artificial Sequence
  Description of Artificial Sequence: Synthetic oligonucleotide
  Sense strand starting at position 148 of SEQ ID NO: 915412
gagugucaaguuuguauaa

SEQ ID NO: 1077935 - RNA, 19 nt, Artificial Sequence
  Description of Artificial Sequence: Synthetic oligonucleotide
  Antisense strand to SEQ ID NO: 1077934
uuauacaaacuugacacuc

SEQ ID NO: 1077936 - RNA, 19 nt, Artificial Sequence
  Description of Artificial Sequence: Synthetic oligonucleotide
  Sense strand starting at position 190 of SEQ ID NO: 915412
acaagaaguaaucguagau

SEQ ID NO: 1077937 - RNA, 19 nt, Artificial Sequence
  Description of Artificial Sequence: Synthetic oligonucleotide
  Antisense strand to SEQ ID NO: 1077936
aucuacgauuacuucuugu

SEQ ID NO: 1077938 - RNA, 19 nt, Artificial Sequence
  Description of Artificial Sequence: Synthetic oligonucleotide
  Sense strand starting at position 373 of SEQ ID NO: 915412
agaugaugagucuguuccu

SEQ ID NO: 1077939 - RNA, 19 nt, Artificial Sequence
  Description of Artificial Sequence: Synthetic oligonucleotide
  Antisense strand to SEQ ID NO: 1077938
aggaacagacucaucaucu

SEQ ID NO: 1077940 - RNA, 19 nt, Artificial Sequence
  Description of Artificial Sequence: Synthetic oligonucleotide
  Sense strand starting at position 374 of SEQ ID NO: 915412
gaugaugagucuguuccua

SEQ ID NO: 1077941 - RNA, 19 nt, Artificial Sequence
  Description of Artificial Sequence: Synthetic oligonucleotide
  Antisense strand to SEQ ID NO: 1077940
uaggaacagacucaucauc

SEQ ID NO: 1077942 - RNA, 19 nt, Artificial Sequence
  Description of Artificial Sequence: Synthetic oligonucleotide
  Sense strand starting at position 376 of SEQ ID NO: 915412
ugaugagucuguuccuacu

SEQ ID NO: 1077943 - RNA, 19 nt, Artificial Sequence
  Description of Artificial Sequence: Synthetic oligonucleotide
  Antisense strand to SEQ ID NO: 1077942
aguaggaacagacucauca

SEQ ID NO: 1077944 - RNA, 19 nt, Artificial Sequence
  Description of Artificial Sequence: Synthetic oligonucleotide
  Sense strand starting at position 430 of SEQ ID NO: 915412
agauguuuguuauuccaag

SEQ ID NO: 1077945 - RNA, 19 nt, Artificial Sequence
  Description of Artificial Sequence: Synthetic oligonucleotide
  Antisense strand to SEQ ID NO: 1077944
cuuggaauaacaaacaucu

SEQ ID NO: 1077946 - RNA, 19 nt, Artificial Sequence
  Description of Artificial Sequence: Synthetic oligonucleotide
  Sense strand starting at position 621 of SEQ ID NO: 915412
ugacauagcaucuggcaga

SEQ ID NO: 1077947 - RNA, 19 nt, Artificial Sequence
  Description of Artificial Sequence: Synthetic oligonucleotide
  Antisense strand to SEQ ID NO: 1077946
ucugccagaugcuauguca

SEQ ID NO: 1077948 - RNA, 19 nt, Artificial Sequence
  Description of Artificial Sequence: Synthetic oligonucleotide
  Sense strand starting at position 628 of SEQ ID NO: 915412
gcaucuggcagagauugaa

SEQ ID NO: 1077949 - RNA, 19 nt, Artificial Sequence
  Description of Artificial Sequence: Synthetic oligonucleotide
  Antisense strand to SEQ ID NO: 1077948
uucaaucucugccagaugc

SEQ ID NO: 1077950 - RNA, 19 nt, Artificial Sequence
  Description of Artificial Sequence: Synthetic oligonucleotide
  Sense strand starting at position 665 of SEQ ID NO: 915412
aaagaauugucagugauga

SEQ ID NO: 1077951 - RNA, 19 nt, Artificial Sequence
  Description of Artificial Sequence: Synthetic oligonucleotide
  Antisense strand to SEQ ID NO: 1077950
ucaucacugacaauucuuu

SEQ ID NO: 1077952 - RNA, 19 nt, Artificial Sequence
  Description of Artificial Sequence: Synthetic oligonucleotide
  Sense strand starting at position 666 of SEQ ID NO: 915412
aagaauugucagugaugaa

SEQ ID NO: 1077953 - RNA, 19 nt, Artificial Sequence
  Description of Artificial Sequence: Synthetic oligonucleotide
  Antisense strand to SEQ ID NO: 1077952
uucaucacugacaauucuu

SEQ ID NO: 1077954 - RNA, 19 nt, Artificial Sequence
  Description of Artificial Sequence: Synthetic oligonucleotide
  Sense strand starting at position 821 of SEQ ID NO: 915412
cucuauggcccagacuaau

SEQ ID NO: 1077955 - RNA, 19 nt, Artificial Sequence
  Description of Artificial Sequence: Synthetic oligonucleotide
  Antisense strand to SEQ ID NO: 1077954
auuagucugggccauagag

SEQ ID NO: 1077956 - RNA, 19 nt, Artificial Sequence
  Description of Artificial Sequence: Synthetic oligonucleotide
  Sense strand starting at position 2126 of SEQ ID NO: 915412
gggcaagccagggauaagu

SEQ ID NO: 1077957 - RNA, 19 nt, Artificial Sequence
  Description of Artificial Sequence: Synthetic oligonucleotide
  Antisense strand to SEQ ID NO: 1077956
acuuaucccuggcuugccc

SEQ ID NO: 1077958 - RNA, 19 nt, Artificial Sequence
  Description of Artificial Sequence: Synthetic oligonucleotide
  Sense strand starting at position 2128 of SEQ ID NO: 915412
gcaagccagggauaaguua

SEQ ID NO: 1077959 - RNA, 19 nt, Artificial Sequence
  Description of Artificial Sequence: Synthetic oligonucleotide
  Antisense strand to SEQ ID NO: 1077958
uaacuuaucccuggcuugc

SEQ ID NO: 1077960 - RNA, 19 nt, Artificial Sequence
  Description of Artificial Sequence: Synthetic oligonucleotide
  Sense strand starting at position 2569 of SEQ ID NO: 915412
cauugcucccaggaauguu

SEQ ID NO: 1077961 - RNA, 19 nt, Artificial Sequence
  Description of Artificial Sequence: Synthetic oligonucleotide
  Antisense strand to SEQ ID NO: 1077960
aacauuccugggagcaaug

SEQ ID NO: 1077962 - RNA, 19 nt, Artificial Sequence
  Description of Artificial Sequence: Synthetic oligonucleotide
  Sense strand starting at position 2572 of SEQ ID NO: 915412
ugcucccaggaauguuaua

SEQ ID NO: 1077963 - RNA, 19 nt, Artificial Sequence
  Description of Artificial Sequence: Synthetic oligonucleotide
  Antisense strand to SEQ ID NO: 1077962
uauaacauuccugggagca

SEQ ID NO: 1077964 - RNA, 19 nt, Artificial Sequence
  Description of Artificial Sequence: Synthetic oligonucleotide
  Sense strand starting at position 2633 of SEQ ID NO: 915412
ugaagcuuagagggaguaa

SEQ ID NO: 1077965 - RNA, 19 nt, Artificial Sequence
  Description of Artificial Sequence: Synthetic oligonucleotide
  Antisense strand to SEQ ID NO: 1077964
uuacucccucuaagcuuca

SEQ ID NO: 1077966 - RNA, 19 nt, Artificial Sequence
  Description of Artificial Sequence: Synthetic oligonucleotide
  Sense strand starting at position 2644 of SEQ ID NO: 915412
gggaguaaaugacuugcaa

SEQ ID NO: 1077967 - RNA, 19 nt, Artificial Sequence
  Description of Artificial Sequence: Synthetic oligonucleotide
  Antisense strand to SEQ ID NO: 1077966
uugcaagucauuuacuccc

SEQ ID NO: 1077968 - RNA, 19 nt, Artificial Sequence
  Description of Artificial Sequence: Synthetic oligonucleotide
  Sense strand starting at position 3510 of SEQ ID NO: 915412
gagguauggcaccacuaca

SEQ ID NO: 1077969 - RNA, 19 nt, Artificial Sequence
  Description of Artificial Sequence: Synthetic oligonucleotide
  Antisense strand to SEQ ID NO: 1077968
uguaguggugccauaccuc

SEQ ID NO: 1077970 - RNA, 19 nt, Artificial Sequence
  Description of Artificial Sequence: Synthetic oligonucleotide
  Sense strand starting at position 3527 of SEQ ID NO: 915412
cacugaaaucugggugaca

SEQ ID NO: 1077971 - RNA, 19 nt, Artificial Sequence
  Description of Artificial Sequence: Synthetic oligonucleotide
  Antisense strand to SEQ ID NO: 1077970
ugucacccagauuucagug

SEQ ID NO: 1077972 - RNA, 19 nt, Artificial Sequence
  Description of Artificial Sequence: Synthetic oligonucleotide
  Sense strand starting at position 3545 of SEQ ID NO: 915412
agaacaagucccugucuua

SEQ ID NO: 1077973 - RNA, 19 nt, Artificial Sequence
  Description of Artificial Sequence: Synthetic oligonucleotide
  Antisense strand to SEQ ID NO: 1077972
uaagacagggacuuguucu

SEQ ID NO: 1077974 - RNA, 19 nt, Artificial Sequence
  Description of Artificial Sequence: Synthetic oligonucleotide
  Sense strand starting at position 3615 of SEQ ID NO: 915412
guccuuacauuugugucua

SEQ ID NO: 1077975 - RNA, 19 nt, Artificial Sequence
  Description of Artificial Sequence: Synthetic oligonucleotide
  Antisense strand to SEQ ID NO: 1077974
uagacacaaauguaaggac

SEQ ID NO: 1077976 - RNA, 19 nt, Artificial Sequence
  Description of Artificial Sequence: Synthetic oligonucleotide
  Sense strand starting at position 3699 of SEQ ID NO: 915412
gggaguuauuugcuuagcu

SEQ ID NO: 1077977 - RNA, 19 nt, Artificial Sequence
  Description of Artificial Sequence: Synthetic oligonucleotide
  Antisense strand to SEQ ID NO: 1077976
agcuaagcaaauaacuccc

SEQ ID NO: 1077978 - RNA, 19 nt, Artificial Sequence
  Description of Artificial Sequence: Synthetic oligonucleotide
  Sense strand starting at position 3700 of SEQ ID NO: 915412
ggaguuauuugcuuagcug

SEQ ID NO: 1077979 - RNA, 19 nt, Artificial Sequence
  Description of Artificial Sequence: Synthetic oligonucleotide
  Antisense strand to SEQ ID NO: 1077978
cagcuaagcaaauaacucc

SEQ ID NO: 1077980 - RNA, 19 nt, Artificial Sequence
  Description of Artificial Sequence: Synthetic oligonucleotide
  Sense strand starting at position 3701 of SEQ ID NO: 915412
gaguuauuugcuuagcugu

SEQ ID NO: 1077981 - RNA, 19 nt, Artificial Sequence
  Description of Artificial Sequence: Synthetic oligonucleotide
  Antisense strand to SEQ ID NO: 1077980
acagcuaagcaaauaacuc

SEQ ID NO: 1077982 - RNA, 19 nt, Artificial Sequence
  Description of Artificial Sequence: Synthetic oligonucleotide
  Sense strand starting at position 3704 of SEQ ID NO: 915412
uuauuugcuuagcuguaga

SEQ ID NO: 1077983 - RNA, 19 nt, Artificial Sequence
  Description of Artificial Sequence: Synthetic oligonucleotide
  Antisense strand to SEQ ID NO: 1077982
ucuacagcuaagcaaauaa

SEQ ID NO: 1077984 - RNA, 19 nt, Artificial Sequence
  Description of Artificial Sequence: Synthetic oligonucleotide
  Sense strand starting at position 3707 of SEQ ID NO: 915412
uuugcuuagcuguagaaau

SEQ ID NO: 1077985 - RNA, 19 nt, Artificial Sequence
  Description of Artificial Sequence: Synthetic oligonucleotide
  Antisense strand to SEQ ID NO: 1077984
auuucuacagcuaagcaaa

SEQ ID NO: 1077986 - RNA, 19 nt, Artificial Sequence
  Description of Artificial Sequence: Synthetic oligonucleotide
  Sense strand starting at position 3709 of SEQ ID NO: 915412
ugcuuagcuguagaaauga

SEQ ID NO: 1077987 - RNA, 19 nt, Artificial Sequence
  Description of Artificial Sequence: Synthetic oligonucleotide
  Antisense strand to SEQ ID NO: 1077986
ucauuucuacagcuaagca

SEQ ID NO: 1077988 - RNA, 19 nt, Artificial Sequence
  Description of Artificial Sequence: Synthetic oligonucleotide
  Sense strand starting at position 3761 of SEQ ID NO: 915412
augaauugcugaccuagaa

SEQ ID NO: 1077989 - RNA, 19 nt, Artificial Sequence
  Description of Artificial Sequence: Synthetic oligonucleotide
  Antisense strand to SEQ ID NO: 1077988
uucuaggucagcaauucau

SEQ ID NO: 1077990 - RNA, 19 nt, Artificial Sequence
  Description of Artificial Sequence: Synthetic oligonucleotide
  Sense strand starting at position 3817 of SEQ ID NO: 915412
ucuauucuggccuaucaag

SEQ ID NO: 1077991 - RNA, 19 nt, Artificial Sequence
  Description of Artificial Sequence: Synthetic oligonucleotide
  Antisense strand to SEQ ID NO: 1077990
cuugauaggccagaauaga

SEQ ID NO: 1077992 - RNA, 19 nt, Artificial Sequence
  Description of Artificial Sequence: Synthetic oligonucleotide
  Sense strand starting at position 3968 of SEQ ID NO: 915412
uuacaaguaguuugucaga

SEQ ID NO: 1077993 - RNA, 19 nt, Artificial Sequence
  Description of Artificial Sequence: Synthetic oligonucleotide
  Antisense strand to SEQ ID NO: 1077992
ucugacaaacuacuuguaa

SEQ ID NO: 1077994 - RNA, 19 nt, Artificial Sequence
  Description of Artificial Sequence: Synthetic oligonucleotide
  Sense strand starting at position 3970 of SEQ ID NO: 915412
acaaguaguuugucagauc

SEQ ID NO: 1077995 - RNA, 19 nt, Artificial Sequence
  Description of Artificial Sequence: Synthetic oligonucleotide
  Antisense strand to SEQ ID NO: 1077994
gaucugacaaacuacuugu

SEQ ID NO: 1077996 - RNA, 19 nt, Artificial Sequence
  Description of Artificial Sequence: Synthetic oligonucleotide
  Sense strand starting at position 3977 of SEQ ID NO: 915412
guuugucagaucuaauagg

SEQ ID NO: 1077997 - RNA, 19 nt, Artificial Sequence
  Description of Artificial Sequence: Synthetic oligonucleotide
  Antisense strand to SEQ ID NO: 1077996
ccuauuagaucugacaaac

SEQ ID NO: 1077998 - RNA, 19 nt, Artificial Sequence
  Description of Artificial Sequence: Synthetic oligonucleotide
  Sense strand starting at position 318 of SEQ ID NO: 915413
gaaacuagaugugugggua

SEQ ID NO: 1077999 - RNA, 19 nt, Artificial Sequence
  Description of Artificial Sequence: Synthetic oligonucleotide
  Antisense strand to SEQ ID NO: 1077998
uacccacacaucuaguuuc

SEQ ID NO: 1078000 - RNA, 19 nt, Artificial Sequence
  Description of Artificial Sequence: Synthetic oligonucleotide
  Sense strand starting at position 319 of SEQ ID NO: 915413
aaacuagauguguggguau

SEQ ID NO: 1078001 - RNA, 19 nt, Artificial Sequence
  Description of Artificial Sequence: Synthetic oligonucleotide
  Antisense strand to SEQ ID NO: 1078000
auacccacacaucuaguuu

SEQ ID NO: 1078002 - RNA, 19 nt, Artificial Sequence
  Description of Artificial Sequence: Synthetic oligonucleotide
  Sense strand starting at position 321 of SEQ ID NO: 915413
acuagauguguggguauau

SEQ ID NO: 1078003 - RNA, 19 nt, Artificial Sequence
  Description of Artificial Sequence: Synthetic oligonucleotide
  Antisense strand to SEQ ID NO: 1078002
auauacccacacaucuagu

SEQ ID NO: 1078004 - RNA, 19 nt, Artificial Sequence
  Description of Artificial Sequence: Synthetic oligonucleotide
  Sense strand starting at position 322 of SEQ ID NO: 915413
cuagauguguggguauaug

SEQ ID NO: 1078005 - RNA, 19 nt, Artificial Sequence
  Description of Artificial Sequence: Synthetic oligonucleotide
  Antisense strand to SEQ ID NO: 1078004
cauauacccacacaucuag

SEQ ID NO: 1078006 - RNA, 19 nt, Artificial Sequence
  Description of Artificial Sequence: Synthetic oligonucleotide
  Sense strand starting at position 447 of SEQ ID NO: 915413
guaguagaggcuuaaacaa

SEQ ID NO: 1078007 - RNA, 19 nt, Artificial Sequence
  Description of Artificial Sequence: Synthetic oligonucleotide
  Antisense strand to SEQ ID NO: 1078006
uuguuuaagccucuacuac

SEQ ID NO: 1078008 - RNA, 19 nt, Artificial Sequence
  Description of Artificial Sequence: Synthetic oligonucleotide
  Sense strand starting at position 545 of SEQ ID NO: 915413
gaagauacuuaggaaguua

SEQ ID NO: 1078009 - RNA, 19 nt, Artificial Sequence
  Description of Artificial Sequence: Synthetic oligonucleotide
  Antisense strand to SEQ ID NO: 1078008
uaacuuccuaaguaucuuc

SEQ ID NO: 1078010 - RNA, 19 nt, Artificial Sequence
  Description of Artificial Sequence: Synthetic oligonucleotide
  Sense strand starting at position 624 of SEQ ID NO: 915413
acuaaauagcugugcauca

SEQ ID NO: 1078011 - RNA, 19 nt, Artificial Sequence
  Description of Artificial Sequence: Synthetic oligonucleotide
  Antisense strand to SEQ ID NO: 1078010
ugaugcacagcuauuuagu

SEQ ID NO: 1078012 - RNA, 19 nt, Artificial Sequence
  Description of Artificial Sequence: Synthetic oligonucleotide
  Sense strand starting at position 654 of SEQ ID NO: 915413
aggcaauaauauccuuaga

SEQ ID NO: 1078013 - RNA, 19 nt, Artificial Sequence
  Description of Artificial Sequence: Synthetic oligonucleotide
  Antisense strand to SEQ ID NO: 1078012
ucuaaggauauuauugccu

SEQ ID NO: 1078014 - RNA, 19 nt, Artificial Sequence
  Description of Artificial Sequence: Synthetic oligonucleotide
  Sense strand starting at position 744 of SEQ ID NO: 915413
uccugauauugacacagaa

SEQ ID NO: 1078015 - RNA, 19 nt, Artificial Sequence
  Description of Artificial Sequence: Synthetic oligonucleotide
  Antisense strand to SEQ ID NO: 1078014
uucugugucaauaucagga

SEQ ID NO: 1078016 - RNA, 19 nt, Artificial Sequence
  Description of Artificial Sequence: Synthetic oligonucleotide
  Sense strand starting at position 935 of SEQ ID NO: 915413
guucuaacuggaggcaauu

SEQ ID NO: 1078017 - RNA, 19 nt, Artificial Sequence
  Description of Artificial Sequence: Synthetic oligonucleotide
  Antisense strand to SEQ ID NO: 1078016
aauugccuccaguuagaac

SEQ ID NO: 1078018 - RNA, 19 nt, Artificial Sequence
  Description of Artificial Sequence: Synthetic oligonucleotide
  Sense strand starting at position 961 of SEQ ID NO: 915413
aguauuaaccucugugaug

SEQ ID NO: 1078019 - RNA, 19 nt, Artificial Sequence
  Description of Artificial Sequence: Synthetic oligonucleotide
  Antisense strand to SEQ ID NO: 1078018
caucacagagguuaauacu

SEQ ID NO: 1078020 - RNA, 19 nt, Artificial Sequence
  Description of Artificial Sequence: Synthetic oligonucleotide
  Sense strand starting at position 1097 of SEQ ID NO: 915413
cuaguagguacucaauguu

SEQ ID NO: 1078021 - RNA, 19 nt, Artificial Sequence
  Description of Artificial Sequence: Synthetic oligonucleotide
  Antisense strand to SEQ ID NO: 1078020
aacauugaguaccuacuag

SEQ ID NO: 1078022 - RNA, 19 nt, Artificial Sequence
  Description of Artificial Sequence: Synthetic oligonucleotide
  Sense strand starting at position 1100 of SEQ ID NO: 915413
guagguacucaauguuuga

SEQ ID NO: 1078023 - RNA, 19 nt, Artificial Sequence
  Description of Artificial Sequence: Synthetic oligonucleotide
  Antisense strand to SEQ ID NO: 1078022
ucaaacauugaguaccuac

SEQ ID NO: 1078024 - RNA, 19 nt, Artificial Sequence
  Description of Artificial Sequence: Synthetic oligonucleotide
  Sense strand starting at position 1103 of SEQ ID NO: 915413
gguacucaauguuugauga

SEQ ID NO: 1078025 - RNA, 19 nt, Artificial Sequence
  Description of Artificial Sequence: Synthetic oligonucleotide
  Antisense strand to SEQ ID NO: 1078024
ucaucaaacauugaguacc

SEQ ID NO: 1078026 - RNA, 19 nt, Artificial Sequence
  Description of Artificial Sequence: Synthetic oligonucleotide
  Sense strand starting at position 1110 of SEQ ID NO: 915413
aauguuugaugacucagaa

SEQ ID NO: 1078027 - RNA, 19 nt, Artificial Sequence
  Description of Artificial Sequence: Synthetic oligonucleotide
  Antisense strand to SEQ ID NO: 1078026
uucugagucaucaaacauu

SEQ ID NO: 1078028 - RNA, 19 nt, Artificial Sequence
  Description of Artificial Sequence: Synthetic oligonucleotide
  Sense strand starting at position 1159 of SEQ ID NO: 915413
gggcaugcaaaguaugaga

SEQ ID NO: 1078029 - RNA, 19 nt, Artificial Sequence
  Description of Artificial Sequence: Synthetic oligonucleotide
  Antisense strand to SEQ ID NO: 1078028
ucucauacuuugcaugccc

SEQ ID NO: 1078030 - RNA, 19 nt, Artificial Sequence
  Description of Artificial Sequence: Synthetic oligonucleotide
  Sense strand starting at position 1161 of SEQ ID NO: 915413
gcaugcaaaguaugagaaa

SEQ ID NO: 1078031 - RNA, 19 nt, Artificial Sequence
  Description of Artificial Sequence: Synthetic oligonucleotide
  Antisense strand to SEQ ID NO: 1078030
uuucucauacuuugcaugc

SEQ ID NO: 1078032 - RNA, 19 nt, Artificial Sequence
  Description of Artificial Sequence: Synthetic oligonucleotide
  Sense strand starting at position 1189 of SEQ ID NO: 915413
ggguaaucaucucugaauu

SEQ ID NO: 1078033 - RNA, 19 nt, Artificial Sequence
  Description of Artificial Sequence: Synthetic oligonucleotide
  Antisense strand to SEQ ID NO: 1078032
aauucagagaugauuaccc

SEQ ID NO: 1078034 - RNA, 19 nt, Artificial Sequence
  Description of Artificial Sequence: Synthetic oligonucleotide
  Sense strand starting at position 1190 of SEQ ID NO: 915413
gguaaucaucucugaauug

SEQ ID NO: 1078035 - RNA, 19 nt, Artificial Sequence
  Description of Artificial Sequence: Synthetic oligonucleotide
  Antisense strand to SEQ ID NO: 1078034
caauucagagaugauuacc

SEQ ID NO: 1078036 - RNA, 19 nt, Artificial Sequence
  Description of Artificial Sequence: Synthetic oligonucleotide
  Sense strand starting at position 1199 of SEQ ID NO: 915413
cucugaauugucgaguguc

SEQ ID NO: 1078037 - RNA, 19 nt, Artificial Sequence
  Description of Artificial Sequence: Synthetic oligonucleotide
  Antisense strand to SEQ ID NO: 1078036
gacacucgacaauucagag

SEQ ID NO: 1078038 - RNA, 19 nt, Artificial Sequence
  Description of Artificial Sequence: Synthetic oligonucleotide
  Sense strand starting at position 1202 of SEQ ID NO: 915413
ugaauugucgagugucaag

SEQ ID NO: 1078039 - RNA, 19 nt, Artificial Sequence
  Description of Artificial Sequence: Synthetic oligonucleotide
  Antisense strand to SEQ ID NO: 1078038
cuugacacucgacaauuca

SEQ ID NO: 1078040 - RNA, 19 nt, Artificial Sequence
  Description of Artificial Sequence: Synthetic oligonucleotide
  Sense strand starting at position 1211 of SEQ ID NO: 915413
gagugucaaguuuguauaa

SEQ ID NO: 1078041 - RNA, 19 nt, Artificial Sequence
  Description of Artificial Sequence: Synthetic oligonucleotide
  Antisense strand to SEQ ID NO: 1078040
uuauacaaacuugacacuc

SEQ ID NO: 1078042 - RNA, 19 nt, Artificial Sequence
  Description of Artificial Sequence: Synthetic oligonucleotide
  Sense strand starting at position 1212 of SEQ ID NO: 915413
agugucaaguuuguauaau

SEQ ID NO: 1078043 - RNA, 19 nt, Artificial Sequence
  Description of Artificial Sequence: Synthetic oligonucleotide
  Antisense strand to SEQ ID NO: 1078042
auuauacaaacuugacacu

SEQ ID NO: 1078044 - RNA, 19 nt, Artificial Sequence
  Description of Artificial Sequence: Synthetic oligonucleotide
  Sense strand starting at position 1253 of SEQ ID NO: 915413
acaagaaguaaucguagau

SEQ ID NO: 1078045 - RNA, 19 nt, Artificial Sequence
  Description of Artificial Sequence: Synthetic oligonucleotide
  Antisense strand to SEQ ID NO: 1078044
aucuacgauuacuucuugu

SEQ ID NO: 1078046 - RNA, 19 nt, Artificial Sequence
  Description of Artificial Sequence: Synthetic oligonucleotide
  Sense strand starting at position 1334 of SEQ ID NO: 915413
ccagguaaaugacauaaca

SEQ ID NO: 1078047 - RNA, 19 nt, Artificial Sequence
  Description of Artificial Sequence: Synthetic oligonucleotide
  Antisense strand to SEQ ID NO: 1078046
uguuaugucauuuaccugg

SEQ ID NO: 1078048 - RNA, 19 nt, Artificial Sequence
  Description of Artificial Sequence: Synthetic oligonucleotide
  Sense strand starting at position 1436 of SEQ ID NO: 915413
agaugaugagucuguuccu

SEQ ID NO: 1078049 - RNA, 19 nt, Artificial Sequence
  Description of Artificial Sequence: Synthetic oligonucleotide
  Antisense strand to SEQ ID NO: 1078048
aggaacagacucaucaucu

SEQ ID NO: 1078050 - RNA, 19 nt, Artificial Sequence
  Description of Artificial Sequence: Synthetic oligonucleotide
  Sense strand starting at position 1437 of SEQ ID NO: 915413
gaugaugagucuguuccua

SEQ ID NO: 1078051 - RNA, 19 nt, Artificial Sequence
  Description of Artificial Sequence: Synthetic oligonucleotide
  Antisense strand to SEQ ID NO: 1078050
uaggaacagacucaucauc

SEQ ID NO: 1078052 - RNA, 19 nt, Artificial Sequence
  Description of Artificial Sequence: Synthetic oligonucleotide
  Sense strand starting at position 1439 of SEQ ID NO: 915413
ugaugagucuguuccuacu

SEQ ID NO: 1078053 - RNA, 19 nt, Artificial Sequence
  Description of Artificial Sequence: Synthetic oligonucleotide
  Antisense strand to SEQ ID NO: 1078052
aguaggaacagacucauca

SEQ ID NO: 1078054 - RNA, 19 nt, Artificial Sequence
  Description of Artificial Sequence: Synthetic oligonucleotide
  Sense strand starting at position 1493 of SEQ ID NO: 915413
agauguuuguuauuccaag

SEQ ID NO: 1078055 - RNA, 19 nt, Artificial Sequence
  Description of Artificial Sequence: Synthetic oligonucleotide
  Antisense strand to SEQ ID NO: 1078054
cuuggaauaacaaacaucu

SEQ ID NO: 1078056 - RNA, 19 nt, Artificial Sequence
  Description of Artificial Sequence: Synthetic oligonucleotide
  Sense strand starting at position 1684 of SEQ ID NO: 915413
ugacauagcaucuggcaga

SEQ ID NO: 1078057 - RNA, 19 nt, Artificial Sequence
  Description of Artificial Sequence: Synthetic oligonucleotide
  Antisense strand to SEQ ID NO: 1078056
ucugccagaugcuauguca

SEQ ID NO: 1078058 - RNA, 19 nt, Artificial Sequence
  Description of Artificial Sequence: Synthetic oligonucleotide
  Sense strand starting at position 1691 of SEQ ID NO: 915413
gcaucuggcagagauugaa

SEQ ID NO: 1078059 - RNA, 19 nt, Artificial Sequence
  Description of Artificial Sequence: Synthetic oligonucleotide
  Antisense strand to SEQ ID NO: 1078058
uucaaucucugccagaugc

SEQ ID NO: 1078060 - RNA, 19 nt, Artificial Sequence
  Description of Artificial Sequence: Synthetic oligonucleotide
  Sense strand starting at position 1728 of SEQ ID NO: 915413
aaagaauugucagugauga

SEQ ID NO: 1078061 - RNA, 19 nt, Artificial Sequence
  Description of Artificial Sequence: Synthetic oligonucleotide
  Antisense strand to SEQ ID NO: 1078060
ucaucacugacaauucuuu

SEQ ID NO: 1078062 - RNA, 19 nt, Artificial Sequence
  Description of Artificial Sequence: Synthetic oligonucleotide
  Sense strand starting at position 1729 of SEQ ID NO: 915413
aagaauugucagugaugaa

SEQ ID NO: 1078063 - RNA, 19 nt, Artificial Sequence
  Description of Artificial Sequence: Synthetic oligonucleotide
  Antisense strand to SEQ ID NO: 1078062
uucaucacugacaauucuu

SEQ ID NO: 1078064 - RNA, 19 nt, Artificial Sequence
  Description of Artificial Sequence: Synthetic oligonucleotide
  Sense strand starting at position 1884 of SEQ ID NO: 915413
cucuauggcccagacuaau

SEQ ID NO: 1078065 - RNA, 19 nt, Artificial Sequence
  Description of Artificial Sequence: Synthetic oligonucleotide
  Antisense strand to SEQ ID NO: 1078064
auuagucugggccauagag

SEQ ID NO: 1078066 - RNA, 19 nt, Artificial Sequence
  Description of Artificial Sequence: Synthetic oligonucleotide
  Sense strand starting at position 3189 of SEQ ID NO: 915413
gggcaagccagggauaagu

SEQ ID NO: 1078067 - RNA, 19 nt, Artificial Sequence
  Description of Artificial Sequence: Synthetic oligonucleotide
  Antisense strand to SEQ ID NO: 1078066
acuuaucccuggcuugccc

SEQ ID NO: 1078068 - RNA, 19 nt, Artificial Sequence
  Description of Artificial Sequence: Synthetic oligonucleotide
  Sense strand starting at position 3191 of SEQ ID NO: 915413
gcaagccagggauaaguua

SEQ ID NO: 1078069 - RNA, 19 nt, Artificial Sequence
  Description of Artificial Sequence: Synthetic oligonucleotide
  Antisense strand to SEQ ID NO: 1078068
uaacuuaucccuggcuugc

SEQ ID NO: 1078070 - RNA, 19 nt, Artificial Sequence
  Description of Artificial Sequence: Synthetic oligonucleotide
  Sense strand starting at position 3632 of SEQ ID NO: 915413
cauugcucccaggaauguu

SEQ ID NO: 1078071 - RNA, 19 nt, Artificial Sequence
  Description of Artificial Sequence: Synthetic oligonucleotide
  Antisense strand to SEQ ID NO: 1078070
aacauuccugggagcaaug

SEQ ID NO: 1078072 - RNA, 19 nt, Artificial Sequence
  Description of Artificial Sequence: Synthetic oligonucleotide
  Sense strand starting at position 3635 of SEQ ID NO: 915413
ugcucccaggaauguuaua

SEQ ID NO: 1078073 - RNA, 19 nt, Artificial Sequence
  Description of Artificial Sequence: Synthetic oligonucleotide
  Antisense strand to SEQ ID NO: 1078072
uauaacauuccugggagca

SEQ ID NO: 1078074 - RNA, 19 nt, Artificial Sequence
  Description of Artificial Sequence: Synthetic oligonucleotide
  Sense strand starting at position 3696 of SEQ ID NO: 915413
ugaagcuuagagggaguaa

SEQ ID NO: 1078075 - RNA, 19 nt, Artificial Sequence
  Description of Artificial Sequence: Synthetic oligonucleotide
  Antisense strand to SEQ ID NO: 1078074
uuacucccucuaagcuuca

SEQ ID NO: 1078076 - RNA, 19 nt, Artificial Sequence
  Description of Artificial Sequence: Synthetic oligonucleotide
  Sense strand starting at position 3707 of SEQ ID NO: 915413
gggaguaaaugacuugcaa

SEQ ID NO: 1078077 - RNA, 19 nt, Artificial Sequence
  Description of Artificial Sequence: Synthetic oligonucleotide
  Antisense strand to SEQ ID NO: 1078076
uugcaagucauuuacuccc

SEQ ID NO: 1078078 - RNA, 19 nt, Artificial Sequence
  Description of Artificial Sequence: Synthetic oligonucleotide
  Sense strand starting at position 802 of SEQ ID NO: 915414
cagucacccugagaaauga

SEQ ID NO: 1078079 - RNA, 19 nt, Artificial Sequence
  Description of Artificial Sequence: Synthetic oligonucleotide
  Antisense strand to SEQ ID NO: 1078078
ucauuucucagggugacug

SEQ ID NO: 1078080 - RNA, 19 nt, Artificial Sequence
  Description of Artificial Sequence: Synthetic oligonucleotide
  Sense strand starting at position 1127 of SEQ ID NO: 915414
gccucugagccacagguua

SEQ ID NO: 1078081 - RNA, 19 nt, Artificial Sequence
  Description of Artificial Sequence: Synthetic oligonucleotide
  Antisense strand to SEQ ID NO: 1078080
uaaccuguggcucagaggc

SEQ ID NO: 1078082 - RNA, 19 nt, Artificial Sequence
  Description of Artificial Sequence: Synthetic oligonucleotide
  Sense strand starting at position 1196 of SEQ ID NO: 915414
ccagaaaugugcucccuag

SEQ ID NO: 1078083 - RNA, 19 nt, Artificial Sequence
  Description of Artificial Sequence: Synthetic oligonucleotide
  Antisense strand to SEQ ID NO: 1078082
cuagggagcacauuucugg

SEQ ID NO: 1078084 - RNA, 19 nt, Artificial Sequence
  Description of Artificial Sequence: Synthetic oligonucleotide
  Sense strand starting at position 1200 of SEQ ID NO: 915414
aaaugugcucccuagagga

SEQ ID NO: 1078085 - RNA, 19 nt, Artificial Sequence
  Description of Artificial Sequence: Synthetic oligonucleotide
  Antisense strand to SEQ ID NO: 1078084
uccucuagggagcacauuu

SEQ ID NO: 1078086 - RNA, 19 nt, Artificial Sequence
  Description of Artificial Sequence: Synthetic oligonucleotide
  Sense strand starting at position 1252 of SEQ ID NO: 915414
aagucagaccuuugggaug

SEQ ID NO: 1078087 - RNA, 19 nt, Artificial Sequence
  Description of Artificial Sequence: Synthetic oligonucleotide
  Antisense strand to SEQ ID NO: 1078086
caucccaaaggucugacuu

SEQ ID NO: 1078088 - RNA, 19 nt, Artificial Sequence
  Description of Artificial Sequence: Synthetic oligonucleotide
  Sense strand starting at position 1332 of SEQ ID NO: 915414
gccaccgucugccuuuaaa

SEQ ID NO: 1078089 - RNA, 19 nt, Artificial Sequence
  Description of Artificial Sequence: Synthetic oligonucleotide
  Antisense strand to SEQ ID NO: 1078088
uuuaaaggcagacgguggc

SEQ ID NO: 1078090 - RNA, 19 nt, Artificial Sequence
  Description of Artificial Sequence: Synthetic oligonucleotide
  Sense strand starting at position 2316 of SEQ ID NO: 915414
gcuuaccuuucuugacgaa

SEQ ID NO: 1078091 - RNA, 19 nt, Artificial Sequence
  Description of Artificial Sequence: Synthetic oligonucleotide
  Antisense strand to SEQ ID NO: 1078090
uucgucaagaaagguaagc

SEQ ID NO: 1078092 - RNA, 19 nt, Artificial Sequence
  Description of Artificial Sequence: Synthetic oligonucleotide
  Sense strand starting at position 2714 of SEQ ID NO: 915414
ggcugcuucugcucacaca

SEQ ID NO: 1078093 - RNA, 19 nt, Artificial Sequence
  Description of Artificial Sequence: Synthetic oligonucleotide
  Antisense strand to SEQ ID NO: 1078092
ugugugagcagaagcagcc

SEQ ID NO: 1078094 - RNA, 19 nt, Artificial Sequence
  Description of Artificial Sequence: Synthetic oligonucleotide
  Sense strand starting at position 2896 of SEQ ID NO: 915414
aggacagcuuuccucaauu

SEQ ID NO: 1078095 - RNA, 19 nt, Artificial Sequence
  Description of Artificial Sequence: Synthetic oligonucleotide
  Antisense strand to SEQ ID NO: 1078094
aauugaggaaagcuguccu

SEQ ID NO: 1078096 - RNA, 19 nt, Artificial Sequence
  Description of Artificial Sequence: Synthetic oligonucleotide
  Sense strand starting at position 2956 of SEQ ID NO: 915414
acugaaacuuugccgacaa

SEQ ID NO: 1078097 - RNA, 19 nt, Artificial Sequence
  Description of Artificial Sequence: Synthetic oligonucleotide
  Antisense strand to SEQ ID NO: 1078096
uugucggcaaaguuucagu

SEQ ID NO: 1078098 - RNA, 19 nt, Artificial Sequence
  Description of Artificial Sequence: Synthetic oligonucleotide
  Sense strand starting at position 2957 of SEQ ID NO: 915414
cugaaacuuugccgacaaa

SEQ ID NO: 1078099 - RNA, 19 nt, Artificial Sequence
  Description of Artificial Sequence: Synthetic oligonucleotide
  Antisense strand to SEQ ID NO: 1078098
uuugucggcaaaguuucag

SEQ ID NO: 1078100 - RNA, 19 nt, Artificial Sequence
  Description of Artificial Sequence: Synthetic oligonucleotide
  Sense strand starting at position 2958 of SEQ ID NO: 915414
ugaaacuuugccgacaaau

SEQ ID NO: 1078101 - RNA, 19 nt, Artificial Sequence
  Description of Artificial Sequence: Synthetic oligonucleotide
  Antisense strand to SEQ ID NO: 1078100
auuugucggcaaaguuuca

SEQ ID NO: 1078102 - RNA, 19 nt, Artificial Sequence
  Description of Artificial Sequence: Synthetic oligonucleotide
  Sense strand starting at position 3007 of SEQ ID NO: 915414
gagacucuaguccggguua

SEQ ID NO: 1078103 - RNA, 19 nt, Artificial Sequence
  Description of Artificial Sequence: Synthetic oligonucleotide
  Antisense strand to SEQ ID NO: 1078102
uaacccggacuagagucuc

SEQ ID NO: 1078104 - RNA, 19 nt, Artificial Sequence
  Description of Artificial Sequence: Synthetic oligonucleotide
  Sense strand starting at position 3388 of SEQ ID NO: 915414
gccuccgucacgugagaaa

SEQ ID NO: 1078105 - RNA, 19 nt, Artificial Sequence
  Description of Artificial Sequence: Synthetic oligonucleotide
  Antisense strand to SEQ ID NO: 1078104
uuucucacgugacggaggc

SEQ ID NO: 1078106 - RNA, 19 nt, Artificial Sequence
  Description of Artificial Sequence: Synthetic oligonucleotide
  Sense strand starting at position 3566 of SEQ ID NO: 915414
ccggauugcgaaggucaga

SEQ ID NO: 1078107 - RNA, 19 nt, Artificial Sequence
  Description of Artificial Sequence: Synthetic oligonucleotide
  Antisense strand to SEQ ID NO: 1078106
ucugaccuucgcaauccgg

SEQ ID NO: 1078108 - RNA, 19 nt, Artificial Sequence
  Description of Artificial Sequence: Synthetic oligonucleotide
  Sense strand starting at position 3927 of SEQ ID NO: 915414
agaguaaaugcucagcggu

SEQ ID NO: 1078109 - RNA, 19 nt, Artificial Sequence
  Description of Artificial Sequence: Synthetic oligonucleotide
  Antisense strand to SEQ ID NO: 1078108
accgcugagcauuuacucu

SEQ ID NO: 1078110 - RNA, 19 nt, Artificial Sequence
  Description of Artificial Sequence: Synthetic oligonucleotide
  Sense strand starting at position 3969 of SEQ ID NO: 915414
ggaguaggucugugagucu

SEQ ID NO: 1078111 - RNA, 19 nt, Artificial Sequence
  Description of Artificial Sequence: Synthetic oligonucleotide
  Antisense strand to SEQ ID NO: 1078110
agacucacagaccuacucc

SEQ ID NO: 1078112 - RNA, 19 nt, Artificial Sequence
  Description of Artificial Sequence: Synthetic oligonucleotide
  Sense strand starting at position 963 of SEQ ID NO: 915415
gcuuaccuuucuugacgaa

SEQ ID NO: 1078113 - RNA, 19 nt, Artificial Sequence
  Description of Artificial Sequence: Synthetic oligonucleotide
  Antisense strand to SEQ ID NO: 1078112
uucgucaagaaagguaagc

SEQ ID NO: 1078114 - RNA, 19 nt, Artificial Sequence
  Description of Artificial Sequence: Synthetic oligonucleotide
  Sense strand starting at position 1361 of SEQ ID NO: 915415
ggcugcuucugcucacaca

SEQ ID NO: 1078115 - RNA, 19 nt, Artificial Sequence
  Description of Artificial Sequence: Synthetic oligonucleotide
  Antisense strand to SEQ ID NO: 1078114
ugugugagcagaagcagcc

SEQ ID NO: 1078116 - RNA, 19 nt, Artificial Sequence
  Description of Artificial Sequence: Synthetic oligonucleotide
  Sense strand starting at position 1543 of SEQ ID NO: 915415
aggacagcuuuccucaauu

SEQ ID NO: 1078117 - RNA, 19 nt, Artificial Sequence
  Description of Artificial Sequence: Synthetic oligonucleotide
  Antisense strand to SEQ ID NO: 1078116
aauugaggaaagcuguccu

SEQ ID NO: 1078118 - RNA, 19 nt, Artificial Sequence
  Description of Artificial Sequence: Synthetic oligonucleotide
  Sense strand starting at position 1603 of SEQ ID NO: 915415
acugaaacuuugccgacaa

SEQ ID NO: 1078119 - RNA, 19 nt, Artificial Sequence
  Description of Artificial Sequence: Synthetic oligonucleotide
  Antisense strand to SEQ ID NO: 1078118
uugucggcaaaguuucagu

SEQ ID NO: 1078120 - RNA, 19 nt, Artificial Sequence
  Description of Artificial Sequence: Synthetic oligonucleotide
  Sense strand starting at position 1604 of SEQ ID NO: 915415
cugaaacuuugccgacaaa

SEQ ID NO: 1078121 - RNA, 19 nt, Artificial Sequence
  Description of Artificial Sequence: Synthetic oligonucleotide
  Antisense strand to SEQ ID NO: 1078120
uuugucggcaaaguuucag

SEQ ID NO: 1078122 - RNA, 19 nt, Artificial Sequence
  Description of Artificial Sequence: Synthetic oligonucleotide
  Sense strand starting at position 1605 of SEQ ID NO: 915415
ugaaacuuugccgacaaau

SEQ ID NO: 1078123 - RNA, 19 nt, Artificial Sequence
  Description of Artificial Sequence: Synthetic oligonucleotide
  Antisense strand to SEQ ID NO: 1078122
auuugucggcaaaguuuca

SEQ ID NO: 1078124 - RNA, 19 nt, Artificial Sequence
  Description of Artificial Sequence: Synthetic oligonucleotide
  Sense strand starting at position 1654 of SEQ ID NO: 915415
gagacucuaguccggguua

SEQ ID NO: 1078125 - RNA, 19 nt, Artificial Sequence
  Description of Artificial Sequence: Synthetic oligonucleotide
  Antisense strand to SEQ ID NO: 1078124
uaacccggacuagagucuc

SEQ ID NO: 1078126 - RNA, 19 nt, Artificial Sequence
  Description of Artificial Sequence: Synthetic oligonucleotide
  Sense strand starting at position 2035 of SEQ ID NO: 915415
gccuccgucacgugagaaa

SEQ ID NO: 1078127 - RNA, 19 nt, Artificial Sequence
  Description of Artificial Sequence: Synthetic oligonucleotide
  Antisense strand to SEQ ID NO: 1078126
uuucucacgugacggaggc

SEQ ID NO: 1078128 - RNA, 19 nt, Artificial Sequence
  Description of Artificial Sequence: Synthetic oligonucleotide
  Sense strand starting at position 2213 of SEQ ID NO: 915415
ccggauugcgaaggucaga

SEQ ID NO: 1078129 - RNA, 19 nt, Artificial Sequence
  Description of Artificial Sequence: Synthetic oligonucleotide
  Antisense strand to SEQ ID NO: 1078128
ucugaccuucgcaauccgg

SEQ ID NO: 1078130 - RNA, 19 nt, Artificial Sequence
  Description of Artificial Sequence: Synthetic oligonucleotide
  Sense strand starting at position 2574 of SEQ ID NO: 915415
agaguaaaugcucagcggu

SEQ ID NO: 1078131 - RNA, 19 nt, Artificial Sequence
  Description of Artificial Sequence: Synthetic oligonucleotide
  Antisense strand to SEQ ID NO: 1078130
accgcugagcauuuacucu

SEQ ID NO: 1078132 - RNA, 19 nt, Artificial Sequence
  Description of Artificial Sequence: Synthetic oligonucleotide
  Sense strand starting at position 2616 of SEQ ID NO: 915415
ggaguaggucugugagucu

SEQ ID NO: 1078133 - RNA, 19 nt, Artificial Sequence
  Description of Artificial Sequence: Synthetic oligonucleotide
  Antisense strand to SEQ ID NO: 1078132
agacucacagaccuacucc

SEQ ID NO: 1078134 - RNA, 19 nt, Artificial Sequence
  Description of Artificial Sequence: Synthetic oligonucleotide
  Sense strand starting at position 2699 of SEQ ID NO: 915415
gaggguagaucgugguuau

SEQ ID NO: 1078135 - RNA, 19 nt, Artificial Sequence
  Description of Artificial Sequence: Synthetic oligonucleotide
  Antisense strand to SEQ ID NO: 1078134
auaaccacgaucuacccuc

SEQ ID NO: 1078136 - RNA, 19 nt, Artificial Sequence
  Description of Artificial Sequence: Synthetic oligonucleotide
  Sense strand starting at position 2700 of SEQ ID NO: 915415
aggguagaucgugguuaug

SEQ ID NO: 1078137 - RNA, 19 nt, Artificial Sequence
  Description of Artificial Sequence: Synthetic oligonucleotide
  Antisense strand to SEQ ID NO: 1078136
cauaaccacgaucuacccu

SEQ ID NO: 1078138 - RNA, 19 nt, Artificial Sequence
  Description of Artificial Sequence: Synthetic oligonucleotide
  Sense strand starting at position 2702 of SEQ ID NO: 915415
gguagaucgugguuaugug

SEQ ID NO: 1078139 - RNA, 19 nt, Artificial Sequence
  Description of Artificial Sequence: Synthetic oligonucleotide
  Antisense strand to SEQ ID NO: 1078138
cacauaaccacgaucuacc

SEQ ID NO: 1078140 - RNA, 19 nt, Artificial Sequence
  Description of Artificial Sequence: Synthetic oligonucleotide
  Sense strand starting at position 3781 of SEQ ID NO: 915415
guaccaaggcucugguagu

SEQ ID NO: 1078141 - RNA, 19 nt, Artificial Sequence
  Description of Artificial Sequence: Synthetic oligonucleotide
  Antisense strand to SEQ ID NO: 1078140
acuaccagagccuugguac

SEQ ID NO: 1078142 - RNA, 19 nt, Artificial Sequence
  Description of Artificial Sequence: Synthetic oligonucleotide
  Sense strand starting at position 3866 of SEQ ID NO: 915415
ugugguagugcagaagaua

SEQ ID NO: 1078143 - RNA, 19 nt, Artificial Sequence
  Description of Artificial Sequence: Synthetic oligonucleotide
  Antisense strand to SEQ ID NO: 1078142
uaucuucugcacuaccaca

SEQ ID NO: 1078144 - RNA, 19 nt, Artificial Sequence
  Description of Artificial Sequence: Synthetic oligonucleotide
  Sense strand starting at position 3869 of SEQ ID NO: 915415
gguagugcagaagauauau

SEQ ID NO: 1078145 - RNA, 19 nt, Artificial Sequence
  Description of Artificial Sequence: Synthetic oligonucleotide
  Antisense strand to SEQ ID NO: 1078144
auauaucuucugcacuacc

SEQ ID NO: 1078146 - RNA, 19 nt, Artificial Sequence
  Description of Artificial Sequence: Synthetic oligonucleotide
  Sense strand starting at position 3951 of SEQ ID NO: 915415
uguacacauuuggauacau

SEQ ID NO: 1078147 - RNA, 19 nt, Artificial Sequence
  Description of Artificial Sequence: Synthetic oligonucleotide
  Antisense strand to SEQ ID NO: 1078146
auguauccaaauguguaca

SEQ ID NO: 1078148 - RNA, 19 nt, Artificial Sequence
  Description of Artificial Sequence: Synthetic oligonucleotide
  Sense strand starting at position 3961 of SEQ ID NO: 915415
uggauacaugcauacacuu

SEQ ID NO: 1078149 - RNA, 19 nt, Artificial Sequence
  Description of Artificial Sequence: Synthetic oligonucleotide
  Antisense strand to SEQ ID NO: 1078148
aaguguaugcauguaucca

SEQ ID NO: 1078150 - RNA, 19 nt, Artificial Sequence
  Description of Artificial Sequence: Synthetic oligonucleotide
  Sense strand starting at position 39 of SEQ ID NO: 915416
ugaugcauaugugcaauuu

SEQ ID NO: 1078151 - RNA, 19 nt, Artificial Sequence
  Description of Artificial Sequence: Synthetic oligonucleotide
  Antisense strand to SEQ ID NO: 1078150
aaauugcacauaugcauca

SEQ ID NO: 1078152 - RNA, 19 nt, Artificial Sequence
  Description of Artificial Sequence: Synthetic oligonucleotide
  Sense strand starting at position 48 of SEQ ID NO: 915416
ugugcaauuucuguaugca

SEQ ID NO: 1078153 - RNA, 19 nt, Artificial Sequence
  Description of Artificial Sequence: Synthetic oligonucleotide
  Antisense strand to SEQ ID NO: 1078152
ugcauacagaaauugcaca

SEQ ID NO: 1078154 - RNA, 19 nt, Artificial Sequence
  Description of Artificial Sequence: Synthetic oligonucleotide
  Sense strand starting at position 49 of SEQ ID NO: 915416
gugcaauuucuguaugcau

SEQ ID NO: 1078155 - RNA, 19 nt, Artificial Sequence
  Description of Artificial Sequence: Synthetic oligonucleotide
  Antisense strand to SEQ ID NO: 1078154
augcauacagaaauugcac

SEQ ID NO: 1078156 - RNA, 19 nt, Artificial Sequence
  Description of Artificial Sequence: Synthetic oligonucleotide
  Sense strand starting at position 51 of SEQ ID NO: 915416
gcaauuucuguaugcauca

SEQ ID NO: 1078157 - RNA, 19 nt, Artificial Sequence
  Description of Artificial Sequence: Synthetic oligonucleotide
  Antisense strand to SEQ ID NO: 1078156
ugaugcauacagaaauugc

SEQ ID NO: 1078158 - RNA, 19 nt, Artificial Sequence
  Description of Artificial Sequence: Synthetic oligonucleotide
  Sense strand starting at position 75 of SEQ ID NO: 915416
auggaaagaugcucacaug

SEQ ID NO: 1078159 - RNA, 19 nt, Artificial Sequence
  Description of Artificial Sequence: Synthetic oligonucleotide
  Antisense strand to SEQ ID NO: 1078158
caugugagcaucuuuccau

SEQ ID NO: 1078160 - RNA, 19 nt, Artificial Sequence
  Description of Artificial Sequence: Synthetic oligonucleotide
  Sense strand starting at position 126 of SEQ ID NO: 915416
auaguaggauucccuuuau

SEQ ID NO: 1078161 - RNA, 19 nt, Artificial Sequence
  Description of Artificial Sequence: Synthetic oligonucleotide
  Antisense strand to SEQ ID NO: 1078160
auaaagggaauccuacuau

SEQ ID NO: 1078162 - RNA, 19 nt, Artificial Sequence
  Description of Artificial Sequence: Synthetic oligonucleotide
  Sense strand starting at position 130 of SEQ ID NO: 915416
uaggauucccuuuauguag

SEQ ID NO: 1078163 - RNA, 19 nt, Artificial Sequence
  Description of Artificial Sequence: Synthetic oligonucleotide
  Antisense strand to SEQ ID NO: 1078162
cuacauaaagggaauccua

SEQ ID NO: 1078164 - RNA, 19 nt, Artificial Sequence
  Description of Artificial Sequence: Synthetic oligonucleotide
  Sense strand starting at position 144 of SEQ ID NO: 915416
uguagauacguuuguauuu

SEQ ID NO: 1078165 - RNA, 19 nt, Artificial Sequence
  Description of Artificial Sequence: Synthetic oligonucleotide
  Antisense strand to SEQ ID NO: 1078164
aaauacaaacguaucuaca

SEQ ID NO: 1078166 - RNA, 19 nt, Artificial Sequence
  Description of Artificial Sequence: Synthetic oligonucleotide
  Sense strand starting at position 149 of SEQ ID NO: 915416
auacguuuguauuuguaca

SEQ ID NO: 1078167 - RNA, 19 nt, Artificial Sequence
  Description of Artificial Sequence: Synthetic oligonucleotide
  Antisense strand to SEQ ID NO: 1078166
uguacaaauacaaacguau

SEQ ID NO: 1078168 - RNA, 19 nt, Artificial Sequence
  Description of Artificial Sequence: Synthetic oligonucleotide
  Sense strand starting at position 238 of SEQ ID NO: 915416
uagaauuggcauugauaag

SEQ ID NO: 1078169 - RNA, 19 nt, Artificial Sequence
  Description of Artificial Sequence: Synthetic oligonucleotide
  Antisense strand to SEQ ID NO: 1078168
cuuaucaaugccaauucua

SEQ ID NO: 1078170 - RNA, 19 nt, Artificial Sequence
  Description of Artificial Sequence: Synthetic oligonucleotide
  Sense strand starting at position 369 of SEQ ID NO: 915416
uuuaaagacuagcuguaua

SEQ ID NO: 1078171 - RNA, 19 nt, Artificial Sequence
  Description of Artificial Sequence: Synthetic oligonucleotide
  Antisense strand to SEQ ID NO: 1078170
uauacagcuagucuuuaaa

SEQ ID NO: 1078172 - RNA, 19 nt, Artificial Sequence
  Description of Artificial Sequence: Synthetic oligonucleotide
  Sense strand starting at position 542 of SEQ ID NO: 915416
ugaaguuaggauugugaaa

SEQ ID NO: 1078173 - RNA, 19 nt, Artificial Sequence
  Description of Artificial Sequence: Synthetic oligonucleotide
  Antisense strand to SEQ ID NO: 1078172
uuucacaauccuaacuuca

SEQ ID NO: 1078174 - RNA, 19 nt, Artificial Sequence
  Description of Artificial Sequence: Synthetic oligonucleotide
  Sense strand starting at position 555 of SEQ ID NO: 915416
gugaaagaguuaucuugga

SEQ ID NO: 1078175 - RNA, 19 nt, Artificial Sequence
  Description of Artificial Sequence: Synthetic oligonucleotide
  Antisense strand to SEQ ID NO: 1078174
uccaagauaacucuuucac

SEQ ID NO: 1078176 - RNA, 19 nt, Artificial Sequence
  Description of Artificial Sequence: Synthetic oligonucleotide
  Sense strand starting at position 1013 of SEQ ID NO: 915416
gugaccucucauuaucaca

SEQ ID NO: 1078177 - RNA, 19 nt, Artificial Sequence
  Description of Artificial Sequence: Synthetic oligonucleotide
  Antisense strand to SEQ ID NO: 1078176
ugugauaaugagaggucac

SEQ ID NO: 1078178 - RNA, 19 nt, Artificial Sequence
  Description of Artificial Sequence: Synthetic oligonucleotide
  Sense strand starting at position 1129 of SEQ ID NO: 915416
agucucaaguauccacaaa

SEQ ID NO: 1078179 - RNA, 19 nt, Artificial Sequence
  Description of Artificial Sequence: Synthetic oligonucleotide
  Antisense strand to SEQ ID NO: 1078178
uuuguggauacuugagacu

SEQ ID NO: 1078180 - RNA, 19 nt, Artificial Sequence
  Description of Artificial Sequence: Synthetic oligonucleotide
  Sense strand starting at position 1438 of SEQ ID NO: 915416
gagaaacauuggucuccua

SEQ ID NO: 1078181 - RNA, 19 nt, Artificial Sequence
  Description of Artificial Sequence: Synthetic oligonucleotide
  Antisense strand to SEQ ID NO: 1078180
uaggagaccaauguuucuc

SEQ ID NO: 1078182 - RNA, 19 nt, Artificial Sequence
  Description of Artificial Sequence: Synthetic oligonucleotide
  Sense strand starting at position 1474 of SEQ ID NO: 915416
caggaaaugccuggcaaua

SEQ ID NO: 1078183 - RNA, 19 nt, Artificial Sequence
  Description of Artificial Sequence: Synthetic oligonucleotide
  Antisense strand to SEQ ID NO: 1078182
uauugccaggcauuuccug

SEQ ID NO: 1078184 - RNA, 19 nt, Artificial Sequence
  Description of Artificial Sequence: Synthetic oligonucleotide
  Sense strand starting at position 1492 of SEQ ID NO: 915416
acuuguuaauaccugggaa

SEQ ID NO: 1078185 - RNA, 19 nt, Artificial Sequence
  Description of Artificial Sequence: Synthetic oligonucleotide
  Antisense strand to SEQ ID NO: 1078184
uucccagguauuaacaagu

SEQ ID NO: 1078186 - RNA, 19 nt, Artificial Sequence
  Description of Artificial Sequence: Synthetic oligonucleotide
  Sense strand starting at position 1494 of SEQ ID NO: 915416
uuguuaauaccugggaaac

SEQ ID NO: 1078187 - RNA, 19 nt, Artificial Sequence
  Description of Artificial Sequence: Synthetic oligonucleotide
  Antisense strand to SEQ ID NO: 1078186
guuucccagguauuaacaa

SEQ ID NO: 1078188 - RNA, 19 nt, Artificial Sequence
  Description of Artificial Sequence: Synthetic oligonucleotide
  Sense strand starting at position 2017 of SEQ ID NO: 915416
gcugcugagcuguuuauca

SEQ ID NO: 1078189 - RNA, 19 nt, Artificial Sequence
  Description of Artificial Sequence: Synthetic oligonucleotide
  Antisense strand to SEQ ID NO: 1078188
ugauaaacagcucagcagc

SEQ ID NO: 1078190 - RNA, 19 nt, Artificial Sequence
  Description of Artificial Sequence: Synthetic oligonucleotide
  Sense strand starting at position 2129 of SEQ ID NO: 915416
ccaccuggcucuuuaggaa

SEQ ID NO: 1078191 - RNA, 19 nt, Artificial Sequence
  Description of Artificial Sequence: Synthetic oligonucleotide
  Antisense strand to SEQ ID NO: 1078190
uuccuaaagagccaggugg

SEQ ID NO: 1078192 - RNA, 19 nt, Artificial Sequence
  Description of Artificial Sequence: Synthetic oligonucleotide
  Sense strand starting at position 2209 of SEQ ID NO: 915416
ccaguucccucccugagaa

SEQ ID NO: 1078193 - RNA, 19 nt, Artificial Sequence
  Description of Artificial Sequence: Synthetic oligonucleotide
  Antisense strand to SEQ ID NO: 1078192
uucucagggagggaacugg

SEQ ID NO: 1078194 - RNA, 19 nt, Artificial Sequence
  Description of Artificial Sequence: Synthetic oligonucleotide
  Sense strand starting at position 2223 of SEQ ID NO: 915416
gagaauguuuggguuggaa

SEQ ID NO: 1078195 - RNA, 19 nt, Artificial Sequence
  Description of Artificial Sequence: Synthetic oligonucleotide
  Antisense strand to SEQ ID NO: 1078194
uuccaacccaaacauucuc

SEQ ID NO: 1078196 - RNA, 19 nt, Artificial Sequence
  Description of Artificial Sequence: Synthetic oligonucleotide
  Sense strand starting at position 2225 of SEQ ID NO: 915416
gaauguuuggguuggaaau

SEQ ID NO: 1078197 - RNA, 19 nt, Artificial Sequence
  Description of Artificial Sequence: Synthetic oligonucleotide
  Antisense strand to SEQ ID NO: 1078196
auuuccaacccaaacauuc

SEQ ID NO: 1078198 - RNA, 19 nt, Artificial Sequence
  Description of Artificial Sequence: Synthetic oligonucleotide
  Sense strand starting at position 2226 of SEQ ID NO: 915416
aauguuuggguuggaaaug

SEQ ID NO: 1078199 - RNA, 19 nt, Artificial Sequence
  Description of Artificial Sequence: Synthetic oligonucleotide
  Antisense strand to SEQ ID NO: 1078198
cauuuccaacccaaacauu

SEQ ID NO: 1078200 - RNA, 19 nt, Artificial Sequence
  Description of Artificial Sequence: Synthetic oligonucleotide
  Sense strand starting at position 2397 of SEQ ID NO: 915416
cgaugucugccucuuugua

SEQ ID NO: 1078201 - RNA, 19 nt, Artificial Sequence
  Description of Artificial Sequence: Synthetic oligonucleotide
  Antisense strand to SEQ ID NO: 1078200
uacaaagaggcagacaucg

SEQ ID NO: 1078202 - RNA, 19 nt, Artificial Sequence
  Description of Artificial Sequence: Synthetic oligonucleotide
  Sense strand starting at position 2503 of SEQ ID NO: 915416
ggucaaaucuugcugagga

SEQ ID NO: 1078203 - RNA, 19 nt, Artificial Sequence
  Description of Artificial Sequence: Synthetic oligonucleotide
  Antisense strand to SEQ ID NO: 1078202
uccucagcaagauuugacc

SEQ ID NO: 1078204 - RNA, 19 nt, Artificial Sequence
  Description of Artificial Sequence: Synthetic oligonucleotide
  Sense strand starting at position 2551 of SEQ ID NO: 915416
uuuaaacauuacucgagua

SEQ ID NO: 1078205 - RNA, 19 nt, Artificial Sequence
  Description of Artificial Sequence: Synthetic oligonucleotide
  Antisense strand to SEQ ID NO: 1078204
uacucgaguaauguuuaaa

SEQ ID NO: 1078206 - RNA, 19 nt, Artificial Sequence
  Description of Artificial Sequence: Synthetic oligonucleotide
  Sense strand starting at position 2553 of SEQ ID NO: 915416
uaaacauuacucgaguaug

SEQ ID NO: 1078207 - RNA, 19 nt, Artificial Sequence
  Description of Artificial Sequence: Synthetic oligonucleotide
  Antisense strand to SEQ ID NO: 1078206
cauacucgaguaauguuua

SEQ ID NO: 1078208 - RNA, 19 nt, Artificial Sequence
  Description of Artificial Sequence: Synthetic oligonucleotide
  Sense strand starting at position 2556 of SEQ ID NO: 915416
acauuacucgaguauggac

SEQ ID NO: 1078209 - RNA, 19 nt, Artificial Sequence
  Description of Artificial Sequence: Synthetic oligonucleotide
  Antisense strand to SEQ ID NO: 1078208
guccauacucgaguaaugu

SEQ ID NO: 1078210 - RNA, 19 nt, Artificial Sequence
  Description of Artificial Sequence: Synthetic oligonucleotide
  Sense strand starting at position 2685 of SEQ ID NO: 915416
uauugagagcaaugggcua

SEQ ID NO: 1078211 - RNA, 19 nt, Artificial Sequence
  Description of Artificial Sequence: Synthetic oligonucleotide
  Antisense strand to SEQ ID NO: 1078210
uagcccauugcucucaaua

SEQ ID NO: 1078212 - RNA, 19 nt, Artificial Sequence
  Description of Artificial Sequence: Synthetic oligonucleotide
  Sense strand starting at position 2918 of SEQ ID NO: 915416
guaguaauagucuaaggau

SEQ ID NO: 1078213 - RNA, 19 nt, Artificial Sequence
  Description of Artificial Sequence: Synthetic oligonucleotide
  Antisense strand to SEQ ID NO: 1078212
auccuuagacuauuacuac

SEQ ID NO: 1078214 - RNA, 19 nt, Artificial Sequence
  Description of Artificial Sequence: Synthetic oligonucleotide
  Sense strand starting at position 3033 of SEQ ID NO: 915416
ucagcuaauaagugagaga

SEQ ID NO: 1078215 - RNA, 19 nt, Artificial Sequence
  Description of Artificial Sequence: Synthetic oligonucleotide
  Antisense strand to SEQ ID NO: 1078214
ucucucacuuauuagcuga

SEQ ID NO: 1078216 - RNA, 19 nt, Artificial Sequence
  Description of Artificial Sequence: Synthetic oligonucleotide
  Sense strand starting at position 3234 of SEQ ID NO: 915416
gcaguaacacugggagaga

SEQ ID NO: 1078217 - RNA, 19 nt, Artificial Sequence
  Description of Artificial Sequence: Synthetic oligonucleotide
  Antisense strand to SEQ ID NO: 1078216
ucucucccaguguuacugc

SEQ ID NO: 1078218 - RNA, 19 nt, Artificial Sequence
  Description of Artificial Sequence: Synthetic oligonucleotide
  Sense strand starting at position 3312 of SEQ ID NO: 915416
ccuuuaccugagggucaua

SEQ ID NO: 1078219 - RNA, 19 nt, Artificial Sequence
  Description of Artificial Sequence: Synthetic oligonucleotide
  Antisense strand to SEQ ID NO: 1078218
uaugacccucagguaaagg

SEQ ID NO: 1078220 - RNA, 19 nt, Artificial Sequence
  Description of Artificial Sequence: Synthetic oligonucleotide
  Sense strand starting at position 3317 of SEQ ID NO: 915416
accugagggucauauuuga

SEQ ID NO: 1078221 - RNA, 19 nt, Artificial Sequence
  Description of Artificial Sequence: Synthetic oligonucleotide
  Antisense strand to SEQ ID NO: 1078220
ucaaauaugacccucaggu

SEQ ID NO: 1078222 - RNA, 19 nt, Artificial Sequence
  Description of Artificial Sequence: Synthetic oligonucleotide
  Sense strand starting at position 3354 of SEQ ID NO: 915416
gcaggugagagcuaagaau

SEQ ID NO: 1078223 - RNA, 19 nt, Artificial Sequence
  Description of Artificial Sequence: Synthetic oligonucleotide
  Antisense strand to SEQ ID NO: 1078222
auucuuagcucucaccugc

SEQ ID NO: 1078224 - RNA, 19 nt, Artificial Sequence
  Description of Artificial Sequence: Synthetic oligonucleotide
  Sense strand starting at position 3365 of SEQ ID NO: 915416
cuaagaauuuccugaagac

SEQ ID NO: 1078225 - RNA, 19 nt, Artificial Sequence
  Description of Artificial Sequence: Synthetic oligonucleotide
  Antisense strand to SEQ ID NO: 1078224
gucuucaggaaauucuuag

SEQ ID NO: 1078226 - RNA, 19 nt, Artificial Sequence
  Description of Artificial Sequence: Synthetic oligonucleotide
  Sense strand starting at position 3786 of SEQ ID NO: 915416
uuucucugaggucaauaau

SEQ ID NO: 1078227 - RNA, 19 nt, Artificial Sequence
  Description of Artificial Sequence: Synthetic oligonucleotide
  Antisense strand to SEQ ID NO: 1078226
auuauugaccucagagaaa

SEQ ID NO: 1078228 - RNA, 19 nt, Artificial Sequence
  Description of Artificial Sequence: Synthetic oligonucleotide
  Sense strand starting at position 3838 of SEQ ID NO: 915416
aaaguaagcuggucaaaug

SEQ ID NO: 1078229 - RNA, 19 nt, Artificial Sequence
  Description of Artificial Sequence: Synthetic oligonucleotide
  Antisense strand to SEQ ID NO: 1078228
cauuugaccagcuuacuuu

SEQ ID NO: 1078230 - RNA, 19 nt, Artificial Sequence
  Description of Artificial Sequence: Synthetic oligonucleotide
  Sense strand starting at position 76 of SEQ ID NO: 915417
ggguuauuaaagcagguga

SEQ ID NO: 1078231 - RNA, 19 nt, Artificial Sequence
  Description of Artificial Sequence: Synthetic oligonucleotide
  Antisense strand to SEQ ID NO: 1078230
ucaccugcuuuaauaaccc

SEQ ID NO: 1078232 - RNA, 19 nt, Artificial Sequence
  Description of Artificial Sequence: Synthetic oligonucleotide
  Sense strand starting at position 94 of SEQ ID NO: 915417
aggaaauggugucucagaa

SEQ ID NO: 1078233 - RNA, 19 nt, Artificial Sequence
  Description of Artificial Sequence: Synthetic oligonucleotide
  Antisense strand to SEQ ID NO: 1078232
uucugagacaccauuuccu

SEQ ID NO: 1078234 - RNA, 19 nt, Artificial Sequence
  Description of Artificial Sequence: Synthetic oligonucleotide
  Sense strand starting at position 101 of SEQ ID NO: 915417
ggugucucagaaggauuau

SEQ ID NO: 1078235 - RNA, 19 nt, Artificial Sequence
  Description of Artificial Sequence: Synthetic oligonucleotide
  Antisense strand to SEQ ID NO: 1078234
auaauccuucugagacacc

SEQ ID NO: 1078236 - RNA, 19 nt, Artificial Sequence
  Description of Artificial Sequence: Synthetic oligonucleotide
  Sense strand starting at position 102 of SEQ ID NO: 915417
gugucucagaaggauuauu

SEQ ID NO: 1078237 - RNA, 19 nt, Artificial Sequence
  Description of Artificial Sequence: Synthetic oligonucleotide
  Antisense strand to SEQ ID NO: 1078236
aauaauccuucugagacac

SEQ ID NO: 1078238 - RNA, 19 nt, Artificial Sequence
  Description of Artificial Sequence: Synthetic oligonucleotide
  Sense strand starting at position 237 of SEQ ID NO: 915417
agggaaggcaucugagcaa

SEQ ID NO: 1078239 - RNA, 19 nt, Artificial Sequence
  Description of Artificial Sequence: Synthetic oligonucleotide
  Antisense strand to SEQ ID NO: 1078238
uugcucagaugccuucccu

SEQ ID NO: 1078240 - RNA, 19 nt, Artificial Sequence
  Description of Artificial Sequence: Synthetic oligonucleotide
  Sense strand starting at position 240 of SEQ ID NO: 915417
gaaggcaucugagcaacua

SEQ ID NO: 1078241 - RNA, 19 nt, Artificial Sequence
  Description of Artificial Sequence: Synthetic oligonucleotide
  Antisense strand to SEQ ID NO: 1078240
uaguugcucagaugccuuc

SEQ ID NO: 1078242 - RNA, 19 nt, Artificial Sequence
  Description of Artificial Sequence: Synthetic oligonucleotide
  Sense strand starting at position 328 of SEQ ID NO: 915417
uacacucagccugagugau

SEQ ID NO: 1078243 - RNA, 19 nt, Artificial Sequence
  Description of Artificial Sequence: Synthetic oligonucleotide
  Antisense strand to SEQ ID NO: 1078242
aucacucaggcugagugua

SEQ ID NO: 1078244 - RNA, 19 nt, Artificial Sequence
  Description of Artificial Sequence: Synthetic oligonucleotide
  Sense strand starting at position 419 of SEQ ID NO: 915417
ugaugacuguuauugagau

SEQ ID NO: 1078245 - RNA, 19 nt, Artificial Sequence
  Description of Artificial Sequence: Synthetic oligonucleotide
  Antisense strand to SEQ ID NO: 1078244
aucucaauaacagucauca

SEQ ID NO: 1078246 - RNA, 19 nt, Artificial Sequence
  Description of Artificial Sequence: Synthetic oligonucleotide
  Sense strand starting at position 958 of SEQ ID NO: 915417
ggaguagaccauuguaucu

SEQ ID NO: 1078247 - RNA, 19 nt, Artificial Sequence
  Description of Artificial Sequence: Synthetic oligonucleotide
  Antisense strand to SEQ ID NO: 1078246
agauacaauggucuacucc

SEQ ID NO: 1078248 - RNA, 19 nt, Artificial Sequence
  Description of Artificial Sequence: Synthetic oligonucleotide
  Sense strand starting at position 988 of SEQ ID NO: 915417
ucaauaugacuguauuagu

SEQ ID NO: 1078249 - RNA, 19 nt, Artificial Sequence
  Description of Artificial Sequence: Synthetic oligonucleotide
  Antisense strand to SEQ ID NO: 1078248
acuaauacagucauauuga

SEQ ID NO: 1078250 - RNA, 19 nt, Artificial Sequence
  Description of Artificial Sequence: Synthetic oligonucleotide
  Sense strand starting at position 1163 of SEQ ID NO: 915417
uaaagauucuuuguaaagg

SEQ ID NO: 1078251 - RNA, 19 nt, Artificial Sequence
  Description of Artificial Sequence: Synthetic oligonucleotide
  Antisense strand to SEQ ID NO: 1078250
ccuuuacaaagaaucuuua

SEQ ID NO: 1078252 - RNA, 19 nt, Artificial Sequence
  Description of Artificial Sequence: Synthetic oligonucleotide
  Sense strand starting at position 1274 of SEQ ID NO: 915417
uagggcauaguugaguaua

SEQ ID NO: 1078253 - RNA, 19 nt, Artificial Sequence
  Description of Artificial Sequence: Synthetic oligonucleotide
  Antisense strand to SEQ ID NO: 1078252
uauacucaacuaugcccua

SEQ ID NO: 1078254 - RNA, 19 nt, Artificial Sequence
  Description of Artificial Sequence: Synthetic oligonucleotide
  Sense strand starting at position 1277 of SEQ ID NO: 915417
ggcauaguugaguauaaug

SEQ ID NO: 1078255 - RNA, 19 nt, Artificial Sequence
  Description of Artificial Sequence: Synthetic oligonucleotide
  Antisense strand to SEQ ID NO: 1078254
cauuauacucaacuaugcc

SEQ ID NO: 1078256 - RNA, 19 nt, Artificial Sequence
  Description of Artificial Sequence: Synthetic oligonucleotide
  Sense strand starting at position 1312 of SEQ ID NO: 915417
gaggucuggguuuauaguu

SEQ ID NO: 1078257 - RNA, 19 nt, Artificial Sequence
  Description of Artificial Sequence: Synthetic oligonucleotide
  Antisense strand to SEQ ID NO: 1078256
aacuauaaacccagaccuc

SEQ ID NO: 1078258 - RNA, 19 nt, Artificial Sequence
  Description of Artificial Sequence: Synthetic oligonucleotide
  Sense strand starting at position 1368 of SEQ ID NO: 915417
gauacuguacugugaaaca

SEQ ID NO: 1078259 - RNA, 19 nt, Artificial Sequence
  Description of Artificial Sequence: Synthetic oligonucleotide
  Antisense strand to SEQ ID NO: 1078258
uguuucacaguacaguauc

SEQ ID NO: 1078260 - RNA, 19 nt, Artificial Sequence
  Description of Artificial Sequence: Synthetic oligonucleotide
  Sense strand starting at position 1419 of SEQ ID NO: 915417
ucuugauugcuccagagua

SEQ ID NO: 1078261 - RNA, 19 nt, Artificial Sequence
  Description of Artificial Sequence: Synthetic oligonucleotide
  Antisense strand to SEQ ID NO: 1078260
uacucuggagcaaucaaga

SEQ ID NO: 1078262 - RNA, 19 nt, Artificial Sequence
  Description of Artificial Sequence: Synthetic oligonucleotide
  Sense strand starting at position 1504 of SEQ ID NO: 915417
ucagguuugaggcauauau

SEQ ID NO: 1078263 - RNA, 19 nt, Artificial Sequence
  Description of Artificial Sequence: Synthetic oligonucleotide
  Antisense strand to SEQ ID NO: 1078262
auauaugccucaaaccuga

SEQ ID NO: 1078264 - RNA, 19 nt, Artificial Sequence
  Description of Artificial Sequence: Synthetic oligonucleotide
  Sense strand starting at position 1506 of SEQ ID NO: 915417
agguuugaggcauauauua

SEQ ID NO: 1078265 - RNA, 19 nt, Artificial Sequence
  Description of Artificial Sequence: Synthetic oligonucleotide
  Antisense strand to SEQ ID NO: 1078264
uaauauaugccucaaaccu

SEQ ID NO: 1078266 - RNA, 19 nt, Artificial Sequence
  Description of Artificial Sequence: Synthetic oligonucleotide
  Sense strand starting at position 1526 of SEQ ID NO: 915417
uuuauuucugcuggcagua

SEQ ID NO: 1078267 - RNA, 19 nt, Artificial Sequence
  Description of Artificial Sequence: Synthetic oligonucleotide
  Antisense strand to SEQ ID NO: 1078266
uacugccagcagaaauaaa

SEQ ID NO: 1078268 - RNA, 19 nt, Artificial Sequence
  Description of Artificial Sequence: Synthetic oligonucleotide
  Sense strand starting at position 1567 of SEQ ID NO: 915417
ccugucuuaggccagagaa

SEQ ID NO: 1078269 - RNA, 19 nt, Artificial Sequence
  Description of Artificial Sequence: Synthetic oligonucleotide
  Antisense strand to SEQ ID NO: 1078268
uucucuggccuaagacagg

SEQ ID NO: 1078270 - RNA, 19 nt, Artificial Sequence
  Description of Artificial Sequence: Synthetic oligonucleotide
  Sense strand starting at position 1614 of SEQ ID NO: 915417
gcucuaaaggccuaauaau

SEQ ID NO: 1078271 - RNA, 19 nt, Artificial Sequence
  Description of Artificial Sequence: Synthetic oligonucleotide
  Antisense strand to SEQ ID NO: 1078270
auuauuaggccuuuagagc

SEQ ID NO: 1078272 - RNA, 19 nt, Artificial Sequence
  Description of Artificial Sequence: Synthetic oligonucleotide
  Sense strand starting at position 1789 of SEQ ID NO: 915417
uuagcuuugguagaaauga

SEQ ID NO: 1078273 - RNA, 19 nt, Artificial Sequence
  Description of Artificial Sequence: Synthetic oligonucleotide
  Antisense strand to SEQ ID NO: 1078272
ucauuucuaccaaagcuaa

SEQ ID NO: 1078274 - RNA, 19 nt, Artificial Sequence
  Description of Artificial Sequence: Synthetic oligonucleotide
  Sense strand starting at position 1977 of SEQ ID NO: 915417
uguucuuaugaacacugau

SEQ ID NO: 1078275 - RNA, 19 nt, Artificial Sequence
  Description of Artificial Sequence: Synthetic oligonucleotide
  Antisense strand to SEQ ID NO: 1078274
aucaguguucauaagaaca

SEQ ID NO: 1078276 - RNA, 19 nt, Artificial Sequence
  Description of Artificial Sequence: Synthetic oligonucleotide
  Sense strand starting at position 2033 of SEQ ID NO: 915417
ucuuuagaugguugaggga

SEQ ID NO: 1078277 - RNA, 19 nt, Artificial Sequence
  Description of Artificial Sequence: Synthetic oligonucleotide
  Antisense strand to SEQ ID NO: 1078276
ucccucaaccaucuaaaga

SEQ ID NO: 1078278 - RNA, 19 nt, Artificial Sequence
  Description of Artificial Sequence: Synthetic oligonucleotide
  Sense strand starting at position 2035 of SEQ ID NO: 915417
uuuagaugguugagggaga

SEQ ID NO: 1078279 - RNA, 19 nt, Artificial Sequence
  Description of Artificial Sequence: Synthetic oligonucleotide
  Antisense strand to SEQ ID NO: 1078278
ucucccucaaccaucuaaa

SEQ ID NO: 1078280 - RNA, 19 nt, Artificial Sequence
  Description of Artificial Sequence: Synthetic oligonucleotide
  Sense strand starting at position 2348 of SEQ ID NO: 915417
gaaggaaggaguuguaauu

SEQ ID NO: 1078281 - RNA, 19 nt, Artificial Sequence
  Description of Artificial Sequence: Synthetic oligonucleotide
  Antisense strand to SEQ ID NO: 1078280
aauuacaacuccuuccuuc

SEQ ID NO: 1078282 - RNA, 19 nt, Artificial Sequence
  Description of Artificial Sequence: Synthetic oligonucleotide
  Sense strand starting at position 2354 of SEQ ID NO: 915417
aggaguuguaauuauucga

SEQ ID NO: 1078283 - RNA, 19 nt, Artificial Sequence
  Description of Artificial Sequence: Synthetic oligonucleotide
  Antisense strand to SEQ ID NO: 1078282
ucgaauaauuacaacuccu

SEQ ID NO: 1078284 - RNA, 19 nt, Artificial Sequence
  Description of Artificial Sequence: Synthetic oligonucleotide
  Sense strand starting at position 2397 of SEQ ID NO: 915417
gcagcuacugaguaauaau

SEQ ID NO: 1078285 - RNA, 19 nt, Artificial Sequence
  Description of Artificial Sequence: Synthetic oligonucleotide
  Antisense strand to SEQ ID NO: 1078284
auuauuacucaguagcugc

SEQ ID NO: 1078286 - RNA, 19 nt, Artificial Sequence
  Description of Artificial Sequence: Synthetic oligonucleotide
  Sense strand starting at position 2408 of SEQ ID NO: 915417
guaauaauacaguguaaug

SEQ ID NO: 1078287 - RNA, 19 nt, Artificial Sequence
  Description of Artificial Sequence: Synthetic oligonucleotide
  Antisense strand to SEQ ID NO: 1078286
cauuacacuguauuauuac

SEQ ID NO: 1078288 - RNA, 19 nt, Artificial Sequence
  Description of Artificial Sequence: Synthetic oligonucleotide
  Sense strand starting at position 2530 of SEQ ID NO: 915417
cagguagagucaucuuaau

SEQ ID NO: 1078289 - RNA, 19 nt, Artificial Sequence
  Description of Artificial Sequence: Synthetic oligonucleotide
  Antisense strand to SEQ ID NO: 1078288
auuaagaugacucuaccug

SEQ ID NO: 1078290 - RNA, 19 nt, Artificial Sequence
  Description of Artificial Sequence: Synthetic oligonucleotide
  Sense strand starting at position 2567 of SEQ ID NO: 915417
cugucucugaaaugaggau

SEQ ID NO: 1078291 - RNA, 19 nt, Artificial Sequence
  Description of Artificial Sequence: Synthetic oligonucleotide
  Antisense strand to SEQ ID NO: 1078290
auccucauuucagagacag

SEQ ID NO: 1078292 - RNA, 19 nt, Artificial Sequence
  Description of Artificial Sequence: Synthetic oligonucleotide
  Sense strand starting at position 2662 of SEQ ID NO: 915417
agaguuuaauauuccauag

SEQ ID NO: 1078293 - RNA, 19 nt, Artificial Sequence
  Description of Artificial Sequence: Synthetic oligonucleotide
  Antisense strand to SEQ ID NO: 1078292
cuauggaauauuaaacucu

SEQ ID NO: 1078294 - RNA, 19 nt, Artificial Sequence
  Description of Artificial Sequence: Synthetic oligonucleotide
  Sense strand starting at position 2672 of SEQ ID NO: 915417
auuccauagugaucuugau

SEQ ID NO: 1078295 - RNA, 19 nt, Artificial Sequence
  Description of Artificial Sequence: Synthetic oligonucleotide
  Antisense strand to SEQ ID NO: 1078294
aucaagaucacuauggaau

SEQ ID NO: 1078296 - RNA, 19 nt, Artificial Sequence
  Description of Artificial Sequence: Synthetic oligonucleotide
  Sense strand starting at position 2676 of SEQ ID NO: 915417
cauagugaucuugauagca

SEQ ID NO: 1078297 - RNA, 19 nt, Artificial Sequence
  Description of Artificial Sequence: Synthetic oligonucleotide
  Antisense strand to SEQ ID NO: 1078296
ugcuaucaagaucacuaug

SEQ ID NO: 1078298 - RNA, 19 nt, Artificial Sequence
  Description of Artificial Sequence: Synthetic oligonucleotide
  Sense strand starting at position 3069 of SEQ ID NO: 915417
ccacuauuguuggucauuu

SEQ ID NO: 1078299 - RNA, 19 nt, Artificial Sequence
  Description of Artificial Sequence: Synthetic oligonucleotide
  Antisense strand to SEQ ID NO: 1078298
aaaugaccaacaauagugg

SEQ ID NO: 1078300 - RNA, 19 nt, Artificial Sequence
  Description of Artificial Sequence: Synthetic oligonucleotide
  Sense strand starting at position 3095 of SEQ ID NO: 915417
uuccauauggcuuagauga

SEQ ID NO: 1078301 - RNA, 19 nt, Artificial Sequence
  Description of Artificial Sequence: Synthetic oligonucleotide
  Antisense strand to SEQ ID NO: 1078300
ucaucuaagccauauggaa

SEQ ID NO: 1078302 - RNA, 19 nt, Artificial Sequence
  Description of Artificial Sequence: Synthetic oligonucleotide
  Sense strand starting at position 3124 of SEQ ID NO: 915417
ugaucagagcuaggcaaau

SEQ ID NO: 1078303 - RNA, 19 nt, Artificial Sequence
  Description of Artificial Sequence: Synthetic oligonucleotide
  Antisense strand to SEQ ID NO: 1078302
auuugccuagcucugauca

SEQ ID NO: 1078304 - RNA, 19 nt, Artificial Sequence
  Description of Artificial Sequence: Synthetic oligonucleotide
  Sense strand starting at position 3135 of SEQ ID NO: 915417
aggcaaaucuggguuugag

SEQ ID NO: 1078305 - RNA, 19 nt, Artificial Sequence
  Description of Artificial Sequence: Synthetic oligonucleotide
  Antisense strand to SEQ ID NO: 1078304
cucaaacccagauuugccu

SEQ ID NO: 1078306 - RNA, 19 nt, Artificial Sequence
  Description of Artificial Sequence: Synthetic oligonucleotide
  Sense strand starting at position 3243 of SEQ ID NO: 915417
augucuauagaauguacau

SEQ ID NO: 1078307 - RNA, 19 nt, Artificial Sequence
  Description of Artificial Sequence: Synthetic oligonucleotide
  Antisense strand to SEQ ID NO: 1078306
auguacauucuauagacau

SEQ ID NO: 1078308 - RNA, 19 nt, Artificial Sequence
  Description of Artificial Sequence: Synthetic oligonucleotide
  Sense strand starting at position 3600 of SEQ ID NO: 915417
ugauauauuggaugucuuc

SEQ ID NO: 1078309 - RNA, 19 nt, Artificial Sequence
  Description of Artificial Sequence: Synthetic oligonucleotide
  Antisense strand to SEQ ID NO: 1078308
gaagacauccaauauauca

SEQ ID NO: 1078310 - RNA, 19 nt, Artificial Sequence
  Description of Artificial Sequence: Synthetic oligonucleotide
  Sense strand starting at position 117 of SEQ ID NO: 915418
gacuguguugaucgucuuu

SEQ ID NO: 1078311 - RNA, 19 nt, Artificial Sequence
  Description of Artificial Sequence: Synthetic oligonucleotide
  Antisense strand to SEQ ID NO: 1078310
aaagacgaucaacacaguc

SEQ ID NO: 1078312 - RNA, 19 nt, Artificial Sequence
  Description of Artificial Sequence: Synthetic oligonucleotide
  Sense strand starting at position 120 of SEQ ID NO: 915418
uguguugaucgucuuucuu

SEQ ID NO: 1078313 - RNA, 19 nt, Artificial Sequence
  Description of Artificial Sequence: Synthetic oligonucleotide
  Antisense strand to SEQ ID NO: 1078312
aagaaagacgaucaacaca

SEQ ID NO: 1078314 - RNA, 19 nt, Artificial Sequence
  Description of Artificial Sequence: Synthetic oligonucleotide
  Sense strand starting at position 204 of SEQ ID NO: 915418
ggucaacagucuugggaua

SEQ ID NO: 1078315 - RNA, 19 nt, Artificial Sequence
  Description of Artificial Sequence: Synthetic oligonucleotide
  Antisense strand to SEQ ID NO: 1078314
uaucccaagacuguugacc

SEQ ID NO: 1078316 - RNA, 19 nt, Artificial Sequence
  Description of Artificial Sequence: Synthetic oligonucleotide
  Sense strand starting at position 206 of SEQ ID NO: 915418
ucaacagucuugggauaca

SEQ ID NO: 1078317 - RNA, 19 nt, Artificial Sequence
  Description of Artificial Sequence: Synthetic oligonucleotide
  Antisense strand to SEQ ID NO: 1078316
uguaucccaagacuguuga

SEQ ID NO: 1078318 - RNA, 19 nt, Artificial Sequence
  Description of Artificial Sequence: Synthetic oligonucleotide
  Sense strand starting at position 219 of SEQ ID NO: 915418
gauacaguagcuggucaau

SEQ ID NO: 1078319 - RNA, 19 nt, Artificial Sequence
  Description of Artificial Sequence: Synthetic oligonucleotide
  Antisense strand to SEQ ID NO: 1078318
auugaccagcuacuguauc

SEQ ID NO: 1078320 - RNA, 19 nt, Artificial Sequence
  Description of Artificial Sequence: Synthetic oligonucleotide
  Sense strand starting at position 221 of SEQ ID NO: 915418
uacaguagcuggucaauaa

SEQ ID NO: 1078321 - RNA, 19 nt, Artificial Sequence
  Description of Artificial Sequence: Synthetic oligonucleotide
  Antisense strand to SEQ ID NO: 1078320
uuauugaccagcuacugua

SEQ ID NO: 1078322 - RNA, 19 nt, Artificial Sequence
  Description of Artificial Sequence: Synthetic oligonucleotide
  Sense strand starting at position 222 of SEQ ID NO: 915418
acaguagcuggucaauaaa

SEQ ID NO: 1078323 - RNA, 19 nt, Artificial Sequence
  Description of Artificial Sequence: Synthetic oligonucleotide
  Antisense strand to SEQ ID NO: 1078322
uuuauugaccagcuacugu

SEQ ID NO: 1078324 - RNA, 19 nt, Artificial Sequence
  Description of Artificial Sequence: Synthetic oligonucleotide
  Sense strand starting at position 225 of SEQ ID NO: 915418
guagcuggucaauaaauau

SEQ ID NO: 1078325 - RNA, 19 nt, Artificial Sequence
  Description of Artificial Sequence: Synthetic oligonucleotide
  Antisense strand to SEQ ID NO: 1078324
auauuuauugaccagcuac

SEQ ID NO: 1078326 - RNA, 19 nt, Artificial Sequence
  Description of Artificial Sequence: Synthetic oligonucleotide
  Sense strand starting at position 243 of SEQ ID NO: 915418
uuugaugacugacuccaua

SEQ ID NO: 1078327 - RNA, 19 nt, Artificial Sequence
  Description of Artificial Sequence: Synthetic oligonucleotide
  Antisense strand to SEQ ID NO: 1078326
uauggagucagucaucaaa

SEQ ID NO: 1078328 - RNA, 19 nt, Artificial Sequence
  Description of Artificial Sequence: Synthetic oligonucleotide
  Sense strand starting at position 269 of SEQ ID NO: 915418
acuguaaggugaguccuau

SEQ ID NO: 1078329 - RNA, 19 nt, Artificial Sequence
  Description of Artificial Sequence: Synthetic oligonucleotide
  Antisense strand to SEQ ID NO: 1078328
auaggacucaccuuacagu

SEQ ID NO: 1078330 - RNA, 19 nt, Artificial Sequence
  Description of Artificial Sequence: Synthetic oligonucleotide
  Sense strand starting at position 273 of SEQ ID NO: 915418
uaaggugaguccuauucuc

SEQ ID NO: 1078331 - RNA, 19 nt, Artificial Sequence
  Description of Artificial Sequence: Synthetic oligonucleotide
  Antisense strand to SEQ ID NO: 1078330
gagaauaggacucaccuua

SEQ ID NO: 1078332 - RNA, 19 nt, Artificial Sequence
  Description of Artificial Sequence: Synthetic oligonucleotide
  Sense strand starting at position 301 of SEQ ID NO: 915418
acagaucucucccaagguu

SEQ ID NO: 1078333 - RNA, 19 nt, Artificial Sequence
  Description of Artificial Sequence: Synthetic oligonucleotide
  Antisense strand to SEQ ID NO: 1078332
aaccuugggagagaucugu

SEQ ID NO: 1078334 - RNA, 19 nt, Artificial Sequence
  Description of Artificial Sequence: Synthetic oligonucleotide
  Sense strand starting at position 391 of SEQ ID NO: 915418
agaggagccucccauuauu

SEQ ID NO: 1078335 - RNA, 19 nt, Artificial Sequence
  Description of Artificial Sequence: Synthetic oligonucleotide
  Antisense strand to SEQ ID NO: 1078334
aauaaugggaggcuccucu

SEQ ID NO: 1078336 - RNA, 19 nt, Artificial Sequence
  Description of Artificial Sequence: Synthetic oligonucleotide
  Sense strand starting at position 404 of SEQ ID NO: 915418
auuauuccuccaggaaguc

SEQ ID NO: 1078337 - RNA, 19 nt, Artificial Sequence
  Description of Artificial Sequence: Synthetic oligonucleotide
  Antisense strand to SEQ ID NO: 1078336
gacuuccuggaggaauaau

SEQ ID NO: 1078338 - RNA, 19 nt, Artificial Sequence
  Description of Artificial Sequence: Synthetic oligonucleotide
  Sense strand starting at position 475 of SEQ ID NO: 915418
guuguuaccuuccuggaua

SEQ ID NO: 1078339 - RNA, 19 nt, Artificial Sequence
  Description of Artificial Sequence: Synthetic oligonucleotide
  Antisense strand to SEQ ID NO: 1078338
uauccaggaagguaacaac

SEQ ID NO: 1078340 - RNA, 19 nt, Artificial Sequence
  Description of Artificial Sequence: Synthetic oligonucleotide
  Sense strand starting at position 476 of SEQ ID NO: 915418
uuguuaccuuccuggauaa

SEQ ID NO: 1078341 - RNA, 19 nt, Artificial Sequence
  Description of Artificial Sequence: Synthetic oligonucleotide
  Antisense strand to SEQ ID NO: 1078340
uuauccaggaagguaacaa

SEQ ID NO: 1078342 - RNA, 19 nt, Artificial Sequence
  Description of Artificial Sequence: Synthetic oligonucleotide
  Sense strand starting at position 566 of SEQ ID NO: 915418
gggugugugccucaugaga

SEQ ID NO: 1078343 - RNA, 19 nt, Artificial Sequence
  Description of Artificial Sequence: Synthetic oligonucleotide
  Antisense strand to SEQ ID NO: 1078342
ucucaugaggcacacaccc

SEQ ID NO: 1078344 - RNA, 19 nt, Artificial Sequence
  Description of Artificial Sequence: Synthetic oligonucleotide
  Sense strand starting at position 680 of SEQ ID NO: 915418
ucgagcauggcgucaucau

SEQ ID NO: 1078345 - RNA, 19 nt, Artificial Sequence
  Description of Artificial Sequence: Synthetic oligonucleotide
  Antisense strand to SEQ ID NO: 1078344
augaugacgccaugcucga

SEQ ID NO: 1078346 - RNA, 19 nt, Artificial Sequence
  Description of Artificial Sequence: Synthetic oligonucleotide
  Sense strand starting at position 681 of SEQ ID NO: 915418
cgagcauggcgucaucauu

SEQ ID NO: 1078347 - RNA, 19 nt, Artificial Sequence
  Description of Artificial Sequence: Synthetic oligonucleotide
  Antisense strand to SEQ ID NO: 1078346
aaugaugacgccaugcucg

SEQ ID NO: 1078348 - RNA, 19 nt, Artificial Sequence
  Description of Artificial Sequence: Synthetic oligonucleotide
  Sense strand starting at position 906 of SEQ ID NO: 915418
gguagcucuccaggaggaa

SEQ ID NO: 1078349 - RNA, 19 nt, Artificial Sequence
  Description of Artificial Sequence: Synthetic oligonucleotide
  Antisense strand to SEQ ID NO: 1078348
uuccuccuggagagcuacc

SEQ ID NO: 1078350 - RNA, 19 nt, Artificial Sequence
  Description of Artificial Sequence: Synthetic oligonucleotide
  Sense strand starting at position 1419 of SEQ ID NO: 915418
ugccaagacucaguaucua

SEQ ID NO: 1078351 - RNA, 19 nt, Artificial Sequence
  Description of Artificial Sequence: Synthetic oligonucleotide
  Antisense strand to SEQ ID NO: 1078350
uagauacugagucuuggca

SEQ ID NO: 1078352 - RNA, 19 nt, Artificial Sequence
  Description of Artificial Sequence: Synthetic oligonucleotide
  Sense strand starting at position 1879 of SEQ ID NO: 915418
cccgaaacgugggaacaaa

SEQ ID NO: 1078353 - RNA, 19 nt, Artificial Sequence
  Description of Artificial Sequence: Synthetic oligonucleotide
  Antisense strand to SEQ ID NO: 1078352
uuuguucccacguuucggg

SEQ ID NO: 1078354 - RNA, 19 nt, Artificial Sequence
  Description of Artificial Sequence: Synthetic oligonucleotide
  Sense strand starting at position 2002 of SEQ ID NO: 915418
ccacauggccucugaggaa

SEQ ID NO: 1078355 - RNA, 19 nt, Artificial Sequence
  Description of Artificial Sequence: Synthetic oligonucleotide
  Antisense strand to SEQ ID NO: 1078354
uuccucagaggccaugugg

SEQ ID NO: 1078356 - RNA, 19 nt, Artificial Sequence
  Description of Artificial Sequence: Synthetic oligonucleotide
  Sense strand starting at position 2014 of SEQ ID NO: 915418
ugaggaaugucagcagcaa

SEQ ID NO: 1078357 - RNA, 19 nt, Artificial Sequence
  Description of Artificial Sequence: Synthetic oligonucleotide
  Antisense strand to SEQ ID NO: 1078356
uugcugcugacauuccuca

SEQ ID NO: 1078358 - RNA, 19 nt, Artificial Sequence
  Description of Artificial Sequence: Synthetic oligonucleotide
  Sense strand starting at position 2015 of SEQ ID NO: 915418
gaggaaugucagcagcaag

SEQ ID NO: 1078359 - RNA, 19 nt, Artificial Sequence
  Description of Artificial Sequence: Synthetic oligonucleotide
  Antisense strand to SEQ ID NO: 1078358
cuugcugcugacauuccuc

SEQ ID NO: 1078360 - RNA, 19 nt, Artificial Sequence
  Description of Artificial Sequence: Synthetic oligonucleotide
  Sense strand starting at position 2073 of SEQ ID NO: 915418
cguggcuucccugagcaua

SEQ ID NO: 1078361 - RNA, 19 nt, Artificial Sequence
  Description of Artificial Sequence: Synthetic oligonucleotide
  Antisense strand to SEQ ID NO: 1078360
uaugcucagggaagccacg

SEQ ID NO: 1078362 - RNA, 19 nt, Artificial Sequence
  Description of Artificial Sequence: Synthetic oligonucleotide
  Sense strand starting at position 2340 of SEQ ID NO: 915418
cuggcucuguuccugaaau

SEQ ID NO: 1078363 - RNA, 19 nt, Artificial Sequence
  Description of Artificial Sequence: Synthetic oligonucleotide
  Antisense strand to SEQ ID NO: 1078362
auuucaggaacagagccag

SEQ ID NO: 1078364 - RNA, 19 nt, Artificial Sequence
  Description of Artificial Sequence: Synthetic oligonucleotide
  Sense strand starting at position 2551 of SEQ ID NO: 915418
acuggacugcuaugagaac

SEQ ID NO: 1078365 - RNA, 19 nt, Artificial Sequence
  Description of Artificial Sequence: Synthetic oligonucleotide
  Antisense strand to SEQ ID NO: 1078364
guucucauagcaguccagu

SEQ ID NO: 1078366 - RNA, 19 nt, Artificial Sequence
  Description of Artificial Sequence: Synthetic oligonucleotide
  Sense strand starting at position 2565 of SEQ ID NO: 915418
agaacucaaugacgaaaga

SEQ ID NO: 1078367 - RNA, 19 nt, Artificial Sequence
  Description of Artificial Sequence: Synthetic oligonucleotide
  Antisense strand to SEQ ID NO: 1078366
ucuuucgucauugaguucu

SEQ ID NO: 1078368 - RNA, 19 nt, Artificial Sequence
  Description of Artificial Sequence: Synthetic oligonucleotide
  Sense strand starting at position 2727 of SEQ ID NO: 915418
cugaaaggguccucauaau

SEQ ID NO: 1078369 - RNA, 19 nt, Artificial Sequence
  Description of Artificial Sequence: Synthetic oligonucleotide
  Antisense strand to SEQ ID NO: 1078368
auuaugaggacccuuucag

SEQ ID NO: 1078370 - RNA, 19 nt, Artificial Sequence
  Description of Artificial Sequence: Synthetic oligonucleotide
  Sense strand starting at position 2773 of SEQ ID NO: 915418
agggcaaggucuuauguag

SEQ ID NO: 1078371 - RNA, 19 nt, Artificial Sequence
  Description of Artificial Sequence: Synthetic oligonucleotide
  Antisense strand to SEQ ID NO: 1078370
cuacauaagaccuugcccu

SEQ ID NO: 1078372 - RNA, 19 nt, Artificial Sequence
  Description of Artificial Sequence: Synthetic oligonucleotide
  Sense strand starting at position 3019 of SEQ ID NO: 915418
ccaccuugauaugacugaa

SEQ ID NO: 1078373 - RNA, 19 nt, Artificial Sequence
  Description of Artificial Sequence: Synthetic oligonucleotide
  Antisense strand to SEQ ID NO: 1078372
uucagucauaucaaggugg

SEQ ID NO: 1078374 - RNA, 19 nt, Artificial Sequence
  Description of Artificial Sequence: Synthetic oligonucleotide
  Sense strand starting at position 3022 of SEQ ID NO: 915418
ccuugauaugacugaauca

SEQ ID NO: 1078375 - RNA, 19 nt, Artificial Sequence
  Description of Artificial Sequence: Synthetic oligonucleotide
  Antisense strand to SEQ ID NO: 1078374
ugauucagucauaucaagg

SEQ ID NO: 1078376 - RNA, 19 nt, Artificial Sequence
  Description of Artificial Sequence: Synthetic oligonucleotide
  Sense strand starting at position 3060 of SEQ ID NO: 915418
gcauauguuuaaguccuaa

SEQ ID NO: 1078377 - RNA, 19 nt, Artificial Sequence
  Description of Artificial Sequence: Synthetic oligonucleotide
  Antisense strand to SEQ ID NO: 1078376
uuaggacuuaaacauaugc

SEQ ID NO: 1078378 - RNA, 19 nt, Artificial Sequence
  Description of Artificial Sequence: Synthetic oligonucleotide
  Sense strand starting at position 3064 of SEQ ID NO: 915418
auguuuaaguccuaacacu

SEQ ID NO: 1078379 - RNA, 19 nt, Artificial Sequence
  Description of Artificial Sequence: Synthetic oligonucleotide
  Antisense strand to SEQ ID NO: 1078378
aguguuaggacuuaaacau

SEQ ID NO: 1078380 - RNA, 19 nt, Artificial Sequence
  Description of Artificial Sequence: Synthetic oligonucleotide
  Sense strand starting at position 3081 of SEQ ID NO: 915418
cucaguaucucauaaggug

SEQ ID NO: 1078381 - RNA, 19 nt, Artificial Sequence
  Description of Artificial Sequence: Synthetic oligonucleotide
  Antisense strand to SEQ ID NO: 1078380
caccuuaugagauacugag

SEQ ID NO: 1078382 - RNA, 19 nt, Artificial Sequence
  Description of Artificial Sequence: Synthetic oligonucleotide
  Sense strand starting at position 3093 of SEQ ID NO: 915418
uaaggugacugucuuugga

SEQ ID NO: 1078383 - RNA, 19 nt, Artificial Sequence
  Description of Artificial Sequence: Synthetic oligonucleotide
  Antisense strand to SEQ ID NO: 1078382
uccaaagacagucaccuua

SEQ ID NO: 1078384 - RNA, 19 nt, Artificial Sequence
  Description of Artificial Sequence: Synthetic oligonucleotide
  Sense strand starting at position 3095 of SEQ ID NO: 915418
aggugacugucuuuggaga

SEQ ID NO: 1078385 - RNA, 19 nt, Artificial Sequence
  Description of Artificial Sequence: Synthetic oligonucleotide
  Antisense strand to SEQ ID NO: 1078384
ucuccaaagacagucaccu

SEQ ID NO: 1078386 - RNA, 19 nt, Artificial Sequence
  Description of Artificial Sequence: Synthetic oligonucleotide
  Sense strand starting at position 3164 of SEQ ID NO: 915418
uccaguuaagacugguauc

SEQ ID NO: 1078387 - RNA, 19 nt, Artificial Sequence
  Description of Artificial Sequence: Synthetic oligonucleotide
  Antisense strand to SEQ ID NO: 1078386
gauaccagucuuaacugga

SEQ ID NO: 1078388 - RNA, 19 nt, Artificial Sequence
  Description of Artificial Sequence: Synthetic oligonucleotide
  Sense strand starting at position 3317 of SEQ ID NO: 915418
gaccacagcugucuaguuu

SEQ ID NO: 1078389 - RNA, 19 nt, Artificial Sequence
  Description of Artificial Sequence: Synthetic oligonucleotide
  Antisense strand to SEQ ID NO: 1078388
aaacuagacagcugugguc

SEQ ID NO: 1078390 - RNA, 19 nt, Artificial Sequence
  Description of Artificial Sequence: Synthetic oligonucleotide
  Sense strand starting at position 25 of SEQ ID NO: 915419
gggcuuuccugagaacacu

SEQ ID NO: 1078391 - RNA, 19 nt, Artificial Sequence
  Description of Artificial Sequence: Synthetic oligonucleotide
  Antisense strand to SEQ ID NO: 1078390
aguguucucaggaaagccc

SEQ ID NO: 1078392 - RNA, 19 nt, Artificial Sequence
  Description of Artificial Sequence: Synthetic oligonucleotide
  Sense strand starting at position 34 of SEQ ID NO: 915419
ugagaacacucagcuggaa

SEQ ID NO: 1078393 - RNA, 19 nt, Artificial Sequence
  Description of Artificial Sequence: Synthetic oligonucleotide
  Antisense strand to SEQ ID NO: 1078392
uuccagcugaguguucuca

SEQ ID NO: 1078394 - RNA, 19 nt, Artificial Sequence
  Description of Artificial Sequence: Synthetic oligonucleotide
  Sense strand starting at position 62 of SEQ ID NO: 915419
gcugguucuucccugcaca

SEQ ID NO: 1078395 - RNA, 19 nt, Artificial Sequence
  Description of Artificial Sequence: Synthetic oligonucleotide
  Antisense strand to SEQ ID NO: 1078394
ugugcagggaagaaccagc

SEQ ID NO: 1078396 - RNA, 19 nt, Artificial Sequence
  Description of Artificial Sequence: Synthetic oligonucleotide
  Sense strand starting at position 168 of SEQ ID NO: 915419
gccucaugacuggaggauu

SEQ ID NO: 1078397 - RNA, 19 nt, Artificial Sequence
  Description of Artificial Sequence: Synthetic oligonucleotide
  Antisense strand to SEQ ID NO: 1078396
aauccuccagucaugaggc

SEQ ID NO: 1078398 - RNA, 19 nt, Artificial Sequence
  Description of Artificial Sequence: Synthetic oligonucleotide
  Sense strand starting at position 360 of SEQ ID NO: 915419
ugugcuugucaauauccca

SEQ ID NO: 1078399 - RNA, 19 nt, Artificial Sequence
  Description of Artificial Sequence: Synthetic oligonucleotide
  Antisense strand to SEQ ID NO: 1078398
ugggauauugacaagcaca

SEQ ID NO: 1078400 - RNA, 19 nt, Artificial Sequence
  Description of Artificial Sequence: Synthetic oligonucleotide
  Sense strand starting at position 1121 of SEQ ID NO: 915419
ugcaaugcugaaugucuaa

SEQ ID NO: 1078401 - RNA, 19 nt, Artificial Sequence
  Description of Artificial Sequence: Synthetic oligonucleotide
  Antisense strand to SEQ ID NO: 1078400
uuagacauucagcauugca

SEQ ID NO: 1078402 - RNA, 19 nt, Artificial Sequence
  Description of Artificial Sequence: Synthetic oligonucleotide
  Sense strand starting at position 1168 of SEQ ID NO: 915419
gcugguggccagugagaua

SEQ ID NO: 1078403 - RNA, 19 nt, Artificial Sequence
  Description of Artificial Sequence: Synthetic oligonucleotide
  Antisense strand to SEQ ID NO: 1078402
uaucucacuggccaccagc

SEQ ID NO: 1078404 - RNA, 19 nt, Artificial Sequence
  Description of Artificial Sequence: Synthetic oligonucleotide
  Sense strand starting at position 1175 of SEQ ID NO: 915419
gccagugagauaugagcuu

SEQ ID NO: 1078405 - RNA, 19 nt, Artificial Sequence
  Description of Artificial Sequence: Synthetic oligonucleotide
  Antisense strand to SEQ ID NO: 1078404
aagcucauaucucacuggc

SEQ ID NO: 1078406 - RNA, 19 nt, Artificial Sequence
  Description of Artificial Sequence: Synthetic oligonucleotide
  Sense strand starting at position 1276 of SEQ ID NO: 915419
ugggcugcccuccagaauu

SEQ ID NO: 1078407 - RNA, 19 nt, Artificial Sequence
  Description of Artificial Sequence: Synthetic oligonucleotide
  Antisense strand to SEQ ID NO: 1078406
aauucuggagggcagccca

SEQ ID NO: 1078408 - RNA, 19 nt, Artificial Sequence
  Description of Artificial Sequence: Synthetic oligonucleotide
  Sense strand starting at position 1297 of SEQ ID NO: 915419
caggacuccuucccggaau

SEQ ID NO: 1078409 - RNA, 19 nt, Artificial Sequence
  Description of Artificial Sequence: Synthetic oligonucleotide
  Antisense strand to SEQ ID NO: 1078408
auuccgggaaggaguccug

SEQ ID NO: 1078410 - RNA, 19 nt, Artificial Sequence
  Description of Artificial Sequence: Synthetic oligonucleotide
  Sense strand starting at position 1408 of SEQ ID NO: 915419
cgguacaucugggcugaua

SEQ ID NO: 1078411 - RNA, 19 nt, Artificial Sequence
  Description of Artificial Sequence: Synthetic oligonucleotide
  Antisense strand to SEQ ID NO: 1078410
uaucagcccagauguaccg

SEQ ID NO: 1078412 - RNA, 19 nt, Artificial Sequence
  Description of Artificial Sequence: Synthetic oligonucleotide
  Sense strand starting at position 1447 of SEQ ID NO: 915419
cagaaagcugcugagauua

SEQ ID NO: 1078413 - RNA, 19 nt, Artificial Sequence
  Description of Artificial Sequence: Synthetic oligonucleotide
  Antisense strand to SEQ ID NO: 1078412
uaaucucagcagcuuucug

SEQ ID NO: 1078414 - RNA, 19 nt, Artificial Sequence
  Description of Artificial Sequence: Synthetic oligonucleotide
  Sense strand starting at position 1449 of SEQ ID NO: 915419
gaaagcugcugagauuaga

SEQ ID NO: 1078415 - RNA, 19 nt, Artificial Sequence
  Description of Artificial Sequence: Synthetic oligonucleotide
  Antisense strand to SEQ ID NO: 1078414
ucuaaucucagcagcuuuc

SEQ ID NO: 1078416 - RNA, 19 nt, Artificial Sequence
  Description of Artificial Sequence: Synthetic oligonucleotide
  Sense strand starting at position 1576 of SEQ ID NO: 915419
gggauuugcuugcuuccca

SEQ ID NO: 1078417 - RNA, 19 nt, Artificial Sequence
  Description of Artificial Sequence: Synthetic oligonucleotide
  Antisense strand to SEQ ID NO: 1078416
ugggaagcaagcaaauccc

SEQ ID NO: 1078418 - RNA, 19 nt, Artificial Sequence
  Description of Artificial Sequence: Synthetic oligonucleotide
  Sense strand starting at position 1901 of SEQ ID NO: 915419
aaugcaaagcccugggaaa

SEQ ID NO: 1078419 - RNA, 19 nt, Artificial Sequence
  Description of Artificial Sequence: Synthetic oligonucleotide
  Antisense strand to SEQ ID NO: 1078418
uuucccagggcuuugcauu

SEQ ID NO: 1078420 - RNA, 19 nt, Artificial Sequence
  Description of Artificial Sequence: Synthetic oligonucleotide
  Sense strand starting at position 2134 of SEQ ID NO: 915419
acucauuggugcuuuaaag

SEQ ID NO: 1078421 - RNA, 19 nt, Artificial Sequence
  Description of Artificial Sequence: Synthetic oligonucleotide
  Antisense strand to SEQ ID NO: 1078420
cuuuaaagcaccaaugagu

SEQ ID NO: 1078422 - RNA, 19 nt, Artificial Sequence
  Description of Artificial Sequence: Synthetic oligonucleotide
  Sense strand starting at position 2194 of SEQ ID NO: 915419
ucugcccuugcuugagaaa

SEQ ID NO: 1078423 - RNA, 19 nt, Artificial Sequence
  Description of Artificial Sequence: Synthetic oligonucleotide
  Antisense strand to SEQ ID NO: 1078422
uuucucaagcaagggcaga

SEQ ID NO: 1078424 - RNA, 19 nt, Artificial Sequence
  Description of Artificial Sequence: Synthetic oligonucleotide
  Sense strand starting at position 2195 of SEQ ID NO: 915419
cugcccuugcuugagaaau

SEQ ID NO: 1078425 - RNA, 19 nt, Artificial Sequence
  Description of Artificial Sequence: Synthetic oligonucleotide
  Antisense strand to SEQ ID NO: 1078424
auuucucaagcaagggcag

SEQ ID NO: 1078426 - RNA, 19 nt, Artificial Sequence
  Description of Artificial Sequence: Synthetic oligonucleotide
  Sense strand starting at position 2427 of SEQ ID NO: 915419
uuccauauuuaguagagac

SEQ ID NO: 1078427 - RNA, 19 nt, Artificial Sequence
  Description of Artificial Sequence: Synthetic oligonucleotide
  Antisense strand to SEQ ID NO: 1078426
gucucuacuaaauauggaa

SEQ ID NO: 1078428 - RNA, 19 nt, Artificial Sequence
  Description of Artificial Sequence: Synthetic oligonucleotide
  Sense strand starting at position 2624 of SEQ ID NO: 915419
gaggcagggagaugucaau

SEQ ID NO: 1078429 - RNA, 19 nt, Artificial Sequence
  Description of Artificial Sequence: Synthetic oligonucleotide
  Antisense strand to SEQ ID NO: 1078428
auugacaucucccugccuc

SEQ ID NO: 1078430 - RNA, 19 nt, Artificial Sequence
  Description of Artificial Sequence: Synthetic oligonucleotide
  Sense strand starting at position 2657 of SEQ ID NO: 915419
auaggacauugucuuguaa

SEQ ID NO: 1078431 - RNA, 19 nt, Artificial Sequence
  Description of Artificial Sequence: Synthetic oligonucleotide
  Antisense strand to SEQ ID NO: 1078430
uuacaagacaauguccuau

SEQ ID NO: 1078432 - RNA, 19 nt, Artificial Sequence
  Description of Artificial Sequence: Synthetic oligonucleotide
  Sense strand starting at position 2661 of SEQ ID NO: 915419
gacauugucuuguaaagac

SEQ ID NO: 1078433 - RNA, 19 nt, Artificial Sequence
  Description of Artificial Sequence: Synthetic oligonucleotide
  Antisense strand to SEQ ID NO: 1078432
gucuuuacaagacaauguc

SEQ ID NO: 1078434 - RNA, 19 nt, Artificial Sequence
  Description of Artificial Sequence: Synthetic oligonucleotide
  Sense strand starting at position 2696 of SEQ ID NO: 915419
gccagaagucuugggagaa

SEQ ID NO: 1078435 - RNA, 19 nt, Artificial Sequence
  Description of Artificial Sequence: Synthetic oligonucleotide
  Antisense strand to SEQ ID NO: 1078434
uucucccaagacuucuggc

SEQ ID NO: 1078436 - RNA, 19 nt, Artificial Sequence
  Description of Artificial Sequence: Synthetic oligonucleotide
  Sense strand starting at position 2863 of SEQ ID NO: 915419
acccauugucucgguaaca

SEQ ID NO: 1078437 - RNA, 19 nt, Artificial Sequence
  Description of Artificial Sequence: Synthetic oligonucleotide
  Antisense strand to SEQ ID NO: 1078436
uguuaccgagacaaugggu

SEQ ID NO: 1078438 - RNA, 19 nt, Artificial Sequence
  Description of Artificial Sequence: Synthetic oligonucleotide
  Sense strand starting at position 2864 of SEQ ID NO: 915419
cccauugucucgguaacag

SEQ ID NO: 1078439 - RNA, 19 nt, Artificial Sequence
  Description of Artificial Sequence: Synthetic oligonucleotide
  Antisense strand to SEQ ID NO: 1078438
cuguuaccgagacaauggg

SEQ ID NO: 1078440 - RNA, 19 nt, Artificial Sequence
  Description of Artificial Sequence: Synthetic oligonucleotide
  Sense strand starting at position 3092 of SEQ ID NO: 915419
ggaguuaagucuuucccac

SEQ ID NO: 1078441 - RNA, 19 nt, Artificial Sequence
  Description of Artificial Sequence: Synthetic oligonucleotide
  Antisense strand to SEQ ID NO: 1078440
gugggaaagacuuaacucc

SEQ ID NO: 1078442 - RNA, 19 nt, Artificial Sequence
  Description of Artificial Sequence: Synthetic oligonucleotide
  Sense strand starting at position 3552 of SEQ ID NO: 915419
gaggaagccucagagcuuu

SEQ ID NO: 1078443 - RNA, 19 nt, Artificial Sequence
  Description of Artificial Sequence: Synthetic oligonucleotide
  Antisense strand to SEQ ID NO: 1078442
aaagcucugaggcuuccuc

SEQ ID NO: 1078444 - RNA, 19 nt, Artificial Sequence
  Description of Artificial Sequence: Synthetic oligonucleotide
  Sense strand starting at position 3562 of SEQ ID NO: 915419
cagagcuuucucgggcaga

SEQ ID NO: 1078445 - RNA, 19 nt, Artificial Sequence
  Description of Artificial Sequence: Synthetic oligonucleotide
  Antisense strand to SEQ ID NO: 1078444
ucugcccgagaaagcucug

SEQ ID NO: 1078446 - RNA, 19 nt, Artificial Sequence
  Description of Artificial Sequence: Synthetic oligonucleotide
  Sense strand starting at position 3637 of SEQ ID NO: 915419
aggaguguccauggucauu

SEQ ID NO: 1078447 - RNA, 19 nt, Artificial Sequence
  Description of Artificial Sequence: Synthetic oligonucleotide
  Antisense strand to SEQ ID NO: 1078446
aaugaccauggacacuccu

SEQ ID NO: 1078448 - RNA, 19 nt, Artificial Sequence
  Description of Artificial Sequence: Synthetic oligonucleotide
  Sense strand starting at position 3639 of SEQ ID NO: 915419
gaguguccauggucauuau

SEQ ID NO: 1078449 - RNA, 19 nt, Artificial Sequence
  Description of Artificial Sequence: Synthetic oligonucleotide
  Antisense strand to SEQ ID NO: 1078448
auaaugaccauggacacuc

SEQ ID NO: 1078450 - RNA, 19 nt, Artificial Sequence
  Description of Artificial Sequence: Synthetic oligonucleotide
  Sense strand starting at position 3712 of SEQ ID NO: 915419
agcagauguuaucuuauua

SEQ ID NO: 1078451 - RNA, 19 nt, Artificial Sequence
  Description of Artificial Sequence: Synthetic oligonucleotide
  Antisense strand to SEQ ID NO: 1078450
uaauaagauaacaucugcu

SEQ ID NO: 1078452 - RNA, 19 nt, Artificial Sequence
  Description of Artificial Sequence: Synthetic oligonucleotide
  Sense strand starting at position 3786 of SEQ ID NO: 915419
ggcugagucacuugucgua

SEQ ID NO: 1078453 - RNA, 19 nt, Artificial Sequence
  Description of Artificial Sequence: Synthetic oligonucleotide
  Antisense strand to SEQ ID NO: 1078452
uacgacaagugacucagcc

SEQ ID NO: 1078454 - RNA, 19 nt, Artificial Sequence
  Description of Artificial Sequence: Synthetic oligonucleotide
  Sense strand starting at position 3788 of SEQ ID NO: 915419
cugagucacuugucguaag

SEQ ID NO: 1078455 - RNA, 19 nt, Artificial Sequence
  Description of Artificial Sequence: Synthetic oligonucleotide
  Antisense strand to SEQ ID NO: 1078454
cuuacgacaagugacucag

SEQ ID NO: 1078456 - RNA, 19 nt, Artificial Sequence
  Description of Artificial Sequence: Synthetic oligonucleotide
  Sense strand starting at position 3798 of SEQ ID NO: 915419
ugucguaagugacuccauu

SEQ ID NO: 1078457 - RNA, 19 nt, Artificial Sequence
  Description of Artificial Sequence: Synthetic oligonucleotide
  Antisense strand to SEQ ID NO: 1078456
aauggagucacuuacgaca

SEQ ID NO: 1078458 - RNA, 19 nt, Artificial Sequence
  Description of Artificial Sequence: Synthetic oligonucleotide
  Sense strand starting at position 3818 of SEQ ID NO: 915419
ugaaauauuuaggaucaca

SEQ ID NO: 1078459 - RNA, 19 nt, Artificial Sequence
  Description of Artificial Sequence: Synthetic oligonucleotide
  Antisense strand to SEQ ID NO: 1078458
ugugauccuaaauauuuca

SEQ ID NO: 1078460 - RNA, 19 nt, Artificial Sequence
  Description of Artificial Sequence: Synthetic oligonucleotide
  Sense strand starting at position 3897 of SEQ ID NO: 915419
ugccuuguggcauaauaaa

SEQ ID NO: 1078461 - RNA, 19 nt, Artificial Sequence
  Description of Artificial Sequence: Synthetic oligonucleotide
  Antisense strand to SEQ ID NO: 1078460
uuuauuaugccacaaggca

SEQ ID NO: 1078462 - RNA, 19 nt, Artificial Sequence
  Description of Artificial Sequence: Synthetic oligonucleotide
  Sense strand starting at position 3935 of SEQ ID NO: 915419
auuuaugccuuguagcaua

SEQ ID NO: 1078463 - RNA, 19 nt, Artificial Sequence
  Description of Artificial Sequence: Synthetic oligonucleotide
  Antisense strand to SEQ ID NO: 1078462
uaugcuacaaggcauaaau

SEQ ID NO: 1078464 - RNA, 19 nt, Artificial Sequence
  Description of Artificial Sequence: Synthetic oligonucleotide
  Sense strand starting at position 3940 of SEQ ID NO: 915419
ugccuuguagcauaauaaa

SEQ ID NO: 1078465 - RNA, 19 nt, Artificial Sequence
  Description of Artificial Sequence: Synthetic oligonucleotide
  Antisense strand to SEQ ID NO: 1078464
uuuauuaugcuacaaggca

SEQ ID NO: 1078466 - RNA, 19 nt, Artificial Sequence
  Description of Artificial Sequence: Synthetic oligonucleotide
  Sense strand starting at position 3960 of SEQ ID NO: 915419
guuuauuuaugccuuaugu

SEQ ID NO: 1078467 - RNA, 19 nt, Artificial Sequence
  Description of Artificial Sequence: Synthetic oligonucleotide
  Antisense strand to SEQ ID NO: 1078466
acauaaggcauaaauaaac

SEQ ID NO: 1078468 - RNA, 19 nt, Artificial Sequence
  Description of Artificial Sequence: Synthetic oligonucleotide
  Sense strand starting at position 3971 of SEQ ID NO: 915419
ccuuauguggcaugauaaa

SEQ ID NO: 1078469 - RNA, 19 nt, Artificial Sequence
  Description of Artificial Sequence: Synthetic oligonucleotide
  Antisense strand to SEQ ID NO: 1078468
uuuaucaugccacauaagg

SEQ ID NO: 1078470 - RNA, 19 nt, Artificial Sequence
  Description of Artificial Sequence: Synthetic oligonucleotide
  Sense strand starting at position 1510 of SEQ ID NO: 915420
ggaguucucaggcggacuu

SEQ ID NO: 1078471 - RNA, 19 nt, Artificial Sequence
  Description of Artificial Sequence: Synthetic oligonucleotide
  Antisense strand to SEQ ID NO: 1078470
aaguccgccugagaacucc

SEQ ID NO: 1078472 - RNA, 19 nt, Artificial Sequence
  Description of Artificial Sequence: Synthetic oligonucleotide
  Sense strand starting at position 1511 of SEQ ID NO: 915420
gaguucucaggcggacuuu

SEQ ID NO: 1078473 - RNA, 19 nt, Artificial Sequence
  Description of Artificial Sequence: Synthetic oligonucleotide
  Antisense strand to SEQ ID NO: 1078472
aaaguccgccugagaacuc

SEQ ID NO: 1078474 - RNA, 19 nt, Artificial Sequence
  Description of Artificial Sequence: Synthetic oligonucleotide
  Sense strand starting at position 1576 of SEQ ID NO: 915420
ucgugugaccuugagaauc

SEQ ID NO: 1078475 - RNA, 19 nt, Artificial Sequence
  Description of Artificial Sequence: Synthetic oligonucleotide
  Antisense strand to SEQ ID NO: 1078474
gauucucaaggucacacga

SEQ ID NO: 1078476 - RNA, 19 nt, Artificial Sequence
  Description of Artificial Sequence: Synthetic oligonucleotide
  Sense strand starting at position 2506 of SEQ ID NO: 915420
gacagcugguccuugagau

SEQ ID NO: 1078477 - RNA, 19 nt, Artificial Sequence
  Description of Artificial Sequence: Synthetic oligonucleotide
  Antisense strand to SEQ ID NO: 1078476
aucucaaggaccagcuguc

SEQ ID NO: 1078478 - RNA, 19 nt, Artificial Sequence
  Description of Artificial Sequence: Synthetic oligonucleotide
  Sense strand starting at position 2507 of SEQ ID NO: 915420
acagcugguccuugagaua

SEQ ID NO: 1078479 - RNA, 19 nt, Artificial Sequence
  Description of Artificial Sequence: Synthetic oligonucleotide
  Antisense strand to SEQ ID NO: 1078478
uaucucaaggaccagcugu

SEQ ID NO: 1078480 - RNA, 19 nt, Artificial Sequence
  Description of Artificial Sequence: Synthetic oligonucleotide
  Sense strand starting at position 2542 of SEQ ID NO: 915420
aggacaagaugggaauauu

SEQ ID NO: 1078481 - RNA, 19 nt, Artificial Sequence
  Description of Artificial Sequence: Synthetic oligonucleotide
  Antisense strand to SEQ ID NO: 1078480
aauauucccaucuuguccu

SEQ ID NO: 1078482 - RNA, 19 nt, Artificial Sequence
  Description of Artificial Sequence: Synthetic oligonucleotide
  Sense strand starting at position 2589 of SEQ ID NO: 915420
gaaugaaaucguggcuauc

SEQ ID NO: 1078483 - RNA, 19 nt, Artificial Sequence
  Description of Artificial Sequence: Synthetic oligonucleotide
  Antisense strand to SEQ ID NO: 1078482
gauagccacgauuucauuc

SEQ ID NO: 1078484 - RNA, 19 nt, Artificial Sequence
  Description of Artificial Sequence: Synthetic oligonucleotide
  Sense strand starting at position 2616 of SEQ ID NO: 915420
cggccuugaugucugggaa

SEQ ID NO: 1078485 - RNA, 19 nt, Artificial Sequence
  Description of Artificial Sequence: Synthetic oligonucleotide
  Antisense strand to SEQ ID NO: 1078484
uucccagacaucaaggccg

SEQ ID NO: 1078486 - RNA, 19 nt, Artificial Sequence
  Description of Artificial Sequence: Synthetic oligonucleotide
  Sense strand starting at position 2617 of SEQ ID NO: 915420
ggccuugaugucugggaau

SEQ ID NO: 1078487 - RNA, 19 nt, Artificial Sequence
  Description of Artificial Sequence: Synthetic oligonucleotide
  Antisense strand to SEQ ID NO: 1078486
auucccagacaucaaggcc

SEQ ID NO: 1078488 - RNA, 19 nt, Artificial Sequence
  Description of Artificial Sequence: Synthetic oligonucleotide
  Sense strand starting at position 2961 of SEQ ID NO: 915420
gcaccucagucuugguaau

SEQ ID NO: 1078489 - RNA, 19 nt, Artificial Sequence
  Description of Artificial Sequence: Synthetic oligonucleotide
  Antisense strand to SEQ ID NO: 1078488
auuaccaagacugaggugc

SEQ ID NO: 1078490 - RNA, 19 nt, Artificial Sequence
  Description of Artificial Sequence: Synthetic oligonucleotide
  Sense strand starting at position 2963 of SEQ ID NO: 915420
accucagucuugguaaugu

SEQ ID NO: 1078491 - RNA, 19 nt, Artificial Sequence
  Description of Artificial Sequence: Synthetic oligonucleotide
  Antisense strand to SEQ ID NO: 1078490
acauuaccaagacugaggu

SEQ ID NO: 1078492 - RNA, 19 nt, Artificial Sequence
  Description of Artificial Sequence: Synthetic oligonucleotide
  Sense strand starting at position 2967 of SEQ ID NO: 915420
cagucuugguaauguaaga

SEQ ID NO: 1078493 - RNA, 19 nt, Artificial Sequence
  Description of Artificial Sequence: Synthetic oligonucleotide
  Antisense strand to SEQ ID NO: 1078492
ucuuacauuaccaagacug

SEQ ID NO: 1078494 - RNA, 19 nt, Artificial Sequence
  Description of Artificial Sequence: Synthetic oligonucleotide
  Sense strand starting at position 3049 of SEQ ID NO: 915420
gcgaguguucccugccgua

SEQ ID NO: 1078495 - RNA, 19 nt, Artificial Sequence
  Description of Artificial Sequence: Synthetic oligonucleotide
  Antisense strand to SEQ ID NO: 1078494
uacggcagggaacacucgc

SEQ ID NO: 1078496 - RNA, 19 nt, Artificial Sequence
  Description of Artificial Sequence: Synthetic oligonucleotide
  Sense strand starting at position 3051 of SEQ ID NO: 915420
gaguguucccugccguaac

SEQ ID NO: 1078497 - RNA, 19 nt, Artificial Sequence
  Description of Artificial Sequence: Synthetic oligonucleotide
  Antisense strand to SEQ ID NO: 1078496
guuacggcagggaacacuc

SEQ ID NO: 1078498 - RNA, 19 nt, Artificial Sequence
  Description of Artificial Sequence: Synthetic oligonucleotide
  Sense strand starting at position 3052 of SEQ ID NO: 915420
aguguucccugccguaaca

SEQ ID NO: 1078499 - RNA, 19 nt, Artificial Sequence
  Description of Artificial Sequence: Synthetic oligonucleotide
  Antisense strand to SEQ ID NO: 1078498
uguuacggcagggaacacu

SEQ ID NO: 1078500 - RNA, 19 nt, Artificial Sequence
  Description of Artificial Sequence: Synthetic oligonucleotide
  Sense strand starting at position 3077 of SEQ ID NO: 915420
cgacuuuggauccagugua

SEQ ID NO: 1078501 - RNA, 19 nt, Artificial Sequence
  Description of Artificial Sequence: Synthetic oligonucleotide
  Antisense strand to SEQ ID NO: 1078500
uacacuggauccaaagucg

SEQ ID NO: 1078502 - RNA, 19 nt, Artificial Sequence
  Description of Artificial Sequence: Synthetic oligonucleotide
  Sense strand starting at position 3535 of SEQ ID NO: 915420
ggaggcucccaaggagaau

SEQ ID NO: 1078503 - RNA, 19 nt, Artificial Sequence
  Description of Artificial Sequence: Synthetic oligonucleotide
  Antisense strand to SEQ ID NO: 1078502
auucuccuugggagccucc

SEQ ID NO: 1078504 - RNA, 19 nt, Artificial Sequence
  Description of Artificial Sequence: Synthetic oligonucleotide
  Sense strand starting at position 3852 of SEQ ID NO: 915420
cccagaucucccgggcaua

SEQ ID NO: 1078505 - RNA, 19 nt, Artificial Sequence
  Description of Artificial Sequence: Synthetic oligonucleotide
  Antisense strand to SEQ ID NO: 1078504
uaugcccgggagaucuggg

SEQ ID NO: 1078506 - RNA, 19 nt, Artificial Sequence
  Description of Artificial Sequence: Synthetic oligonucleotide
  Sense strand starting at position 3891 of SEQ ID NO: 915420
uggagaacuugccagaggu

SEQ ID NO: 1078507 - RNA, 19 nt, Artificial Sequence
  Description of Artificial Sequence: Synthetic oligonucleotide
  Antisense strand to SEQ ID NO: 1078506
accucuggcaaguucucca

SEQ ID NO: 1078508 - RNA, 19 nt, Artificial Sequence
  Description of Artificial Sequence: Synthetic oligonucleotide
  Sense strand starting at position 3908 of SEQ ID NO: 915420
guggcuauguuccggauca

SEQ ID NO: 1078509 - RNA, 19 nt, Artificial Sequence
  Description of Artificial Sequence: Synthetic oligonucleotide
  Antisense strand to SEQ ID NO: 1078508
ugauccggaacauagccac

SEQ ID NO: 1078510 - RNA, 19 nt, Artificial Sequence
  Description of Artificial Sequence: Synthetic oligonucleotide
  Sense strand starting at position 3909 of SEQ ID NO: 915420
uggcuauguuccggaucac

SEQ ID NO: 1078511 - RNA, 19 nt, Artificial Sequence
  Description of Artificial Sequence: Synthetic oligonucleotide
  Antisense strand to SEQ ID NO: 1078510
gugauccggaacauagcca

SEQ ID NO: 1078512 - RNA, 19 nt, Artificial Sequence
  Description of Artificial Sequence: Synthetic oligonucleotide
  Sense strand starting at position 3945 of SEQ ID NO: 915420
uuggguucugcaggucaaa

SEQ ID NO: 1078513 - RNA, 19 nt, Artificial Sequence
  Description of Artificial Sequence: Synthetic oligonucleotide
  Antisense strand to SEQ ID NO: 1078512
uuugaccugcagaacccaa

SEQ ID NO: 1078514 - RNA, 19 nt, Artificial Sequence
  Description of Artificial Sequence: Synthetic oligonucleotide
  Sense strand starting at position 121 of SEQ ID NO: 915421
gguguggugggcgagagau

SEQ ID NO: 1078515 - RNA, 19 nt, Artificial Sequence
  Description of Artificial Sequence: Synthetic oligonucleotide
  Antisense strand to SEQ ID NO: 1078514
aucucucgcccaccacacc

SEQ ID NO: 1078516 - RNA, 19 nt, Artificial Sequence
  Description of Artificial Sequence: Synthetic oligonucleotide
  Sense strand starting at position 247 of SEQ ID NO: 915421
aggucauuuccugagcgcu

SEQ ID NO: 1078517 - RNA, 19 nt, Artificial Sequence
  Description of Artificial Sequence: Synthetic oligonucleotide
  Antisense strand to SEQ ID NO: 1078516
agcgcucaggaaaugaccu

SEQ ID NO: 1078518 - RNA, 19 nt, Artificial Sequence
  Description of Artificial Sequence: Synthetic oligonucleotide
  Sense strand starting at position 438 of SEQ ID NO: 915421
agggaaaccucaucugucu

SEQ ID NO: 1078519 - RNA, 19 nt, Artificial Sequence
  Description of Artificial Sequence: Synthetic oligonucleotide
  Antisense strand to SEQ ID NO: 1078518
agacagaugagguuucccu

SEQ ID NO: 1078520 - RNA, 19 nt, Artificial Sequence
  Description of Artificial Sequence: Synthetic oligonucleotide
  Sense strand starting at position 488 of SEQ ID NO: 915421
ggaggaggcuuucguuaaa

SEQ ID NO: 1078521 - RNA, 19 nt, Artificial Sequence
  Description of Artificial Sequence: Synthetic oligonucleotide
  Antisense strand to SEQ ID NO: 1078520
uuuaacgaaagccuccucc

SEQ ID NO: 1078522 - RNA, 19 nt, Artificial Sequence
  Description of Artificial Sequence: Synthetic oligonucleotide
  Sense strand starting at position 491 of SEQ ID NO: 915421
ggaggcuuucguuaaagag

SEQ ID NO: 1078523 - RNA, 19 nt, Artificial Sequence
  Description of Artificial Sequence: Synthetic oligonucleotide
  Antisense strand to SEQ ID NO: 1078522
cucuuuaacgaaagccucc

SEQ ID NO: 1078524 - RNA, 19 nt, Artificial Sequence
  Description of Artificial Sequence: Synthetic oligonucleotide
  Sense strand starting at position 2209 of SEQ ID NO: 915421
ggaguucucaggcggacuu

SEQ ID NO: 1078525 - RNA, 19 nt, Artificial Sequence
  Description of Artificial Sequence: Synthetic oligonucleotide
  Antisense strand to SEQ ID NO: 1078524
aaguccgccugagaacucc

SEQ ID NO: 1078526 - RNA, 19 nt, Artificial Sequence
  Description of Artificial Sequence: Synthetic oligonucleotide
  Sense strand starting at position 2210 of SEQ ID NO: 915421
gaguucucaggcggacuuu

SEQ ID NO: 1078527 - RNA, 19 nt, Artificial Sequence
  Description of Artificial Sequence: Synthetic oligonucleotide
  Antisense strand to SEQ ID NO: 1078526
aaaguccgccugagaacuc

SEQ ID NO: 1078528 - RNA, 19 nt, Artificial Sequence
  Description of Artificial Sequence: Synthetic oligonucleotide
  Sense strand starting at position 2275 of SEQ ID NO: 915421
ucgugugaccuugagaauc

SEQ ID NO: 1078529 - RNA, 19 nt, Artificial Sequence
  Description of Artificial Sequence: Synthetic oligonucleotide
  Antisense strand to SEQ ID NO: 1078528
gauucucaaggucacacga

SEQ ID NO: 1078530 - RNA, 19 nt, Artificial Sequence
  Description of Artificial Sequence: Synthetic oligonucleotide
  Sense strand starting at position 3205 of SEQ ID NO: 915421
gacagcugguccuugagau

SEQ ID NO: 1078531 - RNA, 19 nt, Artificial Sequence
  Description of Artificial Sequence: Synthetic oligonucleotide
  Antisense strand to SEQ ID NO: 1078530
aucucaaggaccagcuguc

SEQ ID NO: 1078532 - RNA, 19 nt, Artificial Sequence
  Description of Artificial Sequence: Synthetic oligonucleotide
  Sense strand starting at position 3206 of SEQ ID NO: 915421
acagcugguccuugagaua

SEQ ID NO: 1078533 - RNA, 19 nt, Artificial Sequence
  Description of Artificial Sequence: Synthetic oligonucleotide
  Antisense strand to SEQ ID NO: 1078532
uaucucaaggaccagcugu

SEQ ID NO: 1078534 - RNA, 19 nt, Artificial Sequence
  Description of Artificial Sequence: Synthetic oligonucleotide
  Sense strand starting at position 3241 of SEQ ID NO: 915421
aggacaagaugggaauauu

SEQ ID NO: 1078535 - RNA, 19 nt, Artificial Sequence
  Description of Artificial Sequence: Synthetic oligonucleotide
  Antisense strand to SEQ ID NO: 1078534
aauauucccaucuuguccu

SEQ ID NO: 1078536 - RNA, 19 nt, Artificial Sequence
  Description of Artificial Sequence: Synthetic oligonucleotide
  Sense strand starting at position 3288 of SEQ ID NO: 915421
gaaugaaaucguggcuauc

SEQ ID NO: 1078537 - RNA, 19 nt, Artificial Sequence
  Description of Artificial Sequence: Synthetic oligonucleotide
  Antisense strand to SEQ ID NO: 1078536
gauagccacgauuucauuc

SEQ ID NO: 1078538 - RNA, 19 nt, Artificial Sequence
  Description of Artificial Sequence: Synthetic oligonucleotide
  Sense strand starting at position 3315 of SEQ ID NO: 915421
cggccuugaugucugggaa

SEQ ID NO: 1078539 - RNA, 19 nt, Artificial Sequence
  Description of Artificial Sequence: Synthetic oligonucleotide
  Antisense strand to SEQ ID NO: 1078538
uucccagacaucaaggccg

SEQ ID NO: 1078540 - RNA, 19 nt, Artificial Sequence
  Description of Artificial Sequence: Synthetic oligonucleotide
  Sense strand starting at position 3316 of SEQ ID NO: 915421
ggccuugaugucugggaau

SEQ ID NO: 1078541 - RNA, 19 nt, Artificial Sequence
  Description of Artificial Sequence: Synthetic oligonucleotide
  Antisense strand to SEQ ID NO: 1078540
auucccagacaucaaggcc

SEQ ID NO: 1078542 - RNA, 19 nt, Artificial Sequence
  Description of Artificial Sequence: Synthetic oligonucleotide
  Sense strand starting at position 3660 of SEQ ID NO: 915421
gcaccucagucuugguaau

SEQ ID NO: 1078543 - RNA, 19 nt, Artificial Sequence
  Description of Artificial Sequence: Synthetic oligonucleotide
  Antisense strand to SEQ ID NO: 1078542
auuaccaagacugaggugc

SEQ ID NO: 1078544 - RNA, 19 nt, Artificial Sequence
  Description of Artificial Sequence: Synthetic oligonucleotide
  Sense strand starting at position 3662 of SEQ ID NO: 915421
accucagucuugguaaugu

SEQ ID NO: 1078545 - RNA, 19 nt, Artificial Sequence
  Description of Artificial Sequence: Synthetic oligonucleotide
  Antisense strand to SEQ ID NO: 1078544
acauuaccaagacugaggu

SEQ ID NO: 1078546 - RNA, 19 nt, Artificial Sequence
  Description of Artificial Sequence: Synthetic oligonucleotide
  Sense strand starting at position 3666 of SEQ ID NO: 915421
cagucuugguaauguaaga

SEQ ID NO: 1078547 - RNA, 19 nt, Artificial Sequence
  Description of Artificial Sequence: Synthetic oligonucleotide
  Antisense strand to SEQ ID NO: 1078546
ucuuacauuaccaagacug

SEQ ID NO: 1078548 - RNA, 19 nt, Artificial Sequence
  Description of Artificial Sequence: Synthetic oligonucleotide
  Sense strand starting at position 3748 of SEQ ID NO: 915421
gcgaguguucccugccgua

SEQ ID NO: 1078549 - RNA, 19 nt, Artificial Sequence
  Description of Artificial Sequence: Synthetic oligonucleotide
  Antisense strand to SEQ ID NO: 1078548
uacggcagggaacacucgc

SEQ ID NO: 1078550 - RNA, 19 nt, Artificial Sequence
  Description of Artificial Sequence: Synthetic oligonucleotide
  Sense strand starting at position 3750 of SEQ ID NO: 915421
gaguguucccugccguaac

SEQ ID NO: 1078551 - RNA, 19 nt, Artificial Sequence
  Description of Artificial Sequence: Synthetic oligonucleotide
  Antisense strand to SEQ ID NO: 1078550
guuacggcagggaacacuc

SEQ ID NO: 1078552 - RNA, 19 nt, Artificial Sequence
  Description of Artificial Sequence: Synthetic oligonucleotide
  Sense strand starting at position 3751 of SEQ ID NO: 915421
aguguucccugccguaaca

SEQ ID NO: 1078553 - RNA, 19 nt, Artificial Sequence
  Description of Artificial Sequence: Synthetic oligonucleotide
  Antisense strand to SEQ ID NO: 1078552
uguuacggcagggaacacu

SEQ ID NO: 1078554 - RNA, 19 nt, Artificial Sequence
  Description of Artificial Sequence: Synthetic oligonucleotide
  Sense strand starting at position 3776 of SEQ ID NO: 915421
cgacuuuggauccagugua

SEQ ID NO: 1078555 - RNA, 19 nt, Artificial Sequence
  Description of Artificial Sequence: Synthetic oligonucleotide
  Antisense strand to SEQ ID NO: 1078554
uacacuggauccaaagucg

SEQ ID NO: 1078556 - RNA, 19 nt, Artificial Sequence
  Description of Artificial Sequence: Synthetic oligonucleotide
  Sense strand starting at position 911 of SEQ ID NO: 915422
ggaguucucaggcggacuu

SEQ ID NO: 1078557 - RNA, 19 nt, Artificial Sequence
  Description of Artificial Sequence: Synthetic oligonucleotide
  Antisense strand to SEQ ID NO: 1078556
aaguccgccugagaacucc

SEQ ID NO: 1078558 - RNA, 19 nt, Artificial Sequence
  Description of Artificial Sequence: Synthetic oligonucleotide
  Sense strand starting at position 912 of SEQ ID NO: 915422
gaguucucaggcggacuuu

SEQ ID NO: 1078559 - RNA, 19 nt, Artificial Sequence
  Description of Artificial Sequence: Synthetic oligonucleotide
  Antisense strand to SEQ ID NO: 1078558
aaaguccgccugagaacuc

SEQ ID NO: 1078560 - RNA, 19 nt, Artificial Sequence
  Description of Artificial Sequence: Synthetic oligonucleotide
  Sense strand starting at position 977 of SEQ ID NO: 915422
ucgugugaccuugagaauc

SEQ ID NO: 1078561 - RNA, 19 nt, Artificial Sequence
  Description of Artificial Sequence: Synthetic oligonucleotide
  Antisense strand to SEQ ID NO: 1078560
gauucucaaggucacacga

SEQ ID NO: 1078562 - RNA, 19 nt, Artificial Sequence
  Description of Artificial Sequence: Synthetic oligonucleotide
  Sense strand starting at position 1907 of SEQ ID NO: 915422
gacagcugguccuugagau

SEQ ID NO: 1078563 - RNA, 19 nt, Artificial Sequence
  Description of Artificial Sequence: Synthetic oligonucleotide
  Antisense strand to SEQ ID NO: 1078562
aucucaaggaccagcuguc

SEQ ID NO: 1078564 - RNA, 19 nt, Artificial Sequence
  Description of Artificial Sequence: Synthetic oligonucleotide
  Sense strand starting at position 1908 of SEQ ID NO: 915422
acagcugguccuugagaua

SEQ ID NO: 1078565 - RNA, 19 nt, Artificial Sequence
  Description of Artificial Sequence: Synthetic oligonucleotide
  Antisense strand to SEQ ID NO: 1078564
uaucucaaggaccagcugu

SEQ ID NO: 1078566 - RNA, 19 nt, Artificial Sequence
  Description of Artificial Sequence: Synthetic oligonucleotide
  Sense strand starting at position 1943 of SEQ ID NO: 915422
aggacaagaugggaauauu

SEQ ID NO: 1078567 - RNA, 19 nt, Artificial Sequence
  Description of Artificial Sequence: Synthetic oligonucleotide
  Antisense strand to SEQ ID NO: 1078566
aauauucccaucuuguccu

SEQ ID NO: 1078568 - RNA, 19 nt, Artificial Sequence
  Description of Artificial Sequence: Synthetic oligonucleotide
  Sense strand starting at position 1990 of SEQ ID NO: 915422
gaaugaaaucguggcuauc

SEQ ID NO: 1078569 - RNA, 19 nt, Artificial Sequence
  Description of Artificial Sequence: Synthetic oligonucleotide
  Antisense strand to SEQ ID NO: 1078568
gauagccacgauuucauuc

SEQ ID NO: 1078570 - RNA, 19 nt, Artificial Sequence
  Description of Artificial Sequence: Synthetic oligonucleotide
  Sense strand starting at position 2017 of SEQ ID NO: 915422
cggccuugaugucugggaa

SEQ ID NO: 1078571 - RNA, 19 nt, Artificial Sequence
  Description of Artificial Sequence: Synthetic oligonucleotide
  Antisense strand to SEQ ID NO: 1078570
uucccagacaucaaggccg

SEQ ID NO: 1078572 - RNA, 19 nt, Artificial Sequence
  Description of Artificial Sequence: Synthetic oligonucleotide
  Sense strand starting at position 2018 of SEQ ID NO: 915422
ggccuugaugucugggaau

SEQ ID NO: 1078573 - RNA, 19 nt, Artificial Sequence
  Description of Artificial Sequence: Synthetic oligonucleotide
  Antisense strand to SEQ ID NO: 1078572
auucccagacaucaaggcc

SEQ ID NO: 1078574 - RNA, 19 nt, Artificial Sequence
  Description of Artificial Sequence: Synthetic oligonucleotide
  Sense strand starting at position 2362 of SEQ ID NO: 915422
gcaccucagucuugguaau

SEQ ID NO: 1078575 - RNA, 19 nt, Artificial Sequence
  Description of Artificial Sequence: Synthetic oligonucleotide
  Antisense strand to SEQ ID NO: 1078574
auuaccaagacugaggugc

SEQ ID NO: 1078576 - RNA, 19 nt, Artificial Sequence
  Description of Artificial Sequence: Synthetic oligonucleotide
  Sense strand starting at position 2364 of SEQ ID NO: 915422
accucagucuugguaaugu

SEQ ID NO: 1078577 - RNA, 19 nt, Artificial Sequence
  Description of Artificial Sequence: Synthetic oligonucleotide
  Antisense strand to SEQ ID NO: 1078576
acauuaccaagacugaggu

SEQ ID NO: 1078578 - RNA, 19 nt, Artificial Sequence
  Description of Artificial Sequence: Synthetic oligonucleotide
  Sense strand starting at position 2368 of SEQ ID NO: 915422
cagucuugguaauguaaga

SEQ ID NO: 1078579 - RNA, 19 nt, Artificial Sequence
  Description of Artificial Sequence: Synthetic oligonucleotide
  Antisense strand to SEQ ID NO: 1078578
ucuuacauuaccaagacug

SEQ ID NO: 1078580 - RNA, 19 nt, Artificial Sequence
  Description of Artificial Sequence: Synthetic oligonucleotide
  Sense strand starting at position 2450 of SEQ ID NO: 915422
gcgaguguucccugccgua

SEQ ID NO: 1078581 - RNA, 19 nt, Artificial Sequence
  Description of Artificial Sequence: Synthetic oligonucleotide
  Antisense strand to SEQ ID NO: 1078580
uacggcagggaacacucgc

SEQ ID NO: 1078582 - RNA, 19 nt, Artificial Sequence
  Description of Artificial Sequence: Synthetic oligonucleotide
  Sense strand starting at position 2452 of SEQ ID NO: 915422
gaguguucccugccguaac

SEQ ID NO: 1078583 - RNA, 19 nt, Artificial Sequence
  Description of Artificial Sequence: Synthetic oligonucleotide
  Antisense strand to SEQ ID NO: 1078582
guuacggcagggaacacuc

SEQ ID NO: 1078584 - RNA, 19 nt, Artificial Sequence
  Description of Artificial Sequence: Synthetic oligonucleotide
  Sense strand starting at position 2453 of SEQ ID NO: 915422
aguguucccugccguaaca

SEQ ID NO: 1078585 - RNA, 19 nt, Artificial Sequence
  Description of Artificial Sequence: Synthetic oligonucleotide
  Antisense strand to SEQ ID NO: 1078584
uguuacggcagggaacacu

SEQ ID NO: 1078586 - RNA, 19 nt, Artificial Sequence
  Description of Artificial Sequence: Synthetic oligonucleotide
  Sense strand starting at position 2478 of SEQ ID NO: 915422
cgacuuuggauccagugua

SEQ ID NO: 1078587 - RNA, 19 nt, Artificial Sequence
  Description of Artificial Sequence: Synthetic oligonucleotide
  Antisense strand to SEQ ID NO: 1078586
uacacuggauccaaagucg

SEQ ID NO: 1078588 - RNA, 19 nt, Artificial Sequence
  Description of Artificial Sequence: Synthetic oligonucleotide
  Sense strand starting at position 2936 of SEQ ID NO: 915422
ggaggcucccaaggagaau

SEQ ID NO: 1078589 - RNA, 19 nt, Artificial Sequence
  Description of Artificial Sequence: Synthetic oligonucleotide
  Antisense strand to SEQ ID NO: 1078588
auucuccuugggagccucc

SEQ ID NO: 1078590 - RNA, 19 nt, Artificial Sequence
  Description of Artificial Sequence: Synthetic oligonucleotide
  Sense strand starting at position 3253 of SEQ ID NO: 915422
cccagaucucccgggcaua

SEQ ID NO: 1078591 - RNA, 19 nt, Artificial Sequence
  Description of Artificial Sequence: Synthetic oligonucleotide
  Antisense strand to SEQ ID NO: 1078590
uaugcccgggagaucuggg

SEQ ID NO: 1078592 - RNA, 19 nt, Artificial Sequence
  Description of Artificial Sequence: Synthetic oligonucleotide
  Sense strand starting at position 3292 of SEQ ID NO: 915422
uggagaacuugccagaggu

SEQ ID NO: 1078593 - RNA, 19 nt, Artificial Sequence
  Description of Artificial Sequence: Synthetic oligonucleotide
  Antisense strand to SEQ ID NO: 1078592
accucuggcaaguucucca

SEQ ID NO: 1078594 - RNA, 19 nt, Artificial Sequence
  Description of Artificial Sequence: Synthetic oligonucleotide
  Sense strand starting at position 3309 of SEQ ID NO: 915422
guggcuauguuccggauca

SEQ ID NO: 1078595 - RNA, 19 nt, Artificial Sequence
  Description of Artificial Sequence: Synthetic oligonucleotide
  Antisense strand to SEQ ID NO: 1078594
ugauccggaacauagccac

SEQ ID NO: 1078596 - RNA, 19 nt, Artificial Sequence
  Description of Artificial Sequence: Synthetic oligonucleotide
  Sense strand starting at position 3310 of SEQ ID NO: 915422
uggcuauguuccggaucac

SEQ ID NO: 1078597 - RNA, 19 nt, Artificial Sequence
  Description of Artificial Sequence: Synthetic oligonucleotide
  Antisense strand to SEQ ID NO: 1078596
gugauccggaacauagcca

SEQ ID NO: 1078598 - RNA, 19 nt, Artificial Sequence
  Description of Artificial Sequence: Synthetic oligonucleotide
  Sense strand starting at position 3346 of SEQ ID NO: 915422
uuggguucugcaggucaaa

SEQ ID NO: 1078599 - RNA, 19 nt, Artificial Sequence
  Description of Artificial Sequence: Synthetic oligonucleotide
  Antisense strand to SEQ ID NO: 1078598
uuugaccugcagaacccaa

SEQ ID NO: 1078600 - RNA, 19 nt, Artificial Sequence
  Description of Artificial Sequence: Synthetic oligonucleotide
  Sense strand starting at position 3478 of SEQ ID NO: 915422
cugacuuucuccuggcauu

SEQ ID NO: 1078601 - RNA, 19 nt, Artificial Sequence
  Description of Artificial Sequence: Synthetic oligonucleotide
  Antisense strand to SEQ ID NO: 1078600
aaugccaggagaaagucag

SEQ ID NO: 1078602 - RNA, 19 nt, Artificial Sequence
  Description of Artificial Sequence: Synthetic oligonucleotide
  Sense strand starting at position 3479 of SEQ ID NO: 915422
ugacuuucuccuggcauuu

SEQ ID NO: 1078603 - RNA, 19 nt, Artificial Sequence
  Description of Artificial Sequence: Synthetic oligonucleotide
  Antisense strand to SEQ ID NO: 1078602
aaaugccaggagaaaguca

SEQ ID NO: 1078604 - RNA, 19 nt, Artificial Sequence
  Description of Artificial Sequence: Synthetic oligonucleotide
  Sense strand starting at position 3510 of SEQ ID NO: 915422
auaaucugcgaagacuuua

SEQ ID NO: 1078605 - RNA, 19 nt, Artificial Sequence
  Description of Artificial Sequence: Synthetic oligonucleotide
  Antisense strand to SEQ ID NO: 1078604
uaaagucuucgcagauuau

SEQ ID NO: 1078606 - RNA, 19 nt, Artificial Sequence
  Description of Artificial Sequence: Synthetic oligonucleotide
  Sense strand starting at position 3515 of SEQ ID NO: 915422
cugcgaagacuuuaaaccu

SEQ ID NO: 1078607 - RNA, 19 nt, Artificial Sequence
  Description of Artificial Sequence: Synthetic oligonucleotide
  Antisense strand to SEQ ID NO: 1078606
agguuuaaagucuucgcag

SEQ ID NO: 1078608 - RNA, 19 nt, Artificial Sequence
  Description of Artificial Sequence: Synthetic oligonucleotide
  Sense strand starting at position 3541 of SEQ ID NO: 915422
aaaggauaggcaugugcua

SEQ ID NO: 1078609 - RNA, 19 nt, Artificial Sequence
  Description of Artificial Sequence: Synthetic oligonucleotide
  Antisense strand to SEQ ID NO: 1078608
uagcacaugccuauccuuu

SEQ ID NO: 1078610 - RNA, 19 nt, Artificial Sequence
  Description of Artificial Sequence: Synthetic oligonucleotide
  Sense strand starting at position 3543 of SEQ ID NO: 915422
aggauaggcaugugcuauu

SEQ ID NO: 1078611 - RNA, 19 nt, Artificial Sequence
  Description of Artificial Sequence: Synthetic oligonucleotide
  Antisense strand to SEQ ID NO: 1078610
aauagcacaugccuauccu

SEQ ID NO: 1078612 - RNA, 19 nt, Artificial Sequence
  Description of Artificial Sequence: Synthetic oligonucleotide
  Sense strand starting at position 3570 of SEQ ID NO: 915422
gggcuaggauaaguucuau

SEQ ID NO: 1078613 - RNA, 19 nt, Artificial Sequence
  Description of Artificial Sequence: Synthetic oligonucleotide
  Antisense strand to SEQ ID NO: 1078612
auagaacuuauccuagccc

SEQ ID NO: 1078614 - RNA, 19 nt, Artificial Sequence
  Description of Artificial Sequence: Synthetic oligonucleotide
  Sense strand starting at position 3576 of SEQ ID NO: 915422
ggauaaguucuaugagguc

SEQ ID NO: 1078615 - RNA, 19 nt, Artificial Sequence
  Description of Artificial Sequence: Synthetic oligonucleotide
  Antisense strand to SEQ ID NO: 1078614
gaccucauagaacuuaucc

SEQ ID NO: 1078616 - RNA, 19 nt, Artificial Sequence
  Description of Artificial Sequence: Synthetic oligonucleotide
  Sense strand starting at position 3640 of SEQ ID NO: 915422
gggucaugcugcuuccaaa

SEQ ID NO: 1078617 - RNA, 19 nt, Artificial Sequence
  Description of Artificial Sequence: Synthetic oligonucleotide
  Antisense strand to SEQ ID NO: 1078616
uuuggaagcagcaugaccc

SEQ ID NO: 1078618 - RNA, 19 nt, Artificial Sequence
  Description of Artificial Sequence: Synthetic oligonucleotide
  Sense strand starting at position 3739 of SEQ ID NO: 915422
cugagugauucccgggcca

SEQ ID NO: 1078619 - RNA, 19 nt, Artificial Sequence
  Description of Artificial Sequence: Synthetic oligonucleotide
  Antisense strand to SEQ ID NO: 1078618
uggcccgggaaucacucag

SEQ ID NO: 1078620 - RNA, 19 nt, Artificial Sequence
  Description of Artificial Sequence: Synthetic oligonucleotide
  Sense strand starting at position 3741 of SEQ ID NO: 915422
gagugauucccgggccaac

SEQ ID NO: 1078621 - RNA, 19 nt, Artificial Sequence
  Description of Artificial Sequence: Synthetic oligonucleotide
  Antisense strand to SEQ ID NO: 1078620
guuggcccgggaaucacuc

SEQ ID NO: 1078622 - RNA, 19 nt, Artificial Sequence
  Description of Artificial Sequence: Synthetic oligonucleotide
  Sense strand starting at position 3769 of SEQ ID NO: 915422
ggucauggugcaugagcau

SEQ ID NO: 1078623 - RNA, 19 nt, Artificial Sequence
  Description of Artificial Sequence: Synthetic oligonucleotide
  Antisense strand to SEQ ID NO: 1078622
augcucaugcaccaugacc

SEQ ID NO: 1078624 - RNA, 19 nt, Artificial Sequence
  Description of Artificial Sequence: Synthetic oligonucleotide
  Sense strand starting at position 3778 of SEQ ID NO: 915422
gcaugagcauauugacaau

SEQ ID NO: 1078625 - RNA, 19 nt, Artificial Sequence
  Description of Artificial Sequence: Synthetic oligonucleotide
  Antisense strand to SEQ ID NO: 1078624
auugucaauaugcucaugc

SEQ ID NO: 1078626 - RNA, 19 nt, Artificial Sequence
  Description of Artificial Sequence: Synthetic oligonucleotide
  Sense strand starting at position 3784 of SEQ ID NO: 915422
gcauauugacaauguccuu

SEQ ID NO: 1078627 - RNA, 19 nt, Artificial Sequence
  Description of Artificial Sequence: Synthetic oligonucleotide
  Antisense strand to SEQ ID NO: 1078626
aaggacauugucaauaugc

SEQ ID NO: 1078628 - RNA, 19 nt, Artificial Sequence
  Description of Artificial Sequence: Synthetic oligonucleotide
  Sense strand starting at position 3789 of SEQ ID NO: 915422
uugacaauguccuugaaca

SEQ ID NO: 1078629 - RNA, 19 nt, Artificial Sequence
  Description of Artificial Sequence: Synthetic oligonucleotide
  Antisense strand to SEQ ID NO: 1078628
uguucaaggacauugucaa

SEQ ID NO: 1078630 - RNA, 19 nt, Artificial Sequence
  Description of Artificial Sequence: Synthetic oligonucleotide
  Sense strand starting at position 3790 of SEQ ID NO: 915422
ugacaauguccuugaacag

SEQ ID NO: 1078631 - RNA, 19 nt, Artificial Sequence
  Description of Artificial Sequence: Synthetic oligonucleotide
  Antisense strand to SEQ ID NO: 1078630
cuguucaaggacauuguca

SEQ ID NO: 1078632 - RNA, 19 nt, Artificial Sequence
  Description of Artificial Sequence: Synthetic oligonucleotide
  Sense strand starting at position 3868 of SEQ ID NO: 915422
caggaaugcgaucguagua

SEQ ID NO: 1078633 - RNA, 19 nt, Artificial Sequence
  Description of Artificial Sequence: Synthetic oligonucleotide
  Antisense strand to SEQ ID NO: 1078632
uacuacgaucgcauuccug

SEQ ID NO: 1078634 - RNA, 19 nt, Artificial Sequence
  Description of Artificial Sequence: Synthetic oligonucleotide
  Sense strand starting at position 3880 of SEQ ID NO: 915422
cguaguacuccugggcauu

SEQ ID NO: 1078635 - RNA, 19 nt, Artificial Sequence
  Description of Artificial Sequence: Synthetic oligonucleotide
  Antisense strand to SEQ ID NO: 1078634
aaugcccaggaguacuacg

SEQ ID NO: 1078636 - RNA, 19 nt, Artificial Sequence
  Description of Artificial Sequence: Synthetic oligonucleotide
  Sense strand starting at position 2400 of SEQ ID NO: 915423
gugcgucuccuuuggccua

SEQ ID NO: 1078637 - RNA, 19 nt, Artificial Sequence
  Description of Artificial Sequence: Synthetic oligonucleotide
  Antisense strand to SEQ ID NO: 1078636
uaggccaaaggagacgcac

SEQ ID NO: 1078638 - RNA, 19 nt, Artificial Sequence
  Description of Artificial Sequence: Synthetic oligonucleotide
  Sense strand starting at position 2451 of SEQ ID NO: 915423
gacgcaucgugacuuuauc

SEQ ID NO: 1078639 - RNA, 19 nt, Artificial Sequence
  Description of Artificial Sequence: Synthetic oligonucleotide
  Antisense strand to SEQ ID NO: 1078638
gauaaagucacgaugcguc

SEQ ID NO: 1078640 - RNA, 19 nt, Artificial Sequence
  Description of Artificial Sequence: Synthetic oligonucleotide
  Sense strand starting at position 2457 of SEQ ID NO: 915423
ucgugacuuuaucuucuca

SEQ ID NO: 1078641 - RNA, 19 nt, Artificial Sequence
  Description of Artificial Sequence: Synthetic oligonucleotide
  Antisense strand to SEQ ID NO: 1078640
ugagaagauaaagucacga

SEQ ID NO: 1078642 - RNA, 19 nt, Artificial Sequence
  Description of Artificial Sequence: Synthetic oligonucleotide
  Sense strand starting at position 2459 of SEQ ID NO: 915423
gugacuuuaucuucucauc

SEQ ID NO: 1078643 - RNA, 19 nt, Artificial Sequence
  Description of Artificial Sequence: Synthetic oligonucleotide
  Antisense strand to SEQ ID NO: 1078642
gaugagaagauaaagucac

SEQ ID NO: 1078644 - RNA, 19 nt, Artificial Sequence
  Description of Artificial Sequence: Synthetic oligonucleotide
  Sense strand starting at position 2677 of SEQ ID NO: 915423
uugcauaucuaaggagaac

SEQ ID NO: 1078645 - RNA, 19 nt, Artificial Sequence
  Description of Artificial Sequence: Synthetic oligonucleotide
  Antisense strand to SEQ ID NO: 1078644
guucuccuuagauaugcaa

SEQ ID NO: 1078646 - RNA, 19 nt, Artificial Sequence
  Description of Artificial Sequence: Synthetic oligonucleotide
  Sense strand starting at position 2692 of SEQ ID NO: 915423
gaacaagauucggcaaugu

SEQ ID NO: 1078647 - RNA, 19 nt, Artificial Sequence
  Description of Artificial Sequence: Synthetic oligonucleotide
  Antisense strand to SEQ ID NO: 1078646
acauugccgaaucuuguuc

SEQ ID NO: 1078648 - RNA, 19 nt, Artificial Sequence
  Description of Artificial Sequence: Synthetic oligonucleotide
  Sense strand starting at position 2705 of SEQ ID NO: 915423
caaugugcuccgggagcaa

SEQ ID NO: 1078649 - RNA, 19 nt, Artificial Sequence
  Description of Artificial Sequence: Synthetic oligonucleotide
  Antisense strand to SEQ ID NO: 1078648
uugcucccggagcacauug

SEQ ID NO: 1078650 - RNA, 19 nt, Artificial Sequence
  Description of Artificial Sequence: Synthetic oligonucleotide
  Sense strand starting at position 2859 of SEQ ID NO: 915423
ccucauucuagugggaguu

SEQ ID NO: 1078651 - RNA, 19 nt, Artificial Sequence
  Description of Artificial Sequence: Synthetic oligonucleotide
  Antisense strand to SEQ ID NO: 1078650
aacucccacuagaaugagg

SEQ ID NO: 1078652 - RNA, 19 nt, Artificial Sequence
  Description of Artificial Sequence: Synthetic oligonucleotide
  Sense strand starting at position 2993 of SEQ ID NO: 915423
caagcuuuacagugcaaga

SEQ ID NO: 1078653 - RNA, 19 nt, Artificial Sequence
  Description of Artificial Sequence: Synthetic oligonucleotide
  Antisense strand to SEQ ID NO: 1078652
ucuugcacuguaaagcuug

SEQ ID NO: 1078654 - RNA, 19 nt, Artificial Sequence
  Description of Artificial Sequence: Synthetic oligonucleotide
  Sense strand starting at position 2995 of SEQ ID NO: 915423
agcuuuacagugcaagaaa

SEQ ID NO: 1078655 - RNA, 19 nt, Artificial Sequence
  Description of Artificial Sequence: Synthetic oligonucleotide
  Antisense strand to SEQ ID NO: 1078654
uuucuugcacuguaaagcu

SEQ ID NO: 1078656 - RNA, 19 nt, Artificial Sequence
  Description of Artificial Sequence: Synthetic oligonucleotide
  Sense strand starting at position 3077 of SEQ ID NO: 915423
gugcaagguuugcccugaa

SEQ ID NO: 1078657 - RNA, 19 nt, Artificial Sequence
  Description of Artificial Sequence: Synthetic oligonucleotide
  Antisense strand to SEQ ID NO: 1078656
uucagggcaaaccuugcac

SEQ ID NO: 1078658 - RNA, 19 nt, Artificial Sequence
  Description of Artificial Sequence: Synthetic oligonucleotide
  Sense strand starting at position 3080 of SEQ ID NO: 915423
caagguuugcccugaacuu

SEQ ID NO: 1078659 - RNA, 19 nt, Artificial Sequence
  Description of Artificial Sequence: Synthetic oligonucleotide
  Antisense strand to SEQ ID NO: 1078658
aaguucagggcaaaccuug

SEQ ID NO: 1078660 - RNA, 19 nt, Artificial Sequence
  Description of Artificial Sequence: Synthetic oligonucleotide
  Sense strand starting at position 3106 of SEQ ID NO: 915423
ugagcacagguguaauaau

SEQ ID NO: 1078661 - RNA, 19 nt, Artificial Sequence
  Description of Artificial Sequence: Synthetic oligonucleotide
  Antisense strand to SEQ ID NO: 1078660
auuauuacaccugugcuca

SEQ ID NO: 1078662 - RNA, 19 nt, Artificial Sequence
  Description of Artificial Sequence: Synthetic oligonucleotide
  Sense strand starting at position 3115 of SEQ ID NO: 915423
guguaauaauaagcucacu

SEQ ID NO: 1078663 - RNA, 19 nt, Artificial Sequence
  Description of Artificial Sequence: Synthetic oligonucleotide
  Antisense strand to SEQ ID NO: 1078662
agugagcuuauuauuacac

SEQ ID NO: 1078664 - RNA, 19 nt, Artificial Sequence
  Description of Artificial Sequence: Synthetic oligonucleotide
  Sense strand starting at position 3241 of SEQ ID NO: 915423
gguccuacgcuagggauuu

SEQ ID NO: 1078665 - RNA, 19 nt, Artificial Sequence
  Description of Artificial Sequence: Synthetic oligonucleotide
  Antisense strand to SEQ ID NO: 1078664
aaaucccuagcguaggacc

SEQ ID NO: 1078666 - RNA, 19 nt, Artificial Sequence
  Description of Artificial Sequence: Synthetic oligonucleotide
  Sense strand starting at position 3265 of SEQ ID NO: 915423
ugaacuaaucgccaguucu

SEQ ID NO: 1078667 - RNA, 19 nt, Artificial Sequence
  Description of Artificial Sequence: Synthetic oligonucleotide
  Antisense strand to SEQ ID NO: 1078666
agaacuggcgauuaguuca

SEQ ID NO: 1078668 - RNA, 19 nt, Artificial Sequence
  Description of Artificial Sequence: Synthetic oligonucleotide
  Sense strand starting at position 3276 of SEQ ID NO: 915423
ccaguucuggcuugcaaag

SEQ ID NO: 1078669 - RNA, 19 nt, Artificial Sequence
  Description of Artificial Sequence: Synthetic oligonucleotide
  Antisense strand to SEQ ID NO: 1078668
cuuugcaagccagaacugg

SEQ ID NO: 1078670 - RNA, 19 nt, Artificial Sequence
  Description of Artificial Sequence: Synthetic oligonucleotide
  Sense strand starting at position 3345 of SEQ ID NO: 915423
uguccuguguccucugaua

SEQ ID NO: 1078671 - RNA, 19 nt, Artificial Sequence
  Description of Artificial Sequence: Synthetic oligonucleotide
  Antisense strand to SEQ ID NO: 1078670
uaucagaggacacaggaca

SEQ ID NO: 1078672 - RNA, 19 nt, Artificial Sequence
  Description of Artificial Sequence: Synthetic oligonucleotide
  Sense strand starting at position 3347 of SEQ ID NO: 915423
uccuguguccucugauaag

SEQ ID NO: 1078673 - RNA, 19 nt, Artificial Sequence
  Description of Artificial Sequence: Synthetic oligonucleotide
  Antisense strand to SEQ ID NO: 1078672
cuuaucagaggacacagga

SEQ ID NO: 1078674 - RNA, 19 nt, Artificial Sequence
  Description of Artificial Sequence: Synthetic oligonucleotide
  Sense strand starting at position 3350 of SEQ ID NO: 915423
uguguccucugauaaggga

SEQ ID NO: 1078675 - RNA, 19 nt, Artificial Sequence
  Description of Artificial Sequence: Synthetic oligonucleotide
  Antisense strand to SEQ ID NO: 1078674
ucccuuaucagaggacaca

SEQ ID NO: 1078676 - RNA, 19 nt, Artificial Sequence
  Description of Artificial Sequence: Synthetic oligonucleotide
  Sense strand starting at position 3423 of SEQ ID NO: 915423
aaggaaggcuuucccuaga

SEQ ID NO: 1078677 - RNA, 19 nt, Artificial Sequence
  Description of Artificial Sequence: Synthetic oligonucleotide
  Antisense strand to SEQ ID NO: 1078676
ucuagggaaagccuuccuu

SEQ ID NO: 1078678 - RNA, 19 nt, Artificial Sequence
  Description of Artificial Sequence: Synthetic oligonucleotide
  Sense strand starting at position 3437 of SEQ ID NO: 915423
cuagaagagguguguuaga

SEQ ID NO: 1078679 - RNA, 19 nt, Artificial Sequence
  Description of Artificial Sequence: Synthetic oligonucleotide
  Antisense strand to SEQ ID NO: 1078678
ucuaacacaccucuucuag

SEQ ID NO: 1078680 - RNA, 19 nt, Artificial Sequence
  Description of Artificial Sequence: Synthetic oligonucleotide
  Sense strand starting at position 3442 of SEQ ID NO: 915423
agagguguguuagacaaga

SEQ ID NO: 1078681 - RNA, 19 nt, Artificial Sequence
  Description of Artificial Sequence: Synthetic oligonucleotide
  Antisense strand to SEQ ID NO: 1078680
ucuugucuaacacaccucu

SEQ ID NO: 1078682 - RNA, 19 nt, Artificial Sequence
  Description of Artificial Sequence: Synthetic oligonucleotide
  Sense strand starting at position 3469 of SEQ ID NO: 915423
accauuagagucugccaaa

SEQ ID NO: 1078683 - RNA, 19 nt, Artificial Sequence
  Description of Artificial Sequence: Synthetic oligonucleotide
  Antisense strand to SEQ ID NO: 1078682
uuuggcagacucuaauggu

SEQ ID NO: 1078684 - RNA, 19 nt, Artificial Sequence
  Description of Artificial Sequence: Synthetic oligonucleotide
  Sense strand starting at position 3518 of SEQ ID NO: 915423
gcauucuagaagggauugu

SEQ ID NO: 1078685 - RNA, 19 nt, Artificial Sequence
  Description of Artificial Sequence: Synthetic oligonucleotide
  Antisense strand to SEQ ID NO: 1078684
acaaucccuucuagaaugc

SEQ ID NO: 1078686 - RNA, 19 nt, Artificial Sequence
  Description of Artificial Sequence: Synthetic oligonucleotide
  Sense strand starting at position 3536 of SEQ ID NO: 915423
uagugcagucaggaaucaa

SEQ ID NO: 1078687 - RNA, 19 nt, Artificial Sequence
  Description of Artificial Sequence: Synthetic oligonucleotide
  Antisense strand to SEQ ID NO: 1078686
uugauuccugacugcacua

SEQ ID NO: 1078688 - RNA, 19 nt, Artificial Sequence
  Description of Artificial Sequence: Synthetic oligonucleotide
  Sense strand starting at position 3548 of SEQ ID NO: 915423
gaaucaagagcauguuagu

SEQ ID NO: 1078689 - RNA, 19 nt, Artificial Sequence
  Description of Artificial Sequence: Synthetic oligonucleotide
  Antisense strand to SEQ ID NO: 1078688
acuaacaugcucuugauuc

SEQ ID NO: 1078690 - RNA, 19 nt, Artificial Sequence
  Description of Artificial Sequence: Synthetic oligonucleotide
  Sense strand starting at position 3551 of SEQ ID NO: 915423
ucaagagcauguuaguuau

SEQ ID NO: 1078691 - RNA, 19 nt, Artificial Sequence
  Description of Artificial Sequence: Synthetic oligonucleotide
  Antisense strand to SEQ ID NO: 1078690
auaacuaacaugcucuuga

SEQ ID NO: 1078692 - RNA, 19 nt, Artificial Sequence
  Description of Artificial Sequence: Synthetic oligonucleotide
  Sense strand starting at position 3578 of SEQ ID NO: 915423
ucaggaauuugagaggagu

SEQ ID NO: 1078693 - RNA, 19 nt, Artificial Sequence
  Description of Artificial Sequence: Synthetic oligonucleotide
  Antisense strand to SEQ ID NO: 1078692
acuccucucaaauuccuga

SEQ ID NO: 1078694 - RNA, 19 nt, Artificial Sequence
  Description of Artificial Sequence: Synthetic oligonucleotide
  Sense strand starting at position 3651 of SEQ ID NO: 915423
auuccaugcuuauguauuu

SEQ ID NO: 1078695 - RNA, 19 nt, Artificial Sequence
  Description of Artificial Sequence: Synthetic oligonucleotide
  Antisense strand to SEQ ID NO: 1078694
aaauacauaagcauggaau

SEQ ID NO: 1078696 - RNA, 19 nt, Artificial Sequence
  Description of Artificial Sequence: Synthetic oligonucleotide
  Sense strand starting at position 3668 of SEQ ID NO: 915423
uuggauuuaucuuaaagac

SEQ ID NO: 1078697 - RNA, 19 nt, Artificial Sequence
  Description of Artificial Sequence: Synthetic oligonucleotide
  Antisense strand to SEQ ID NO: 1078696
gucuuuaagauaaauccaa

SEQ ID NO: 1078698 - RNA, 19 nt, Artificial Sequence
  Description of Artificial Sequence: Synthetic oligonucleotide
  Sense strand starting at position 3692 of SEQ ID NO: 915423
gaacccauagagugcaaau

SEQ ID NO: 1078699 - RNA, 19 nt, Artificial Sequence
  Description of Artificial Sequence: Synthetic oligonucleotide
  Antisense strand to SEQ ID NO: 1078698
auuugcacucuauggguuc

SEQ ID NO: 1078700 - RNA, 19 nt, Artificial Sequence
  Description of Artificial Sequence: Synthetic oligonucleotide
  Sense strand starting at position 3775 of SEQ ID NO: 915423
guauuaaucucucugagcu

SEQ ID NO: 1078701 - RNA, 19 nt, Artificial Sequence
  Description of Artificial Sequence: Synthetic oligonucleotide
  Antisense strand to SEQ ID NO: 1078700
agcucagagagauuaauac

SEQ ID NO: 1078702 - RNA, 19 nt, Artificial Sequence
  Description of Artificial Sequence: Synthetic oligonucleotide
  Sense strand starting at position 3803 of SEQ ID NO: 915423
uggucugugaaauggugau

SEQ ID NO: 1078703 - RNA, 19 nt, Artificial Sequence
  Description of Artificial Sequence: Synthetic oligonucleotide
  Antisense strand to SEQ ID NO: 1078702
aucaccauuucacagacca

SEQ ID NO: 1078704 - RNA, 19 nt, Artificial Sequence
  Description of Artificial Sequence: Synthetic oligonucleotide
  Sense strand starting at position 3809 of SEQ ID NO: 915423
gugaaauggugauaauaaa

SEQ ID NO: 1078705 - RNA, 19 nt, Artificial Sequence
  Description of Artificial Sequence: Synthetic oligonucleotide
  Antisense strand to SEQ ID NO: 1078704
uuuauuaucaccauuucac

SEQ ID NO: 1078706 - RNA, 19 nt, Artificial Sequence
  Description of Artificial Sequence: Synthetic oligonucleotide
  Sense strand starting at position 3862 of SEQ ID NO: 915423
cugccugggccugguaaau

SEQ ID NO: 1078707 - RNA, 19 nt, Artificial Sequence
  Description of Artificial Sequence: Synthetic oligonucleotide
  Antisense strand to SEQ ID NO: 1078706
auuuaccaggcccaggcag

SEQ ID NO: 1078708 - RNA, 19 nt, Artificial Sequence
  Description of Artificial Sequence: Synthetic oligonucleotide
  Sense strand starting at position 3902 of SEQ ID NO: 915423
guuggaaaggucggaggua

SEQ ID NO: 1078709 - RNA, 19 nt, Artificial Sequence
  Description of Artificial Sequence: Synthetic oligonucleotide
  Antisense strand to SEQ ID NO: 1078708
uaccuccgaccuuuccaac

SEQ ID NO: 1078710 - RNA, 19 nt, Artificial Sequence
  Description of Artificial Sequence: Synthetic oligonucleotide
  Sense strand starting at position 3903 of SEQ ID NO: 915423
uuggaaaggucggagguau

SEQ ID NO: 1078711 - RNA, 19 nt, Artificial Sequence
  Description of Artificial Sequence: Synthetic oligonucleotide
  Antisense strand to SEQ ID NO: 1078710
auaccuccgaccuuuccaa

SEQ ID NO: 1078712 - RNA, 19 nt, Artificial Sequence
  Description of Artificial Sequence: Synthetic oligonucleotide
  Sense strand starting at position 3905 of SEQ ID NO: 915423
ggaaaggucggagguauau

SEQ ID NO: 1078713 - RNA, 19 nt, Artificial Sequence
  Description of Artificial Sequence: Synthetic oligonucleotide
  Antisense strand to SEQ ID NO: 1078712
auauaccuccgaccuuucc

SEQ ID NO: 1078714 - RNA, 19 nt, Artificial Sequence
  Description of Artificial Sequence: Synthetic oligonucleotide
  Sense strand starting at position 3907 of SEQ ID NO: 915423
aaaggucggagguauauua

SEQ ID NO: 1078715 - RNA, 19 nt, Artificial Sequence
  Description of Artificial Sequence: Synthetic oligonucleotide
  Antisense strand to SEQ ID NO: 1078714
uaauauaccuccgaccuuu

SEQ ID NO: 1078716 - RNA, 19 nt, Artificial Sequence
  Description of Artificial Sequence: Synthetic oligonucleotide
  Sense strand starting at position 137 of SEQ ID NO: 915424
cccguaucugcccauauca

SEQ ID NO: 1078717 - RNA, 19 nt, Artificial Sequence
  Description of Artificial Sequence: Synthetic oligonucleotide
  Antisense strand to SEQ ID NO: 1078716
ugauaugggcagauacggg

SEQ ID NO: 1078718 - RNA, 19 nt, Artificial Sequence
  Description of Artificial Sequence: Synthetic oligonucleotide
  Sense strand starting at position 885 of SEQ ID NO: 915424
cagucuggccugggaagaa

SEQ ID NO: 1078719 - RNA, 19 nt, Artificial Sequence
  Description of Artificial Sequence: Synthetic oligonucleotide
  Antisense strand to SEQ ID NO: 1078718
uucuucccaggccagacug

SEQ ID NO: 1078720 - RNA, 19 nt, Artificial Sequence
  Description of Artificial Sequence: Synthetic oligonucleotide
  Sense strand starting at position 948 of SEQ ID NO: 915424
gcuugaagaguugggaaga

SEQ ID NO: 1078721 - RNA, 19 nt, Artificial Sequence
  Description of Artificial Sequence: Synthetic oligonucleotide
  Antisense strand to SEQ ID NO: 1078720
ucuucccaacucuucaagc

SEQ ID NO: 1078722 - RNA, 19 nt, Artificial Sequence
  Description of Artificial Sequence: Synthetic oligonucleotide
  Sense strand starting at position 949 of SEQ ID NO: 915424
cuugaagaguugggaagaa

SEQ ID NO: 1078723 - RNA, 19 nt, Artificial Sequence
  Description of Artificial Sequence: Synthetic oligonucleotide
  Antisense strand to SEQ ID NO: 1078722
uucuucccaacucuucaag

SEQ ID NO: 1078724 - RNA, 19 nt, Artificial Sequence
  Description of Artificial Sequence: Synthetic oligonucleotide
  Sense strand starting at position 1076 of SEQ ID NO: 915424
ucaccuauugcuugggcua

SEQ ID NO: 1078725 - RNA, 19 nt, Artificial Sequence
  Description of Artificial Sequence: Synthetic oligonucleotide
  Antisense strand to SEQ ID NO: 1078724
uagcccaagcaauagguga

SEQ ID NO: 1078726 - RNA, 19 nt, Artificial Sequence
  Description of Artificial Sequence: Synthetic oligonucleotide
  Sense strand starting at position 1454 of SEQ ID NO: 915424
gcgaaucauuaaccagauc

SEQ ID NO: 1078727 - RNA, 19 nt, Artificial Sequence
  Description of Artificial Sequence: Synthetic oligonucleotide
  Antisense strand to SEQ ID NO: 1078726
gaucugguuaaugauucgc

SEQ ID NO: 1078728 - RNA, 19 nt, Artificial Sequence
  Description of Artificial Sequence: Synthetic oligonucleotide
  Sense strand starting at position 2360 of SEQ ID NO: 915424
aagggucucuggcuugaga

SEQ ID NO: 1078729 - RNA, 19 nt, Artificial Sequence
  Description of Artificial Sequence: Synthetic oligonucleotide
  Antisense strand to SEQ ID NO: 1078728
ucucaagccagagacccuu

SEQ ID NO: 1078730 - RNA, 19 nt, Artificial Sequence
  Description of Artificial Sequence: Synthetic oligonucleotide
  Sense strand starting at position 2362 of SEQ ID NO: 915424
gggucucuggcuugagauc

SEQ ID NO: 1078731 - RNA, 19 nt, Artificial Sequence
  Description of Artificial Sequence: Synthetic oligonucleotide
  Antisense strand to SEQ ID NO: 1078730
gaucucaagccagagaccc

SEQ ID NO: 1078732 - RNA, 19 nt, Artificial Sequence
  Description of Artificial Sequence: Synthetic oligonucleotide
  Sense strand starting at position 2732 of SEQ ID NO: 915424
agcugugugggccauugau

SEQ ID NO: 1078733 - RNA, 19 nt, Artificial Sequence
  Description of Artificial Sequence: Synthetic oligonucleotide
  Antisense strand to SEQ ID NO: 1078732
aucaauggcccacacagcu

SEQ ID NO: 1078734 - RNA, 19 nt, Artificial Sequence
  Description of Artificial Sequence: Synthetic oligonucleotide
  Sense strand starting at position 2748 of SEQ ID NO: 915424
gauuguucugcccagcuca

SEQ ID NO: 1078735 - RNA, 19 nt, Artificial Sequence
  Description of Artificial Sequence: Synthetic oligonucleotide
  Antisense strand to SEQ ID NO: 1078734
ugagcugggcagaacaauc

SEQ ID NO: 1078736 - RNA, 19 nt, Artificial Sequence
  Description of Artificial Sequence: Synthetic oligonucleotide
  Sense strand starting at position 2825 of SEQ ID NO: 915424
ccuuacauagccgaaaguu

SEQ ID NO: 1078737 - RNA, 19 nt, Artificial Sequence
  Description of Artificial Sequence: Synthetic oligonucleotide
  Antisense strand to SEQ ID NO: 1078736
aacuuucggcuauguaagg

SEQ ID NO: 1078738 - RNA, 19 nt, Artificial Sequence
  Description of Artificial Sequence: Synthetic oligonucleotide
  Sense strand starting at position 2833 of SEQ ID NO: 915424
agccgaaaguugcagagau

SEQ ID NO: 1078739 - RNA, 19 nt, Artificial Sequence
  Description of Artificial Sequence: Synthetic oligonucleotide
  Antisense strand to SEQ ID NO: 1078738
aucucugcaacuuucggcu

SEQ ID NO: 1078740 - RNA, 19 nt, Artificial Sequence
  Description of Artificial Sequence: Synthetic oligonucleotide
  Sense strand starting at position 2834 of SEQ ID NO: 915424
gccgaaaguugcagagaug

SEQ ID NO: 1078741 - RNA, 19 nt, Artificial Sequence
  Description of Artificial Sequence: Synthetic oligonucleotide
  Antisense strand to SEQ ID NO: 1078740
caucucugcaacuuucggc

SEQ ID NO: 1078742 - RNA, 19 nt, Artificial Sequence
  Description of Artificial Sequence: Synthetic oligonucleotide
  Sense strand starting at position 2835 of SEQ ID NO: 915424
ccgaaaguugcagagauga

SEQ ID NO: 1078743 - RNA, 19 nt, Artificial Sequence
  Description of Artificial Sequence: Synthetic oligonucleotide
  Antisense strand to SEQ ID NO: 1078742
ucaucucugcaacuuucgg

SEQ ID NO: 1078744 - RNA, 19 nt, Artificial Sequence
  Description of Artificial Sequence: Synthetic oligonucleotide
  Sense strand starting at position 2922 of SEQ ID NO: 915424
agggaauacuugucauggu

SEQ ID NO: 1078745 - RNA, 19 nt, Artificial Sequence
  Description of Artificial Sequence: Synthetic oligonucleotide
  Antisense strand to SEQ ID NO: 1078744
accaugacaaguauucccu

SEQ ID NO: 1078746 - RNA, 19 nt, Artificial Sequence
  Description of Artificial Sequence: Synthetic oligonucleotide
  Sense strand starting at position 2923 of SEQ ID NO: 915424
gggaauacuugucauggua

SEQ ID NO: 1078747 - RNA, 19 nt, Artificial Sequence
  Description of Artificial Sequence: Synthetic oligonucleotide
  Antisense strand to SEQ ID NO: 1078746
uaccaugacaaguauuccc

SEQ ID NO: 1078748 - RNA, 19 nt, Artificial Sequence
  Description of Artificial Sequence: Synthetic oligonucleotide
  Sense strand starting at position 2925 of SEQ ID NO: 915424
gaauacuugucaugguaau

SEQ ID NO: 1078749 - RNA, 19 nt, Artificial Sequence
  Description of Artificial Sequence: Synthetic oligonucleotide
  Antisense strand to SEQ ID NO: 1078748
auuaccaugacaaguauuc

SEQ ID NO: 1078750 - RNA, 19 nt, Artificial Sequence
  Description of Artificial Sequence: Synthetic oligonucleotide
  Sense strand starting at position 2926 of SEQ ID NO: 915424
aauacuugucaugguaaug

SEQ ID NO: 1078751 - RNA, 19 nt, Artificial Sequence
  Description of Artificial Sequence: Synthetic oligonucleotide
  Antisense strand to SEQ ID NO: 1078750
cauuaccaugacaaguauu

SEQ ID NO: 1078752 - RNA, 19 nt, Artificial Sequence
  Description of Artificial Sequence: Synthetic oligonucleotide
  Sense strand starting at position 3014 of SEQ ID NO: 915424
gccugucacugaggucaaa

SEQ ID NO: 1078753 - RNA, 19 nt, Artificial Sequence
  Description of Artificial Sequence: Synthetic oligonucleotide
  Antisense strand to SEQ ID NO: 1078752
uuugaccucagugacaggc

SEQ ID NO: 1078754 - RNA, 19 nt, Artificial Sequence
  Description of Artificial Sequence: Synthetic oligonucleotide
  Sense strand starting at position 3130 of SEQ ID NO: 915424
gguuaacgugcgcugucau

SEQ ID NO: 1078755 - RNA, 19 nt, Artificial Sequence
  Description of Artificial Sequence: Synthetic oligonucleotide
  Antisense strand to SEQ ID NO: 1078754
augacagcgcacguuaacc

SEQ ID NO: 1078756 - RNA, 19 nt, Artificial Sequence
  Description of Artificial Sequence: Synthetic oligonucleotide
  Sense strand starting at position 3236 of SEQ ID NO: 915424
aguguacuauugccaguua

SEQ ID NO: 1078757 - RNA, 19 nt, Artificial Sequence
  Description of Artificial Sequence: Synthetic oligonucleotide
  Antisense strand to SEQ ID NO: 1078756
uaacuggcaauaguacacu

SEQ ID NO: 1078758 - RNA, 19 nt, Artificial Sequence
  Description of Artificial Sequence: Synthetic oligonucleotide
  Sense strand starting at position 3240 of SEQ ID NO: 915424
uacuauugccaguuagcgu

SEQ ID NO: 1078759 - RNA, 19 nt, Artificial Sequence
  Description of Artificial Sequence: Synthetic oligonucleotide
  Antisense strand to SEQ ID NO: 1078758
acgcuaacuggcaauagua

SEQ ID NO: 1078760 - RNA, 19 nt, Artificial Sequence
  Description of Artificial Sequence: Synthetic oligonucleotide
  Sense strand starting at position 3406 of SEQ ID NO: 915424
ggguguuggucacuaagug

SEQ ID NO: 1078761 - RNA, 19 nt, Artificial Sequence
  Description of Artificial Sequence: Synthetic oligonucleotide
  Antisense strand to SEQ ID NO: 1078760
cacuuagugaccaacaccc

SEQ ID NO: 1078762 - RNA, 19 nt, Artificial Sequence
  Description of Artificial Sequence: Synthetic oligonucleotide
  Sense strand starting at position 3522 of SEQ ID NO: 915424
ggaggcuccugguaacaaa

SEQ ID NO: 1078763 - RNA, 19 nt, Artificial Sequence
  Description of Artificial Sequence: Synthetic oligonucleotide
  Antisense strand to SEQ ID NO: 1078762
uuuguuaccaggagccucc

SEQ ID NO: 1078764 - RNA, 19 nt, Artificial Sequence
  Description of Artificial Sequence: Synthetic oligonucleotide
  Sense strand starting at position 3756 of SEQ ID NO: 915424
gcgccagccuggucagaaa

SEQ ID NO: 1078765 - RNA, 19 nt, Artificial Sequence
  Description of Artificial Sequence: Synthetic oligonucleotide
  Antisense strand to SEQ ID NO: 1078764
uuucugaccaggcuggcgc

SEQ ID NO: 1078766 - RNA, 19 nt, Artificial Sequence
  Description of Artificial Sequence: Synthetic oligonucleotide
  Sense strand starting at position 3812 of SEQ ID NO: 915424
agagcaacgcucugugagu

SEQ ID NO: 1078767 - RNA, 19 nt, Artificial Sequence
  Description of Artificial Sequence: Synthetic oligonucleotide
  Antisense strand to SEQ ID NO: 1078766
acucacagagcguugcucu

SEQ ID NO: 1078768 - RNA, 19 nt, Artificial Sequence
  Description of Artificial Sequence: Synthetic oligonucleotide
  Sense strand starting at position 3813 of SEQ ID NO: 915424
gagcaacgcucugugagua

SEQ ID NO: 1078769 - RNA, 19 nt, Artificial Sequence
  Description of Artificial Sequence: Synthetic oligonucleotide
  Antisense strand to SEQ ID NO: 1078768
uacucacagagcguugcuc

SEQ ID NO: 1078770 - RNA, 19 nt, Artificial Sequence
  Description of Artificial Sequence: Synthetic oligonucleotide
  Sense strand starting at position 3814 of SEQ ID NO: 915424
agcaacgcucugugaguaa

SEQ ID NO: 1078771 - RNA, 19 nt, Artificial Sequence
  Description of Artificial Sequence: Synthetic oligonucleotide
  Antisense strand to SEQ ID NO: 1078770
uuacucacagagcguugcu

SEQ ID NO: 1078772 - RNA, 19 nt, Artificial Sequence
  Description of Artificial Sequence: Synthetic oligonucleotide
  Sense strand starting at position 273 of SEQ ID NO: 915425
augagauccuuaggaggca

SEQ ID NO: 1078773 - RNA, 19 nt, Artificial Sequence
  Description of Artificial Sequence: Synthetic oligonucleotide
  Antisense strand to SEQ ID NO: 1078772
ugccuccuaaggaucucau

SEQ ID NO: 1078774 - RNA, 19 nt, Artificial Sequence
  Description of Artificial Sequence: Synthetic oligonucleotide
  Sense strand starting at position 616 of SEQ ID NO: 915425
cccguaucugcccauauca

SEQ ID NO: 1078775 - RNA, 19 nt, Artificial Sequence
  Description of Artificial Sequence: Synthetic oligonucleotide
  Antisense strand to SEQ ID NO: 1078774
ugauaugggcagauacggg

SEQ ID NO: 1078776 - RNA, 19 nt, Artificial Sequence
  Description of Artificial Sequence: Synthetic oligonucleotide
  Sense strand starting at position 1364 of SEQ ID NO: 915425
cagucuggccugggaagaa

SEQ ID NO: 1078777 - RNA, 19 nt, Artificial Sequence
  Description of Artificial Sequence: Synthetic oligonucleotide
  Antisense strand to SEQ ID NO: 1078776
uucuucccaggccagacug

SEQ ID NO: 1078778 - RNA, 19 nt, Artificial Sequence
  Description of Artificial Sequence: Synthetic oligonucleotide
  Sense strand starting at position 1427 of SEQ ID NO: 915425
gcuugaagaguugggaaga

SEQ ID NO: 1078779 - RNA, 19 nt, Artificial Sequence
  Description of Artificial Sequence: Synthetic oligonucleotide
  Antisense strand to SEQ ID NO: 1078778
ucuucccaacucuucaagc

SEQ ID NO: 1078780 - RNA, 19 nt, Artificial Sequence
  Description of Artificial Sequence: Synthetic oligonucleotide
  Sense strand starting at position 1428 of SEQ ID NO: 915425
cuugaagaguugggaagaa

SEQ ID NO: 1078781 - RNA, 19 nt, Artificial Sequence
  Description of Artificial Sequence: Synthetic oligonucleotide
  Antisense strand to SEQ ID NO: 1078780
uucuucccaacucuucaag

SEQ ID NO: 1078782 - RNA, 19 nt, Artificial Sequence
  Description of Artificial Sequence: Synthetic oligonucleotide
  Sense strand starting at position 1555 of SEQ ID NO: 915425
ucaccuauugcuugggcua

SEQ ID NO: 1078783 - RNA, 19 nt, Artificial Sequence
  Description of Artificial Sequence: Synthetic oligonucleotide
  Antisense strand to SEQ ID NO: 1078782
uagcccaagcaauagguga

SEQ ID NO: 1078784 - RNA, 19 nt, Artificial Sequence
  Description of Artificial Sequence: Synthetic oligonucleotide
  Sense strand starting at position 1933 of SEQ ID NO: 915425
gcgaaucauuaaccagauc

SEQ ID NO: 1078785 - RNA, 19 nt, Artificial Sequence
  Description of Artificial Sequence: Synthetic oligonucleotide
  Antisense strand to SEQ ID NO: 1078784
gaucugguuaaugauucgc

SEQ ID NO: 1078786 - RNA, 19 nt, Artificial Sequence
  Description of Artificial Sequence: Synthetic oligonucleotide
  Sense strand starting at position 2839 of SEQ ID NO: 915425
aagggucucuggcuugaga

SEQ ID NO: 1078787 - RNA, 19 nt, Artificial Sequence
  Description of Artificial Sequence: Synthetic oligonucleotide
  Antisense strand to SEQ ID NO: 1078786
ucucaagccagagacccuu

SEQ ID NO: 1078788 - RNA, 19 nt, Artificial Sequence
  Description of Artificial Sequence: Synthetic oligonucleotide
  Sense strand starting at position 2841 of SEQ ID NO: 915425
gggucucuggcuugagauc

SEQ ID NO: 1078789 - RNA, 19 nt, Artificial Sequence
  Description of Artificial Sequence: Synthetic oligonucleotide
  Antisense strand to SEQ ID NO: 1078788
gaucucaagccagagaccc

SEQ ID NO: 1078790 - RNA, 19 nt, Artificial Sequence
  Description of Artificial Sequence: Synthetic oligonucleotide
  Sense strand starting at position 3211 of SEQ ID NO: 915425
agcugugugggccauugau

SEQ ID NO: 1078791 - RNA, 19 nt, Artificial Sequence
  Description of Artificial Sequence: Synthetic oligonucleotide
  Antisense strand to SEQ ID NO: 1078790
aucaauggcccacacagcu

SEQ ID NO: 1078792 - RNA, 19 nt, Artificial Sequence
  Description of Artificial Sequence: Synthetic oligonucleotide
  Sense strand starting at position 3227 of SEQ ID NO: 915425
gauuguucugcccagcuca

SEQ ID NO: 1078793 - RNA, 19 nt, Artificial Sequence
  Description of Artificial Sequence: Synthetic oligonucleotide
  Antisense strand to SEQ ID NO: 1078792
ugagcugggcagaacaauc

SEQ ID NO: 1078794 - RNA, 19 nt, Artificial Sequence
  Description of Artificial Sequence: Synthetic oligonucleotide
  Sense strand starting at position 3304 of SEQ ID NO: 915425
ccuuacauagccgaaaguu

SEQ ID NO: 1078795 - RNA, 19 nt, Artificial Sequence
  Description of Artificial Sequence: Synthetic oligonucleotide
  Antisense strand to SEQ ID NO: 1078794
aacuuucggcuauguaagg

SEQ ID NO: 1078796 - RNA, 19 nt, Artificial Sequence
  Description of Artificial Sequence: Synthetic oligonucleotide
  Sense strand starting at position 3312 of SEQ ID NO: 915425
agccgaaaguugcagagau

SEQ ID NO: 1078797 - RNA, 19 nt, Artificial Sequence
  Description of Artificial Sequence: Synthetic oligonucleotide
  Antisense strand to SEQ ID NO: 1078796
aucucugcaacuuucggcu

SEQ ID NO: 1078798 - RNA, 19 nt, Artificial Sequence
  Description of Artificial Sequence: Synthetic oligonucleotide
  Sense strand starting at position 3313 of SEQ ID NO: 915425
gccgaaaguugcagagaug

SEQ ID NO: 1078799 - RNA, 19 nt, Artificial Sequence
  Description of Artificial Sequence: Synthetic oligonucleotide
  Antisense strand to SEQ ID NO: 1078798
caucucugcaacuuucggc

SEQ ID NO: 1078800 - RNA, 19 nt, Artificial Sequence
  Description of Artificial Sequence: Synthetic oligonucleotide
  Sense strand starting at position 3314 of SEQ ID NO: 915425
ccgaaaguugcagagauga

SEQ ID NO: 1078801 - RNA, 19 nt, Artificial Sequence
  Description of Artificial Sequence: Synthetic oligonucleotide
  Antisense strand to SEQ ID NO: 1078800
ucaucucugcaacuuucgg

SEQ ID NO: 1078802 - RNA, 19 nt, Artificial Sequence
  Description of Artificial Sequence: Synthetic oligonucleotide
  Sense strand starting at position 3401 of SEQ ID NO: 915425
agggaauacuugucauggu

SEQ ID NO: 1078803 - RNA, 19 nt, Artificial Sequence
  Description of Artificial Sequence: Synthetic oligonucleotide
  Antisense strand to SEQ ID NO: 1078802
accaugacaaguauucccu

SEQ ID NO: 1078804 - RNA, 19 nt, Artificial Sequence
  Description of Artificial Sequence: Synthetic oligonucleotide
  Sense strand starting at position 3402 of SEQ ID NO: 915425
gggaauacuugucauggua

SEQ ID NO: 1078805 - RNA, 19 nt, Artificial Sequence
  Description of Artificial Sequence: Synthetic oligonucleotide
  Antisense strand to SEQ ID NO: 1078804
uaccaugacaaguauuccc

SEQ ID NO: 1078806 - RNA, 19 nt, Artificial Sequence
  Description of Artificial Sequence: Synthetic oligonucleotide
  Sense strand starting at position 3404 of SEQ ID NO: 915425
gaauacuugucaugguaau

SEQ ID NO: 1078807 - RNA, 19 nt, Artificial Sequence
  Description of Artificial Sequence: Synthetic oligonucleotide
  Antisense strand to SEQ ID NO: 1078806
auuaccaugacaaguauuc

SEQ ID NO: 1078808 - RNA, 19 nt, Artificial Sequence
  Description of Artificial Sequence: Synthetic oligonucleotide
  Sense strand starting at position 3405 of SEQ ID NO: 915425
aauacuugucaugguaaug

SEQ ID NO: 1078809 - RNA, 19 nt, Artificial Sequence
  Description of Artificial Sequence: Synthetic oligonucleotide
  Antisense strand to SEQ ID NO: 1078808
cauuaccaugacaaguauu

SEQ ID NO: 1078810 - RNA, 19 nt, Artificial Sequence
  Description of Artificial Sequence: Synthetic oligonucleotide
  Sense strand starting at position 3493 of SEQ ID NO: 915425
gccugucacugaggucaaa

SEQ ID NO: 1078811 - RNA, 19 nt, Artificial Sequence
  Description of Artificial Sequence: Synthetic oligonucleotide
  Antisense strand to SEQ ID NO: 1078810
uuugaccucagugacaggc

SEQ ID NO: 1078812 - RNA, 19 nt, Artificial Sequence
  Description of Artificial Sequence: Synthetic oligonucleotide
  Sense strand starting at position 3609 of SEQ ID NO: 915425
gguuaacgugcgcugucau

SEQ ID NO: 1078813 - RNA, 19 nt, Artificial Sequence
  Description of Artificial Sequence: Synthetic oligonucleotide
  Antisense strand to SEQ ID NO: 1078812
augacagcgcacguuaacc

SEQ ID NO: 1078814 - RNA, 19 nt, Artificial Sequence
  Description of Artificial Sequence: Synthetic oligonucleotide
  Sense strand starting at position 3715 of SEQ ID NO: 915425
aguguacuauugccaguua

SEQ ID NO: 1078815 - RNA, 19 nt, Artificial Sequence
  Description of Artificial Sequence: Synthetic oligonucleotide
  Antisense strand to SEQ ID NO: 1078814
uaacuggcaauaguacacu

SEQ ID NO: 1078816 - RNA, 19 nt, Artificial Sequence
  Description of Artificial Sequence: Synthetic oligonucleotide
  Sense strand starting at position 3719 of SEQ ID NO: 915425
uacuauugccaguuagcgu

SEQ ID NO: 1078817 - RNA, 19 nt, Artificial Sequence
  Description of Artificial Sequence: Synthetic oligonucleotide
  Antisense strand to SEQ ID NO: 1078816
acgcuaacuggcaauagua

SEQ ID NO: 1078818 - RNA, 19 nt, Artificial Sequence
  Description of Artificial Sequence: Synthetic oligonucleotide
  Sense strand starting at position 3885 of SEQ ID NO: 915425
ggguguuggucacuaagug

SEQ ID NO: 1078819 - RNA, 19 nt, Artificial Sequence
  Description of Artificial Sequence: Synthetic oligonucleotide
  Antisense strand to SEQ ID NO: 1078818
cacuuagugaccaacaccc

SEQ ID NO: 1078820 - RNA, 19 nt, Artificial Sequence
  Description of Artificial Sequence: Synthetic oligonucleotide
  Sense strand starting at position 75 of SEQ ID NO: 915426
ggacuuguauaaccugagu

SEQ ID NO: 1078821 - RNA, 19 nt, Artificial Sequence
  Description of Artificial Sequence: Synthetic oligonucleotide
  Antisense strand to SEQ ID NO: 1078820
acucagguuauacaagucc

SEQ ID NO: 1078822 - RNA, 19 nt, Artificial Sequence
  Description of Artificial Sequence: Synthetic oligonucleotide
  Sense strand starting at position 78 of SEQ ID NO: 915426
cuuguauaaccugaguuga

SEQ ID NO: 1078823 - RNA, 19 nt, Artificial Sequence
  Description of Artificial Sequence: Synthetic oligonucleotide
  Antisense strand to SEQ ID NO: 1078822
ucaacucagguuauacaag

SEQ ID NO: 1078824 - RNA, 19 nt, Artificial Sequence
  Description of Artificial Sequence: Synthetic oligonucleotide
  Sense strand starting at position 226 of SEQ ID NO: 915426
ugaaauaucuuggugggau

SEQ ID NO: 1078825 - RNA, 19 nt, Artificial Sequence
  Description of Artificial Sequence: Synthetic oligonucleotide
  Antisense strand to SEQ ID NO: 1078824
aucccaccaagauauuuca

SEQ ID NO: 1078826 - RNA, 19 nt, Artificial Sequence
  Description of Artificial Sequence: Synthetic oligonucleotide
  Sense strand starting at position 227 of SEQ ID NO: 915426
gaaauaucuuggugggaua

SEQ ID NO: 1078827 - RNA, 19 nt, Artificial Sequence
  Description of Artificial Sequence: Synthetic oligonucleotide
  Antisense strand to SEQ ID NO: 1078826
uaucccaccaagauauuuc

SEQ ID NO: 1078828 - RNA, 19 nt, Artificial Sequence
  Description of Artificial Sequence: Synthetic oligonucleotide
  Sense strand starting at position 230 of SEQ ID NO: 915426
auaucuuggugggauaaau

SEQ ID NO: 1078829 - RNA, 19 nt, Artificial Sequence
  Description of Artificial Sequence: Synthetic oligonucleotide
  Antisense strand to SEQ ID NO: 1078828
auuuaucccaccaagauau

SEQ ID NO: 1078830 - RNA, 19 nt, Artificial Sequence
  Description of Artificial Sequence: Synthetic oligonucleotide
  Sense strand starting at position 296 of SEQ ID NO: 915426
aggguaugagcagguauga

SEQ ID NO: 1078831 - RNA, 19 nt, Artificial Sequence
  Description of Artificial Sequence: Synthetic oligonucleotide
  Antisense strand to SEQ ID NO: 1078830
ucauaccugcucauacccu

SEQ ID NO: 1078832 - RNA, 19 nt, Artificial Sequence
  Description of Artificial Sequence: Synthetic oligonucleotide
  Sense strand starting at position 369 of SEQ ID NO: 915426
gggcaaaguuaacucugau

SEQ ID NO: 1078833 - RNA, 19 nt, Artificial Sequence
  Description of Artificial Sequence: Synthetic oligonucleotide
  Antisense strand to SEQ ID NO: 1078832
aucagaguuaacuuugccc

SEQ ID NO: 1078834 - RNA, 19 nt, Artificial Sequence
  Description of Artificial Sequence: Synthetic oligonucleotide
  Sense strand starting at position 375 of SEQ ID NO: 915426
aguuaacucugaucuguuc

SEQ ID NO: 1078835 - RNA, 19 nt, Artificial Sequence
  Description of Artificial Sequence: Synthetic oligonucleotide
  Antisense strand to SEQ ID NO: 1078834
gaacagaucagaguuaacu

SEQ ID NO: 1078836 - RNA, 19 nt, Artificial Sequence
  Description of Artificial Sequence: Synthetic oligonucleotide
  Sense strand starting at position 460 of SEQ ID NO: 915426
uaaagagcuuaagggauaa

SEQ ID NO: 1078837 - RNA, 19 nt, Artificial Sequence
  Description of Artificial Sequence: Synthetic oligonucleotide
  Antisense strand to SEQ ID NO: 1078836
uuaucccuuaagcucuuua

SEQ ID NO: 1078838 - RNA, 19 nt, Artificial Sequence
  Description of Artificial Sequence: Synthetic oligonucleotide
  Sense strand starting at position 510 of SEQ ID NO: 915426
ccuagucaggcuuaaauua

SEQ ID NO: 1078839 - RNA, 19 nt, Artificial Sequence
  Description of Artificial Sequence: Synthetic oligonucleotide
  Antisense strand to SEQ ID NO: 1078838
uaauuuaagccugacuagg

SEQ ID NO: 1078840 - RNA, 19 nt, Artificial Sequence
  Description of Artificial Sequence: Synthetic oligonucleotide
  Sense strand starting at position 520 of SEQ ID NO: 915426
cuuaaauuauggugacaca

SEQ ID NO: 1078841 - RNA, 19 nt, Artificial Sequence
  Description of Artificial Sequence: Synthetic oligonucleotide
  Antisense strand to SEQ ID NO: 1078840
ugugucaccauaauuuaag

SEQ ID NO: 1078842 - RNA, 19 nt, Artificial Sequence
  Description of Artificial Sequence: Synthetic oligonucleotide
  Sense strand starting at position 560 of SEQ ID NO: 915426
cgggaucugcccugagaau

SEQ ID NO: 1078843 - RNA, 19 nt, Artificial Sequence
  Description of Artificial Sequence: Synthetic oligonucleotide
  Antisense strand to SEQ ID NO: 1078842
auucucagggcagaucccg

SEQ ID NO: 1078844 - RNA, 19 nt, Artificial Sequence
  Description of Artificial Sequence: Synthetic oligonucleotide
  Sense strand starting at position 561 of SEQ ID NO: 915426
gggaucugcccugagaauc

SEQ ID NO: 1078845 - RNA, 19 nt, Artificial Sequence
  Description of Artificial Sequence: Synthetic oligonucleotide
  Antisense strand to SEQ ID NO: 1078844
gauucucagggcagauccc

SEQ ID NO: 1078846 - RNA, 19 nt, Artificial Sequence
  Description of Artificial Sequence: Synthetic oligonucleotide
  Sense strand starting at position 590 of SEQ ID NO: 915426
agcaaugacuacuacugau

SEQ ID NO: 1078847 - RNA, 19 nt, Artificial Sequence
  Description of Artificial Sequence: Synthetic oligonucleotide
  Antisense strand to SEQ ID NO: 1078846
aucaguaguagucauugcu

SEQ ID NO: 1078848 - RNA, 19 nt, Artificial Sequence
  Description of Artificial Sequence: Synthetic oligonucleotide
  Sense strand starting at position 618 of SEQ ID NO: 915426
cguguuuagccacuguuua

SEQ ID NO: 1078849 - RNA, 19 nt, Artificial Sequence
  Description of Artificial Sequence: Synthetic oligonucleotide
  Antisense strand to SEQ ID NO: 1078848
uaaacaguggcuaaacacg

SEQ ID NO: 1078850 - RNA, 19 nt, Artificial Sequence
  Description of Artificial Sequence: Synthetic oligonucleotide
  Sense strand starting at position 619 of SEQ ID NO: 915426
guguuuagccacuguuuaa

SEQ ID NO: 1078851 - RNA, 19 nt, Artificial Sequence
  Description of Artificial Sequence: Synthetic oligonucleotide
  Antisense strand to SEQ ID NO: 1078850
uuaaacaguggcuaaacac

SEQ ID NO: 1078852 - RNA, 19 nt, Artificial Sequence
  Description of Artificial Sequence: Synthetic oligonucleotide
  Sense strand starting at position 913 of SEQ ID NO: 915426
aggccaaagugauucggaa

SEQ ID NO: 1078853 - RNA, 19 nt, Artificial Sequence
  Description of Artificial Sequence: Synthetic oligonucleotide
  Antisense strand to SEQ ID NO: 1078852
uuccgaaucacuuuggccu

SEQ ID NO: 1078854 - RNA, 19 nt, Artificial Sequence
  Description of Artificial Sequence: Synthetic oligonucleotide
  Sense strand starting at position 953 of SEQ ID NO: 915426
uguaacugugcccaugagu

SEQ ID NO: 1078855 - RNA, 19 nt, Artificial Sequence
  Description of Artificial Sequence: Synthetic oligonucleotide
  Antisense strand to SEQ ID NO: 1078854
acucaugggcacaguuaca

SEQ ID NO: 1078856 - RNA, 19 nt, Artificial Sequence
  Description of Artificial Sequence: Synthetic oligonucleotide
  Sense strand starting at position 956 of SEQ ID NO: 915426
aacugugcccaugaguaga

SEQ ID NO: 1078857 - RNA, 19 nt, Artificial Sequence
  Description of Artificial Sequence: Synthetic oligonucleotide
  Antisense strand to SEQ ID NO: 1078856
ucuacucaugggcacaguu

SEQ ID NO: 1078858 - RNA, 19 nt, Artificial Sequence
  Description of Artificial Sequence: Synthetic oligonucleotide
  Sense strand starting at position 967 of SEQ ID NO: 915426
ugaguagacccaugccaga

SEQ ID NO: 1078859 - RNA, 19 nt, Artificial Sequence
  Description of Artificial Sequence: Synthetic oligonucleotide
  Antisense strand to SEQ ID NO: 1078858
ucuggcaugggucuacuca

SEQ ID NO: 1078860 - RNA, 19 nt, Artificial Sequence
  Description of Artificial Sequence: Synthetic oligonucleotide
  Sense strand starting at position 1182 of SEQ ID NO: 915426
gcccgucacuucccaauuu

SEQ ID NO: 1078861 - RNA, 19 nt, Artificial Sequence
  Description of Artificial Sequence: Synthetic oligonucleotide
  Antisense strand to SEQ ID NO: 1078860
aaauugggaagugacgggc

SEQ ID NO: 1078862 - RNA, 19 nt, Artificial Sequence
  Description of Artificial Sequence: Synthetic oligonucleotide
  Sense strand starting at position 2491 of SEQ ID NO: 915426
auugauucuuuggaaacau

SEQ ID NO: 1078863 - RNA, 19 nt, Artificial Sequence
  Description of Artificial Sequence: Synthetic oligonucleotide
  Antisense strand to SEQ ID NO: 1078862
auguuuccaaagaaucaau

SEQ ID NO: 1078864 - RNA, 19 nt, Artificial Sequence
  Description of Artificial Sequence: Synthetic oligonucleotide
  Sense strand starting at position 2553 of SEQ ID NO: 915426
ggccucugcccugauggaa

SEQ ID NO: 1078865 - RNA, 19 nt, Artificial Sequence
  Description of Artificial Sequence: Synthetic oligonucleotide
  Antisense strand to SEQ ID NO: 1078864
uuccaucagggcagaggcc

SEQ ID NO: 1078866 - RNA, 19 nt, Artificial Sequence
  Description of Artificial Sequence: Synthetic oligonucleotide
  Sense strand starting at position 2583 of SEQ ID NO: 915426
gaaauaauggaaugacguu

SEQ ID NO: 1078867 - RNA, 19 nt, Artificial Sequence
  Description of Artificial Sequence: Synthetic oligonucleotide
  Antisense strand to SEQ ID NO: 1078866
aacgucauuccauuauuuc

SEQ ID NO: 1078868 - RNA, 19 nt, Artificial Sequence
  Description of Artificial Sequence: Synthetic oligonucleotide
  Sense strand starting at position 2589 of SEQ ID NO: 915426
auggaaugacguuauugua

SEQ ID NO: 1078869 - RNA, 19 nt, Artificial Sequence
  Description of Artificial Sequence: Synthetic oligonucleotide
  Antisense strand to SEQ ID NO: 1078868
uacaauaacgucauuccau

SEQ ID NO: 1078870 - RNA, 19 nt, Artificial Sequence
  Description of Artificial Sequence: Synthetic oligonucleotide
  Sense strand starting at position 2596 of SEQ ID NO: 915426
gacguuauuguauguugaa

SEQ ID NO: 1078871 - RNA, 19 nt, Artificial Sequence
  Description of Artificial Sequence: Synthetic oligonucleotide
  Antisense strand to SEQ ID NO: 1078870
uucaacauacaauaacguc

SEQ ID NO: 1078872 - RNA, 19 nt, Artificial Sequence
  Description of Artificial Sequence: Synthetic oligonucleotide
  Sense strand starting at position 2597 of SEQ ID NO: 915426
acguuauuguauguugaag

SEQ ID NO: 1078873 - RNA, 19 nt, Artificial Sequence
  Description of Artificial Sequence: Synthetic oligonucleotide
  Antisense strand to SEQ ID NO: 1078872
cuucaacauacaauaacgu

SEQ ID NO: 1078874 - RNA, 19 nt, Artificial Sequence
  Description of Artificial Sequence: Synthetic oligonucleotide
  Sense strand starting at position 2649 of SEQ ID NO: 915426
auuaauucugcaggaagca

SEQ ID NO: 1078875 - RNA, 19 nt, Artificial Sequence
  Description of Artificial Sequence: Synthetic oligonucleotide
  Antisense strand to SEQ ID NO: 1078874
ugcuuccugcagaauuaau

SEQ ID NO: 1078876 - RNA, 19 nt, Artificial Sequence
  Description of Artificial Sequence: Synthetic oligonucleotide
  Sense strand starting at position 2650 of SEQ ID NO: 915426
uuaauucugcaggaagcaa

SEQ ID NO: 1078877 - RNA, 19 nt, Artificial Sequence
  Description of Artificial Sequence: Synthetic oligonucleotide
  Antisense strand to SEQ ID NO: 1078876
uugcuuccugcagaauuaa

SEQ ID NO: 1078878 - RNA, 19 nt, Artificial Sequence
  Description of Artificial Sequence: Synthetic oligonucleotide
  Sense strand starting at position 3000 of SEQ ID NO: 915426
uguaaauaagauuguugca

SEQ ID NO: 1078879 - RNA, 19 nt, Artificial Sequence
  Description of Artificial Sequence: Synthetic oligonucleotide
  Antisense strand to SEQ ID NO: 1078878
ugcaacaaucuuauuuaca

SEQ ID NO: 1078880 - RNA, 19 nt, Artificial Sequence
  Description of Artificial Sequence: Synthetic oligonucleotide
  Sense strand starting at position 3007 of SEQ ID NO: 915426
aagauuguugcauggcaga

SEQ ID NO: 1078881 - RNA, 19 nt, Artificial Sequence
  Description of Artificial Sequence: Synthetic oligonucleotide
  Antisense strand to SEQ ID NO: 1078880
ucugccaugcaacaaucuu

SEQ ID NO: 1078882 - RNA, 19 nt, Artificial Sequence
  Description of Artificial Sequence: Synthetic oligonucleotide
  Sense strand starting at position 3047 of SEQ ID NO: 915426
gugacaaacucagggaaau

SEQ ID NO: 1078883 - RNA, 19 nt, Artificial Sequence
  Description of Artificial Sequence: Synthetic oligonucleotide
  Antisense strand to SEQ ID NO: 1078882
auuucccugaguuugucac

SEQ ID NO: 1078884 - RNA, 19 nt, Artificial Sequence
  Description of Artificial Sequence: Synthetic oligonucleotide
  Sense strand starting at position 3068 of SEQ ID NO: 915426
uugccuacguguucaguca

SEQ ID NO: 1078885 - RNA, 19 nt, Artificial Sequence
  Description of Artificial Sequence: Synthetic oligonucleotide
  Antisense strand to SEQ ID NO: 1078884
ugacugaacacguaggcaa

SEQ ID NO: 1078886 - RNA, 19 nt, Artificial Sequence
  Description of Artificial Sequence: Synthetic oligonucleotide
  Sense strand starting at position 3115 of SEQ ID NO: 915426
ccaagaauauagcagugaa

SEQ ID NO: 1078887 - RNA, 19 nt, Artificial Sequence
  Description of Artificial Sequence: Synthetic oligonucleotide
  Antisense strand to SEQ ID NO: 1078886
uucacugcuauauucuugg

SEQ ID NO: 1078888 - RNA, 19 nt, Artificial Sequence
  Description of Artificial Sequence: Synthetic oligonucleotide
  Sense strand starting at position 3210 of SEQ ID NO: 915426
aagcguguuagauggugau

SEQ ID NO: 1078889 - RNA, 19 nt, Artificial Sequence
  Description of Artificial Sequence: Synthetic oligonucleotide
  Antisense strand to SEQ ID NO: 1078888
aucaccaucuaacacgcuu

SEQ ID NO: 1078890 - RNA, 19 nt, Artificial Sequence
  Description of Artificial Sequence: Synthetic oligonucleotide
  Sense strand starting at position 3254 of SEQ ID NO: 915426
uaagccauccucugaggga

SEQ ID NO: 1078891 - RNA, 19 nt, Artificial Sequence
  Description of Artificial Sequence: Synthetic oligonucleotide
  Antisense strand to SEQ ID NO: 1078890
ucccucagaggauggcuua

SEQ ID NO: 1078892 - RNA, 19 nt, Artificial Sequence
  Description of Artificial Sequence: Synthetic oligonucleotide
  Sense strand starting at position 3255 of SEQ ID NO: 915426
aagccauccucugagggaa

SEQ ID NO: 1078893 - RNA, 19 nt, Artificial Sequence
  Description of Artificial Sequence: Synthetic oligonucleotide
  Antisense strand to SEQ ID NO: 1078892
uucccucagaggauggcuu

SEQ ID NO: 1078894 - RNA, 19 nt, Artificial Sequence
  Description of Artificial Sequence: Synthetic oligonucleotide
  Sense strand starting at position 3781 of SEQ ID NO: 915426
gugggaguuguguagcaca

SEQ ID NO: 1078895 - RNA, 19 nt, Artificial Sequence
  Description of Artificial Sequence: Synthetic oligonucleotide
  Antisense strand to SEQ ID NO: 1078894
ugugcuacacaacucccac

SEQ ID NO: 1078896 - RNA, 19 nt, Artificial Sequence
  Description of Artificial Sequence: Synthetic oligonucleotide
  Sense strand starting at position 3795 of SEQ ID NO: 915426
gcacaaggccauugaaaug

SEQ ID NO: 1078897 - RNA, 19 nt, Artificial Sequence
  Description of Artificial Sequence: Synthetic oligonucleotide
  Antisense strand to SEQ ID NO: 1078896
cauuucaauggccuugugc

SEQ ID NO: 1078898 - RNA, 19 nt, Artificial Sequence
  Description of Artificial Sequence: Synthetic oligonucleotide
  Sense strand starting at position 3805 of SEQ ID NO: 915426
auugaaauggcaugugcuu

SEQ ID NO: 1078899 - RNA, 19 nt, Artificial Sequence
  Description of Artificial Sequence: Synthetic oligonucleotide
  Antisense strand to SEQ ID NO: 1078898
aagcacaugccauuucaau

SEQ ID NO: 1078900 - RNA, 19 nt, Artificial Sequence
  Description of Artificial Sequence: Synthetic oligonucleotide
  Sense strand starting at position 75 of SEQ ID NO: 915427
ggacuuguauaaccugagu

SEQ ID NO: 1078901 - RNA, 19 nt, Artificial Sequence
  Description of Artificial Sequence: Synthetic oligonucleotide
  Antisense strand to SEQ ID NO: 1078900
acucagguuauacaagucc

SEQ ID NO: 1078902 - RNA, 19 nt, Artificial Sequence
  Description of Artificial Sequence: Synthetic oligonucleotide
  Sense strand starting at position 78 of SEQ ID NO: 915427
cuuguauaaccugaguuga

SEQ ID NO: 1078903 - RNA, 19 nt, Artificial Sequence
  Description of Artificial Sequence: Synthetic oligonucleotide
  Antisense strand to SEQ ID NO: 1078902
ucaacucagguuauacaag

SEQ ID NO: 1078904 - RNA, 19 nt, Artificial Sequence
  Description of Artificial Sequence: Synthetic oligonucleotide
  Sense strand starting at position 226 of SEQ ID NO: 915427
ugaaauaucuuggugggau

SEQ ID NO: 1078905 - RNA, 19 nt, Artificial Sequence
  Description of Artificial Sequence: Synthetic oligonucleotide
  Antisense strand to SEQ ID NO: 1078904
aucccaccaagauauuuca

SEQ ID NO: 1078906 - RNA, 19 nt, Artificial Sequence
  Description of Artificial Sequence: Synthetic oligonucleotide
  Sense strand starting at position 227 of SEQ ID NO: 915427
gaaauaucuuggugggaua

SEQ ID NO: 1078907 - RNA, 19 nt, Artificial Sequence
  Description of Artificial Sequence: Synthetic oligonucleotide
  Antisense strand to SEQ ID NO: 1078906
uaucccaccaagauauuuc

SEQ ID NO: 1078908 - RNA, 19 nt, Artificial Sequence
  Description of Artificial Sequence: Synthetic oligonucleotide
  Sense strand starting at position 230 of SEQ ID NO: 915427
auaucuuggugggauaaau

SEQ ID NO: 1078909 - RNA, 19 nt, Artificial Sequence
  Description of Artificial Sequence: Synthetic oligonucleotide
  Antisense strand to SEQ ID NO: 1078908
auuuaucccaccaagauau

SEQ ID NO: 1078910 - RNA, 19 nt, Artificial Sequence
  Description of Artificial Sequence: Synthetic oligonucleotide
  Sense strand starting at position 296 of SEQ ID NO: 915427
aggguaugagcagguauga

SEQ ID NO: 1078911 - RNA, 19 nt, Artificial Sequence
  Description of Artificial Sequence: Synthetic oligonucleotide
  Antisense strand to SEQ ID NO: 1078910
ucauaccugcucauacccu

SEQ ID NO: 1078912 - RNA, 19 nt, Artificial Sequence
  Description of Artificial Sequence: Synthetic oligonucleotide
  Sense strand starting at position 369 of SEQ ID NO: 915427
gggcaaaguuaacucugau

SEQ ID NO: 1078913 - RNA, 19 nt, Artificial Sequence
  Description of Artificial Sequence: Synthetic oligonucleotide
  Antisense strand to SEQ ID NO: 1078912
aucagaguuaacuuugccc

SEQ ID NO: 1078914 - RNA, 19 nt, Artificial Sequence
  Description of Artificial Sequence: Synthetic oligonucleotide
  Sense strand starting at position 375 of SEQ ID NO: 915427
aguuaacucugaucuguuc

SEQ ID NO: 1078915 - RNA, 19 nt, Artificial Sequence
  Description of Artificial Sequence: Synthetic oligonucleotide
  Antisense strand to SEQ ID NO: 1078914
gaacagaucagaguuaacu

SEQ ID NO: 1078916 - RNA, 19 nt, Artificial Sequence
  Description of Artificial Sequence: Synthetic oligonucleotide
  Sense strand starting at position 460 of SEQ ID NO: 915427
uaaagagcuuaagggauaa

SEQ ID NO: 1078917 - RNA, 19 nt, Artificial Sequence
  Description of Artificial Sequence: Synthetic oligonucleotide
  Antisense strand to SEQ ID NO: 1078916
uuaucccuuaagcucuuua

SEQ ID NO: 1078918 - RNA, 19 nt, Artificial Sequence
  Description of Artificial Sequence: Synthetic oligonucleotide
  Sense strand starting at position 510 of SEQ ID NO: 915427
ccuagucaggcuuaaauua

SEQ ID NO: 1078919 - RNA, 19 nt, Artificial Sequence
  Description of Artificial Sequence: Synthetic oligonucleotide
  Antisense strand to SEQ ID NO: 1078918
uaauuuaagccugacuagg

SEQ ID NO: 1078920 - RNA, 19 nt, Artificial Sequence
  Description of Artificial Sequence: Synthetic oligonucleotide
  Sense strand starting at position 520 of SEQ ID NO: 915427
cuuaaauuauggugacaca

SEQ ID NO: 1078921 - RNA, 19 nt, Artificial Sequence
  Description of Artificial Sequence: Synthetic oligonucleotide
  Antisense strand to SEQ ID NO: 1078920
ugugucaccauaauuuaag

SEQ ID NO: 1078922 - RNA, 19 nt, Artificial Sequence
  Description of Artificial Sequence: Synthetic oligonucleotide
  Sense strand starting at position 560 of SEQ ID NO: 915427
cgggaucugcccugagaau

SEQ ID NO: 1078923 - RNA, 19 nt, Artificial Sequence
  Description of Artificial Sequence: Synthetic oligonucleotide
  Antisense strand to SEQ ID NO: 1078922
auucucagggcagaucccg

SEQ ID NO: 1078924 - RNA, 19 nt, Artificial Sequence
  Description of Artificial Sequence: Synthetic oligonucleotide
  Sense strand starting at position 561 of SEQ ID NO: 915427
gggaucugcccugagaauc

SEQ ID NO: 1078925 - RNA, 19 nt, Artificial Sequence
  Description of Artificial Sequence: Synthetic oligonucleotide
  Antisense strand to SEQ ID NO: 1078924
gauucucagggcagauccc

SEQ ID NO: 1078926 - RNA, 19 nt, Artificial Sequence
  Description of Artificial Sequence: Synthetic oligonucleotide
  Sense strand starting at position 590 of SEQ ID NO: 915427
agcaaugacuacuacugau

SEQ ID NO: 1078927 - RNA, 19 nt, Artificial Sequence
  Description of Artificial Sequence: Synthetic oligonucleotide
  Antisense strand to SEQ ID NO: 1078926
aucaguaguagucauugcu

SEQ ID NO: 1078928 - RNA, 19 nt, Artificial Sequence
  Description of Artificial Sequence: Synthetic oligonucleotide
  Sense strand starting at position 618 of SEQ ID NO: 915427
cguguuuagccacuguuua

SEQ ID NO: 1078929 - RNA, 19 nt, Artificial Sequence
  Description of Artificial Sequence: Synthetic oligonucleotide
  Antisense strand to SEQ ID NO: 1078928
uaaacaguggcuaaacacg

SEQ ID NO: 1078930 - RNA, 19 nt, Artificial Sequence
  Description of Artificial Sequence: Synthetic oligonucleotide
  Sense strand starting at position 619 of SEQ ID NO: 915427
guguuuagccacuguuuaa

SEQ ID NO: 1078931 - RNA, 19 nt, Artificial Sequence
  Description of Artificial Sequence: Synthetic oligonucleotide
  Antisense strand to SEQ ID NO: 1078930
uuaaacaguggcuaaacac

SEQ ID NO: 1078932 - RNA, 19 nt, Artificial Sequence
  Description of Artificial Sequence: Synthetic oligonucleotide
  Sense strand starting at position 913 of SEQ ID NO: 915427
aggccaaagugauucggaa

SEQ ID NO: 1078933 - RNA, 19 nt, Artificial Sequence
  Description of Artificial Sequence: Synthetic oligonucleotide
  Antisense strand to SEQ ID NO: 1078932
uuccgaaucacuuuggccu

SEQ ID NO: 1078934 - RNA, 19 nt, Artificial Sequence
  Description of Artificial Sequence: Synthetic oligonucleotide
  Sense strand starting at position 953 of SEQ ID NO: 915427
uguaacugugcccaugagu

SEQ ID NO: 1078935 - RNA, 19 nt, Artificial Sequence
  Description of Artificial Sequence: Synthetic oligonucleotide
  Antisense strand to SEQ ID NO: 1078934
acucaugggcacaguuaca

SEQ ID NO: 1078936 - RNA, 19 nt, Artificial Sequence
  Description of Artificial Sequence: Synthetic oligonucleotide
  Sense strand starting at position 956 of SEQ ID NO: 915427
aacugugcccaugaguaga

SEQ ID NO: 1078937 - RNA, 19 nt, Artificial Sequence
  Description of Artificial Sequence: Synthetic oligonucleotide
  Antisense strand to SEQ ID NO: 1078936
ucuacucaugggcacaguu

SEQ ID NO: 1078938 - RNA, 19 nt, Artificial Sequence
  Description of Artificial Sequence: Synthetic oligonucleotide
  Sense strand starting at position 967 of SEQ ID NO: 915427
ugaguagacccaugccaga

SEQ ID NO: 1078939 - RNA, 19 nt, Artificial Sequence
  Description of Artificial Sequence: Synthetic oligonucleotide
  Antisense strand to SEQ ID NO: 1078938
ucuggcaugggucuacuca

SEQ ID NO: 1078940 - RNA, 19 nt, Artificial Sequence
  Description of Artificial Sequence: Synthetic oligonucleotide
  Sense strand starting at position 1182 of SEQ ID NO: 915427
gcccgucacuucccaauuu

SEQ ID NO: 1078941 - RNA, 19 nt, Artificial Sequence
  Description of Artificial Sequence: Synthetic oligonucleotide
  Antisense strand to SEQ ID NO: 1078940
aaauugggaagugacgggc

SEQ ID NO: 1078942 - RNA, 19 nt, Artificial Sequence
  Description of Artificial Sequence: Synthetic oligonucleotide
  Sense strand starting at position 2491 of SEQ ID NO: 915427
auugauucuuuggaaacau

SEQ ID NO: 1078943 - RNA, 19 nt, Artificial Sequence
  Description of Artificial Sequence: Synthetic oligonucleotide
  Antisense strand to SEQ ID NO: 1078942
auguuuccaaagaaucaau

SEQ ID NO: 1078944 - RNA, 19 nt, Artificial Sequence
  Description of Artificial Sequence: Synthetic oligonucleotide
  Sense strand starting at position 2553 of SEQ ID NO: 915427
ggccucugcccugauggaa

SEQ ID NO: 1078945 - RNA, 19 nt, Artificial Sequence
  Description of Artificial Sequence: Synthetic oligonucleotide
  Antisense strand to SEQ ID NO: 1078944
uuccaucagggcagaggcc

SEQ ID NO: 1078946 - RNA, 19 nt, Artificial Sequence
  Description of Artificial Sequence: Synthetic oligonucleotide
  Sense strand starting at position 2583 of SEQ ID NO: 915427
gaaauaauggaaugacguu

SEQ ID NO: 1078947 - RNA, 19 nt, Artificial Sequence
  Description of Artificial Sequence: Synthetic oligonucleotide
  Antisense strand to SEQ ID NO: 1078946
aacgucauuccauuauuuc

SEQ ID NO: 1078948 - RNA, 19 nt, Artificial Sequence
  Description of Artificial Sequence: Synthetic oligonucleotide
  Sense strand starting at position 2589 of SEQ ID NO: 915427
auggaaugacguuauugua

SEQ ID NO: 1078949 - RNA, 19 nt, Artificial Sequence
  Description of Artificial Sequence: Synthetic oligonucleotide
  Antisense strand to SEQ ID NO: 1078948
uacaauaacgucauuccau

SEQ ID NO: 1078950 - RNA, 19 nt, Artificial Sequence
  Description of Artificial Sequence: Synthetic oligonucleotide
  Sense strand starting at position 2596 of SEQ ID NO: 915427
gacguuauuguauguugaa

SEQ ID NO: 1078951 - RNA, 19 nt, Artificial Sequence
  Description of Artificial Sequence: Synthetic oligonucleotide
  Antisense strand to SEQ ID NO: 1078950
uucaacauacaauaacguc

SEQ ID NO: 1078952 - RNA, 19 nt, Artificial Sequence
  Description of Artificial Sequence: Synthetic oligonucleotide
  Sense strand starting at position 2597 of SEQ ID NO: 915427
acguuauuguauguugaag

SEQ ID NO: 1078953 - RNA, 19 nt, Artificial Sequence
  Description of Artificial Sequence: Synthetic oligonucleotide
  Antisense strand to SEQ ID NO: 1078952
cuucaacauacaauaacgu

SEQ ID NO: 1078954 - RNA, 19 nt, Artificial Sequence
  Description of Artificial Sequence: Synthetic oligonucleotide
  Sense strand starting at position 2649 of SEQ ID NO: 915427
auuaauucugcaggaagca

SEQ ID NO: 1078955 - RNA, 19 nt, Artificial Sequence
  Description of Artificial Sequence: Synthetic oligonucleotide
  Antisense strand to SEQ ID NO: 1078954
ugcuuccugcagaauuaau

SEQ ID NO: 1078956 - RNA, 19 nt, Artificial Sequence
  Description of Artificial Sequence: Synthetic oligonucleotide
  Sense strand starting at position 2650 of SEQ ID NO: 915427
uuaauucugcaggaagcaa

SEQ ID NO: 1078957 - RNA, 19 nt, Artificial Sequence
  Description of Artificial Sequence: Synthetic oligonucleotide
  Antisense strand to SEQ ID NO: 1078956
uugcuuccugcagaauuaa

SEQ ID NO: 1078958 - RNA, 19 nt, Artificial Sequence
  Description of Artificial Sequence: Synthetic oligonucleotide
  Sense strand starting at position 3000 of SEQ ID NO: 915427
uguaaauaagauuguugca

SEQ ID NO: 1078959 - RNA, 19 nt, Artificial Sequence
  Description of Artificial Sequence: Synthetic oligonucleotide
  Antisense strand to SEQ ID NO: 1078958
ugcaacaaucuuauuuaca

SEQ ID NO: 1078960 - RNA, 19 nt, Artificial Sequence
  Description of Artificial Sequence: Synthetic oligonucleotide
  Sense strand starting at position 3007 of SEQ ID NO: 915427
aagauuguugcauggcaga

SEQ ID NO: 1078961 - RNA, 19 nt, Artificial Sequence
  Description of Artificial Sequence: Synthetic oligonucleotide
  Antisense strand to SEQ ID NO: 1078960
ucugccaugcaacaaucuu

SEQ ID NO: 1078962 - RNA, 19 nt, Artificial Sequence
  Description of Artificial Sequence: Synthetic oligonucleotide
  Sense strand starting at position 3047 of SEQ ID NO: 915427
gugacaaacucagggaaau

SEQ ID NO: 1078963 - RNA, 19 nt, Artificial Sequence
  Description of Artificial Sequence: Synthetic oligonucleotide
  Antisense strand to SEQ ID NO: 1078962
auuucccugaguuugucac

SEQ ID NO: 1078964 - RNA, 19 nt, Artificial Sequence
  Description of Artificial Sequence: Synthetic oligonucleotide
  Sense strand starting at position 3068 of SEQ ID NO: 915427
uugccuacguguucaguca

SEQ ID NO: 1078965 - RNA, 19 nt, Artificial Sequence
  Description of Artificial Sequence: Synthetic oligonucleotide
  Antisense strand to SEQ ID NO: 1078964
ugacugaacacguaggcaa

SEQ ID NO: 1078966 - RNA, 19 nt, Artificial Sequence
  Description of Artificial Sequence: Synthetic oligonucleotide
  Sense strand starting at position 3115 of SEQ ID NO: 915427
ccaagaauauagcagugaa

SEQ ID NO: 1078967 - RNA, 19 nt, Artificial Sequence
  Description of Artificial Sequence: Synthetic oligonucleotide
  Antisense strand to SEQ ID NO: 1078966
uucacugcuauauucuugg

SEQ ID NO: 1078968 - RNA, 19 nt, Artificial Sequence
  Description of Artificial Sequence: Synthetic oligonucleotide
  Sense strand starting at position 3210 of SEQ ID NO: 915427
aagcguguuagauggugau

SEQ ID NO: 1078969 - RNA, 19 nt, Artificial Sequence
  Description of Artificial Sequence: Synthetic oligonucleotide
  Antisense strand to SEQ ID NO: 1078968
aucaccaucuaacacgcuu

SEQ ID NO: 1078970 - RNA, 19 nt, Artificial Sequence
  Description of Artificial Sequence: Synthetic oligonucleotide
  Sense strand starting at position 3254 of SEQ ID NO: 915427
uaagccauccucugaggga

SEQ ID NO: 1078971 - RNA, 19 nt, Artificial Sequence
  Description of Artificial Sequence: Synthetic oligonucleotide
  Antisense strand to SEQ ID NO: 1078970
ucccucagaggauggcuua

SEQ ID NO: 1078972 - RNA, 19 nt, Artificial Sequence
  Description of Artificial Sequence: Synthetic oligonucleotide
  Sense strand starting at position 3255 of SEQ ID NO: 915427
aagccauccucugagggaa

SEQ ID NO: 1078973 - RNA, 19 nt, Artificial Sequence
  Description of Artificial Sequence: Synthetic oligonucleotide
  Antisense strand to SEQ ID NO: 1078972
uucccucagaggauggcuu

SEQ ID NO: 1078974 - RNA, 19 nt, Artificial Sequence
  Description of Artificial Sequence: Synthetic oligonucleotide
  Sense strand starting at position 3781 of SEQ ID NO: 915427
gugggaguuguguagcaca

SEQ ID NO: 1078975 - RNA, 19 nt, Artificial Sequence
  Description of Artificial Sequence: Synthetic oligonucleotide
  Antisense strand to SEQ ID NO: 1078974
ugugcuacacaacucccac

SEQ ID NO: 1078976 - RNA, 19 nt, Artificial Sequence
  Description of Artificial Sequence: Synthetic oligonucleotide
  Sense strand starting at position 3795 of SEQ ID NO: 915427
gcacaaggccauugaaaug

SEQ ID NO: 1078977 - RNA, 19 nt, Artificial Sequence
  Description of Artificial Sequence: Synthetic oligonucleotide
  Antisense strand to SEQ ID NO: 1078976
cauuucaauggccuugugc

SEQ ID NO: 1078978 - RNA, 19 nt, Artificial Sequence
  Description of Artificial Sequence: Synthetic oligonucleotide
  Sense strand starting at position 3805 of SEQ ID NO: 915427
auugaaauggcaugugcuu

SEQ ID NO: 1078979 - RNA, 19 nt, Artificial Sequence
  Description of Artificial Sequence: Synthetic oligonucleotide
  Antisense strand to SEQ ID NO: 1078978
aagcacaugccauuucaau

SEQ ID NO: 1078980 - RNA, 19 nt, Artificial Sequence
  Description of Artificial Sequence: Synthetic oligonucleotide
  Sense strand starting at position 10 of SEQ ID NO: 915428
gcuguaacccuuuaaagag

SEQ ID NO: 1078981 - RNA, 19 nt, Artificial Sequence
  Description of Artificial Sequence: Synthetic oligonucleotide
  Antisense strand to SEQ ID NO: 1078980
cucuuuaaaggguuacagc

SEQ ID NO: 1078982 - RNA, 19 nt, Artificial Sequence
  Description of Artificial Sequence: Synthetic oligonucleotide
  Sense strand starting at position 19 of SEQ ID NO: 915428
cuuuaaagaguuuguguaa

SEQ ID NO: 1078983 - RNA, 19 nt, Artificial Sequence
  Description of Artificial Sequence: Synthetic oligonucleotide
  Antisense strand to SEQ ID NO: 1078982
uuacacaaacucuuuaaag

SEQ ID NO: 1078984 - RNA, 19 nt, Artificial Sequence
  Description of Artificial Sequence: Synthetic oligonucleotide
  Sense strand starting at position 20 of SEQ ID NO: 915428
uuuaaagaguuuguguaag

SEQ ID NO: 1078985 - RNA, 19 nt, Artificial Sequence
  Description of Artificial Sequence: Synthetic oligonucleotide
  Antisense strand to SEQ ID NO: 1078984
cuuacacaaacucuuuaaa

SEQ ID NO: 1078986 - RNA, 19 nt, Artificial Sequence
  Description of Artificial Sequence: Synthetic oligonucleotide
  Sense strand starting at position 22 of SEQ ID NO: 915428
uaaagaguuuguguaaggu

SEQ ID NO: 1078987 - RNA, 19 nt, Artificial Sequence
  Description of Artificial Sequence: Synthetic oligonucleotide
  Antisense strand to SEQ ID NO: 1078986
accuuacacaaacucuuua

SEQ ID NO: 1078988 - RNA, 19 nt, Artificial Sequence
  Description of Artificial Sequence: Synthetic oligonucleotide
  Sense strand starting at position 28 of SEQ ID NO: 915428
guuuguguaagguaggaca

SEQ ID NO: 1078989 - RNA, 19 nt, Artificial Sequence
  Description of Artificial Sequence: Synthetic oligonucleotide
  Antisense strand to SEQ ID NO: 1078988
uguccuaccuuacacaaac

SEQ ID NO: 1078990 - RNA, 19 nt, Artificial Sequence
  Description of Artificial Sequence: Synthetic oligonucleotide
  Sense strand starting at position 53 of SEQ ID NO: 915428
caaggauucugguccuaua

SEQ ID NO: 1078991 - RNA, 19 nt, Artificial Sequence
  Description of Artificial Sequence: Synthetic oligonucleotide
  Antisense strand to SEQ ID NO: 1078990
uauaggaccagaauccuug

SEQ ID NO: 1078992 - RNA, 19 nt, Artificial Sequence
  Description of Artificial Sequence: Synthetic oligonucleotide
  Sense strand starting at position 91 of SEQ ID NO: 915428
uugagagguucuucacgua

SEQ ID NO: 1078993 - RNA, 19 nt, Artificial Sequence
  Description of Artificial Sequence: Synthetic oligonucleotide
  Antisense strand to SEQ ID NO: 1078992
uacgugaagaaccucucaa

SEQ ID NO: 1078994 - RNA, 19 nt, Artificial Sequence
  Description of Artificial Sequence: Synthetic oligonucleotide
  Sense strand starting at position 114 of SEQ ID NO: 915428
gcagaauucugauccugug

SEQ ID NO: 1078995 - RNA, 19 nt, Artificial Sequence
  Description of Artificial Sequence: Synthetic oligonucleotide
  Antisense strand to SEQ ID NO: 1078994
cacaggaucagaauucugc

SEQ ID NO: 1078996 - RNA, 19 nt, Artificial Sequence
  Description of Artificial Sequence: Synthetic oligonucleotide
  Sense strand starting at position 128 of SEQ ID NO: 915428
cugugcugagggcaauaaa

SEQ ID NO: 1078997 - RNA, 19 nt, Artificial Sequence
  Description of Artificial Sequence: Synthetic oligonucleotide
  Antisense strand to SEQ ID NO: 1078996
uuuauugcccucagcacag

SEQ ID NO: 1078998 - RNA, 19 nt, Artificial Sequence
  Description of Artificial Sequence: Synthetic oligonucleotide
  Sense strand starting at position 164 of SEQ ID NO: 915428
ugaacugugcucuacuaca

SEQ ID NO: 1078999 - RNA, 19 nt, Artificial Sequence
  Description of Artificial Sequence: Synthetic oligonucleotide
  Antisense strand to SEQ ID NO: 1078998
uguaguagagcacaguuca

SEQ ID NO: 1079000 - RNA, 19 nt, Artificial Sequence
  Description of Artificial Sequence: Synthetic oligonucleotide
  Sense strand starting at position 235 of SEQ ID NO: 915428
ggguuucugcacugauaag

SEQ ID NO: 1079001 - RNA, 19 nt, Artificial Sequence
  Description of Artificial Sequence: Synthetic oligonucleotide
  Antisense strand to SEQ ID NO: 1079000
cuuaucagugcagaaaccc

SEQ ID NO: 1079002 - RNA, 19 nt, Artificial Sequence
  Description of Artificial Sequence: Synthetic oligonucleotide
  Sense strand starting at position 1070 of SEQ ID NO: 915428
ugaacuaaggccugcuaua

SEQ ID NO: 1079003 - RNA, 19 nt, Artificial Sequence
  Description of Artificial Sequence: Synthetic oligonucleotide
  Antisense strand to SEQ ID NO: 1079002
uauagcaggccuuaguuca

SEQ ID NO: 1079004 - RNA, 19 nt, Artificial Sequence
  Description of Artificial Sequence: Synthetic oligonucleotide
  Sense strand starting at position 1093 of SEQ ID NO: 915428
ccgccaugaaccuguaaga

SEQ ID NO: 1079005 - RNA, 19 nt, Artificial Sequence
  Description of Artificial Sequence: Synthetic oligonucleotide
  Antisense strand to SEQ ID NO: 1079004
ucuuacagguucauggcgg

SEQ ID NO: 1079006 - RNA, 19 nt, Artificial Sequence
  Description of Artificial Sequence: Synthetic oligonucleotide
  Sense strand starting at position 1113 of SEQ ID NO: 915428
uaagaagacgucugcaaua

SEQ ID NO: 1079007 - RNA, 19 nt, Artificial Sequence
  Description of Artificial Sequence: Synthetic oligonucleotide
  Antisense strand to SEQ ID NO: 1079006
uauugcagacgucuucuua

SEQ ID NO: 1079008 - RNA, 19 nt, Artificial Sequence
  Description of Artificial Sequence: Synthetic oligonucleotide
  Sense strand starting at position 1373 of SEQ ID NO: 915428
uugaguuuccuuuggaagu

SEQ ID NO: 1079009 - RNA, 19 nt, Artificial Sequence
  Description of Artificial Sequence: Synthetic oligonucleotide
  Antisense strand to SEQ ID NO: 1079008
acuuccaaaggaaacucaa

SEQ ID NO: 1079010 - RNA, 19 nt, Artificial Sequence
  Description of Artificial Sequence: Synthetic oligonucleotide
  Sense strand starting at position 1438 of SEQ ID NO: 915428
gaaauacuggaguggugaa

SEQ ID NO: 1079011 - RNA, 19 nt, Artificial Sequence
  Description of Artificial Sequence: Synthetic oligonucleotide
  Antisense strand to SEQ ID NO: 1079010
uucaccacuccaguauuuc

SEQ ID NO: 1079012 - RNA, 19 nt, Artificial Sequence
  Description of Artificial Sequence: Synthetic oligonucleotide
  Sense strand starting at position 1545 of SEQ ID NO: 915428
gucucacggcccgagaaau

SEQ ID NO: 1079013 - RNA, 19 nt, Artificial Sequence
  Description of Artificial Sequence: Synthetic oligonucleotide
  Antisense strand to SEQ ID NO: 1079012
auuucucgggccgugagac

SEQ ID NO: 1079014 - RNA, 19 nt, Artificial Sequence
  Description of Artificial Sequence: Synthetic oligonucleotide
  Sense strand starting at position 1556 of SEQ ID NO: 915428
cgagaaauucccgaaacga

SEQ ID NO: 1079015 - RNA, 19 nt, Artificial Sequence
  Description of Artificial Sequence: Synthetic oligonucleotide
  Antisense strand to SEQ ID NO: 1079014
ucguuucgggaauuucucg

SEQ ID NO: 1079016 - RNA, 19 nt, Artificial Sequence
  Description of Artificial Sequence: Synthetic oligonucleotide
  Sense strand starting at position 1572 of SEQ ID NO: 915428
cgagaauguaacugucaga

SEQ ID NO: 1079017 - RNA, 19 nt, Artificial Sequence
  Description of Artificial Sequence: Synthetic oligonucleotide
  Antisense strand to SEQ ID NO: 1079016
ucugacaguuacauucucg

SEQ ID NO: 1079018 - RNA, 19 nt, Artificial Sequence
  Description of Artificial Sequence: Synthetic oligonucleotide
  Sense strand starting at position 1604 of SEQ ID NO: 915428
ggguuaucccaguggaaau

SEQ ID NO: 1079019 - RNA, 19 nt, Artificial Sequence
  Description of Artificial Sequence: Synthetic oligonucleotide
  Antisense strand to SEQ ID NO: 1079018
auuuccacugggauaaccc

SEQ ID NO: 1079020 - RNA, 19 nt, Artificial Sequence
  Description of Artificial Sequence: Synthetic oligonucleotide
  Sense strand starting at position 1605 of SEQ ID NO: 915428
gguuaucccaguggaaauc

SEQ ID NO: 1079021 - RNA, 19 nt, Artificial Sequence
  Description of Artificial Sequence: Synthetic oligonucleotide
  Antisense strand to SEQ ID NO: 1079020
gauuuccacugggauaacc

SEQ ID NO: 1079022 - RNA, 19 nt, Artificial Sequence
  Description of Artificial Sequence: Synthetic oligonucleotide
  Sense strand starting at position 1616 of SEQ ID NO: 915428
uggaaaucucgaggcucca

SEQ ID NO: 1079023 - RNA, 19 nt, Artificial Sequence
  Description of Artificial Sequence: Synthetic oligonucleotide
  Antisense strand to SEQ ID NO: 1079022
uggagccucgagauuucca

SEQ ID NO: 1079024 - RNA, 19 nt, Artificial Sequence
  Description of Artificial Sequence: Synthetic oligonucleotide
  Sense strand starting at position 2024 of SEQ ID NO: 915428
uccucuuccugauugguua

SEQ ID NO: 1079025 - RNA, 19 nt, Artificial Sequence
  Description of Artificial Sequence: Synthetic oligonucleotide
  Antisense strand to SEQ ID NO: 1079024
uaaccaaucaggaagagga

SEQ ID NO: 1079026 - RNA, 19 nt, Artificial Sequence
  Description of Artificial Sequence: Synthetic oligonucleotide
  Sense strand starting at position 2321 of SEQ ID NO: 915428
acaguauuccgcgcuccau

SEQ ID NO: 1079027 - RNA, 19 nt, Artificial Sequence
  Description of Artificial Sequence: Synthetic oligonucleotide
  Antisense strand to SEQ ID NO: 1079026
auggagcgcggaauacugu

SEQ ID NO: 1079028 - RNA, 19 nt, Artificial Sequence
  Description of Artificial Sequence: Synthetic oligonucleotide
  Sense strand starting at position 2322 of SEQ ID NO: 915428
caguauuccgcgcuccauu

SEQ ID NO: 1079029 - RNA, 19 nt, Artificial Sequence
  Description of Artificial Sequence: Synthetic oligonucleotide
  Antisense strand to SEQ ID NO: 1079028
aauggagcgcggaauacug

SEQ ID NO: 1079030 - RNA, 19 nt, Artificial Sequence
  Description of Artificial Sequence: Synthetic oligonucleotide
  Sense strand starting at position 2408 of SEQ ID NO: 915428
guggaaauagcuuaugcag

SEQ ID NO: 1079031 - RNA, 19 nt, Artificial Sequence
  Description of Artificial Sequence: Synthetic oligonucleotide
  Antisense strand to SEQ ID NO: 1079030
cugcauaagcuauuuccac

SEQ ID NO: 1079032 - RNA, 19 nt, Artificial Sequence
  Description of Artificial Sequence: Synthetic oligonucleotide
  Sense strand starting at position 2646 of SEQ ID NO: 915428
acaaguucccucugggaac

SEQ ID NO: 1079033 - RNA, 19 nt, Artificial Sequence
  Description of Artificial Sequence: Synthetic oligonucleotide
  Antisense strand to SEQ ID NO: 1079032
guucccagagggaacuugu

SEQ ID NO: 1079034 - RNA, 19 nt, Artificial Sequence
  Description of Artificial Sequence: Synthetic oligonucleotide
  Sense strand starting at position 2673 of SEQ ID NO: 915428
caggguccgcgaugaagaa

SEQ ID NO: 1079035 - RNA, 19 nt, Artificial Sequence
  Description of Artificial Sequence: Synthetic oligonucleotide
  Antisense strand to SEQ ID NO: 1079034
uucuucaucgcggacccug

SEQ ID NO: 1079036 - RNA, 19 nt, Artificial Sequence
  Description of Artificial Sequence: Synthetic oligonucleotide
  Sense strand starting at position 3528 of SEQ ID NO: 915428
ucaggaaucugacugcaga

SEQ ID NO: 1079037 - RNA, 19 nt, Artificial Sequence
  Description of Artificial Sequence: Synthetic oligonucleotide
  Antisense strand to SEQ ID NO: 1079036
ucugcagucagauuccuga

SEQ ID NO: 1079038 - RNA, 19 nt, Artificial Sequence
  Description of Artificial Sequence: Synthetic oligonucleotide
  Sense strand starting at position 3529 of SEQ ID NO: 915428
caggaaucugacugcagaa

SEQ ID NO: 1079039 - RNA, 19 nt, Artificial Sequence
  Description of Artificial Sequence: Synthetic oligonucleotide
  Antisense strand to SEQ ID NO: 1079038
uucugcagucagauuccug

SEQ ID NO: 1079040 - RNA, 19 nt, Artificial Sequence
  Description of Artificial Sequence: Synthetic oligonucleotide
  Sense strand starting at position 3559 of SEQ ID NO: 915428
aauuuauccuaggguagaa

SEQ ID NO: 1079041 - RNA, 19 nt, Artificial Sequence
  Description of Artificial Sequence: Synthetic oligonucleotide
  Antisense strand to SEQ ID NO: 1079040
uucuacccuaggauaaauu

SEQ ID NO: 1079042 - RNA, 19 nt, Artificial Sequence
  Description of Artificial Sequence: Synthetic oligonucleotide
  Sense strand starting at position 3614 of SEQ ID NO: 915428
acagauguguuggucacua

SEQ ID NO: 1079043 - RNA, 19 nt, Artificial Sequence
  Description of Artificial Sequence: Synthetic oligonucleotide
  Antisense strand to SEQ ID NO: 1079042
uagugaccaacacaucugu

SEQ ID NO: 1079044 - RNA, 19 nt, Artificial Sequence
  Description of Artificial Sequence: Synthetic oligonucleotide
  Sense strand starting at position 3616 of SEQ ID NO: 915428
agauguguuggucacuaau

SEQ ID NO: 1079045 - RNA, 19 nt, Artificial Sequence
  Description of Artificial Sequence: Synthetic oligonucleotide
  Antisense strand to SEQ ID NO: 1079044
auuagugaccaacacaucu

SEQ ID NO: 1079046 - RNA, 19 nt, Artificial Sequence
  Description of Artificial Sequence: Synthetic oligonucleotide
  Sense strand starting at position 3619 of SEQ ID NO: 915428
uguguuggucacuaaucuu

SEQ ID NO: 1079047 - RNA, 19 nt, Artificial Sequence
  Description of Artificial Sequence: Synthetic oligonucleotide
  Antisense strand to SEQ ID NO: 1079046
aagauuagugaccaacaca

SEQ ID NO: 1079048 - RNA, 19 nt, Artificial Sequence
  Description of Artificial Sequence: Synthetic oligonucleotide
  Sense strand starting at position 3740 of SEQ ID NO: 915428
agagguggccagcauuaga

SEQ ID NO: 1079049 - RNA, 19 nt, Artificial Sequence
  Description of Artificial Sequence: Synthetic oligonucleotide
  Antisense strand to SEQ ID NO: 1079048
ucuaaugcuggccaccucu

SEQ ID NO: 1079050 - RNA, 19 nt, Artificial Sequence
  Description of Artificial Sequence: Synthetic oligonucleotide
  Sense strand starting at position 3757 of SEQ ID NO: 915428
gaagguaacgcauauggua

SEQ ID NO: 1079051 - RNA, 19 nt, Artificial Sequence
  Description of Artificial Sequence: Synthetic oligonucleotide
  Antisense strand to SEQ ID NO: 1079050
uaccauaugcguuaccuuc

SEQ ID NO: 1079052 - RNA, 19 nt, Artificial Sequence
  Description of Artificial Sequence: Synthetic oligonucleotide
  Sense strand starting at position 3764 of SEQ ID NO: 915428
acgcauaugguauagaaau

SEQ ID NO: 1079053 - RNA, 19 nt, Artificial Sequence
  Description of Artificial Sequence: Synthetic oligonucleotide
  Antisense strand to SEQ ID NO: 1079052
auuucuauaccauaugcgu

SEQ ID NO: 1079054 - RNA, 19 nt, Artificial Sequence
  Description of Artificial Sequence: Synthetic oligonucleotide
  Sense strand starting at position 3863 of SEQ ID NO: 915428
aggaucaacucauuguaag

SEQ ID NO: 1079055 - RNA, 19 nt, Artificial Sequence
  Description of Artificial Sequence: Synthetic oligonucleotide
  Antisense strand to SEQ ID NO: 1079054
cuuacaaugaguugauccu

SEQ ID NO: 1079056 - RNA, 19 nt, Artificial Sequence
  Description of Artificial Sequence: Synthetic oligonucleotide
  Sense strand starting at position 3864 of SEQ ID NO: 915428
ggaucaacucauuguaagu

SEQ ID NO: 1079057 - RNA, 19 nt, Artificial Sequence
  Description of Artificial Sequence: Synthetic oligonucleotide
  Antisense strand to SEQ ID NO: 1079056
acuuacaaugaguugaucc

SEQ ID NO: 1079058 - RNA, 19 nt, Artificial Sequence
  Description of Artificial Sequence: Synthetic oligonucleotide
  Sense strand starting at position 3900 of SEQ ID NO: 915428
gaaggagacugggaacaua

SEQ ID NO: 1079059 - RNA, 19 nt, Artificial Sequence
  Description of Artificial Sequence: Synthetic oligonucleotide
  Antisense strand to SEQ ID NO: 1079058
uauguucccagucuccuuc

SEQ ID NO: 1079060 - RNA, 19 nt, Artificial Sequence
  Description of Artificial Sequence: Synthetic oligonucleotide
  Sense strand starting at position 32 of SEQ ID NO: 915429
ccuuuauuaucgguauaaa

SEQ ID NO: 1079061 - RNA, 19 nt, Artificial Sequence
  Description of Artificial Sequence: Synthetic oligonucleotide
  Antisense strand to SEQ ID NO: 1079060
uuuauaccgauaauaaagg

SEQ ID NO: 1079062 - RNA, 19 nt, Artificial Sequence
  Description of Artificial Sequence: Synthetic oligonucleotide
  Sense strand starting at position 54 of SEQ ID NO: 915429
uaugauaugcucuacgaug

SEQ ID NO: 1079063 - RNA, 19 nt, Artificial Sequence
  Description of Artificial Sequence: Synthetic oligonucleotide
  Antisense strand to SEQ ID NO: 1079062
caucguagagcauaucaua

SEQ ID NO: 1079064 - RNA, 19 nt, Artificial Sequence
  Description of Artificial Sequence: Synthetic oligonucleotide
  Sense strand starting at position 99 of SEQ ID NO: 915429
ggaccaucauucccauuga

SEQ ID NO: 1079065 - RNA, 19 nt, Artificial Sequence
  Description of Artificial Sequence: Synthetic oligonucleotide
  Antisense strand to SEQ ID NO: 1079064
ucaaugggaaugauggucc

SEQ ID NO: 1079066 - RNA, 19 nt, Artificial Sequence
  Description of Artificial Sequence: Synthetic oligonucleotide
  Sense strand starting at position 109 of SEQ ID NO: 915429
ucccauugagucugauaua

SEQ ID NO: 1079067 - RNA, 19 nt, Artificial Sequence
  Description of Artificial Sequence: Synthetic oligonucleotide
  Antisense strand to SEQ ID NO: 1079066
uauaucagacucaauggga

SEQ ID NO: 1079068 - RNA, 19 nt, Artificial Sequence
  Description of Artificial Sequence: Synthetic oligonucleotide
  Sense strand starting at position 279 of SEQ ID NO: 915429
uagggcuuccucuagaugu

SEQ ID NO: 1079069 - RNA, 19 nt, Artificial Sequence
  Description of Artificial Sequence: Synthetic oligonucleotide
  Antisense strand to SEQ ID NO: 1079068
acaucuagaggaagcccua

SEQ ID NO: 1079070 - RNA, 19 nt, Artificial Sequence
  Description of Artificial Sequence: Synthetic oligonucleotide
  Sense strand starting at position 281 of SEQ ID NO: 915429
gggcuuccucuagaugucu

SEQ ID NO: 1079071 - RNA, 19 nt, Artificial Sequence
  Description of Artificial Sequence: Synthetic oligonucleotide
  Antisense strand to SEQ ID NO: 1079070
agacaucuagaggaagccc

SEQ ID NO: 1079072 - RNA, 19 nt, Artificial Sequence
  Description of Artificial Sequence: Synthetic oligonucleotide
  Sense strand starting at position 371 of SEQ ID NO: 915429
auauaaggcuuccugauca

SEQ ID NO: 1079073 - RNA, 19 nt, Artificial Sequence
  Description of Artificial Sequence: Synthetic oligonucleotide
  Antisense strand to SEQ ID NO: 1079072
ugaucaggaagccuuauau

SEQ ID NO: 1079074 - RNA, 19 nt, Artificial Sequence
  Description of Artificial Sequence: Synthetic oligonucleotide
  Sense strand starting at position 491 of SEQ ID NO: 915429
gcaagaaucccgcagggua

SEQ ID NO: 1079075 - RNA, 19 nt, Artificial Sequence
  Description of Artificial Sequence: Synthetic oligonucleotide
  Antisense strand to SEQ ID NO: 1079074
uacccugcgggauucuugc

SEQ ID NO: 1079076 - RNA, 19 nt, Artificial Sequence
  Description of Artificial Sequence: Synthetic oligonucleotide
  Sense strand starting at position 493 of SEQ ID NO: 915429
aagaaucccgcaggguaaa

SEQ ID NO: 1079077 - RNA, 19 nt, Artificial Sequence
  Description of Artificial Sequence: Synthetic oligonucleotide
  Antisense strand to SEQ ID NO: 1079076
uuuacccugcgggauucuu

SEQ ID NO: 1079078 - RNA, 19 nt, Artificial Sequence
  Description of Artificial Sequence: Synthetic oligonucleotide
  Sense strand starting at position 518 of SEQ ID NO: 915429
cacaguuugugauucuaug

SEQ ID NO: 1079079 - RNA, 19 nt, Artificial Sequence
  Description of Artificial Sequence: Synthetic oligonucleotide
  Antisense strand to SEQ ID NO: 1079078
cauagaaucacaaacugug

SEQ ID NO: 1079080 - RNA, 19 nt, Artificial Sequence
  Description of Artificial Sequence: Synthetic oligonucleotide
  Sense strand starting at position 539 of SEQ ID NO: 915429
gucggugagcaacaucuua

SEQ ID NO: 1079081 - RNA, 19 nt, Artificial Sequence
  Description of Artificial Sequence: Synthetic oligonucleotide
  Antisense strand to SEQ ID NO: 1079080
uaagauguugcucaccgac

SEQ ID NO: 1079082 - RNA, 19 nt, Artificial Sequence
  Description of Artificial Sequence: Synthetic oligonucleotide
  Sense strand starting at position 594 of SEQ ID NO: 915429
gguaaauuaugcuuaagag

SEQ ID NO: 1079083 - RNA, 19 nt, Artificial Sequence
  Description of Artificial Sequence: Synthetic oligonucleotide
  Antisense strand to SEQ ID NO: 1079082
cucuuaagcauaauuuacc

SEQ ID NO: 1079084 - RNA, 19 nt, Artificial Sequence
  Description of Artificial Sequence: Synthetic oligonucleotide
  Sense strand starting at position 595 of SEQ ID NO: 915429
guaaauuaugcuuaagagc

SEQ ID NO: 1079085 - RNA, 19 nt, Artificial Sequence
  Description of Artificial Sequence: Synthetic oligonucleotide
  Antisense strand to SEQ ID NO: 1079084
gcucuuaagcauaauuuac

SEQ ID NO: 1079086 - RNA, 19 nt, Artificial Sequence
  Description of Artificial Sequence: Synthetic oligonucleotide
  Sense strand starting at position 604 of SEQ ID NO: 915429
gcuuaagagcgguaaacau

SEQ ID NO: 1079087 - RNA, 19 nt, Artificial Sequence
  Description of Artificial Sequence: Synthetic oligonucleotide
  Antisense strand to SEQ ID NO: 1079086
auguuuaccgcucuuaagc

SEQ ID NO: 1079088 - RNA, 19 nt, Artificial Sequence
  Description of Artificial Sequence: Synthetic oligonucleotide
  Sense strand starting at position 613 of SEQ ID NO: 915429
cgguaaacauaaucuauua

SEQ ID NO: 1079089 - RNA, 19 nt, Artificial Sequence
  Description of Artificial Sequence: Synthetic oligonucleotide
  Antisense strand to SEQ ID NO: 1079088
uaauagauuauguuuaccg

SEQ ID NO: 1079090 - RNA, 19 nt, Artificial Sequence
  Description of Artificial Sequence: Synthetic oligonucleotide
  Sense strand starting at position 840 of SEQ ID NO: 915429
auucgaugaccggaccaua

SEQ ID NO: 1079091 - RNA, 19 nt, Artificial Sequence
  Description of Artificial Sequence: Synthetic oligonucleotide
  Antisense strand to SEQ ID NO: 1079090
uaugguccggucaucgaau

SEQ ID NO: 1079092 - RNA, 19 nt, Artificial Sequence
  Description of Artificial Sequence: Synthetic oligonucleotide
  Sense strand starting at position 1079 of SEQ ID NO: 915429
uucccauacugcucgaaga

SEQ ID NO: 1079093 - RNA, 19 nt, Artificial Sequence
  Description of Artificial Sequence: Synthetic oligonucleotide
  Antisense strand to SEQ ID NO: 1079092
ucuucgagcaguaugggaa

SEQ ID NO: 1079094 - RNA, 19 nt, Artificial Sequence
  Description of Artificial Sequence: Synthetic oligonucleotide
  Sense strand starting at position 1081 of SEQ ID NO: 915429
cccauacugcucgaagagu

SEQ ID NO: 1079095 - RNA, 19 nt, Artificial Sequence
  Description of Artificial Sequence: Synthetic oligonucleotide
  Antisense strand to SEQ ID NO: 1079094
acucuucgagcaguauggg

SEQ ID NO: 1079096 - RNA, 19 nt, Artificial Sequence
  Description of Artificial Sequence: Synthetic oligonucleotide
  Sense strand starting at position 1089 of SEQ ID NO: 915429
gcucgaagagugagcgaau

SEQ ID NO: 1079097 - RNA, 19 nt, Artificial Sequence
  Description of Artificial Sequence: Synthetic oligonucleotide
  Antisense strand to SEQ ID NO: 1079096
auucgcucacucuucgagc

SEQ ID NO: 1079098 - RNA, 19 nt, Artificial Sequence
  Description of Artificial Sequence: Synthetic oligonucleotide
  Sense strand starting at position 1102 of SEQ ID NO: 915429
gcgaaucuccugcucugua

SEQ ID NO: 1079099 - RNA, 19 nt, Artificial Sequence
  Description of Artificial Sequence: Synthetic oligonucleotide
  Antisense strand to SEQ ID NO: 1079098
uacagagcaggagauucgc

SEQ ID NO: 1079100 - RNA, 19 nt, Artificial Sequence
  Description of Artificial Sequence: Synthetic oligonucleotide
  Sense strand starting at position 1131 of SEQ ID NO: 915429
gaagguuuccgaugaacag

SEQ ID NO: 1079101 - RNA, 19 nt, Artificial Sequence
  Description of Artificial Sequence: Synthetic oligonucleotide
  Antisense strand to SEQ ID NO: 1079100
cuguucaucggaaaccuuc

SEQ ID NO: 1079102 - RNA, 19 nt, Artificial Sequence
  Description of Artificial Sequence: Synthetic oligonucleotide
  Sense strand starting at position 1240 of SEQ ID NO: 915429
cgucuaauccuccaaaguu

SEQ ID NO: 1079103 - RNA, 19 nt, Artificial Sequence
  Description of Artificial Sequence: Synthetic oligonucleotide
  Antisense strand to SEQ ID NO: 1079102
aacuuuggaggauuagacg

SEQ ID NO: 1079104 - RNA, 19 nt, Artificial Sequence
  Description of Artificial Sequence: Synthetic oligonucleotide
  Sense strand starting at position 1327 of SEQ ID NO: 915429
ucgagaagugcgagcuaug

SEQ ID NO: 1079105 - RNA, 19 nt, Artificial Sequence
  Description of Artificial Sequence: Synthetic oligonucleotide
  Antisense strand to SEQ ID NO: 1079104
cauagcucgcacuucucga

SEQ ID NO: 1079106 - RNA, 19 nt, Artificial Sequence
  Description of Artificial Sequence: Synthetic oligonucleotide
  Sense strand starting at position 1407 of SEQ ID NO: 915429
aguggagcgcaaugaaaua

SEQ ID NO: 1079107 - RNA, 19 nt, Artificial Sequence
  Description of Artificial Sequence: Synthetic oligonucleotide
  Antisense strand to SEQ ID NO: 1079106
uauuucauugcgcuccacu

SEQ ID NO: 1079108 - RNA, 19 nt, Artificial Sequence
  Description of Artificial Sequence: Synthetic oligonucleotide
  Sense strand starting at position 1523 of SEQ ID NO: 915429
gagggaaaucuguguaccu

SEQ ID NO: 1079109 - RNA, 19 nt, Artificial Sequence
  Description of Artificial Sequence: Synthetic oligonucleotide
  Antisense strand to SEQ ID NO: 1079108
agguacacagauuucccuc

SEQ ID NO: 1079110 - RNA, 19 nt, Artificial Sequence
  Description of Artificial Sequence: Synthetic oligonucleotide
  Sense strand starting at position 1524 of SEQ ID NO: 915429
agggaaaucuguguaccuc

SEQ ID NO: 1079111 - RNA, 19 nt, Artificial Sequence
  Description of Artificial Sequence: Synthetic oligonucleotide
  Antisense strand to SEQ ID NO: 1079110
gagguacacagauuucccu

SEQ ID NO: 1079112 - RNA, 19 nt, Artificial Sequence
  Description of Artificial Sequence: Synthetic oligonucleotide
  Sense strand starting at position 1525 of SEQ ID NO: 915429
gggaaaucuguguaccucu

SEQ ID NO: 1079113 - RNA, 19 nt, Artificial Sequence
  Description of Artificial Sequence: Synthetic oligonucleotide
  Antisense strand to SEQ ID NO: 1079112
agagguacacagauuuccc

SEQ ID NO: 1079114 - RNA, 19 nt, Artificial Sequence
  Description of Artificial Sequence: Synthetic oligonucleotide
  Sense strand starting at position 2405 of SEQ ID NO: 915429
uaaaguuugucauugcaga

SEQ ID NO: 1079115 - RNA, 19 nt, Artificial Sequence
  Description of Artificial Sequence: Synthetic oligonucleotide
  Antisense strand to SEQ ID NO: 1079114
ucugcaaugacaaacuuua

SEQ ID NO: 1079116 - RNA, 19 nt, Artificial Sequence
  Description of Artificial Sequence: Synthetic oligonucleotide
  Sense strand starting at position 2406 of SEQ ID NO: 915429
aaaguuugucauugcagag

SEQ ID NO: 1079117 - RNA, 19 nt, Artificial Sequence
  Description of Artificial Sequence: Synthetic oligonucleotide
  Antisense strand to SEQ ID NO: 1079116
cucugcaaugacaaacuuu

SEQ ID NO: 1079118 - RNA, 19 nt, Artificial Sequence
  Description of Artificial Sequence: Synthetic oligonucleotide
  Sense strand starting at position 2426 of SEQ ID NO: 915429
uguuauuuauugcuacgga

SEQ ID NO: 1079119 - RNA, 19 nt, Artificial Sequence
  Description of Artificial Sequence: Synthetic oligonucleotide
  Antisense strand to SEQ ID NO: 1079118
uccguagcaauaaauaaca

SEQ ID NO: 1079120 - RNA, 19 nt, Artificial Sequence
  Description of Artificial Sequence: Synthetic oligonucleotide
  Sense strand starting at position 2648 of SEQ ID NO: 915429
ucccuaguucuggguggga

SEQ ID NO: 1079121 - RNA, 19 nt, Artificial Sequence
  Description of Artificial Sequence: Synthetic oligonucleotide
  Antisense strand to SEQ ID NO: 1079120
ucccacccagaacuaggga

SEQ ID NO: 1079122 - RNA, 19 nt, Artificial Sequence
  Description of Artificial Sequence: Synthetic oligonucleotide
  Sense strand starting at position 2650 of SEQ ID NO: 915429
ccuaguucugggugggaca

SEQ ID NO: 1079123 - RNA, 19 nt, Artificial Sequence
  Description of Artificial Sequence: Synthetic oligonucleotide
  Antisense strand to SEQ ID NO: 1079122
ugucccacccagaacuagg

SEQ ID NO: 1079124 - RNA, 19 nt, Artificial Sequence
  Description of Artificial Sequence: Synthetic oligonucleotide
  Sense strand starting at position 3080 of SEQ ID NO: 915429
aaagaaguuuaggcugauu

SEQ ID NO: 1079125 - RNA, 19 nt, Artificial Sequence
  Description of Artificial Sequence: Synthetic oligonucleotide
  Antisense strand to SEQ ID NO: 1079124
aaucagccuaaacuucuuu

SEQ ID NO: 1079126 - RNA, 19 nt, Artificial Sequence
  Description of Artificial Sequence: Synthetic oligonucleotide
  Sense strand starting at position 3139 of SEQ ID NO: 915429
gauugauggauuggguuua

SEQ ID NO: 1079127 - RNA, 19 nt, Artificial Sequence
  Description of Artificial Sequence: Synthetic oligonucleotide
  Antisense strand to SEQ ID NO: 1079126
uaaacccaauccaucaauc

SEQ ID NO: 1079128 - RNA, 19 nt, Artificial Sequence
  Description of Artificial Sequence: Synthetic oligonucleotide
  Sense strand starting at position 3281 of SEQ ID NO: 915429
uuggauauguucuuuaccu

SEQ ID NO: 1079129 - RNA, 19 nt, Artificial Sequence
  Description of Artificial Sequence: Synthetic oligonucleotide
  Antisense strand to SEQ ID NO: 1079128
agguaaagaacauauccaa

SEQ ID NO: 1079130 - RNA, 19 nt, Artificial Sequence
  Description of Artificial Sequence: Synthetic oligonucleotide
  Sense strand starting at position 3282 of SEQ ID NO: 915429
uggauauguucuuuaccug

SEQ ID NO: 1079131 - RNA, 19 nt, Artificial Sequence
  Description of Artificial Sequence: Synthetic oligonucleotide
  Antisense strand to SEQ ID NO: 1079130
cagguaaagaacauaucca

SEQ ID NO: 1079132 - RNA, 19 nt, Artificial Sequence
  Description of Artificial Sequence: Synthetic oligonucleotide
  Sense strand starting at position 3283 of SEQ ID NO: 915429
ggauauguucuuuaccuga

SEQ ID NO: 1079133 - RNA, 19 nt, Artificial Sequence
  Description of Artificial Sequence: Synthetic oligonucleotide
  Antisense strand to SEQ ID NO: 1079132
ucagguaaagaacauaucc

SEQ ID NO: 1079134 - RNA, 19 nt, Artificial Sequence
  Description of Artificial Sequence: Synthetic oligonucleotide
  Sense strand starting at position 3285 of SEQ ID NO: 915429
auauguucuuuaccugagu

SEQ ID NO: 1079135 - RNA, 19 nt, Artificial Sequence
  Description of Artificial Sequence: Synthetic oligonucleotide
  Antisense strand to SEQ ID NO: 1079134
acucagguaaagaacauau

SEQ ID NO: 1079136 - RNA, 19 nt, Artificial Sequence
  Description of Artificial Sequence: Synthetic oligonucleotide
  Sense strand starting at position 3288 of SEQ ID NO: 915429
uguucuuuaccugaguucu

SEQ ID NO: 1079137 - RNA, 19 nt, Artificial Sequence
  Description of Artificial Sequence: Synthetic oligonucleotide
  Antisense strand to SEQ ID NO: 1079136
agaacucagguaaagaaca

SEQ ID NO: 1079138 - RNA, 19 nt, Artificial Sequence
  Description of Artificial Sequence: Synthetic oligonucleotide
  Sense strand starting at position 3331 of SEQ ID NO: 915429
gaggcacuguccuuccaau

SEQ ID NO: 1079139 - RNA, 19 nt, Artificial Sequence
  Description of Artificial Sequence: Synthetic oligonucleotide
  Antisense strand to SEQ ID NO: 1079138
auuggaaggacagugccuc

SEQ ID NO: 1079140 - RNA, 19 nt, Artificial Sequence
  Description of Artificial Sequence: Synthetic oligonucleotide
  Sense strand starting at position 422 of SEQ ID NO: 915430
agugauacaguuuauguuu

SEQ ID NO: 1079141 - RNA, 19 nt, Artificial Sequence
  Description of Artificial Sequence: Synthetic oligonucleotide
  Antisense strand to SEQ ID NO: 1079140
aaacauaaacuguaucacu

SEQ ID NO: 1079142 - RNA, 19 nt, Artificial Sequence
  Description of Artificial Sequence: Synthetic oligonucleotide
  Sense strand starting at position 650 of SEQ ID NO: 915430
gaaccucauugggcaguua

SEQ ID NO: 1079143 - RNA, 19 nt, Artificial Sequence
  Description of Artificial Sequence: Synthetic oligonucleotide
  Antisense strand to SEQ ID NO: 1079142
uaacugcccaaugagguuc

SEQ ID NO: 1079144 - RNA, 19 nt, Artificial Sequence
  Description of Artificial Sequence: Synthetic oligonucleotide
  Sense strand starting at position 659 of SEQ ID NO: 915430
ugggcaguuaccugaucua

SEQ ID NO: 1079145 - RNA, 19 nt, Artificial Sequence
  Description of Artificial Sequence: Synthetic oligonucleotide
  Antisense strand to SEQ ID NO: 1079144
uagaucagguaacugccca

SEQ ID NO: 1079146 - RNA, 19 nt, Artificial Sequence
  Description of Artificial Sequence: Synthetic oligonucleotide
  Sense strand starting at position 662 of SEQ ID NO: 915430
gcaguuaccugaucuaaau

SEQ ID NO: 1079147 - RNA, 19 nt, Artificial Sequence
  Description of Artificial Sequence: Synthetic oligonucleotide
  Antisense strand to SEQ ID NO: 1079146
auuuagaucagguaacugc

SEQ ID NO: 1079148 - RNA, 19 nt, Artificial Sequence
  Description of Artificial Sequence: Synthetic oligonucleotide
  Sense strand starting at position 992 of SEQ ID NO: 915430
ccuaguuaugacugaacau

SEQ ID NO: 1079149 - RNA, 19 nt, Artificial Sequence
  Description of Artificial Sequence: Synthetic oligonucleotide
  Antisense strand to SEQ ID NO: 1079148
auguucagucauaacuagg

SEQ ID NO: 1079150 - RNA, 19 nt, Artificial Sequence
  Description of Artificial Sequence: Synthetic oligonucleotide
  Sense strand starting at position 1094 of SEQ ID NO: 915430
gugaccaaucgccauuauu

SEQ ID NO: 1079151 - RNA, 19 nt, Artificial Sequence
  Description of Artificial Sequence: Synthetic oligonucleotide
  Antisense strand to SEQ ID NO: 1079150
aauaauggcgauuggucac

SEQ ID NO: 1079152 - RNA, 19 nt, Artificial Sequence
  Description of Artificial Sequence: Synthetic oligonucleotide
  Sense strand starting at position 1512 of SEQ ID NO: 915430
ggaucucuaccacgggaaa

SEQ ID NO: 1079153 - RNA, 19 nt, Artificial Sequence
  Description of Artificial Sequence: Synthetic oligonucleotide
  Antisense strand to SEQ ID NO: 1079152
uuucccgugguagagaucc

SEQ ID NO: 1079154 - RNA, 19 nt, Artificial Sequence
  Description of Artificial Sequence: Synthetic oligonucleotide
  Sense strand starting at position 1524 of SEQ ID NO: 915430
cgggaaaccugaucgagga

SEQ ID NO: 1079155 - RNA, 19 nt, Artificial Sequence
  Description of Artificial Sequence: Synthetic oligonucleotide
  Antisense strand to SEQ ID NO: 1079154
uccucgaucagguuucccg

SEQ ID NO: 1079156 - RNA, 19 nt, Artificial Sequence
  Description of Artificial Sequence: Synthetic oligonucleotide
  Sense strand starting at position 1564 of SEQ ID NO: 915430
ucacuuucggccuaaacga

SEQ ID NO: 1079157 - RNA, 19 nt, Artificial Sequence
  Description of Artificial Sequence: Synthetic oligonucleotide
  Antisense strand to SEQ ID NO: 1079156
ucguuuaggccgaaaguga

SEQ ID NO: 1079158 - RNA, 19 nt, Artificial Sequence
  Description of Artificial Sequence: Synthetic oligonucleotide
  Sense strand starting at position 2191 of SEQ ID NO: 915430
guuugaauauggcccugaa

SEQ ID NO: 1079159 - RNA, 19 nt, Artificial Sequence
  Description of Artificial Sequence: Synthetic oligonucleotide
  Antisense strand to SEQ ID NO: 1079158
uucagggccauauucaaac

SEQ ID NO: 1079160 - RNA, 19 nt, Artificial Sequence
  Description of Artificial Sequence: Synthetic oligonucleotide
  Sense strand starting at position 2194 of SEQ ID NO: 915430
ugaauauggcccugaacaa

SEQ ID NO: 1079161 - RNA, 19 nt, Artificial Sequence
  Description of Artificial Sequence: Synthetic oligonucleotide
  Antisense strand to SEQ ID NO: 1079160
uuguucagggccauauuca

SEQ ID NO: 1079162 - RNA, 19 nt, Artificial Sequence
  Description of Artificial Sequence: Synthetic oligonucleotide
  Sense strand starting at position 2513 of SEQ ID NO: 915430
gcugcaacagcguuugauu

SEQ ID NO: 1079163 - RNA, 19 nt, Artificial Sequence
  Description of Artificial Sequence: Synthetic oligonucleotide
  Antisense strand to SEQ ID NO: 1079162
aaucaaacgcuguugcagc

SEQ ID NO: 1079164 - RNA, 19 nt, Artificial Sequence
  Description of Artificial Sequence: Synthetic oligonucleotide
  Sense strand starting at position 2529 of SEQ ID NO: 915430
auugcauuaggagguguua

SEQ ID NO: 1079165 - RNA, 19 nt, Artificial Sequence
  Description of Artificial Sequence: Synthetic oligonucleotide
  Antisense strand to SEQ ID NO: 1079164
uaacaccuccuaaugcaau

SEQ ID NO: 1079166 - RNA, 19 nt, Artificial Sequence
  Description of Artificial Sequence: Synthetic oligonucleotide
  Sense strand starting at position 2540 of SEQ ID NO: 915430
agguguuaucgcagcucga

SEQ ID NO: 1079167 - RNA, 19 nt, Artificial Sequence
  Description of Artificial Sequence: Synthetic oligonucleotide
  Antisense strand to SEQ ID NO: 1079166
ucgagcugcgauaacaccu

SEQ ID NO: 1079168 - RNA, 19 nt, Artificial Sequence
  Description of Artificial Sequence: Synthetic oligonucleotide
  Sense strand starting at position 2541 of SEQ ID NO: 915430
gguguuaucgcagcucgaa

SEQ ID NO: 1079169 - RNA, 19 nt, Artificial Sequence
  Description of Artificial Sequence: Synthetic oligonucleotide
  Antisense strand to SEQ ID NO: 1079168
uucgagcugcgauaacacc

SEQ ID NO: 1079170 - RNA, 19 nt, Artificial Sequence
  Description of Artificial Sequence: Synthetic oligonucleotide
  Sense strand starting at position 2542 of SEQ ID NO: 915430
guguuaucgcagcucgaau

SEQ ID NO: 1079171 - RNA, 19 nt, Artificial Sequence
  Description of Artificial Sequence: Synthetic oligonucleotide
  Antisense strand to SEQ ID NO: 1079170
auucgagcugcgauaacac

SEQ ID NO: 1079172 - RNA, 19 nt, Artificial Sequence
  Description of Artificial Sequence: Synthetic oligonucleotide
  Sense strand starting at position 2543 of SEQ ID NO: 915430
uguuaucgcagcucgaauu

SEQ ID NO: 1079173 - RNA, 19 nt, Artificial Sequence
  Description of Artificial Sequence: Synthetic oligonucleotide
  Antisense strand to SEQ ID NO: 1079172
aauucgagcugcgauaaca

SEQ ID NO: 1079174 - RNA, 19 nt, Artificial Sequence
  Description of Artificial Sequence: Synthetic oligonucleotide
  Sense strand starting at position 2638 of SEQ ID NO: 915430
agcagcaaucguguuguuu

SEQ ID NO: 1079175 - RNA, 19 nt, Artificial Sequence
  Description of Artificial Sequence: Synthetic oligonucleotide
  Antisense strand to SEQ ID NO: 1079174
aaacaacacgauugcugcu

SEQ ID NO: 1079176 - RNA, 19 nt, Artificial Sequence
  Description of Artificial Sequence: Synthetic oligonucleotide
  Sense strand starting at position 2685 of SEQ ID NO: 915430
auacgugggaguuauauga

SEQ ID NO: 1079177 - RNA, 19 nt, Artificial Sequence
  Description of Artificial Sequence: Synthetic oligonucleotide
  Antisense strand to SEQ ID NO: 1079176
ucauauaacucccacguau

SEQ ID NO: 1079178 - RNA, 19 nt, Artificial Sequence
  Description of Artificial Sequence: Synthetic oligonucleotide
  Sense strand starting at position 2689 of SEQ ID NO: 915430
gugggaguuauaugaauau

SEQ ID NO: 1079179 - RNA, 19 nt, Artificial Sequence
  Description of Artificial Sequence: Synthetic oligonucleotide
  Antisense strand to SEQ ID NO: 1079178
auauucauauaacucccac

SEQ ID NO: 1079180 - RNA, 19 nt, Artificial Sequence
  Description of Artificial Sequence: Synthetic oligonucleotide
  Sense strand starting at position 2698 of SEQ ID NO: 915430
auaugaauauguccuagca

SEQ ID NO: 1079181 - RNA, 19 nt, Artificial Sequence
  Description of Artificial Sequence: Synthetic oligonucleotide
  Antisense strand to SEQ ID NO: 1079180
ugcuaggacauauucauau

SEQ ID NO: 1079182 - RNA, 19 nt, Artificial Sequence
  Description of Artificial Sequence: Synthetic oligonucleotide
  Sense strand starting at position 2725 of SEQ ID NO: 915430
aguguaacaguugauugau

SEQ ID NO: 1079183 - RNA, 19 nt, Artificial Sequence
  Description of Artificial Sequence: Synthetic oligonucleotide
  Antisense strand to SEQ ID NO: 1079182
aucaaucaacuguuacacu

SEQ ID NO: 1079184 - RNA, 19 nt, Artificial Sequence
  Description of Artificial Sequence: Synthetic oligonucleotide
  Sense strand starting at position 2798 of SEQ ID NO: 915430
auucuuaggucgucacaaa

SEQ ID NO: 1079185 - RNA, 19 nt, Artificial Sequence
  Description of Artificial Sequence: Synthetic oligonucleotide
  Antisense strand to SEQ ID NO: 1079184
uuugugacgaccuaagaau

SEQ ID NO: 1079186 - RNA, 19 nt, Artificial Sequence
  Description of Artificial Sequence: Synthetic oligonucleotide
  Sense strand starting at position 3309 of SEQ ID NO: 915430
uguaguaaacacuguauga

SEQ ID NO: 1079187 - RNA, 19 nt, Artificial Sequence
  Description of Artificial Sequence: Synthetic oligonucleotide
  Antisense strand to SEQ ID NO: 1079186
ucauacaguguuuacuaca

SEQ ID NO: 1079188 - RNA, 19 nt, Artificial Sequence
  Description of Artificial Sequence: Synthetic oligonucleotide
  Sense strand starting at position 3336 of SEQ ID NO: 915430
cagucuggccaucaagaaa

SEQ ID NO: 1079189 - RNA, 19 nt, Artificial Sequence
  Description of Artificial Sequence: Synthetic oligonucleotide
  Antisense strand to SEQ ID NO: 1079188
uuucuugauggccagacug

SEQ ID NO: 1079190 - RNA, 19 nt, Artificial Sequence
  Description of Artificial Sequence: Synthetic oligonucleotide
  Sense strand starting at position 3358 of SEQ ID NO: 915430
cacggaguauauucuagau

SEQ ID NO: 1079191 - RNA, 19 nt, Artificial Sequence
  Description of Artificial Sequence: Synthetic oligonucleotide
  Antisense strand to SEQ ID NO: 1079190
aucuagaauauacuccgug

SEQ ID NO: 1079192 - RNA, 19 nt, Artificial Sequence
  Description of Artificial Sequence: Synthetic oligonucleotide
  Sense strand starting at position 3379 of SEQ ID NO: 915430
ggaggcuacuaagugaaua

SEQ ID NO: 1079193 - RNA, 19 nt, Artificial Sequence
  Description of Artificial Sequence: Synthetic oligonucleotide
  Antisense strand to SEQ ID NO: 1079192
uauucacuuaguagccucc

SEQ ID NO: 1079194 - RNA, 19 nt, Artificial Sequence
  Description of Artificial Sequence: Synthetic oligonucleotide
  Sense strand starting at position 3415 of SEQ ID NO: 915430
cuguuuauuagguacagua

SEQ ID NO: 1079195 - RNA, 19 nt, Artificial Sequence
  Description of Artificial Sequence: Synthetic oligonucleotide
  Antisense strand to SEQ ID NO: 1079194
uacuguaccuaauaaacag

SEQ ID NO: 1079196 - RNA, 19 nt, Artificial Sequence
  Description of Artificial Sequence: Synthetic oligonucleotide
  Sense strand starting at position 3417 of SEQ ID NO: 915430
guuuauuagguacaguaau

SEQ ID NO: 1079197 - RNA, 19 nt, Artificial Sequence
  Description of Artificial Sequence: Synthetic oligonucleotide
  Antisense strand to SEQ ID NO: 1079196
auuacuguaccuaauaaac

SEQ ID NO: 1079198 - RNA, 19 nt, Artificial Sequence
  Description of Artificial Sequence: Synthetic oligonucleotide
  Sense strand starting at position 3569 of SEQ ID NO: 915430
caauguuuaaaggguggua

SEQ ID NO: 1079199 - RNA, 19 nt, Artificial Sequence
  Description of Artificial Sequence: Synthetic oligonucleotide
  Antisense strand to SEQ ID NO: 1079198
uaccacccuuuaaacauug

SEQ ID NO: 1079200 - RNA, 19 nt, Artificial Sequence
  Description of Artificial Sequence: Synthetic oligonucleotide
  Sense strand starting at position 3571 of SEQ ID NO: 915430
auguuuaaagggugguauu

SEQ ID NO: 1079201 - RNA, 19 nt, Artificial Sequence
  Description of Artificial Sequence: Synthetic oligonucleotide
  Antisense strand to SEQ ID NO: 1079200
aauaccacccuuuaaacau

SEQ ID NO: 1079202 - RNA, 19 nt, Artificial Sequence
  Description of Artificial Sequence: Synthetic oligonucleotide
  Sense strand starting at position 3609 of SEQ ID NO: 915430
uuguaagugccagcucuuu

SEQ ID NO: 1079203 - RNA, 19 nt, Artificial Sequence
  Description of Artificial Sequence: Synthetic oligonucleotide
  Antisense strand to SEQ ID NO: 1079202
aaagagcuggcacuuacaa

SEQ ID NO: 1079204 - RNA, 19 nt, Artificial Sequence
  Description of Artificial Sequence: Synthetic oligonucleotide
  Sense strand starting at position 3615 of SEQ ID NO: 915430
gugccagcucuuuauauaa

SEQ ID NO: 1079205 - RNA, 19 nt, Artificial Sequence
  Description of Artificial Sequence: Synthetic oligonucleotide
  Antisense strand to SEQ ID NO: 1079204
uuauauaaagagcuggcac

SEQ ID NO: 1079206 - RNA, 19 nt, Artificial Sequence
  Description of Artificial Sequence: Synthetic oligonucleotide
  Sense strand starting at position 3749 of SEQ ID NO: 915430
acguguuaagaagaauguu

SEQ ID NO: 1079207 - RNA, 19 nt, Artificial Sequence
  Description of Artificial Sequence: Synthetic oligonucleotide
  Antisense strand to SEQ ID NO: 1079206
aacauucuucuuaacacgu

SEQ ID NO: 1079208 - RNA, 19 nt, Artificial Sequence
  Description of Artificial Sequence: Synthetic oligonucleotide
  Sense strand starting at position 3783 of SEQ ID NO: 915430
cuuccauaagagggugauu

SEQ ID NO: 1079209 - RNA, 19 nt, Artificial Sequence
  Description of Artificial Sequence: Synthetic oligonucleotide
  Antisense strand to SEQ ID NO: 1079208
aaucacccucuuauggaag

SEQ ID NO: 1079210 - RNA, 19 nt, Artificial Sequence
  Description of Artificial Sequence: Synthetic oligonucleotide
  Sense strand starting at position 3823 of SEQ ID NO: 915430
accagaucauaggaagaau

SEQ ID NO: 1079211 - RNA, 19 nt, Artificial Sequence
  Description of Artificial Sequence: Synthetic oligonucleotide
  Antisense strand to SEQ ID NO: 1079210
auucuuccuaugaucuggu

SEQ ID NO: 1079212 - RNA, 19 nt, Artificial Sequence
  Description of Artificial Sequence: Synthetic oligonucleotide
  Sense strand starting at position 3901 of SEQ ID NO: 915430
ggacuucuauuguuuauag

SEQ ID NO: 1079213 - RNA, 19 nt, Artificial Sequence
  Description of Artificial Sequence: Synthetic oligonucleotide
  Antisense strand to SEQ ID NO: 1079212
cuauaaacaauagaagucc

SEQ ID NO: 1079214 - RNA, 19 nt, Artificial Sequence
  Description of Artificial Sequence: Synthetic oligonucleotide
  Sense strand starting at position 3918 of SEQ ID NO: 915430
agagauauuuauugagaac

SEQ ID NO: 1079215 - RNA, 19 nt, Artificial Sequence
  Description of Artificial Sequence: Synthetic oligonucleotide
  Antisense strand to SEQ ID NO: 1079214
guucucaauaaauaucucu

SEQ ID NO: 1079216 - RNA, 19 nt, Artificial Sequence
  Description of Artificial Sequence: Synthetic oligonucleotide
  Sense strand starting at position 3960 of SEQ ID NO: 915430
gcgguaagcacuuagaaua

SEQ ID NO: 1079217 - RNA, 19 nt, Artificial Sequence
  Description of Artificial Sequence: Synthetic oligonucleotide
  Antisense strand to SEQ ID NO: 1079216
uauucuaagugcuuaccgc

SEQ ID NO: 1079218 - RNA, 19 nt, Artificial Sequence
  Description of Artificial Sequence: Synthetic oligonucleotide
  Sense strand starting at position 3970 of SEQ ID NO: 915430
cuuagaauaaaguggugaa

SEQ ID NO: 1079219 - RNA, 19 nt, Artificial Sequence
  Description of Artificial Sequence: Synthetic oligonucleotide
  Antisense strand to SEQ ID NO: 1079218
uucaccacuuuauucuaag

SEQ ID NO: 1079220 - RNA, 19 nt, Artificial Sequence
  Description of Artificial Sequence: Synthetic oligonucleotide
  Sense strand starting at position 2010 of SEQ ID NO: 915431
gccaauucgccgucgggaa

SEQ ID NO: 1079221 - RNA, 19 nt, Artificial Sequence
  Description of Artificial Sequence: Synthetic oligonucleotide
  Antisense strand to SEQ ID NO: 1079220
uucccgacggcgaauuggc

SEQ ID NO: 1079222 - RNA, 19 nt, Artificial Sequence
  Description of Artificial Sequence: Synthetic oligonucleotide
  Sense strand starting at position 2388 of SEQ ID NO: 915431
ugcuauugucuuuauucuu

SEQ ID NO: 1079223 - RNA, 19 nt, Artificial Sequence
  Description of Artificial Sequence: Synthetic oligonucleotide
  Antisense strand to SEQ ID NO: 1079222
aagaauaaagacaauagca

SEQ ID NO: 1079224 - RNA, 19 nt, Artificial Sequence
  Description of Artificial Sequence: Synthetic oligonucleotide
  Sense strand starting at position 2527 of SEQ ID NO: 915431
uucucuaugcacugguuaa

SEQ ID NO: 1079225 - RNA, 19 nt, Artificial Sequence
  Description of Artificial Sequence: Synthetic oligonucleotide
  Antisense strand to SEQ ID NO: 1079224
uuaaccagugcauagagaa

SEQ ID NO: 1079226 - RNA, 19 nt, Artificial Sequence
  Description of Artificial Sequence: Synthetic oligonucleotide
  Sense strand starting at position 2551 of SEQ ID NO: 915431
ugccuugagcuguaauaua

SEQ ID NO: 1079227 - RNA, 19 nt, Artificial Sequence
  Description of Artificial Sequence: Synthetic oligonucleotide
  Antisense strand to SEQ ID NO: 1079226
uauauuacagcucaaggca

SEQ ID NO: 1079228 - RNA, 19 nt, Artificial Sequence
  Description of Artificial Sequence: Synthetic oligonucleotide
  Sense strand starting at position 2689 of SEQ ID NO: 915431
uuuaauaugcucuguacga

SEQ ID NO: 1079229 - RNA, 19 nt, Artificial Sequence
  Description of Artificial Sequence: Synthetic oligonucleotide
  Antisense strand to SEQ ID NO: 1079228
ucguacagagcauauuaaa

SEQ ID NO: 1079230 - RNA, 19 nt, Artificial Sequence
  Description of Artificial Sequence: Synthetic oligonucleotide
  Sense strand starting at position 2690 of SEQ ID NO: 915431
uuaauaugcucuguacgau

SEQ ID NO: 1079231 - RNA, 19 nt, Artificial Sequence
  Description of Artificial Sequence: Synthetic oligonucleotide
  Antisense strand to SEQ ID NO: 1079230
aucguacagagcauauuaa

SEQ ID NO: 1079232 - RNA, 19 nt, Artificial Sequence
  Description of Artificial Sequence: Synthetic oligonucleotide
  Sense strand starting at position 2691 of SEQ ID NO: 915431
uaauaugcucuguacgaua

SEQ ID NO: 1079233 - RNA, 19 nt, Artificial Sequence
  Description of Artificial Sequence: Synthetic oligonucleotide
  Antisense strand to SEQ ID NO: 1079232
uaucguacagagcauauua

SEQ ID NO: 1079234 - RNA, 19 nt, Artificial Sequence
  Description of Artificial Sequence: Synthetic oligonucleotide
  Sense strand starting at position 2696 of SEQ ID NO: 915431
ugcucuguacgauauccau

SEQ ID NO: 1079235 - RNA, 19 nt, Artificial Sequence
  Description of Artificial Sequence: Synthetic oligonucleotide
  Antisense strand to SEQ ID NO: 1079234
auggauaucguacagagca

SEQ ID NO: 1079236 - RNA, 19 nt, Artificial Sequence
  Description of Artificial Sequence: Synthetic oligonucleotide
  Sense strand starting at position 2730 of SEQ ID NO: 915431
cuugcuuugugaccuaaua

SEQ ID NO: 1079237 - RNA, 19 nt, Artificial Sequence
  Description of Artificial Sequence: Synthetic oligonucleotide
  Antisense strand to SEQ ID NO: 1079236
uauuaggucacaaagcaag

SEQ ID NO: 1079238 - RNA, 19 nt, Artificial Sequence
  Description of Artificial Sequence: Synthetic oligonucleotide
  Sense strand starting at position 2742 of SEQ ID NO: 915431
ccuaauaugguguaauuaa

SEQ ID NO: 1079239 - RNA, 19 nt, Artificial Sequence
  Description of Artificial Sequence: Synthetic oligonucleotide
  Antisense strand to SEQ ID NO: 1079238
uuaauuacaccauauuagg

SEQ ID NO: 1079240 - RNA, 19 nt, Artificial Sequence
  Description of Artificial Sequence: Synthetic oligonucleotide
  Sense strand starting at position 2791 of SEQ ID NO: 915431
ucucuaaauguuggacaaa

SEQ ID NO: 1079241 - RNA, 19 nt, Artificial Sequence
  Description of Artificial Sequence: Synthetic oligonucleotide
  Antisense strand to SEQ ID NO: 1079240
uuuguccaacauuuagaga

SEQ ID NO: 1079242 - RNA, 19 nt, Artificial Sequence
  Description of Artificial Sequence: Synthetic oligonucleotide
  Sense strand starting at position 2802 of SEQ ID NO: 915431
uggacaaaguucuuucuua

SEQ ID NO: 1079243 - RNA, 19 nt, Artificial Sequence
  Description of Artificial Sequence: Synthetic oligonucleotide
  Antisense strand to SEQ ID NO: 1079242
uaagaaagaacuuugucca

SEQ ID NO: 1079244 - RNA, 19 nt, Artificial Sequence
  Description of Artificial Sequence: Synthetic oligonucleotide
  Sense strand starting at position 2803 of SEQ ID NO: 915431
ggacaaaguucuuucuuau

SEQ ID NO: 1079245 - RNA, 19 nt, Artificial Sequence
  Description of Artificial Sequence: Synthetic oligonucleotide
  Antisense strand to SEQ ID NO: 1079244
auaagaaagaacuuugucc

SEQ ID NO: 1079246 - RNA, 19 nt, Artificial Sequence
  Description of Artificial Sequence: Synthetic oligonucleotide
  Sense strand starting at position 2901 of SEQ ID NO: 915431
uuaccauaauuguggauuu

SEQ ID NO: 1079247 - RNA, 19 nt, Artificial Sequence
  Description of Artificial Sequence: Synthetic oligonucleotide
  Antisense strand to SEQ ID NO: 1079246
aaauccacaauuaugguaa

SEQ ID NO: 1079248 - RNA, 19 nt, Artificial Sequence
  Description of Artificial Sequence: Synthetic oligonucleotide
  Sense strand starting at position 2920 of SEQ ID NO: 915431
guaaauuucucuuugucuu

SEQ ID NO: 1079249 - RNA, 19 nt, Artificial Sequence
  Description of Artificial Sequence: Synthetic oligonucleotide
  Antisense strand to SEQ ID NO: 1079248
aagacaaagagaaauuuac

SEQ ID NO: 1079250 - RNA, 19 nt, Artificial Sequence
  Description of Artificial Sequence: Synthetic oligonucleotide
  Sense strand starting at position 2992 of SEQ ID NO: 915431
aauugagaauugcuacgua

SEQ ID NO: 1079251 - RNA, 19 nt, Artificial Sequence
  Description of Artificial Sequence: Synthetic oligonucleotide
  Antisense strand to SEQ ID NO: 1079250
uacguagcaauucucaauu

SEQ ID NO: 1079252 - RNA, 19 nt, Artificial Sequence
  Description of Artificial Sequence: Synthetic oligonucleotide
  Sense strand starting at position 2995 of SEQ ID NO: 915431
ugagaauugcuacguauuu

SEQ ID NO: 1079253 - RNA, 19 nt, Artificial Sequence
  Description of Artificial Sequence: Synthetic oligonucleotide
  Antisense strand to SEQ ID NO: 1079252
aaauacguagcaauucuca

SEQ ID NO: 1079254 - RNA, 19 nt, Artificial Sequence
  Description of Artificial Sequence: Synthetic oligonucleotide
  Sense strand starting at position 2996 of SEQ ID NO: 915431
gagaauugcuacguauuuc

SEQ ID NO: 1079255 - RNA, 19 nt, Artificial Sequence
  Description of Artificial Sequence: Synthetic oligonucleotide
  Antisense strand to SEQ ID NO: 1079254
gaaauacguagcaauucuc

SEQ ID NO: 1079256 - RNA, 19 nt, Artificial Sequence
  Description of Artificial Sequence: Synthetic oligonucleotide
  Sense strand starting at position 3038 of SEQ ID NO: 915431
ugauccuccuuauucguaa

SEQ ID NO: 1079257 - RNA, 19 nt, Artificial Sequence
  Description of Artificial Sequence: Synthetic oligonucleotide
  Antisense strand to SEQ ID NO: 1079256
uuacgaauaaggaggauca

SEQ ID NO: 1079258 - RNA, 19 nt, Artificial Sequence
  Description of Artificial Sequence: Synthetic oligonucleotide
  Sense strand starting at position 3080 of SEQ ID NO: 915431
uugugugaugcuuauaacu

SEQ ID NO: 1079259 - RNA, 19 nt, Artificial Sequence
  Description of Artificial Sequence: Synthetic oligonucleotide
  Antisense strand to SEQ ID NO: 1079258
aguuauaagcaucacacaa

SEQ ID NO: 1079260 - RNA, 19 nt, Artificial Sequence
  Description of Artificial Sequence: Synthetic oligonucleotide
  Sense strand starting at position 3091 of SEQ ID NO: 915431
uuauaacuuucgguacuuu

SEQ ID NO: 1079261 - RNA, 19 nt, Artificial Sequence
  Description of Artificial Sequence: Synthetic oligonucleotide
  Antisense strand to SEQ ID NO: 1079260
aaaguaccgaaaguuauaa

SEQ ID NO: 1079262 - RNA, 19 nt, Artificial Sequence
  Description of Artificial Sequence: Synthetic oligonucleotide
  Sense strand starting at position 3185 of SEQ ID NO: 915431
uguaguaagugauuugucu

SEQ ID NO: 1079263 - RNA, 19 nt, Artificial Sequence
  Description of Artificial Sequence: Synthetic oligonucleotide
  Antisense strand to SEQ ID NO: 1079262
agacaaaucacuuacuaca

SEQ ID NO: 1079264 - RNA, 19 nt, Artificial Sequence
  Description of Artificial Sequence: Synthetic oligonucleotide
  Sense strand starting at position 3189 of SEQ ID NO: 915431
guaagugauuugucuuugu

SEQ ID NO: 1079265 - RNA, 19 nt, Artificial Sequence
  Description of Artificial Sequence: Synthetic oligonucleotide
  Antisense strand to SEQ ID NO: 1079264
acaaagacaaaucacuuac

SEQ ID NO: 1079266 - RNA, 19 nt, Artificial Sequence
  Description of Artificial Sequence: Synthetic oligonucleotide
  Sense strand starting at position 3192 of SEQ ID NO: 915431
agugauuugucuuuguuuc

SEQ ID NO: 1079267 - RNA, 19 nt, Artificial Sequence
  Description of Artificial Sequence: Synthetic oligonucleotide
  Antisense strand to SEQ ID NO: 1079266
gaaacaaagacaaaucacu

SEQ ID NO: 1079268 - RNA, 19 nt, Artificial Sequence
  Description of Artificial Sequence: Synthetic oligonucleotide
  Sense strand starting at position 3193 of SEQ ID NO: 915431
gugauuugucuuuguuucu

SEQ ID NO: 1079269 - RNA, 19 nt, Artificial Sequence
  Description of Artificial Sequence: Synthetic oligonucleotide
  Antisense strand to SEQ ID NO: 1079268
agaaacaaagacaaaucac

SEQ ID NO: 1079270 - RNA, 19 nt, Artificial Sequence
  Description of Artificial Sequence: Synthetic oligonucleotide
  Sense strand starting at position 3194 of SEQ ID NO: 915431
ugauuugucuuuguuucuu

SEQ ID NO: 1079271 - RNA, 19 nt, Artificial Sequence
  Description of Artificial Sequence: Synthetic oligonucleotide
  Antisense strand to SEQ ID NO: 1079270
aagaaacaaagacaaauca

SEQ ID NO: 1079272 - RNA, 19 nt, Artificial Sequence
  Description of Artificial Sequence: Synthetic oligonucleotide
  Sense strand starting at position 3226 of SEQ ID NO: 915431
ggaagaaguuaugccuucu

SEQ ID NO: 1079273 - RNA, 19 nt, Artificial Sequence
  Description of Artificial Sequence: Synthetic oligonucleotide
  Antisense strand to SEQ ID NO: 1079272
agaaggcauaacuucuucc

SEQ ID NO: 1079274 - RNA, 19 nt, Artificial Sequence
  Description of Artificial Sequence: Synthetic oligonucleotide
  Sense strand starting at position 3257 of SEQ ID NO: 915431
ucgaaugacugcccuuaau

SEQ ID NO: 1079275 - RNA, 19 nt, Artificial Sequence
  Description of Artificial Sequence: Synthetic oligonucleotide
  Antisense strand to SEQ ID NO: 1079274
auuaagggcagucauucga

SEQ ID NO: 1079276 - RNA, 19 nt, Artificial Sequence
  Description of Artificial Sequence: Synthetic oligonucleotide
  Sense strand starting at position 3354 of SEQ ID NO: 915431
uguguauauccauguaacc

SEQ ID NO: 1079277 - RNA, 19 nt, Artificial Sequence
  Description of Artificial Sequence: Synthetic oligonucleotide
  Antisense strand to SEQ ID NO: 1079276
gguuacauggauauacaca

SEQ ID NO: 1079278 - RNA, 19 nt, Artificial Sequence
  Description of Artificial Sequence: Synthetic oligonucleotide
  Sense strand starting at position 3450 of SEQ ID NO: 915431
gagauaugcucuccuggca

SEQ ID NO: 1079279 - RNA, 19 nt, Artificial Sequence
  Description of Artificial Sequence: Synthetic oligonucleotide
  Antisense strand to SEQ ID NO: 1079278
ugccaggagagcauaucuc

SEQ ID NO: 1079280 - RNA, 19 nt, Artificial Sequence
  Description of Artificial Sequence: Synthetic oligonucleotide
  Sense strand starting at position 3491 of SEQ ID NO: 915431
ugagguuugcagcaggaaa

SEQ ID NO: 1079281 - RNA, 19 nt, Artificial Sequence
  Description of Artificial Sequence: Synthetic oligonucleotide
  Antisense strand to SEQ ID NO: 1079280
uuuccugcugcaaaccuca

SEQ ID NO: 1079282 - RNA, 19 nt, Artificial Sequence
  Description of Artificial Sequence: Synthetic oligonucleotide
  Sense strand starting at position 3549 of SEQ ID NO: 915431
ccaggcagcuacucuuaaa

SEQ ID NO: 1079283 - RNA, 19 nt, Artificial Sequence
  Description of Artificial Sequence: Synthetic oligonucleotide
  Antisense strand to SEQ ID NO: 1079282
uuuaagaguagcugccugg

SEQ ID NO: 1079284 - RNA, 19 nt, Artificial Sequence
  Description of Artificial Sequence: Synthetic oligonucleotide
  Sense strand starting at position 3653 of SEQ ID NO: 915431
aagucaauacauggagguu

SEQ ID NO: 1079285 - RNA, 19 nt, Artificial Sequence
  Description of Artificial Sequence: Synthetic oligonucleotide
  Antisense strand to SEQ ID NO: 1079284
aaccuccauguauugacuu

SEQ ID NO: 1079286 - RNA, 19 nt, Artificial Sequence
  Description of Artificial Sequence: Synthetic oligonucleotide
  Sense strand starting at position 3666 of SEQ ID NO: 915431
gagguuacacauugguauu

SEQ ID NO: 1079287 - RNA, 19 nt, Artificial Sequence
  Description of Artificial Sequence: Synthetic oligonucleotide
  Antisense strand to SEQ ID NO: 1079286
aauaccaauguguaaccuc

SEQ ID NO: 1079288 - RNA, 19 nt, Artificial Sequence
  Description of Artificial Sequence: Synthetic oligonucleotide
  Sense strand starting at position 3677 of SEQ ID NO: 915431
uugguauuggcccaaagga

SEQ ID NO: 1079289 - RNA, 19 nt, Artificial Sequence
  Description of Artificial Sequence: Synthetic oligonucleotide
  Antisense strand to SEQ ID NO: 1079288
uccuuugggccaauaccaa

SEQ ID NO: 1079290 - RNA, 19 nt, Artificial Sequence
  Description of Artificial Sequence: Synthetic oligonucleotide
  Sense strand starting at position 3750 of SEQ ID NO: 915431
cugauuugcaguuggugaa

SEQ ID NO: 1079291 - RNA, 19 nt, Artificial Sequence
  Description of Artificial Sequence: Synthetic oligonucleotide
  Antisense strand to SEQ ID NO: 1079290
uucaccaacugcaaaucag

SEQ ID NO: 1079292 - RNA, 19 nt, Artificial Sequence
  Description of Artificial Sequence: Synthetic oligonucleotide
  Sense strand starting at position 3856 of SEQ ID NO: 915431
aaagaaugguugucagagu

SEQ ID NO: 1079293 - RNA, 19 nt, Artificial Sequence
  Description of Artificial Sequence: Synthetic oligonucleotide
  Antisense strand to SEQ ID NO: 1079292
acucugacaaccauucuuu

SEQ ID NO: 1079294 - RNA, 19 nt, Artificial Sequence
  Description of Artificial Sequence: Synthetic oligonucleotide
  Sense strand starting at position 3901 of SEQ ID NO: 915431
ggucuaccugucuguggaa

SEQ ID NO: 1079295 - RNA, 19 nt, Artificial Sequence
  Description of Artificial Sequence: Synthetic oligonucleotide
  Antisense strand to SEQ ID NO: 1079294
uuccacagacagguagacc

SEQ ID NO: 1079296 - RNA, 19 nt, Artificial Sequence
  Description of Artificial Sequence: Synthetic oligonucleotide
  Sense strand starting at position 3930 of SEQ ID NO: 915431
ggaucuggguuucugaaag

SEQ ID NO: 1079297 - RNA, 19 nt, Artificial Sequence
  Description of Artificial Sequence: Synthetic oligonucleotide
  Antisense strand to SEQ ID NO: 1079296
cuuucagaaacccagaucc

SEQ ID NO: 1079298 - RNA, 19 nt, Artificial Sequence
  Description of Artificial Sequence: Synthetic oligonucleotide
  Sense strand starting at position 3956 of SEQ ID NO: 915431
agggacauauguuaagaca

SEQ ID NO: 1079299 - RNA, 19 nt, Artificial Sequence
  Description of Artificial Sequence: Synthetic oligonucleotide
  Antisense strand to SEQ ID NO: 1079298
ugucuuaacauaugucccu

SEQ ID NO: 1079300 - RNA, 19 nt, Artificial Sequence
  Description of Artificial Sequence: Synthetic oligonucleotide
  Sense strand starting at position 121 of SEQ ID NO: 915432
ggccauuagcgacaucauc

SEQ ID NO: 1079301 - RNA, 19 nt, Artificial Sequence
  Description of Artificial Sequence: Synthetic oligonucleotide
  Antisense strand to SEQ ID NO: 1079300
gaugaugucgcuaauggcc

SEQ ID NO: 1079302 - RNA, 19 nt, Artificial Sequence
  Description of Artificial Sequence: Synthetic oligonucleotide
  Sense strand starting at position 353 of SEQ ID NO: 915432
caggacuaaucuggccaga

SEQ ID NO: 1079303 - RNA, 19 nt, Artificial Sequence
  Description of Artificial Sequence: Synthetic oligonucleotide
  Antisense strand to SEQ ID NO: 1079302
ucuggccagauuaguccug

SEQ ID NO: 1079304 - RNA, 19 nt, Artificial Sequence
  Description of Artificial Sequence: Synthetic oligonucleotide
  Sense strand starting at position 355 of SEQ ID NO: 915432
ggacuaaucuggccagacu

SEQ ID NO: 1079305 - RNA, 19 nt, Artificial Sequence
  Description of Artificial Sequence: Synthetic oligonucleotide
  Antisense strand to SEQ ID NO: 1079304
agucuggccagauuagucc

SEQ ID NO: 1079306 - RNA, 19 nt, Artificial Sequence
  Description of Artificial Sequence: Synthetic oligonucleotide
  Sense strand starting at position 648 of SEQ ID NO: 915432
cagguuaggcaucaauacu

SEQ ID NO: 1079307 - RNA, 19 nt, Artificial Sequence
  Description of Artificial Sequence: Synthetic oligonucleotide
  Antisense strand to SEQ ID NO: 1079306
aguauugaugccuaaccug

SEQ ID NO: 1079308 - RNA, 19 nt, Artificial Sequence
  Description of Artificial Sequence: Synthetic oligonucleotide
  Sense strand starting at position 696 of SEQ ID NO: 915432
aacccaaugucuugagaug

SEQ ID NO: 1079309 - RNA, 19 nt, Artificial Sequence
  Description of Artificial Sequence: Synthetic oligonucleotide
  Antisense strand to SEQ ID NO: 1079308
caucucaagacauuggguu

SEQ ID NO: 1079310 - RNA, 19 nt, Artificial Sequence
  Description of Artificial Sequence: Synthetic oligonucleotide
  Sense strand starting at position 715 of SEQ ID NO: 915432
accugaauggaaggcauua

SEQ ID NO: 1079311 - RNA, 19 nt, Artificial Sequence
  Description of Artificial Sequence: Synthetic oligonucleotide
  Antisense strand to SEQ ID NO: 1079310
uaaugccuuccauucaggu

SEQ ID NO: 1079312 - RNA, 19 nt, Artificial Sequence
  Description of Artificial Sequence: Synthetic oligonucleotide
  Sense strand starting at position 754 of SEQ ID NO: 915432
gaaguaaacucuggagaca

SEQ ID NO: 1079313 - RNA, 19 nt, Artificial Sequence
  Description of Artificial Sequence: Synthetic oligonucleotide
  Antisense strand to SEQ ID NO: 1079312
ugucuccagaguuuacuuc

SEQ ID NO: 1079314 - RNA, 19 nt, Artificial Sequence
  Description of Artificial Sequence: Synthetic oligonucleotide
  Sense strand starting at position 814 of SEQ ID NO: 915432
gacagugcucucugaucca

SEQ ID NO: 1079315 - RNA, 19 nt, Artificial Sequence
  Description of Artificial Sequence: Synthetic oligonucleotide
  Antisense strand to SEQ ID NO: 1079314
uggaucagagagcacuguc

SEQ ID NO: 1079316 - RNA, 19 nt, Artificial Sequence
  Description of Artificial Sequence: Synthetic oligonucleotide
  Sense strand starting at position 856 of SEQ ID NO: 915432
cagggaacuccuuggacgu

SEQ ID NO: 1079317 - RNA, 19 nt, Artificial Sequence
  Description of Artificial Sequence: Synthetic oligonucleotide
  Antisense strand to SEQ ID NO: 1079316
acguccaaggaguucccug

SEQ ID NO: 1079318 - RNA, 19 nt, Artificial Sequence
  Description of Artificial Sequence: Synthetic oligonucleotide
  Sense strand starting at position 857 of SEQ ID NO: 915432
agggaacuccuuggacguu

SEQ ID NO: 1079319 - RNA, 19 nt, Artificial Sequence
  Description of Artificial Sequence: Synthetic oligonucleotide
  Antisense strand to SEQ ID NO: 1079318
aacguccaaggaguucccu

SEQ ID NO: 1079320 - RNA, 19 nt, Artificial Sequence
  Description of Artificial Sequence: Synthetic oligonucleotide
  Sense strand starting at position 894 of SEQ ID NO: 915432
gccaccuagcucuauguuu

SEQ ID NO: 1079321 - RNA, 19 nt, Artificial Sequence
  Description of Artificial Sequence: Synthetic oligonucleotide
  Antisense strand to SEQ ID NO: 1079320
aaacauagagcuagguggc

SEQ ID NO: 1079322 - RNA, 19 nt, Artificial Sequence
  Description of Artificial Sequence: Synthetic oligonucleotide
  Sense strand starting at position 1181 of SEQ ID NO: 915432
gcccaugcucccugagacu

SEQ ID NO: 1079323 - RNA, 19 nt, Artificial Sequence
  Description of Artificial Sequence: Synthetic oligonucleotide
  Antisense strand to SEQ ID NO: 1079322
agucucagggagcaugggc

SEQ ID NO: 1079324 - RNA, 19 nt, Artificial Sequence
  Description of Artificial Sequence: Synthetic oligonucleotide
  Sense strand starting at position 1320 of SEQ ID NO: 915432
gcccaucaggcugauaaca

SEQ ID NO: 1079325 - RNA, 19 nt, Artificial Sequence
  Description of Artificial Sequence: Synthetic oligonucleotide
  Antisense strand to SEQ ID NO: 1079324
uguuaucagccugaugggc

SEQ ID NO: 1079326 - RNA, 19 nt, Artificial Sequence
  Description of Artificial Sequence: Synthetic oligonucleotide
  Sense strand starting at position 1322 of SEQ ID NO: 915432
ccaucaggcugauaacaaa

SEQ ID NO: 1079327 - RNA, 19 nt, Artificial Sequence
  Description of Artificial Sequence: Synthetic oligonucleotide
  Antisense strand to SEQ ID NO: 1079326
uuuguuaucagccugaugg

SEQ ID NO: 1079328 - RNA, 19 nt, Artificial Sequence
  Description of Artificial Sequence: Synthetic oligonucleotide
  Sense strand starting at position 1643 of SEQ ID NO: 915432
gcgggauggucccuacgga

SEQ ID NO: 1079329 - RNA, 19 nt, Artificial Sequence
  Description of Artificial Sequence: Synthetic oligonucleotide
  Antisense strand to SEQ ID NO: 1079328
uccguagggaccaucccgc

SEQ ID NO: 1079330 - RNA, 19 nt, Artificial Sequence
  Description of Artificial Sequence: Synthetic oligonucleotide
  Sense strand starting at position 2785 of SEQ ID NO: 915432
ggagauugucccgagcccu

SEQ ID NO: 1079331 - RNA, 19 nt, Artificial Sequence
  Description of Artificial Sequence: Synthetic oligonucleotide
  Antisense strand to SEQ ID NO: 1079330
agggcucgggacaaucucc

SEQ ID NO: 1079332 - RNA, 19 nt, Artificial Sequence
  Description of Artificial Sequence: Synthetic oligonucleotide
  Sense strand starting at position 2827 of SEQ ID NO: 915432
aguaacuuucuguauagau

SEQ ID NO: 1079333 - RNA, 19 nt, Artificial Sequence
  Description of Artificial Sequence: Synthetic oligonucleotide
  Antisense strand to SEQ ID NO: 1079332
aucuauacagaaaguuacu

SEQ ID NO: 1079334 - RNA, 19 nt, Artificial Sequence
  Description of Artificial Sequence: Synthetic oligonucleotide
  Sense strand starting at position 2837 of SEQ ID NO: 915432
uguauagauucuuccugga

SEQ ID NO: 1079335 - RNA, 19 nt, Artificial Sequence
  Description of Artificial Sequence: Synthetic oligonucleotide
  Antisense strand to SEQ ID NO: 1079334
uccaggaagaaucuauaca

SEQ ID NO: 1079336 - RNA, 19 nt, Artificial Sequence
  Description of Artificial Sequence: Synthetic oligonucleotide
  Sense strand starting at position 2839 of SEQ ID NO: 915432
uauagauucuuccuggagu

SEQ ID NO: 1079337 - RNA, 19 nt, Artificial Sequence
  Description of Artificial Sequence: Synthetic oligonucleotide
  Antisense strand to SEQ ID NO: 1079336
acuccaggaagaaucuaua

SEQ ID NO: 1079338 - RNA, 19 nt, Artificial Sequence
  Description of Artificial Sequence: Synthetic oligonucleotide
  Sense strand starting at position 2840 of SEQ ID NO: 915432
auagauucuuccuggaguc

SEQ ID NO: 1079339 - RNA, 19 nt, Artificial Sequence
  Description of Artificial Sequence: Synthetic oligonucleotide
  Antisense strand to SEQ ID NO: 1079338
gacuccaggaagaaucuau

SEQ ID NO: 1079340 - RNA, 19 nt, Artificial Sequence
  Description of Artificial Sequence: Synthetic oligonucleotide
  Sense strand starting at position 2994 of SEQ ID NO: 915432
gucaaauuaaagcgaguuu

SEQ ID NO: 1079341 - RNA, 19 nt, Artificial Sequence
  Description of Artificial Sequence: Synthetic oligonucleotide
  Antisense strand to SEQ ID NO: 1079340
aaacucgcuuuaauuugac

SEQ ID NO: 1079342 - RNA, 19 nt, Artificial Sequence
  Description of Artificial Sequence: Synthetic oligonucleotide
  Sense strand starting at position 3005 of SEQ ID NO: 915432
gcgaguuuagauggauaga

SEQ ID NO: 1079343 - RNA, 19 nt, Artificial Sequence
  Description of Artificial Sequence: Synthetic oligonucleotide
  Antisense strand to SEQ ID NO: 1079342
ucuauccaucuaaacucgc

SEQ ID NO: 1079344 - RNA, 19 nt, Artificial Sequence
  Description of Artificial Sequence: Synthetic oligonucleotide
  Sense strand starting at position 3046 of SEQ ID NO: 915432
gaugcagaucaaugagcuu

SEQ ID NO: 1079345 - RNA, 19 nt, Artificial Sequence
  Description of Artificial Sequence: Synthetic oligonucleotide
  Antisense strand to SEQ ID NO: 1079344
aagcucauugaucugcauc

SEQ ID NO: 1079346 - RNA, 19 nt, Artificial Sequence
  Description of Artificial Sequence: Synthetic oligonucleotide
  Sense strand starting at position 3098 of SEQ ID NO: 915432
gaugcagaccuguguacaa

SEQ ID NO: 1079347 - RNA, 19 nt, Artificial Sequence
  Description of Artificial Sequence: Synthetic oligonucleotide
  Antisense strand to SEQ ID NO: 1079346
uuguacacaggucugcauc

SEQ ID NO: 1079348 - RNA, 19 nt, Artificial Sequence
  Description of Artificial Sequence: Synthetic oligonucleotide
  Sense strand starting at position 3168 of SEQ ID NO: 915432
ggguuuccaugaggagaua

SEQ ID NO: 1079349 - RNA, 19 nt, Artificial Sequence
  Description of Artificial Sequence: Synthetic oligonucleotide
  Antisense strand to SEQ ID NO: 1079348
uaucuccucauggaaaccc

SEQ ID NO: 1079350 - RNA, 19 nt, Artificial Sequence
  Description of Artificial Sequence: Synthetic oligonucleotide
  Sense strand starting at position 3450 of SEQ ID NO: 915432
cgguauuacaggcauaagu

SEQ ID NO: 1079351 - RNA, 19 nt, Artificial Sequence
  Description of Artificial Sequence: Synthetic oligonucleotide
  Antisense strand to SEQ ID NO: 1079350
acuuaugccuguaauaccg

SEQ ID NO: 1079352 - RNA, 19 nt, Artificial Sequence
  Description of Artificial Sequence: Synthetic oligonucleotide
  Sense strand starting at position 3501 of SEQ ID NO: 915432
gaugaagagugauaugcca

SEQ ID NO: 1079353 - RNA, 19 nt, Artificial Sequence
  Description of Artificial Sequence: Synthetic oligonucleotide
  Antisense strand to SEQ ID NO: 1079352
uggcauaucacucuucauc

SEQ ID NO: 1079354 - RNA, 19 nt, Artificial Sequence
  Description of Artificial Sequence: Synthetic oligonucleotide
  Sense strand starting at position 3503 of SEQ ID NO: 915432
ugaagagugauaugccaga

SEQ ID NO: 1079355 - RNA, 19 nt, Artificial Sequence
  Description of Artificial Sequence: Synthetic oligonucleotide
  Antisense strand to SEQ ID NO: 1079354
ucuggcauaucacucuuca

SEQ ID NO: 1079356 - RNA, 19 nt, Artificial Sequence
  Description of Artificial Sequence: Synthetic oligonucleotide
  Sense strand starting at position 3533 of SEQ ID NO: 915432
aagggaauuucuugcugaa

SEQ ID NO: 1079357 - RNA, 19 nt, Artificial Sequence
  Description of Artificial Sequence: Synthetic oligonucleotide
  Antisense strand to SEQ ID NO: 1079356
uucagcaagaaauucccuu

SEQ ID NO: 1079358 - RNA, 19 nt, Artificial Sequence
  Description of Artificial Sequence: Synthetic oligonucleotide
  Sense strand starting at position 3536 of SEQ ID NO: 915432
ggaauuucuugcugaaagu

SEQ ID NO: 1079359 - RNA, 19 nt, Artificial Sequence
  Description of Artificial Sequence: Synthetic oligonucleotide
  Antisense strand to SEQ ID NO: 1079358
acuuucagcaagaaauucc

SEQ ID NO: 1079360 - RNA, 19 nt, Artificial Sequence
  Description of Artificial Sequence: Synthetic oligonucleotide
  Sense strand starting at position 3699 of SEQ ID NO: 915432
ucgaguaacugggacuaaa

SEQ ID NO: 1079361 - RNA, 19 nt, Artificial Sequence
  Description of Artificial Sequence: Synthetic oligonucleotide
  Antisense strand to SEQ ID NO: 1079360
uuuagucccaguuacucga

SEQ ID NO: 1079362 - RNA, 19 nt, Artificial Sequence
  Description of Artificial Sequence: Synthetic oligonucleotide
  Sense strand starting at position 3787 of SEQ ID NO: 915432
uuaagcacuggugaaauau

SEQ ID NO: 1079363 - RNA, 19 nt, Artificial Sequence
  Description of Artificial Sequence: Synthetic oligonucleotide
  Antisense strand to SEQ ID NO: 1079362
auauuucaccagugcuuaa

SEQ ID NO: 1079364 - RNA, 19 nt, Artificial Sequence
  Description of Artificial Sequence: Synthetic oligonucleotide
  Sense strand starting at position 3796 of SEQ ID NO: 915432
ggugaaauauauugguaau

SEQ ID NO: 1079365 - RNA, 19 nt, Artificial Sequence
  Description of Artificial Sequence: Synthetic oligonucleotide
  Antisense strand to SEQ ID NO: 1079364
auuaccaauauauuucacc

SEQ ID NO: 1079366 - RNA, 19 nt, Artificial Sequence
  Description of Artificial Sequence: Synthetic oligonucleotide
  Sense strand starting at position 3823 of SEQ ID NO: 915432
ucagaaagaucguucuuuc

SEQ ID NO: 1079367 - RNA, 19 nt, Artificial Sequence
  Description of Artificial Sequence: Synthetic oligonucleotide
  Antisense strand to SEQ ID NO: 1079366
gaaagaacgaucuuucuga

SEQ ID NO: 1079368 - RNA, 19 nt, Artificial Sequence
  Description of Artificial Sequence: Synthetic oligonucleotide
  Sense strand starting at position 3842 of SEQ ID NO: 915432
aaagguguggcuuagauca

SEQ ID NO: 1079369 - RNA, 19 nt, Artificial Sequence
  Description of Artificial Sequence: Synthetic oligonucleotide
  Antisense strand to SEQ ID NO: 1079368
ugaucuaagccacaccuuu

SEQ ID NO: 1079370 - RNA, 19 nt, Artificial Sequence
  Description of Artificial Sequence: Synthetic oligonucleotide
  Sense strand starting at position 3844 of SEQ ID NO: 915432
agguguggcuuagaucaaa

SEQ ID NO: 1079371 - RNA, 19 nt, Artificial Sequence
  Description of Artificial Sequence: Synthetic oligonucleotide
  Antisense strand to SEQ ID NO: 1079370
uuugaucuaagccacaccu

SEQ ID NO: 1079372 - RNA, 19 nt, Artificial Sequence
  Description of Artificial Sequence: Synthetic oligonucleotide
  Sense strand starting at position 3847 of SEQ ID NO: 915432
uguggcuuagaucaaacua

SEQ ID NO: 1079373 - RNA, 19 nt, Artificial Sequence
  Description of Artificial Sequence: Synthetic oligonucleotide
  Antisense strand to SEQ ID NO: 1079372
uaguuugaucuaagccaca

SEQ ID NO: 1079374 - RNA, 19 nt, Artificial Sequence
  Description of Artificial Sequence: Synthetic oligonucleotide
  Sense strand starting at position 3949 of SEQ ID NO: 915432
gccuaagugauaggccuuu

SEQ ID NO: 1079375 - RNA, 19 nt, Artificial Sequence
  Description of Artificial Sequence: Synthetic oligonucleotide
  Antisense strand to SEQ ID NO: 1079374
aaaggccuaucacuuaggc

SEQ ID NO: 1079376 - RNA, 19 nt, Artificial Sequence
  Description of Artificial Sequence: Synthetic oligonucleotide
  Sense strand starting at position 362 of SEQ ID NO: 915433
uuugguuccugacucaacu

SEQ ID NO: 1079377 - RNA, 19 nt, Artificial Sequence
  Description of Artificial Sequence: Synthetic oligonucleotide
  Antisense strand to SEQ ID NO: 1079376
aguugagucaggaaccaaa

SEQ ID NO: 1079378 - RNA, 19 nt, Artificial Sequence
  Description of Artificial Sequence: Synthetic oligonucleotide
  Sense strand starting at position 446 of SEQ ID NO: 915433
acaaaucaguugccaaaga

SEQ ID NO: 1079379 - RNA, 19 nt, Artificial Sequence
  Description of Artificial Sequence: Synthetic oligonucleotide
  Antisense strand to SEQ ID NO: 1079378
ucuuuggcaacugauuugu

SEQ ID NO: 1079380 - RNA, 19 nt, Artificial Sequence
  Description of Artificial Sequence: Synthetic oligonucleotide
  Sense strand starting at position 459 of SEQ ID NO: 915433
caaagaacugagugcuucu

SEQ ID NO: 1079381 - RNA, 19 nt, Artificial Sequence
  Description of Artificial Sequence: Synthetic oligonucleotide
  Antisense strand to SEQ ID NO: 1079380
agaagcacucaguucuuug

SEQ ID NO: 1079382 - RNA, 19 nt, Artificial Sequence
  Description of Artificial Sequence: Synthetic oligonucleotide
  Sense strand starting at position 469 of SEQ ID NO: 915433
agugcuucugcagacaucu

SEQ ID NO: 1079383 - RNA, 19 nt, Artificial Sequence
  Description of Artificial Sequence: Synthetic oligonucleotide
  Antisense strand to SEQ ID NO: 1079382
agaugucugcagaagcacu

SEQ ID NO: 1079384 - RNA, 19 nt, Artificial Sequence
  Description of Artificial Sequence: Synthetic oligonucleotide
  Sense strand starting at position 579 of SEQ ID NO: 915433
uuuguaucccuacacuaga

SEQ ID NO: 1079385 - RNA, 19 nt, Artificial Sequence
  Description of Artificial Sequence: Synthetic oligonucleotide
  Antisense strand to SEQ ID NO: 1079384
ucuaguguagggauacaaa

SEQ ID NO: 1079386 - RNA, 19 nt, Artificial Sequence
  Description of Artificial Sequence: Synthetic oligonucleotide
  Sense strand starting at position 1111 of SEQ ID NO: 915433
ggaggaacucauggcacua

SEQ ID NO: 1079387 - RNA, 19 nt, Artificial Sequence
  Description of Artificial Sequence: Synthetic oligonucleotide
  Antisense strand to SEQ ID NO: 1079386
uagugccaugaguuccucc

SEQ ID NO: 1079388 - RNA, 19 nt, Artificial Sequence
  Description of Artificial Sequence: Synthetic oligonucleotide
  Sense strand starting at position 1377 of SEQ ID NO: 915433
gcgcgauuucgcuuucgcu

SEQ ID NO: 1079389 - RNA, 19 nt, Artificial Sequence
  Description of Artificial Sequence: Synthetic oligonucleotide
  Antisense strand to SEQ ID NO: 1079388
agcgaaagcgaaaucgcgc

SEQ ID NO: 1079390 - RNA, 19 nt, Artificial Sequence
  Description of Artificial Sequence: Synthetic oligonucleotide
  Sense strand starting at position 1378 of SEQ ID NO: 915433
cgcgauuucgcuuucgcuu

SEQ ID NO: 1079391 - RNA, 19 nt, Artificial Sequence
  Description of Artificial Sequence: Synthetic oligonucleotide
  Antisense strand to SEQ ID NO: 1079390
aagcgaaagcgaaaucgcg

SEQ ID NO: 1079392 - RNA, 19 nt, Artificial Sequence
  Description of Artificial Sequence: Synthetic oligonucleotide
  Sense strand starting at position 1379 of SEQ ID NO: 915433
gcgauuucgcuuucgcuuu

SEQ ID NO: 1079393 - RNA, 19 nt, Artificial Sequence
  Description of Artificial Sequence: Synthetic oligonucleotide
  Antisense strand to SEQ ID NO: 1079392
aaagcgaaagcgaaaucgc

SEQ ID NO: 1079394 - RNA, 19 nt, Artificial Sequence
  Description of Artificial Sequence: Synthetic oligonucleotide
  Sense strand starting at position 2118 of SEQ ID NO: 915433
uugggaaguucuuugucaa

SEQ ID NO: 1079395 - RNA, 19 nt, Artificial Sequence
  Description of Artificial Sequence: Synthetic oligonucleotide
  Antisense strand to SEQ ID NO: 1079394
uugacaaagaacuucccaa

SEQ ID NO: 1079396 - RNA, 19 nt, Artificial Sequence
  Description of Artificial Sequence: Synthetic oligonucleotide
  Sense strand starting at position 2119 of SEQ ID NO: 915433
ugggaaguucuuugucaag

SEQ ID NO: 1079397 - RNA, 19 nt, Artificial Sequence
  Description of Artificial Sequence: Synthetic oligonucleotide
  Antisense strand to SEQ ID NO: 1079396
cuugacaaagaacuuccca

SEQ ID NO: 1079398 - RNA, 19 nt, Artificial Sequence
  Description of Artificial Sequence: Synthetic oligonucleotide
  Sense strand starting at position 2121 of SEQ ID NO: 915433
ggaaguucuuugucaagca

SEQ ID NO: 1079399 - RNA, 19 nt, Artificial Sequence
  Description of Artificial Sequence: Synthetic oligonucleotide
  Antisense strand to SEQ ID NO: 1079398
ugcuugacaaagaacuucc

SEQ ID NO: 1079400 - RNA, 19 nt, Artificial Sequence
  Description of Artificial Sequence: Synthetic oligonucleotide
  Sense strand starting at position 2137 of SEQ ID NO: 915433
gcaacagaugugcaggaua

SEQ ID NO: 1079401 - RNA, 19 nt, Artificial Sequence
  Description of Artificial Sequence: Synthetic oligonucleotide
  Antisense strand to SEQ ID NO: 1079400
uauccugcacaucuguugc

SEQ ID NO: 1079402 - RNA, 19 nt, Artificial Sequence
  Description of Artificial Sequence: Synthetic oligonucleotide
  Sense strand starting at position 2139 of SEQ ID NO: 915433
aacagaugugcaggauaaa

SEQ ID NO: 1079403 - RNA, 19 nt, Artificial Sequence
  Description of Artificial Sequence: Synthetic oligonucleotide
  Antisense strand to SEQ ID NO: 1079402
uuuauccugcacaucuguu

SEQ ID NO: 1079404 - RNA, 19 nt, Artificial Sequence
  Description of Artificial Sequence: Synthetic oligonucleotide
  Sense strand starting at position 2248 of SEQ ID NO: 915433
ccuagacccugcucuaaga

SEQ ID NO: 1079405 - RNA, 19 nt, Artificial Sequence
  Description of Artificial Sequence: Synthetic oligonucleotide
  Antisense strand to SEQ ID NO: 1079404
ucuuagagcagggucuagg

SEQ ID NO: 1079406 - RNA, 19 nt, Artificial Sequence
  Description of Artificial Sequence: Synthetic oligonucleotide
  Sense strand starting at position 2304 of SEQ ID NO: 915433
uuuggagucugguuacaaa

SEQ ID NO: 1079407 - RNA, 19 nt, Artificial Sequence
  Description of Artificial Sequence: Synthetic oligonucleotide
  Antisense strand to SEQ ID NO: 1079406
uuuguaaccagacuccaaa

SEQ ID NO: 1079408 - RNA, 19 nt, Artificial Sequence
  Description of Artificial Sequence: Synthetic oligonucleotide
  Sense strand starting at position 2373 of SEQ ID NO: 915433
ucguacugucagucgucaa

SEQ ID NO: 1079409 - RNA, 19 nt, Artificial Sequence
  Description of Artificial Sequence: Synthetic oligonucleotide
  Antisense strand to SEQ ID NO: 1079408
uugacgacugacaguacga

SEQ ID NO: 1079410 - RNA, 19 nt, Artificial Sequence
  Description of Artificial Sequence: Synthetic oligonucleotide
  Sense strand starting at position 2546 of SEQ ID NO: 915433
uuucuaaauguugguaacu

SEQ ID NO: 1079411 - RNA, 19 nt, Artificial Sequence
  Description of Artificial Sequence: Synthetic oligonucleotide
  Antisense strand to SEQ ID NO: 1079410
aguuaccaacauuuagaaa

SEQ ID NO: 1079412 - RNA, 19 nt, Artificial Sequence
  Description of Artificial Sequence: Synthetic oligonucleotide
  Sense strand starting at position 2627 of SEQ ID NO: 915433
acagauaucugucccauca

SEQ ID NO: 1079413 - RNA, 19 nt, Artificial Sequence
  Description of Artificial Sequence: Synthetic oligonucleotide
  Antisense strand to SEQ ID NO: 1079412
ugaugggacagauaucugu

SEQ ID NO: 1079414 - RNA, 19 nt, Artificial Sequence
  Description of Artificial Sequence: Synthetic oligonucleotide
  Sense strand starting at position 2779 of SEQ ID NO: 915433
gggacuaauggcuaccgua

SEQ ID NO: 1079415 - RNA, 19 nt, Artificial Sequence
  Description of Artificial Sequence: Synthetic oligonucleotide
  Antisense strand to SEQ ID NO: 1079414
uacgguagccauuaguccc

SEQ ID NO: 1079416 - RNA, 19 nt, Artificial Sequence
  Description of Artificial Sequence: Synthetic oligonucleotide
  Sense strand starting at position 2889 of SEQ ID NO: 915433
acgggugcuugauuaaaga

SEQ ID NO: 1079417 - RNA, 19 nt, Artificial Sequence
  Description of Artificial Sequence: Synthetic oligonucleotide
  Antisense strand to SEQ ID NO: 1079416
ucuuuaaucaagcacccgu

SEQ ID NO: 1079418 - RNA, 19 nt, Artificial Sequence
  Description of Artificial Sequence: Synthetic oligonucleotide
  Sense strand starting at position 2898 of SEQ ID NO: 915433
ugauuaaagagucggagga

SEQ ID NO: 1079419 - RNA, 19 nt, Artificial Sequence
  Description of Artificial Sequence: Synthetic oligonucleotide
  Antisense strand to SEQ ID NO: 1079418
uccuccgacucuuuaauca

SEQ ID NO: 1079420 - RNA, 19 nt, Artificial Sequence
  Description of Artificial Sequence: Synthetic oligonucleotide
  Sense strand starting at position 2899 of SEQ ID NO: 915433
gauuaaagagucggaggau

SEQ ID NO: 1079421 - RNA, 19 nt, Artificial Sequence
  Description of Artificial Sequence: Synthetic oligonucleotide
  Antisense strand to SEQ ID NO: 1079420
auccuccgacucuuuaauc

SEQ ID NO: 1079422 - RNA, 19 nt, Artificial Sequence
  Description of Artificial Sequence: Synthetic oligonucleotide
  Sense strand starting at position 3273 of SEQ ID NO: 915433
cugaaacgauaguugaaga

SEQ ID NO: 1079423 - RNA, 19 nt, Artificial Sequence
  Description of Artificial Sequence: Synthetic oligonucleotide
  Antisense strand to SEQ ID NO: 1079422
ucuucaacuaucguuucag

SEQ ID NO: 1079424 - RNA, 19 nt, Artificial Sequence
  Description of Artificial Sequence: Synthetic oligonucleotide
  Sense strand starting at position 3359 of SEQ ID NO: 915433
accuccaucccugauguuu

SEQ ID NO: 1079425 - RNA, 19 nt, Artificial Sequence
  Description of Artificial Sequence: Synthetic oligonucleotide
  Antisense strand to SEQ ID NO: 1079424
aaacaucagggauggaggu

SEQ ID NO: 1079426 - RNA, 19 nt, Artificial Sequence
  Description of Artificial Sequence: Synthetic oligonucleotide
  Sense strand starting at position 3395 of SEQ ID NO: 915433
gugcuucuugcccuugcaa

SEQ ID NO: 1079427 - RNA, 19 nt, Artificial Sequence
  Description of Artificial Sequence: Synthetic oligonucleotide
  Antisense strand to SEQ ID NO: 1079426
uugcaagggcaagaagcac

SEQ ID NO: 1079428 - RNA, 19 nt, Artificial Sequence
  Description of Artificial Sequence: Synthetic oligonucleotide
  Sense strand starting at position 3402 of SEQ ID NO: 915433
uugcccuugcaauaaagau

SEQ ID NO: 1079429 - RNA, 19 nt, Artificial Sequence
  Description of Artificial Sequence: Synthetic oligonucleotide
  Antisense strand to SEQ ID NO: 1079428
aucuuuauugcaagggcaa

SEQ ID NO: 1079430 - RNA, 19 nt, Artificial Sequence
  Description of Artificial Sequence: Synthetic oligonucleotide
  Sense strand starting at position 3544 of SEQ ID NO: 915433
caagauaaucauggugucu

SEQ ID NO: 1079431 - RNA, 19 nt, Artificial Sequence
  Description of Artificial Sequence: Synthetic oligonucleotide
  Antisense strand to SEQ ID NO: 1079430
agacaccaugauuaucuug

SEQ ID NO: 1079432 - RNA, 19 nt, Artificial Sequence
  Description of Artificial Sequence: Synthetic oligonucleotide
  Sense strand starting at position 3549 of SEQ ID NO: 915433
uaaucauggugucugcaga

SEQ ID NO: 1079433 - RNA, 19 nt, Artificial Sequence
  Description of Artificial Sequence: Synthetic oligonucleotide
  Antisense strand to SEQ ID NO: 1079432
ucugcagacaccaugauua

SEQ ID NO: 1079434 - RNA, 19 nt, Artificial Sequence
  Description of Artificial Sequence: Synthetic oligonucleotide
  Sense strand starting at position 3565 of SEQ ID NO: 915433
agagcuauaguguauauga

SEQ ID NO: 1079435 - RNA, 19 nt, Artificial Sequence
  Description of Artificial Sequence: Synthetic oligonucleotide
  Antisense strand to SEQ ID NO: 1079434
ucauauacacuauagcucu

SEQ ID NO: 1079436 - RNA, 19 nt, Artificial Sequence
  Description of Artificial Sequence: Synthetic oligonucleotide
  Sense strand starting at position 3573 of SEQ ID NO: 915433
aguguauaugaacagaugu

SEQ ID NO: 1079437 - RNA, 19 nt, Artificial Sequence
  Description of Artificial Sequence: Synthetic oligonucleotide
  Antisense strand to SEQ ID NO: 1079436
acaucuguucauauacacu

SEQ ID NO: 1079438 - RNA, 19 nt, Artificial Sequence
  Description of Artificial Sequence: Synthetic oligonucleotide
  Sense strand starting at position 3596 of SEQ ID NO: 915433
ucguucguucguuccauaa

SEQ ID NO: 1079439 - RNA, 19 nt, Artificial Sequence
  Description of Artificial Sequence: Synthetic oligonucleotide
  Antisense strand to SEQ ID NO: 1079438
uuauggaacgaacgaacga

SEQ ID NO: 1079440 - RNA, 19 nt, Artificial Sequence
  Description of Artificial Sequence: Synthetic oligonucleotide
  Sense strand starting at position 3644 of SEQ ID NO: 915433
cuggauucuggcuaacuga

SEQ ID NO: 1079441 - RNA, 19 nt, Artificial Sequence
  Description of Artificial Sequence: Synthetic oligonucleotide
  Antisense strand to SEQ ID NO: 1079440
ucaguuagccagaauccag

SEQ ID NO: 1079442 - RNA, 19 nt, Artificial Sequence
  Description of Artificial Sequence: Synthetic oligonucleotide
  Sense strand starting at position 3647 of SEQ ID NO: 915433
gauucuggcuaacugagau

SEQ ID NO: 1079443 - RNA, 19 nt, Artificial Sequence
  Description of Artificial Sequence: Synthetic oligonucleotide
  Antisense strand to SEQ ID NO: 1079442
aucucaguuagccagaauc

SEQ ID NO: 1079444 - RNA, 19 nt, Artificial Sequence
  Description of Artificial Sequence: Synthetic oligonucleotide
  Sense strand starting at position 3684 of SEQ ID NO: 915433
caugacaagugcucacaga

SEQ ID NO: 1079445 - RNA, 19 nt, Artificial Sequence
  Description of Artificial Sequence: Synthetic oligonucleotide
  Antisense strand to SEQ ID NO: 1079444
ucugugagcacuugucaug

SEQ ID NO: 1079446 - RNA, 19 nt, Artificial Sequence
  Description of Artificial Sequence: Synthetic oligonucleotide
  Sense strand starting at position 3734 of SEQ ID NO: 915433
ccgauccagacaugggaau

SEQ ID NO: 1079447 - RNA, 19 nt, Artificial Sequence
  Description of Artificial Sequence: Synthetic oligonucleotide
  Antisense strand to SEQ ID NO: 1079446
auucccaugucuggaucgg

SEQ ID NO: 1079448 - RNA, 19 nt, Artificial Sequence
  Description of Artificial Sequence: Synthetic oligonucleotide
  Sense strand starting at position 3804 of SEQ ID NO: 915433
ugaguaagauaagcuagau

SEQ ID NO: 1079449 - RNA, 19 nt, Artificial Sequence
  Description of Artificial Sequence: Synthetic oligonucleotide
  Antisense strand to SEQ ID NO: 1079448
aucuagcuuaucuuacuca

SEQ ID NO: 1079450 - RNA, 19 nt, Artificial Sequence
  Description of Artificial Sequence: Synthetic oligonucleotide
  Sense strand starting at position 3824 of SEQ ID NO: 915433
gaaggauguaguuauguga

SEQ ID NO: 1079451 - RNA, 19 nt, Artificial Sequence
  Description of Artificial Sequence: Synthetic oligonucleotide
  Antisense strand to SEQ ID NO: 1079450
ucacauaacuacauccuuc

SEQ ID NO: 1079452 - RNA, 19 nt, Artificial Sequence
  Description of Artificial Sequence: Synthetic oligonucleotide
  Sense strand starting at position 3827 of SEQ ID NO: 915433
ggauguaguuaugugagag

SEQ ID NO: 1079453 - RNA, 19 nt, Artificial Sequence
  Description of Artificial Sequence: Synthetic oligonucleotide
  Antisense strand to SEQ ID NO: 1079452
cucucacauaacuacaucc

SEQ ID NO: 1079454 - RNA, 19 nt, Artificial Sequence
  Description of Artificial Sequence: Synthetic oligonucleotide
  Sense strand starting at position 3828 of SEQ ID NO: 915433
gauguaguuaugugagaga

SEQ ID NO: 1079455 - RNA, 19 nt, Artificial Sequence
  Description of Artificial Sequence: Synthetic oligonucleotide
  Antisense strand to SEQ ID NO: 1079454
ucucucacauaacuacauc

SEQ ID NO: 1079456 - RNA, 19 nt, Artificial Sequence
  Description of Artificial Sequence: Synthetic oligonucleotide
  Sense strand starting at position 51 of SEQ ID NO: 915434
ggcucaccugcucaauguu

SEQ ID NO: 1079457 - RNA, 19 nt, Artificial Sequence
  Description of Artificial Sequence: Synthetic oligonucleotide
  Antisense strand to SEQ ID NO: 1079456
aacauugagcaggugagcc

SEQ ID NO: 1079458 - RNA, 19 nt, Artificial Sequence
  Description of Artificial Sequence: Synthetic oligonucleotide
  Sense strand starting at position 54 of SEQ ID NO: 915434
ucaccugcucaauguugua

SEQ ID NO: 1079459 - RNA, 19 nt, Artificial Sequence
  Description of Artificial Sequence: Synthetic oligonucleotide
  Antisense strand to SEQ ID NO: 1079458
uacaacauugagcagguga

SEQ ID NO: 1079460 - RNA, 19 nt, Artificial Sequence
  Description of Artificial Sequence: Synthetic oligonucleotide
  Sense strand starting at position 59 of SEQ ID NO: 915434
ugcucaauguuguagccau

SEQ ID NO: 1079461 - RNA, 19 nt, Artificial Sequence
  Description of Artificial Sequence: Synthetic oligonucleotide
  Antisense strand to SEQ ID NO: 1079460
auggcuacaacauugagca

SEQ ID NO: 1079462 - RNA, 19 nt, Artificial Sequence
  Description of Artificial Sequence: Synthetic oligonucleotide
  Sense strand starting at position 92 of SEQ ID NO: 915434
aucgcaauguacuugucaa

SEQ ID NO: 1079463 - RNA, 19 nt, Artificial Sequence
  Description of Artificial Sequence: Synthetic oligonucleotide
  Antisense strand to SEQ ID NO: 1079462
uugacaaguacauugcgau

SEQ ID NO: 1079464 - RNA, 19 nt, Artificial Sequence
  Description of Artificial Sequence: Synthetic oligonucleotide
  Sense strand starting at position 147 of SEQ ID NO: 915434
gguuauagcuccuaaccca

SEQ ID NO: 1079465 - RNA, 19 nt, Artificial Sequence
  Description of Artificial Sequence: Synthetic oligonucleotide
  Antisense strand to SEQ ID NO: 1079464
uggguuaggagcuauaacc

SEQ ID NO: 1079466 - RNA, 19 nt, Artificial Sequence
  Description of Artificial Sequence: Synthetic oligonucleotide
  Sense strand starting at position 332 of SEQ ID NO: 915434
acgcuuggcaucugacaca

SEQ ID NO: 1079467 - RNA, 19 nt, Artificial Sequence
  Description of Artificial Sequence: Synthetic oligonucleotide
  Antisense strand to SEQ ID NO: 1079466
ugugucagaugccaagcgu

SEQ ID NO: 1079468 - RNA, 19 nt, Artificial Sequence
  Description of Artificial Sequence: Synthetic oligonucleotide
  Sense strand starting at position 712 of SEQ ID NO: 915434
aggcuugcacuccggaauu

SEQ ID NO: 1079469 - RNA, 19 nt, Artificial Sequence
  Description of Artificial Sequence: Synthetic oligonucleotide
  Antisense strand to SEQ ID NO: 1079468
aauuccggagugcaagccu

SEQ ID NO: 1079470 - RNA, 19 nt, Artificial Sequence
  Description of Artificial Sequence: Synthetic oligonucleotide
  Sense strand starting at position 725 of SEQ ID NO: 915434
ggaauuacggccugguaau

SEQ ID NO: 1079471 - RNA, 19 nt, Artificial Sequence
  Description of Artificial Sequence: Synthetic oligonucleotide
  Antisense strand to SEQ ID NO: 1079470
auuaccaggccguaauucc

SEQ ID NO: 1079472 - RNA, 19 nt, Artificial Sequence
  Description of Artificial Sequence: Synthetic oligonucleotide
  Sense strand starting at position 726 of SEQ ID NO: 915434
gaauuacggccugguaauu

SEQ ID NO: 1079473 - RNA, 19 nt, Artificial Sequence
  Description of Artificial Sequence: Synthetic oligonucleotide
  Antisense strand to SEQ ID NO: 1079472
aauuaccaggccguaauuc

SEQ ID NO: 1079474 - RNA, 19 nt, Artificial Sequence
  Description of Artificial Sequence: Synthetic oligonucleotide
  Sense strand starting at position 756 of SEQ ID NO: 915434
ggaucaugcugucugugga

SEQ ID NO: 1079475 - RNA, 19 nt, Artificial Sequence
  Description of Artificial Sequence: Synthetic oligonucleotide
  Antisense strand to SEQ ID NO: 1079474
uccacagacagcaugaucc

SEQ ID NO: 1079476 - RNA, 19 nt, Artificial Sequence
  Description of Artificial Sequence: Synthetic oligonucleotide
  Sense strand starting at position 1335 of SEQ ID NO: 915434
ggguuugugggagaagcaa

SEQ ID NO: 1079477 - RNA, 19 nt, Artificial Sequence
  Description of Artificial Sequence: Synthetic oligonucleotide
  Antisense strand to SEQ ID NO: 1079476
uugcuucucccacaaaccc

SEQ ID NO: 1079478 - RNA, 19 nt, Artificial Sequence
  Description of Artificial Sequence: Synthetic oligonucleotide
  Sense strand starting at position 1380 of SEQ ID NO: 915434
aggagccaucaguguaaca

SEQ ID NO: 1079479 - RNA, 19 nt, Artificial Sequence
  Description of Artificial Sequence: Synthetic oligonucleotide
  Antisense strand to SEQ ID NO: 1079478
uguuacacugauggcuccu

SEQ ID NO: 1079480 - RNA, 19 nt, Artificial Sequence
  Description of Artificial Sequence: Synthetic oligonucleotide
  Sense strand starting at position 1881 of SEQ ID NO: 915434
gggcgugauuacuauguac

SEQ ID NO: 1079481 - RNA, 19 nt, Artificial Sequence
  Description of Artificial Sequence: Synthetic oligonucleotide
  Antisense strand to SEQ ID NO: 1079480
guacauaguaaucacgccc

SEQ ID NO: 1079482 - RNA, 19 nt, Artificial Sequence
  Description of Artificial Sequence: Synthetic oligonucleotide
  Sense strand starting at position 2882 of SEQ ID NO: 915434
cccuuuaacugcugcagua

SEQ ID NO: 1079483 - RNA, 19 nt, Artificial Sequence
  Description of Artificial Sequence: Synthetic oligonucleotide
  Antisense strand to SEQ ID NO: 1079482
uacugcagcaguuaaaggg

SEQ ID NO: 1079484 - RNA, 19 nt, Artificial Sequence
  Description of Artificial Sequence: Synthetic oligonucleotide
  Sense strand starting at position 3666 of SEQ ID NO: 915434
ccucuuaaaucauggauug

SEQ ID NO: 1079485 - RNA, 19 nt, Artificial Sequence
  Description of Artificial Sequence: Synthetic oligonucleotide
  Antisense strand to SEQ ID NO: 1079484
caauccaugauuuaagagg

SEQ ID NO: 1079486 - RNA, 19 nt, Artificial Sequence
  Description of Artificial Sequence: Synthetic oligonucleotide
  Sense strand starting at position 3843 of SEQ ID NO: 915434
uggagagacucucauuucu

SEQ ID NO: 1079487 - RNA, 19 nt, Artificial Sequence
  Description of Artificial Sequence: Synthetic oligonucleotide
  Antisense strand to SEQ ID NO: 1079486
agaaaugagagucucucca

SEQ ID NO: 1079488 - RNA, 19 nt, Artificial Sequence
  Description of Artificial Sequence: Synthetic oligonucleotide
  Sense strand starting at position 156 of SEQ ID NO: 915435
aggucaagaacucaacguu

SEQ ID NO: 1079489 - RNA, 19 nt, Artificial Sequence
  Description of Artificial Sequence: Synthetic oligonucleotide
  Antisense strand to SEQ ID NO: 1079488
aacguugaguucuugaccu

SEQ ID NO: 1079490 - RNA, 19 nt, Artificial Sequence
  Description of Artificial Sequence: Synthetic oligonucleotide
  Sense strand starting at position 324 of SEQ ID NO: 915435
gucuuuacagcauacgauu

SEQ ID NO: 1079491 - RNA, 19 nt, Artificial Sequence
  Description of Artificial Sequence: Synthetic oligonucleotide
  Antisense strand to SEQ ID NO: 1079490
aaucguaugcuguaaagac

SEQ ID NO: 1079492 - RNA, 19 nt, Artificial Sequence
  Description of Artificial Sequence: Synthetic oligonucleotide
  Sense strand starting at position 366 of SEQ ID NO: 915435
uguugcuguauuugaagga

SEQ ID NO: 1079493 - RNA, 19 nt, Artificial Sequence
  Description of Artificial Sequence: Synthetic oligonucleotide
  Antisense strand to SEQ ID NO: 1079492
uccuucaaauacagcaaca

SEQ ID NO: 1079494 - RNA, 19 nt, Artificial Sequence
  Description of Artificial Sequence: Synthetic oligonucleotide
  Sense strand starting at position 452 of SEQ ID NO: 915435
ugcaauccugaauauuagu

SEQ ID NO: 1079495 - RNA, 19 nt, Artificial Sequence
  Description of Artificial Sequence: Synthetic oligonucleotide
  Antisense strand to SEQ ID NO: 1079494
acuaauauucaggauugca

SEQ ID NO: 1079496 - RNA, 19 nt, Artificial Sequence
  Description of Artificial Sequence: Synthetic oligonucleotide
  Sense strand starting at position 477 of SEQ ID NO: 915435
ucucaaauccagugaugcu

SEQ ID NO: 1079497 - RNA, 19 nt, Artificial Sequence
  Description of Artificial Sequence: Synthetic oligonucleotide
  Antisense strand to SEQ ID NO: 1079496
agcaucacuggauuugaga

SEQ ID NO: 1079498 - RNA, 19 nt, Artificial Sequence
  Description of Artificial Sequence: Synthetic oligonucleotide
  Sense strand starting at position 640 of SEQ ID NO: 915435
uuacaaugucuaugucaaa

SEQ ID NO: 1079499 - RNA, 19 nt, Artificial Sequence
  Description of Artificial Sequence: Synthetic oligonucleotide
  Antisense strand to SEQ ID NO: 1079498
uuugacauagacauuguaa

SEQ ID NO: 1079500 - RNA, 19 nt, Artificial Sequence
  Description of Artificial Sequence: Synthetic oligonucleotide
  Sense strand starting at position 658 of SEQ ID NO: 915435
aguacucguuuaucaaaua

SEQ ID NO: 1079501 - RNA, 19 nt, Artificial Sequence
  Description of Artificial Sequence: Synthetic oligonucleotide
  Antisense strand to SEQ ID NO: 1079500
uauuugauaaacgaguacu

SEQ ID NO: 1079502 - RNA, 19 nt, Artificial Sequence
  Description of Artificial Sequence: Synthetic oligonucleotide
  Sense strand starting at position 717 of SEQ ID NO: 915435
gucuuagugccacaagaau

SEQ ID NO: 1079503 - RNA, 19 nt, Artificial Sequence
  Description of Artificial Sequence: Synthetic oligonucleotide
  Antisense strand to SEQ ID NO: 1079502
auucuuguggcacuaagac

SEQ ID NO: 1079504 - RNA, 19 nt, Artificial Sequence
  Description of Artificial Sequence: Synthetic oligonucleotide
  Sense strand starting at position 738 of SEQ ID NO: 915435
caucgaguuccucagcaac

SEQ ID NO: 1079505 - RNA, 19 nt, Artificial Sequence
  Description of Artificial Sequence: Synthetic oligonucleotide
  Antisense strand to SEQ ID NO: 1079504
guugcugaggaacucgaug

SEQ ID NO: 1079506 - RNA, 19 nt, Artificial Sequence
  Description of Artificial Sequence: Synthetic oligonucleotide
  Sense strand starting at position 832 of SEQ ID NO: 915435
aguaacuacucuuuaagga

SEQ ID NO: 1079507 - RNA, 19 nt, Artificial Sequence
  Description of Artificial Sequence: Synthetic oligonucleotide
  Antisense strand to SEQ ID NO: 1079506
uccuuaaagaguaguuacu

SEQ ID NO: 1079508 - RNA, 19 nt, Artificial Sequence
  Description of Artificial Sequence: Synthetic oligonucleotide
  Sense strand starting at position 898 of SEQ ID NO: 915435
cugucuaggaagugaugua

SEQ ID NO: 1079509 - RNA, 19 nt, Artificial Sequence
  Description of Artificial Sequence: Synthetic oligonucleotide
  Antisense strand to SEQ ID NO: 1079508
uacaucacuuccuagacag

SEQ ID NO: 1079510 - RNA, 19 nt, Artificial Sequence
  Description of Artificial Sequence: Synthetic oligonucleotide
  Sense strand starting at position 968 of SEQ ID NO: 915435
aaaguuaguccgggaauug

SEQ ID NO: 1079511 - RNA, 19 nt, Artificial Sequence
  Description of Artificial Sequence: Synthetic oligonucleotide
  Antisense strand to SEQ ID NO: 1079510
caauucccggacuaacuuu

SEQ ID NO: 1079512 - RNA, 19 nt, Artificial Sequence
  Description of Artificial Sequence: Synthetic oligonucleotide
  Sense strand starting at position 969 of SEQ ID NO: 915435
aaguuaguccgggaauuga

SEQ ID NO: 1079513 - RNA, 19 nt, Artificial Sequence
  Description of Artificial Sequence: Synthetic oligonucleotide
  Antisense strand to SEQ ID NO: 1079512
ucaauucccggacuaacuu

SEQ ID NO: 1079514 - RNA, 19 nt, Artificial Sequence
  Description of Artificial Sequence: Synthetic oligonucleotide
  Sense strand starting at position 987 of SEQ ID NO: 915435
aguuuagaauccuuuaaag

SEQ ID NO: 1079515 - RNA, 19 nt, Artificial Sequence
  Description of Artificial Sequence: Synthetic oligonucleotide
  Antisense strand to SEQ ID NO: 1079514
cuuuaaaggauucuaaacu

SEQ ID NO: 1079516 - RNA, 19 nt, Artificial Sequence
  Description of Artificial Sequence: Synthetic oligonucleotide
  Sense strand starting at position 1225 of SEQ ID NO: 915435
gaacgcacgcucucuagua

SEQ ID NO: 1079517 - RNA, 19 nt, Artificial Sequence
  Description of Artificial Sequence: Synthetic oligonucleotide
  Antisense strand to SEQ ID NO: 1079516
uacuagagagcgugcguuc

SEQ ID NO: 1079518 - RNA, 19 nt, Artificial Sequence
  Description of Artificial Sequence: Synthetic oligonucleotide
  Sense strand starting at position 1885 of SEQ ID NO: 915435
cagacagcuccgcaauaug

SEQ ID NO: 1079519 - RNA, 19 nt, Artificial Sequence
  Description of Artificial Sequence: Synthetic oligonucleotide
  Antisense strand to SEQ ID NO: 1079518
cauauugcggagcugucug

SEQ ID NO: 1079520 - RNA, 19 nt, Artificial Sequence
  Description of Artificial Sequence: Synthetic oligonucleotide
  Sense strand starting at position 2359 of SEQ ID NO: 915435
gaccaaaugaagcgugaga

SEQ ID NO: 1079521 - RNA, 19 nt, Artificial Sequence
  Description of Artificial Sequence: Synthetic oligonucleotide
  Antisense strand to SEQ ID NO: 1079520
ucucacgcuucauuugguc

SEQ ID NO: 1079522 - RNA, 19 nt, Artificial Sequence
  Description of Artificial Sequence: Synthetic oligonucleotide
  Sense strand starting at position 2361 of SEQ ID NO: 915435
ccaaaugaagcgugagacu

SEQ ID NO: 1079523 - RNA, 19 nt, Artificial Sequence
  Description of Artificial Sequence: Synthetic oligonucleotide
  Antisense strand to SEQ ID NO: 1079522
agucucacgcuucauuugg

SEQ ID NO: 1079524 - RNA, 19 nt, Artificial Sequence
  Description of Artificial Sequence: Synthetic oligonucleotide
  Sense strand starting at position 2554 of SEQ ID NO: 915435
ccaaaucaggagugcaaau

SEQ ID NO: 1079525 - RNA, 19 nt, Artificial Sequence
  Description of Artificial Sequence: Synthetic oligonucleotide
  Antisense strand to SEQ ID NO: 1079524
auuugcacuccugauuugg

SEQ ID NO: 1079526 - RNA, 19 nt, Artificial Sequence
  Description of Artificial Sequence: Synthetic oligonucleotide
  Sense strand starting at position 2581 of SEQ ID NO: 915435
aagcaaggaugugugauaa

SEQ ID NO: 1079527 - RNA, 19 nt, Artificial Sequence
  Description of Artificial Sequence: Synthetic oligonucleotide
  Antisense strand to SEQ ID NO: 1079526
uuaucacacauccuugcuu

SEQ ID NO: 1079528 - RNA, 19 nt, Artificial Sequence
  Description of Artificial Sequence: Synthetic oligonucleotide
  Sense strand starting at position 2633 of SEQ ID NO: 915435
gaaggaguugguuagcaag

SEQ ID NO: 1079529 - RNA, 19 nt, Artificial Sequence
  Description of Artificial Sequence: Synthetic oligonucleotide
  Antisense strand to SEQ ID NO: 1079528
cuugcuaaccaacuccuuc

SEQ ID NO: 1079530 - RNA, 19 nt, Artificial Sequence
  Description of Artificial Sequence: Synthetic oligonucleotide
  Sense strand starting at position 2635 of SEQ ID NO: 915435
aggaguugguuagcaagaa

SEQ ID NO: 1079531 - RNA, 19 nt, Artificial Sequence
  Description of Artificial Sequence: Synthetic oligonucleotide
  Antisense strand to SEQ ID NO: 1079530
uucuugcuaaccaacuccu

SEQ ID NO: 1079532 - RNA, 19 nt, Artificial Sequence
  Description of Artificial Sequence: Synthetic oligonucleotide
  Sense strand starting at position 2708 of SEQ ID NO: 915435
gagaaaguuaggcauucga

SEQ ID NO: 1079533 - RNA, 19 nt, Artificial Sequence
  Description of Artificial Sequence: Synthetic oligonucleotide
  Antisense strand to SEQ ID NO: 1079532
ucgaaugccuaacuuucuc

SEQ ID NO: 1079534 - RNA, 19 nt, Artificial Sequence
  Description of Artificial Sequence: Synthetic oligonucleotide
  Sense strand starting at position 2724 of SEQ ID NO: 915435
cgaucuuaagacuaagucu

SEQ ID NO: 1079535 - RNA, 19 nt, Artificial Sequence
  Description of Artificial Sequence: Synthetic oligonucleotide
  Antisense strand to SEQ ID NO: 1079534
agacuuagucuuaagaucg

SEQ ID NO: 1079536 - RNA, 19 nt, Artificial Sequence
  Description of Artificial Sequence: Synthetic oligonucleotide
  Sense strand starting at position 2785 of SEQ ID NO: 915435
uccugacuucuggaucagu

SEQ ID NO: 1079537 - RNA, 19 nt, Artificial Sequence
  Description of Artificial Sequence: Synthetic oligonucleotide
  Antisense strand to SEQ ID NO: 1079536
acugauccagaagucagga

SEQ ID NO: 1079538 - RNA, 19 nt, Artificial Sequence
  Description of Artificial Sequence: Synthetic oligonucleotide
  Sense strand starting at position 2838 of SEQ ID NO: 915435
uauugucugcugggaugau

SEQ ID NO: 1079539 - RNA, 19 nt, Artificial Sequence
  Description of Artificial Sequence: Synthetic oligonucleotide
  Antisense strand to SEQ ID NO: 1079538
aucaucccagcagacaaua

SEQ ID NO: 1079540 - RNA, 19 nt, Artificial Sequence
  Description of Artificial Sequence: Synthetic oligonucleotide
  Sense strand starting at position 2869 of SEQ ID NO: 915435
acuugcuaugaguauacaa

SEQ ID NO: 1079541 - RNA, 19 nt, Artificial Sequence
  Description of Artificial Sequence: Synthetic oligonucleotide
  Antisense strand to SEQ ID NO: 1079540
uuguauacucauagcaagu

SEQ ID NO: 1079542 - RNA, 19 nt, Artificial Sequence
  Description of Artificial Sequence: Synthetic oligonucleotide
  Sense strand starting at position 2871 of SEQ ID NO: 915435
uugcuaugaguauacaaac

SEQ ID NO: 1079543 - RNA, 19 nt, Artificial Sequence
  Description of Artificial Sequence: Synthetic oligonucleotide
  Antisense strand to SEQ ID NO: 1079542
guuuguauacucauagcaa

SEQ ID NO: 1079544 - RNA, 19 nt, Artificial Sequence
  Description of Artificial Sequence: Synthetic oligonucleotide
  Sense strand starting at position 2916 of SEQ ID NO: 915435
uggcuugcccuguuugcaa

SEQ ID NO: 1079545 - RNA, 19 nt, Artificial Sequence
  Description of Artificial Sequence: Synthetic oligonucleotide
  Antisense strand to SEQ ID NO: 1079544
uugcaaacagggcaagcca

SEQ ID NO: 1079546 - RNA, 19 nt, Artificial Sequence
  Description of Artificial Sequence: Synthetic oligonucleotide
  Sense strand starting at position 3135 of SEQ ID NO: 915435
uugagaccucuccgaacaa

SEQ ID NO: 1079547 - RNA, 19 nt, Artificial Sequence
  Description of Artificial Sequence: Synthetic oligonucleotide
  Antisense strand to SEQ ID NO: 1079546
uuguucggagaggucucaa

SEQ ID NO: 1079548 - RNA, 19 nt, Artificial Sequence
  Description of Artificial Sequence: Synthetic oligonucleotide
  Sense strand starting at position 3189 of SEQ ID NO: 915435
agggccuuuagauagcaaa

SEQ ID NO: 1079549 - RNA, 19 nt, Artificial Sequence
  Description of Artificial Sequence: Synthetic oligonucleotide
  Antisense strand to SEQ ID NO: 1079548
uuugcuaucuaaaggcccu

SEQ ID NO: 1079550 - RNA, 19 nt, Artificial Sequence
  Description of Artificial Sequence: Synthetic oligonucleotide
  Sense strand starting at position 3200 of SEQ ID NO: 915435
auagcaaauuccucaagga

SEQ ID NO: 1079551 - RNA, 19 nt, Artificial Sequence
  Description of Artificial Sequence: Synthetic oligonucleotide
  Antisense strand to SEQ ID NO: 1079550
uccuugaggaauuugcuau

SEQ ID NO: 1079552 - RNA, 19 nt, Artificial Sequence
  Description of Artificial Sequence: Synthetic oligonucleotide
  Sense strand starting at position 3296 of SEQ ID NO: 915435
cucccuagggugcaagaau

SEQ ID NO: 1079553 - RNA, 19 nt, Artificial Sequence
  Description of Artificial Sequence: Synthetic oligonucleotide
  Antisense strand to SEQ ID NO: 1079552
auucuugcacccuagggag

SEQ ID NO: 1079554 - RNA, 19 nt, Artificial Sequence
  Description of Artificial Sequence: Synthetic oligonucleotide
  Sense strand starting at position 3311 of SEQ ID NO: 915435
gaauuauccugguuauugu

SEQ ID NO: 1079555 - RNA, 19 nt, Artificial Sequence
  Description of Artificial Sequence: Synthetic oligonucleotide
  Antisense strand to SEQ ID NO: 1079554
acaauaaccaggauaauuc

SEQ ID NO: 1079556 - RNA, 19 nt, Artificial Sequence
  Description of Artificial Sequence: Synthetic oligonucleotide
  Sense strand starting at position 3370 of SEQ ID NO: 915435
acguaauacuucccaugaa

SEQ ID NO: 1079557 - RNA, 19 nt, Artificial Sequence
  Description of Artificial Sequence: Synthetic oligonucleotide
  Antisense strand to SEQ ID NO: 1079556
uucaugggaaguauuacgu

SEQ ID NO: 1079558 - RNA, 19 nt, Artificial Sequence
  Description of Artificial Sequence: Synthetic oligonucleotide
  Sense strand starting at position 3412 of SEQ ID NO: 915435
uguaaauuccuacauagua

SEQ ID NO: 1079559 - RNA, 19 nt, Artificial Sequence
  Description of Artificial Sequence: Synthetic oligonucleotide
  Antisense strand to SEQ ID NO: 1079558
uacuauguaggaauuuaca

SEQ ID NO: 1079560 - RNA, 19 nt, Artificial Sequence
  Description of Artificial Sequence: Synthetic oligonucleotide
  Sense strand starting at position 3504 of SEQ ID NO: 915435
cagacacuggugugaaauu

SEQ ID NO: 1079561 - RNA, 19 nt, Artificial Sequence
  Description of Artificial Sequence: Synthetic oligonucleotide
  Antisense strand to SEQ ID NO: 1079560
aauuucacaccagugucug

SEQ ID NO: 1079562 - RNA, 19 nt, Artificial Sequence
  Description of Artificial Sequence: Synthetic oligonucleotide
  Sense strand starting at position 3760 of SEQ ID NO: 915435
uuaguuggguauccuauua

SEQ ID NO: 1079563 - RNA, 19 nt, Artificial Sequence
  Description of Artificial Sequence: Synthetic oligonucleotide
  Antisense strand to SEQ ID NO: 1079562
uaauaggauacccaacuaa

SEQ ID NO: 1079564 - RNA, 19 nt, Artificial Sequence
  Description of Artificial Sequence: Synthetic oligonucleotide
  Sense strand starting at position 3767 of SEQ ID NO: 915435
gguauccuauuaguaaaua

SEQ ID NO: 1079565 - RNA, 19 nt, Artificial Sequence
  Description of Artificial Sequence: Synthetic oligonucleotide
  Antisense strand to SEQ ID NO: 1079564
uauuuacuaauaggauacc

SEQ ID NO: 1079566 - RNA, 19 nt, Artificial Sequence
  Description of Artificial Sequence: Synthetic oligonucleotide
  Sense strand starting at position 3881 of SEQ ID NO: 915435
gcuauuuggcacugugauu

SEQ ID NO: 1079567 - RNA, 19 nt, Artificial Sequence
  Description of Artificial Sequence: Synthetic oligonucleotide
  Antisense strand to SEQ ID NO: 1079566
aaucacagugccaaauagc

SEQ ID NO: 1079568 - RNA, 19 nt, Artificial Sequence
  Description of Artificial Sequence: Synthetic oligonucleotide
  Sense strand starting at position 262 of SEQ ID NO: 915436
cuuggcuagucuugaauuc

SEQ ID NO: 1079569 - RNA, 19 nt, Artificial Sequence
  Description of Artificial Sequence: Synthetic oligonucleotide
  Antisense strand to SEQ ID NO: 1079568
gaauucaagacuagccaag

SEQ ID NO: 1079570 - RNA, 19 nt, Artificial Sequence
  Description of Artificial Sequence: Synthetic oligonucleotide
  Sense strand starting at position 445 of SEQ ID NO: 915436
acgugacucugagggacuu

SEQ ID NO: 1079571 - RNA, 19 nt, Artificial Sequence
  Description of Artificial Sequence: Synthetic oligonucleotide
  Antisense strand to SEQ ID NO: 1079570
aagucccucagagucacgu

SEQ ID NO: 1079572 - RNA, 19 nt, Artificial Sequence
  Description of Artificial Sequence: Synthetic oligonucleotide
  Sense strand starting at position 451 of SEQ ID NO: 915436
cucugagggacuuguccuu

SEQ ID NO: 1079573 - RNA, 19 nt, Artificial Sequence
  Description of Artificial Sequence: Synthetic oligonucleotide
  Antisense strand to SEQ ID NO: 1079572
aaggacaagucccucagag

SEQ ID NO: 1079574 - RNA, 19 nt, Artificial Sequence
  Description of Artificial Sequence: Synthetic oligonucleotide
  Sense strand starting at position 525 of SEQ ID NO: 915436
gaacucaucugcuagagua

SEQ ID NO: 1079575 - RNA, 19 nt, Artificial Sequence
  Description of Artificial Sequence: Synthetic oligonucleotide
  Antisense strand to SEQ ID NO: 1079574
uacucuagcagaugaguuc

SEQ ID NO: 1079576 - RNA, 19 nt, Artificial Sequence
  Description of Artificial Sequence: Synthetic oligonucleotide
  Sense strand starting at position 527 of SEQ ID NO: 915436
acucaucugcuagaguaaa

SEQ ID NO: 1079577 - RNA, 19 nt, Artificial Sequence
  Description of Artificial Sequence: Synthetic oligonucleotide
  Antisense strand to SEQ ID NO: 1079576
uuuacucuagcagaugagu

SEQ ID NO: 1079578 - RNA, 19 nt, Artificial Sequence
  Description of Artificial Sequence: Synthetic oligonucleotide
  Sense strand starting at position 574 of SEQ ID NO: 915436
gcaguuuacuugcagagcu

SEQ ID NO: 1079579 - RNA, 19 nt, Artificial Sequence
  Description of Artificial Sequence: Synthetic oligonucleotide
  Antisense strand to SEQ ID NO: 1079578
agcucugcaaguaaacugc

SEQ ID NO: 1079580 - RNA, 19 nt, Artificial Sequence
  Description of Artificial Sequence: Synthetic oligonucleotide
  Sense strand starting at position 610 of SEQ ID NO: 915436
gaggaauucugcccugggu

SEQ ID NO: 1079581 - RNA, 19 nt, Artificial Sequence
  Description of Artificial Sequence: Synthetic oligonucleotide
  Antisense strand to SEQ ID NO: 1079580
acccagggcagaauuccuc

SEQ ID NO: 1079582 - RNA, 19 nt, Artificial Sequence
  Description of Artificial Sequence: Synthetic oligonucleotide
  Sense strand starting at position 854 of SEQ ID NO: 915436
agccauugaucuguccaaa

SEQ ID NO: 1079583 - RNA, 19 nt, Artificial Sequence
  Description of Artificial Sequence: Synthetic oligonucleotide
  Antisense strand to SEQ ID NO: 1079582
uuuggacagaucaauggcu

SEQ ID NO: 1079584 - RNA, 19 nt, Artificial Sequence
  Description of Artificial Sequence: Synthetic oligonucleotide
  Sense strand starting at position 1287 of SEQ ID NO: 915436
ggaggaaucugcucuccac

SEQ ID NO: 1079585 - RNA, 19 nt, Artificial Sequence
  Description of Artificial Sequence: Synthetic oligonucleotide
  Antisense strand to SEQ ID NO: 1079584
guggagagcagauuccucc

SEQ ID NO: 1079586 - RNA, 19 nt, Artificial Sequence
  Description of Artificial Sequence: Synthetic oligonucleotide
  Sense strand starting at position 1357 of SEQ ID NO: 915436
ccuagaaccugcggugaaa

SEQ ID NO: 1079587 - RNA, 19 nt, Artificial Sequence
  Description of Artificial Sequence: Synthetic oligonucleotide
  Antisense strand to SEQ ID NO: 1079586
uuucaccgcagguucuagg

SEQ ID NO: 1079588 - RNA, 19 nt, Artificial Sequence
  Description of Artificial Sequence: Synthetic oligonucleotide
  Sense strand starting at position 1459 of SEQ ID NO: 915436
ugaaucagggccuguugua

SEQ ID NO: 1079589 - RNA, 19 nt, Artificial Sequence
  Description of Artificial Sequence: Synthetic oligonucleotide
  Antisense strand to SEQ ID NO: 1079588
uacaacaggcccugauuca

SEQ ID NO: 1079590 - RNA, 19 nt, Artificial Sequence
  Description of Artificial Sequence: Synthetic oligonucleotide
  Sense strand starting at position 1471 of SEQ ID NO: 915436
uguuguacuuucuuaagga

SEQ ID NO: 1079591 - RNA, 19 nt, Artificial Sequence
  Description of Artificial Sequence: Synthetic oligonucleotide
  Antisense strand to SEQ ID NO: 1079590
uccuuaagaaaguacaaca

SEQ ID NO: 1079592 - RNA, 19 nt, Artificial Sequence
  Description of Artificial Sequence: Synthetic oligonucleotide
  Sense strand starting at position 1472 of SEQ ID NO: 915436
guuguacuuucuuaaggaa

SEQ ID NO: 1079593 - RNA, 19 nt, Artificial Sequence
  Description of Artificial Sequence: Synthetic oligonucleotide
  Antisense strand to SEQ ID NO: 1079592
uuccuuaagaaaguacaac

SEQ ID NO: 1079594 - RNA, 19 nt, Artificial Sequence
  Description of Artificial Sequence: Synthetic oligonucleotide
  Sense strand starting at position 2185 of SEQ ID NO: 915436
gccgauuacucacuuuguu

SEQ ID NO: 1079595 - RNA, 19 nt, Artificial Sequence
  Description of Artificial Sequence: Synthetic oligonucleotide
  Antisense strand to SEQ ID NO: 1079594
aacaaagugaguaaucggc

SEQ ID NO: 1079596 - RNA, 19 nt, Artificial Sequence
  Description of Artificial Sequence: Synthetic oligonucleotide
  Sense strand starting at position 2237 of SEQ ID NO: 915436
ggcggaguuuggugauguc

SEQ ID NO: 1079597 - RNA, 19 nt, Artificial Sequence
  Description of Artificial Sequence: Synthetic oligonucleotide
  Antisense strand to SEQ ID NO: 1079596
gacaucaccaaacuccgcc

SEQ ID NO: 1079598 - RNA, 19 nt, Artificial Sequence
  Description of Artificial Sequence: Synthetic oligonucleotide
  Sense strand starting at position 2238 of SEQ ID NO: 915436
gcggaguuuggugauguca

SEQ ID NO: 1079599 - RNA, 19 nt, Artificial Sequence
  Description of Artificial Sequence: Synthetic oligonucleotide
  Antisense strand to SEQ ID NO: 1079598
ugacaucaccaaacuccgc

SEQ ID NO: 1079600 - RNA, 19 nt, Artificial Sequence
  Description of Artificial Sequence: Synthetic oligonucleotide
  Sense strand starting at position 2240 of SEQ ID NO: 915436
ggaguuuggugaugucacu

SEQ ID NO: 1079601 - RNA, 19 nt, Artificial Sequence
  Description of Artificial Sequence: Synthetic oligonucleotide
  Antisense strand to SEQ ID NO: 1079600
agugacaucaccaaacucc

SEQ ID NO: 1079602 - RNA, 19 nt, Artificial Sequence
  Description of Artificial Sequence: Synthetic oligonucleotide
  Sense strand starting at position 2373 of SEQ ID NO: 915436
cggguuuccuaaccgcuaa

SEQ ID NO: 1079603 - RNA, 19 nt, Artificial Sequence
  Description of Artificial Sequence: Synthetic oligonucleotide
  Antisense strand to SEQ ID NO: 1079602
uuagcgguuaggaaacccg

SEQ ID NO: 1079604 - RNA, 19 nt, Artificial Sequence
  Description of Artificial Sequence: Synthetic oligonucleotide
  Sense strand starting at position 2374 of SEQ ID NO: 915436
ggguuuccuaaccgcuaaa

SEQ ID NO: 1079605 - RNA, 19 nt, Artificial Sequence
  Description of Artificial Sequence: Synthetic oligonucleotide
  Antisense strand to SEQ ID NO: 1079604
uuuagcgguuaggaaaccc

SEQ ID NO: 1079606 - RNA, 19 nt, Artificial Sequence
  Description of Artificial Sequence: Synthetic oligonucleotide
  Sense strand starting at position 2403 of SEQ ID NO: 915436
ggugguggcugucucagaa

SEQ ID NO: 1079607 - RNA, 19 nt, Artificial Sequence
  Description of Artificial Sequence: Synthetic oligonucleotide
  Antisense strand to SEQ ID NO: 1079606
uucugagacagccaccacc

SEQ ID NO: 1079608 - RNA, 19 nt, Artificial Sequence
  Description of Artificial Sequence: Synthetic oligonucleotide
  Sense strand starting at position 2413 of SEQ ID NO: 915436
gucucagaagcacguuaaa

SEQ ID NO: 1079609 - RNA, 19 nt, Artificial Sequence
  Description of Artificial Sequence: Synthetic oligonucleotide
  Antisense strand to SEQ ID NO: 1079608
uuuaacgugcuucugagac

SEQ ID NO: 1079610 - RNA, 19 nt, Artificial Sequence
  Description of Artificial Sequence: Synthetic oligonucleotide
  Sense strand starting at position 2692 of SEQ ID NO: 915436
uggcgcuugugucucagaa

SEQ ID NO: 1079611 - RNA, 19 nt, Artificial Sequence
  Description of Artificial Sequence: Synthetic oligonucleotide
  Antisense strand to SEQ ID NO: 1079610
uucugagacacaagcgcca

SEQ ID NO: 1079612 - RNA, 19 nt, Artificial Sequence
  Description of Artificial Sequence: Synthetic oligonucleotide
  Sense strand starting at position 2696 of SEQ ID NO: 915436
gcuugugucucagaaggug

SEQ ID NO: 1079613 - RNA, 19 nt, Artificial Sequence
  Description of Artificial Sequence: Synthetic oligonucleotide
  Antisense strand to SEQ ID NO: 1079612
caccuucugagacacaagc

SEQ ID NO: 1079614 - RNA, 19 nt, Artificial Sequence
  Description of Artificial Sequence: Synthetic oligonucleotide
  Sense strand starting at position 2807 of SEQ ID NO: 915436
accacuaauucugucaugu

SEQ ID NO: 1079615 - RNA, 19 nt, Artificial Sequence
  Description of Artificial Sequence: Synthetic oligonucleotide
  Antisense strand to SEQ ID NO: 1079614
acaugacagaauuaguggu

SEQ ID NO: 1079616 - RNA, 19 nt, Artificial Sequence
  Description of Artificial Sequence: Synthetic oligonucleotide
  Sense strand starting at position 2945 of SEQ ID NO: 915436
ggcggagucuucuccagau

SEQ ID NO: 1079617 - RNA, 19 nt, Artificial Sequence
  Description of Artificial Sequence: Synthetic oligonucleotide
  Antisense strand to SEQ ID NO: 1079616
aucuggagaagacuccgcc

SEQ ID NO: 1079618 - RNA, 19 nt, Artificial Sequence
  Description of Artificial Sequence: Synthetic oligonucleotide
  Sense strand starting at position 2951 of SEQ ID NO: 915436
gucuucuccagauggagaa

SEQ ID NO: 1079619 - RNA, 19 nt, Artificial Sequence
  Description of Artificial Sequence: Synthetic oligonucleotide
  Antisense strand to SEQ ID NO: 1079618
uucuccaucuggagaagac

SEQ ID NO: 1079620 - RNA, 19 nt, Artificial Sequence
  Description of Artificial Sequence: Synthetic oligonucleotide
  Sense strand starting at position 2983 of SEQ ID NO: 915436
uucucugaauucgucuuaa

SEQ ID NO: 1079621 - RNA, 19 nt, Artificial Sequence
  Description of Artificial Sequence: Synthetic oligonucleotide
  Antisense strand to SEQ ID NO: 1079620
uuaagacgaauucagagaa

SEQ ID NO: 1079622 - RNA, 19 nt, Artificial Sequence
  Description of Artificial Sequence: Synthetic oligonucleotide
  Sense strand starting at position 2987 of SEQ ID NO: 915436
cugaauucgucuuaaauua

SEQ ID NO: 1079623 - RNA, 19 nt, Artificial Sequence
  Description of Artificial Sequence: Synthetic oligonucleotide
  Antisense strand to SEQ ID NO: 1079622
uaauuuaagacgaauucag

SEQ ID NO: 1079624 - RNA, 19 nt, Artificial Sequence
  Description of Artificial Sequence: Synthetic oligonucleotide
  Sense strand starting at position 2994 of SEQ ID NO: 915436
cgucuuaaauuaggaaauc

SEQ ID NO: 1079625 - RNA, 19 nt, Artificial Sequence
  Description of Artificial Sequence: Synthetic oligonucleotide
  Antisense strand to SEQ ID NO: 1079624
gauuuccuaauuuaagacg

SEQ ID NO: 1079626 - RNA, 19 nt, Artificial Sequence
  Description of Artificial Sequence: Synthetic oligonucleotide
  Sense strand starting at position 2995 of SEQ ID NO: 915436
gucuuaaauuaggaaauca

SEQ ID NO: 1079627 - RNA, 19 nt, Artificial Sequence
  Description of Artificial Sequence: Synthetic oligonucleotide
  Antisense strand to SEQ ID NO: 1079626
ugauuuccuaauuuaagac

SEQ ID NO: 1079628 - RNA, 19 nt, Artificial Sequence
  Description of Artificial Sequence: Synthetic oligonucleotide
  Sense strand starting at position 3005 of SEQ ID NO: 915436
aggaaaucaugugggaauu

SEQ ID NO: 1079629 - RNA, 19 nt, Artificial Sequence
  Description of Artificial Sequence: Synthetic oligonucleotide
  Antisense strand to SEQ ID NO: 1079628
aauucccacaugauuuccu

SEQ ID NO: 1079630 - RNA, 19 nt, Artificial Sequence
  Description of Artificial Sequence: Synthetic oligonucleotide
  Sense strand starting at position 3031 of SEQ ID NO: 915436
auuggaaauucugacuugu

SEQ ID NO: 1079631 - RNA, 19 nt, Artificial Sequence
  Description of Artificial Sequence: Synthetic oligonucleotide
  Antisense strand to SEQ ID NO: 1079630
acaagucagaauuuccaau

SEQ ID NO: 1079632 - RNA, 19 nt, Artificial Sequence
  Description of Artificial Sequence: Synthetic oligonucleotide
  Sense strand starting at position 3033 of SEQ ID NO: 915436
uggaaauucugacuuguuu

SEQ ID NO: 1079633 - RNA, 19 nt, Artificial Sequence
  Description of Artificial Sequence: Synthetic oligonucleotide
  Antisense strand to SEQ ID NO: 1079632
aaacaagucagaauuucca

SEQ ID NO: 1079634 - RNA, 19 nt, Artificial Sequence
  Description of Artificial Sequence: Synthetic oligonucleotide
  Sense strand starting at position 3050 of SEQ ID NO: 915436
uucccaggcucugaagaaa

SEQ ID NO: 1079635 - RNA, 19 nt, Artificial Sequence
  Description of Artificial Sequence: Synthetic oligonucleotide
  Antisense strand to SEQ ID NO: 1079634
uuucuucagagccugggaa

SEQ ID NO: 1079636 - RNA, 19 nt, Artificial Sequence
  Description of Artificial Sequence: Synthetic oligonucleotide
  Sense strand starting at position 3127 of SEQ ID NO: 915436
guggcuggcccugauuaga

SEQ ID NO: 1079637 - RNA, 19 nt, Artificial Sequence
  Description of Artificial Sequence: Synthetic oligonucleotide
  Antisense strand to SEQ ID NO: 1079636
ucuaaucagggccagccac

SEQ ID NO: 1079638 - RNA, 19 nt, Artificial Sequence
  Description of Artificial Sequence: Synthetic oligonucleotide
  Sense strand starting at position 3589 of SEQ ID NO: 915436
uuuguaaagaagugguuua

SEQ ID NO: 1079639 - RNA, 19 nt, Artificial Sequence
  Description of Artificial Sequence: Synthetic oligonucleotide
  Antisense strand to SEQ ID NO: 1079638
uaaaccacuucuuuacaaa

SEQ ID NO: 1079640 - RNA, 19 nt, Artificial Sequence
  Description of Artificial Sequence: Synthetic oligonucleotide
  Sense strand starting at position 3590 of SEQ ID NO: 915436
uuguaaagaagugguuuaa

SEQ ID NO: 1079641 - RNA, 19 nt, Artificial Sequence
  Description of Artificial Sequence: Synthetic oligonucleotide
  Antisense strand to SEQ ID NO: 1079640
uuaaaccacuucuuuacaa

SEQ ID NO: 1079642 - RNA, 19 nt, Artificial Sequence
  Description of Artificial Sequence: Synthetic oligonucleotide
  Sense strand starting at position 3705 of SEQ ID NO: 915436
gggccagaauucuguauuu

SEQ ID NO: 1079643 - RNA, 19 nt, Artificial Sequence
  Description of Artificial Sequence: Synthetic oligonucleotide
  Antisense strand to SEQ ID NO: 1079642
aaauacagaauucuggccc

SEQ ID NO: 1079644 - RNA, 19 nt, Artificial Sequence
  Description of Artificial Sequence: Synthetic oligonucleotide
  Sense strand starting at position 3751 of SEQ ID NO: 915436
uguaaauagagaugggucu

SEQ ID NO: 1079645 - RNA, 19 nt, Artificial Sequence
  Description of Artificial Sequence: Synthetic oligonucleotide
  Antisense strand to SEQ ID NO: 1079644
agacccaucucuauuuaca

SEQ ID NO: 1079646 - RNA, 19 nt, Artificial Sequence
  Description of Artificial Sequence: Synthetic oligonucleotide
  Sense strand starting at position 3900 of SEQ ID NO: 915436
guuauaucugcaugccuac

SEQ ID NO: 1079647 - RNA, 19 nt, Artificial Sequence
  Description of Artificial Sequence: Synthetic oligonucleotide
  Antisense strand to SEQ ID NO: 1079646
guaggcaugcagauauaac

SEQ ID NO: 1079648 - RNA, 19 nt, Artificial Sequence
  Description of Artificial Sequence: Synthetic oligonucleotide
  Sense strand starting at position 162 of SEQ ID NO: 915437
cuguccugacucuguauga

SEQ ID NO: 1079649 - RNA, 19 nt, Artificial Sequence
  Description of Artificial Sequence: Synthetic oligonucleotide
  Antisense strand to SEQ ID NO: 1079648
ucauacagagucaggacag

SEQ ID NO: 1079650 - RNA, 19 nt, Artificial Sequence
  Description of Artificial Sequence: Synthetic oligonucleotide
  Sense strand starting at position 172 of SEQ ID NO: 915437
ucuguaugaccuuggccaa

SEQ ID NO: 1079651 - RNA, 19 nt, Artificial Sequence
  Description of Artificial Sequence: Synthetic oligonucleotide
  Antisense strand to SEQ ID NO: 1079650
uuggccaaggucauacaga

SEQ ID NO: 1079652 - RNA, 19 nt, Artificial Sequence
  Description of Artificial Sequence: Synthetic oligonucleotide
  Sense strand starting at position 246 of SEQ ID NO: 915437
ucagaaucacugcgaagau

SEQ ID NO: 1079653 - RNA, 19 nt, Artificial Sequence
  Description of Artificial Sequence: Synthetic oligonucleotide
  Antisense strand to SEQ ID NO: 1079652
aucuucgcagugauucuga

SEQ ID NO: 1079654 - RNA, 19 nt, Artificial Sequence
  Description of Artificial Sequence: Synthetic oligonucleotide
  Sense strand starting at position 247 of SEQ ID NO: 915437
cagaaucacugcgaagauu

SEQ ID NO: 1079655 - RNA, 19 nt, Artificial Sequence
  Description of Artificial Sequence: Synthetic oligonucleotide
  Antisense strand to SEQ ID NO: 1079654
aaucuucgcagugauucug

SEQ ID NO: 1079656 - RNA, 19 nt, Artificial Sequence
  Description of Artificial Sequence: Synthetic oligonucleotide
  Sense strand starting at position 334 of SEQ ID NO: 915437
ccuagaauguaaucagcau

SEQ ID NO: 1079657 - RNA, 19 nt, Artificial Sequence
  Description of Artificial Sequence: Synthetic oligonucleotide
  Antisense strand to SEQ ID NO: 1079656
augcugauuacauucuagg

SEQ ID NO: 1079658 - RNA, 19 nt, Artificial Sequence
  Description of Artificial Sequence: Synthetic oligonucleotide
  Sense strand starting at position 629 of SEQ ID NO: 915437
cagagaagugaaugucuau

SEQ ID NO: 1079659 - RNA, 19 nt, Artificial Sequence
  Description of Artificial Sequence: Synthetic oligonucleotide
  Antisense strand to SEQ ID NO: 1079658
auagacauucacuucucug

SEQ ID NO: 1079660 - RNA, 19 nt, Artificial Sequence
  Description of Artificial Sequence: Synthetic oligonucleotide
  Sense strand starting at position 632 of SEQ ID NO: 915437
agaagugaaugucuaugga

SEQ ID NO: 1079661 - RNA, 19 nt, Artificial Sequence
  Description of Artificial Sequence: Synthetic oligonucleotide
  Antisense strand to SEQ ID NO: 1079660
uccauagacauucacuucu

SEQ ID NO: 1079662 - RNA, 19 nt, Artificial Sequence
  Description of Artificial Sequence: Synthetic oligonucleotide
  Sense strand starting at position 636 of SEQ ID NO: 915437
gugaaugucuauggauuug

SEQ ID NO: 1079663 - RNA, 19 nt, Artificial Sequence
  Description of Artificial Sequence: Synthetic oligonucleotide
  Antisense strand to SEQ ID NO: 1079662
caaauccauagacauucac

SEQ ID NO: 1079664 - RNA, 19 nt, Artificial Sequence
  Description of Artificial Sequence: Synthetic oligonucleotide
  Sense strand starting at position 657 of SEQ ID NO: 915437
gauccauauugucuaugga

SEQ ID NO: 1079665 - RNA, 19 nt, Artificial Sequence
  Description of Artificial Sequence: Synthetic oligonucleotide
  Antisense strand to SEQ ID NO: 1079664
uccauagacaauauggauc

SEQ ID NO: 1079666 - RNA, 19 nt, Artificial Sequence
  Description of Artificial Sequence: Synthetic oligonucleotide
  Sense strand starting at position 673 of SEQ ID NO: 915437
ggauccauuucgugacaga

SEQ ID NO: 1079667 - RNA, 19 nt, Artificial Sequence
  Description of Artificial Sequence: Synthetic oligonucleotide
  Antisense strand to SEQ ID NO: 1079666
ucugucacgaaauggaucc

SEQ ID NO: 1079668 - RNA, 19 nt, Artificial Sequence
  Description of Artificial Sequence: Synthetic oligonucleotide
  Sense strand starting at position 676 of SEQ ID NO: 915437
uccauuucgugacagagga

SEQ ID NO: 1079669 - RNA, 19 nt, Artificial Sequence
  Description of Artificial Sequence: Synthetic oligonucleotide
  Antisense strand to SEQ ID NO: 1079668
uccucugucacgaaaugga

SEQ ID NO: 1079670 - RNA, 19 nt, Artificial Sequence
  Description of Artificial Sequence: Synthetic oligonucleotide
  Sense strand starting at position 719 of SEQ ID NO: 915437
uaacguuuccuugaccagu

SEQ ID NO: 1079671 - RNA, 19 nt, Artificial Sequence
  Description of Artificial Sequence: Synthetic oligonucleotide
  Antisense strand to SEQ ID NO: 1079670
acuggucaaggaaacguua

SEQ ID NO: 1079672 - RNA, 19 nt, Artificial Sequence
  Description of Artificial Sequence: Synthetic oligonucleotide
  Sense strand starting at position 833 of SEQ ID NO: 915437
ugcagucuuucugccugaa

SEQ ID NO: 1079673 - RNA, 19 nt, Artificial Sequence
  Description of Artificial Sequence: Synthetic oligonucleotide
  Antisense strand to SEQ ID NO: 1079672
uucaggcagaaagacugca

SEQ ID NO: 1079674 - RNA, 19 nt, Artificial Sequence
  Description of Artificial Sequence: Synthetic oligonucleotide
  Sense strand starting at position 837 of SEQ ID NO: 915437
gucuuucugccugaaggga

SEQ ID NO: 1079675 - RNA, 19 nt, Artificial Sequence
  Description of Artificial Sequence: Synthetic oligonucleotide
  Antisense strand to SEQ ID NO: 1079674
ucccuucaggcagaaagac

SEQ ID NO: 1079676 - RNA, 19 nt, Artificial Sequence
  Description of Artificial Sequence: Synthetic oligonucleotide
  Sense strand starting at position 1005 of SEQ ID NO: 915437
guccggguccgcugagaau

SEQ ID NO: 1079677 - RNA, 19 nt, Artificial Sequence
  Description of Artificial Sequence: Synthetic oligonucleotide
  Antisense strand to SEQ ID NO: 1079676
auucucagcggacccggac

SEQ ID NO: 1079678 - RNA, 19 nt, Artificial Sequence
  Description of Artificial Sequence: Synthetic oligonucleotide
  Sense strand starting at position 1057 of SEQ ID NO: 915437
uagggacuucgaugcguga

SEQ ID NO: 1079679 - RNA, 19 nt, Artificial Sequence
  Description of Artificial Sequence: Synthetic oligonucleotide
  Antisense strand to SEQ ID NO: 1079678
ucacgcaucgaagucccua

SEQ ID NO: 1079680 - RNA, 19 nt, Artificial Sequence
  Description of Artificial Sequence: Synthetic oligonucleotide
  Sense strand starting at position 1059 of SEQ ID NO: 915437
gggacuucgaugcgugagu

SEQ ID NO: 1079681 - RNA, 19 nt, Artificial Sequence
  Description of Artificial Sequence: Synthetic oligonucleotide
  Antisense strand to SEQ ID NO: 1079680
acucacgcaucgaaguccc

SEQ ID NO: 1079682 - RNA, 19 nt, Artificial Sequence
  Description of Artificial Sequence: Synthetic oligonucleotide
  Sense strand starting at position 1204 of SEQ ID NO: 915437
ggguccaucuccucaccaa

SEQ ID NO: 1079683 - RNA, 19 nt, Artificial Sequence
  Description of Artificial Sequence: Synthetic oligonucleotide
  Antisense strand to SEQ ID NO: 1079682
uuggugaggagauggaccc

SEQ ID NO: 1079684 - RNA, 19 nt, Artificial Sequence
  Description of Artificial Sequence: Synthetic oligonucleotide
  Sense strand starting at position 1562 of SEQ ID NO: 915437
gggucuuucccucacacaa

SEQ ID NO: 1079685 - RNA, 19 nt, Artificial Sequence
  Description of Artificial Sequence: Synthetic oligonucleotide
  Antisense strand to SEQ ID NO: 1079684
uugugugagggaaagaccc

SEQ ID NO: 1079686 - RNA, 19 nt, Artificial Sequence
  Description of Artificial Sequence: Synthetic oligonucleotide
  Sense strand starting at position 2057 of SEQ ID NO: 915437
ccgcgaacuuccucagaga

SEQ ID NO: 1079687 - RNA, 19 nt, Artificial Sequence
  Description of Artificial Sequence: Synthetic oligonucleotide
  Antisense strand to SEQ ID NO: 1079686
ucucugaggaaguucgcgg

SEQ ID NO: 1079688 - RNA, 19 nt, Artificial Sequence
  Description of Artificial Sequence: Synthetic oligonucleotide
  Sense strand starting at position 2533 of SEQ ID NO: 915437
caaggaguugugcgaagca

SEQ ID NO: 1079689 - RNA, 19 nt, Artificial Sequence
  Description of Artificial Sequence: Synthetic oligonucleotide
  Antisense strand to SEQ ID NO: 1079688
ugcuucgcacaacuccuug

SEQ ID NO: 1079690 - RNA, 19 nt, Artificial Sequence
  Description of Artificial Sequence: Synthetic oligonucleotide
  Sense strand starting at position 2538 of SEQ ID NO: 915437
aguugugcgaagcaagaua

SEQ ID NO: 1079691 - RNA, 19 nt, Artificial Sequence
  Description of Artificial Sequence: Synthetic oligonucleotide
  Antisense strand to SEQ ID NO: 1079690
uaucuugcuucgcacaacu

SEQ ID NO: 1079692 - RNA, 19 nt, Artificial Sequence
  Description of Artificial Sequence: Synthetic oligonucleotide
  Sense strand starting at position 2570 of SEQ ID NO: 915437
cugagauacuccucugggu

SEQ ID NO: 1079693 - RNA, 19 nt, Artificial Sequence
  Description of Artificial Sequence: Synthetic oligonucleotide
  Antisense strand to SEQ ID NO: 1079692
acccagaggaguaucucag

SEQ ID NO: 1079694 - RNA, 19 nt, Artificial Sequence
  Description of Artificial Sequence: Synthetic oligonucleotide
  Sense strand starting at position 2594 of SEQ ID NO: 915437
cagcauugccaguguaacu

SEQ ID NO: 1079695 - RNA, 19 nt, Artificial Sequence
  Description of Artificial Sequence: Synthetic oligonucleotide
  Antisense strand to SEQ ID NO: 1079694
aguuacacuggcaaugcug

SEQ ID NO: 1079696 - RNA, 19 nt, Artificial Sequence
  Description of Artificial Sequence: Synthetic oligonucleotide
  Sense strand starting at position 2657 of SEQ ID NO: 915437
guugguggccaggaagaau

SEQ ID NO: 1079697 - RNA, 19 nt, Artificial Sequence
  Description of Artificial Sequence: Synthetic oligonucleotide
  Antisense strand to SEQ ID NO: 1079696
auucuuccuggccaccaac

SEQ ID NO: 1079698 - RNA, 19 nt, Artificial Sequence
  Description of Artificial Sequence: Synthetic oligonucleotide
  Sense strand starting at position 2747 of SEQ ID NO: 915437
uggugaaggugagucuaua

SEQ ID NO: 1079699 - RNA, 19 nt, Artificial Sequence
  Description of Artificial Sequence: Synthetic oligonucleotide
  Antisense strand to SEQ ID NO: 1079698
uauagacucaccuucacca

SEQ ID NO: 1079700 - RNA, 19 nt, Artificial Sequence
  Description of Artificial Sequence: Synthetic oligonucleotide
  Sense strand starting at position 2946 of SEQ ID NO: 915437
gccaguuuccaaugccagu

SEQ ID NO: 1079701 - RNA, 19 nt, Artificial Sequence
  Description of Artificial Sequence: Synthetic oligonucleotide
  Antisense strand to SEQ ID NO: 1079700
acuggcauuggaaacuggc

SEQ ID NO: 1079702 - RNA, 19 nt, Artificial Sequence
  Description of Artificial Sequence: Synthetic oligonucleotide
  Sense strand starting at position 3435 of SEQ ID NO: 915437
ggagcuacaggucauugau

SEQ ID NO: 1079703 - RNA, 19 nt, Artificial Sequence
  Description of Artificial Sequence: Synthetic oligonucleotide
  Antisense strand to SEQ ID NO: 1079702
aucaaugaccuguagcucc

SEQ ID NO: 1079704 - RNA, 19 nt, Artificial Sequence
  Description of Artificial Sequence: Synthetic oligonucleotide
  Sense strand starting at position 3444 of SEQ ID NO: 915437
ggucauugaugucaggauc

SEQ ID NO: 1079705 - RNA, 19 nt, Artificial Sequence
  Description of Artificial Sequence: Synthetic oligonucleotide
  Antisense strand to SEQ ID NO: 1079704
gauccugacaucaaugacc

SEQ ID NO: 1079706 - RNA, 19 nt, Artificial Sequence
  Description of Artificial Sequence: Synthetic oligonucleotide
  Sense strand starting at position 3477 of SEQ ID NO: 915437
cucauaugucaauggagac

SEQ ID NO: 1079707 - RNA, 19 nt, Artificial Sequence
  Description of Artificial Sequence: Synthetic oligonucleotide
  Antisense strand to SEQ ID NO: 1079706
gucuccauugacauaugag

SEQ ID NO: 1079708 - RNA, 19 nt, Artificial Sequence
  Description of Artificial Sequence: Synthetic oligonucleotide
  Sense strand starting at position 3566 of SEQ ID NO: 915437
ugccuccacuccuggaaau

SEQ ID NO: 1079709 - RNA, 19 nt, Artificial Sequence
  Description of Artificial Sequence: Synthetic oligonucleotide
  Antisense strand to SEQ ID NO: 1079708
auuuccaggaguggaggca

SEQ ID NO: 1079710 - RNA, 19 nt, Artificial Sequence
  Description of Artificial Sequence: Synthetic oligonucleotide
  Sense strand starting at position 3568 of SEQ ID NO: 915437
ccuccacuccuggaaaugu

SEQ ID NO: 1079711 - RNA, 19 nt, Artificial Sequence
  Description of Artificial Sequence: Synthetic oligonucleotide
  Antisense strand to SEQ ID NO: 1079710
acauuuccaggaguggagg

SEQ ID NO: 1079712 - RNA, 19 nt, Artificial Sequence
  Description of Artificial Sequence: Synthetic oligonucleotide
  Sense strand starting at position 3616 of SEQ ID NO: 915437
agcucuagguucuagaguu

SEQ ID NO: 1079713 - RNA, 19 nt, Artificial Sequence
  Description of Artificial Sequence: Synthetic oligonucleotide
  Antisense strand to SEQ ID NO: 1079712
aacucuagaaccuagagcu

SEQ ID NO: 1079714 - RNA, 19 nt, Artificial Sequence
  Description of Artificial Sequence: Synthetic oligonucleotide
  Sense strand starting at position 3653 of SEQ ID NO: 915437
ggugucgucacucaauaaa

SEQ ID NO: 1079715 - RNA, 19 nt, Artificial Sequence
  Description of Artificial Sequence: Synthetic oligonucleotide
  Antisense strand to SEQ ID NO: 1079714
uuuauugagugacgacacc

SEQ ID NO: 1079716 - RNA, 19 nt, Artificial Sequence
  Description of Artificial Sequence: Synthetic oligonucleotide
  Sense strand starting at position 3656 of SEQ ID NO: 915437
gucgucacucaauaaacca

SEQ ID NO: 1079717 - RNA, 19 nt, Artificial Sequence
  Description of Artificial Sequence: Synthetic oligonucleotide
  Antisense strand to SEQ ID NO: 1079716
ugguuuauugagugacgac

SEQ ID NO: 1079718 - RNA, 19 nt, Artificial Sequence
  Description of Artificial Sequence: Synthetic oligonucleotide
  Sense strand starting at position 3935 of SEQ ID NO: 915437
uggagcacuggcuauuaau

SEQ ID NO: 1079719 - RNA, 19 nt, Artificial Sequence
  Description of Artificial Sequence: Synthetic oligonucleotide
  Antisense strand to SEQ ID NO: 1079718
auuaauagccagugcucca

SEQ ID NO: 1079720 - RNA, 19 nt, Artificial Sequence
  Description of Artificial Sequence: Synthetic oligonucleotide
  Sense strand starting at position 3941 of SEQ ID NO: 915437
acuggcuauuaaucagaca

SEQ ID NO: 1079721 - RNA, 19 nt, Artificial Sequence
  Description of Artificial Sequence: Synthetic oligonucleotide
  Antisense strand to SEQ ID NO: 1079720
ugucugauuaauagccagu

SEQ ID NO: 1079722 - RNA, 19 nt, Artificial Sequence
  Description of Artificial Sequence: Synthetic oligonucleotide
  Sense strand starting at position 26 of SEQ ID NO: 915438
ccuagaauguaaucagcau

SEQ ID NO: 1079723 - RNA, 19 nt, Artificial Sequence
  Description of Artificial Sequence: Synthetic oligonucleotide
  Antisense strand to SEQ ID NO: 1079722
augcugauuacauucuagg

SEQ ID NO: 1079724 - RNA, 19 nt, Artificial Sequence
  Description of Artificial Sequence: Synthetic oligonucleotide
  Sense strand starting at position 321 of SEQ ID NO: 915438
cagagaagugaaugucuau

SEQ ID NO: 1079725 - RNA, 19 nt, Artificial Sequence
  Description of Artificial Sequence: Synthetic oligonucleotide
  Antisense strand to SEQ ID NO: 1079724
auagacauucacuucucug

SEQ ID NO: 1079726 - RNA, 19 nt, Artificial Sequence
  Description of Artificial Sequence: Synthetic oligonucleotide
  Sense strand starting at position 324 of SEQ ID NO: 915438
agaagugaaugucuaugga

SEQ ID NO: 1079727 - RNA, 19 nt, Artificial Sequence
  Description of Artificial Sequence: Synthetic oligonucleotide
  Antisense strand to SEQ ID NO: 1079726
uccauagacauucacuucu

SEQ ID NO: 1079728 - RNA, 19 nt, Artificial Sequence
  Description of Artificial Sequence: Synthetic oligonucleotide
  Sense strand starting at position 328 of SEQ ID NO: 915438
gugaaugucuauggauuug

SEQ ID NO: 1079729 - RNA, 19 nt, Artificial Sequence
  Description of Artificial Sequence: Synthetic oligonucleotide
  Antisense strand to SEQ ID NO: 1079728
caaauccauagacauucac

SEQ ID NO: 1079730 - RNA, 19 nt, Artificial Sequence
  Description of Artificial Sequence: Synthetic oligonucleotide
  Sense strand starting at position 349 of SEQ ID NO: 915438
gauccauauugucuaugga

SEQ ID NO: 1079731 - RNA, 19 nt, Artificial Sequence
  Description of Artificial Sequence: Synthetic oligonucleotide
  Antisense strand to SEQ ID NO: 1079730
uccauagacaauauggauc

SEQ ID NO: 1079732 - RNA, 19 nt, Artificial Sequence
  Description of Artificial Sequence: Synthetic oligonucleotide
  Sense strand starting at position 365 of SEQ ID NO: 915438
ggauccauuucgugacaga

SEQ ID NO: 1079733 - RNA, 19 nt, Artificial Sequence
  Description of Artificial Sequence: Synthetic oligonucleotide
  Antisense strand to SEQ ID NO: 1079732
ucugucacgaaauggaucc

SEQ ID NO: 1079734 - RNA, 19 nt, Artificial Sequence
  Description of Artificial Sequence: Synthetic oligonucleotide
  Sense strand starting at position 368 of SEQ ID NO: 915438
uccauuucgugacagagga

SEQ ID NO: 1079735 - RNA, 19 nt, Artificial Sequence
  Description of Artificial Sequence: Synthetic oligonucleotide
  Antisense strand to SEQ ID NO: 1079734
uccucugucacgaaaugga

SEQ ID NO: 1079736 - RNA, 19 nt, Artificial Sequence
  Description of Artificial Sequence: Synthetic oligonucleotide
  Sense strand starting at position 411 of SEQ ID NO: 915438
uaacguuuccuugaccagu

SEQ ID NO: 1079737 - RNA, 19 nt, Artificial Sequence
  Description of Artificial Sequence: Synthetic oligonucleotide
  Antisense strand to SEQ ID NO: 1079736
acuggucaaggaaacguua

SEQ ID NO: 1079738 - RNA, 19 nt, Artificial Sequence
  Description of Artificial Sequence: Synthetic oligonucleotide
  Sense strand starting at position 525 of SEQ ID NO: 915438
ugcagucuuucugccugaa

SEQ ID NO: 1079739 - RNA, 19 nt, Artificial Sequence
  Description of Artificial Sequence: Synthetic oligonucleotide
  Antisense strand to SEQ ID NO: 1079738
uucaggcagaaagacugca

SEQ ID NO: 1079740 - RNA, 19 nt, Artificial Sequence
  Description of Artificial Sequence: Synthetic oligonucleotide
  Sense strand starting at position 529 of SEQ ID NO: 915438
gucuuucugccugaaggga

SEQ ID NO: 1079741 - RNA, 19 nt, Artificial Sequence
  Description of Artificial Sequence: Synthetic oligonucleotide
  Antisense strand to SEQ ID NO: 1079740
ucccuucaggcagaaagac

SEQ ID NO: 1079742 - RNA, 19 nt, Artificial Sequence
  Description of Artificial Sequence: Synthetic oligonucleotide
  Sense strand starting at position 697 of SEQ ID NO: 915438
guccggguccgcugagaau

SEQ ID NO: 1079743 - RNA, 19 nt, Artificial Sequence
  Description of Artificial Sequence: Synthetic oligonucleotide
  Antisense strand to SEQ ID NO: 1079742
auucucagcggacccggac

SEQ ID NO: 1079744 - RNA, 19 nt, Artificial Sequence
  Description of Artificial Sequence: Synthetic oligonucleotide
  Sense strand starting at position 749 of SEQ ID NO: 915438
uagggacuucgaugcguga

SEQ ID NO: 1079745 - RNA, 19 nt, Artificial Sequence
  Description of Artificial Sequence: Synthetic oligonucleotide
  Antisense strand to SEQ ID NO: 1079744
ucacgcaucgaagucccua

SEQ ID NO: 1079746 - RNA, 19 nt, Artificial Sequence
  Description of Artificial Sequence: Synthetic oligonucleotide
  Sense strand starting at position 751 of SEQ ID NO: 915438
gggacuucgaugcgugagu

SEQ ID NO: 1079747 - RNA, 19 nt, Artificial Sequence
  Description of Artificial Sequence: Synthetic oligonucleotide
  Antisense strand to SEQ ID NO: 1079746
acucacgcaucgaaguccc

SEQ ID NO: 1079748 - RNA, 19 nt, Artificial Sequence
  Description of Artificial Sequence: Synthetic oligonucleotide
  Sense strand starting at position 896 of SEQ ID NO: 915438
ggguccaucuccucaccaa

SEQ ID NO: 1079749 - RNA, 19 nt, Artificial Sequence
  Description of Artificial Sequence: Synthetic oligonucleotide
  Antisense strand to SEQ ID NO: 1079748
uuggugaggagauggaccc

SEQ ID NO: 1079750 - RNA, 19 nt, Artificial Sequence
  Description of Artificial Sequence: Synthetic oligonucleotide
  Sense strand starting at position 1254 of SEQ ID NO: 915438
gggucuuucccucacacaa

SEQ ID NO: 1079751 - RNA, 19 nt, Artificial Sequence
  Description of Artificial Sequence: Synthetic oligonucleotide
  Antisense strand to SEQ ID NO: 1079750
uugugugagggaaagaccc

SEQ ID NO: 1079752 - RNA, 19 nt, Artificial Sequence
  Description of Artificial Sequence: Synthetic oligonucleotide
  Sense strand starting at position 1749 of SEQ ID NO: 915438
ccgcgaacuuccucagaga

SEQ ID NO: 1079753 - RNA, 19 nt, Artificial Sequence
  Description of Artificial Sequence: Synthetic oligonucleotide
  Antisense strand to SEQ ID NO: 1079752
ucucugaggaaguucgcgg

SEQ ID NO: 1079754 - RNA, 19 nt, Artificial Sequence
  Description of Artificial Sequence: Synthetic oligonucleotide
  Sense strand starting at position 2225 of SEQ ID NO: 915438
caaggaguugugcgaagca

SEQ ID NO: 1079755 - RNA, 19 nt, Artificial Sequence
  Description of Artificial Sequence: Synthetic oligonucleotide
  Antisense strand to SEQ ID NO: 1079754
ugcuucgcacaacuccuug

SEQ ID NO: 1079756 - RNA, 19 nt, Artificial Sequence
  Description of Artificial Sequence: Synthetic oligonucleotide
  Sense strand starting at position 2230 of SEQ ID NO: 915438
aguugugcgaagcaagaua

SEQ ID NO: 1079757 - RNA, 19 nt, Artificial Sequence
  Description of Artificial Sequence: Synthetic oligonucleotide
  Antisense strand to SEQ ID NO: 1079756
uaucuugcuucgcacaacu

SEQ ID NO: 1079758 - RNA, 19 nt, Artificial Sequence
  Description of Artificial Sequence: Synthetic oligonucleotide
  Sense strand starting at position 2262 of SEQ ID NO: 915438
cugagauacuccucugggu

SEQ ID NO: 1079759 - RNA, 19 nt, Artificial Sequence
  Description of Artificial Sequence: Synthetic oligonucleotide
  Antisense strand to SEQ ID NO: 1079758
acccagaggaguaucucag

SEQ ID NO: 1079760 - RNA, 19 nt, Artificial Sequence
  Description of Artificial Sequence: Synthetic oligonucleotide
  Sense strand starting at position 2286 of SEQ ID NO: 915438
cagcauugccaguguaacu

SEQ ID NO: 1079761 - RNA, 19 nt, Artificial Sequence
  Description of Artificial Sequence: Synthetic oligonucleotide
  Antisense strand to SEQ ID NO: 1079760
aguuacacuggcaaugcug

SEQ ID NO: 1079762 - RNA, 19 nt, Artificial Sequence
  Description of Artificial Sequence: Synthetic oligonucleotide
  Sense strand starting at position 2349 of SEQ ID NO: 915438
guugguggccaggaagaau

SEQ ID NO: 1079763 - RNA, 19 nt, Artificial Sequence
  Description of Artificial Sequence: Synthetic oligonucleotide
  Antisense strand to SEQ ID NO: 1079762
auucuuccuggccaccaac

SEQ ID NO: 1079764 - RNA, 19 nt, Artificial Sequence
  Description of Artificial Sequence: Synthetic oligonucleotide
  Sense strand starting at position 2439 of SEQ ID NO: 915438
uggugaaggugagucuaua

SEQ ID NO: 1079765 - RNA, 19 nt, Artificial Sequence
  Description of Artificial Sequence: Synthetic oligonucleotide
  Antisense strand to SEQ ID NO: 1079764
uauagacucaccuucacca

SEQ ID NO: 1079766 - RNA, 19 nt, Artificial Sequence
  Description of Artificial Sequence: Synthetic oligonucleotide
  Sense strand starting at position 2638 of SEQ ID NO: 915438
gccaguuuccaaugccagu

SEQ ID NO: 1079767 - RNA, 19 nt, Artificial Sequence
  Description of Artificial Sequence: Synthetic oligonucleotide
  Antisense strand to SEQ ID NO: 1079766
acuggcauuggaaacuggc

SEQ ID NO: 1079768 - RNA, 19 nt, Artificial Sequence
  Description of Artificial Sequence: Synthetic oligonucleotide
  Sense strand starting at position 3127 of SEQ ID NO: 915438
ggagcuacaggucauugau

SEQ ID NO: 1079769 - RNA, 19 nt, Artificial Sequence
  Description of Artificial Sequence: Synthetic oligonucleotide
  Antisense strand to SEQ ID NO: 1079768
aucaaugaccuguagcucc

SEQ ID NO: 1079770 - RNA, 19 nt, Artificial Sequence
  Description of Artificial Sequence: Synthetic oligonucleotide
  Sense strand starting at position 3136 of SEQ ID NO: 915438
ggucauugaugucaggauc

SEQ ID NO: 1079771 - RNA, 19 nt, Artificial Sequence
  Description of Artificial Sequence: Synthetic oligonucleotide
  Antisense strand to SEQ ID NO: 1079770
gauccugacaucaaugacc

SEQ ID NO: 1079772 - RNA, 19 nt, Artificial Sequence
  Description of Artificial Sequence: Synthetic oligonucleotide
  Sense strand starting at position 3169 of SEQ ID NO: 915438
cucauaugucaauggagac

SEQ ID NO: 1079773 - RNA, 19 nt, Artificial Sequence
  Description of Artificial Sequence: Synthetic oligonucleotide
  Antisense strand to SEQ ID NO: 1079772
gucuccauugacauaugag

SEQ ID NO: 1079774 - RNA, 19 nt, Artificial Sequence
  Description of Artificial Sequence: Synthetic oligonucleotide
  Sense strand starting at position 3258 of SEQ ID NO: 915438
ugccuccacuccuggaaau

SEQ ID NO: 1079775 - RNA, 19 nt, Artificial Sequence
  Description of Artificial Sequence: Synthetic oligonucleotide
  Antisense strand to SEQ ID NO: 1079774
auuuccaggaguggaggca

SEQ ID NO: 1079776 - RNA, 19 nt, Artificial Sequence
  Description of Artificial Sequence: Synthetic oligonucleotide
  Sense strand starting at position 3260 of SEQ ID NO: 915438
ccuccacuccuggaaaugu

SEQ ID NO: 1079777 - RNA, 19 nt, Artificial Sequence
  Description of Artificial Sequence: Synthetic oligonucleotide
  Antisense strand to SEQ ID NO: 1079776
acauuuccaggaguggagg

SEQ ID NO: 1079778 - RNA, 19 nt, Artificial Sequence
  Description of Artificial Sequence: Synthetic oligonucleotide
  Sense strand starting at position 3308 of SEQ ID NO: 915438
agcucuagguucuagaguu

SEQ ID NO: 1079779 - RNA, 19 nt, Artificial Sequence
  Description of Artificial Sequence: Synthetic oligonucleotide
  Antisense strand to SEQ ID NO: 1079778
aacucuagaaccuagagcu

SEQ ID NO: 1079780 - RNA, 19 nt, Artificial Sequence
  Description of Artificial Sequence: Synthetic oligonucleotide
  Sense strand starting at position 3345 of SEQ ID NO: 915438
ggugucgucacucaauaaa

SEQ ID NO: 1079781 - RNA, 19 nt, Artificial Sequence
  Description of Artificial Sequence: Synthetic oligonucleotide
  Antisense strand to SEQ ID NO: 1079780
uuuauugagugacgacacc

SEQ ID NO: 1079782 - RNA, 19 nt, Artificial Sequence
  Description of Artificial Sequence: Synthetic oligonucleotide
  Sense strand starting at position 3348 of SEQ ID NO: 915438
gucgucacucaauaaacca

SEQ ID NO: 1079783 - RNA, 19 nt, Artificial Sequence
  Description of Artificial Sequence: Synthetic oligonucleotide
  Antisense strand to SEQ ID NO: 1079782
ugguuuauugagugacgac

SEQ ID NO: 1079784 - RNA, 19 nt, Artificial Sequence
  Description of Artificial Sequence: Synthetic oligonucleotide
  Sense strand starting at position 3627 of SEQ ID NO: 915438
uggagcacuggcuauuaau

SEQ ID NO: 1079785 - RNA, 19 nt, Artificial Sequence
  Description of Artificial Sequence: Synthetic oligonucleotide
  Antisense strand to SEQ ID NO: 1079784
auuaauagccagugcucca

SEQ ID NO: 1079786 - RNA, 19 nt, Artificial Sequence
  Description of Artificial Sequence: Synthetic oligonucleotide
  Sense strand starting at position 3633 of SEQ ID NO: 915438
acuggcuauuaaucagaca

SEQ ID NO: 1079787 - RNA, 19 nt, Artificial Sequence
  Description of Artificial Sequence: Synthetic oligonucleotide
  Antisense strand to SEQ ID NO: 1079786
ugucugauuaauagccagu

SEQ ID NO: 1079788 - RNA, 19 nt, Artificial Sequence
  Description of Artificial Sequence: Synthetic oligonucleotide
  Sense strand starting at position 3682 of SEQ ID NO: 915438
accagcucucugugagguu

SEQ ID NO: 1079789 - RNA, 19 nt, Artificial Sequence
  Description of Artificial Sequence: Synthetic oligonucleotide
  Antisense strand to SEQ ID NO: 1079788
aaccucacagagagcuggu

SEQ ID NO: 1079790 - RNA, 19 nt, Artificial Sequence
  Description of Artificial Sequence: Synthetic oligonucleotide
  Sense strand starting at position 3751 of SEQ ID NO: 915438
cagacauguugccugaagu

SEQ ID NO: 1079791 - RNA, 19 nt, Artificial Sequence
  Description of Artificial Sequence: Synthetic oligonucleotide
  Antisense strand to SEQ ID NO: 1079790
acuucaggcaacaugucug

SEQ ID NO: 1079792 - RNA, 19 nt, Artificial Sequence
  Description of Artificial Sequence: Synthetic oligonucleotide
  Sense strand starting at position 3752 of SEQ ID NO: 915438
agacauguugccugaaguu

SEQ ID NO: 1079793 - RNA, 19 nt, Artificial Sequence
  Description of Artificial Sequence: Synthetic oligonucleotide
  Antisense strand to SEQ ID NO: 1079792
aacuucaggcaacaugucu

SEQ ID NO: 1079794 - RNA, 19 nt, Artificial Sequence
  Description of Artificial Sequence: Synthetic oligonucleotide
  Sense strand starting at position 3762 of SEQ ID NO: 915438
ccugaaguucucuguggga

SEQ ID NO: 1079795 - RNA, 19 nt, Artificial Sequence
  Description of Artificial Sequence: Synthetic oligonucleotide
  Antisense strand to SEQ ID NO: 1079794
ucccacagagaacuucagg

SEQ ID NO: 1079796 - RNA, 19 nt, Artificial Sequence
  Description of Artificial Sequence: Synthetic oligonucleotide
  Sense strand starting at position 3802 of SEQ ID NO: 915438
gcagcagcuccauagagua

SEQ ID NO: 1079797 - RNA, 19 nt, Artificial Sequence
  Description of Artificial Sequence: Synthetic oligonucleotide
  Antisense strand to SEQ ID NO: 1079796
uacucuauggagcugcugc

SEQ ID NO: 1079798 - RNA, 19 nt, Artificial Sequence
  Description of Artificial Sequence: Synthetic oligonucleotide
  Sense strand starting at position 3875 of SEQ ID NO: 915438
gagggagccuaauuauuau

SEQ ID NO: 1079799 - RNA, 19 nt, Artificial Sequence
  Description of Artificial Sequence: Synthetic oligonucleotide
  Antisense strand to SEQ ID NO: 1079798
auaauaauuaggcucccuc

SEQ ID NO: 1079800 - RNA, 19 nt, Artificial Sequence
  Description of Artificial Sequence: Synthetic oligonucleotide
  Sense strand starting at position 3958 of SEQ ID NO: 915438
ugggcuccucccugagagu

SEQ ID NO: 1079801 - RNA, 19 nt, Artificial Sequence
  Description of Artificial Sequence: Synthetic oligonucleotide
  Antisense strand to SEQ ID NO: 1079800
acucucagggaggagccca

SEQ ID NO: 1079802 - RNA, 19 nt, Artificial Sequence
  Description of Artificial Sequence: Synthetic oligonucleotide
  Sense strand starting at position 42 of SEQ ID NO: 915439
agaaucacauguccuaguu

SEQ ID NO: 1079803 - RNA, 19 nt, Artificial Sequence
  Description of Artificial Sequence: Synthetic oligonucleotide
  Antisense strand to SEQ ID NO: 1079802
aacuaggacaugugauucu

SEQ ID NO: 1079804 - RNA, 19 nt, Artificial Sequence
  Description of Artificial Sequence: Synthetic oligonucleotide
  Sense strand starting at position 90 of SEQ ID NO: 915439
aguuaaagucaagguuaug

SEQ ID NO: 1079805 - RNA, 19 nt, Artificial Sequence
  Description of Artificial Sequence: Synthetic oligonucleotide
  Antisense strand to SEQ ID NO: 1079804
cauaaccuugacuuuaacu

SEQ ID NO: 1079806 - RNA, 19 nt, Artificial Sequence
  Description of Artificial Sequence: Synthetic oligonucleotide
  Sense strand starting at position 120 of SEQ ID NO: 915439
caaacauuggcacgaguca

SEQ ID NO: 1079807 - RNA, 19 nt, Artificial Sequence
  Description of Artificial Sequence: Synthetic oligonucleotide
  Antisense strand to SEQ ID NO: 1079806
ugacucgugccaauguuug

SEQ ID NO: 1079808 - RNA, 19 nt, Artificial Sequence
  Description of Artificial Sequence: Synthetic oligonucleotide
  Sense strand starting at position 190 of SEQ ID NO: 915439
cugagacagccugaguuaa

SEQ ID NO: 1079809 - RNA, 19 nt, Artificial Sequence
  Description of Artificial Sequence: Synthetic oligonucleotide
  Antisense strand to SEQ ID NO: 1079808
uuaacucaggcugucucag

SEQ ID NO: 1079810 - RNA, 19 nt, Artificial Sequence
  Description of Artificial Sequence: Synthetic oligonucleotide
  Sense strand starting at position 192 of SEQ ID NO: 915439
gagacagccugaguuaaac

SEQ ID NO: 1079811 - RNA, 19 nt, Artificial Sequence
  Description of Artificial Sequence: Synthetic oligonucleotide
  Antisense strand to SEQ ID NO: 1079810
guuuaacucaggcugucuc

SEQ ID NO: 1079812 - RNA, 19 nt, Artificial Sequence
  Description of Artificial Sequence: Synthetic oligonucleotide
  Sense strand starting at position 414 of SEQ ID NO: 915439
uucuguaaauuucuggcau

SEQ ID NO: 1079813 - RNA, 19 nt, Artificial Sequence
  Description of Artificial Sequence: Synthetic oligonucleotide
  Antisense strand to SEQ ID NO: 1079812
augccagaaauuuacagaa

SEQ ID NO: 1079814 - RNA, 19 nt, Artificial Sequence
  Description of Artificial Sequence: Synthetic oligonucleotide
  Sense strand starting at position 471 of SEQ ID NO: 915439
uaggcugugagauggauua

SEQ ID NO: 1079815 - RNA, 19 nt, Artificial Sequence
  Description of Artificial Sequence: Synthetic oligonucleotide
  Antisense strand to SEQ ID NO: 1079814
uaauccaucucacagccua

SEQ ID NO: 1079816 - RNA, 19 nt, Artificial Sequence
  Description of Artificial Sequence: Synthetic oligonucleotide
  Sense strand starting at position 473 of SEQ ID NO: 915439
ggcugugagauggauuacu

SEQ ID NO: 1079817 - RNA, 19 nt, Artificial Sequence
  Description of Artificial Sequence: Synthetic oligonucleotide
  Antisense strand to SEQ ID NO: 1079816
aguaauccaucucacagcc

SEQ ID NO: 1079818 - RNA, 19 nt, Artificial Sequence
  Description of Artificial Sequence: Synthetic oligonucleotide
  Sense strand starting at position 481 of SEQ ID NO: 915439
gauggauuacuuugguucu

SEQ ID NO: 1079819 - RNA, 19 nt, Artificial Sequence
  Description of Artificial Sequence: Synthetic oligonucleotide
  Antisense strand to SEQ ID NO: 1079818
agaaccaaaguaauccauc

SEQ ID NO: 1079820 - RNA, 19 nt, Artificial Sequence
  Description of Artificial Sequence: Synthetic oligonucleotide
  Sense strand starting at position 594 of SEQ ID NO: 915439
uuauauuuccagugcccuu

SEQ ID NO: 1079821 - RNA, 19 nt, Artificial Sequence
  Description of Artificial Sequence: Synthetic oligonucleotide
  Antisense strand to SEQ ID NO: 1079820
aagggcacuggaaauauaa

SEQ ID NO: 1079822 - RNA, 19 nt, Artificial Sequence
  Description of Artificial Sequence: Synthetic oligonucleotide
  Sense strand starting at position 930 of SEQ ID NO: 915439
gccugcuauuugucaagca

SEQ ID NO: 1079823 - RNA, 19 nt, Artificial Sequence
  Description of Artificial Sequence: Synthetic oligonucleotide
  Antisense strand to SEQ ID NO: 1079822
ugcuugacaaauagcaggc

SEQ ID NO: 1079824 - RNA, 19 nt, Artificial Sequence
  Description of Artificial Sequence: Synthetic oligonucleotide
  Sense strand starting at position 949 of SEQ ID NO: 915439
cugagauucuacuccggga

SEQ ID NO: 1079825 - RNA, 19 nt, Artificial Sequence
  Description of Artificial Sequence: Synthetic oligonucleotide
  Antisense strand to SEQ ID NO: 1079824
ucccggaguagaaucucag

SEQ ID NO: 1079826 - RNA, 19 nt, Artificial Sequence
  Description of Artificial Sequence: Synthetic oligonucleotide
  Sense strand starting at position 951 of SEQ ID NO: 915439
gagauucuacuccgggaca

SEQ ID NO: 1079827 - RNA, 19 nt, Artificial Sequence
  Description of Artificial Sequence: Synthetic oligonucleotide
  Antisense strand to SEQ ID NO: 1079826
ugucccggaguagaaucuc

SEQ ID NO: 1079828 - RNA, 19 nt, Artificial Sequence
  Description of Artificial Sequence: Synthetic oligonucleotide
  Sense strand starting at position 953 of SEQ ID NO: 915439
gauucuacuccgggacaga

SEQ ID NO: 1079829 - RNA, 19 nt, Artificial Sequence
  Description of Artificial Sequence: Synthetic oligonucleotide
  Antisense strand to SEQ ID NO: 1079828
ucugucccggaguagaauc

SEQ ID NO: 1079830 - RNA, 19 nt, Artificial Sequence
  Description of Artificial Sequence: Synthetic oligonucleotide
  Sense strand starting at position 1162 of SEQ ID NO: 915439
ccuuguuucgggcauggaa

SEQ ID NO: 1079831 - RNA, 19 nt, Artificial Sequence
  Description of Artificial Sequence: Synthetic oligonucleotide
  Antisense strand to SEQ ID NO: 1079830
uuccaugcccgaaacaagg

SEQ ID NO: 1079832 - RNA, 19 nt, Artificial Sequence
  Description of Artificial Sequence: Synthetic oligonucleotide
  Sense strand starting at position 1238 of SEQ ID NO: 915439
gaccuugaaugaguugaau

SEQ ID NO: 1079833 - RNA, 19 nt, Artificial Sequence
  Description of Artificial Sequence: Synthetic oligonucleotide
  Antisense strand to SEQ ID NO: 1079832
auucaacucauucaagguc

SEQ ID NO: 1079834 - RNA, 19 nt, Artificial Sequence
  Description of Artificial Sequence: Synthetic oligonucleotide
  Sense strand starting at position 1491 of SEQ ID NO: 915439
ggacuccucccuuguggaa

SEQ ID NO: 1079835 - RNA, 19 nt, Artificial Sequence
  Description of Artificial Sequence: Synthetic oligonucleotide
  Antisense strand to SEQ ID NO: 1079834
uuccacaagggaggagucc

SEQ ID NO: 1079836 - RNA, 19 nt, Artificial Sequence
  Description of Artificial Sequence: Synthetic oligonucleotide
  Sense strand starting at position 2165 of SEQ ID NO: 915439
aguuguaaccgcgcaguua

SEQ ID NO: 1079837 - RNA, 19 nt, Artificial Sequence
  Description of Artificial Sequence: Synthetic oligonucleotide
  Antisense strand to SEQ ID NO: 1079836
uaacugcgcgguuacaacu

SEQ ID NO: 1079838 - RNA, 19 nt, Artificial Sequence
  Description of Artificial Sequence: Synthetic oligonucleotide
  Sense strand starting at position 2215 of SEQ ID NO: 915439
agagcugauuaucucugua

SEQ ID NO: 1079839 - RNA, 19 nt, Artificial Sequence
  Description of Artificial Sequence: Synthetic oligonucleotide
  Antisense strand to SEQ ID NO: 1079838
uacagagauaaucagcucu

SEQ ID NO: 1079840 - RNA, 19 nt, Artificial Sequence
  Description of Artificial Sequence: Synthetic oligonucleotide
  Sense strand starting at position 2219 of SEQ ID NO: 915439
cugauuaucucuguaugac

SEQ ID NO: 1079841 - RNA, 19 nt, Artificial Sequence
  Description of Artificial Sequence: Synthetic oligonucleotide
  Antisense strand to SEQ ID NO: 1079840
gucauacagagauaaucag

SEQ ID NO: 1079842 - RNA, 19 nt, Artificial Sequence
  Description of Artificial Sequence: Synthetic oligonucleotide
  Sense strand starting at position 2220 of SEQ ID NO: 915439
ugauuaucucuguaugaca

SEQ ID NO: 1079843 - RNA, 19 nt, Artificial Sequence
  Description of Artificial Sequence: Synthetic oligonucleotide
  Antisense strand to SEQ ID NO: 1079842
ugucauacagagauaauca

SEQ ID NO: 1079844 - RNA, 19 nt, Artificial Sequence
  Description of Artificial Sequence: Synthetic oligonucleotide
  Sense strand starting at position 2222 of SEQ ID NO: 915439
auuaucucuguaugacauu

SEQ ID NO: 1079845 - RNA, 19 nt, Artificial Sequence
  Description of Artificial Sequence: Synthetic oligonucleotide
  Antisense strand to SEQ ID NO: 1079844
aaugucauacagagauaau

SEQ ID NO: 1079846 - RNA, 19 nt, Artificial Sequence
  Description of Artificial Sequence: Synthetic oligonucleotide
  Sense strand starting at position 2411 of SEQ ID NO: 915439
auaagaucuugucugagaa

SEQ ID NO: 1079847 - RNA, 19 nt, Artificial Sequence
  Description of Artificial Sequence: Synthetic oligonucleotide
  Antisense strand to SEQ ID NO: 1079846
uucucagacaagaucuuau

SEQ ID NO: 1079848 - RNA, 19 nt, Artificial Sequence
  Description of Artificial Sequence: Synthetic oligonucleotide
  Sense strand starting at position 2412 of SEQ ID NO: 915439
uaagaucuugucugagaaa

SEQ ID NO: 1079849 - RNA, 19 nt, Artificial Sequence
  Description of Artificial Sequence: Synthetic oligonucleotide
  Antisense strand to SEQ ID NO: 1079848
uuucucagacaagaucuua

SEQ ID NO: 1079850 - RNA, 19 nt, Artificial Sequence
  Description of Artificial Sequence: Synthetic oligonucleotide
  Sense strand starting at position 2442 of SEQ ID NO: 915439
guaucagguguucagucaa

SEQ ID NO: 1079851 - RNA, 19 nt, Artificial Sequence
  Description of Artificial Sequence: Synthetic oligonucleotide
  Antisense strand to SEQ ID NO: 1079850
uugacugaacaccugauac

SEQ ID NO: 1079852 - RNA, 19 nt, Artificial Sequence
  Description of Artificial Sequence: Synthetic oligonucleotide
  Sense strand starting at position 2639 of SEQ ID NO: 915439
gaccgaguauacuuacacu

SEQ ID NO: 1079853 - RNA, 19 nt, Artificial Sequence
  Description of Artificial Sequence: Synthetic oligonucleotide
  Antisense strand to SEQ ID NO: 1079852
aguguaaguauacucgguc

SEQ ID NO: 1079854 - RNA, 19 nt, Artificial Sequence
  Description of Artificial Sequence: Synthetic oligonucleotide
  Sense strand starting at position 2790 of SEQ ID NO: 915439
ucguuuagcaugcuaaugu

SEQ ID NO: 1079855 - RNA, 19 nt, Artificial Sequence
  Description of Artificial Sequence: Synthetic oligonucleotide
  Antisense strand to SEQ ID NO: 1079854
acauuagcaugcuaaacga

SEQ ID NO: 1079856 - RNA, 19 nt, Artificial Sequence
  Description of Artificial Sequence: Synthetic oligonucleotide
  Sense strand starting at position 2818 of SEQ ID NO: 915439
acuguauaaugaguaguga

SEQ ID NO: 1079857 - RNA, 19 nt, Artificial Sequence
  Description of Artificial Sequence: Synthetic oligonucleotide
  Antisense strand to SEQ ID NO: 1079856
ucacuacucauuauacagu

SEQ ID NO: 1079858 - RNA, 19 nt, Artificial Sequence
  Description of Artificial Sequence: Synthetic oligonucleotide
  Sense strand starting at position 2819 of SEQ ID NO: 915439
cuguauaaugaguagugaa

SEQ ID NO: 1079859 - RNA, 19 nt, Artificial Sequence
  Description of Artificial Sequence: Synthetic oligonucleotide
  Antisense strand to SEQ ID NO: 1079858
uucacuacucauuauacag

SEQ ID NO: 1079860 - RNA, 19 nt, Artificial Sequence
  Description of Artificial Sequence: Synthetic oligonucleotide
  Sense strand starting at position 3071 of SEQ ID NO: 915439
ggccaaggauuaucccuua

SEQ ID NO: 1079861 - RNA, 19 nt, Artificial Sequence
  Description of Artificial Sequence: Synthetic oligonucleotide
  Antisense strand to SEQ ID NO: 1079860
uaagggauaauccuuggcc

SEQ ID NO: 1079862 - RNA, 19 nt, Artificial Sequence
  Description of Artificial Sequence: Synthetic oligonucleotide
  Sense strand starting at position 3097 of SEQ ID NO: 915439
ugaaaugcggccugcauuu

SEQ ID NO: 1079863 - RNA, 19 nt, Artificial Sequence
  Description of Artificial Sequence: Synthetic oligonucleotide
  Antisense strand to SEQ ID NO: 1079862
aaaugcaggccgcauuuca

SEQ ID NO: 1079864 - RNA, 19 nt, Artificial Sequence
  Description of Artificial Sequence: Synthetic oligonucleotide
  Sense strand starting at position 3129 of SEQ ID NO: 915439
aggugucugcaugaugaca

SEQ ID NO: 1079865 - RNA, 19 nt, Artificial Sequence
  Description of Artificial Sequence: Synthetic oligonucleotide
  Antisense strand to SEQ ID NO: 1079864
ugucaucaugcagacaccu

SEQ ID NO: 1079866 - RNA, 19 nt, Artificial Sequence
  Description of Artificial Sequence: Synthetic oligonucleotide
  Sense strand starting at position 3178 of SEQ ID NO: 915439
aguuaaauuucguccuccu

SEQ ID NO: 1079867 - RNA, 19 nt, Artificial Sequence
  Description of Artificial Sequence: Synthetic oligonucleotide
  Antisense strand to SEQ ID NO: 1079866
aggaggacgaaauuuaacu

SEQ ID NO: 1079868 - RNA, 19 nt, Artificial Sequence
  Description of Artificial Sequence: Synthetic oligonucleotide
  Sense strand starting at position 3272 of SEQ ID NO: 915439
ugauccaggugucuuuaau

SEQ ID NO: 1079869 - RNA, 19 nt, Artificial Sequence
  Description of Artificial Sequence: Synthetic oligonucleotide
  Antisense strand to SEQ ID NO: 1079868
auuaaagacaccuggauca

SEQ ID NO: 1079870 - RNA, 19 nt, Artificial Sequence
  Description of Artificial Sequence: Synthetic oligonucleotide
  Sense strand starting at position 3481 of SEQ ID NO: 915439
uucugaaagccauauugcu

SEQ ID NO: 1079871 - RNA, 19 nt, Artificial Sequence
  Description of Artificial Sequence: Synthetic oligonucleotide
  Antisense strand to SEQ ID NO: 1079870
agcaauauggcuuucagaa

SEQ ID NO: 1079872 - RNA, 19 nt, Artificial Sequence
  Description of Artificial Sequence: Synthetic oligonucleotide
  Sense strand starting at position 3542 of SEQ ID NO: 915439
gagagaaacuuuguugccu

SEQ ID NO: 1079873 - RNA, 19 nt, Artificial Sequence
  Description of Artificial Sequence: Synthetic oligonucleotide
  Antisense strand to SEQ ID NO: 1079872
aggcaacaaaguuucucuc

SEQ ID NO: 1079874 - RNA, 19 nt, Artificial Sequence
  Description of Artificial Sequence: Synthetic oligonucleotide
  Sense strand starting at position 3543 of SEQ ID NO: 915439
agagaaacuuuguugccua

SEQ ID NO: 1079875 - RNA, 19 nt, Artificial Sequence
  Description of Artificial Sequence: Synthetic oligonucleotide
  Antisense strand to SEQ ID NO: 1079874
uaggcaacaaaguuucucu

SEQ ID NO: 1079876 - RNA, 19 nt, Artificial Sequence
  Description of Artificial Sequence: Synthetic oligonucleotide
  Sense strand starting at position 3708 of SEQ ID NO: 915439
gcacaaugcguauauauuu

SEQ ID NO: 1079877 - RNA, 19 nt, Artificial Sequence
  Description of Artificial Sequence: Synthetic oligonucleotide
  Antisense strand to SEQ ID NO: 1079876
aaauauauacgcauugugc

SEQ ID NO: 1079878 - RNA, 19 nt, Artificial Sequence
  Description of Artificial Sequence: Synthetic oligonucleotide
  Sense strand starting at position 3777 of SEQ ID NO: 915439
uguggccuacuuuaugaaa

SEQ ID NO: 1079879 - RNA, 19 nt, Artificial Sequence
  Description of Artificial Sequence: Synthetic oligonucleotide
  Antisense strand to SEQ ID NO: 1079878
uuucauaaaguaggccaca

SEQ ID NO: 1079880 - RNA, 19 nt, Artificial Sequence
  Description of Artificial Sequence: Synthetic oligonucleotide
  Sense strand starting at position 3802 of SEQ ID NO: 915439
gugcauuucuucuuuaguu

SEQ ID NO: 1079881 - RNA, 19 nt, Artificial Sequence
  Description of Artificial Sequence: Synthetic oligonucleotide
  Antisense strand to SEQ ID NO: 1079880
aacuaaagaagaaaugcac

SEQ ID NO: 1079882 - RNA, 19 nt, Artificial Sequence
  Description of Artificial Sequence: Synthetic oligonucleotide
  Sense strand starting at position 90 of SEQ ID NO: 915440
uaagaacuacagugugaua

SEQ ID NO: 1079883 - RNA, 19 nt, Artificial Sequence
  Description of Artificial Sequence: Synthetic oligonucleotide
  Antisense strand to SEQ ID NO: 1079882
uaucacacuguaguucuua

SEQ ID NO: 1079884 - RNA, 19 nt, Artificial Sequence
  Description of Artificial Sequence: Synthetic oligonucleotide
  Sense strand starting at position 179 of SEQ ID NO: 915440
agaggaugcugggaagaaa

SEQ ID NO: 1079885 - RNA, 19 nt, Artificial Sequence
  Description of Artificial Sequence: Synthetic oligonucleotide
  Antisense strand to SEQ ID NO: 1079884
uuucuucccagcauccucu

SEQ ID NO: 1079886 - RNA, 19 nt, Artificial Sequence
  Description of Artificial Sequence: Synthetic oligonucleotide
  Sense strand starting at position 936 of SEQ ID NO: 915440
gcaugucaggaaggauuaa

SEQ ID NO: 1079887 - RNA, 19 nt, Artificial Sequence
  Description of Artificial Sequence: Synthetic oligonucleotide
  Antisense strand to SEQ ID NO: 1079886
uuaauccuuccugacaugc

SEQ ID NO: 1079888 - RNA, 19 nt, Artificial Sequence
  Description of Artificial Sequence: Synthetic oligonucleotide
  Sense strand starting at position 946 of SEQ ID NO: 915440
aaggauuaacggugggcau

SEQ ID NO: 1079889 - RNA, 19 nt, Artificial Sequence
  Description of Artificial Sequence: Synthetic oligonucleotide
  Antisense strand to SEQ ID NO: 1079888
augcccaccguuaauccuu

SEQ ID NO: 1079890 - RNA, 19 nt, Artificial Sequence
  Description of Artificial Sequence: Synthetic oligonucleotide
  Sense strand starting at position 1236 of SEQ ID NO: 915440
gagacaauguuucccagga

SEQ ID NO: 1079891 - RNA, 19 nt, Artificial Sequence
  Description of Artificial Sequence: Synthetic oligonucleotide
  Antisense strand to SEQ ID NO: 1079890
uccugggaaacauugucuc

SEQ ID NO: 1079892 - RNA, 19 nt, Artificial Sequence
  Description of Artificial Sequence: Synthetic oligonucleotide
  Sense strand starting at position 1240 of SEQ ID NO: 915440
caauguuucccaggagcga

SEQ ID NO: 1079893 - RNA, 19 nt, Artificial Sequence
  Description of Artificial Sequence: Synthetic oligonucleotide
  Antisense strand to SEQ ID NO: 1079892
ucgcuccugggaaacauug

SEQ ID NO: 1079894 - RNA, 19 nt, Artificial Sequence
  Description of Artificial Sequence: Synthetic oligonucleotide
  Sense strand starting at position 1307 of SEQ ID NO: 915440
gugcuugaggucuauuaac

SEQ ID NO: 1079895 - RNA, 19 nt, Artificial Sequence
  Description of Artificial Sequence: Synthetic oligonucleotide
  Antisense strand to SEQ ID NO: 1079894
guuaauagaccucaagcac

SEQ ID NO: 1079896 - RNA, 19 nt, Artificial Sequence
  Description of Artificial Sequence: Synthetic oligonucleotide
  Sense strand starting at position 1359 of SEQ ID NO: 915440
gucacucaccugugaugua

SEQ ID NO: 1079897 - RNA, 19 nt, Artificial Sequence
  Description of Artificial Sequence: Synthetic oligonucleotide
  Antisense strand to SEQ ID NO: 1079896
uacaucacaggugagugac

SEQ ID NO: 1079898 - RNA, 19 nt, Artificial Sequence
  Description of Artificial Sequence: Synthetic oligonucleotide
  Sense strand starting at position 1546 of SEQ ID NO: 915440
ucacucaguccuugugaca

SEQ ID NO: 1079899 - RNA, 19 nt, Artificial Sequence
  Description of Artificial Sequence: Synthetic oligonucleotide
  Antisense strand to SEQ ID NO: 1079898
ugucacaaggacugaguga

SEQ ID NO: 1079900 - RNA, 19 nt, Artificial Sequence
  Description of Artificial Sequence: Synthetic oligonucleotide
  Sense strand starting at position 2099 of SEQ ID NO: 915440
ccgucuaggucccugaaga

SEQ ID NO: 1079901 - RNA, 19 nt, Artificial Sequence
  Description of Artificial Sequence: Synthetic oligonucleotide
  Antisense strand to SEQ ID NO: 1079900
ucuucagggaccuagacgg

SEQ ID NO: 1079902 - RNA, 19 nt, Artificial Sequence
  Description of Artificial Sequence: Synthetic oligonucleotide
  Sense strand starting at position 2100 of SEQ ID NO: 915440
cgucuaggucccugaagaa

SEQ ID NO: 1079903 - RNA, 19 nt, Artificial Sequence
  Description of Artificial Sequence: Synthetic oligonucleotide
  Antisense strand to SEQ ID NO: 1079902
uucuucagggaccuagacg

SEQ ID NO: 1079904 - RNA, 19 nt, Artificial Sequence
  Description of Artificial Sequence: Synthetic oligonucleotide
  Sense strand starting at position 2253 of SEQ ID NO: 915440
gccagugaccuuuagugaa

SEQ ID NO: 1079905 - RNA, 19 nt, Artificial Sequence
  Description of Artificial Sequence: Synthetic oligonucleotide
  Antisense strand to SEQ ID NO: 1079904
uucacuaaaggucacuggc

SEQ ID NO: 1079906 - RNA, 19 nt, Artificial Sequence
  Description of Artificial Sequence: Synthetic oligonucleotide
  Sense strand starting at position 2255 of SEQ ID NO: 915440
cagugaccuuuagugaaug

SEQ ID NO: 1079907 - RNA, 19 nt, Artificial Sequence
  Description of Artificial Sequence: Synthetic oligonucleotide
  Antisense strand to SEQ ID NO: 1079906
cauucacuaaaggucacug

SEQ ID NO: 1079908 - RNA, 19 nt, Artificial Sequence
  Description of Artificial Sequence: Synthetic oligonucleotide
  Sense strand starting at position 2260 of SEQ ID NO: 915440
accuuuagugaaugaauga

SEQ ID NO: 1079909 - RNA, 19 nt, Artificial Sequence
  Description of Artificial Sequence: Synthetic oligonucleotide
  Antisense strand to SEQ ID NO: 1079908
ucauucauucacuaaaggu

SEQ ID NO: 1079910 - RNA, 19 nt, Artificial Sequence
  Description of Artificial Sequence: Synthetic oligonucleotide
  Sense strand starting at position 2495 of SEQ ID NO: 915440
aagugugaguguuucuuau

SEQ ID NO: 1079911 - RNA, 19 nt, Artificial Sequence
  Description of Artificial Sequence: Synthetic oligonucleotide
  Antisense strand to SEQ ID NO: 1079910
auaagaaacacucacacuu

SEQ ID NO: 1079912 - RNA, 19 nt, Artificial Sequence
  Description of Artificial Sequence: Synthetic oligonucleotide
  Sense strand starting at position 2510 of SEQ ID NO: 915440
uuauuauugcaccaugaga

SEQ ID NO: 1079913 - RNA, 19 nt, Artificial Sequence
  Description of Artificial Sequence: Synthetic oligonucleotide
  Antisense strand to SEQ ID NO: 1079912
ucucauggugcaauaauaa

SEQ ID NO: 1079914 - RNA, 19 nt, Artificial Sequence
  Description of Artificial Sequence: Synthetic oligonucleotide
  Sense strand starting at position 2512 of SEQ ID NO: 915440
auuauugcaccaugagaug

SEQ ID NO: 1079915 - RNA, 19 nt, Artificial Sequence
  Description of Artificial Sequence: Synthetic oligonucleotide
  Antisense strand to SEQ ID NO: 1079914
caucucauggugcaauaau

SEQ ID NO: 1079916 - RNA, 19 nt, Artificial Sequence
  Description of Artificial Sequence: Synthetic oligonucleotide
  Sense strand starting at position 2554 of SEQ ID NO: 915440
gggacccugaacuguuuaa

SEQ ID NO: 1079917 - RNA, 19 nt, Artificial Sequence
  Description of Artificial Sequence: Synthetic oligonucleotide
  Antisense strand to SEQ ID NO: 1079916
uuaaacaguucaggguccc

SEQ ID NO: 1079918 - RNA, 19 nt, Artificial Sequence
  Description of Artificial Sequence: Synthetic oligonucleotide
  Sense strand starting at position 2593 of SEQ ID NO: 915440
uugagaagcccacggcuua

SEQ ID NO: 1079919 - RNA, 19 nt, Artificial Sequence
  Description of Artificial Sequence: Synthetic oligonucleotide
  Antisense strand to SEQ ID NO: 1079918
uaagccgugggcuucucaa

SEQ ID NO: 1079920 - RNA, 19 nt, Artificial Sequence
  Description of Artificial Sequence: Synthetic oligonucleotide
  Sense strand starting at position 2625 of SEQ ID NO: 915440
gcaggacaucagugugauc

SEQ ID NO: 1079921 - RNA, 19 nt, Artificial Sequence
  Description of Artificial Sequence: Synthetic oligonucleotide
  Antisense strand to SEQ ID NO: 1079920
gaucacacugauguccugc

SEQ ID NO: 1079922 - RNA, 19 nt, Artificial Sequence
  Description of Artificial Sequence: Synthetic oligonucleotide
  Sense strand starting at position 2630 of SEQ ID NO: 915440
acaucagugugaucagaac

SEQ ID NO: 1079923 - RNA, 19 nt, Artificial Sequence
  Description of Artificial Sequence: Synthetic oligonucleotide
  Antisense strand to SEQ ID NO: 1079922
guucugaucacacugaugu

SEQ ID NO: 1079924 - RNA, 19 nt, Artificial Sequence
  Description of Artificial Sequence: Synthetic oligonucleotide
  Sense strand starting at position 2779 of SEQ ID NO: 915440
agguguuccaccggagaca

SEQ ID NO: 1079925 - RNA, 19 nt, Artificial Sequence
  Description of Artificial Sequence: Synthetic oligonucleotide
  Antisense strand to SEQ ID NO: 1079924
ugucuccgguggaacaccu

SEQ ID NO: 1079926 - RNA, 19 nt, Artificial Sequence
  Description of Artificial Sequence: Synthetic oligonucleotide
  Sense strand starting at position 2922 of SEQ ID NO: 915440
guuggaugccagcaguaaa

SEQ ID NO: 1079927 - RNA, 19 nt, Artificial Sequence
  Description of Artificial Sequence: Synthetic oligonucleotide
  Antisense strand to SEQ ID NO: 1079926
uuuacugcuggcauccaac

SEQ ID NO: 1079928 - RNA, 19 nt, Artificial Sequence
  Description of Artificial Sequence: Synthetic oligonucleotide
  Sense strand starting at position 2987 of SEQ ID NO: 915440
uccuaauggccagaguuga

SEQ ID NO: 1079929 - RNA, 19 nt, Artificial Sequence
  Description of Artificial Sequence: Synthetic oligonucleotide
  Antisense strand to SEQ ID NO: 1079928
ucaacucuggccauuagga

SEQ ID NO: 1079930 - RNA, 19 nt, Artificial Sequence
  Description of Artificial Sequence: Synthetic oligonucleotide
  Sense strand starting at position 3022 of SEQ ID NO: 915440
gcacaagggucuucccaga

SEQ ID NO: 1079931 - RNA, 19 nt, Artificial Sequence
  Description of Artificial Sequence: Synthetic oligonucleotide
  Antisense strand to SEQ ID NO: 1079930
ucugggaagacccuugugc

SEQ ID NO: 1079932 - RNA, 19 nt, Artificial Sequence
  Description of Artificial Sequence: Synthetic oligonucleotide
  Sense strand starting at position 3038 of SEQ ID NO: 915440
agaucuuggacugaguguu

SEQ ID NO: 1079933 - RNA, 19 nt, Artificial Sequence
  Description of Artificial Sequence: Synthetic oligonucleotide
  Antisense strand to SEQ ID NO: 1079932
aacacucaguccaagaucu

SEQ ID NO: 1079934 - RNA, 19 nt, Artificial Sequence
  Description of Artificial Sequence: Synthetic oligonucleotide
  Sense strand starting at position 3046 of SEQ ID NO: 915440
gacugaguguuucuauuga

SEQ ID NO: 1079935 - RNA, 19 nt, Artificial Sequence
  Description of Artificial Sequence: Synthetic oligonucleotide
  Antisense strand to SEQ ID NO: 1079934
ucaauagaaacacucaguc

SEQ ID NO: 1079936 - RNA, 19 nt, Artificial Sequence
  Description of Artificial Sequence: Synthetic oligonucleotide
  Sense strand starting at position 3183 of SEQ ID NO: 915440
aacucacuguggucuaaag

SEQ ID NO: 1079937 - RNA, 19 nt, Artificial Sequence
  Description of Artificial Sequence: Synthetic oligonucleotide
  Antisense strand to SEQ ID NO: 1079936
cuuuagaccacagugaguu

SEQ ID NO: 1079938 - RNA, 19 nt, Artificial Sequence
  Description of Artificial Sequence: Synthetic oligonucleotide
  Sense strand starting at position 3597 of SEQ ID NO: 915440
uugguugcuauagggauaa

SEQ ID NO: 1079939 - RNA, 19 nt, Artificial Sequence
  Description of Artificial Sequence: Synthetic oligonucleotide
  Antisense strand to SEQ ID NO: 1079938
uuaucccuauagcaaccaa

SEQ ID NO: 1079940 - RNA, 19 nt, Artificial Sequence
  Description of Artificial Sequence: Synthetic oligonucleotide
  Sense strand starting at position 3599 of SEQ ID NO: 915440
gguugcuauagggauaauc

SEQ ID NO: 1079941 - RNA, 19 nt, Artificial Sequence
  Description of Artificial Sequence: Synthetic oligonucleotide
  Antisense strand to SEQ ID NO: 1079940
gauuaucccuauagcaacc

SEQ ID NO: 1079942 - RNA, 19 nt, Artificial Sequence
  Description of Artificial Sequence: Synthetic oligonucleotide
  Sense strand starting at position 3607 of SEQ ID NO: 915440
uagggauaaucucuguaau

SEQ ID NO: 1079943 - RNA, 19 nt, Artificial Sequence
  Description of Artificial Sequence: Synthetic oligonucleotide
  Antisense strand to SEQ ID NO: 1079942
auuacagagauuaucccua

SEQ ID NO: 1079944 - RNA, 19 nt, Artificial Sequence
  Description of Artificial Sequence: Synthetic oligonucleotide
  Sense strand starting at position 3608 of SEQ ID NO: 915440
agggauaaucucuguaaug

SEQ ID NO: 1079945 - RNA, 19 nt, Artificial Sequence
  Description of Artificial Sequence: Synthetic oligonucleotide
  Antisense strand to SEQ ID NO: 1079944
cauuacagagauuaucccu

SEQ ID NO: 1079946 - RNA, 19 nt, Artificial Sequence
  Description of Artificial Sequence: Synthetic oligonucleotide
  Sense strand starting at position 3609 of SEQ ID NO: 915440
gggauaaucucuguaauga

SEQ ID NO: 1079947 - RNA, 19 nt, Artificial Sequence
  Description of Artificial Sequence: Synthetic oligonucleotide
  Antisense strand to SEQ ID NO: 1079946
ucauuacagagauuauccc

SEQ ID NO: 1079948 - RNA, 19 nt, Artificial Sequence
  Description of Artificial Sequence: Synthetic oligonucleotide
  Sense strand starting at position 3639 of SEQ ID NO: 915440
uuugucaugcuauacaguu

SEQ ID NO: 1079949 - RNA, 19 nt, Artificial Sequence
  Description of Artificial Sequence: Synthetic oligonucleotide
  Antisense strand to SEQ ID NO: 1079948
aacuguauagcaugacaaa

SEQ ID NO: 1079950 - RNA, 19 nt, Artificial Sequence
  Description of Artificial Sequence: Synthetic oligonucleotide
  Sense strand starting at position 3717 of SEQ ID NO: 915440
cacuguucccuaggaggua

SEQ ID NO: 1079951 - RNA, 19 nt, Artificial Sequence
  Description of Artificial Sequence: Synthetic oligonucleotide
  Antisense strand to SEQ ID NO: 1079950
uaccuccuagggaacagug

SEQ ID NO: 1079952 - RNA, 19 nt, Artificial Sequence
  Description of Artificial Sequence: Synthetic oligonucleotide
  Sense strand starting at position 3781 of SEQ ID NO: 915440
gaggcuaaguuguugacua

SEQ ID NO: 1079953 - RNA, 19 nt, Artificial Sequence
  Description of Artificial Sequence: Synthetic oligonucleotide
  Antisense strand to SEQ ID NO: 1079952
uagucaacaacuuagccuc

SEQ ID NO: 1079954 - RNA, 19 nt, Artificial Sequence
  Description of Artificial Sequence: Synthetic oligonucleotide
  Sense strand starting at position 3783 of SEQ ID NO: 915440
ggcuaaguuguugacuaac

SEQ ID NO: 1079955 - RNA, 19 nt, Artificial Sequence
  Description of Artificial Sequence: Synthetic oligonucleotide
  Antisense strand to SEQ ID NO: 1079954
guuagucaacaacuuagcc

SEQ ID NO: 1079956 - RNA, 19 nt, Artificial Sequence
  Description of Artificial Sequence: Synthetic oligonucleotide
  Sense strand starting at position 3785 of SEQ ID NO: 915440
cuaaguuguugacuaacau

SEQ ID NO: 1079957 - RNA, 19 nt, Artificial Sequence
  Description of Artificial Sequence: Synthetic oligonucleotide
  Antisense strand to SEQ ID NO: 1079956
auguuagucaacaacuuag

SEQ ID NO: 1079958 - RNA, 19 nt, Artificial Sequence
  Description of Artificial Sequence: Synthetic oligonucleotide
  Sense strand starting at position 3810 of SEQ ID NO: 915440
cuaguaagaggcugaacua

SEQ ID NO: 1079959 - RNA, 19 nt, Artificial Sequence
  Description of Artificial Sequence: Synthetic oligonucleotide
  Antisense strand to SEQ ID NO: 1079958
uaguucagccucuuacuag

SEQ ID NO: 1079960 - RNA, 19 nt, Artificial Sequence
  Description of Artificial Sequence: Synthetic oligonucleotide
  Sense strand starting at position 3877 of SEQ ID NO: 915440
acgccucaucugcacaauu

SEQ ID NO: 1079961 - RNA, 19 nt, Artificial Sequence
  Description of Artificial Sequence: Synthetic oligonucleotide
  Antisense strand to SEQ ID NO: 1079960
aauugugcagaugaggcgu

SEQ ID NO: 1079962 - RNA, 19 nt, Artificial Sequence
  Description of Artificial Sequence: Synthetic oligonucleotide
  Sense strand starting at position 83 of SEQ ID NO: 915441
gcuucuuaaguccgaaguu

SEQ ID NO: 1079963 - RNA, 19 nt, Artificial Sequence
  Description of Artificial Sequence: Synthetic oligonucleotide
  Antisense strand to SEQ ID NO: 1079962
aacuucggacuuaagaagc

SEQ ID NO: 1079964 - RNA, 19 nt, Artificial Sequence
  Description of Artificial Sequence: Synthetic oligonucleotide
  Sense strand starting at position 110 of SEQ ID NO: 915441
ugcagucuuuccuccagaa

SEQ ID NO: 1079965 - RNA, 19 nt, Artificial Sequence
  Description of Artificial Sequence: Synthetic oligonucleotide
  Antisense strand to SEQ ID NO: 1079964
uucuggaggaaagacugca

SEQ ID NO: 1079966 - RNA, 19 nt, Artificial Sequence
  Description of Artificial Sequence: Synthetic oligonucleotide
  Sense strand starting at position 188 of SEQ ID NO: 915441
ccaggugaugcuggaacua

SEQ ID NO: 1079967 - RNA, 19 nt, Artificial Sequence
  Description of Artificial Sequence: Synthetic oligonucleotide
  Antisense strand to SEQ ID NO: 1079966
uaguuccagcaucaccugg

SEQ ID NO: 1079968 - RNA, 19 nt, Artificial Sequence
  Description of Artificial Sequence: Synthetic oligonucleotide
  Sense strand starting at position 233 of SEQ ID NO: 915441
ggcugucuuccggcuucua

SEQ ID NO: 1079969 - RNA, 19 nt, Artificial Sequence
  Description of Artificial Sequence: Synthetic oligonucleotide
  Antisense strand to SEQ ID NO: 1079968
uagaagccggaagacagcc

SEQ ID NO: 1079970 - RNA, 19 nt, Artificial Sequence
  Description of Artificial Sequence: Synthetic oligonucleotide
  Sense strand starting at position 318 of SEQ ID NO: 915441
gucuuauuccugugucacc

SEQ ID NO: 1079971 - RNA, 19 nt, Artificial Sequence
  Description of Artificial Sequence: Synthetic oligonucleotide
  Antisense strand to SEQ ID NO: 1079970
ggugacacaggaauaagac

SEQ ID NO: 1079972 - RNA, 19 nt, Artificial Sequence
  Description of Artificial Sequence: Synthetic oligonucleotide
  Sense strand starting at position 559 of SEQ ID NO: 915441
auccaucucuaagagauga

SEQ ID NO: 1079973 - RNA, 19 nt, Artificial Sequence
  Description of Artificial Sequence: Synthetic oligonucleotide
  Antisense strand to SEQ ID NO: 1079972
ucaucucuuagagauggau

SEQ ID NO: 1079974 - RNA, 19 nt, Artificial Sequence
  Description of Artificial Sequence: Synthetic oligonucleotide
  Sense strand starting at position 656 of SEQ ID NO: 915441
gcucuuuaauccgucucua

SEQ ID NO: 1079975 - RNA, 19 nt, Artificial Sequence
  Description of Artificial Sequence: Synthetic oligonucleotide
  Antisense strand to SEQ ID NO: 1079974
uagagacggauuaaagagc

SEQ ID NO: 1079976 - RNA, 19 nt, Artificial Sequence
  Description of Artificial Sequence: Synthetic oligonucleotide
  Sense strand starting at position 754 of SEQ ID NO: 915441
gauuccaaagcuggagaua

SEQ ID NO: 1079977 - RNA, 19 nt, Artificial Sequence
  Description of Artificial Sequence: Synthetic oligonucleotide
  Antisense strand to SEQ ID NO: 1079976
uaucuccagcuuuggaauc

SEQ ID NO: 1079978 - RNA, 19 nt, Artificial Sequence
  Description of Artificial Sequence: Synthetic oligonucleotide
  Sense strand starting at position 956 of SEQ ID NO: 915441
uagguaugaccguauguuu

SEQ ID NO: 1079979 - RNA, 19 nt, Artificial Sequence
  Description of Artificial Sequence: Synthetic oligonucleotide
  Antisense strand to SEQ ID NO: 1079978
aaacauacggucauaccua

SEQ ID NO: 1079980 - RNA, 19 nt, Artificial Sequence
  Description of Artificial Sequence: Synthetic oligonucleotide
  Sense strand starting at position 964 of SEQ ID NO: 915441
accguauguuuggaggaaa

SEQ ID NO: 1079981 - RNA, 19 nt, Artificial Sequence
  Description of Artificial Sequence: Synthetic oligonucleotide
  Antisense strand to SEQ ID NO: 1079980
uuuccuccaaacauacggu

SEQ ID NO: 1079982 - RNA, 19 nt, Artificial Sequence
  Description of Artificial Sequence: Synthetic oligonucleotide
  Sense strand starting at position 1012 of SEQ ID NO: 915441
uggcggauuuguggguaga

SEQ ID NO: 1079983 - RNA, 19 nt, Artificial Sequence
  Description of Artificial Sequence: Synthetic oligonucleotide
  Antisense strand to SEQ ID NO: 1079982
ucuacccacaaauccgcca

SEQ ID NO: 1079984 - RNA, 19 nt, Artificial Sequence
  Description of Artificial Sequence: Synthetic oligonucleotide
  Sense strand starting at position 1013 of SEQ ID NO: 915441
ggcggauuuguggguagaa

SEQ ID NO: 1079985 - RNA, 19 nt, Artificial Sequence
  Description of Artificial Sequence: Synthetic oligonucleotide
  Antisense strand to SEQ ID NO: 1079984
uucuacccacaaauccgcc

SEQ ID NO: 1079986 - RNA, 19 nt, Artificial Sequence
  Description of Artificial Sequence: Synthetic oligonucleotide
  Sense strand starting at position 1057 of SEQ ID NO: 915441
acaggagcauguguauaau

SEQ ID NO: 1079987 - RNA, 19 nt, Artificial Sequence
  Description of Artificial Sequence: Synthetic oligonucleotide
  Antisense strand to SEQ ID NO: 1079986
auuauacacaugcuccugu

SEQ ID NO: 1079988 - RNA, 19 nt, Artificial Sequence
  Description of Artificial Sequence: Synthetic oligonucleotide
  Sense strand starting at position 1104 of SEQ ID NO: 915441
aggagaugguucucaauug

SEQ ID NO: 1079989 - RNA, 19 nt, Artificial Sequence
  Description of Artificial Sequence: Synthetic oligonucleotide
  Antisense strand to SEQ ID NO: 1079988
caauugagaaccaucuccu

SEQ ID NO: 1079990 - RNA, 19 nt, Artificial Sequence
  Description of Artificial Sequence: Synthetic oligonucleotide
  Sense strand starting at position 1161 of SEQ ID NO: 915441
aguaccucugaaugagagu

SEQ ID NO: 1079991 - RNA, 19 nt, Artificial Sequence
  Description of Artificial Sequence: Synthetic oligonucleotide
  Antisense strand to SEQ ID NO: 1079990
acucucauucagagguacu

SEQ ID NO: 1079992 - RNA, 19 nt, Artificial Sequence
  Description of Artificial Sequence: Synthetic oligonucleotide
  Sense strand starting at position 1170 of SEQ ID NO: 915441
gaaugagaguccuuccacu

SEQ ID NO: 1079993 - RNA, 19 nt, Artificial Sequence
  Description of Artificial Sequence: Synthetic oligonucleotide
  Antisense strand to SEQ ID NO: 1079992
aguggaaggacucucauuc

SEQ ID NO: 1079994 - RNA, 19 nt, Artificial Sequence
  Description of Artificial Sequence: Synthetic oligonucleotide
  Sense strand starting at position 1255 of SEQ ID NO: 915441
agcgucugcucacuaaaua

SEQ ID NO: 1079995 - RNA, 19 nt, Artificial Sequence
  Description of Artificial Sequence: Synthetic oligonucleotide
  Antisense strand to SEQ ID NO: 1079994
uauuuagugagcagacgcu

SEQ ID NO: 1079996 - RNA, 19 nt, Artificial Sequence
  Description of Artificial Sequence: Synthetic oligonucleotide
  Sense strand starting at position 1256 of SEQ ID NO: 915441
gcgucugcucacuaaauac

SEQ ID NO: 1079997 - RNA, 19 nt, Artificial Sequence
  Description of Artificial Sequence: Synthetic oligonucleotide
  Antisense strand to SEQ ID NO: 1079996
guauuuagugagcagacgc

SEQ ID NO: 1079998 - RNA, 19 nt, Artificial Sequence
  Description of Artificial Sequence: Synthetic oligonucleotide
  Sense strand starting at position 1277 of SEQ ID NO: 915441
acugcuuggcuccagguaa

SEQ ID NO: 1079999 - RNA, 19 nt, Artificial Sequence
  Description of Artificial Sequence: Synthetic oligonucleotide
  Antisense strand to SEQ ID NO: 1079998
uuaccuggagccaagcagu

SEQ ID NO: 1080000 - RNA, 19 nt, Artificial Sequence
  Description of Artificial Sequence: Synthetic oligonucleotide
  Sense strand starting at position 1402 of SEQ ID NO: 915441
gagugugggucuguauuag

SEQ ID NO: 1080001 - RNA, 19 nt, Artificial Sequence
  Description of Artificial Sequence: Synthetic oligonucleotide
  Antisense strand to SEQ ID NO: 1080000
cuaauacagacccacacuc

SEQ ID NO: 1080002 - RNA, 19 nt, Artificial Sequence
  Description of Artificial Sequence: Synthetic oligonucleotide
  Sense strand starting at position 1560 of SEQ ID NO: 915441
ccaccaacuucugaggaca

SEQ ID NO: 1080003 - RNA, 19 nt, Artificial Sequence
  Description of Artificial Sequence: Synthetic oligonucleotide
  Antisense strand to SEQ ID NO: 1080002
uguccucagaaguuggugg

SEQ ID NO: 1080004 - RNA, 19 nt, Artificial Sequence
  Description of Artificial Sequence: Synthetic oligonucleotide
  Sense strand starting at position 2283 of SEQ ID NO: 915441
gcgggaagaugcugagaaa

SEQ ID NO: 1080005 - RNA, 19 nt, Artificial Sequence
  Description of Artificial Sequence: Synthetic oligonucleotide
  Antisense strand to SEQ ID NO: 1080004
uuucucagcaucuucccgc

SEQ ID NO: 1080006 - RNA, 19 nt, Artificial Sequence
  Description of Artificial Sequence: Synthetic oligonucleotide
  Sense strand starting at position 2409 of SEQ ID NO: 915441
gugauucagcagugggaag

SEQ ID NO: 1080007 - RNA, 19 nt, Artificial Sequence
  Description of Artificial Sequence: Synthetic oligonucleotide
  Antisense strand to SEQ ID NO: 1080006
cuucccacugcugaaucac

SEQ ID NO: 1080008 - RNA, 19 nt, Artificial Sequence
  Description of Artificial Sequence: Synthetic oligonucleotide
  Sense strand starting at position 2544 of SEQ ID NO: 915441
gaugucgagucgucauuca

SEQ ID NO: 1080009 - RNA, 19 nt, Artificial Sequence
  Description of Artificial Sequence: Synthetic oligonucleotide
  Antisense strand to SEQ ID NO: 1080008
ugaaugacgacucgacauc

SEQ ID NO: 1080010 - RNA, 19 nt, Artificial Sequence
  Description of Artificial Sequence: Synthetic oligonucleotide
  Sense strand starting at position 2783 of SEQ ID NO: 915441
ggagcuuugacuugagaau

SEQ ID NO: 1080011 - RNA, 19 nt, Artificial Sequence
  Description of Artificial Sequence: Synthetic oligonucleotide
  Antisense strand to SEQ ID NO: 1080010
auucucaagucaaagcucc

SEQ ID NO: 1080012 - RNA, 19 nt, Artificial Sequence
  Description of Artificial Sequence: Synthetic oligonucleotide
  Sense strand starting at position 2821 of SEQ ID NO: 915441
caaaguuucugagcgccua

SEQ ID NO: 1080013 - RNA, 19 nt, Artificial Sequence
  Description of Artificial Sequence: Synthetic oligonucleotide
  Antisense strand to SEQ ID NO: 1080012
uaggcgcucagaaacuuug

SEQ ID NO: 1080014 - RNA, 19 nt, Artificial Sequence
  Description of Artificial Sequence: Synthetic oligonucleotide
  Sense strand starting at position 2872 of SEQ ID NO: 915441
gaagaaacacagcguuuaa

SEQ ID NO: 1080015 - RNA, 19 nt, Artificial Sequence
  Description of Artificial Sequence: Synthetic oligonucleotide
  Antisense strand to SEQ ID NO: 1080014
uuaaacgcuguguuucuuc

SEQ ID NO: 1080016 - RNA, 19 nt, Artificial Sequence
  Description of Artificial Sequence: Synthetic oligonucleotide
  Sense strand starting at position 2895 of SEQ ID NO: 915441
ggaucccugucuuccagaa

SEQ ID NO: 1080017 - RNA, 19 nt, Artificial Sequence
  Description of Artificial Sequence: Synthetic oligonucleotide
  Antisense strand to SEQ ID NO: 1080016
uucuggaagacagggaucc

SEQ ID NO: 1080018 - RNA, 19 nt, Artificial Sequence
  Description of Artificial Sequence: Synthetic oligonucleotide
  Sense strand starting at position 2899 of SEQ ID NO: 915441
cccugucuuccagaagcuu

SEQ ID NO: 1080019 - RNA, 19 nt, Artificial Sequence
  Description of Artificial Sequence: Synthetic oligonucleotide
  Antisense strand to SEQ ID NO: 1080018
aagcuucuggaagacaggg

SEQ ID NO: 1080020 - RNA, 19 nt, Artificial Sequence
  Description of Artificial Sequence: Synthetic oligonucleotide
  Sense strand starting at position 2927 of SEQ ID NO: 915441
acggauugauuccaggaau

SEQ ID NO: 1080021 - RNA, 19 nt, Artificial Sequence
  Description of Artificial Sequence: Synthetic oligonucleotide
  Antisense strand to SEQ ID NO: 1080020
auuccuggaaucaauccgu

SEQ ID NO: 1080022 - RNA, 19 nt, Artificial Sequence
  Description of Artificial Sequence: Synthetic oligonucleotide
  Sense strand starting at position 2967 of SEQ ID NO: 915441
ccucaaaucugucuuuggu

SEQ ID NO: 1080023 - RNA, 19 nt, Artificial Sequence
  Description of Artificial Sequence: Synthetic oligonucleotide
  Antisense strand to SEQ ID NO: 1080022
accaaagacagauuugagg

SEQ ID NO: 1080024 - RNA, 19 nt, Artificial Sequence
  Description of Artificial Sequence: Synthetic oligonucleotide
  Sense strand starting at position 2969 of SEQ ID NO: 915441
ucaaaucugucuuugguaa

SEQ ID NO: 1080025 - RNA, 19 nt, Artificial Sequence
  Description of Artificial Sequence: Synthetic oligonucleotide
  Antisense strand to SEQ ID NO: 1080024
uuaccaaagacagauuuga

SEQ ID NO: 1080026 - RNA, 19 nt, Artificial Sequence
  Description of Artificial Sequence: Synthetic oligonucleotide
  Sense strand starting at position 3048 of SEQ ID NO: 915441
accuguugucaaugcguau

SEQ ID NO: 1080027 - RNA, 19 nt, Artificial Sequence
  Description of Artificial Sequence: Synthetic oligonucleotide
  Antisense strand to SEQ ID NO: 1080026
auacgcauugacaacaggu

SEQ ID NO: 1080028 - RNA, 19 nt, Artificial Sequence
  Description of Artificial Sequence: Synthetic oligonucleotide
  Sense strand starting at position 3052 of SEQ ID NO: 915441
guugucaaugcguaucuca

SEQ ID NO: 1080029 - RNA, 19 nt, Artificial Sequence
  Description of Artificial Sequence: Synthetic oligonucleotide
  Antisense strand to SEQ ID NO: 1080028
ugagauacgcauugacaac

SEQ ID NO: 1080030 - RNA, 19 nt, Artificial Sequence
  Description of Artificial Sequence: Synthetic oligonucleotide
  Sense strand starting at position 3123 of SEQ ID NO: 915441
uggcgucugccuguaauua

SEQ ID NO: 1080031 - RNA, 19 nt, Artificial Sequence
  Description of Artificial Sequence: Synthetic oligonucleotide
  Antisense strand to SEQ ID NO: 1080030
uaauuacaggcagacgcca

SEQ ID NO: 1080032 - RNA, 19 nt, Artificial Sequence
  Description of Artificial Sequence: Synthetic oligonucleotide
  Sense strand starting at position 3124 of SEQ ID NO: 915441
ggcgucugccuguaauuac

SEQ ID NO: 1080033 - RNA, 19 nt, Artificial Sequence
  Description of Artificial Sequence: Synthetic oligonucleotide
  Antisense strand to SEQ ID NO: 1080032
guaauuacaggcagacgcc

SEQ ID NO: 1080034 - RNA, 19 nt, Artificial Sequence
  Description of Artificial Sequence: Synthetic oligonucleotide
  Sense strand starting at position 3341 of SEQ ID NO: 915441
ucguauuucuaguagggac

SEQ ID NO: 1080035 - RNA, 19 nt, Artificial Sequence
  Description of Artificial Sequence: Synthetic oligonucleotide
  Antisense strand to SEQ ID NO: 1080034
gucccuacuagaaauacga

SEQ ID NO: 1080036 - RNA, 19 nt, Artificial Sequence
  Description of Artificial Sequence: Synthetic oligonucleotide
  Sense strand starting at position 3389 of SEQ ID NO: 915441
ucgaacuacugaucucagu

SEQ ID NO: 1080037 - RNA, 19 nt, Artificial Sequence
  Description of Artificial Sequence: Synthetic oligonucleotide
  Antisense strand to SEQ ID NO: 1080036
acugagaucaguaguucga

SEQ ID NO: 1080038 - RNA, 19 nt, Artificial Sequence
  Description of Artificial Sequence: Synthetic oligonucleotide
  Sense strand starting at position 3579 of SEQ ID NO: 915441
uugacuuagccauagccaa

SEQ ID NO: 1080039 - RNA, 19 nt, Artificial Sequence
  Description of Artificial Sequence: Synthetic oligonucleotide
  Antisense strand to SEQ ID NO: 1080038
uuggcuauggcuaagucaa

SEQ ID NO: 1080040 - RNA, 19 nt, Artificial Sequence
  Description of Artificial Sequence: Synthetic oligonucleotide
  Sense strand starting at position 3928 of SEQ ID NO: 915441
uuagcaugguaaucaacau

SEQ ID NO: 1080041 - RNA, 19 nt, Artificial Sequence
  Description of Artificial Sequence: Synthetic oligonucleotide
  Antisense strand to SEQ ID NO: 1080040
auguugauuaccaugcuaa

SEQ ID NO: 1080042 - RNA, 19 nt, Artificial Sequence
  Description of Artificial Sequence: Synthetic oligonucleotide
  Sense strand starting at position 82 of SEQ ID NO: 915442
caguauugguagcuuaaua

SEQ ID NO: 1080043 - RNA, 19 nt, Artificial Sequence
  Description of Artificial Sequence: Synthetic oligonucleotide
  Antisense strand to SEQ ID NO: 1080042
uauuaagcuaccaauacug

SEQ ID NO: 1080044 - RNA, 19 nt, Artificial Sequence
  Description of Artificial Sequence: Synthetic oligonucleotide
  Sense strand starting at position 109 of SEQ ID NO: 915442
guauuuauugacugcccau

SEQ ID NO: 1080045 - RNA, 19 nt, Artificial Sequence
  Description of Artificial Sequence: Synthetic oligonucleotide
  Antisense strand to SEQ ID NO: 1080044
augggcagucaauaaauac

SEQ ID NO: 1080046 - RNA, 19 nt, Artificial Sequence
  Description of Artificial Sequence: Synthetic oligonucleotide
  Sense strand starting at position 250 of SEQ ID NO: 915442
uauagugaugccuaucaug

SEQ ID NO: 1080047 - RNA, 19 nt, Artificial Sequence
  Description of Artificial Sequence: Synthetic oligonucleotide
  Antisense strand to SEQ ID NO: 1080046
caugauaggcaucacuaua

SEQ ID NO: 1080048 - RNA, 19 nt, Artificial Sequence
  Description of Artificial Sequence: Synthetic oligonucleotide
  Sense strand starting at position 475 of SEQ ID NO: 915442
uugaguucucaagggaaca

SEQ ID NO: 1080049 - RNA, 19 nt, Artificial Sequence
  Description of Artificial Sequence: Synthetic oligonucleotide
  Antisense strand to SEQ ID NO: 1080048
uguucccuugagaacucaa

SEQ ID NO: 1080050 - RNA, 19 nt, Artificial Sequence
  Description of Artificial Sequence: Synthetic oligonucleotide
  Sense strand starting at position 487 of SEQ ID NO: 915442
gggaacaacccaugucuaa

SEQ ID NO: 1080051 - RNA, 19 nt, Artificial Sequence
  Description of Artificial Sequence: Synthetic oligonucleotide
  Antisense strand to SEQ ID NO: 1080050
uuagacauggguuguuccc

SEQ ID NO: 1080052 - RNA, 19 nt, Artificial Sequence
  Description of Artificial Sequence: Synthetic oligonucleotide
  Sense strand starting at position 669 of SEQ ID NO: 915442
aguagacaauaucauuaga

SEQ ID NO: 1080053 - RNA, 19 nt, Artificial Sequence
  Description of Artificial Sequence: Synthetic oligonucleotide
  Antisense strand to SEQ ID NO: 1080052
ucuaaugauauugucuacu

SEQ ID NO: 1080054 - RNA, 19 nt, Artificial Sequence
  Description of Artificial Sequence: Synthetic oligonucleotide
  Sense strand starting at position 777 of SEQ ID NO: 915442
ccaaguggauagucuuaca

SEQ ID NO: 1080055 - RNA, 19 nt, Artificial Sequence
  Description of Artificial Sequence: Synthetic oligonucleotide
  Antisense strand to SEQ ID NO: 1080054
uguaagacuauccacuugg

SEQ ID NO: 1080056 - RNA, 19 nt, Artificial Sequence
  Description of Artificial Sequence: Synthetic oligonucleotide
  Sense strand starting at position 788 of SEQ ID NO: 915442
gucuuacaagcauaaagau

SEQ ID NO: 1080057 - RNA, 19 nt, Artificial Sequence
  Description of Artificial Sequence: Synthetic oligonucleotide
  Antisense strand to SEQ ID NO: 1080056
aucuuuaugcuuguaagac

SEQ ID NO: 1080058 - RNA, 19 nt, Artificial Sequence
  Description of Artificial Sequence: Synthetic oligonucleotide
  Sense strand starting at position 797 of SEQ ID NO: 915442
gcauaaagauuaucaggca

SEQ ID NO: 1080059 - RNA, 19 nt, Artificial Sequence
  Description of Artificial Sequence: Synthetic oligonucleotide
  Antisense strand to SEQ ID NO: 1080058
ugccugauaaucuuuaugc

SEQ ID NO: 1080060 - RNA, 19 nt, Artificial Sequence
  Description of Artificial Sequence: Synthetic oligonucleotide
  Sense strand starting at position 868 of SEQ ID NO: 915442
gugcuuugcauuuauagug

SEQ ID NO: 1080061 - RNA, 19 nt, Artificial Sequence
  Description of Artificial Sequence: Synthetic oligonucleotide
  Antisense strand to SEQ ID NO: 1080060
cacuauaaaugcaaagcac

SEQ ID NO: 1080062 - RNA, 19 nt, Artificial Sequence
  Description of Artificial Sequence: Synthetic oligonucleotide
  Sense strand starting at position 875 of SEQ ID NO: 915442
gcauuuauaguguguauga

SEQ ID NO: 1080063 - RNA, 19 nt, Artificial Sequence
  Description of Artificial Sequence: Synthetic oligonucleotide
  Antisense strand to SEQ ID NO: 1080062
ucauacacacuauaaaugc

SEQ ID NO: 1080064 - RNA, 19 nt, Artificial Sequence
  Description of Artificial Sequence: Synthetic oligonucleotide
  Sense strand starting at position 885 of SEQ ID NO: 915442
uguguaugaugcucaagag

SEQ ID NO: 1080065 - RNA, 19 nt, Artificial Sequence
  Description of Artificial Sequence: Synthetic oligonucleotide
  Antisense strand to SEQ ID NO: 1080064
cucuugagcaucauacaca

SEQ ID NO: 1080066 - RNA, 19 nt, Artificial Sequence
  Description of Artificial Sequence: Synthetic oligonucleotide
  Sense strand starting at position 886 of SEQ ID NO: 915442
guguaugaugcucaagaga

SEQ ID NO: 1080067 - RNA, 19 nt, Artificial Sequence
  Description of Artificial Sequence: Synthetic oligonucleotide
  Antisense strand to SEQ ID NO: 1080066
ucucuugagcaucauacac

SEQ ID NO: 1080068 - RNA, 19 nt, Artificial Sequence
  Description of Artificial Sequence: Synthetic oligonucleotide
  Sense strand starting at position 915 of SEQ ID NO: 915442
agucaaugugcauaaagca

SEQ ID NO: 1080069 - RNA, 19 nt, Artificial Sequence
  Description of Artificial Sequence: Synthetic oligonucleotide
  Antisense strand to SEQ ID NO: 1080068
ugcuuuaugcacauugacu

SEQ ID NO: 1080070 - RNA, 19 nt, Artificial Sequence
  Description of Artificial Sequence: Synthetic oligonucleotide
  Sense strand starting at position 956 of SEQ ID NO: 915442
aaaggagcuguccagcaau

SEQ ID NO: 1080071 - RNA, 19 nt, Artificial Sequence
  Description of Artificial Sequence: Synthetic oligonucleotide
  Antisense strand to SEQ ID NO: 1080070
auugcuggacagcuccuuu

SEQ ID NO: 1080072 - RNA, 19 nt, Artificial Sequence
  Description of Artificial Sequence: Synthetic oligonucleotide
  Sense strand starting at position 959 of SEQ ID NO: 915442
ggagcuguccagcaaucaa

SEQ ID NO: 1080073 - RNA, 19 nt, Artificial Sequence
  Description of Artificial Sequence: Synthetic oligonucleotide
  Antisense strand to SEQ ID NO: 1080072
uugauugcuggacagcucc

SEQ ID NO: 1080074 - RNA, 19 nt, Artificial Sequence
  Description of Artificial Sequence: Synthetic oligonucleotide
  Sense strand starting at position 1377 of SEQ ID NO: 915442
uaagguuugcuguaccaau

SEQ ID NO: 1080075 - RNA, 19 nt, Artificial Sequence
  Description of Artificial Sequence: Synthetic oligonucleotide
  Antisense strand to SEQ ID NO: 1080074
auugguacagcaaaccuua

SEQ ID NO: 1080076 - RNA, 19 nt, Artificial Sequence
  Description of Artificial Sequence: Synthetic oligonucleotide
  Sense strand starting at position 1402 of SEQ ID NO: 915442
ugccuugauuucguaccaa

SEQ ID NO: 1080077 - RNA, 19 nt, Artificial Sequence
  Description of Artificial Sequence: Synthetic oligonucleotide
  Antisense strand to SEQ ID NO: 1080076
uugguacgaaaucaaggca

SEQ ID NO: 1080078 - RNA, 19 nt, Artificial Sequence
  Description of Artificial Sequence: Synthetic oligonucleotide
  Sense strand starting at position 1500 of SEQ ID NO: 915442
uggugacgagaugaguuaa

SEQ ID NO: 1080079 - RNA, 19 nt, Artificial Sequence
  Description of Artificial Sequence: Synthetic oligonucleotide
  Antisense strand to SEQ ID NO: 1080078
uuaacucaucucgucacca

SEQ ID NO: 1080080 - RNA, 19 nt, Artificial Sequence
  Description of Artificial Sequence: Synthetic oligonucleotide
  Sense strand starting at position 1702 of SEQ ID NO: 915442
ccagucaguuugguggaua

SEQ ID NO: 1080081 - RNA, 19 nt, Artificial Sequence
  Description of Artificial Sequence: Synthetic oligonucleotide
  Antisense strand to SEQ ID NO: 1080080
uauccaccaaacugacugg

SEQ ID NO: 1080082 - RNA, 19 nt, Artificial Sequence
  Description of Artificial Sequence: Synthetic oligonucleotide
  Sense strand starting at position 2125 of SEQ ID NO: 915442
ugguuacccgucgcuguaa

SEQ ID NO: 1080083 - RNA, 19 nt, Artificial Sequence
  Description of Artificial Sequence: Synthetic oligonucleotide
  Antisense strand to SEQ ID NO: 1080082
uuacagcgacggguaacca

SEQ ID NO: 1080084 - RNA, 19 nt, Artificial Sequence
  Description of Artificial Sequence: Synthetic oligonucleotide
  Sense strand starting at position 2212 of SEQ ID NO: 915442
cugaguccugugcauucua

SEQ ID NO: 1080085 - RNA, 19 nt, Artificial Sequence
  Description of Artificial Sequence: Synthetic oligonucleotide
  Antisense strand to SEQ ID NO: 1080084
uagaaugcacaggacucag

SEQ ID NO: 1080086 - RNA, 19 nt, Artificial Sequence
  Description of Artificial Sequence: Synthetic oligonucleotide
  Sense strand starting at position 2782 of SEQ ID NO: 915442
guauuagacccucaacuug

SEQ ID NO: 1080087 - RNA, 19 nt, Artificial Sequence
  Description of Artificial Sequence: Synthetic oligonucleotide
  Antisense strand to SEQ ID NO: 1080086
caaguugagggucuaauac

SEQ ID NO: 1080088 - RNA, 19 nt, Artificial Sequence
  Description of Artificial Sequence: Synthetic oligonucleotide
  Sense strand starting at position 2825 of SEQ ID NO: 915442
auggauucccuuuguagga

SEQ ID NO: 1080089 - RNA, 19 nt, Artificial Sequence
  Description of Artificial Sequence: Synthetic oligonucleotide
  Antisense strand to SEQ ID NO: 1080088
uccuacaaagggaauccau

SEQ ID NO: 1080090 - RNA, 19 nt, Artificial Sequence
  Description of Artificial Sequence: Synthetic oligonucleotide
  Sense strand starting at position 2891 of SEQ ID NO: 915442
cgagcagucuucucaacug

SEQ ID NO: 1080091 - RNA, 19 nt, Artificial Sequence
  Description of Artificial Sequence: Synthetic oligonucleotide
  Antisense strand to SEQ ID NO: 1080090
caguugagaagacugcucg

SEQ ID NO: 1080092 - RNA, 19 nt, Artificial Sequence
  Description of Artificial Sequence: Synthetic oligonucleotide
  Sense strand starting at position 2944 of SEQ ID NO: 915442
aggugaaauugaguuagcu

SEQ ID NO: 1080093 - RNA, 19 nt, Artificial Sequence
  Description of Artificial Sequence: Synthetic oligonucleotide
  Antisense strand to SEQ ID NO: 1080092
agcuaacucaauuucaccu

SEQ ID NO: 1080094 - RNA, 19 nt, Artificial Sequence
  Description of Artificial Sequence: Synthetic oligonucleotide
  Sense strand starting at position 2946 of SEQ ID NO: 915442
gugaaauugaguuagcugu

SEQ ID NO: 1080095 - RNA, 19 nt, Artificial Sequence
  Description of Artificial Sequence: Synthetic oligonucleotide
  Antisense strand to SEQ ID NO: 1080094
acagcuaacucaauuucac

SEQ ID NO: 1080096 - RNA, 19 nt, Artificial Sequence
  Description of Artificial Sequence: Synthetic oligonucleotide
  Sense strand starting at position 3004 of SEQ ID NO: 915442
uuagaaagguauuccggaa

SEQ ID NO: 1080097 - RNA, 19 nt, Artificial Sequence
  Description of Artificial Sequence: Synthetic oligonucleotide
  Antisense strand to SEQ ID NO: 1080096
uuccggaauaccuuucuaa

SEQ ID NO: 1080098 - RNA, 19 nt, Artificial Sequence
  Description of Artificial Sequence: Synthetic oligonucleotide
  Sense strand starting at position 3042 of SEQ ID NO: 915442
aaggcaaaucuggaagcuu

SEQ ID NO: 1080099 - RNA, 19 nt, Artificial Sequence
  Description of Artificial Sequence: Synthetic oligonucleotide
  Antisense strand to SEQ ID NO: 1080098
aagcuuccagauuugccuu

SEQ ID NO: 1080100 - RNA, 19 nt, Artificial Sequence
  Description of Artificial Sequence: Synthetic oligonucleotide
  Sense strand starting at position 3122 of SEQ ID NO: 915442
acacgaagugcacaaauau

SEQ ID NO: 1080101 - RNA, 19 nt, Artificial Sequence
  Description of Artificial Sequence: Synthetic oligonucleotide
  Antisense strand to SEQ ID NO: 1080100
auauuugugcacuucgugu

SEQ ID NO: 1080102 - RNA, 19 nt, Artificial Sequence
  Description of Artificial Sequence: Synthetic oligonucleotide
  Sense strand starting at position 3216 of SEQ ID NO: 915442
uuugcuuuccugggacagu

SEQ ID NO: 1080103 - RNA, 19 nt, Artificial Sequence
  Description of Artificial Sequence: Synthetic oligonucleotide
  Antisense strand to SEQ ID NO: 1080102
acugucccaggaaagcaaa

SEQ ID NO: 1080104 - RNA, 19 nt, Artificial Sequence
  Description of Artificial Sequence: Synthetic oligonucleotide
  Sense strand starting at position 3306 of SEQ ID NO: 915442
gcagaugagaaaugucaau

SEQ ID NO: 1080105 - RNA, 19 nt, Artificial Sequence
  Description of Artificial Sequence: Synthetic oligonucleotide
  Antisense strand to SEQ ID NO: 1080104
auugacauuucucaucugc

SEQ ID NO: 1080106 - RNA, 19 nt, Artificial Sequence
  Description of Artificial Sequence: Synthetic oligonucleotide
  Sense strand starting at position 3540 of SEQ ID NO: 915442
aaguuaaaugccuguggac

SEQ ID NO: 1080107 - RNA, 19 nt, Artificial Sequence
  Description of Artificial Sequence: Synthetic oligonucleotide
  Antisense strand to SEQ ID NO: 1080106
guccacaggcauuuaacuu

SEQ ID NO: 1080108 - RNA, 19 nt, Artificial Sequence
  Description of Artificial Sequence: Synthetic oligonucleotide
  Sense strand starting at position 3542 of SEQ ID NO: 915442
guuaaaugccuguggacug

SEQ ID NO: 1080109 - RNA, 19 nt, Artificial Sequence
  Description of Artificial Sequence: Synthetic oligonucleotide
  Antisense strand to SEQ ID NO: 1080108
caguccacaggcauuuaac

SEQ ID NO: 1080110 - RNA, 19 nt, Artificial Sequence
  Description of Artificial Sequence: Synthetic oligonucleotide
  Sense strand starting at position 3564 of SEQ ID NO: 915442
gccuguaaggagugaacua

SEQ ID NO: 1080111 - RNA, 19 nt, Artificial Sequence
  Description of Artificial Sequence: Synthetic oligonucleotide
  Antisense strand to SEQ ID NO: 1080110
uaguucacuccuuacaggc

SEQ ID NO: 1080112 - RNA, 19 nt, Artificial Sequence
  Description of Artificial Sequence: Synthetic oligonucleotide
  Sense strand starting at position 3603 of SEQ ID NO: 915442
gcucuuaagaauuggaggu

SEQ ID NO: 1080113 - RNA, 19 nt, Artificial Sequence
  Description of Artificial Sequence: Synthetic oligonucleotide
  Antisense strand to SEQ ID NO: 1080112
accuccaauucuuaagagc

SEQ ID NO: 1080114 - RNA, 19 nt, Artificial Sequence
  Description of Artificial Sequence: Synthetic oligonucleotide
  Sense strand starting at position 3619 of SEQ ID NO: 915442
gguacuggguuccuuuaaa

SEQ ID NO: 1080115 - RNA, 19 nt, Artificial Sequence
  Description of Artificial Sequence: Synthetic oligonucleotide
  Antisense strand to SEQ ID NO: 1080114
uuuaaaggaacccaguacc

SEQ ID NO: 1080116 - RNA, 19 nt, Artificial Sequence
  Description of Artificial Sequence: Synthetic oligonucleotide
  Sense strand starting at position 3664 of SEQ ID NO: 915442
gaaggauuggcuggaaauc

SEQ ID NO: 1080117 - RNA, 19 nt, Artificial Sequence
  Description of Artificial Sequence: Synthetic oligonucleotide
  Antisense strand to SEQ ID NO: 1080116
gauuuccagccaauccuuc

SEQ ID NO: 1080118 - RNA, 19 nt, Artificial Sequence
  Description of Artificial Sequence: Synthetic oligonucleotide
  Sense strand starting at position 3933 of SEQ ID NO: 915442
agcuaugauugugugaaac

SEQ ID NO: 1080119 - RNA, 19 nt, Artificial Sequence
  Description of Artificial Sequence: Synthetic oligonucleotide
  Antisense strand to SEQ ID NO: 1080118
guuucacacaaucauagcu

SEQ ID NO: 1080120 - RNA, 19 nt, Artificial Sequence
  Description of Artificial Sequence: Synthetic oligonucleotide
  Sense strand starting at position 3976 of SEQ ID NO: 915442
ugauaauaaugccugaaug

SEQ ID NO: 1080121 - RNA, 19 nt, Artificial Sequence
  Description of Artificial Sequence: Synthetic oligonucleotide
  Antisense strand to SEQ ID NO: 1080120
cauucaggcauuauuauca

SEQ ID NO: 1080122 - RNA, 19 nt, Artificial Sequence
  Description of Artificial Sequence: Synthetic oligonucleotide
  Sense strand starting at position 235 of SEQ ID NO: 915443
gggagugcugcagagagaa

SEQ ID NO: 1080123 - RNA, 19 nt, Artificial Sequence
  Description of Artificial Sequence: Synthetic oligonucleotide
  Antisense strand to SEQ ID NO: 1080122
uucucucugcagcacuccc

SEQ ID NO: 1080124 - RNA, 19 nt, Artificial Sequence
  Description of Artificial Sequence: Synthetic oligonucleotide
  Sense strand starting at position 2629 of SEQ ID NO: 915443
ccguguucuugucugcaaa

SEQ ID NO: 1080125 - RNA, 19 nt, Artificial Sequence
  Description of Artificial Sequence: Synthetic oligonucleotide
  Antisense strand to SEQ ID NO: 1080124
uuugcagacaagaacacgg

SEQ ID NO: 1080126 - RNA, 19 nt, Artificial Sequence
  Description of Artificial Sequence: Synthetic oligonucleotide
  Sense strand starting at position 2630 of SEQ ID NO: 915443
cguguucuugucugcaaag

SEQ ID NO: 1080127 - RNA, 19 nt, Artificial Sequence
  Description of Artificial Sequence: Synthetic oligonucleotide
  Antisense strand to SEQ ID NO: 1080126
cuuugcagacaagaacacg

SEQ ID NO: 1080128 - RNA, 19 nt, Artificial Sequence
  Description of Artificial Sequence: Synthetic oligonucleotide
  Sense strand starting at position 2631 of SEQ ID NO: 915443
guguucuugucugcaaagu

SEQ ID NO: 1080129 - RNA, 19 nt, Artificial Sequence
  Description of Artificial Sequence: Synthetic oligonucleotide
  Antisense strand to SEQ ID NO: 1080128
acuuugcagacaagaacac

SEQ ID NO: 1080130 - RNA, 19 nt, Artificial Sequence
  Description of Artificial Sequence: Synthetic oligonucleotide
  Sense strand starting at position 2648 of SEQ ID NO: 915443
gugggauauugaugccugu

SEQ ID NO: 1080131 - RNA, 19 nt, Artificial Sequence
  Description of Artificial Sequence: Synthetic oligonucleotide
  Antisense strand to SEQ ID NO: 1080130
acaggcaucaauaucccac

SEQ ID NO: 1080132 - RNA, 19 nt, Artificial Sequence
  Description of Artificial Sequence: Synthetic oligonucleotide
  Sense strand starting at position 2652 of SEQ ID NO: 915443
gauauugaugccugucucu

SEQ ID NO: 1080133 - RNA, 19 nt, Artificial Sequence
  Description of Artificial Sequence: Synthetic oligonucleotide
  Antisense strand to SEQ ID NO: 1080132
agagacaggcaucaauauc

SEQ ID NO: 1080134 - RNA, 19 nt, Artificial Sequence
  Description of Artificial Sequence: Synthetic oligonucleotide
  Sense strand starting at position 2663 of SEQ ID NO: 915443
cugucucugugagguguua

SEQ ID NO: 1080135 - RNA, 19 nt, Artificial Sequence
  Description of Artificial Sequence: Synthetic oligonucleotide
  Antisense strand to SEQ ID NO: 1080134
uaacaccucacagagacag

SEQ ID NO: 1080136 - RNA, 19 nt, Artificial Sequence
  Description of Artificial Sequence: Synthetic oligonucleotide
  Sense strand starting at position 2665 of SEQ ID NO: 915443
gucucugugagguguuaug

SEQ ID NO: 1080137 - RNA, 19 nt, Artificial Sequence
  Description of Artificial Sequence: Synthetic oligonucleotide
  Antisense strand to SEQ ID NO: 1080136
cauaacaccucacagagac

SEQ ID NO: 1080138 - RNA, 19 nt, Artificial Sequence
  Description of Artificial Sequence: Synthetic oligonucleotide
  Sense strand starting at position 2676 of SEQ ID NO: 915443
guguuaugaugauuaaagg

SEQ ID NO: 1080139 - RNA, 19 nt, Artificial Sequence
  Description of Artificial Sequence: Synthetic oligonucleotide
  Antisense strand to SEQ ID NO: 1080138
ccuuuaaucaucauaacac

SEQ ID NO: 1080140 - RNA, 19 nt, Artificial Sequence
  Description of Artificial Sequence: Synthetic oligonucleotide
  Sense strand starting at position 2930 of SEQ ID NO: 915443
gggaacuuugcucagccau

SEQ ID NO: 1080141 - RNA, 19 nt, Artificial Sequence
  Description of Artificial Sequence: Synthetic oligonucleotide
  Antisense strand to SEQ ID NO: 1080140
auggcugagcaaaguuccc

SEQ ID NO: 1080142 - RNA, 19 nt, Artificial Sequence
  Description of Artificial Sequence: Synthetic oligonucleotide
  Sense strand starting at position 3075 of SEQ ID NO: 915443
uuucuaugcucuuagcaga

SEQ ID NO: 1080143 - RNA, 19 nt, Artificial Sequence
  Description of Artificial Sequence: Synthetic oligonucleotide
  Antisense strand to SEQ ID NO: 1080142
ucugcuaagagcauagaaa

SEQ ID NO: 1080144 - RNA, 19 nt, Artificial Sequence
  Description of Artificial Sequence: Synthetic oligonucleotide
  Sense strand starting at position 3078 of SEQ ID NO: 915443
cuaugcucuuagcagaguu

SEQ ID NO: 1080145 - RNA, 19 nt, Artificial Sequence
  Description of Artificial Sequence: Synthetic oligonucleotide
  Antisense strand to SEQ ID NO: 1080144
aacucugcuaagagcauag

SEQ ID NO: 1080146 - RNA, 19 nt, Artificial Sequence
  Description of Artificial Sequence: Synthetic oligonucleotide
  Sense strand starting at position 3080 of SEQ ID NO: 915443
augcucuuagcagaguuua

SEQ ID NO: 1080147 - RNA, 19 nt, Artificial Sequence
  Description of Artificial Sequence: Synthetic oligonucleotide
  Antisense strand to SEQ ID NO: 1080146
uaaacucugcuaagagcau

SEQ ID NO: 1080148 - RNA, 19 nt, Artificial Sequence
  Description of Artificial Sequence: Synthetic oligonucleotide
  Sense strand starting at position 3145 of SEQ ID NO: 915443
ccuggaugcaagugucaca

SEQ ID NO: 1080149 - RNA, 19 nt, Artificial Sequence
  Description of Artificial Sequence: Synthetic oligonucleotide
  Antisense strand to SEQ ID NO: 1080148
ugugacacuugcauccagg

SEQ ID NO: 1080150 - RNA, 19 nt, Artificial Sequence
  Description of Artificial Sequence: Synthetic oligonucleotide
  Sense strand starting at position 3150 of SEQ ID NO: 915443
augcaagugucacaucaua

SEQ ID NO: 1080151 - RNA, 19 nt, Artificial Sequence
  Description of Artificial Sequence: Synthetic oligonucleotide
  Antisense strand to SEQ ID NO: 1080150
uaugaugugacacuugcau

SEQ ID NO: 1080152 - RNA, 19 nt, Artificial Sequence
  Description of Artificial Sequence: Synthetic oligonucleotide
  Sense strand starting at position 3257 of SEQ ID NO: 915443
ccaccuugauguguacaca

SEQ ID NO: 1080153 - RNA, 19 nt, Artificial Sequence
  Description of Artificial Sequence: Synthetic oligonucleotide
  Antisense strand to SEQ ID NO: 1080152
uguguacacaucaaggugg

SEQ ID NO: 1080154 - RNA, 19 nt, Artificial Sequence
  Description of Artificial Sequence: Synthetic oligonucleotide
  Sense strand starting at position 3260 of SEQ ID NO: 915443
ccuugauguguacacagga

SEQ ID NO: 1080155 - RNA, 19 nt, Artificial Sequence
  Description of Artificial Sequence: Synthetic oligonucleotide
  Antisense strand to SEQ ID NO: 1080154
uccuguguacacaucaagg

SEQ ID NO: 1080156 - RNA, 19 nt, Artificial Sequence
  Description of Artificial Sequence: Synthetic oligonucleotide
  Sense strand starting at position 3322 of SEQ ID NO: 915443
cagccugucucaugugcaa

SEQ ID NO: 1080157 - RNA, 19 nt, Artificial Sequence
  Description of Artificial Sequence: Synthetic oligonucleotide
  Antisense strand to SEQ ID NO: 1080156
uugcacaugagacaggcug

SEQ ID NO: 1080158 - RNA, 19 nt, Artificial Sequence
  Description of Artificial Sequence: Synthetic oligonucleotide
  Sense strand starting at position 3324 of SEQ ID NO: 915443
gccugucucaugugcaaga

SEQ ID NO: 1080159 - RNA, 19 nt, Artificial Sequence
  Description of Artificial Sequence: Synthetic oligonucleotide
  Antisense strand to SEQ ID NO: 1080158
ucuugcacaugagacaggc

SEQ ID NO: 1080160 - RNA, 19 nt, Artificial Sequence
  Description of Artificial Sequence: Synthetic oligonucleotide
  Sense strand starting at position 3325 of SEQ ID NO: 915443
ccugucucaugugcaagau

SEQ ID NO: 1080161 - RNA, 19 nt, Artificial Sequence
  Description of Artificial Sequence: Synthetic oligonucleotide
  Antisense strand to SEQ ID NO: 1080160
aucuugcacaugagacagg

SEQ ID NO: 1080162 - RNA, 19 nt, Artificial Sequence
  Description of Artificial Sequence: Synthetic oligonucleotide
  Sense strand starting at position 3326 of SEQ ID NO: 915443
cugucucaugugcaagauu

SEQ ID NO: 1080163 - RNA, 19 nt, Artificial Sequence
  Description of Artificial Sequence: Synthetic oligonucleotide
  Antisense strand to SEQ ID NO: 1080162
aaucuugcacaugagacag

SEQ ID NO: 1080164 - RNA, 19 nt, Artificial Sequence
  Description of Artificial Sequence: Synthetic oligonucleotide
  Sense strand starting at position 3390 of SEQ ID NO: 915443
ccagaugugguuggaguga

SEQ ID NO: 1080165 - RNA, 19 nt, Artificial Sequence
  Description of Artificial Sequence: Synthetic oligonucleotide
  Antisense strand to SEQ ID NO: 1080164
ucacuccaaccacaucugg

SEQ ID NO: 1080166 - RNA, 19 nt, Artificial Sequence
  Description of Artificial Sequence: Synthetic oligonucleotide
  Sense strand starting at position 3392 of SEQ ID NO: 915443
agaugugguuggagugaga

SEQ ID NO: 1080167 - RNA, 19 nt, Artificial Sequence
  Description of Artificial Sequence: Synthetic oligonucleotide
  Antisense strand to SEQ ID NO: 1080166
ucucacuccaaccacaucu

SEQ ID NO: 1080168 - RNA, 19 nt, Artificial Sequence
  Description of Artificial Sequence: Synthetic oligonucleotide
  Sense strand starting at position 3482 of SEQ ID NO: 915443
cgcuguggaagagauucua

SEQ ID NO: 1080169 - RNA, 19 nt, Artificial Sequence
  Description of Artificial Sequence: Synthetic oligonucleotide
  Antisense strand to SEQ ID NO: 1080168
uagaaucucuuccacagcg

SEQ ID NO: 1080170 - RNA, 19 nt, Artificial Sequence
  Description of Artificial Sequence: Synthetic oligonucleotide
  Sense strand starting at position 3551 of SEQ ID NO: 915443
gcucaaaucggucaguggu

SEQ ID NO: 1080171 - RNA, 19 nt, Artificial Sequence
  Description of Artificial Sequence: Synthetic oligonucleotide
  Antisense strand to SEQ ID NO: 1080170
accacugaccgauuugagc

SEQ ID NO: 1080172 - RNA, 19 nt, Artificial Sequence
  Description of Artificial Sequence: Synthetic oligonucleotide
  Sense strand starting at position 3636 of SEQ ID NO: 915443
agaggaguuucaggcaguu

SEQ ID NO: 1080173 - RNA, 19 nt, Artificial Sequence
  Description of Artificial Sequence: Synthetic oligonucleotide
  Antisense strand to SEQ ID NO: 1080172
aacugccugaaacuccucu

SEQ ID NO: 1080174 - RNA, 19 nt, Artificial Sequence
  Description of Artificial Sequence: Synthetic oligonucleotide
  Sense strand starting at position 3737 of SEQ ID NO: 915443
cacugugucuggcagaguu

SEQ ID NO: 1080175 - RNA, 19 nt, Artificial Sequence
  Description of Artificial Sequence: Synthetic oligonucleotide
  Antisense strand to SEQ ID NO: 1080174
aacucugccagacacagug

SEQ ID NO: 1080176 - RNA, 19 nt, Artificial Sequence
  Description of Artificial Sequence: Synthetic oligonucleotide
  Sense strand starting at position 3740 of SEQ ID NO: 915443
ugugucuggcagaguuguu

SEQ ID NO: 1080177 - RNA, 19 nt, Artificial Sequence
  Description of Artificial Sequence: Synthetic oligonucleotide
  Antisense strand to SEQ ID NO: 1080176
aacaacucugccagacaca

SEQ ID NO: 1080178 - RNA, 19 nt, Artificial Sequence
  Description of Artificial Sequence: Synthetic oligonucleotide
  Sense strand starting at position 3749 of SEQ ID NO: 915443
cagaguuguuggcaggguu

SEQ ID NO: 1080179 - RNA, 19 nt, Artificial Sequence
  Description of Artificial Sequence: Synthetic oligonucleotide
  Antisense strand to SEQ ID NO: 1080178
aacccugccaacaacucug

SEQ ID NO: 1080180 - RNA, 19 nt, Artificial Sequence
  Description of Artificial Sequence: Synthetic oligonucleotide
  Sense strand starting at position 3750 of SEQ ID NO: 915443
agaguuguuggcaggguuu

SEQ ID NO: 1080181 - RNA, 19 nt, Artificial Sequence
  Description of Artificial Sequence: Synthetic oligonucleotide
  Antisense strand to SEQ ID NO: 1080180
aaacccugccaacaacucu

SEQ ID NO: 1080182 - RNA, 19 nt, Artificial Sequence
  Description of Artificial Sequence: Synthetic oligonucleotide
  Sense strand starting at position 3752 of SEQ ID NO: 915443
aguuguuggcaggguuuau

SEQ ID NO: 1080183 - RNA, 19 nt, Artificial Sequence
  Description of Artificial Sequence: Synthetic oligonucleotide
  Antisense strand to SEQ ID NO: 1080182
auaaacccugccaacaacu

SEQ ID NO: 1080184 - RNA, 19 nt, Artificial Sequence
  Description of Artificial Sequence: Synthetic oligonucleotide
  Sense strand starting at position 3781 of SEQ ID NO: 915443
gagggugagugcuguauua

SEQ ID NO: 1080185 - RNA, 19 nt, Artificial Sequence
  Description of Artificial Sequence: Synthetic oligonucleotide
  Antisense strand to SEQ ID NO: 1080184
uaauacagcacucacccuc

SEQ ID NO: 1080186 - RNA, 19 nt, Artificial Sequence
  Description of Artificial Sequence: Synthetic oligonucleotide
  Sense strand starting at position 3783 of SEQ ID NO: 915443
gggugagugcuguauuaug

SEQ ID NO: 1080187 - RNA, 19 nt, Artificial Sequence
  Description of Artificial Sequence: Synthetic oligonucleotide
  Antisense strand to SEQ ID NO: 1080186
cauaauacagcacucaccc

SEQ ID NO: 1080188 - RNA, 19 nt, Artificial Sequence
  Description of Artificial Sequence: Synthetic oligonucleotide
  Sense strand starting at position 531 of SEQ ID NO: 915444
cuuugaagcuucucuugaa

SEQ ID NO: 1080189 - RNA, 19 nt, Artificial Sequence
  Description of Artificial Sequence: Synthetic oligonucleotide
  Antisense strand to SEQ ID NO: 1080188
uucaagagaagcuucaaag

SEQ ID NO: 1080190 - RNA, 19 nt, Artificial Sequence
  Description of Artificial Sequence: Synthetic oligonucleotide
  Sense strand starting at position 532 of SEQ ID NO: 915444
uuugaagcuucucuugaau

SEQ ID NO: 1080191 - RNA, 19 nt, Artificial Sequence
  Description of Artificial Sequence: Synthetic oligonucleotide
  Antisense strand to SEQ ID NO: 1080190
auucaagagaagcuucaaa

SEQ ID NO: 1080192 - RNA, 19 nt, Artificial Sequence
  Description of Artificial Sequence: Synthetic oligonucleotide
  Sense strand starting at position 543 of SEQ ID NO: 915444
ucuugaauuucucccgcuu

SEQ ID NO: 1080193 - RNA, 19 nt, Artificial Sequence
  Description of Artificial Sequence: Synthetic oligonucleotide
  Antisense strand to SEQ ID NO: 1080192
aagcgggagaaauucaaga

SEQ ID NO: 1080194 - RNA, 19 nt, Artificial Sequence
  Description of Artificial Sequence: Synthetic oligonucleotide
  Sense strand starting at position 684 of SEQ ID NO: 915444
cccgcugagccuugauguu

SEQ ID NO: 1080195 - RNA, 19 nt, Artificial Sequence
  Description of Artificial Sequence: Synthetic oligonucleotide
  Antisense strand to SEQ ID NO: 1080194
aacaucaaggcucagcggg

SEQ ID NO: 1080196 - RNA, 19 nt, Artificial Sequence
  Description of Artificial Sequence: Synthetic oligonucleotide
  Sense strand starting at position 690 of SEQ ID NO: 915444
gagccuugauguugaggga

SEQ ID NO: 1080197 - RNA, 19 nt, Artificial Sequence
  Description of Artificial Sequence: Synthetic oligonucleotide
  Antisense strand to SEQ ID NO: 1080196
ucccucaacaucaaggcuc

SEQ ID NO: 1080198 - RNA, 19 nt, Artificial Sequence
  Description of Artificial Sequence: Synthetic oligonucleotide
  Sense strand starting at position 693 of SEQ ID NO: 915444
ccuugauguugagggagga

SEQ ID NO: 1080199 - RNA, 19 nt, Artificial Sequence
  Description of Artificial Sequence: Synthetic oligonucleotide
  Antisense strand to SEQ ID NO: 1080198
uccucccucaacaucaagg

SEQ ID NO: 1080200 - RNA, 19 nt, Artificial Sequence
  Description of Artificial Sequence: Synthetic oligonucleotide
  Sense strand starting at position 715 of SEQ ID NO: 915444
ccagaacucuagggaacaa

SEQ ID NO: 1080201 - RNA, 19 nt, Artificial Sequence
  Description of Artificial Sequence: Synthetic oligonucleotide
  Antisense strand to SEQ ID NO: 1080200
uuguucccuagaguucugg

SEQ ID NO: 1080202 - RNA, 19 nt, Artificial Sequence
  Description of Artificial Sequence: Synthetic oligonucleotide
  Sense strand starting at position 863 of SEQ ID NO: 915444
gcaggaagcccuuaccaau

SEQ ID NO: 1080203 - RNA, 19 nt, Artificial Sequence
  Description of Artificial Sequence: Synthetic oligonucleotide
  Antisense strand to SEQ ID NO: 1080202
auugguaagggcuuccugc

SEQ ID NO: 1080204 - RNA, 19 nt, Artificial Sequence
  Description of Artificial Sequence: Synthetic oligonucleotide
  Sense strand starting at position 1108 of SEQ ID NO: 915444
uggacuaggucugggaaca

SEQ ID NO: 1080205 - RNA, 19 nt, Artificial Sequence
  Description of Artificial Sequence: Synthetic oligonucleotide
  Antisense strand to SEQ ID NO: 1080204
uguucccagaccuagucca

SEQ ID NO: 1080206 - RNA, 19 nt, Artificial Sequence
  Description of Artificial Sequence: Synthetic oligonucleotide
  Sense strand starting at position 1109 of SEQ ID NO: 915444
ggacuaggucugggaacau

SEQ ID NO: 1080207 - RNA, 19 nt, Artificial Sequence
  Description of Artificial Sequence: Synthetic oligonucleotide
  Antisense strand to SEQ ID NO: 1080206
auguucccagaccuagucc

SEQ ID NO: 1080208 - RNA, 19 nt, Artificial Sequence
  Description of Artificial Sequence: Synthetic oligonucleotide
  Sense strand starting at position 1236 of SEQ ID NO: 915444
cagggcucuccaggaugua

SEQ ID NO: 1080209 - RNA, 19 nt, Artificial Sequence
  Description of Artificial Sequence: Synthetic oligonucleotide
  Antisense strand to SEQ ID NO: 1080208
uacauccuggagagcccug

SEQ ID NO: 1080210 - RNA, 19 nt, Artificial Sequence
  Description of Artificial Sequence: Synthetic oligonucleotide
  Sense strand starting at position 1322 of SEQ ID NO: 915444
guguuagauuuccgcacga

SEQ ID NO: 1080211 - RNA, 19 nt, Artificial Sequence
  Description of Artificial Sequence: Synthetic oligonucleotide
  Antisense strand to SEQ ID NO: 1080210
ucgugcggaaaucuaacac

SEQ ID NO: 1080212 - RNA, 19 nt, Artificial Sequence
  Description of Artificial Sequence: Synthetic oligonucleotide
  Sense strand starting at position 1592 of SEQ ID NO: 915444
uggcauugggcacgucaua

SEQ ID NO: 1080213 - RNA, 19 nt, Artificial Sequence
  Description of Artificial Sequence: Synthetic oligonucleotide
  Antisense strand to SEQ ID NO: 1080212
uaugacgugcccaaugcca

SEQ ID NO: 1080214 - RNA, 19 nt, Artificial Sequence
  Description of Artificial Sequence: Synthetic oligonucleotide
  Sense strand starting at position 1798 of SEQ ID NO: 915444
ccaggugcccaguagugaa

SEQ ID NO: 1080215 - RNA, 19 nt, Artificial Sequence
  Description of Artificial Sequence: Synthetic oligonucleotide
  Antisense strand to SEQ ID NO: 1080214
uucacuacugggcaccugg

SEQ ID NO: 1080216 - RNA, 19 nt, Artificial Sequence
  Description of Artificial Sequence: Synthetic oligonucleotide
  Sense strand starting at position 1978 of SEQ ID NO: 915444
ccaguuaacucuugugugu

SEQ ID NO: 1080217 - RNA, 19 nt, Artificial Sequence
  Description of Artificial Sequence: Synthetic oligonucleotide
  Antisense strand to SEQ ID NO: 1080216
acacacaagaguuaacugg

SEQ ID NO: 1080218 - RNA, 19 nt, Artificial Sequence
  Description of Artificial Sequence: Synthetic oligonucleotide
  Sense strand starting at position 2278 of SEQ ID NO: 915444
cccucuacuguccauagau

SEQ ID NO: 1080219 - RNA, 19 nt, Artificial Sequence
  Description of Artificial Sequence: Synthetic oligonucleotide
  Antisense strand to SEQ ID NO: 1080218
aucuauggacaguagaggg

SEQ ID NO: 1080220 - RNA, 19 nt, Artificial Sequence
  Description of Artificial Sequence: Synthetic oligonucleotide
  Sense strand starting at position 2280 of SEQ ID NO: 915444
cucuacuguccauagauga

SEQ ID NO: 1080221 - RNA, 19 nt, Artificial Sequence
  Description of Artificial Sequence: Synthetic oligonucleotide
  Antisense strand to SEQ ID NO: 1080220
ucaucuauggacaguagag

SEQ ID NO: 1080222 - RNA, 19 nt, Artificial Sequence
  Description of Artificial Sequence: Synthetic oligonucleotide
  Sense strand starting at position 2327 of SEQ ID NO: 915444
uuagguugccauggagaaa

SEQ ID NO: 1080223 - RNA, 19 nt, Artificial Sequence
  Description of Artificial Sequence: Synthetic oligonucleotide
  Antisense strand to SEQ ID NO: 1080222
uuucuccauggcaaccuaa

SEQ ID NO: 1080224 - RNA, 19 nt, Artificial Sequence
  Description of Artificial Sequence: Synthetic oligonucleotide
  Sense strand starting at position 2348 of SEQ ID NO: 915444
augccaugucuccauggaa

SEQ ID NO: 1080225 - RNA, 19 nt, Artificial Sequence
  Description of Artificial Sequence: Synthetic oligonucleotide
  Antisense strand to SEQ ID NO: 1080224
uuccauggagacauggcau

SEQ ID NO: 1080226 - RNA, 19 nt, Artificial Sequence
  Description of Artificial Sequence: Synthetic oligonucleotide
  Sense strand starting at position 2403 of SEQ ID NO: 915444
uucugacacucagugcuaa

SEQ ID NO: 1080227 - RNA, 19 nt, Artificial Sequence
  Description of Artificial Sequence: Synthetic oligonucleotide
  Antisense strand to SEQ ID NO: 1080226
uuagcacugagugucagaa

SEQ ID NO: 1080228 - RNA, 19 nt, Artificial Sequence
  Description of Artificial Sequence: Synthetic oligonucleotide
  Sense strand starting at position 2437 of SEQ ID NO: 915444
cugugaggucgucagcaca

SEQ ID NO: 1080229 - RNA, 19 nt, Artificial Sequence
  Description of Artificial Sequence: Synthetic oligonucleotide
  Antisense strand to SEQ ID NO: 1080228
ugugcugacgaccucacag

SEQ ID NO: 1080230 - RNA, 19 nt, Artificial Sequence
  Description of Artificial Sequence: Synthetic oligonucleotide
  Sense strand starting at position 2585 of SEQ ID NO: 915444
gcacucucccggugccaua

SEQ ID NO: 1080231 - RNA, 19 nt, Artificial Sequence
  Description of Artificial Sequence: Synthetic oligonucleotide
  Antisense strand to SEQ ID NO: 1080230
uauggcaccgggagagugc

SEQ ID NO: 1080232 - RNA, 19 nt, Artificial Sequence
  Description of Artificial Sequence: Synthetic oligonucleotide
  Sense strand starting at position 2692 of SEQ ID NO: 915444
uagugugaggaguggcaau

SEQ ID NO: 1080233 - RNA, 19 nt, Artificial Sequence
  Description of Artificial Sequence: Synthetic oligonucleotide
  Antisense strand to SEQ ID NO: 1080232
auugccacuccucacacua

SEQ ID NO: 1080234 - RNA, 19 nt, Artificial Sequence
  Description of Artificial Sequence: Synthetic oligonucleotide
  Sense strand starting at position 2757 of SEQ ID NO: 915444
agcccugauucucuugcaa

SEQ ID NO: 1080235 - RNA, 19 nt, Artificial Sequence
  Description of Artificial Sequence: Synthetic oligonucleotide
  Antisense strand to SEQ ID NO: 1080234
uugcaagagaaucagggcu

SEQ ID NO: 1080236 - RNA, 19 nt, Artificial Sequence
  Description of Artificial Sequence: Synthetic oligonucleotide
  Sense strand starting at position 2761 of SEQ ID NO: 915444
cugauucucuugcaaggua

SEQ ID NO: 1080237 - RNA, 19 nt, Artificial Sequence
  Description of Artificial Sequence: Synthetic oligonucleotide
  Antisense strand to SEQ ID NO: 1080236
uaccuugcaagagaaucag

SEQ ID NO: 1080238 - RNA, 19 nt, Artificial Sequence
  Description of Artificial Sequence: Synthetic oligonucleotide
  Sense strand starting at position 2764 of SEQ ID NO: 915444
auucucuugcaagguaaau

SEQ ID NO: 1080239 - RNA, 19 nt, Artificial Sequence
  Description of Artificial Sequence: Synthetic oligonucleotide
  Antisense strand to SEQ ID NO: 1080238
auuuaccuugcaagagaau

SEQ ID NO: 1080240 - RNA, 19 nt, Artificial Sequence
  Description of Artificial Sequence: Synthetic oligonucleotide
  Sense strand starting at position 2833 of SEQ ID NO: 915444
guccuuggaaucugagaag

SEQ ID NO: 1080241 - RNA, 19 nt, Artificial Sequence
  Description of Artificial Sequence: Synthetic oligonucleotide
  Antisense strand to SEQ ID NO: 1080240
cuucucagauuccaaggac

SEQ ID NO: 1080242 - RNA, 19 nt, Artificial Sequence
  Description of Artificial Sequence: Synthetic oligonucleotide
  Sense strand starting at position 2889 of SEQ ID NO: 915444
cuggcaucuugccuccaga

SEQ ID NO: 1080243 - RNA, 19 nt, Artificial Sequence
  Description of Artificial Sequence: Synthetic oligonucleotide
  Antisense strand to SEQ ID NO: 1080242
ucuggaggcaagaugccag

SEQ ID NO: 1080244 - RNA, 19 nt, Artificial Sequence
  Description of Artificial Sequence: Synthetic oligonucleotide
  Sense strand starting at position 2929 of SEQ ID NO: 915444
cccagauaaucacgucuga

SEQ ID NO: 1080245 - RNA, 19 nt, Artificial Sequence
  Description of Artificial Sequence: Synthetic oligonucleotide
  Antisense strand to SEQ ID NO: 1080244
ucagacgugauuaucuggg

SEQ ID NO: 1080246 - RNA, 19 nt, Artificial Sequence
  Description of Artificial Sequence: Synthetic oligonucleotide
  Sense strand starting at position 2933 of SEQ ID NO: 915444
gauaaucacgucugacuca

SEQ ID NO: 1080247 - RNA, 19 nt, Artificial Sequence
  Description of Artificial Sequence: Synthetic oligonucleotide
  Antisense strand to SEQ ID NO: 1080246
ugagucagacgugauuauc

SEQ ID NO: 1080248 - RNA, 19 nt, Artificial Sequence
  Description of Artificial Sequence: Synthetic oligonucleotide
  Sense strand starting at position 2938 of SEQ ID NO: 915444
ucacgucugacucagaguu

SEQ ID NO: 1080249 - RNA, 19 nt, Artificial Sequence
  Description of Artificial Sequence: Synthetic oligonucleotide
  Antisense strand to SEQ ID NO: 1080248
aacucugagucagacguga

SEQ ID NO: 1080250 - RNA, 19 nt, Artificial Sequence
  Description of Artificial Sequence: Synthetic oligonucleotide
  Sense strand starting at position 3292 of SEQ ID NO: 915444
acgagaauccugggugcag

SEQ ID NO: 1080251 - RNA, 19 nt, Artificial Sequence
  Description of Artificial Sequence: Synthetic oligonucleotide
  Antisense strand to SEQ ID NO: 1080250
cugcacccaggauucucgu

SEQ ID NO: 1080252 - RNA, 19 nt, Artificial Sequence
  Description of Artificial Sequence: Synthetic oligonucleotide
  Sense strand starting at position 3293 of SEQ ID NO: 915444
cgagaauccugggugcagu

SEQ ID NO: 1080253 - RNA, 19 nt, Artificial Sequence
  Description of Artificial Sequence: Synthetic oligonucleotide
  Antisense strand to SEQ ID NO: 1080252
acugcacccaggauucucg

SEQ ID NO: 1080254 - RNA, 19 nt, Artificial Sequence
  Description of Artificial Sequence: Synthetic oligonucleotide
  Sense strand starting at position 3350 of SEQ ID NO: 915444
gggucaagguccugugcau

SEQ ID NO: 1080255 - RNA, 19 nt, Artificial Sequence
  Description of Artificial Sequence: Synthetic oligonucleotide
  Antisense strand to SEQ ID NO: 1080254
augcacaggaccuugaccc

SEQ ID NO: 1080256 - RNA, 19 nt, Artificial Sequence
  Description of Artificial Sequence: Synthetic oligonucleotide
  Sense strand starting at position 3362 of SEQ ID NO: 915444
ugugcauaugugggaagaa

SEQ ID NO: 1080257 - RNA, 19 nt, Artificial Sequence
  Description of Artificial Sequence: Synthetic oligonucleotide
  Antisense strand to SEQ ID NO: 1080256
uucuucccacauaugcaca

SEQ ID NO: 1080258 - RNA, 19 nt, Artificial Sequence
  Description of Artificial Sequence: Synthetic oligonucleotide
  Sense strand starting at position 3363 of SEQ ID NO: 915444
gugcauaugugggaagaag

SEQ ID NO: 1080259 - RNA, 19 nt, Artificial Sequence
  Description of Artificial Sequence: Synthetic oligonucleotide
  Antisense strand to SEQ ID NO: 1080258
cuucuucccacauaugcac

SEQ ID NO: 1080260 - RNA, 19 nt, Artificial Sequence
  Description of Artificial Sequence: Synthetic oligonucleotide
  Sense strand starting at position 3540 of SEQ ID NO: 915444
gguuccugcuccucaaacu

SEQ ID NO: 1080261 - RNA, 19 nt, Artificial Sequence
  Description of Artificial Sequence: Synthetic oligonucleotide
  Antisense strand to SEQ ID NO: 1080260
aguuugaggagcaggaacc

SEQ ID NO: 1080262 - RNA, 19 nt, Artificial Sequence
  Description of Artificial Sequence: Synthetic oligonucleotide
  Sense strand starting at position 3599 of SEQ ID NO: 915444
agccacugauucugacaca

SEQ ID NO: 1080263 - RNA, 19 nt, Artificial Sequence
  Description of Artificial Sequence: Synthetic oligonucleotide
  Antisense strand to SEQ ID NO: 1080262
ugugucagaaucaguggcu

SEQ ID NO: 1080264 - RNA, 19 nt, Artificial Sequence
  Description of Artificial Sequence: Synthetic oligonucleotide
  Sense strand starting at position 655 of SEQ ID NO: 915445
uucuauaugccagagccau

SEQ ID NO: 1080265 - RNA, 19 nt, Artificial Sequence
  Description of Artificial Sequence: Synthetic oligonucleotide
  Antisense strand to SEQ ID NO: 1080264
auggcucuggcauauagaa

SEQ ID NO: 1080266 - RNA, 19 nt, Artificial Sequence
  Description of Artificial Sequence: Synthetic oligonucleotide
  Sense strand starting at position 663 of SEQ ID NO: 915445
gccagagccaugcaaaguu

SEQ ID NO: 1080267 - RNA, 19 nt, Artificial Sequence
  Description of Artificial Sequence: Synthetic oligonucleotide
  Antisense strand to SEQ ID NO: 1080266
aacuuugcauggcucuggc

SEQ ID NO: 1080268 - RNA, 19 nt, Artificial Sequence
  Description of Artificial Sequence: Synthetic oligonucleotide
  Sense strand starting at position 783 of SEQ ID NO: 915445
guuccaaagagcugguuua

SEQ ID NO: 1080269 - RNA, 19 nt, Artificial Sequence
  Description of Artificial Sequence: Synthetic oligonucleotide
  Antisense strand to SEQ ID NO: 1080268
uaaaccagcucuuuggaac

SEQ ID NO: 1080270 - RNA, 19 nt, Artificial Sequence
  Description of Artificial Sequence: Synthetic oligonucleotide
  Sense strand starting at position 797 of SEQ ID NO: 915445
guuuacugcugugaaggga

SEQ ID NO: 1080271 - RNA, 19 nt, Artificial Sequence
  Description of Artificial Sequence: Synthetic oligonucleotide
  Antisense strand to SEQ ID NO: 1080270
ucccuucacagcaguaaac

SEQ ID NO: 1080272 - RNA, 19 nt, Artificial Sequence
  Description of Artificial Sequence: Synthetic oligonucleotide
  Sense strand starting at position 855 of SEQ ID NO: 915445
ggcaccugugcgugaaucu

SEQ ID NO: 1080273 - RNA, 19 nt, Artificial Sequence
  Description of Artificial Sequence: Synthetic oligonucleotide
  Antisense strand to SEQ ID NO: 1080272
agauucacgcacaggugcc

SEQ ID NO: 1080274 - RNA, 19 nt, Artificial Sequence
  Description of Artificial Sequence: Synthetic oligonucleotide
  Sense strand starting at position 971 of SEQ ID NO: 915445
uagacaugcuaggaagagu

SEQ ID NO: 1080275 - RNA, 19 nt, Artificial Sequence
  Description of Artificial Sequence: Synthetic oligonucleotide
  Antisense strand to SEQ ID NO: 1080274
acucuuccuagcaugucua

SEQ ID NO: 1080276 - RNA, 19 nt, Artificial Sequence
  Description of Artificial Sequence: Synthetic oligonucleotide
  Sense strand starting at position 984 of SEQ ID NO: 915445
aagaguggucagggagcua

SEQ ID NO: 1080277 - RNA, 19 nt, Artificial Sequence
  Description of Artificial Sequence: Synthetic oligonucleotide
  Antisense strand to SEQ ID NO: 1080276
uagcucccugaccacucuu

SEQ ID NO: 1080278 - RNA, 19 nt, Artificial Sequence
  Description of Artificial Sequence: Synthetic oligonucleotide
  Sense strand starting at position 1929 of SEQ ID NO: 915445
ggagcuucacgggaagugu

SEQ ID NO: 1080279 - RNA, 19 nt, Artificial Sequence
  Description of Artificial Sequence: Synthetic oligonucleotide
  Antisense strand to SEQ ID NO: 1080278
acacuucccgugaagcucc

SEQ ID NO: 1080280 - RNA, 19 nt, Artificial Sequence
  Description of Artificial Sequence: Synthetic oligonucleotide
  Sense strand starting at position 1976 of SEQ ID NO: 915445
ggguucaaguccuaggguu

SEQ ID NO: 1080281 - RNA, 19 nt, Artificial Sequence
  Description of Artificial Sequence: Synthetic oligonucleotide
  Antisense strand to SEQ ID NO: 1080280
aacccuaggacuugaaccc

SEQ ID NO: 1080282 - RNA, 19 nt, Artificial Sequence
  Description of Artificial Sequence: Synthetic oligonucleotide
  Sense strand starting at position 2505 of SEQ ID NO: 915445
uggcacaugucguuguaaa

SEQ ID NO: 1080283 - RNA, 19 nt, Artificial Sequence
  Description of Artificial Sequence: Synthetic oligonucleotide
  Antisense strand to SEQ ID NO: 1080282
uuuacaacgacaugugcca

SEQ ID NO: 1080284 - RNA, 19 nt, Artificial Sequence
  Description of Artificial Sequence: Synthetic oligonucleotide
  Sense strand starting at position 2559 of SEQ ID NO: 915445
uugauuaguagguagguua

SEQ ID NO: 1080285 - RNA, 19 nt, Artificial Sequence
  Description of Artificial Sequence: Synthetic oligonucleotide
  Antisense strand to SEQ ID NO: 1080284
uaaccuaccuacuaaucaa

SEQ ID NO: 1080286 - RNA, 19 nt, Artificial Sequence
  Description of Artificial Sequence: Synthetic oligonucleotide
  Sense strand starting at position 2584 of SEQ ID NO: 915445
uuuaguuuauuagggacau

SEQ ID NO: 1080287 - RNA, 19 nt, Artificial Sequence
  Description of Artificial Sequence: Synthetic oligonucleotide
  Antisense strand to SEQ ID NO: 1080286
augucccuaauaaacuaaa

SEQ ID NO: 1080288 - RNA, 19 nt, Artificial Sequence
  Description of Artificial Sequence: Synthetic oligonucleotide
  Sense strand starting at position 2585 of SEQ ID NO: 915445
uuaguuuauuagggacauc

SEQ ID NO: 1080289 - RNA, 19 nt, Artificial Sequence
  Description of Artificial Sequence: Synthetic oligonucleotide
  Antisense strand to SEQ ID NO: 1080288
gaugucccuaauaaacuaa

SEQ ID NO: 1080290 - RNA, 19 nt, Artificial Sequence
  Description of Artificial Sequence: Synthetic oligonucleotide
  Sense strand starting at position 2649 of SEQ ID NO: 915445
cuugcaaaccuguguaaag

SEQ ID NO: 1080291 - RNA, 19 nt, Artificial Sequence
  Description of Artificial Sequence: Synthetic oligonucleotide
  Antisense strand to SEQ ID NO: 1080290
cuuuacacagguuugcaag

SEQ ID NO: 1080292 - RNA, 19 nt, Artificial Sequence
  Description of Artificial Sequence: Synthetic oligonucleotide
  Sense strand starting at position 2749 of SEQ ID NO: 915445
gugguuugauuggcucacu

SEQ ID NO: 1080293 - RNA, 19 nt, Artificial Sequence
  Description of Artificial Sequence: Synthetic oligonucleotide
  Antisense strand to SEQ ID NO: 1080292
agugagccaaucaaaccac

SEQ ID NO: 1080294 - RNA, 19 nt, Artificial Sequence
  Description of Artificial Sequence: Synthetic oligonucleotide
  Sense strand starting at position 2752 of SEQ ID NO: 915445
guuugauuggcucacugca

SEQ ID NO: 1080295 - RNA, 19 nt, Artificial Sequence
  Description of Artificial Sequence: Synthetic oligonucleotide
  Antisense strand to SEQ ID NO: 1080294
ugcagugagccaaucaaac

SEQ ID NO: 1080296 - RNA, 19 nt, Artificial Sequence
  Description of Artificial Sequence: Synthetic oligonucleotide
  Sense strand starting at position 2946 of SEQ ID NO: 915445
cccaaaucacgcuggaauu

SEQ ID NO: 1080297 - RNA, 19 nt, Artificial Sequence
  Description of Artificial Sequence: Synthetic oligonucleotide
  Antisense strand to SEQ ID NO: 1080296
aauuccagcgugauuuggg

SEQ ID NO: 1080298 - RNA, 19 nt, Artificial Sequence
  Description of Artificial Sequence: Synthetic oligonucleotide
  Sense strand starting at position 2947 of SEQ ID NO: 915445
ccaaaucacgcuggaauua

SEQ ID NO: 1080299 - RNA, 19 nt, Artificial Sequence
  Description of Artificial Sequence: Synthetic oligonucleotide
  Antisense strand to SEQ ID NO: 1080298
uaauuccagcgugauuugg

SEQ ID NO: 1080300 - RNA, 19 nt, Artificial Sequence
  Description of Artificial Sequence: Synthetic oligonucleotide
  Sense strand starting at position 3201 of SEQ ID NO: 915445
gggagcuggccuugguauu

SEQ ID NO: 1080301 - RNA, 19 nt, Artificial Sequence
  Description of Artificial Sequence: Synthetic oligonucleotide
  Antisense strand to SEQ ID NO: 1080300
aauaccaaggccagcuccc

SEQ ID NO: 1080302 - RNA, 19 nt, Artificial Sequence
  Description of Artificial Sequence: Synthetic oligonucleotide
  Sense strand starting at position 3212 of SEQ ID NO: 915445
uugguauucuguugaauau

SEQ ID NO: 1080303 - RNA, 19 nt, Artificial Sequence
  Description of Artificial Sequence: Synthetic oligonucleotide
  Antisense strand to SEQ ID NO: 1080302
auauucaacagaauaccaa

SEQ ID NO: 1080304 - RNA, 19 nt, Artificial Sequence
  Description of Artificial Sequence: Synthetic oligonucleotide
  Sense strand starting at position 3316 of SEQ ID NO: 915445
acaucugaaugcuggcaaa

SEQ ID NO: 1080305 - RNA, 19 nt, Artificial Sequence
  Description of Artificial Sequence: Synthetic oligonucleotide
  Antisense strand to SEQ ID NO: 1080304
uuugccagcauucagaugu

SEQ ID NO: 1080306 - RNA, 19 nt, Artificial Sequence
  Description of Artificial Sequence: Synthetic oligonucleotide
  Sense strand starting at position 3319 of SEQ ID NO: 915445
ucugaaugcuggcaaaggu

SEQ ID NO: 1080307 - RNA, 19 nt, Artificial Sequence
  Description of Artificial Sequence: Synthetic oligonucleotide
  Antisense strand to SEQ ID NO: 1080306
accuuugccagcauucaga

SEQ ID NO: 1080308 - RNA, 19 nt, Artificial Sequence
  Description of Artificial Sequence: Synthetic oligonucleotide
  Sense strand starting at position 3332 of SEQ ID NO: 915445
aaaggugaacacuguccaa

SEQ ID NO: 1080309 - RNA, 19 nt, Artificial Sequence
  Description of Artificial Sequence: Synthetic oligonucleotide
  Antisense strand to SEQ ID NO: 1080308
uuggacaguguucaccuuu

SEQ ID NO: 1080310 - RNA, 19 nt, Artificial Sequence
  Description of Artificial Sequence: Synthetic oligonucleotide
  Sense strand starting at position 3391 of SEQ ID NO: 915445
gagugacuguuguuuccuu

SEQ ID NO: 1080311 - RNA, 19 nt, Artificial Sequence
  Description of Artificial Sequence: Synthetic oligonucleotide
  Antisense strand to SEQ ID NO: 1080310
aaggaaacaacagucacuc

SEQ ID NO: 1080312 - RNA, 19 nt, Artificial Sequence
  Description of Artificial Sequence: Synthetic oligonucleotide
  Sense strand starting at position 3392 of SEQ ID NO: 915445
agugacuguuguuuccuua

SEQ ID NO: 1080313 - RNA, 19 nt, Artificial Sequence
  Description of Artificial Sequence: Synthetic oligonucleotide
  Antisense strand to SEQ ID NO: 1080312
uaaggaaacaacagucacu

SEQ ID NO: 1080314 - RNA, 19 nt, Artificial Sequence
  Description of Artificial Sequence: Synthetic oligonucleotide
  Sense strand starting at position 3396 of SEQ ID NO: 915445
acuguuguuuccuuaccaa

SEQ ID NO: 1080315 - RNA, 19 nt, Artificial Sequence
  Description of Artificial Sequence: Synthetic oligonucleotide
  Antisense strand to SEQ ID NO: 1080314
uugguaaggaaacaacagu

SEQ ID NO: 1080316 - RNA, 19 nt, Artificial Sequence
  Description of Artificial Sequence: Synthetic oligonucleotide
  Sense strand starting at position 3399 of SEQ ID NO: 915445
guuguuuccuuaccaauua

SEQ ID NO: 1080317 - RNA, 19 nt, Artificial Sequence
  Description of Artificial Sequence: Synthetic oligonucleotide
  Antisense strand to SEQ ID NO: 1080316
uaauugguaaggaaacaac

SEQ ID NO: 1080318 - RNA, 19 nt, Artificial Sequence
  Description of Artificial Sequence: Synthetic oligonucleotide
  Sense strand starting at position 3452 of SEQ ID NO: 915445
gggcaagacucauuaagau

SEQ ID NO: 1080319 - RNA, 19 nt, Artificial Sequence
  Description of Artificial Sequence: Synthetic oligonucleotide
  Antisense strand to SEQ ID NO: 1080318
aucuuaaugagucuugccc

SEQ ID NO: 1080320 - RNA, 19 nt, Artificial Sequence
  Description of Artificial Sequence: Synthetic oligonucleotide
  Sense strand starting at position 3461 of SEQ ID NO: 915445
ucauuaagauaguccguca

SEQ ID NO: 1080321 - RNA, 19 nt, Artificial Sequence
  Description of Artificial Sequence: Synthetic oligonucleotide
  Antisense strand to SEQ ID NO: 1080320
ugacggacuaucuuaauga

SEQ ID NO: 1080322 - RNA, 19 nt, Artificial Sequence
  Description of Artificial Sequence: Synthetic oligonucleotide
  Sense strand starting at position 3464 of SEQ ID NO: 915445
uuaagauaguccgucauag

SEQ ID NO: 1080323 - RNA, 19 nt, Artificial Sequence
  Description of Artificial Sequence: Synthetic oligonucleotide
  Antisense strand to SEQ ID NO: 1080322
cuaugacggacuaucuuaa

SEQ ID NO: 1080324 - RNA, 19 nt, Artificial Sequence
  Description of Artificial Sequence: Synthetic oligonucleotide
  Sense strand starting at position 3466 of SEQ ID NO: 915445
aagauaguccgucauagac

SEQ ID NO: 1080325 - RNA, 19 nt, Artificial Sequence
  Description of Artificial Sequence: Synthetic oligonucleotide
  Antisense strand to SEQ ID NO: 1080324
gucuaugacggacuaucuu

SEQ ID NO: 1080326 - RNA, 19 nt, Artificial Sequence
  Description of Artificial Sequence: Synthetic oligonucleotide
  Sense strand starting at position 3468 of SEQ ID NO: 915445
gauaguccgucauagacau

SEQ ID NO: 1080327 - RNA, 19 nt, Artificial Sequence
  Description of Artificial Sequence: Synthetic oligonucleotide
  Antisense strand to SEQ ID NO: 1080326
augucuaugacggacuauc

SEQ ID NO: 1080328 - RNA, 19 nt, Artificial Sequence
  Description of Artificial Sequence: Synthetic oligonucleotide
  Sense strand starting at position 3561 of SEQ ID NO: 915445
gggcacaaauccuccuaua

SEQ ID NO: 1080329 - RNA, 19 nt, Artificial Sequence
  Description of Artificial Sequence: Synthetic oligonucleotide
  Antisense strand to SEQ ID NO: 1080328
uauaggaggauuugugccc

SEQ ID NO: 1080330 - RNA, 19 nt, Artificial Sequence
  Description of Artificial Sequence: Synthetic oligonucleotide
  Sense strand starting at position 3611 of SEQ ID NO: 915445
cccagagugcaggaguaau

SEQ ID NO: 1080331 - RNA, 19 nt, Artificial Sequence
  Description of Artificial Sequence: Synthetic oligonucleotide
  Antisense strand to SEQ ID NO: 1080330
auuacuccugcacucuggg

SEQ ID NO: 1080332 - RNA, 19 nt, Artificial Sequence
  Description of Artificial Sequence: Synthetic oligonucleotide
  Sense strand starting at position 3672 of SEQ ID NO: 915445
ucacuagaguggcagauua

SEQ ID NO: 1080333 - RNA, 19 nt, Artificial Sequence
  Description of Artificial Sequence: Synthetic oligonucleotide
  Antisense strand to SEQ ID NO: 1080332
uaaucugccacucuaguga

SEQ ID NO: 1080334 - RNA, 19 nt, Artificial Sequence
  Description of Artificial Sequence: Synthetic oligonucleotide
  Sense strand starting at position 3755 of SEQ ID NO: 915445
cuuggauaucuguacaguu

SEQ ID NO: 1080335 - RNA, 19 nt, Artificial Sequence
  Description of Artificial Sequence: Synthetic oligonucleotide
  Antisense strand to SEQ ID NO: 1080334
aacuguacagauauccaag

SEQ ID NO: 1080336 - RNA, 19 nt, Artificial Sequence
  Description of Artificial Sequence: Synthetic oligonucleotide
  Sense strand starting at position 3757 of SEQ ID NO: 915445
uggauaucuguacaguugu

SEQ ID NO: 1080337 - RNA, 19 nt, Artificial Sequence
  Description of Artificial Sequence: Synthetic oligonucleotide
  Antisense strand to SEQ ID NO: 1080336
acaacuguacagauaucca

SEQ ID NO: 1080338 - RNA, 19 nt, Artificial Sequence
  Description of Artificial Sequence: Synthetic oligonucleotide
  Sense strand starting at position 3819 of SEQ ID NO: 915445
guuuauuucuucuuagcuu

SEQ ID NO: 1080339 - RNA, 19 nt, Artificial Sequence
  Description of Artificial Sequence: Synthetic oligonucleotide
  Antisense strand to SEQ ID NO: 1080338
aagcuaagaagaaauaaac

SEQ ID NO: 1080340 - RNA, 19 nt, Artificial Sequence
  Description of Artificial Sequence: Synthetic oligonucleotide
  Sense strand starting at position 3849 of SEQ ID NO: 915445
uguuucuauuaagaacuga

SEQ ID NO: 1080341 - RNA, 19 nt, Artificial Sequence
  Description of Artificial Sequence: Synthetic oligonucleotide
  Antisense strand to SEQ ID NO: 1080340
ucaguucuuaauagaaaca

SEQ ID NO: 1080342 - RNA, 19 nt, Artificial Sequence
  Description of Artificial Sequence: Synthetic oligonucleotide
  Sense strand starting at position 3971 of SEQ ID NO: 915445
uagcaagacuccguuccua

SEQ ID NO: 1080343 - RNA, 19 nt, Artificial Sequence
  Description of Artificial Sequence: Synthetic oligonucleotide
  Antisense strand to SEQ ID NO: 1080342
uaggaacggagucuugcua

SEQ ID NO: 1080344 - RNA, 19 nt, Artificial Sequence
  Description of Artificial Sequence: Synthetic oligonucleotide
  Sense strand starting at position 75 of SEQ ID NO: 915446
agccaacuguaaucacaga

SEQ ID NO: 1080345 - RNA, 19 nt, Artificial Sequence
  Description of Artificial Sequence: Synthetic oligonucleotide
  Antisense strand to SEQ ID NO: 1080344
ucugugauuacaguuggcu

SEQ ID NO: 1080346 - RNA, 19 nt, Artificial Sequence
  Description of Artificial Sequence: Synthetic oligonucleotide
  Sense strand starting at position 169 of SEQ ID NO: 915446
accuguagucucuagugau

SEQ ID NO: 1080347 - RNA, 19 nt, Artificial Sequence
  Description of Artificial Sequence: Synthetic oligonucleotide
  Antisense strand to SEQ ID NO: 1080346
aucacuagagacuacaggu

SEQ ID NO: 1080348 - RNA, 19 nt, Artificial Sequence
  Description of Artificial Sequence: Synthetic oligonucleotide
  Sense strand starting at position 181 of SEQ ID NO: 915446
uagugauugggagguagaa

SEQ ID NO: 1080349 - RNA, 19 nt, Artificial Sequence
  Description of Artificial Sequence: Synthetic oligonucleotide
  Antisense strand to SEQ ID NO: 1080348
uucuaccucccaaucacua

SEQ ID NO: 1080350 - RNA, 19 nt, Artificial Sequence
  Description of Artificial Sequence: Synthetic oligonucleotide
  Sense strand starting at position 232 of SEQ ID NO: 915446
gugaucaccugucaauuuc

SEQ ID NO: 1080351 - RNA, 19 nt, Artificial Sequence
  Description of Artificial Sequence: Synthetic oligonucleotide
  Antisense strand to SEQ ID NO: 1080350
gaaauugacaggugaucac

SEQ ID NO: 1080352 - RNA, 19 nt, Artificial Sequence
  Description of Artificial Sequence: Synthetic oligonucleotide
  Sense strand starting at position 242 of SEQ ID NO: 915446
gucaauuucucagucccuu

SEQ ID NO: 1080353 - RNA, 19 nt, Artificial Sequence
  Description of Artificial Sequence: Synthetic oligonucleotide
  Antisense strand to SEQ ID NO: 1080352
aagggacugagaaauugac

SEQ ID NO: 1080354 - RNA, 19 nt, Artificial Sequence
  Description of Artificial Sequence: Synthetic oligonucleotide
  Sense strand starting at position 448 of SEQ ID NO: 915446
cagagaucucacugguucu

SEQ ID NO: 1080355 - RNA, 19 nt, Artificial Sequence
  Description of Artificial Sequence: Synthetic oligonucleotide
  Antisense strand to SEQ ID NO: 1080354
agaaccagugagaucucug

SEQ ID NO: 1080356 - RNA, 19 nt, Artificial Sequence
  Description of Artificial Sequence: Synthetic oligonucleotide
  Sense strand starting at position 459 of SEQ ID NO: 915446
cugguucuaucucugacaa

SEQ ID NO: 1080357 - RNA, 19 nt, Artificial Sequence
  Description of Artificial Sequence: Synthetic oligonucleotide
  Antisense strand to SEQ ID NO: 1080356
uugucagagauagaaccag

SEQ ID NO: 1080358 - RNA, 19 nt, Artificial Sequence
  Description of Artificial Sequence: Synthetic oligonucleotide
  Sense strand starting at position 460 of SEQ ID NO: 915446
ugguucuaucucugacaac

SEQ ID NO: 1080359 - RNA, 19 nt, Artificial Sequence
  Description of Artificial Sequence: Synthetic oligonucleotide
  Antisense strand to SEQ ID NO: 1080358
guugucagagauagaacca

SEQ ID NO: 1080360 - RNA, 19 nt, Artificial Sequence
  Description of Artificial Sequence: Synthetic oligonucleotide
  Sense strand starting at position 490 of SEQ ID NO: 915446
cuccuauuccugugauguc

SEQ ID NO: 1080361 - RNA, 19 nt, Artificial Sequence
  Description of Artificial Sequence: Synthetic oligonucleotide
  Antisense strand to SEQ ID NO: 1080360
gacaucacaggaauaggag

SEQ ID NO: 1080362 - RNA, 19 nt, Artificial Sequence
  Description of Artificial Sequence: Synthetic oligonucleotide
  Sense strand starting at position 499 of SEQ ID NO: 915446
cugugaugucuuugcccau

SEQ ID NO: 1080363 - RNA, 19 nt, Artificial Sequence
  Description of Artificial Sequence: Synthetic oligonucleotide
  Antisense strand to SEQ ID NO: 1080362
augggcaaagacaucacag

SEQ ID NO: 1080364 - RNA, 19 nt, Artificial Sequence
  Description of Artificial Sequence: Synthetic oligonucleotide
  Sense strand starting at position 500 of SEQ ID NO: 915446
ugugaugucuuugcccaua

SEQ ID NO: 1080365 - RNA, 19 nt, Artificial Sequence
  Description of Artificial Sequence: Synthetic oligonucleotide
  Antisense strand to SEQ ID NO: 1080364
uaugggcaaagacaucaca

SEQ ID NO: 1080366 - RNA, 19 nt, Artificial Sequence
  Description of Artificial Sequence: Synthetic oligonucleotide
  Sense strand starting at position 502 of SEQ ID NO: 915446
ugaugucuuugcccauaug

SEQ ID NO: 1080367 - RNA, 19 nt, Artificial Sequence
  Description of Artificial Sequence: Synthetic oligonucleotide
  Antisense strand to SEQ ID NO: 1080366
cauaugggcaaagacauca

SEQ ID NO: 1080368 - RNA, 19 nt, Artificial Sequence
  Description of Artificial Sequence: Synthetic oligonucleotide
  Sense strand starting at position 522 of SEQ ID NO: 915446
uggcaugugcaagaucaca

SEQ ID NO: 1080369 - RNA, 19 nt, Artificial Sequence
  Description of Artificial Sequence: Synthetic oligonucleotide
  Antisense strand to SEQ ID NO: 1080368
ugugaucuugcacaugcca

SEQ ID NO: 1080370 - RNA, 19 nt, Artificial Sequence
  Description of Artificial Sequence: Synthetic oligonucleotide
  Sense strand starting at position 699 of SEQ ID NO: 915446
gccuauuagauagguaaag

SEQ ID NO: 1080371 - RNA, 19 nt, Artificial Sequence
  Description of Artificial Sequence: Synthetic oligonucleotide
  Antisense strand to SEQ ID NO: 1080370
cuuuaccuaucuaauaggc

SEQ ID NO: 1080372 - RNA, 19 nt, Artificial Sequence
  Description of Artificial Sequence: Synthetic oligonucleotide
  Sense strand starting at position 877 of SEQ ID NO: 915446
ugcaaugacuagucuucuu

SEQ ID NO: 1080373 - RNA, 19 nt, Artificial Sequence
  Description of Artificial Sequence: Synthetic oligonucleotide
  Antisense strand to SEQ ID NO: 1080372
aagaagacuagucauugca

SEQ ID NO: 1080374 - RNA, 19 nt, Artificial Sequence
  Description of Artificial Sequence: Synthetic oligonucleotide
  Sense strand starting at position 999 of SEQ ID NO: 915446
ugaauaaaugcaugaauuc

SEQ ID NO: 1080375 - RNA, 19 nt, Artificial Sequence
  Description of Artificial Sequence: Synthetic oligonucleotide
  Antisense strand to SEQ ID NO: 1080374
gaauucaugcauuuauuca

SEQ ID NO: 1080376 - RNA, 19 nt, Artificial Sequence
  Description of Artificial Sequence: Synthetic oligonucleotide
  Sense strand starting at position 1011 of SEQ ID NO: 915446
ugaauuccggcauacaauc

SEQ ID NO: 1080377 - RNA, 19 nt, Artificial Sequence
  Description of Artificial Sequence: Synthetic oligonucleotide
  Antisense strand to SEQ ID NO: 1080376
gauuguaugccggaauuca

SEQ ID NO: 1080378 - RNA, 19 nt, Artificial Sequence
  Description of Artificial Sequence: Synthetic oligonucleotide
  Sense strand starting at position 1069 of SEQ ID NO: 915446
cuuuacugagcaugcauua

SEQ ID NO: 1080379 - RNA, 19 nt, Artificial Sequence
  Description of Artificial Sequence: Synthetic oligonucleotide
  Antisense strand to SEQ ID NO: 1080378
uaaugcaugcucaguaaag

SEQ ID NO: 1080380 - RNA, 19 nt, Artificial Sequence
  Description of Artificial Sequence: Synthetic oligonucleotide
  Sense strand starting at position 1088 of SEQ ID NO: 915446
gauacaaagucuuagaaug

SEQ ID NO: 1080381 - RNA, 19 nt, Artificial Sequence
  Description of Artificial Sequence: Synthetic oligonucleotide
  Antisense strand to SEQ ID NO: 1080380
cauucuaagacuuuguauc

SEQ ID NO: 1080382 - RNA, 19 nt, Artificial Sequence
  Description of Artificial Sequence: Synthetic oligonucleotide
  Sense strand starting at position 1090 of SEQ ID NO: 915446
uacaaagucuuagaaugga

SEQ ID NO: 1080383 - RNA, 19 nt, Artificial Sequence
  Description of Artificial Sequence: Synthetic oligonucleotide
  Antisense strand to SEQ ID NO: 1080382
uccauucuaagacuuugua

SEQ ID NO: 1080384 - RNA, 19 nt, Artificial Sequence
  Description of Artificial Sequence: Synthetic oligonucleotide
  Sense strand starting at position 1217 of SEQ ID NO: 915446
aguccucucccacaguaga

SEQ ID NO: 1080385 - RNA, 19 nt, Artificial Sequence
  Description of Artificial Sequence: Synthetic oligonucleotide
  Antisense strand to SEQ ID NO: 1080384
ucuacugugggagaggacu

SEQ ID NO: 1080386 - RNA, 19 nt, Artificial Sequence
  Description of Artificial Sequence: Synthetic oligonucleotide
  Sense strand starting at position 2056 of SEQ ID NO: 915446
gaggcugacccggaaguuu

SEQ ID NO: 1080387 - RNA, 19 nt, Artificial Sequence
  Description of Artificial Sequence: Synthetic oligonucleotide
  Antisense strand to SEQ ID NO: 1080386
aaacuuccgggucagccuc

SEQ ID NO: 1080388 - RNA, 19 nt, Artificial Sequence
  Description of Artificial Sequence: Synthetic oligonucleotide
  Sense strand starting at position 2089 of SEQ ID NO: 915446
ccacgaaagaguuguagug

SEQ ID NO: 1080389 - RNA, 19 nt, Artificial Sequence
  Description of Artificial Sequence: Synthetic oligonucleotide
  Antisense strand to SEQ ID NO: 1080388
cacuacaacucuuucgugg

SEQ ID NO: 1080390 - RNA, 19 nt, Artificial Sequence
  Description of Artificial Sequence: Synthetic oligonucleotide
  Sense strand starting at position 2095 of SEQ ID NO: 915446
aagaguuguagugagugaa

SEQ ID NO: 1080391 - RNA, 19 nt, Artificial Sequence
  Description of Artificial Sequence: Synthetic oligonucleotide
  Antisense strand to SEQ ID NO: 1080390
uucacucacuacaacucuu

SEQ ID NO: 1080392 - RNA, 19 nt, Artificial Sequence
  Description of Artificial Sequence: Synthetic oligonucleotide
  Sense strand starting at position 2163 of SEQ ID NO: 915446
ccaucuugccucgguagga

SEQ ID NO: 1080393 - RNA, 19 nt, Artificial Sequence
  Description of Artificial Sequence: Synthetic oligonucleotide
  Antisense strand to SEQ ID NO: 1080392
uccuaccgaggcaagaugg

SEQ ID NO: 1080394 - RNA, 19 nt, Artificial Sequence
  Description of Artificial Sequence: Synthetic oligonucleotide
  Sense strand starting at position 2282 of SEQ ID NO: 915446
ggccgaauuggcgggagaa

SEQ ID NO: 1080395 - RNA, 19 nt, Artificial Sequence
  Description of Artificial Sequence: Synthetic oligonucleotide
  Antisense strand to SEQ ID NO: 1080394
uucucccgccaauucggcc

SEQ ID NO: 1080396 - RNA, 19 nt, Artificial Sequence
  Description of Artificial Sequence: Synthetic oligonucleotide
  Sense strand starting at position 2283 of SEQ ID NO: 915446
gccgaauuggcgggagaau

SEQ ID NO: 1080397 - RNA, 19 nt, Artificial Sequence
  Description of Artificial Sequence: Synthetic oligonucleotide
  Antisense strand to SEQ ID NO: 1080396
auucucccgccaauucggc

SEQ ID NO: 1080398 - RNA, 19 nt, Artificial Sequence
  Description of Artificial Sequence: Synthetic oligonucleotide
  Sense strand starting at position 2284 of SEQ ID NO: 915446
ccgaauuggcgggagaaua

SEQ ID NO: 1080399 - RNA, 19 nt, Artificial Sequence
  Description of Artificial Sequence: Synthetic oligonucleotide
  Antisense strand to SEQ ID NO: 1080398
uauucucccgccaauucgg

SEQ ID NO: 1080400 - RNA, 19 nt, Artificial Sequence
  Description of Artificial Sequence: Synthetic oligonucleotide
  Sense strand starting at position 2295 of SEQ ID NO: 915446
ggagaauagguuugguggu

SEQ ID NO: 1080401 - RNA, 19 nt, Artificial Sequence
  Description of Artificial Sequence: Synthetic oligonucleotide
  Antisense strand to SEQ ID NO: 1080400
accaccaaaccuauucucc

SEQ ID NO: 1080402 - RNA, 19 nt, Artificial Sequence
  Description of Artificial Sequence: Synthetic oligonucleotide
  Sense strand starting at position 2301 of SEQ ID NO: 915446
uagguuuggugguccgaga

SEQ ID NO: 1080403 - RNA, 19 nt, Artificial Sequence
  Description of Artificial Sequence: Synthetic oligonucleotide
  Antisense strand to SEQ ID NO: 1080402
ucucggaccaccaaaccua

SEQ ID NO: 1080404 - RNA, 19 nt, Artificial Sequence
  Description of Artificial Sequence: Synthetic oligonucleotide
  Sense strand starting at position 2365 of SEQ ID NO: 915446
ggcguugggauuuguugau

SEQ ID NO: 1080405 - RNA, 19 nt, Artificial Sequence
  Description of Artificial Sequence: Synthetic oligonucleotide
  Antisense strand to SEQ ID NO: 1080404
aucaacaaaucccaacgcc

SEQ ID NO: 1080406 - RNA, 19 nt, Artificial Sequence
  Description of Artificial Sequence: Synthetic oligonucleotide
  Sense strand starting at position 2472 of SEQ ID NO: 915446
gcggcuugagcucccgaaa

SEQ ID NO: 1080407 - RNA, 19 nt, Artificial Sequence
  Description of Artificial Sequence: Synthetic oligonucleotide
  Antisense strand to SEQ ID NO: 1080406
uuucgggagcucaagccgc

SEQ ID NO: 1080408 - RNA, 19 nt, Artificial Sequence
  Description of Artificial Sequence: Synthetic oligonucleotide
  Sense strand starting at position 2528 of SEQ ID NO: 915446
ccacauuccgcgucuuacu

SEQ ID NO: 1080409 - RNA, 19 nt, Artificial Sequence
  Description of Artificial Sequence: Synthetic oligonucleotide
  Antisense strand to SEQ ID NO: 1080408
aguaagacgcggaaugugg

SEQ ID NO: 1080410 - RNA, 19 nt, Artificial Sequence
  Description of Artificial Sequence: Synthetic oligonucleotide
  Sense strand starting at position 2915 of SEQ ID NO: 915446
cggagaauauuguaaauac

SEQ ID NO: 1080411 - RNA, 19 nt, Artificial Sequence
  Description of Artificial Sequence: Synthetic oligonucleotide
  Antisense strand to SEQ ID NO: 1080410
guauuuacaauauucuccg

SEQ ID NO: 1080412 - RNA, 19 nt, Artificial Sequence
  Description of Artificial Sequence: Synthetic oligonucleotide
  Sense strand starting at position 2956 of SEQ ID NO: 915446
gacuacuggcauuaugauu

SEQ ID NO: 1080413 - RNA, 19 nt, Artificial Sequence
  Description of Artificial Sequence: Synthetic oligonucleotide
  Antisense strand to SEQ ID NO: 1080412
aaucauaaugccaguaguc

SEQ ID NO: 1080414 - RNA, 19 nt, Artificial Sequence
  Description of Artificial Sequence: Synthetic oligonucleotide
  Sense strand starting at position 3068 of SEQ ID NO: 915446
agaagcaacuauuaugaau

SEQ ID NO: 1080415 - RNA, 19 nt, Artificial Sequence
  Description of Artificial Sequence: Synthetic oligonucleotide
  Antisense strand to SEQ ID NO: 1080414
auucauaauaguugcuucu

SEQ ID NO: 1080416 - RNA, 19 nt, Artificial Sequence
  Description of Artificial Sequence: Synthetic oligonucleotide
  Sense strand starting at position 3086 of SEQ ID NO: 915446
uuagaauuagcuuguguuc

SEQ ID NO: 1080417 - RNA, 19 nt, Artificial Sequence
  Description of Artificial Sequence: Synthetic oligonucleotide
  Antisense strand to SEQ ID NO: 1080416
gaacacaagcuaauucuaa

SEQ ID NO: 1080418 - RNA, 19 nt, Artificial Sequence
  Description of Artificial Sequence: Synthetic oligonucleotide
  Sense strand starting at position 3127 of SEQ ID NO: 915446
auauguagccaugacuaua

SEQ ID NO: 1080419 - RNA, 19 nt, Artificial Sequence
  Description of Artificial Sequence: Synthetic oligonucleotide
  Antisense strand to SEQ ID NO: 1080418
uauagucauggcuacauau

SEQ ID NO: 1080420 - RNA, 19 nt, Artificial Sequence
  Description of Artificial Sequence: Synthetic oligonucleotide
  Sense strand starting at position 3519 of SEQ ID NO: 915446
cgugauaacugcucacugu

SEQ ID NO: 1080421 - RNA, 19 nt, Artificial Sequence
  Description of Artificial Sequence: Synthetic oligonucleotide
  Antisense strand to SEQ ID NO: 1080420
acagugagcaguuaucacg

SEQ ID NO: 1080422 - RNA, 19 nt, Artificial Sequence
  Description of Artificial Sequence: Synthetic oligonucleotide
  Sense strand starting at position 3522 of SEQ ID NO: 915446
gauaacugcucacuguagu

SEQ ID NO: 1080423 - RNA, 19 nt, Artificial Sequence
  Description of Artificial Sequence: Synthetic oligonucleotide
  Antisense strand to SEQ ID NO: 1080422
acuacagugagcaguuauc

SEQ ID NO: 1080424 - RNA, 19 nt, Artificial Sequence
  Description of Artificial Sequence: Synthetic oligonucleotide
  Sense strand starting at position 111 of SEQ ID NO: 915447
ugacaaguacugcacugua

SEQ ID NO: 1080425 - RNA, 19 nt, Artificial Sequence
  Description of Artificial Sequence: Synthetic oligonucleotide
  Antisense strand to SEQ ID NO: 1080424
uacagugcaguacuuguca

SEQ ID NO: 1080426 - RNA, 19 nt, Artificial Sequence
  Description of Artificial Sequence: Synthetic oligonucleotide
  Sense strand starting at position 393 of SEQ ID NO: 915447
aggccagagucacuauaga

SEQ ID NO: 1080427 - RNA, 19 nt, Artificial Sequence
  Description of Artificial Sequence: Synthetic oligonucleotide
  Antisense strand to SEQ ID NO: 1080426
ucuauagugacucuggccu

SEQ ID NO: 1080428 - RNA, 19 nt, Artificial Sequence
  Description of Artificial Sequence: Synthetic oligonucleotide
  Sense strand starting at position 415 of SEQ ID NO: 915447
cagaaugccuguuccagaa

SEQ ID NO: 1080429 - RNA, 19 nt, Artificial Sequence
  Description of Artificial Sequence: Synthetic oligonucleotide
  Antisense strand to SEQ ID NO: 1080428
uucuggaacaggcauucug

SEQ ID NO: 1080430 - RNA, 19 nt, Artificial Sequence
  Description of Artificial Sequence: Synthetic oligonucleotide
  Sense strand starting at position 419 of SEQ ID NO: 915447
augccuguuccagaaucaa

SEQ ID NO: 1080431 - RNA, 19 nt, Artificial Sequence
  Description of Artificial Sequence: Synthetic oligonucleotide
  Antisense strand to SEQ ID NO: 1080430
uugauucuggaacaggcau

SEQ ID NO: 1080432 - RNA, 19 nt, Artificial Sequence
  Description of Artificial Sequence: Synthetic oligonucleotide
  Sense strand starting at position 518 of SEQ ID NO: 915447
cuaggagauuaagaauaug

SEQ ID NO: 1080433 - RNA, 19 nt, Artificial Sequence
  Description of Artificial Sequence: Synthetic oligonucleotide
  Antisense strand to SEQ ID NO: 1080432
cauauucuuaaucuccuag

SEQ ID NO: 1080434 - RNA, 19 nt, Artificial Sequence
  Description of Artificial Sequence: Synthetic oligonucleotide
  Sense strand starting at position 534 of SEQ ID NO: 915447
auggauuucucacaguaac

SEQ ID NO: 1080435 - RNA, 19 nt, Artificial Sequence
  Description of Artificial Sequence: Synthetic oligonucleotide
  Antisense strand to SEQ ID NO: 1080434
guuacugugagaaauccau

SEQ ID NO: 1080436 - RNA, 19 nt, Artificial Sequence
  Description of Artificial Sequence: Synthetic oligonucleotide
  Sense strand starting at position 641 of SEQ ID NO: 915447
gaaagcguguuuguauuua

SEQ ID NO: 1080437 - RNA, 19 nt, Artificial Sequence
  Description of Artificial Sequence: Synthetic oligonucleotide
  Antisense strand to SEQ ID NO: 1080436
uaaauacaaacacgcuuuc

SEQ ID NO: 1080438 - RNA, 19 nt, Artificial Sequence
  Description of Artificial Sequence: Synthetic oligonucleotide
  Sense strand starting at position 653 of SEQ ID NO: 915447
guauuuagaugggaaccaa

SEQ ID NO: 1080439 - RNA, 19 nt, Artificial Sequence
  Description of Artificial Sequence: Synthetic oligonucleotide
  Antisense strand to SEQ ID NO: 1080438
uugguucccaucuaaauac

SEQ ID NO: 1080440 - RNA, 19 nt, Artificial Sequence
  Description of Artificial Sequence: Synthetic oligonucleotide
  Sense strand starting at position 681 of SEQ ID NO: 915447
ggcuacacacaucgaauau

SEQ ID NO: 1080441 - RNA, 19 nt, Artificial Sequence
  Description of Artificial Sequence: Synthetic oligonucleotide
  Antisense strand to SEQ ID NO: 1080440
auauucgauguguguagcc

SEQ ID NO: 1080442 - RNA, 19 nt, Artificial Sequence
  Description of Artificial Sequence: Synthetic oligonucleotide
  Sense strand starting at position 778 of SEQ ID NO: 915447
gaagucaggcaaugugaaa

SEQ ID NO: 1080443 - RNA, 19 nt, Artificial Sequence
  Description of Artificial Sequence: Synthetic oligonucleotide
  Antisense strand to SEQ ID NO: 1080442
uuucacauugccugacuuc

SEQ ID NO: 1080444 - RNA, 19 nt, Artificial Sequence
  Description of Artificial Sequence: Synthetic oligonucleotide
  Sense strand starting at position 846 of SEQ ID NO: 915447
ucacuucucagacggguga

SEQ ID NO: 1080445 - RNA, 19 nt, Artificial Sequence
  Description of Artificial Sequence: Synthetic oligonucleotide
  Antisense strand to SEQ ID NO: 1080444
ucacccgucugagaaguga

SEQ ID NO: 1080446 - RNA, 19 nt, Artificial Sequence
  Description of Artificial Sequence: Synthetic oligonucleotide
  Sense strand starting at position 861 of SEQ ID NO: 915447
gugacuucgacauggaggu

SEQ ID NO: 1080447 - RNA, 19 nt, Artificial Sequence
  Description of Artificial Sequence: Synthetic oligonucleotide
  Antisense strand to SEQ ID NO: 1080446
accuccaugucgaagucac

SEQ ID NO: 1080448 - RNA, 19 nt, Artificial Sequence
  Description of Artificial Sequence: Synthetic oligonucleotide
  Sense strand starting at position 867 of SEQ ID NO: 915447
ucgacauggaggugacuaa

SEQ ID NO: 1080449 - RNA, 19 nt, Artificial Sequence
  Description of Artificial Sequence: Synthetic oligonucleotide
  Antisense strand to SEQ ID NO: 1080448
uuagucaccuccaugucga

SEQ ID NO: 1080450 - RNA, 19 nt, Artificial Sequence
  Description of Artificial Sequence: Synthetic oligonucleotide
  Sense strand starting at position 990 of SEQ ID NO: 915447
uaaauucgugcugaagaug

SEQ ID NO: 1080451 - RNA, 19 nt, Artificial Sequence
  Description of Artificial Sequence: Synthetic oligonucleotide
  Antisense strand to SEQ ID NO: 1080450
caucuucagcacgaauuua

SEQ ID NO: 1080452 - RNA, 19 nt, Artificial Sequence
  Description of Artificial Sequence: Synthetic oligonucleotide
  Sense strand starting at position 993 of SEQ ID NO: 915447
auucgugcugaagauguaa

SEQ ID NO: 1080453 - RNA, 19 nt, Artificial Sequence
  Description of Artificial Sequence: Synthetic oligonucleotide
  Antisense strand to SEQ ID NO: 1080452
uuacaucuucagcacgaau

SEQ ID NO: 1080454 - RNA, 19 nt, Artificial Sequence
  Description of Artificial Sequence: Synthetic oligonucleotide
  Sense strand starting at position 1023 of SEQ ID NO: 915447
aauugaaaguguuccagca

SEQ ID NO: 1080455 - RNA, 19 nt, Artificial Sequence
  Description of Artificial Sequence: Synthetic oligonucleotide
  Antisense strand to SEQ ID NO: 1080454
ugcuggaacacuuucaauu

SEQ ID NO: 1080456 - RNA, 19 nt, Artificial Sequence
  Description of Artificial Sequence: Synthetic oligonucleotide
  Sense strand starting at position 1177 of SEQ ID NO: 915447
uuguaacgccgagacaaau

SEQ ID NO: 1080457 - RNA, 19 nt, Artificial Sequence
  Description of Artificial Sequence: Synthetic oligonucleotide
  Antisense strand to SEQ ID NO: 1080456
auuugucucggcguuacaa

SEQ ID NO: 1080458 - RNA, 19 nt, Artificial Sequence
  Description of Artificial Sequence: Synthetic oligonucleotide
  Sense strand starting at position 1234 of SEQ ID NO: 915447
ucugcuccugcuguguaau

SEQ ID NO: 1080459 - RNA, 19 nt, Artificial Sequence
  Description of Artificial Sequence: Synthetic oligonucleotide
  Antisense strand to SEQ ID NO: 1080458
auuacacagcaggagcaga

SEQ ID NO: 1080460 - RNA, 19 nt, Artificial Sequence
  Description of Artificial Sequence: Synthetic oligonucleotide
  Sense strand starting at position 1244 of SEQ ID NO: 915447
cuguguaaucacuaccuuc

SEQ ID NO: 1080461 - RNA, 19 nt, Artificial Sequence
  Description of Artificial Sequence: Synthetic oligonucleotide
  Antisense strand to SEQ ID NO: 1080460
gaagguagugauuacacag

SEQ ID NO: 1080462 - RNA, 19 nt, Artificial Sequence
  Description of Artificial Sequence: Synthetic oligonucleotide
  Sense strand starting at position 2358 of SEQ ID NO: 915447
acacaaaggucaucuuguu

SEQ ID NO: 1080463 - RNA, 19 nt, Artificial Sequence
  Description of Artificial Sequence: Synthetic oligonucleotide
  Antisense strand to SEQ ID NO: 1080462
aacaagaugaccuuugugu

SEQ ID NO: 1080464 - RNA, 19 nt, Artificial Sequence
  Description of Artificial Sequence: Synthetic oligonucleotide
  Sense strand starting at position 2367 of SEQ ID NO: 915447
ucaucuuguuucuuuauga

SEQ ID NO: 1080465 - RNA, 19 nt, Artificial Sequence
  Description of Artificial Sequence: Synthetic oligonucleotide
  Antisense strand to SEQ ID NO: 1080464
ucauaaagaaacaagauga

SEQ ID NO: 1080466 - RNA, 19 nt, Artificial Sequence
  Description of Artificial Sequence: Synthetic oligonucleotide
  Sense strand starting at position 2410 of SEQ ID NO: 915447
cgaguuguuaagcauaaga

SEQ ID NO: 1080467 - RNA, 19 nt, Artificial Sequence
  Description of Artificial Sequence: Synthetic oligonucleotide
  Antisense strand to SEQ ID NO: 1080466
ucuuaugcuuaacaacucg

SEQ ID NO: 1080468 - RNA, 19 nt, Artificial Sequence
  Description of Artificial Sequence: Synthetic oligonucleotide
  Sense strand starting at position 2412 of SEQ ID NO: 915447
aguuguuaagcauaagaga

SEQ ID NO: 1080469 - RNA, 19 nt, Artificial Sequence
  Description of Artificial Sequence: Synthetic oligonucleotide
  Antisense strand to SEQ ID NO: 1080468
ucucuuaugcuuaacaacu

SEQ ID NO: 1080470 - RNA, 19 nt, Artificial Sequence
  Description of Artificial Sequence: Synthetic oligonucleotide
  Sense strand starting at position 2420 of SEQ ID NO: 915447
agcauaagagaauguauga

SEQ ID NO: 1080471 - RNA, 19 nt, Artificial Sequence
  Description of Artificial Sequence: Synthetic oligonucleotide
  Antisense strand to SEQ ID NO: 1080470
ucauacauucucuuaugcu

SEQ ID NO: 1080472 - RNA, 19 nt, Artificial Sequence
  Description of Artificial Sequence: Synthetic oligonucleotide
  Sense strand starting at position 2487 of SEQ ID NO: 915447
ugaugaugagcacauguua

SEQ ID NO: 1080473 - RNA, 19 nt, Artificial Sequence
  Description of Artificial Sequence: Synthetic oligonucleotide
  Antisense strand to SEQ ID NO: 1080472
uaacaugugcucaucauca

SEQ ID NO: 1080474 - RNA, 19 nt, Artificial Sequence
  Description of Artificial Sequence: Synthetic oligonucleotide
  Sense strand starting at position 2494 of SEQ ID NO: 915447
gagcacauguuagugauau

SEQ ID NO: 1080475 - RNA, 19 nt, Artificial Sequence
  Description of Artificial Sequence: Synthetic oligonucleotide
  Antisense strand to SEQ ID NO: 1080474
auaucacuaacaugugcuc

SEQ ID NO: 1080476 - RNA, 19 nt, Artificial Sequence
  Description of Artificial Sequence: Synthetic oligonucleotide
  Sense strand starting at position 2525 of SEQ ID NO: 915447
ggacgucugaaucaguaau

SEQ ID NO: 1080477 - RNA, 19 nt, Artificial Sequence
  Description of Artificial Sequence: Synthetic oligonucleotide
  Antisense strand to SEQ ID NO: 1080476
auuacugauucagacgucc

SEQ ID NO: 1080478 - RNA, 19 nt, Artificial Sequence
  Description of Artificial Sequence: Synthetic oligonucleotide
  Sense strand starting at position 2595 of SEQ ID NO: 915447
cgggcauugcucuuguuua

SEQ ID NO: 1080479 - RNA, 19 nt, Artificial Sequence
  Description of Artificial Sequence: Synthetic oligonucleotide
  Antisense strand to SEQ ID NO: 1080478
uaaacaagagcaaugcccg

SEQ ID NO: 1080480 - RNA, 19 nt, Artificial Sequence
  Description of Artificial Sequence: Synthetic oligonucleotide
  Sense strand starting at position 2622 of SEQ ID NO: 915447
ggucaaaguugccuagaca

SEQ ID NO: 1080481 - RNA, 19 nt, Artificial Sequence
  Description of Artificial Sequence: Synthetic oligonucleotide
  Antisense strand to SEQ ID NO: 1080480
ugucuaggcaacuuugacc

SEQ ID NO: 1080482 - RNA, 19 nt, Artificial Sequence
  Description of Artificial Sequence: Synthetic oligonucleotide
  Sense strand starting at position 2623 of SEQ ID NO: 915447
gucaaaguugccuagacaa

SEQ ID NO: 1080483 - RNA, 19 nt, Artificial Sequence
  Description of Artificial Sequence: Synthetic oligonucleotide
  Antisense strand to SEQ ID NO: 1080482
uugucuaggcaacuuugac

SEQ ID NO: 1080484 - RNA, 19 nt, Artificial Sequence
  Description of Artificial Sequence: Synthetic oligonucleotide
  Sense strand starting at position 2764 of SEQ ID NO: 915447
ucaccuugugaagagcuaa

SEQ ID NO: 1080485 - RNA, 19 nt, Artificial Sequence
  Description of Artificial Sequence: Synthetic oligonucleotide
  Antisense strand to SEQ ID NO: 1080484
uuagcucuucacaagguga

SEQ ID NO: 1080486 - RNA, 19 nt, Artificial Sequence
  Description of Artificial Sequence: Synthetic oligonucleotide
  Sense strand starting at position 2874 of SEQ ID NO: 915447
acagcaauccugugaguag

SEQ ID NO: 1080487 - RNA, 19 nt, Artificial Sequence
  Description of Artificial Sequence: Synthetic oligonucleotide
  Antisense strand to SEQ ID NO: 1080486
cuacucacaggauugcugu

SEQ ID NO: 1080488 - RNA, 19 nt, Artificial Sequence
  Description of Artificial Sequence: Synthetic oligonucleotide
  Sense strand starting at position 2878 of SEQ ID NO: 915447
caauccugugaguagguau

SEQ ID NO: 1080489 - RNA, 19 nt, Artificial Sequence
  Description of Artificial Sequence: Synthetic oligonucleotide
  Antisense strand to SEQ ID NO: 1080488
auaccuacucacaggauug

SEQ ID NO: 1080490 - RNA, 19 nt, Artificial Sequence
  Description of Artificial Sequence: Synthetic oligonucleotide
  Sense strand starting at position 3040 of SEQ ID NO: 915447
ucgguaguacgguaagacu

SEQ ID NO: 1080491 - RNA, 19 nt, Artificial Sequence
  Description of Artificial Sequence: Synthetic oligonucleotide
  Antisense strand to SEQ ID NO: 1080490
agucuuaccguacuaccga

SEQ ID NO: 1080492 - RNA, 19 nt, Artificial Sequence
  Description of Artificial Sequence: Synthetic oligonucleotide
  Sense strand starting at position 3141 of SEQ ID NO: 915447
ugaugaauauuugaacacu

SEQ ID NO: 1080493 - RNA, 19 nt, Artificial Sequence
  Description of Artificial Sequence: Synthetic oligonucleotide
  Antisense strand to SEQ ID NO: 1080492
aguguucaaauauucauca

SEQ ID NO: 1080494 - RNA, 19 nt, Artificial Sequence
  Description of Artificial Sequence: Synthetic oligonucleotide
  Sense strand starting at position 3378 of SEQ ID NO: 915447
guuguagcacugcauuuau

SEQ ID NO: 1080495 - RNA, 19 nt, Artificial Sequence
  Description of Artificial Sequence: Synthetic oligonucleotide
  Antisense strand to SEQ ID NO: 1080494
auaaaugcagugcuacaac

SEQ ID NO: 1080496 - RNA, 19 nt, Artificial Sequence
  Description of Artificial Sequence: Synthetic oligonucleotide
  Sense strand starting at position 3388 of SEQ ID NO: 915447
ugcauuuauuugcauaaga

SEQ ID NO: 1080497 - RNA, 19 nt, Artificial Sequence
  Description of Artificial Sequence: Synthetic oligonucleotide
  Antisense strand to SEQ ID NO: 1080496
ucuuaugcaaauaaaugca

SEQ ID NO: 1080498 - RNA, 19 nt, Artificial Sequence
  Description of Artificial Sequence: Synthetic oligonucleotide
  Sense strand starting at position 3439 of SEQ ID NO: 915447
acucauaagugaguuuaca

SEQ ID NO: 1080499 - RNA, 19 nt, Artificial Sequence
  Description of Artificial Sequence: Synthetic oligonucleotide
  Antisense strand to SEQ ID NO: 1080498
uguaaacucacuuaugagu

SEQ ID NO: 1080500 - RNA, 19 nt, Artificial Sequence
  Description of Artificial Sequence: Synthetic oligonucleotide
  Sense strand starting at position 3680 of SEQ ID NO: 915447
ggugcuuaucaauagugga

SEQ ID NO: 1080501 - RNA, 19 nt, Artificial Sequence
  Description of Artificial Sequence: Synthetic oligonucleotide
  Antisense strand to SEQ ID NO: 1080500
uccacuauugauaagcacc

SEQ ID NO: 1080502 - RNA, 19 nt, Artificial Sequence
  Description of Artificial Sequence: Synthetic oligonucleotide
  Sense strand starting at position 3965 of SEQ ID NO: 915447
uugggugaccuggaucauu

SEQ ID NO: 1080503 - RNA, 19 nt, Artificial Sequence
  Description of Artificial Sequence: Synthetic oligonucleotide
  Antisense strand to SEQ ID NO: 1080502
aaugauccaggucacccaa

SEQ ID NO: 1080504 - RNA, 19 nt, Artificial Sequence
  Description of Artificial Sequence: Synthetic oligonucleotide
  Sense strand starting at position 349 of SEQ ID NO: 915448
cccaauauccuaggacagu

SEQ ID NO: 1080505 - RNA, 19 nt, Artificial Sequence
  Description of Artificial Sequence: Synthetic oligonucleotide
  Antisense strand to SEQ ID NO: 1080504
acuguccuaggauauuggg

SEQ ID NO: 1080506 - RNA, 19 nt, Artificial Sequence
  Description of Artificial Sequence: Synthetic oligonucleotide
  Sense strand starting at position 431 of SEQ ID NO: 915448
gcugcacuuguauacacaa

SEQ ID NO: 1080507 - RNA, 19 nt, Artificial Sequence
  Description of Artificial Sequence: Synthetic oligonucleotide
  Antisense strand to SEQ ID NO: 1080506
uuguguauacaagugcagc

SEQ ID NO: 1080508 - RNA, 19 nt, Artificial Sequence
  Description of Artificial Sequence: Synthetic oligonucleotide
  Sense strand starting at position 517 of SEQ ID NO: 915448
cuggccuuucgugauuuau

SEQ ID NO: 1080509 - RNA, 19 nt, Artificial Sequence
  Description of Artificial Sequence: Synthetic oligonucleotide
  Antisense strand to SEQ ID NO: 1080508
auaaaucacgaaaggccag

SEQ ID NO: 1080510 - RNA, 19 nt, Artificial Sequence
  Description of Artificial Sequence: Synthetic oligonucleotide
  Sense strand starting at position 519 of SEQ ID NO: 915448
ggccuuucgugauuuaugu

SEQ ID NO: 1080511 - RNA, 19 nt, Artificial Sequence
  Description of Artificial Sequence: Synthetic oligonucleotide
  Antisense strand to SEQ ID NO: 1080510
acauaaaucacgaaaggcc

SEQ ID NO: 1080512 - RNA, 19 nt, Artificial Sequence
  Description of Artificial Sequence: Synthetic oligonucleotide
  Sense strand starting at position 526 of SEQ ID NO: 915448
cgugauuuauguuucuuga

SEQ ID NO: 1080513 - RNA, 19 nt, Artificial Sequence
  Description of Artificial Sequence: Synthetic oligonucleotide
  Antisense strand to SEQ ID NO: 1080512
ucaagaaacauaaaucacg

SEQ ID NO: 1080514 - RNA, 19 nt, Artificial Sequence
  Description of Artificial Sequence: Synthetic oligonucleotide
  Sense strand starting at position 547 of SEQ ID NO: 915448
aucucauucuagguaagca

SEQ ID NO: 1080515 - RNA, 19 nt, Artificial Sequence
  Description of Artificial Sequence: Synthetic oligonucleotide
  Antisense strand to SEQ ID NO: 1080514
ugcuuaccuagaaugagau

SEQ ID NO: 1080516 - RNA, 19 nt, Artificial Sequence
  Description of Artificial Sequence: Synthetic oligonucleotide
  Sense strand starting at position 576 of SEQ ID NO: 915448
aacagagcugcagauguua

SEQ ID NO: 1080517 - RNA, 19 nt, Artificial Sequence
  Description of Artificial Sequence: Synthetic oligonucleotide
  Antisense strand to SEQ ID NO: 1080516
uaacaucugcagcucuguu

SEQ ID NO: 1080518 - RNA, 19 nt, Artificial Sequence
  Description of Artificial Sequence: Synthetic oligonucleotide
  Sense strand starting at position 584 of SEQ ID NO: 915448
ugcagauguuauguugacu

SEQ ID NO: 1080519 - RNA, 19 nt, Artificial Sequence
  Description of Artificial Sequence: Synthetic oligonucleotide
  Antisense strand to SEQ ID NO: 1080518
agucaacauaacaucugca

SEQ ID NO: 1080520 - RNA, 19 nt, Artificial Sequence
  Description of Artificial Sequence: Synthetic oligonucleotide
  Sense strand starting at position 772 of SEQ ID NO: 915448
ccauacugccaaggagaua

SEQ ID NO: 1080521 - RNA, 19 nt, Artificial Sequence
  Description of Artificial Sequence: Synthetic oligonucleotide
  Antisense strand to SEQ ID NO: 1080520
uaucuccuuggcaguaugg

SEQ ID NO: 1080522 - RNA, 19 nt, Artificial Sequence
  Description of Artificial Sequence: Synthetic oligonucleotide
  Sense strand starting at position 902 of SEQ ID NO: 915448
gucacuuacugcuuccuca

SEQ ID NO: 1080523 - RNA, 19 nt, Artificial Sequence
  Description of Artificial Sequence: Synthetic oligonucleotide
  Antisense strand to SEQ ID NO: 1080522
ugaggaagcaguaagugac

SEQ ID NO: 1080524 - RNA, 19 nt, Artificial Sequence
  Description of Artificial Sequence: Synthetic oligonucleotide
  Sense strand starting at position 1346 of SEQ ID NO: 915448
ggguagagcccggguucua

SEQ ID NO: 1080525 - RNA, 19 nt, Artificial Sequence
  Description of Artificial Sequence: Synthetic oligonucleotide
  Antisense strand to SEQ ID NO: 1080524
uagaacccgggcucuaccc

SEQ ID NO: 1080526 - RNA, 19 nt, Artificial Sequence
  Description of Artificial Sequence: Synthetic oligonucleotide
  Sense strand starting at position 2090 of SEQ ID NO: 915448
aggcuucugugagcccaaa

SEQ ID NO: 1080527 - RNA, 19 nt, Artificial Sequence
  Description of Artificial Sequence: Synthetic oligonucleotide
  Antisense strand to SEQ ID NO: 1080526
uuugggcucacagaagccu

SEQ ID NO: 1080528 - RNA, 19 nt, Artificial Sequence
  Description of Artificial Sequence: Synthetic oligonucleotide
  Sense strand starting at position 2109 of SEQ ID NO: 915448
gaggguucuccucagaccu

SEQ ID NO: 1080529 - RNA, 19 nt, Artificial Sequence
  Description of Artificial Sequence: Synthetic oligonucleotide
  Antisense strand to SEQ ID NO: 1080528
aggucugaggagaacccuc

SEQ ID NO: 1080530 - RNA, 19 nt, Artificial Sequence
  Description of Artificial Sequence: Synthetic oligonucleotide
  Sense strand starting at position 2261 of SEQ ID NO: 915448
ggcaauucugaacgauguu

SEQ ID NO: 1080531 - RNA, 19 nt, Artificial Sequence
  Description of Artificial Sequence: Synthetic oligonucleotide
  Antisense strand to SEQ ID NO: 1080530
aacaucguucagaauugcc

SEQ ID NO: 1080532 - RNA, 19 nt, Artificial Sequence
  Description of Artificial Sequence: Synthetic oligonucleotide
  Sense strand starting at position 2262 of SEQ ID NO: 915448
gcaauucugaacgauguua

SEQ ID NO: 1080533 - RNA, 19 nt, Artificial Sequence
  Description of Artificial Sequence: Synthetic oligonucleotide
  Antisense strand to SEQ ID NO: 1080532
uaacaucguucagaauugc

SEQ ID NO: 1080534 - RNA, 19 nt, Artificial Sequence
  Description of Artificial Sequence: Synthetic oligonucleotide
  Sense strand starting at position 2290 of SEQ ID NO: 915448
acacguacuuauccuguaa

SEQ ID NO: 1080535 - RNA, 19 nt, Artificial Sequence
  Description of Artificial Sequence: Synthetic oligonucleotide
  Antisense strand to SEQ ID NO: 1080534
uuacaggauaaguacgugu

SEQ ID NO: 1080536 - RNA, 19 nt, Artificial Sequence
  Description of Artificial Sequence: Synthetic oligonucleotide
  Sense strand starting at position 2302 of SEQ ID NO: 915448
ccuguaaugccuugauaac

SEQ ID NO: 1080537 - RNA, 19 nt, Artificial Sequence
  Description of Artificial Sequence: Synthetic oligonucleotide
  Antisense strand to SEQ ID NO: 1080536
guuaucaaggcauuacagg

SEQ ID NO: 1080538 - RNA, 19 nt, Artificial Sequence
  Description of Artificial Sequence: Synthetic oligonucleotide
  Sense strand starting at position 2303 of SEQ ID NO: 915448
cuguaaugccuugauaacu

SEQ ID NO: 1080539 - RNA, 19 nt, Artificial Sequence
  Description of Artificial Sequence: Synthetic oligonucleotide
  Antisense strand to SEQ ID NO: 1080538
aguuaucaaggcauuacag

SEQ ID NO: 1080540 - RNA, 19 nt, Artificial Sequence
  Description of Artificial Sequence: Synthetic oligonucleotide
  Sense strand starting at position 2338 of SEQ ID NO: 915448
gggaauaugugaguuacuc

SEQ ID NO: 1080541 - RNA, 19 nt, Artificial Sequence
  Description of Artificial Sequence: Synthetic oligonucleotide
  Antisense strand to SEQ ID NO: 1080540
gaguaacucacauauuccc

SEQ ID NO: 1080542 - RNA, 19 nt, Artificial Sequence
  Description of Artificial Sequence: Synthetic oligonucleotide
  Sense strand starting at position 2342 of SEQ ID NO: 915448
auaugugaguuacucagaa

SEQ ID NO: 1080543 - RNA, 19 nt, Artificial Sequence
  Description of Artificial Sequence: Synthetic oligonucleotide
  Antisense strand to SEQ ID NO: 1080542
uucugaguaacucacauau

SEQ ID NO: 1080544 - RNA, 19 nt, Artificial Sequence
  Description of Artificial Sequence: Synthetic oligonucleotide
  Sense strand starting at position 2357 of SEQ ID NO: 915448
agaaaccugccuuaguguu

SEQ ID NO: 1080545 - RNA, 19 nt, Artificial Sequence
  Description of Artificial Sequence: Synthetic oligonucleotide
  Antisense strand to SEQ ID NO: 1080544
aacacuaaggcagguuucu

SEQ ID NO: 1080546 - RNA, 19 nt, Artificial Sequence
  Description of Artificial Sequence: Synthetic oligonucleotide
  Sense strand starting at position 2416 of SEQ ID NO: 915448
guagcuuugugacugaaac

SEQ ID NO: 1080547 - RNA, 19 nt, Artificial Sequence
  Description of Artificial Sequence: Synthetic oligonucleotide
  Antisense strand to SEQ ID NO: 1080546
guuucagucacaaagcuac

SEQ ID NO: 1080548 - RNA, 19 nt, Artificial Sequence
  Description of Artificial Sequence: Synthetic oligonucleotide
  Sense strand starting at position 2662 of SEQ ID NO: 915448
gcugcacugguccacauuu

SEQ ID NO: 1080549 - RNA, 19 nt, Artificial Sequence
  Description of Artificial Sequence: Synthetic oligonucleotide
  Antisense strand to SEQ ID NO: 1080548
aaauguggaccagugcagc

SEQ ID NO: 1080550 - RNA, 19 nt, Artificial Sequence
  Description of Artificial Sequence: Synthetic oligonucleotide
  Sense strand starting at position 3047 of SEQ ID NO: 915448
guagcugcuauagauugau

SEQ ID NO: 1080551 - RNA, 19 nt, Artificial Sequence
  Description of Artificial Sequence: Synthetic oligonucleotide
  Antisense strand to SEQ ID NO: 1080550
aucaaucuauagcagcuac

SEQ ID NO: 1080552 - RNA, 19 nt, Artificial Sequence
  Description of Artificial Sequence: Synthetic oligonucleotide
  Sense strand starting at position 3050 of SEQ ID NO: 915448
gcugcuauagauugauugu

SEQ ID NO: 1080553 - RNA, 19 nt, Artificial Sequence
  Description of Artificial Sequence: Synthetic oligonucleotide
  Antisense strand to SEQ ID NO: 1080552
acaaucaaucuauagcagc

SEQ ID NO: 1080554 - RNA, 19 nt, Artificial Sequence
  Description of Artificial Sequence: Synthetic oligonucleotide
  Sense strand starting at position 3164 of SEQ ID NO: 915448
gggagaggugcuuggacuu

SEQ ID NO: 1080555 - RNA, 19 nt, Artificial Sequence
  Description of Artificial Sequence: Synthetic oligonucleotide
  Antisense strand to SEQ ID NO: 1080554
aaguccaagcaccucuccc

SEQ ID NO: 1080556 - RNA, 19 nt, Artificial Sequence
  Description of Artificial Sequence: Synthetic oligonucleotide
  Sense strand starting at position 3282 of SEQ ID NO: 915448
cuuucuuugcccugggaua

SEQ ID NO: 1080557 - RNA, 19 nt, Artificial Sequence
  Description of Artificial Sequence: Synthetic oligonucleotide
  Antisense strand to SEQ ID NO: 1080556
uaucccagggcaaagaaag

SEQ ID NO: 1080558 - RNA, 19 nt, Artificial Sequence
  Description of Artificial Sequence: Synthetic oligonucleotide
  Sense strand starting at position 3284 of SEQ ID NO: 915448
uucuuugcccugggauaga

SEQ ID NO: 1080559 - RNA, 19 nt, Artificial Sequence
  Description of Artificial Sequence: Synthetic oligonucleotide
  Antisense strand to SEQ ID NO: 1080558
ucuaucccagggcaaagaa

SEQ ID NO: 1080560 - RNA, 19 nt, Artificial Sequence
  Description of Artificial Sequence: Synthetic oligonucleotide
  Sense strand starting at position 3338 of SEQ ID NO: 915448
aauggcauuucuuagugga

SEQ ID NO: 1080561 - RNA, 19 nt, Artificial Sequence
  Description of Artificial Sequence: Synthetic oligonucleotide
  Antisense strand to SEQ ID NO: 1080560
uccacuaagaaaugccauu

SEQ ID NO: 1080562 - RNA, 19 nt, Artificial Sequence
  Description of Artificial Sequence: Synthetic oligonucleotide
  Sense strand starting at position 3353 of SEQ ID NO: 915448
uggaaaccuuuauaggaua

SEQ ID NO: 1080563 - RNA, 19 nt, Artificial Sequence
  Description of Artificial Sequence: Synthetic oligonucleotide
  Antisense strand to SEQ ID NO: 1080562
uauccuauaaagguuucca

SEQ ID NO: 1080564 - RNA, 19 nt, Artificial Sequence
  Description of Artificial Sequence: Synthetic oligonucleotide
  Sense strand starting at position 3591 of SEQ ID NO: 915448
acuggaguccaugagguua

SEQ ID NO: 1080565 - RNA, 19 nt, Artificial Sequence
  Description of Artificial Sequence: Synthetic oligonucleotide
  Antisense strand to SEQ ID NO: 1080564
uaaccucauggacuccagu

SEQ ID NO: 1080566 - RNA, 19 nt, Artificial Sequence
  Description of Artificial Sequence: Synthetic oligonucleotide
  Sense strand starting at position 3760 of SEQ ID NO: 915448
uccagugccgagugauuga

SEQ ID NO: 1080567 - RNA, 19 nt, Artificial Sequence
  Description of Artificial Sequence: Synthetic oligonucleotide
  Antisense strand to SEQ ID NO: 1080566
ucaaucacucggcacugga

SEQ ID NO: 1080568 - RNA, 19 nt, Artificial Sequence
  Description of Artificial Sequence: Synthetic oligonucleotide
  Sense strand starting at position 3763 of SEQ ID NO: 915448
agugccgagugauugauua

SEQ ID NO: 1080569 - RNA, 19 nt, Artificial Sequence
  Description of Artificial Sequence: Synthetic oligonucleotide
  Antisense strand to SEQ ID NO: 1080568
uaaucaaucacucggcacu

SEQ ID NO: 1080570 - RNA, 19 nt, Artificial Sequence
  Description of Artificial Sequence: Synthetic oligonucleotide
  Sense strand starting at position 3765 of SEQ ID NO: 915448
ugccgagugauugauuaac

SEQ ID NO: 1080571 - RNA, 19 nt, Artificial Sequence
  Description of Artificial Sequence: Synthetic oligonucleotide
  Antisense strand to SEQ ID NO: 1080570
guuaaucaaucacucggca

SEQ ID NO: 1080572 - RNA, 19 nt, Artificial Sequence
  Description of Artificial Sequence: Synthetic oligonucleotide
  Sense strand starting at position 3767 of SEQ ID NO: 915448
ccgagugauugauuaacuc

SEQ ID NO: 1080573 - RNA, 19 nt, Artificial Sequence
  Description of Artificial Sequence: Synthetic oligonucleotide
  Antisense strand to SEQ ID NO: 1080572
gaguuaaucaaucacucgg

SEQ ID NO: 1080574 - RNA, 19 nt, Artificial Sequence
  Description of Artificial Sequence: Synthetic oligonucleotide
  Sense strand starting at position 3771 of SEQ ID NO: 915448
gugauugauuaacucagag

SEQ ID NO: 1080575 - RNA, 19 nt, Artificial Sequence
  Description of Artificial Sequence: Synthetic oligonucleotide
  Antisense strand to SEQ ID NO: 1080574
cucugaguuaaucaaucac

SEQ ID NO: 1080576 - RNA, 19 nt, Artificial Sequence
  Description of Artificial Sequence: Synthetic oligonucleotide
  Sense strand starting at position 3806 of SEQ ID NO: 915448
ggugauggauucccaagau

SEQ ID NO: 1080577 - RNA, 19 nt, Artificial Sequence
  Description of Artificial Sequence: Synthetic oligonucleotide
  Antisense strand to SEQ ID NO: 1080576
aucuugggaauccaucacc

SEQ ID NO: 1080578 - RNA, 19 nt, Artificial Sequence
  Description of Artificial Sequence: Synthetic oligonucleotide
  Sense strand starting at position 3863 of SEQ ID NO: 915448
aaggccaaugggugauuaa

SEQ ID NO: 1080579 - RNA, 19 nt, Artificial Sequence
  Description of Artificial Sequence: Synthetic oligonucleotide
  Antisense strand to SEQ ID NO: 1080578
uuaaucacccauuggccuu

SEQ ID NO: 1080580 - RNA, 19 nt, Artificial Sequence
  Description of Artificial Sequence: Synthetic oligonucleotide
  Sense strand starting at position 3931 of SEQ ID NO: 915448
gaaguauggccuuggcuag

SEQ ID NO: 1080581 - RNA, 19 nt, Artificial Sequence
  Description of Artificial Sequence: Synthetic oligonucleotide
  Antisense strand to SEQ ID NO: 1080580
cuagccaaggccauacuuc

SEQ ID NO: 1080582 - RNA, 19 nt, Artificial Sequence
  Description of Artificial Sequence: Synthetic oligonucleotide
  Sense strand starting at position 3943 of SEQ ID NO: 915448
uggcuaggcuauccuuuau

SEQ ID NO: 1080583 - RNA, 19 nt, Artificial Sequence
  Description of Artificial Sequence: Synthetic oligonucleotide
  Antisense strand to SEQ ID NO: 1080582
auaaaggauagccuagcca

SEQ ID NO: 1080584 - RNA, 19 nt, Artificial Sequence
  Description of Artificial Sequence: Synthetic oligonucleotide
  Sense strand starting at position 9 of SEQ ID NO: 915449
uuuagauauccauguacac

SEQ ID NO: 1080585 - RNA, 19 nt, Artificial Sequence
  Description of Artificial Sequence: Synthetic oligonucleotide
  Antisense strand to SEQ ID NO: 1080584
guguacauggauaucuaaa

SEQ ID NO: 1080586 - RNA, 19 nt, Artificial Sequence
  Description of Artificial Sequence: Synthetic oligonucleotide
  Sense strand starting at position 195 of SEQ ID NO: 915449
ugcuguguuggauaccaga

SEQ ID NO: 1080587 - RNA, 19 nt, Artificial Sequence
  Description of Artificial Sequence: Synthetic oligonucleotide
  Antisense strand to SEQ ID NO: 1080586
ucugguauccaacacagca

SEQ ID NO: 1080588 - RNA, 19 nt, Artificial Sequence
  Description of Artificial Sequence: Synthetic oligonucleotide
  Sense strand starting at position 232 of SEQ ID NO: 915449
acaguccuguaccuuuaaa

SEQ ID NO: 1080589 - RNA, 19 nt, Artificial Sequence
  Description of Artificial Sequence: Synthetic oligonucleotide
  Antisense strand to SEQ ID NO: 1080588
uuuaaagguacaggacugu

SEQ ID NO: 1080590 - RNA, 19 nt, Artificial Sequence
  Description of Artificial Sequence: Synthetic oligonucleotide
  Sense strand starting at position 461 of SEQ ID NO: 915449
ccauuaugcucuguacauu

SEQ ID NO: 1080591 - RNA, 19 nt, Artificial Sequence
  Description of Artificial Sequence: Synthetic oligonucleotide
  Antisense strand to SEQ ID NO: 1080590
aauguacagagcauaaugg

SEQ ID NO: 1080592 - RNA, 19 nt, Artificial Sequence
  Description of Artificial Sequence: Synthetic oligonucleotide
  Sense strand starting at position 495 of SEQ ID NO: 915449
ggcuacaaguuuccaaagu

SEQ ID NO: 1080593 - RNA, 19 nt, Artificial Sequence
  Description of Artificial Sequence: Synthetic oligonucleotide
  Antisense strand to SEQ ID NO: 1080592
acuuuggaaacuuguagcc

SEQ ID NO: 1080594 - RNA, 19 nt, Artificial Sequence
  Description of Artificial Sequence: Synthetic oligonucleotide
  Sense strand starting at position 622 of SEQ ID NO: 915449
agagacauuguaugcaaag

SEQ ID NO: 1080595 - RNA, 19 nt, Artificial Sequence
  Description of Artificial Sequence: Synthetic oligonucleotide
  Antisense strand to SEQ ID NO: 1080594
cuuugcauacaaugucucu

SEQ ID NO: 1080596 - RNA, 19 nt, Artificial Sequence
  Description of Artificial Sequence: Synthetic oligonucleotide
  Sense strand starting at position 623 of SEQ ID NO: 915449
gagacauuguaugcaaagu

SEQ ID NO: 1080597 - RNA, 19 nt, Artificial Sequence
  Description of Artificial Sequence: Synthetic oligonucleotide
  Antisense strand to SEQ ID NO: 1080596
acuuugcauacaaugucuc

SEQ ID NO: 1080598 - RNA, 19 nt, Artificial Sequence
  Description of Artificial Sequence: Synthetic oligonucleotide
  Sense strand starting at position 693 of SEQ ID NO: 915449
uaucuaggagucugugcaa

SEQ ID NO: 1080599 - RNA, 19 nt, Artificial Sequence
  Description of Artificial Sequence: Synthetic oligonucleotide
  Antisense strand to SEQ ID NO: 1080598
uugcacagacuccuagaua

SEQ ID NO: 1080600 - RNA, 19 nt, Artificial Sequence
  Description of Artificial Sequence: Synthetic oligonucleotide
  Sense strand starting at position 696 of SEQ ID NO: 915449
cuaggagucugugcaaaga

SEQ ID NO: 1080601 - RNA, 19 nt, Artificial Sequence
  Description of Artificial Sequence: Synthetic oligonucleotide
  Antisense strand to SEQ ID NO: 1080600
ucuuugcacagacuccuag

SEQ ID NO: 1080602 - RNA, 19 nt, Artificial Sequence
  Description of Artificial Sequence: Synthetic oligonucleotide
  Sense strand starting at position 729 of SEQ ID NO: 915449
uuggcagaaauguagucau

SEQ ID NO: 1080603 - RNA, 19 nt, Artificial Sequence
  Description of Artificial Sequence: Synthetic oligonucleotide
  Antisense strand to SEQ ID NO: 1080602
augacuacauuucugccaa

SEQ ID NO: 1080604 - RNA, 19 nt, Artificial Sequence
  Description of Artificial Sequence: Synthetic oligonucleotide
  Sense strand starting at position 758 of SEQ ID NO: 915449
acaucuuagucugccagga

SEQ ID NO: 1080605 - RNA, 19 nt, Artificial Sequence
  Description of Artificial Sequence: Synthetic oligonucleotide
  Antisense strand to SEQ ID NO: 1080604
uccuggcagacuaagaugu

SEQ ID NO: 1080606 - RNA, 19 nt, Artificial Sequence
  Description of Artificial Sequence: Synthetic oligonucleotide
  Sense strand starting at position 762 of SEQ ID NO: 915449
cuuagucugccaggaucuu

SEQ ID NO: 1080607 - RNA, 19 nt, Artificial Sequence
  Description of Artificial Sequence: Synthetic oligonucleotide
  Antisense strand to SEQ ID NO: 1080606
aagauccuggcagacuaag

SEQ ID NO: 1080608 - RNA, 19 nt, Artificial Sequence
  Description of Artificial Sequence: Synthetic oligonucleotide
  Sense strand starting at position 872 of SEQ ID NO: 915449
ucacuuuauggcuguuaca

SEQ ID NO: 1080609 - RNA, 19 nt, Artificial Sequence
  Description of Artificial Sequence: Synthetic oligonucleotide
  Antisense strand to SEQ ID NO: 1080608
uguaacagccauaaaguga

SEQ ID NO: 1080610 - RNA, 19 nt, Artificial Sequence
  Description of Artificial Sequence: Synthetic oligonucleotide
  Sense strand starting at position 904 of SEQ ID NO: 915449
ccauuaauuuaagggaagu

SEQ ID NO: 1080611 - RNA, 19 nt, Artificial Sequence
  Description of Artificial Sequence: Synthetic oligonucleotide
  Antisense strand to SEQ ID NO: 1080610
acuucccuuaaauuaaugg

SEQ ID NO: 1080612 - RNA, 19 nt, Artificial Sequence
  Description of Artificial Sequence: Synthetic oligonucleotide
  Sense strand starting at position 938 of SEQ ID NO: 915449
ccuguaagucaacaaguaa

SEQ ID NO: 1080613 - RNA, 19 nt, Artificial Sequence
  Description of Artificial Sequence: Synthetic oligonucleotide
  Antisense strand to SEQ ID NO: 1080612
uuacuuguugacuuacagg

SEQ ID NO: 1080614 - RNA, 19 nt, Artificial Sequence
  Description of Artificial Sequence: Synthetic oligonucleotide
  Sense strand starting at position 1078 of SEQ ID NO: 915449
aaagaauccuggguucucu

SEQ ID NO: 1080615 - RNA, 19 nt, Artificial Sequence
  Description of Artificial Sequence: Synthetic oligonucleotide
  Antisense strand to SEQ ID NO: 1080614
agagaacccaggauucuuu

SEQ ID NO: 1080616 - RNA, 19 nt, Artificial Sequence
  Description of Artificial Sequence: Synthetic oligonucleotide
  Sense strand starting at position 1262 of SEQ ID NO: 915449
guuaguuugcauucuugcu

SEQ ID NO: 1080617 - RNA, 19 nt, Artificial Sequence
  Description of Artificial Sequence: Synthetic oligonucleotide
  Antisense strand to SEQ ID NO: 1080616
agcaagaaugcaaacuaac

SEQ ID NO: 1080618 - RNA, 19 nt, Artificial Sequence
  Description of Artificial Sequence: Synthetic oligonucleotide
  Sense strand starting at position 1599 of SEQ ID NO: 915449
gagggucgaguguaccaaa

SEQ ID NO: 1080619 - RNA, 19 nt, Artificial Sequence
  Description of Artificial Sequence: Synthetic oligonucleotide
  Antisense strand to SEQ ID NO: 1080618
uuugguacacucgacccuc

SEQ ID NO: 1080620 - RNA, 19 nt, Artificial Sequence
  Description of Artificial Sequence: Synthetic oligonucleotide
  Sense strand starting at position 2853 of SEQ ID NO: 915449
ggcccagaauuccuggaua

SEQ ID NO: 1080621 - RNA, 19 nt, Artificial Sequence
  Description of Artificial Sequence: Synthetic oligonucleotide
  Antisense strand to SEQ ID NO: 1080620
uauccaggaauucugggcc

SEQ ID NO: 1080622 - RNA, 19 nt, Artificial Sequence
  Description of Artificial Sequence: Synthetic oligonucleotide
  Sense strand starting at position 2855 of SEQ ID NO: 915449
cccagaauuccuggauaau

SEQ ID NO: 1080623 - RNA, 19 nt, Artificial Sequence
  Description of Artificial Sequence: Synthetic oligonucleotide
  Antisense strand to SEQ ID NO: 1080622
auuauccaggaauucuggg

SEQ ID NO: 1080624 - RNA, 19 nt, Artificial Sequence
  Description of Artificial Sequence: Synthetic oligonucleotide
  Sense strand starting at position 2865 of SEQ ID NO: 915449
cuggauaaugugggugcua

SEQ ID NO: 1080625 - RNA, 19 nt, Artificial Sequence
  Description of Artificial Sequence: Synthetic oligonucleotide
  Antisense strand to SEQ ID NO: 1080624
uagcacccacauuauccag

SEQ ID NO: 1080626 - RNA, 19 nt, Artificial Sequence
  Description of Artificial Sequence: Synthetic oligonucleotide
  Sense strand starting at position 2866 of SEQ ID NO: 915449
uggauaaugugggugcuaa

SEQ ID NO: 1080627 - RNA, 19 nt, Artificial Sequence
  Description of Artificial Sequence: Synthetic oligonucleotide
  Antisense strand to SEQ ID NO: 1080626
uuagcacccacauuaucca

SEQ ID NO: 1080628 - RNA, 19 nt, Artificial Sequence
  Description of Artificial Sequence: Synthetic oligonucleotide
  Sense strand starting at position 2867 of SEQ ID NO: 915449
ggauaaugugggugcuaau

SEQ ID NO: 1080629 - RNA, 19 nt, Artificial Sequence
  Description of Artificial Sequence: Synthetic oligonucleotide
  Antisense strand to SEQ ID NO: 1080628
auuagcacccacauuaucc

SEQ ID NO: 1080630 - RNA, 19 nt, Artificial Sequence
  Description of Artificial Sequence: Synthetic oligonucleotide
  Sense strand starting at position 3121 of SEQ ID NO: 915449
guuccuuucccagaagccu

SEQ ID NO: 1080631 - RNA, 19 nt, Artificial Sequence
  Description of Artificial Sequence: Synthetic oligonucleotide
  Antisense strand to SEQ ID NO: 1080630
aggcuucugggaaaggaac

SEQ ID NO: 1080632 - RNA, 19 nt, Artificial Sequence
  Description of Artificial Sequence: Synthetic oligonucleotide
  Sense strand starting at position 3154 of SEQ ID NO: 915449
cugcuuugccacuaguaga

SEQ ID NO: 1080633 - RNA, 19 nt, Artificial Sequence
  Description of Artificial Sequence: Synthetic oligonucleotide
  Antisense strand to SEQ ID NO: 1080632
ucuacuaguggcaaagcag

SEQ ID NO: 1080634 - RNA, 19 nt, Artificial Sequence
  Description of Artificial Sequence: Synthetic oligonucleotide
  Sense strand starting at position 3204 of SEQ ID NO: 915449
acaucuguggugggaucua

SEQ ID NO: 1080635 - RNA, 19 nt, Artificial Sequence
  Description of Artificial Sequence: Synthetic oligonucleotide
  Antisense strand to SEQ ID NO: 1080634
uagaucccaccacagaugu

SEQ ID NO: 1080636 - RNA, 19 nt, Artificial Sequence
  Description of Artificial Sequence: Synthetic oligonucleotide
  Sense strand starting at position 3215 of SEQ ID NO: 915449
gggaucuacugagucugaa

SEQ ID NO: 1080637 - RNA, 19 nt, Artificial Sequence
  Description of Artificial Sequence: Synthetic oligonucleotide
  Antisense strand to SEQ ID NO: 1080636
uucagacucaguagauccc

SEQ ID NO: 1080638 - RNA, 19 nt, Artificial Sequence
  Description of Artificial Sequence: Synthetic oligonucleotide
  Sense strand starting at position 3286 of SEQ ID NO: 915449
uuuguuuacuuaguagagu

SEQ ID NO: 1080639 - RNA, 19 nt, Artificial Sequence
  Description of Artificial Sequence: Synthetic oligonucleotide
  Antisense strand to SEQ ID NO: 1080638
acucuacuaaguaaacaaa

SEQ ID NO: 1080640 - RNA, 19 nt, Artificial Sequence
  Description of Artificial Sequence: Synthetic oligonucleotide
  Sense strand starting at position 3375 of SEQ ID NO: 915449
gggaauaugccuggaaacc

SEQ ID NO: 1080641 - RNA, 19 nt, Artificial Sequence
  Description of Artificial Sequence: Synthetic oligonucleotide
  Antisense strand to SEQ ID NO: 1080640
gguuuccaggcauauuccc

SEQ ID NO: 1080642 - RNA, 19 nt, Artificial Sequence
  Description of Artificial Sequence: Synthetic oligonucleotide
  Sense strand starting at position 3410 of SEQ ID NO: 915449
gaagaaauguaguaugaag

SEQ ID NO: 1080643 - RNA, 19 nt, Artificial Sequence
  Description of Artificial Sequence: Synthetic oligonucleotide
  Antisense strand to SEQ ID NO: 1080642
cuucauacuacauuucuuc

SEQ ID NO: 1080644 - RNA, 19 nt, Artificial Sequence
  Description of Artificial Sequence: Synthetic oligonucleotide
  Sense strand starting at position 3500 of SEQ ID NO: 915449
ucuggaaugcuuugaggua

SEQ ID NO: 1080645 - RNA, 19 nt, Artificial Sequence
  Description of Artificial Sequence: Synthetic oligonucleotide
  Antisense strand to SEQ ID NO: 1080644
uaccucaaagcauuccaga

SEQ ID NO: 1080646 - RNA, 19 nt, Artificial Sequence
  Description of Artificial Sequence: Synthetic oligonucleotide
  Sense strand starting at position 3530 of SEQ ID NO: 915449
guguguaucugaguacuaa

SEQ ID NO: 1080647 - RNA, 19 nt, Artificial Sequence
  Description of Artificial Sequence: Synthetic oligonucleotide
  Antisense strand to SEQ ID NO: 1080646
uuaguacucagauacacac

SEQ ID NO: 1080648 - RNA, 19 nt, Artificial Sequence
  Description of Artificial Sequence: Synthetic oligonucleotide
  Sense strand starting at position 3531 of SEQ ID NO: 915449
uguguaucugaguacuaag

SEQ ID NO: 1080649 - RNA, 19 nt, Artificial Sequence
  Description of Artificial Sequence: Synthetic oligonucleotide
  Antisense strand to SEQ ID NO: 1080648
cuuaguacucagauacaca

SEQ ID NO: 1080650 - RNA, 19 nt, Artificial Sequence
  Description of Artificial Sequence: Synthetic oligonucleotide
  Sense strand starting at position 3691 of SEQ ID NO: 915449
agaccaauucccugguucu

SEQ ID NO: 1080651 - RNA, 19 nt, Artificial Sequence
  Description of Artificial Sequence: Synthetic oligonucleotide
  Antisense strand to SEQ ID NO: 1080650
agaaccagggaauuggucu

SEQ ID NO: 1080652 - RNA, 19 nt, Artificial Sequence
  Description of Artificial Sequence: Synthetic oligonucleotide
  Sense strand starting at position 3741 of SEQ ID NO: 915449
gagucugaguccucaccuu

SEQ ID NO: 1080653 - RNA, 19 nt, Artificial Sequence
  Description of Artificial Sequence: Synthetic oligonucleotide
  Antisense strand to SEQ ID NO: 1080652
aaggugaggacucagacuc

SEQ ID NO: 1080654 - RNA, 19 nt, Artificial Sequence
  Description of Artificial Sequence: Synthetic oligonucleotide
  Sense strand starting at position 3785 of SEQ ID NO: 915449
aggaguagcugcuuaguga

SEQ ID NO: 1080655 - RNA, 19 nt, Artificial Sequence
  Description of Artificial Sequence: Synthetic oligonucleotide
  Antisense strand to SEQ ID NO: 1080654
ucacuaagcagcuacuccu

SEQ ID NO: 1080656 - RNA, 19 nt, Artificial Sequence
  Description of Artificial Sequence: Synthetic oligonucleotide
  Sense strand starting at position 3798 of SEQ ID NO: 915449
uagugagguucucucauca

SEQ ID NO: 1080657 - RNA, 19 nt, Artificial Sequence
  Description of Artificial Sequence: Synthetic oligonucleotide
  Antisense strand to SEQ ID NO: 1080656
ugaugagagaaccucacua

SEQ ID NO: 1080658 - RNA, 19 nt, Artificial Sequence
  Description of Artificial Sequence: Synthetic oligonucleotide
  Sense strand starting at position 3925 of SEQ ID NO: 915449
gguauccuucugggauaua

SEQ ID NO: 1080659 - RNA, 19 nt, Artificial Sequence
  Description of Artificial Sequence: Synthetic oligonucleotide
  Antisense strand to SEQ ID NO: 1080658
uauaucccagaaggauacc

SEQ ID NO: 1080660 - RNA, 19 nt, Artificial Sequence
  Description of Artificial Sequence: Synthetic oligonucleotide
  Sense strand starting at position 3966 of SEQ ID NO: 915449
ccuggacuucuaggacguu

SEQ ID NO: 1080661 - RNA, 19 nt, Artificial Sequence
  Description of Artificial Sequence: Synthetic oligonucleotide
  Antisense strand to SEQ ID NO: 1080660
aacguccuagaaguccagg

SEQ ID NO: 1080662 - RNA, 19 nt, Artificial Sequence
  Description of Artificial Sequence: Synthetic oligonucleotide
  Sense strand starting at position 3969 of SEQ ID NO: 915449
ggacuucuaggacguuauu

SEQ ID NO: 1080663 - RNA, 19 nt, Artificial Sequence
  Description of Artificial Sequence: Synthetic oligonucleotide
  Antisense strand to SEQ ID NO: 1080662
aauaacguccuagaagucc

SEQ ID NO: 1080664 - RNA, 19 nt, Artificial Sequence
  Description of Artificial Sequence: Synthetic oligonucleotide
  Sense strand starting at position 84 of SEQ ID NO: 915450
ugcuguguuggauaccaga

SEQ ID NO: 1080665 - RNA, 19 nt, Artificial Sequence
  Description of Artificial Sequence: Synthetic oligonucleotide
  Antisense strand to SEQ ID NO: 1080664
ucugguauccaacacagca

SEQ ID NO: 1080666 - RNA, 19 nt, Artificial Sequence
  Description of Artificial Sequence: Synthetic oligonucleotide
  Sense strand starting at position 121 of SEQ ID NO: 915450
acaguccuguaccuuuaaa

SEQ ID NO: 1080667 - RNA, 19 nt, Artificial Sequence
  Description of Artificial Sequence: Synthetic oligonucleotide
  Antisense strand to SEQ ID NO: 1080666
uuuaaagguacaggacugu

SEQ ID NO: 1080668 - RNA, 19 nt, Artificial Sequence
  Description of Artificial Sequence: Synthetic oligonucleotide
  Sense strand starting at position 350 of SEQ ID NO: 915450
ccauuaugcucuguacauu

SEQ ID NO: 1080669 - RNA, 19 nt, Artificial Sequence
  Description of Artificial Sequence: Synthetic oligonucleotide
  Antisense strand to SEQ ID NO: 1080668
aauguacagagcauaaugg

SEQ ID NO: 1080670 - RNA, 19 nt, Artificial Sequence
  Description of Artificial Sequence: Synthetic oligonucleotide
  Sense strand starting at position 384 of SEQ ID NO: 915450
ggcuacaaguuuccaaagu

SEQ ID NO: 1080671 - RNA, 19 nt, Artificial Sequence
  Description of Artificial Sequence: Synthetic oligonucleotide
  Antisense strand to SEQ ID NO: 1080670
acuuuggaaacuuguagcc

SEQ ID NO: 1080672 - RNA, 19 nt, Artificial Sequence
  Description of Artificial Sequence: Synthetic oligonucleotide
  Sense strand starting at position 511 of SEQ ID NO: 915450
agagacauuguaugcaaag

SEQ ID NO: 1080673 - RNA, 19 nt, Artificial Sequence
  Description of Artificial Sequence: Synthetic oligonucleotide
  Antisense strand to SEQ ID NO: 1080672
cuuugcauacaaugucucu

SEQ ID NO: 1080674 - RNA, 19 nt, Artificial Sequence
  Description of Artificial Sequence: Synthetic oligonucleotide
  Sense strand starting at position 512 of SEQ ID NO: 915450
gagacauuguaugcaaagu

SEQ ID NO: 1080675 - RNA, 19 nt, Artificial Sequence
  Description of Artificial Sequence: Synthetic oligonucleotide
  Antisense strand to SEQ ID NO: 1080674
acuuugcauacaaugucuc

SEQ ID NO: 1080676 - RNA, 19 nt, Artificial Sequence
  Description of Artificial Sequence: Synthetic oligonucleotide
  Sense strand starting at position 582 of SEQ ID NO: 915450
uaucuaggagucugugcaa

SEQ ID NO: 1080677 - RNA, 19 nt, Artificial Sequence
  Description of Artificial Sequence: Synthetic oligonucleotide
  Antisense strand to SEQ ID NO: 1080676
uugcacagacuccuagaua

SEQ ID NO: 1080678 - RNA, 19 nt, Artificial Sequence
  Description of Artificial Sequence: Synthetic oligonucleotide
  Sense strand starting at position 585 of SEQ ID NO: 915450
cuaggagucugugcaaaga

SEQ ID NO: 1080679 - RNA, 19 nt, Artificial Sequence
  Description of Artificial Sequence: Synthetic oligonucleotide
  Antisense strand to SEQ ID NO: 1080678
ucuuugcacagacuccuag

SEQ ID NO: 1080680 - RNA, 19 nt, Artificial Sequence
  Description of Artificial Sequence: Synthetic oligonucleotide
  Sense strand starting at position 618 of SEQ ID NO: 915450
uuggcagaaauguagucau

SEQ ID NO: 1080681 - RNA, 19 nt, Artificial Sequence
  Description of Artificial Sequence: Synthetic oligonucleotide
  Antisense strand to SEQ ID NO: 1080680
augacuacauuucugccaa

SEQ ID NO: 1080682 - RNA, 19 nt, Artificial Sequence
  Description of Artificial Sequence: Synthetic oligonucleotide
  Sense strand starting at position 647 of SEQ ID NO: 915450
acaucuuagucugccagga

SEQ ID NO: 1080683 - RNA, 19 nt, Artificial Sequence
  Description of Artificial Sequence: Synthetic oligonucleotide
  Antisense strand to SEQ ID NO: 1080682
uccuggcagacuaagaugu

SEQ ID NO: 1080684 - RNA, 19 nt, Artificial Sequence
  Description of Artificial Sequence: Synthetic oligonucleotide
  Sense strand starting at position 651 of SEQ ID NO: 915450
cuuagucugccaggaucuu

SEQ ID NO: 1080685 - RNA, 19 nt, Artificial Sequence
  Description of Artificial Sequence: Synthetic oligonucleotide
  Antisense strand to SEQ ID NO: 1080684
aagauccuggcagacuaag

SEQ ID NO: 1080686 - RNA, 19 nt, Artificial Sequence
  Description of Artificial Sequence: Synthetic oligonucleotide
  Sense strand starting at position 761 of SEQ ID NO: 915450
ucacuuuauggcuguuaca

SEQ ID NO: 1080687 - RNA, 19 nt, Artificial Sequence
  Description of Artificial Sequence: Synthetic oligonucleotide
  Antisense strand to SEQ ID NO: 1080686
uguaacagccauaaaguga

SEQ ID NO: 1080688 - RNA, 19 nt, Artificial Sequence
  Description of Artificial Sequence: Synthetic oligonucleotide
  Sense strand starting at position 793 of SEQ ID NO: 915450
ccauuaauuuaagggaagu

SEQ ID NO: 1080689 - RNA, 19 nt, Artificial Sequence
  Description of Artificial Sequence: Synthetic oligonucleotide
  Antisense strand to SEQ ID NO: 1080688
acuucccuuaaauuaaugg

SEQ ID NO: 1080690 - RNA, 19 nt, Artificial Sequence
  Description of Artificial Sequence: Synthetic oligonucleotide
  Sense strand starting at position 827 of SEQ ID NO: 915450
ccuguaagucaacaaguaa

SEQ ID NO: 1080691 - RNA, 19 nt, Artificial Sequence
  Description of Artificial Sequence: Synthetic oligonucleotide
  Antisense strand to SEQ ID NO: 1080690
uuacuuguugacuuacagg

SEQ ID NO: 1080692 - RNA, 19 nt, Artificial Sequence
  Description of Artificial Sequence: Synthetic oligonucleotide
  Sense strand starting at position 967 of SEQ ID NO: 915450
aaagaauccuggguucucu

SEQ ID NO: 1080693 - RNA, 19 nt, Artificial Sequence
  Description of Artificial Sequence: Synthetic oligonucleotide
  Antisense strand to SEQ ID NO: 1080692
agagaacccaggauucuuu

SEQ ID NO: 1080694 - RNA, 19 nt, Artificial Sequence
  Description of Artificial Sequence: Synthetic oligonucleotide
  Sense strand starting at position 1151 of SEQ ID NO: 915450
guuaguuugcauucuugcu

SEQ ID NO: 1080695 - RNA, 19 nt, Artificial Sequence
  Description of Artificial Sequence: Synthetic oligonucleotide
  Antisense strand to SEQ ID NO: 1080694
agcaagaaugcaaacuaac

SEQ ID NO: 1080696 - RNA, 19 nt, Artificial Sequence
  Description of Artificial Sequence: Synthetic oligonucleotide
  Sense strand starting at position 1488 of SEQ ID NO: 915450
gagggucgaguguaccaaa

SEQ ID NO: 1080697 - RNA, 19 nt, Artificial Sequence
  Description of Artificial Sequence: Synthetic oligonucleotide
  Antisense strand to SEQ ID NO: 1080696
uuugguacacucgacccuc

SEQ ID NO: 1080698 - RNA, 19 nt, Artificial Sequence
  Description of Artificial Sequence: Synthetic oligonucleotide
  Sense strand starting at position 2742 of SEQ ID NO: 915450
ggcccagaauuccuggaua

SEQ ID NO: 1080699 - RNA, 19 nt, Artificial Sequence
  Description of Artificial Sequence: Synthetic oligonucleotide
  Antisense strand to SEQ ID NO: 1080698
uauccaggaauucugggcc

SEQ ID NO: 1080700 - RNA, 19 nt, Artificial Sequence
  Description of Artificial Sequence: Synthetic oligonucleotide
  Sense strand starting at position 2744 of SEQ ID NO: 915450
cccagaauuccuggauaau

SEQ ID NO: 1080701 - RNA, 19 nt, Artificial Sequence
  Description of Artificial Sequence: Synthetic oligonucleotide
  Antisense strand to SEQ ID NO: 1080700
auuauccaggaauucuggg

SEQ ID NO: 1080702 - RNA, 19 nt, Artificial Sequence
  Description of Artificial Sequence: Synthetic oligonucleotide
  Sense strand starting at position 2754 of SEQ ID NO: 915450
cuggauaaugugggugcua

SEQ ID NO: 1080703 - RNA, 19 nt, Artificial Sequence
  Description of Artificial Sequence: Synthetic oligonucleotide
  Antisense strand to SEQ ID NO: 1080702
uagcacccacauuauccag

SEQ ID NO: 1080704 - RNA, 19 nt, Artificial Sequence
  Description of Artificial Sequence: Synthetic oligonucleotide
  Sense strand starting at position 2755 of SEQ ID NO: 915450
uggauaaugugggugcuaa

SEQ ID NO: 1080705 - RNA, 19 nt, Artificial Sequence
  Description of Artificial Sequence: Synthetic oligonucleotide
  Antisense strand to SEQ ID NO: 1080704
uuagcacccacauuaucca

SEQ ID NO: 1080706 - RNA, 19 nt, Artificial Sequence
  Description of Artificial Sequence: Synthetic oligonucleotide
  Sense strand starting at position 2756 of SEQ ID NO: 915450
ggauaaugugggugcuaau

SEQ ID NO: 1080707 - RNA, 19 nt, Artificial Sequence
  Description of Artificial Sequence: Synthetic oligonucleotide
  Antisense strand to SEQ ID NO: 1080706
auuagcacccacauuaucc

SEQ ID NO: 1080708 - RNA, 19 nt, Artificial Sequence
  Description of Artificial Sequence: Synthetic oligonucleotide
  Sense strand starting at position 3010 of SEQ ID NO: 915450
guuccuuucccagaagccu

SEQ ID NO: 1080709 - RNA, 19 nt, Artificial Sequence
  Description of Artificial Sequence: Synthetic oligonucleotide
  Antisense strand to SEQ ID NO: 1080708
aggcuucugggaaaggaac

SEQ ID NO: 1080710 - RNA, 19 nt, Artificial Sequence
  Description of Artificial Sequence: Synthetic oligonucleotide
  Sense strand starting at position 3043 of SEQ ID NO: 915450
cugcuuugccacuaguaga

SEQ ID NO: 1080711 - RNA, 19 nt, Artificial Sequence
  Description of Artificial Sequence: Synthetic oligonucleotide
  Antisense strand to SEQ ID NO: 1080710
ucuacuaguggcaaagcag

SEQ ID NO: 1080712 - RNA, 19 nt, Artificial Sequence
  Description of Artificial Sequence: Synthetic oligonucleotide
  Sense strand starting at position 3093 of SEQ ID NO: 915450
acaucuguggugggaucua

SEQ ID NO: 1080713 - RNA, 19 nt, Artificial Sequence
  Description of Artificial Sequence: Synthetic oligonucleotide
  Antisense strand to SEQ ID NO: 1080712
uagaucccaccacagaugu

SEQ ID NO: 1080714 - RNA, 19 nt, Artificial Sequence
  Description of Artificial Sequence: Synthetic oligonucleotide
  Sense strand starting at position 3104 of SEQ ID NO: 915450
gggaucuacugagucugaa

SEQ ID NO: 1080715 - RNA, 19 nt, Artificial Sequence
  Description of Artificial Sequence: Synthetic oligonucleotide
  Antisense strand to SEQ ID NO: 1080714
uucagacucaguagauccc

SEQ ID NO: 1080716 - RNA, 19 nt, Artificial Sequence
  Description of Artificial Sequence: Synthetic oligonucleotide
  Sense strand starting at position 3140 of SEQ ID NO: 915450
gccacugucuggcuaacaa

SEQ ID NO: 1080717 - RNA, 19 nt, Artificial Sequence
  Description of Artificial Sequence: Synthetic oligonucleotide
  Antisense strand to SEQ ID NO: 1080716
uuguuagccagacaguggc

SEQ ID NO: 1080718 - RNA, 19 nt, Artificial Sequence
  Description of Artificial Sequence: Synthetic oligonucleotide
  Sense strand starting at position 3175 of SEQ ID NO: 915450
uuuguuuacuuaguagagu

SEQ ID NO: 1080719 - RNA, 19 nt, Artificial Sequence
  Description of Artificial Sequence: Synthetic oligonucleotide
  Antisense strand to SEQ ID NO: 1080718
acucuacuaaguaaacaaa

SEQ ID NO: 1080720 - RNA, 19 nt, Artificial Sequence
  Description of Artificial Sequence: Synthetic oligonucleotide
  Sense strand starting at position 3264 of SEQ ID NO: 915450
gggaauaugccuggaaacc

SEQ ID NO: 1080721 - RNA, 19 nt, Artificial Sequence
  Description of Artificial Sequence: Synthetic oligonucleotide
  Antisense strand to SEQ ID NO: 1080720
gguuuccaggcauauuccc

SEQ ID NO: 1080722 - RNA, 19 nt, Artificial Sequence
  Description of Artificial Sequence: Synthetic oligonucleotide
  Sense strand starting at position 3299 of SEQ ID NO: 915450
gaagaaauguaguaugaag

SEQ ID NO: 1080723 - RNA, 19 nt, Artificial Sequence
  Description of Artificial Sequence: Synthetic oligonucleotide
  Antisense strand to SEQ ID NO: 1080722
cuucauacuacauuucuuc

SEQ ID NO: 1080724 - RNA, 19 nt, Artificial Sequence
  Description of Artificial Sequence: Synthetic oligonucleotide
  Sense strand starting at position 3389 of SEQ ID NO: 915450
ucuggaaugcuuugaggua

SEQ ID NO: 1080725 - RNA, 19 nt, Artificial Sequence
  Description of Artificial Sequence: Synthetic oligonucleotide
  Antisense strand to SEQ ID NO: 1080724
uaccucaaagcauuccaga

SEQ ID NO: 1080726 - RNA, 19 nt, Artificial Sequence
  Description of Artificial Sequence: Synthetic oligonucleotide
  Sense strand starting at position 3419 of SEQ ID NO: 915450
guguguaucugaguacuaa

SEQ ID NO: 1080727 - RNA, 19 nt, Artificial Sequence
  Description of Artificial Sequence: Synthetic oligonucleotide
  Antisense strand to SEQ ID NO: 1080726
uuaguacucagauacacac

SEQ ID NO: 1080728 - RNA, 19 nt, Artificial Sequence
  Description of Artificial Sequence: Synthetic oligonucleotide
  Sense strand starting at position 3420 of SEQ ID NO: 915450
uguguaucugaguacuaag

SEQ ID NO: 1080729 - RNA, 19 nt, Artificial Sequence
  Description of Artificial Sequence: Synthetic oligonucleotide
  Antisense strand to SEQ ID NO: 1080728
cuuaguacucagauacaca

SEQ ID NO: 1080730 - RNA, 19 nt, Artificial Sequence
  Description of Artificial Sequence: Synthetic oligonucleotide
  Sense strand starting at position 3580 of SEQ ID NO: 915450
agaccaauucccugguucu

SEQ ID NO: 1080731 - RNA, 19 nt, Artificial Sequence
  Description of Artificial Sequence: Synthetic oligonucleotide
  Antisense strand to SEQ ID NO: 1080730
agaaccagggaauuggucu

SEQ ID NO: 1080732 - RNA, 19 nt, Artificial Sequence
  Description of Artificial Sequence: Synthetic oligonucleotide
  Sense strand starting at position 3630 of SEQ ID NO: 915450
gagucugaguccucaccuu

SEQ ID NO: 1080733 - RNA, 19 nt, Artificial Sequence
  Description of Artificial Sequence: Synthetic oligonucleotide
  Antisense strand to SEQ ID NO: 1080732
aaggugaggacucagacuc

SEQ ID NO: 1080734 - RNA, 19 nt, Artificial Sequence
  Description of Artificial Sequence: Synthetic oligonucleotide
  Sense strand starting at position 3674 of SEQ ID NO: 915450
aggaguagcugcuuaguga

SEQ ID NO: 1080735 - RNA, 19 nt, Artificial Sequence
  Description of Artificial Sequence: Synthetic oligonucleotide
  Antisense strand to SEQ ID NO: 1080734
ucacuaagcagcuacuccu

SEQ ID NO: 1080736 - RNA, 19 nt, Artificial Sequence
  Description of Artificial Sequence: Synthetic oligonucleotide
  Sense strand starting at position 3687 of SEQ ID NO: 915450
uagugagguucucucauca

SEQ ID NO: 1080737 - RNA, 19 nt, Artificial Sequence
  Description of Artificial Sequence: Synthetic oligonucleotide
  Antisense strand to SEQ ID NO: 1080736
ugaugagagaaccucacua

SEQ ID NO: 1080738 - RNA, 19 nt, Artificial Sequence
  Description of Artificial Sequence: Synthetic oligonucleotide
  Sense strand starting at position 3814 of SEQ ID NO: 915450
gguauccuucugggauaua

SEQ ID NO: 1080739 - RNA, 19 nt, Artificial Sequence
  Description of Artificial Sequence: Synthetic oligonucleotide
  Antisense strand to SEQ ID NO: 1080738
uauaucccagaaggauacc

SEQ ID NO: 1080740 - RNA, 19 nt, Artificial Sequence
  Description of Artificial Sequence: Synthetic oligonucleotide
  Sense strand starting at position 3855 of SEQ ID NO: 915450
ccuggacuucuaggacguu

SEQ ID NO: 1080741 - RNA, 19 nt, Artificial Sequence
  Description of Artificial Sequence: Synthetic oligonucleotide
  Antisense strand to SEQ ID NO: 1080740
aacguccuagaaguccagg

SEQ ID NO: 1080742 - RNA, 19 nt, Artificial Sequence
  Description of Artificial Sequence: Synthetic oligonucleotide
  Sense strand starting at position 3858 of SEQ ID NO: 915450
ggacuucuaggacguuauu

SEQ ID NO: 1080743 - RNA, 19 nt, Artificial Sequence
  Description of Artificial Sequence: Synthetic oligonucleotide
  Antisense strand to SEQ ID NO: 1080742
aauaacguccuagaagucc

SEQ ID NO: 1080744 - RNA, 19 nt, Artificial Sequence
  Description of Artificial Sequence: Synthetic oligonucleotide
  Sense strand starting at position 2062 of SEQ ID NO: 915451
cacucauugguccguuuga

SEQ ID NO: 1080745 - RNA, 19 nt, Artificial Sequence
  Description of Artificial Sequence: Synthetic oligonucleotide
  Antisense strand to SEQ ID NO: 1080744
ucaaacggaccaaugagug

SEQ ID NO: 1080746 - RNA, 19 nt, Artificial Sequence
  Description of Artificial Sequence: Synthetic oligonucleotide
  Sense strand starting at position 2063 of SEQ ID NO: 915451
acucauugguccguuugaa

SEQ ID NO: 1080747 - RNA, 19 nt, Artificial Sequence
  Description of Artificial Sequence: Synthetic oligonucleotide
  Antisense strand to SEQ ID NO: 1080746
uucaaacggaccaaugagu

SEQ ID NO: 1080748 - RNA, 19 nt, Artificial Sequence
  Description of Artificial Sequence: Synthetic oligonucleotide
  Sense strand starting at position 2086 of SEQ ID NO: 915451
gcccgaacguauuuacuuu

SEQ ID NO: 1080749 - RNA, 19 nt, Artificial Sequence
  Description of Artificial Sequence: Synthetic oligonucleotide
  Antisense strand to SEQ ID NO: 1080748
aaaguaaauacguucgggc

SEQ ID NO: 1080750 - RNA, 19 nt, Artificial Sequence
  Description of Artificial Sequence: Synthetic oligonucleotide
  Sense strand starting at position 2311 of SEQ ID NO: 915451
ugggcugggcuuuggaaua

SEQ ID NO: 1080751 - RNA, 19 nt, Artificial Sequence
  Description of Artificial Sequence: Synthetic oligonucleotide
  Antisense strand to SEQ ID NO: 1080750
uauuccaaagcccagccca

SEQ ID NO: 1080752 - RNA, 19 nt, Artificial Sequence
  Description of Artificial Sequence: Synthetic oligonucleotide
  Sense strand starting at position 2350 of SEQ ID NO: 915451
ccagauccgucuccucauu

SEQ ID NO: 1080753 - RNA, 19 nt, Artificial Sequence
  Description of Artificial Sequence: Synthetic oligonucleotide
  Antisense strand to SEQ ID NO: 1080752
aaugaggagacggaucugg

SEQ ID NO: 1080754 - RNA, 19 nt, Artificial Sequence
  Description of Artificial Sequence: Synthetic oligonucleotide
  Sense strand starting at position 2408 of SEQ ID NO: 915451
ccuacagugcauugaggau

SEQ ID NO: 1080755 - RNA, 19 nt, Artificial Sequence
  Description of Artificial Sequence: Synthetic oligonucleotide
  Antisense strand to SEQ ID NO: 1080754
auccucaaugcacuguagg

SEQ ID NO: 1080756 - RNA, 19 nt, Artificial Sequence
  Description of Artificial Sequence: Synthetic oligonucleotide
  Sense strand starting at position 2915 of SEQ ID NO: 915451
ucccaaauauauugggaau

SEQ ID NO: 1080757 - RNA, 19 nt, Artificial Sequence
  Description of Artificial Sequence: Synthetic oligonucleotide
  Antisense strand to SEQ ID NO: 1080756
auucccaauauauuuggga

SEQ ID NO: 1080758 - RNA, 19 nt, Artificial Sequence
  Description of Artificial Sequence: Synthetic oligonucleotide
  Sense strand starting at position 2955 of SEQ ID NO: 915451
caaggaugcuuagcagacu

SEQ ID NO: 1080759 - RNA, 19 nt, Artificial Sequence
  Description of Artificial Sequence: Synthetic oligonucleotide
  Antisense strand to SEQ ID NO: 1080758
agucugcuaagcauccuug

SEQ ID NO: 1080760 - RNA, 19 nt, Artificial Sequence
  Description of Artificial Sequence: Synthetic oligonucleotide
  Sense strand starting at position 2967 of SEQ ID NO: 915451
gcagacuccuaguggacuu

SEQ ID NO: 1080761 - RNA, 19 nt, Artificial Sequence
  Description of Artificial Sequence: Synthetic oligonucleotide
  Antisense strand to SEQ ID NO: 1080760
aaguccacuaggagucugc

SEQ ID NO: 1080762 - RNA, 19 nt, Artificial Sequence
  Description of Artificial Sequence: Synthetic oligonucleotide
  Sense strand starting at position 2994 of SEQ ID NO: 915451
ccuggucaccuuugcugaa

SEQ ID NO: 1080763 - RNA, 19 nt, Artificial Sequence
  Description of Artificial Sequence: Synthetic oligonucleotide
  Antisense strand to SEQ ID NO: 1080762
uucagcaaaggugaccagg

SEQ ID NO: 1080764 - RNA, 19 nt, Artificial Sequence
  Description of Artificial Sequence: Synthetic oligonucleotide
  Sense strand starting at position 2995 of SEQ ID NO: 915451
cuggucaccuuugcugaau

SEQ ID NO: 1080765 - RNA, 19 nt, Artificial Sequence
  Description of Artificial Sequence: Synthetic oligonucleotide
  Antisense strand to SEQ ID NO: 1080764
auucagcaaaggugaccag

SEQ ID NO: 1080766 - RNA, 19 nt, Artificial Sequence
  Description of Artificial Sequence: Synthetic oligonucleotide
  Sense strand starting at position 2996 of SEQ ID NO: 915451
uggucaccuuugcugaauu

SEQ ID NO: 1080767 - RNA, 19 nt, Artificial Sequence
  Description of Artificial Sequence: Synthetic oligonucleotide
  Antisense strand to SEQ ID NO: 1080766
aauucagcaaaggugacca

SEQ ID NO: 1080768 - RNA, 19 nt, Artificial Sequence
  Description of Artificial Sequence: Synthetic oligonucleotide
  Sense strand starting at position 3013 of SEQ ID NO: 915451
uuuccuacuugaguugaau

SEQ ID NO: 1080769 - RNA, 19 nt, Artificial Sequence
  Description of Artificial Sequence: Synthetic oligonucleotide
  Antisense strand to SEQ ID NO: 1080768
auucaacucaaguaggaaa

SEQ ID NO: 1080770 - RNA, 19 nt, Artificial Sequence
  Description of Artificial Sequence: Synthetic oligonucleotide
  Sense strand starting at position 3022 of SEQ ID NO: 915451
ugaguugaauucuccaucu

SEQ ID NO: 1080771 - RNA, 19 nt, Artificial Sequence
  Description of Artificial Sequence: Synthetic oligonucleotide
  Antisense strand to SEQ ID NO: 1080770
agauggagaauucaacuca

SEQ ID NO: 1080772 - RNA, 19 nt, Artificial Sequence
  Description of Artificial Sequence: Synthetic oligonucleotide
  Sense strand starting at position 3206 of SEQ ID NO: 915451
gacugcagucgcugaaacu

SEQ ID NO: 1080773 - RNA, 19 nt, Artificial Sequence
  Description of Artificial Sequence: Synthetic oligonucleotide
  Antisense strand to SEQ ID NO: 1080772
aguuucagcgacugcaguc

SEQ ID NO: 1080774 - RNA, 19 nt, Artificial Sequence
  Description of Artificial Sequence: Synthetic oligonucleotide
  Sense strand starting at position 3276 of SEQ ID NO: 915451
gguuaugguuuguuguguu

SEQ ID NO: 1080775 - RNA, 19 nt, Artificial Sequence
  Description of Artificial Sequence: Synthetic oligonucleotide
  Antisense strand to SEQ ID NO: 1080774
aacacaacaaaccauaacc

SEQ ID NO: 1080776 - RNA, 19 nt, Artificial Sequence
  Description of Artificial Sequence: Synthetic oligonucleotide
  Sense strand starting at position 3280 of SEQ ID NO: 915451
augguuuguuguguuguga

SEQ ID NO: 1080777 - RNA, 19 nt, Artificial Sequence
  Description of Artificial Sequence: Synthetic oligonucleotide
  Antisense strand to SEQ ID NO: 1080776
ucacaacacaacaaaccau

SEQ ID NO: 1080778 - RNA, 19 nt, Artificial Sequence
  Description of Artificial Sequence: Synthetic oligonucleotide
  Sense strand starting at position 3281 of SEQ ID NO: 915451
ugguuuguuguguugugau

SEQ ID NO: 1080779 - RNA, 19 nt, Artificial Sequence
  Description of Artificial Sequence: Synthetic oligonucleotide
  Antisense strand to SEQ ID NO: 1080778
aucacaacacaacaaacca

SEQ ID NO: 1080780 - RNA, 19 nt, Artificial Sequence
  Description of Artificial Sequence: Synthetic oligonucleotide
  Sense strand starting at position 3291 of SEQ ID NO: 915451
uguugugauguguugcuga

SEQ ID NO: 1080781 - RNA, 19 nt, Artificial Sequence
  Description of Artificial Sequence: Synthetic oligonucleotide
  Antisense strand to SEQ ID NO: 1080780
ucagcaacacaucacaaca

SEQ ID NO: 1080782 - RNA, 19 nt, Artificial Sequence
  Description of Artificial Sequence: Synthetic oligonucleotide
  Sense strand starting at position 3296 of SEQ ID NO: 915451
ugauguguugcugauguuu

SEQ ID NO: 1080783 - RNA, 19 nt, Artificial Sequence
  Description of Artificial Sequence: Synthetic oligonucleotide
  Antisense strand to SEQ ID NO: 1080782
aaacaucagcaacacauca

SEQ ID NO: 1080784 - RNA, 19 nt, Artificial Sequence
  Description of Artificial Sequence: Synthetic oligonucleotide
  Sense strand starting at position 3343 of SEQ ID NO: 915451
gugucaaaucuuggagaau

SEQ ID NO: 1080785 - RNA, 19 nt, Artificial Sequence
  Description of Artificial Sequence: Synthetic oligonucleotide
  Antisense strand to SEQ ID NO: 1080784
auucuccaagauuugacac

SEQ ID NO: 1080786 - RNA, 19 nt, Artificial Sequence
  Description of Artificial Sequence: Synthetic oligonucleotide
  Sense strand starting at position 3344 of SEQ ID NO: 915451
ugucaaaucuuggagaaug

SEQ ID NO: 1080787 - RNA, 19 nt, Artificial Sequence
  Description of Artificial Sequence: Synthetic oligonucleotide
  Antisense strand to SEQ ID NO: 1080786
cauucuccaagauuugaca

SEQ ID NO: 1080788 - RNA, 19 nt, Artificial Sequence
  Description of Artificial Sequence: Synthetic oligonucleotide
  Sense strand starting at position 3403 of SEQ ID NO: 915451
accaucuccucuuaaggga

SEQ ID NO: 1080789 - RNA, 19 nt, Artificial Sequence
  Description of Artificial Sequence: Synthetic oligonucleotide
  Antisense strand to SEQ ID NO: 1080788
ucccuuaagaggagauggu

SEQ ID NO: 1080790 - RNA, 19 nt, Artificial Sequence
  Description of Artificial Sequence: Synthetic oligonucleotide
  Sense strand starting at position 3433 of SEQ ID NO: 915451
cagugaacacuauguuguu

SEQ ID NO: 1080791 - RNA, 19 nt, Artificial Sequence
  Description of Artificial Sequence: Synthetic oligonucleotide
  Antisense strand to SEQ ID NO: 1080790
aacaacauaguguucacug

SEQ ID NO: 1080792 - RNA, 19 nt, Artificial Sequence
  Description of Artificial Sequence: Synthetic oligonucleotide
  Sense strand starting at position 3434 of SEQ ID NO: 915451
agugaacacuauguuguua

SEQ ID NO: 1080793 - RNA, 19 nt, Artificial Sequence
  Description of Artificial Sequence: Synthetic oligonucleotide
  Antisense strand to SEQ ID NO: 1080792
uaacaacauaguguucacu

SEQ ID NO: 1080794 - RNA, 19 nt, Artificial Sequence
  Description of Artificial Sequence: Synthetic oligonucleotide
  Sense strand starting at position 3436 of SEQ ID NO: 915451
ugaacacuauguuguuauu

SEQ ID NO: 1080795 - RNA, 19 nt, Artificial Sequence
  Description of Artificial Sequence: Synthetic oligonucleotide
  Antisense strand to SEQ ID NO: 1080794
aauaacaacauaguguuca

SEQ ID NO: 1080796 - RNA, 19 nt, Artificial Sequence
  Description of Artificial Sequence: Synthetic oligonucleotide
  Sense strand starting at position 3554 of SEQ ID NO: 915451
uccuguauacacgaugauu

SEQ ID NO: 1080797 - RNA, 19 nt, Artificial Sequence
  Description of Artificial Sequence: Synthetic oligonucleotide
  Antisense strand to SEQ ID NO: 1080796
aaucaucguguauacagga

SEQ ID NO: 1080798 - RNA, 19 nt, Artificial Sequence
  Description of Artificial Sequence: Synthetic oligonucleotide
  Sense strand starting at position 3591 of SEQ ID NO: 915451
gccugaaccuguccugcaa

SEQ ID NO: 1080799 - RNA, 19 nt, Artificial Sequence
  Description of Artificial Sequence: Synthetic oligonucleotide
  Antisense strand to SEQ ID NO: 1080798
uugcaggacagguucaggc

SEQ ID NO: 1080800 - RNA, 19 nt, Artificial Sequence
  Description of Artificial Sequence: Synthetic oligonucleotide
  Sense strand starting at position 3622 of SEQ ID NO: 915451
agcugcuuccuggacauga

SEQ ID NO: 1080801 - RNA, 19 nt, Artificial Sequence
  Description of Artificial Sequence: Synthetic oligonucleotide
  Antisense strand to SEQ ID NO: 1080800
ucauguccaggaagcagcu

SEQ ID NO: 1080802 - RNA, 19 nt, Artificial Sequence
  Description of Artificial Sequence: Synthetic oligonucleotide
  Sense strand starting at position 3659 of SEQ ID NO: 915451
acuggugcuuccuacacaa

SEQ ID NO: 1080803 - RNA, 19 nt, Artificial Sequence
  Description of Artificial Sequence: Synthetic oligonucleotide
  Antisense strand to SEQ ID NO: 1080802
uuguguaggaagcaccagu

SEQ ID NO: 1080804 - RNA, 19 nt, Artificial Sequence
  Description of Artificial Sequence: Synthetic oligonucleotide
  Sense strand starting at position 3661 of SEQ ID NO: 915451
uggugcuuccuacacaaua

SEQ ID NO: 1080805 - RNA, 19 nt, Artificial Sequence
  Description of Artificial Sequence: Synthetic oligonucleotide
  Antisense strand to SEQ ID NO: 1080804
uauuguguaggaagcacca

SEQ ID NO: 1080806 - RNA, 19 nt, Artificial Sequence
  Description of Artificial Sequence: Synthetic oligonucleotide
  Sense strand starting at position 3713 of SEQ ID NO: 915451
cugcacugcgugcaauuaa

SEQ ID NO: 1080807 - RNA, 19 nt, Artificial Sequence
  Description of Artificial Sequence: Synthetic oligonucleotide
  Antisense strand to SEQ ID NO: 1080806
uuaauugcacgcagugcag

SEQ ID NO: 1080808 - RNA, 19 nt, Artificial Sequence
  Description of Artificial Sequence: Synthetic oligonucleotide
  Sense strand starting at position 3722 of SEQ ID NO: 915451
gugcaauuaacuggccagu

SEQ ID NO: 1080809 - RNA, 19 nt, Artificial Sequence
  Description of Artificial Sequence: Synthetic oligonucleotide
  Antisense strand to SEQ ID NO: 1080808
acuggccaguuaauugcac

SEQ ID NO: 1080810 - RNA, 19 nt, Artificial Sequence
  Description of Artificial Sequence: Synthetic oligonucleotide
  Sense strand starting at position 3724 of SEQ ID NO: 915451
gcaauuaacuggccaguuu

SEQ ID NO: 1080811 - RNA, 19 nt, Artificial Sequence
  Description of Artificial Sequence: Synthetic oligonucleotide
  Antisense strand to SEQ ID NO: 1080810
aaacuggccaguuaauugc

SEQ ID NO: 1080812 - RNA, 19 nt, Artificial Sequence
  Description of Artificial Sequence: Synthetic oligonucleotide
  Sense strand starting at position 3778 of SEQ ID NO: 915451
uuggcaggauccucuaaga

SEQ ID NO: 1080813 - RNA, 19 nt, Artificial Sequence
  Description of Artificial Sequence: Synthetic oligonucleotide
  Antisense strand to SEQ ID NO: 1080812
ucuuagaggauccugccaa

SEQ ID NO: 1080814 - RNA, 19 nt, Artificial Sequence
  Description of Artificial Sequence: Synthetic oligonucleotide
  Sense strand starting at position 3783 of SEQ ID NO: 915451
aggauccucuaagagagaa

SEQ ID NO: 1080815 - RNA, 19 nt, Artificial Sequence
  Description of Artificial Sequence: Synthetic oligonucleotide
  Antisense strand to SEQ ID NO: 1080814
uucucucuuagaggauccu

SEQ ID NO: 1080816 - RNA, 19 nt, Artificial Sequence
  Description of Artificial Sequence: Synthetic oligonucleotide
  Sense strand starting at position 3882 of SEQ ID NO: 915451
acccuugacucccaggaaa

SEQ ID NO: 1080817 - RNA, 19 nt, Artificial Sequence
  Description of Artificial Sequence: Synthetic oligonucleotide
  Antisense strand to SEQ ID NO: 1080816
uuuccugggagucaagggu

SEQ ID NO: 1080818 - RNA, 19 nt, Artificial Sequence
  Description of Artificial Sequence: Synthetic oligonucleotide
  Sense strand starting at position 3966 of SEQ ID NO: 915451
auuguuugacaauguuagu

SEQ ID NO: 1080819 - RNA, 19 nt, Artificial Sequence
  Description of Artificial Sequence: Synthetic oligonucleotide
  Antisense strand to SEQ ID NO: 1080818
acuaacauugucaaacaau

SEQ ID NO: 1080820 - RNA, 19 nt, Artificial Sequence
  Description of Artificial Sequence: Synthetic oligonucleotide
  Sense strand starting at position 3975 of SEQ ID NO: 915451
caauguuagucccagggau

SEQ ID NO: 1080821 - RNA, 19 nt, Artificial Sequence
  Description of Artificial Sequence: Synthetic oligonucleotide
  Antisense strand to SEQ ID NO: 1080820
aucccugggacuaacauug

SEQ ID NO: 1080822 - RNA, 19 nt, Artificial Sequence
  Description of Artificial Sequence: Synthetic oligonucleotide
  Sense strand starting at position 3977 of SEQ ID NO: 915451
auguuagucccagggauug

SEQ ID NO: 1080823 - RNA, 19 nt, Artificial Sequence
  Description of Artificial Sequence: Synthetic oligonucleotide
  Antisense strand to SEQ ID NO: 1080822
caaucccugggacuaacau

SEQ ID NO: 1080824 - RNA, 19 nt, Artificial Sequence
  Description of Artificial Sequence: Synthetic oligonucleotide
  Sense strand starting at position 53 of SEQ ID NO: 915452
gaugauuuguuguagcuga

SEQ ID NO: 1080825 - RNA, 19 nt, Artificial Sequence
  Description of Artificial Sequence: Synthetic oligonucleotide
  Antisense strand to SEQ ID NO: 1080824
ucagcuacaacaaaucauc

SEQ ID NO: 1080826 - RNA, 19 nt, Artificial Sequence
  Description of Artificial Sequence: Synthetic oligonucleotide
  Sense strand starting at position 146 of SEQ ID NO: 915452
ccguuucugucagucaaga

SEQ ID NO: 1080827 - RNA, 19 nt, Artificial Sequence
  Description of Artificial Sequence: Synthetic oligonucleotide
  Antisense strand to SEQ ID NO: 1080826
ucuugacugacagaaacgg

SEQ ID NO: 1080828 - RNA, 19 nt, Artificial Sequence
  Description of Artificial Sequence: Synthetic oligonucleotide
  Sense strand starting at position 148 of SEQ ID NO: 915452
guuucugucagucaagagu

SEQ ID NO: 1080829 - RNA, 19 nt, Artificial Sequence
  Description of Artificial Sequence: Synthetic oligonucleotide
  Antisense strand to SEQ ID NO: 1080828
acucuugacugacagaaac

SEQ ID NO: 1080830 - RNA, 19 nt, Artificial Sequence
  Description of Artificial Sequence: Synthetic oligonucleotide
  Sense strand starting at position 174 of SEQ ID NO: 915452
gccugagcucgggaagcau

SEQ ID NO: 1080831 - RNA, 19 nt, Artificial Sequence
  Description of Artificial Sequence: Synthetic oligonucleotide
  Antisense strand to SEQ ID NO: 1080830
augcuucccgagcucaggc

SEQ ID NO: 1080832 - RNA, 19 nt, Artificial Sequence
  Description of Artificial Sequence: Synthetic oligonucleotide
  Sense strand starting at position 359 of SEQ ID NO: 915452
ggccgcggucacucauauu

SEQ ID NO: 1080833 - RNA, 19 nt, Artificial Sequence
  Description of Artificial Sequence: Synthetic oligonucleotide
  Antisense strand to SEQ ID NO: 1080832
aauaugagugaccgcggcc

SEQ ID NO: 1080834 - RNA, 19 nt, Artificial Sequence
  Description of Artificial Sequence: Synthetic oligonucleotide
  Sense strand starting at position 531 of SEQ ID NO: 915452
uaagaauauugagauguga

SEQ ID NO: 1080835 - RNA, 19 nt, Artificial Sequence
  Description of Artificial Sequence: Synthetic oligonucleotide
  Antisense strand to SEQ ID NO: 1080834
ucacaucucaauauucuua

SEQ ID NO: 1080836 - RNA, 19 nt, Artificial Sequence
  Description of Artificial Sequence: Synthetic oligonucleotide
  Sense strand starting at position 575 of SEQ ID NO: 915452
ccggcauauaaucaugaga

SEQ ID NO: 1080837 - RNA, 19 nt, Artificial Sequence
  Description of Artificial Sequence: Synthetic oligonucleotide
  Antisense strand to SEQ ID NO: 1080836
ucucaugauuauaugccgg

SEQ ID NO: 1080838 - RNA, 19 nt, Artificial Sequence
  Description of Artificial Sequence: Synthetic oligonucleotide
  Sense strand starting at position 578 of SEQ ID NO: 915452
gcauauaaucaugagaguu

SEQ ID NO: 1080839 - RNA, 19 nt, Artificial Sequence
  Description of Artificial Sequence: Synthetic oligonucleotide
  Antisense strand to SEQ ID NO: 1080838
aacucucaugauuauaugc

SEQ ID NO: 1080840 - RNA, 19 nt, Artificial Sequence
  Description of Artificial Sequence: Synthetic oligonucleotide
  Sense strand starting at position 580 of SEQ ID NO: 915452
auauaaucaugagaguucu

SEQ ID NO: 1080841 - RNA, 19 nt, Artificial Sequence
  Description of Artificial Sequence: Synthetic oligonucleotide
  Antisense strand to SEQ ID NO: 1080840
agaacucucaugauuauau

SEQ ID NO: 1080842 - RNA, 19 nt, Artificial Sequence
  Description of Artificial Sequence: Synthetic oligonucleotide
  Sense strand starting at position 586 of SEQ ID NO: 915452
ucaugagaguucuuaugca

SEQ ID NO: 1080843 - RNA, 19 nt, Artificial Sequence
  Description of Artificial Sequence: Synthetic oligonucleotide
  Antisense strand to SEQ ID NO: 1080842
ugcauaagaacucucauga

SEQ ID NO: 1080844 - RNA, 19 nt, Artificial Sequence
  Description of Artificial Sequence: Synthetic oligonucleotide
  Sense strand starting at position 590 of SEQ ID NO: 915452
gagaguucuuaugcagaga

SEQ ID NO: 1080845 - RNA, 19 nt, Artificial Sequence
  Description of Artificial Sequence: Synthetic oligonucleotide
  Antisense strand to SEQ ID NO: 1080844
ucucugcauaagaacucuc

SEQ ID NO: 1080846 - RNA, 19 nt, Artificial Sequence
  Description of Artificial Sequence: Synthetic oligonucleotide
  Sense strand starting at position 591 of SEQ ID NO: 915452
agaguucuuaugcagagac

SEQ ID NO: 1080847 - RNA, 19 nt, Artificial Sequence
  Description of Artificial Sequence: Synthetic oligonucleotide
  Antisense strand to SEQ ID NO: 1080846
gucucugcauaagaacucu

SEQ ID NO: 1080848 - RNA, 19 nt, Artificial Sequence
  Description of Artificial Sequence: Synthetic oligonucleotide
  Sense strand starting at position 637 of SEQ ID NO: 915452
gccucuagaaguuggaaga

SEQ ID NO: 1080849 - RNA, 19 nt, Artificial Sequence
  Description of Artificial Sequence: Synthetic oligonucleotide
  Antisense strand to SEQ ID NO: 1080848
ucuuccaacuucuagaggc

SEQ ID NO: 1080850 - RNA, 19 nt, Artificial Sequence
  Description of Artificial Sequence: Synthetic oligonucleotide
  Sense strand starting at position 664 of SEQ ID NO: 915452
agcagauucuccuugggaa

SEQ ID NO: 1080851 - RNA, 19 nt, Artificial Sequence
  Description of Artificial Sequence: Synthetic oligonucleotide
  Antisense strand to SEQ ID NO: 1080850
uucccaaggagaaucugcu

SEQ ID NO: 1080852 - RNA, 19 nt, Artificial Sequence
  Description of Artificial Sequence: Synthetic oligonucleotide
  Sense strand starting at position 665 of SEQ ID NO: 915452
gcagauucuccuugggaaa

SEQ ID NO: 1080853 - RNA, 19 nt, Artificial Sequence
  Description of Artificial Sequence: Synthetic oligonucleotide
  Antisense strand to SEQ ID NO: 1080852
uuucccaaggagaaucugc

SEQ ID NO: 1080854 - RNA, 19 nt, Artificial Sequence
  Description of Artificial Sequence: Synthetic oligonucleotide
  Sense strand starting at position 773 of SEQ ID NO: 915452
ugugacaaauucguuauag

SEQ ID NO: 1080855 - RNA, 19 nt, Artificial Sequence
  Description of Artificial Sequence: Synthetic oligonucleotide
  Antisense strand to SEQ ID NO: 1080854
cuauaacgaauuugucaca

SEQ ID NO: 1080856 - RNA, 19 nt, Artificial Sequence
  Description of Artificial Sequence: Synthetic oligonucleotide
  Sense strand starting at position 774 of SEQ ID NO: 915452
gugacaaauucguuauagc

SEQ ID NO: 1080857 - RNA, 19 nt, Artificial Sequence
  Description of Artificial Sequence: Synthetic oligonucleotide
  Antisense strand to SEQ ID NO: 1080856
gcuauaacgaauuugucac

SEQ ID NO: 1080858 - RNA, 19 nt, Artificial Sequence
  Description of Artificial Sequence: Synthetic oligonucleotide
  Sense strand starting at position 775 of SEQ ID NO: 915452
ugacaaauucguuauagca

SEQ ID NO: 1080859 - RNA, 19 nt, Artificial Sequence
  Description of Artificial Sequence: Synthetic oligonucleotide
  Antisense strand to SEQ ID NO: 1080858
ugcuauaacgaauuuguca

SEQ ID NO: 1080860 - RNA, 19 nt, Artificial Sequence
  Description of Artificial Sequence: Synthetic oligonucleotide
  Sense strand starting at position 782 of SEQ ID NO: 915452
uucguuauagcagggauga

SEQ ID NO: 1080861 - RNA, 19 nt, Artificial Sequence
  Description of Artificial Sequence: Synthetic oligonucleotide
  Antisense strand to SEQ ID NO: 1080860
ucaucccugcuauaacgaa

SEQ ID NO: 1080862 - RNA, 19 nt, Artificial Sequence
  Description of Artificial Sequence: Synthetic oligonucleotide
  Sense strand starting at position 784 of SEQ ID NO: 915452
cguuauagcagggaugaga

SEQ ID NO: 1080863 - RNA, 19 nt, Artificial Sequence
  Description of Artificial Sequence: Synthetic oligonucleotide
  Antisense strand to SEQ ID NO: 1080862
ucucaucccugcuauaacg

SEQ ID NO: 1080864 - RNA, 19 nt, Artificial Sequence
  Description of Artificial Sequence: Synthetic oligonucleotide
  Sense strand starting at position 944 of SEQ ID NO: 915452
uggccaaacucaguauguu

SEQ ID NO: 1080865 - RNA, 19 nt, Artificial Sequence
  Description of Artificial Sequence: Synthetic oligonucleotide
  Antisense strand to SEQ ID NO: 1080864
aacauacugaguuuggcca

SEQ ID NO: 1080866 - RNA, 19 nt, Artificial Sequence
  Description of Artificial Sequence: Synthetic oligonucleotide
  Sense strand starting at position 1319 of SEQ ID NO: 915452
ggcccaguguaacuguuaa

SEQ ID NO: 1080867 - RNA, 19 nt, Artificial Sequence
  Description of Artificial Sequence: Synthetic oligonucleotide
  Antisense strand to SEQ ID NO: 1080866
uuaacaguuacacugggcc

SEQ ID NO: 1080868 - RNA, 19 nt, Artificial Sequence
  Description of Artificial Sequence: Synthetic oligonucleotide
  Sense strand starting at position 1327 of SEQ ID NO: 915452
guaacuguuaacggcaaca

SEQ ID NO: 1080869 - RNA, 19 nt, Artificial Sequence
  Description of Artificial Sequence: Synthetic oligonucleotide
  Antisense strand to SEQ ID NO: 1080868
uguugccguuaacaguuac

SEQ ID NO: 1080870 - RNA, 19 nt, Artificial Sequence
  Description of Artificial Sequence: Synthetic oligonucleotide
  Sense strand starting at position 1352 of SEQ ID NO: 915452
gcagucuccggcuugcauu

SEQ ID NO: 1080871 - RNA, 19 nt, Artificial Sequence
  Description of Artificial Sequence: Synthetic oligonucleotide
  Antisense strand to SEQ ID NO: 1080870
aaugcaagccggagacugc

SEQ ID NO: 1080872 - RNA, 19 nt, Artificial Sequence
  Description of Artificial Sequence: Synthetic oligonucleotide
  Sense strand starting at position 1482 of SEQ ID NO: 915452
gccaaacuguccucgggaa

SEQ ID NO: 1080873 - RNA, 19 nt, Artificial Sequence
  Description of Artificial Sequence: Synthetic oligonucleotide
  Antisense strand to SEQ ID NO: 1080872
uucccgaggacaguuuggc

SEQ ID NO: 1080874 - RNA, 19 nt, Artificial Sequence
  Description of Artificial Sequence: Synthetic oligonucleotide
  Sense strand starting at position 1483 of SEQ ID NO: 915452
ccaaacuguccucgggaaa

SEQ ID NO: 1080875 - RNA, 19 nt, Artificial Sequence
  Description of Artificial Sequence: Synthetic oligonucleotide
  Antisense strand to SEQ ID NO: 1080874
uuucccgaggacaguuugg

SEQ ID NO: 1080876 - RNA, 19 nt, Artificial Sequence
  Description of Artificial Sequence: Synthetic oligonucleotide
  Sense strand starting at position 1484 of SEQ ID NO: 915452
caaacuguccucgggaaac

SEQ ID NO: 1080877 - RNA, 19 nt, Artificial Sequence
  Description of Artificial Sequence: Synthetic oligonucleotide
  Antisense strand to SEQ ID NO: 1080876
guuucccgaggacaguuug

SEQ ID NO: 1080878 - RNA, 19 nt, Artificial Sequence
  Description of Artificial Sequence: Synthetic oligonucleotide
  Sense strand starting at position 2704 of SEQ ID NO: 915452
acgcaagucucagcaauuc

SEQ ID NO: 1080879 - RNA, 19 nt, Artificial Sequence
  Description of Artificial Sequence: Synthetic oligonucleotide
  Antisense strand to SEQ ID NO: 1080878
gaauugcugagacuugcgu

SEQ ID NO: 1080880 - RNA, 19 nt, Artificial Sequence
  Description of Artificial Sequence: Synthetic oligonucleotide
  Sense strand starting at position 2713 of SEQ ID NO: 915452
ucagcaauuccugagaauc

SEQ ID NO: 1080881 - RNA, 19 nt, Artificial Sequence
  Description of Artificial Sequence: Synthetic oligonucleotide
  Antisense strand to SEQ ID NO: 1080880
gauucucaggaauugcuga

SEQ ID NO: 1080882 - RNA, 19 nt, Artificial Sequence
  Description of Artificial Sequence: Synthetic oligonucleotide
  Sense strand starting at position 2724 of SEQ ID NO: 915452
ugagaauccucggaggaag

SEQ ID NO: 1080883 - RNA, 19 nt, Artificial Sequence
  Description of Artificial Sequence: Synthetic oligonucleotide
  Antisense strand to SEQ ID NO: 1080882
cuuccuccgaggauucuca

SEQ ID NO: 1080884 - RNA, 19 nt, Artificial Sequence
  Description of Artificial Sequence: Synthetic oligonucleotide
  Sense strand starting at position 3260 of SEQ ID NO: 915452
gcagaugaagauugcaagu

SEQ ID NO: 1080885 - RNA, 19 nt, Artificial Sequence
  Description of Artificial Sequence: Synthetic oligonucleotide
  Antisense strand to SEQ ID NO: 1080884
acuugcaaucuucaucugc

SEQ ID NO: 1080886 - RNA, 19 nt, Artificial Sequence
  Description of Artificial Sequence: Synthetic oligonucleotide
  Sense strand starting at position 3262 of SEQ ID NO: 915452
agaugaagauugcaaguaa

SEQ ID NO: 1080887 - RNA, 19 nt, Artificial Sequence
  Description of Artificial Sequence: Synthetic oligonucleotide
  Antisense strand to SEQ ID NO: 1080886
uuacuugcaaucuucaucu

SEQ ID NO: 1080888 - RNA, 19 nt, Artificial Sequence
  Description of Artificial Sequence: Synthetic oligonucleotide
  Sense strand starting at position 3288 of SEQ ID NO: 915452
aacgguaucucagauuugu

SEQ ID NO: 1080889 - RNA, 19 nt, Artificial Sequence
  Description of Artificial Sequence: Synthetic oligonucleotide
  Antisense strand to SEQ ID NO: 1080888
acaaaucugagauaccguu

SEQ ID NO: 1080890 - RNA, 19 nt, Artificial Sequence
  Description of Artificial Sequence: Synthetic oligonucleotide
  Sense strand starting at position 3297 of SEQ ID NO: 915452
ucagauuuguucuuuagca

SEQ ID NO: 1080891 - RNA, 19 nt, Artificial Sequence
  Description of Artificial Sequence: Synthetic oligonucleotide
  Antisense strand to SEQ ID NO: 1080890
ugcuaaagaacaaaucuga

SEQ ID NO: 1080892 - RNA, 19 nt, Artificial Sequence
  Description of Artificial Sequence: Synthetic oligonucleotide
  Sense strand starting at position 3592 of SEQ ID NO: 915452
ccucccauaucgcuggaau

SEQ ID NO: 1080893 - RNA, 19 nt, Artificial Sequence
  Description of Artificial Sequence: Synthetic oligonucleotide
  Antisense strand to SEQ ID NO: 1080892
auuccagcgauaugggagg

SEQ ID NO: 1080894 - RNA, 19 nt, Artificial Sequence
  Description of Artificial Sequence: Synthetic oligonucleotide
  Sense strand starting at position 3593 of SEQ ID NO: 915452
cucccauaucgcuggaauu

SEQ ID NO: 1080895 - RNA, 19 nt, Artificial Sequence
  Description of Artificial Sequence: Synthetic oligonucleotide
  Antisense strand to SEQ ID NO: 1080894
aauuccagcgauaugggag

SEQ ID NO: 1080896 - RNA, 19 nt, Artificial Sequence
  Description of Artificial Sequence: Synthetic oligonucleotide
  Sense strand starting at position 3594 of SEQ ID NO: 915452
ucccauaucgcuggaauua

SEQ ID NO: 1080897 - RNA, 19 nt, Artificial Sequence
  Description of Artificial Sequence: Synthetic oligonucleotide
  Antisense strand to SEQ ID NO: 1080896
uaauuccagcgauauggga

SEQ ID NO: 1080898 - RNA, 19 nt, Artificial Sequence
  Description of Artificial Sequence: Synthetic oligonucleotide
  Sense strand starting at position 3595 of SEQ ID NO: 915452
cccauaucgcuggaauuac

SEQ ID NO: 1080899 - RNA, 19 nt, Artificial Sequence
  Description of Artificial Sequence: Synthetic oligonucleotide
  Antisense strand to SEQ ID NO: 1080898
guaauuccagcgauauggg

SEQ ID NO: 1080900 - RNA, 19 nt, Artificial Sequence
  Description of Artificial Sequence: Synthetic oligonucleotide
  Sense strand starting at position 3632 of SEQ ID NO: 915452
ccggccugaucaucuuuaa

SEQ ID NO: 1080901 - RNA, 19 nt, Artificial Sequence
  Description of Artificial Sequence: Synthetic oligonucleotide
  Antisense strand to SEQ ID NO: 1080900
uuaaagaugaucaggccgg

SEQ ID NO: 1080902 - RNA, 19 nt, Artificial Sequence
  Description of Artificial Sequence: Synthetic oligonucleotide
  Sense strand starting at position 3635 of SEQ ID NO: 915452
gccugaucaucuuuaaaga

SEQ ID NO: 1080903 - RNA, 19 nt, Artificial Sequence
  Description of Artificial Sequence: Synthetic oligonucleotide
  Antisense strand to SEQ ID NO: 1080902
ucuuuaaagaugaucaggc

SEQ ID NO: 1080904 - RNA, 19 nt, Artificial Sequence
  Description of Artificial Sequence: Synthetic oligonucleotide
  Sense strand starting at position 69 of SEQ ID NO: 915453
uaagaauauugagauguga

SEQ ID NO: 1080905 - RNA, 19 nt, Artificial Sequence
  Description of Artificial Sequence: Synthetic oligonucleotide
  Antisense strand to SEQ ID NO: 1080904
ucacaucucaauauucuua

SEQ ID NO: 1080906 - RNA, 19 nt, Artificial Sequence
  Description of Artificial Sequence: Synthetic oligonucleotide
  Sense strand starting at position 113 of SEQ ID NO: 915453
ccggcauauaaucaugaga

SEQ ID NO: 1080907 - RNA, 19 nt, Artificial Sequence
  Description of Artificial Sequence: Synthetic oligonucleotide
  Antisense strand to SEQ ID NO: 1080906
ucucaugauuauaugccgg

SEQ ID NO: 1080908 - RNA, 19 nt, Artificial Sequence
  Description of Artificial Sequence: Synthetic oligonucleotide
  Sense strand starting at position 116 of SEQ ID NO: 915453
gcauauaaucaugagaguu

SEQ ID NO: 1080909 - RNA, 19 nt, Artificial Sequence
  Description of Artificial Sequence: Synthetic oligonucleotide
  Antisense strand to SEQ ID NO: 1080908
aacucucaugauuauaugc

SEQ ID NO: 1080910 - RNA, 19 nt, Artificial Sequence
  Description of Artificial Sequence: Synthetic oligonucleotide
  Sense strand starting at position 118 of SEQ ID NO: 915453
auauaaucaugagaguucu

SEQ ID NO: 1080911 - RNA, 19 nt, Artificial Sequence
  Description of Artificial Sequence: Synthetic oligonucleotide
  Antisense strand to SEQ ID NO: 1080910
agaacucucaugauuauau

SEQ ID NO: 1080912 - RNA, 19 nt, Artificial Sequence
  Description of Artificial Sequence: Synthetic oligonucleotide
  Sense strand starting at position 124 of SEQ ID NO: 915453
ucaugagaguucuuaugca

SEQ ID NO: 1080913 - RNA, 19 nt, Artificial Sequence
  Description of Artificial Sequence: Synthetic oligonucleotide
  Antisense strand to SEQ ID NO: 1080912
ugcauaagaacucucauga

SEQ ID NO: 1080914 - RNA, 19 nt, Artificial Sequence
  Description of Artificial Sequence: Synthetic oligonucleotide
  Sense strand starting at position 128 of SEQ ID NO: 915453
gagaguucuuaugcagaga

SEQ ID NO: 1080915 - RNA, 19 nt, Artificial Sequence
  Description of Artificial Sequence: Synthetic oligonucleotide
  Antisense strand to SEQ ID NO: 1080914
ucucugcauaagaacucuc

SEQ ID NO: 1080916 - RNA, 19 nt, Artificial Sequence
  Description of Artificial Sequence: Synthetic oligonucleotide
  Sense strand starting at position 129 of SEQ ID NO: 915453
agaguucuuaugcagagac

SEQ ID NO: 1080917 - RNA, 19 nt, Artificial Sequence
  Description of Artificial Sequence: Synthetic oligonucleotide
  Antisense strand to SEQ ID NO: 1080916
gucucugcauaagaacucu

SEQ ID NO: 1080918 - RNA, 19 nt, Artificial Sequence
  Description of Artificial Sequence: Synthetic oligonucleotide
  Sense strand starting at position 175 of SEQ ID NO: 915453
gccucuagaaguuggaaga

SEQ ID NO: 1080919 - RNA, 19 nt, Artificial Sequence
  Description of Artificial Sequence: Synthetic oligonucleotide
  Antisense strand to SEQ ID NO: 1080918
ucuuccaacuucuagaggc

SEQ ID NO: 1080920 - RNA, 19 nt, Artificial Sequence
  Description of Artificial Sequence: Synthetic oligonucleotide
  Sense strand starting at position 202 of SEQ ID NO: 915453
agcagauucuccuugggaa

SEQ ID NO: 1080921 - RNA, 19 nt, Artificial Sequence
  Description of Artificial Sequence: Synthetic oligonucleotide
  Antisense strand to SEQ ID NO: 1080920
uucccaaggagaaucugcu

SEQ ID NO: 1080922 - RNA, 19 nt, Artificial Sequence
  Description of Artificial Sequence: Synthetic oligonucleotide
  Sense strand starting at position 203 of SEQ ID NO: 915453
gcagauucuccuugggaaa

SEQ ID NO: 1080923 - RNA, 19 nt, Artificial Sequence
  Description of Artificial Sequence: Synthetic oligonucleotide
  Antisense strand to SEQ ID NO: 1080922
uuucccaaggagaaucugc

SEQ ID NO: 1080924 - RNA, 19 nt, Artificial Sequence
  Description of Artificial Sequence: Synthetic oligonucleotide
  Sense strand starting at position 311 of SEQ ID NO: 915453
ugugacaaauucguuauag

SEQ ID NO: 1080925 - RNA, 19 nt, Artificial Sequence
  Description of Artificial Sequence: Synthetic oligonucleotide
  Antisense strand to SEQ ID NO: 1080924
cuauaacgaauuugucaca

SEQ ID NO: 1080926 - RNA, 19 nt, Artificial Sequence
  Description of Artificial Sequence: Synthetic oligonucleotide
  Sense strand starting at position 312 of SEQ ID NO: 915453
gugacaaauucguuauagc

SEQ ID NO: 1080927 - RNA, 19 nt, Artificial Sequence
  Description of Artificial Sequence: Synthetic oligonucleotide
  Antisense strand to SEQ ID NO: 1080926
gcuauaacgaauuugucac

SEQ ID NO: 1080928 - RNA, 19 nt, Artificial Sequence
  Description of Artificial Sequence: Synthetic oligonucleotide
  Sense strand starting at position 313 of SEQ ID NO: 915453
ugacaaauucguuauagca

SEQ ID NO: 1080929 - RNA, 19 nt, Artificial Sequence
  Description of Artificial Sequence: Synthetic oligonucleotide
  Antisense strand to SEQ ID NO: 1080928
ugcuauaacgaauuuguca

SEQ ID NO: 1080930 - RNA, 19 nt, Artificial Sequence
  Description of Artificial Sequence: Synthetic oligonucleotide
  Sense strand starting at position 320 of SEQ ID NO: 915453
uucguuauagcagggauga

SEQ ID NO: 1080931 - RNA, 19 nt, Artificial Sequence
  Description of Artificial Sequence: Synthetic oligonucleotide
  Antisense strand to SEQ ID NO: 1080930
ucaucccugcuauaacgaa

SEQ ID NO: 1080932 - RNA, 19 nt, Artificial Sequence
  Description of Artificial Sequence: Synthetic oligonucleotide
  Sense strand starting at position 322 of SEQ ID NO: 915453
cguuauagcagggaugaga

SEQ ID NO: 1080933 - RNA, 19 nt, Artificial Sequence
  Description of Artificial Sequence: Synthetic oligonucleotide
  Antisense strand to SEQ ID NO: 1080932
ucucaucccugcuauaacg

SEQ ID NO: 1080934 - RNA, 19 nt, Artificial Sequence
  Description of Artificial Sequence: Synthetic oligonucleotide
  Sense strand starting at position 482 of SEQ ID NO: 915453
uggccaaacucaguauguu

SEQ ID NO: 1080935 - RNA, 19 nt, Artificial Sequence
  Description of Artificial Sequence: Synthetic oligonucleotide
  Antisense strand to SEQ ID NO: 1080934
aacauacugaguuuggcca

SEQ ID NO: 1080936 - RNA, 19 nt, Artificial Sequence
  Description of Artificial Sequence: Synthetic oligonucleotide
  Sense strand starting at position 857 of SEQ ID NO: 915453
ggcccaguguaacuguuaa

SEQ ID NO: 1080937 - RNA, 19 nt, Artificial Sequence
  Description of Artificial Sequence: Synthetic oligonucleotide
  Antisense strand to SEQ ID NO: 1080936
uuaacaguuacacugggcc

SEQ ID NO: 1080938 - RNA, 19 nt, Artificial Sequence
  Description of Artificial Sequence: Synthetic oligonucleotide
  Sense strand starting at position 865 of SEQ ID NO: 915453
guaacuguuaacggcaaca

SEQ ID NO: 1080939 - RNA, 19 nt, Artificial Sequence
  Description of Artificial Sequence: Synthetic oligonucleotide
  Antisense strand to SEQ ID NO: 1080938
uguugccguuaacaguuac

SEQ ID NO: 1080940 - RNA, 19 nt, Artificial Sequence
  Description of Artificial Sequence: Synthetic oligonucleotide
  Sense strand starting at position 890 of SEQ ID NO: 915453
gcagucuccggcuugcauu

SEQ ID NO: 1080941 - RNA, 19 nt, Artificial Sequence
  Description of Artificial Sequence: Synthetic oligonucleotide
  Antisense strand to SEQ ID NO: 1080940
aaugcaagccggagacugc

SEQ ID NO: 1080942 - RNA, 19 nt, Artificial Sequence
  Description of Artificial Sequence: Synthetic oligonucleotide
  Sense strand starting at position 908 of SEQ ID NO: 915453
ucgguuuagucagccaauc

SEQ ID NO: 1080943 - RNA, 19 nt, Artificial Sequence
  Description of Artificial Sequence: Synthetic oligonucleotide
  Antisense strand to SEQ ID NO: 1080942
gauuggcugacuaaaccga

SEQ ID NO: 1080944 - RNA, 19 nt, Artificial Sequence
  Description of Artificial Sequence: Synthetic oligonucleotide
  Sense strand starting at position 1020 of SEQ ID NO: 915453
gccaaacuguccucgggaa

SEQ ID NO: 1080945 - RNA, 19 nt, Artificial Sequence
  Description of Artificial Sequence: Synthetic oligonucleotide
  Antisense strand to SEQ ID NO: 1080944
uucccgaggacaguuuggc

SEQ ID NO: 1080946 - RNA, 19 nt, Artificial Sequence
  Description of Artificial Sequence: Synthetic oligonucleotide
  Sense strand starting at position 1021 of SEQ ID NO: 915453
ccaaacuguccucgggaaa

SEQ ID NO: 1080947 - RNA, 19 nt, Artificial Sequence
  Description of Artificial Sequence: Synthetic oligonucleotide
  Antisense strand to SEQ ID NO: 1080946
uuucccgaggacaguuugg

SEQ ID NO: 1080948 - RNA, 19 nt, Artificial Sequence
  Description of Artificial Sequence: Synthetic oligonucleotide
  Sense strand starting at position 1022 of SEQ ID NO: 915453
caaacuguccucgggaaac

SEQ ID NO: 1080949 - RNA, 19 nt, Artificial Sequence
  Description of Artificial Sequence: Synthetic oligonucleotide
  Antisense strand to SEQ ID NO: 1080948
guuucccgaggacaguuug

SEQ ID NO: 1080950 - RNA, 19 nt, Artificial Sequence
  Description of Artificial Sequence: Synthetic oligonucleotide
  Sense strand starting at position 2242 of SEQ ID NO: 915453
acgcaagucucagcaauuc

SEQ ID NO: 1080951 - RNA, 19 nt, Artificial Sequence
  Description of Artificial Sequence: Synthetic oligonucleotide
  Antisense strand to SEQ ID NO: 1080950
gaauugcugagacuugcgu

SEQ ID NO: 1080952 - RNA, 19 nt, Artificial Sequence
  Description of Artificial Sequence: Synthetic oligonucleotide
  Sense strand starting at position 2251 of SEQ ID NO: 915453
ucagcaauuccugagaauc

SEQ ID NO: 1080953 - RNA, 19 nt, Artificial Sequence
  Description of Artificial Sequence: Synthetic oligonucleotide
  Antisense strand to SEQ ID NO: 1080952
gauucucaggaauugcuga

SEQ ID NO: 1080954 - RNA, 19 nt, Artificial Sequence
  Description of Artificial Sequence: Synthetic oligonucleotide
  Sense strand starting at position 2262 of SEQ ID NO: 915453
ugagaauccucggaggaag

SEQ ID NO: 1080955 - RNA, 19 nt, Artificial Sequence
  Description of Artificial Sequence: Synthetic oligonucleotide
  Antisense strand to SEQ ID NO: 1080954
cuuccuccgaggauucuca

SEQ ID NO: 1080956 - RNA, 19 nt, Artificial Sequence
  Description of Artificial Sequence: Synthetic oligonucleotide
  Sense strand starting at position 2798 of SEQ ID NO: 915453
gcagaugaagauugcaagu

SEQ ID NO: 1080957 - RNA, 19 nt, Artificial Sequence
  Description of Artificial Sequence: Synthetic oligonucleotide
  Antisense strand to SEQ ID NO: 1080956
acuugcaaucuucaucugc

SEQ ID NO: 1080958 - RNA, 19 nt, Artificial Sequence
  Description of Artificial Sequence: Synthetic oligonucleotide
  Sense strand starting at position 2800 of SEQ ID NO: 915453
agaugaagauugcaaguaa

SEQ ID NO: 1080959 - RNA, 19 nt, Artificial Sequence
  Description of Artificial Sequence: Synthetic oligonucleotide
  Antisense strand to SEQ ID NO: 1080958
uuacuugcaaucuucaucu

SEQ ID NO: 1080960 - RNA, 19 nt, Artificial Sequence
  Description of Artificial Sequence: Synthetic oligonucleotide
  Sense strand starting at position 2826 of SEQ ID NO: 915453
aacgguaucucagauuugu

SEQ ID NO: 1080961 - RNA, 19 nt, Artificial Sequence
  Description of Artificial Sequence: Synthetic oligonucleotide
  Antisense strand to SEQ ID NO: 1080960
acaaaucugagauaccguu

SEQ ID NO: 1080962 - RNA, 19 nt, Artificial Sequence
  Description of Artificial Sequence: Synthetic oligonucleotide
  Sense strand starting at position 2835 of SEQ ID NO: 915453
ucagauuuguucuuuagca

SEQ ID NO: 1080963 - RNA, 19 nt, Artificial Sequence
  Description of Artificial Sequence: Synthetic oligonucleotide
  Antisense strand to SEQ ID NO: 1080962
ugcuaaagaacaaaucuga

SEQ ID NO: 1080964 - RNA, 19 nt, Artificial Sequence
  Description of Artificial Sequence: Synthetic oligonucleotide
  Sense strand starting at position 3130 of SEQ ID NO: 915453
ccucccauaucgcuggaau

SEQ ID NO: 1080965 - RNA, 19 nt, Artificial Sequence
  Description of Artificial Sequence: Synthetic oligonucleotide
  Antisense strand to SEQ ID NO: 1080964
auuccagcgauaugggagg

SEQ ID NO: 1080966 - RNA, 19 nt, Artificial Sequence
  Description of Artificial Sequence: Synthetic oligonucleotide
  Sense strand starting at position 3131 of SEQ ID NO: 915453
cucccauaucgcuggaauu

SEQ ID NO: 1080967 - RNA, 19 nt, Artificial Sequence
  Description of Artificial Sequence: Synthetic oligonucleotide
  Antisense strand to SEQ ID NO: 1080966
aauuccagcgauaugggag

SEQ ID NO: 1080968 - RNA, 19 nt, Artificial Sequence
  Description of Artificial Sequence: Synthetic oligonucleotide
  Sense strand starting at position 3132 of SEQ ID NO: 915453
ucccauaucgcuggaauua

SEQ ID NO: 1080969 - RNA, 19 nt, Artificial Sequence
  Description of Artificial Sequence: Synthetic oligonucleotide
  Antisense strand to SEQ ID NO: 1080968
uaauuccagcgauauggga

SEQ ID NO: 1080970 - RNA, 19 nt, Artificial Sequence
  Description of Artificial Sequence: Synthetic oligonucleotide
  Sense strand starting at position 3133 of SEQ ID NO: 915453
cccauaucgcuggaauuac

SEQ ID NO: 1080971 - RNA, 19 nt, Artificial Sequence
  Description of Artificial Sequence: Synthetic oligonucleotide
  Antisense strand to SEQ ID NO: 1080970
guaauuccagcgauauggg

SEQ ID NO: 1080972 - RNA, 19 nt, Artificial Sequence
  Description of Artificial Sequence: Synthetic oligonucleotide
  Sense strand starting at position 3170 of SEQ ID NO: 915453
ccggccugaucaucuuuaa

SEQ ID NO: 1080973 - RNA, 19 nt, Artificial Sequence
  Description of Artificial Sequence: Synthetic oligonucleotide
  Antisense strand to SEQ ID NO: 1080972
uuaaagaugaucaggccgg

SEQ ID NO: 1080974 - RNA, 19 nt, Artificial Sequence
  Description of Artificial Sequence: Synthetic oligonucleotide
  Sense strand starting at position 3173 of SEQ ID NO: 915453
gccugaucaucuuuaaaga

SEQ ID NO: 1080975 - RNA, 19 nt, Artificial Sequence
  Description of Artificial Sequence: Synthetic oligonucleotide
  Antisense strand to SEQ ID NO: 1080974
ucuuuaaagaugaucaggc

SEQ ID NO: 1080976 - RNA, 19 nt, Artificial Sequence
  Description of Artificial Sequence: Synthetic oligonucleotide
  Sense strand starting at position 3895 of SEQ ID NO: 915453
accaguagcugauucuuua

SEQ ID NO: 1080977 - RNA, 19 nt, Artificial Sequence
  Description of Artificial Sequence: Synthetic oligonucleotide
  Antisense strand to SEQ ID NO: 1080976
uaaagaaucagcuacuggu

SEQ ID NO: 1080978 - RNA, 19 nt, Artificial Sequence
  Description of Artificial Sequence: Synthetic oligonucleotide
  Sense strand starting at position 3898 of SEQ ID NO: 915453
aguagcugauucuuuaacu

SEQ ID NO: 1080979 - RNA, 19 nt, Artificial Sequence
  Description of Artificial Sequence: Synthetic oligonucleotide
  Antisense strand to SEQ ID NO: 1080978
aguuaaagaaucagcuacu

SEQ ID NO: 1080980 - RNA, 19 nt, Artificial Sequence
  Description of Artificial Sequence: Synthetic oligonucleotide
  Sense strand starting at position 3899 of SEQ ID NO: 915453
guagcugauucuuuaacuc

SEQ ID NO: 1080981 - RNA, 19 nt, Artificial Sequence
  Description of Artificial Sequence: Synthetic oligonucleotide
  Antisense strand to SEQ ID NO: 1080980
gaguuaaagaaucagcuac

SEQ ID NO: 1080982 - RNA, 19 nt, Artificial Sequence
  Description of Artificial Sequence: Synthetic oligonucleotide
  Sense strand starting at position 3928 of SEQ ID NO: 915453
ggagucuggaugugagguu

SEQ ID NO: 1080983 - RNA, 19 nt, Artificial Sequence
  Description of Artificial Sequence: Synthetic oligonucleotide
  Antisense strand to SEQ ID NO: 1080982
aaccucacauccagacucc

SEQ ID NO: 1080984 - RNA, 19 nt, Artificial Sequence
  Description of Artificial Sequence: Synthetic oligonucleotide
  Sense strand starting at position 6 of SEQ ID NO: 915454
cuguaagaacuugggcaaa

SEQ ID NO: 1080985 - RNA, 19 nt, Artificial Sequence
  Description of Artificial Sequence: Synthetic oligonucleotide
  Antisense strand to SEQ ID NO: 1080984
uuugcccaaguucuuacag

SEQ ID NO: 1080986 - RNA, 19 nt, Artificial Sequence
  Description of Artificial Sequence: Synthetic oligonucleotide
  Sense strand starting at position 8 of SEQ ID NO: 915454
guaagaacuugggcaaauu

SEQ ID NO: 1080987 - RNA, 19 nt, Artificial Sequence
  Description of Artificial Sequence: Synthetic oligonucleotide
  Antisense strand to SEQ ID NO: 1080986
aauuugcccaaguucuuac

SEQ ID NO: 1080988 - RNA, 19 nt, Artificial Sequence
  Description of Artificial Sequence: Synthetic oligonucleotide
  Sense strand starting at position 74 of SEQ ID NO: 915454
gugauaggguugcucuaag

SEQ ID NO: 1080989 - RNA, 19 nt, Artificial Sequence
  Description of Artificial Sequence: Synthetic oligonucleotide
  Antisense strand to SEQ ID NO: 1080988
cuuagagcaacccuaucac

SEQ ID NO: 1080990 - RNA, 19 nt, Artificial Sequence
  Description of Artificial Sequence: Synthetic oligonucleotide
  Sense strand starting at position 85 of SEQ ID NO: 915454
gcucuaagaccauaaugua

SEQ ID NO: 1080991 - RNA, 19 nt, Artificial Sequence
  Description of Artificial Sequence: Synthetic oligonucleotide
  Antisense strand to SEQ ID NO: 1080990
uacauuauggucuuagagc

SEQ ID NO: 1080992 - RNA, 19 nt, Artificial Sequence
  Description of Artificial Sequence: Synthetic oligonucleotide
  Sense strand starting at position 92 of SEQ ID NO: 915454
gaccauaauguauguaaag

SEQ ID NO: 1080993 - RNA, 19 nt, Artificial Sequence
  Description of Artificial Sequence: Synthetic oligonucleotide
  Antisense strand to SEQ ID NO: 1080992
cuuuacauacauuaugguc

SEQ ID NO: 1080994 - RNA, 19 nt, Artificial Sequence
  Description of Artificial Sequence: Synthetic oligonucleotide
  Sense strand starting at position 119 of SEQ ID NO: 915454
ggauaaacgucacuacucu

SEQ ID NO: 1080995 - RNA, 19 nt, Artificial Sequence
  Description of Artificial Sequence: Synthetic oligonucleotide
  Antisense strand to SEQ ID NO: 1080994
agaguagugacguuuaucc

SEQ ID NO: 1080996 - RNA, 19 nt, Artificial Sequence
  Description of Artificial Sequence: Synthetic oligonucleotide
  Sense strand starting at position 314 of SEQ ID NO: 915454
ugacgauuagggcaccauu

SEQ ID NO: 1080997 - RNA, 19 nt, Artificial Sequence
  Description of Artificial Sequence: Synthetic oligonucleotide
  Antisense strand to SEQ ID NO: 1080996
aauggugcccuaaucguca

SEQ ID NO: 1080998 - RNA, 19 nt, Artificial Sequence
  Description of Artificial Sequence: Synthetic oligonucleotide
  Sense strand starting at position 398 of SEQ ID NO: 915454
aaguuucgagcuuagauga

SEQ ID NO: 1080999 - RNA, 19 nt, Artificial Sequence
  Description of Artificial Sequence: Synthetic oligonucleotide
  Antisense strand to SEQ ID NO: 1080998
ucaucuaagcucgaaacuu

SEQ ID NO: 1081000 - RNA, 19 nt, Artificial Sequence
  Description of Artificial Sequence: Synthetic oligonucleotide
  Sense strand starting at position 486 of SEQ ID NO: 915454
cgagaagggaucugugcuu

SEQ ID NO: 1081001 - RNA, 19 nt, Artificial Sequence
  Description of Artificial Sequence: Synthetic oligonucleotide
  Antisense strand to SEQ ID NO: 1081000
aagcacagaucccuucucg

SEQ ID NO: 1081002 - RNA, 19 nt, Artificial Sequence
  Description of Artificial Sequence: Synthetic oligonucleotide
  Sense strand starting at position 491 of SEQ ID NO: 915454
agggaucugugcuuaaccu

SEQ ID NO: 1081003 - RNA, 19 nt, Artificial Sequence
  Description of Artificial Sequence: Synthetic oligonucleotide
  Antisense strand to SEQ ID NO: 1081002
agguuaagcacagaucccu

SEQ ID NO: 1081004 - RNA, 19 nt, Artificial Sequence
  Description of Artificial Sequence: Synthetic oligonucleotide
  Sense strand starting at position 501 of SEQ ID NO: 915454
gcuuaaccuccuggaaauc

SEQ ID NO: 1081005 - RNA, 19 nt, Artificial Sequence
  Description of Artificial Sequence: Synthetic oligonucleotide
  Antisense strand to SEQ ID NO: 1081004
gauuuccaggagguuaagc

SEQ ID NO: 1081006 - RNA, 19 nt, Artificial Sequence
  Description of Artificial Sequence: Synthetic oligonucleotide
  Sense strand starting at position 510 of SEQ ID NO: 915454
ccuggaaaucuaggagggu

SEQ ID NO: 1081007 - RNA, 19 nt, Artificial Sequence
  Description of Artificial Sequence: Synthetic oligonucleotide
  Antisense strand to SEQ ID NO: 1081006
acccuccuagauuuccagg

SEQ ID NO: 1081008 - RNA, 19 nt, Artificial Sequence
  Description of Artificial Sequence: Synthetic oligonucleotide
  Sense strand starting at position 519 of SEQ ID NO: 915454
cuaggagggucaagagguu

SEQ ID NO: 1081009 - RNA, 19 nt, Artificial Sequence
  Description of Artificial Sequence: Synthetic oligonucleotide
  Antisense strand to SEQ ID NO: 1081008
aaccucuugacccuccuag

SEQ ID NO: 1081010 - RNA, 19 nt, Artificial Sequence
  Description of Artificial Sequence: Synthetic oligonucleotide
  Sense strand starting at position 526 of SEQ ID NO: 915454
ggucaagagguuggagaau

SEQ ID NO: 1081011 - RNA, 19 nt, Artificial Sequence
  Description of Artificial Sequence: Synthetic oligonucleotide
  Antisense strand to SEQ ID NO: 1081010
auucuccaaccucuugacc

SEQ ID NO: 1081012 - RNA, 19 nt, Artificial Sequence
  Description of Artificial Sequence: Synthetic oligonucleotide
  Sense strand starting at position 644 of SEQ ID NO: 915454
cgcccuuucccuggaauuu

SEQ ID NO: 1081013 - RNA, 19 nt, Artificial Sequence
  Description of Artificial Sequence: Synthetic oligonucleotide
  Antisense strand to SEQ ID NO: 1081012
aaauuccagggaaagggcg

SEQ ID NO: 1081014 - RNA, 19 nt, Artificial Sequence
  Description of Artificial Sequence: Synthetic oligonucleotide
  Sense strand starting at position 830 of SEQ ID NO: 915454
agcacagugcucgucacua

SEQ ID NO: 1081015 - RNA, 19 nt, Artificial Sequence
  Description of Artificial Sequence: Synthetic oligonucleotide
  Antisense strand to SEQ ID NO: 1081014
uagugacgagcacugugcu

SEQ ID NO: 1081016 - RNA, 19 nt, Artificial Sequence
  Description of Artificial Sequence: Synthetic oligonucleotide
  Sense strand starting at position 1036 of SEQ ID NO: 915454
gucauuuauuaaucaccgu

SEQ ID NO: 1081017 - RNA, 19 nt, Artificial Sequence
  Description of Artificial Sequence: Synthetic oligonucleotide
  Antisense strand to SEQ ID NO: 1081016
acggugauuaauaaaugac

SEQ ID NO: 1081018 - RNA, 19 nt, Artificial Sequence
  Description of Artificial Sequence: Synthetic oligonucleotide
  Sense strand starting at position 1226 of SEQ ID NO: 915454
cuaagugaguucuugggaa

SEQ ID NO: 1081019 - RNA, 19 nt, Artificial Sequence
  Description of Artificial Sequence: Synthetic oligonucleotide
  Antisense strand to SEQ ID NO: 1081018
uucccaagaacucacuuag

SEQ ID NO: 1081020 - RNA, 19 nt, Artificial Sequence
  Description of Artificial Sequence: Synthetic oligonucleotide
  Sense strand starting at position 1228 of SEQ ID NO: 915454
aagugaguucuugggaaac

SEQ ID NO: 1081021 - RNA, 19 nt, Artificial Sequence
  Description of Artificial Sequence: Synthetic oligonucleotide
  Antisense strand to SEQ ID NO: 1081020
guuucccaagaacucacuu

SEQ ID NO: 1081022 - RNA, 19 nt, Artificial Sequence
  Description of Artificial Sequence: Synthetic oligonucleotide
  Sense strand starting at position 1664 of SEQ ID NO: 915454
gggucucaccguugagaga

SEQ ID NO: 1081023 - RNA, 19 nt, Artificial Sequence
  Description of Artificial Sequence: Synthetic oligonucleotide
  Antisense strand to SEQ ID NO: 1081022
ucucucaacggugagaccc

SEQ ID NO: 1081024 - RNA, 19 nt, Artificial Sequence
  Description of Artificial Sequence: Synthetic oligonucleotide
  Sense strand starting at position 2079 of SEQ ID NO: 915454
gccgaucacggcguaauua

SEQ ID NO: 1081025 - RNA, 19 nt, Artificial Sequence
  Description of Artificial Sequence: Synthetic oligonucleotide
  Antisense strand to SEQ ID NO: 1081024
uaauuacgccgugaucggc

SEQ ID NO: 1081026 - RNA, 19 nt, Artificial Sequence
  Description of Artificial Sequence: Synthetic oligonucleotide
  Sense strand starting at position 2088 of SEQ ID NO: 915454
ggcguaauuaagggauuaa

SEQ ID NO: 1081027 - RNA, 19 nt, Artificial Sequence
  Description of Artificial Sequence: Synthetic oligonucleotide
  Antisense strand to SEQ ID NO: 1081026
uuaaucccuuaauuacgcc

SEQ ID NO: 1081028 - RNA, 19 nt, Artificial Sequence
  Description of Artificial Sequence: Synthetic oligonucleotide
  Sense strand starting at position 2089 of SEQ ID NO: 915454
gcguaauuaagggauuaau

SEQ ID NO: 1081029 - RNA, 19 nt, Artificial Sequence
  Description of Artificial Sequence: Synthetic oligonucleotide
  Antisense strand to SEQ ID NO: 1081028
auuaaucccuuaauuacgc

SEQ ID NO: 1081030 - RNA, 19 nt, Artificial Sequence
  Description of Artificial Sequence: Synthetic oligonucleotide
  Sense strand starting at position 2144 of SEQ ID NO: 915454
ucacuauccgagcaggaga

SEQ ID NO: 1081031 - RNA, 19 nt, Artificial Sequence
  Description of Artificial Sequence: Synthetic oligonucleotide
  Antisense strand to SEQ ID NO: 1081030
ucuccugcucggauaguga

SEQ ID NO: 1081032 - RNA, 19 nt, Artificial Sequence
  Description of Artificial Sequence: Synthetic oligonucleotide
  Sense strand starting at position 2317 of SEQ ID NO: 915454
aggaaucuguccucucuuu

SEQ ID NO: 1081033 - RNA, 19 nt, Artificial Sequence
  Description of Artificial Sequence: Synthetic oligonucleotide
  Antisense strand to SEQ ID NO: 1081032
aaagagaggacagauuccu

SEQ ID NO: 1081034 - RNA, 19 nt, Artificial Sequence
  Description of Artificial Sequence: Synthetic oligonucleotide
  Sense strand starting at position 2600 of SEQ ID NO: 915454
ggaguuccuguaggagacu

SEQ ID NO: 1081035 - RNA, 19 nt, Artificial Sequence
  Description of Artificial Sequence: Synthetic oligonucleotide
  Antisense strand to SEQ ID NO: 1081034
agucuccuacaggaacucc

SEQ ID NO: 1081036 - RNA, 19 nt, Artificial Sequence
  Description of Artificial Sequence: Synthetic oligonucleotide
  Sense strand starting at position 2768 of SEQ ID NO: 915454
uguaaaggcaugugggauu

SEQ ID NO: 1081037 - RNA, 19 nt, Artificial Sequence
  Description of Artificial Sequence: Synthetic oligonucleotide
  Antisense strand to SEQ ID NO: 1081036
aaucccacaugccuuuaca

SEQ ID NO: 1081038 - RNA, 19 nt, Artificial Sequence
  Description of Artificial Sequence: Synthetic oligonucleotide
  Sense strand starting at position 2809 of SEQ ID NO: 915454
guucaaaucggauagcagu

SEQ ID NO: 1081039 - RNA, 19 nt, Artificial Sequence
  Description of Artificial Sequence: Synthetic oligonucleotide
  Antisense strand to SEQ ID NO: 1081038
acugcuauccgauuugaac

SEQ ID NO: 1081040 - RNA, 19 nt, Artificial Sequence
  Description of Artificial Sequence: Synthetic oligonucleotide
  Sense strand starting at position 2916 of SEQ ID NO: 915454
aguucuuucuaccugaaga

SEQ ID NO: 1081041 - RNA, 19 nt, Artificial Sequence
  Description of Artificial Sequence: Synthetic oligonucleotide
  Antisense strand to SEQ ID NO: 1081040
ucuucagguagaaagaacu

SEQ ID NO: 1081042 - RNA, 19 nt, Artificial Sequence
  Description of Artificial Sequence: Synthetic oligonucleotide
  Sense strand starting at position 3024 of SEQ ID NO: 915454
aggcccugcugauugaaga

SEQ ID NO: 1081043 - RNA, 19 nt, Artificial Sequence
  Description of Artificial Sequence: Synthetic oligonucleotide
  Antisense strand to SEQ ID NO: 1081042
ucuucaaucagcagggccu

SEQ ID NO: 1081044 - RNA, 19 nt, Artificial Sequence
  Description of Artificial Sequence: Synthetic oligonucleotide
  Sense strand starting at position 3041 of SEQ ID NO: 915454
gagucagugccagaguucu

SEQ ID NO: 1081045 - RNA, 19 nt, Artificial Sequence
  Description of Artificial Sequence: Synthetic oligonucleotide
  Antisense strand to SEQ ID NO: 1081044
agaacucuggcacugacuc

SEQ ID NO: 1081046 - RNA, 19 nt, Artificial Sequence
  Description of Artificial Sequence: Synthetic oligonucleotide
  Sense strand starting at position 3071 of SEQ ID NO: 915454
cagguucugggaugagaca

SEQ ID NO: 1081047 - RNA, 19 nt, Artificial Sequence
  Description of Artificial Sequence: Synthetic oligonucleotide
  Antisense strand to SEQ ID NO: 1081046
ugucucaucccagaaccug

SEQ ID NO: 1081048 - RNA, 19 nt, Artificial Sequence
  Description of Artificial Sequence: Synthetic oligonucleotide
  Sense strand starting at position 3292 of SEQ ID NO: 915454
cuccaacuauggguguuua

SEQ ID NO: 1081049 - RNA, 19 nt, Artificial Sequence
  Description of Artificial Sequence: Synthetic oligonucleotide
  Antisense strand to SEQ ID NO: 1081048
uaaacacccauaguuggag

SEQ ID NO: 1081050 - RNA, 19 nt, Artificial Sequence
  Description of Artificial Sequence: Synthetic oligonucleotide
  Sense strand starting at position 3582 of SEQ ID NO: 915454
gcaagaagauaauaagaga

SEQ ID NO: 1081051 - RNA, 19 nt, Artificial Sequence
  Description of Artificial Sequence: Synthetic oligonucleotide
  Antisense strand to SEQ ID NO: 1081050
ucucuuauuaucuucuugc

SEQ ID NO: 1081052 - RNA, 19 nt, Artificial Sequence
  Description of Artificial Sequence: Synthetic oligonucleotide
  Sense strand starting at position 3723 of SEQ ID NO: 915454
acguuugccaaguacaaga

SEQ ID NO: 1081053 - RNA, 19 nt, Artificial Sequence
  Description of Artificial Sequence: Synthetic oligonucleotide
  Antisense strand to SEQ ID NO: 1081052
ucuuguacuuggcaaacgu

SEQ ID NO: 1081054 - RNA, 19 nt, Artificial Sequence
  Description of Artificial Sequence: Synthetic oligonucleotide
  Sense strand starting at position 3780 of SEQ ID NO: 915454
gaggaauuggagugcuuga

SEQ ID NO: 1081055 - RNA, 19 nt, Artificial Sequence
  Description of Artificial Sequence: Synthetic oligonucleotide
  Antisense strand to SEQ ID NO: 1081054
ucaagcacuccaauuccuc

SEQ ID NO: 1081056 - RNA, 19 nt, Artificial Sequence
  Description of Artificial Sequence: Synthetic oligonucleotide
  Sense strand starting at position 3785 of SEQ ID NO: 915454
auuggagugcuugaucuac

SEQ ID NO: 1081057 - RNA, 19 nt, Artificial Sequence
  Description of Artificial Sequence: Synthetic oligonucleotide
  Antisense strand to SEQ ID NO: 1081056
guagaucaagcacuccaau

SEQ ID NO: 1081058 - RNA, 19 nt, Artificial Sequence
  Description of Artificial Sequence: Synthetic oligonucleotide
  Sense strand starting at position 3797 of SEQ ID NO: 915454
gaucuacucugaccuguga

SEQ ID NO: 1081059 - RNA, 19 nt, Artificial Sequence
  Description of Artificial Sequence: Synthetic oligonucleotide
  Antisense strand to SEQ ID NO: 1081058
ucacaggucagaguagauc

SEQ ID NO: 1081060 - RNA, 19 nt, Artificial Sequence
  Description of Artificial Sequence: Synthetic oligonucleotide
  Sense strand starting at position 3801 of SEQ ID NO: 915454
uacucugaccugugagauu

SEQ ID NO: 1081061 - RNA, 19 nt, Artificial Sequence
  Description of Artificial Sequence: Synthetic oligonucleotide
  Antisense strand to SEQ ID NO: 1081060
aaucucacaggucagagua

SEQ ID NO: 1081062 - RNA, 19 nt, Artificial Sequence
  Description of Artificial Sequence: Synthetic oligonucleotide
  Sense strand starting at position 3980 of SEQ ID NO: 915454
guccuaaugcccugauuug

SEQ ID NO: 1081063 - RNA, 19 nt, Artificial Sequence
  Description of Artificial Sequence: Synthetic oligonucleotide
  Antisense strand to SEQ ID NO: 1081062
caaaucagggcauuaggac

SEQ ID NO: 1081064 - RNA, 19 nt, Artificial Sequence
  Description of Artificial Sequence: Synthetic oligonucleotide
  Sense strand starting at position 87 of SEQ ID NO: 915455
ucuccaggucuugagcauu

SEQ ID NO: 1081065 - RNA, 19 nt, Artificial Sequence
  Description of Artificial Sequence: Synthetic oligonucleotide
  Antisense strand to SEQ ID NO: 1081064
aaugcucaagaccuggaga

SEQ ID NO: 1081066 - RNA, 19 nt, Artificial Sequence
  Description of Artificial Sequence: Synthetic oligonucleotide
  Sense strand starting at position 105 of SEQ ID NO: 915455
uccgauuucuacucuagca

SEQ ID NO: 1081067 - RNA, 19 nt, Artificial Sequence
  Description of Artificial Sequence: Synthetic oligonucleotide
  Antisense strand to SEQ ID NO: 1081066
ugcuagaguagaaaucgga

SEQ ID NO: 1081068 - RNA, 19 nt, Artificial Sequence
  Description of Artificial Sequence: Synthetic oligonucleotide
  Sense strand starting at position 255 of SEQ ID NO: 915455
gcccuuacccuggauggaa

SEQ ID NO: 1081069 - RNA, 19 nt, Artificial Sequence
  Description of Artificial Sequence: Synthetic oligonucleotide
  Antisense strand to SEQ ID NO: 1081068
uuccauccaggguaagggc

SEQ ID NO: 1081070 - RNA, 19 nt, Artificial Sequence
  Description of Artificial Sequence: Synthetic oligonucleotide
  Sense strand starting at position 390 of SEQ ID NO: 915455
gggccagguucacugugaa

SEQ ID NO: 1081071 - RNA, 19 nt, Artificial Sequence
  Description of Artificial Sequence: Synthetic oligonucleotide
  Antisense strand to SEQ ID NO: 1081070
uucacagugaaccuggccc

SEQ ID NO: 1081072 - RNA, 19 nt, Artificial Sequence
  Description of Artificial Sequence: Synthetic oligonucleotide
  Sense strand starting at position 472 of SEQ ID NO: 915455
ucaaauucuaccggaggau

SEQ ID NO: 1081073 - RNA, 19 nt, Artificial Sequence
  Description of Artificial Sequence: Synthetic oligonucleotide
  Antisense strand to SEQ ID NO: 1081072
auccuccgguagaauuuga

SEQ ID NO: 1081074 - RNA, 19 nt, Artificial Sequence
  Description of Artificial Sequence: Synthetic oligonucleotide
  Sense strand starting at position 658 of SEQ ID NO: 915455
gcccacauuccagaguaaa

SEQ ID NO: 1081075 - RNA, 19 nt, Artificial Sequence
  Description of Artificial Sequence: Synthetic oligonucleotide
  Antisense strand to SEQ ID NO: 1081074
uuuacucuggaaugugggc

SEQ ID NO: 1081076 - RNA, 19 nt, Artificial Sequence
  Description of Artificial Sequence: Synthetic oligonucleotide
  Sense strand starting at position 669 of SEQ ID NO: 915455
agaguaaacugcucaccca

SEQ ID NO: 1081077 - RNA, 19 nt, Artificial Sequence
  Description of Artificial Sequence: Synthetic oligonucleotide
  Antisense strand to SEQ ID NO: 1081076
ugggugagcaguuuacucu

SEQ ID NO: 1081078 - RNA, 19 nt, Artificial Sequence
  Description of Artificial Sequence: Synthetic oligonucleotide
  Sense strand starting at position 705 of SEQ ID NO: 915455
cgaggcuggaucuggaaau

SEQ ID NO: 1081079 - RNA, 19 nt, Artificial Sequence
  Description of Artificial Sequence: Synthetic oligonucleotide
  Antisense strand to SEQ ID NO: 1081078
auuuccagauccagccucg

SEQ ID NO: 1081080 - RNA, 19 nt, Artificial Sequence
  Description of Artificial Sequence: Synthetic oligonucleotide
  Sense strand starting at position 916 of SEQ ID NO: 915455
cucagauguucccuugaac

SEQ ID NO: 1081081 - RNA, 19 nt, Artificial Sequence
  Description of Artificial Sequence: Synthetic oligonucleotide
  Antisense strand to SEQ ID NO: 1081080
guucaagggaacaucugag

SEQ ID NO: 1081082 - RNA, 19 nt, Artificial Sequence
  Description of Artificial Sequence: Synthetic oligonucleotide
  Sense strand starting at position 919 of SEQ ID NO: 915455
agauguucccuugaacauu

SEQ ID NO: 1081083 - RNA, 19 nt, Artificial Sequence
  Description of Artificial Sequence: Synthetic oligonucleotide
  Antisense strand to SEQ ID NO: 1081082
aauguucaagggaacaucu

SEQ ID NO: 1081084 - RNA, 19 nt, Artificial Sequence
  Description of Artificial Sequence: Synthetic oligonucleotide
  Sense strand starting at position 1957 of SEQ ID NO: 915455
gguuguuugugaccgagac

SEQ ID NO: 1081085 - RNA, 19 nt, Artificial Sequence
  Description of Artificial Sequence: Synthetic oligonucleotide
  Antisense strand to SEQ ID NO: 1081084
gucucggucacaaacaacc

SEQ ID NO: 1081086 - RNA, 19 nt, Artificial Sequence
  Description of Artificial Sequence: Synthetic oligonucleotide
  Sense strand starting at position 2062 of SEQ ID NO: 915455
gcgagaaacucucugaccu

SEQ ID NO: 1081087 - RNA, 19 nt, Artificial Sequence
  Description of Artificial Sequence: Synthetic oligonucleotide
  Antisense strand to SEQ ID NO: 1081086
aggucagagaguuucucgc

SEQ ID NO: 1081088 - RNA, 19 nt, Artificial Sequence
  Description of Artificial Sequence: Synthetic oligonucleotide
  Sense strand starting at position 2063 of SEQ ID NO: 915455
cgagaaacucucugaccuc

SEQ ID NO: 1081089 - RNA, 19 nt, Artificial Sequence
  Description of Artificial Sequence: Synthetic oligonucleotide
  Antisense strand to SEQ ID NO: 1081088
gaggucagagaguuucucg

SEQ ID NO: 1081090 - RNA, 19 nt, Artificial Sequence
  Description of Artificial Sequence: Synthetic oligonucleotide
  Sense strand starting at position 2184 of SEQ ID NO: 915455
cgaucagagccuuaauccu

SEQ ID NO: 1081091 - RNA, 19 nt, Artificial Sequence
  Description of Artificial Sequence: Synthetic oligonucleotide
  Antisense strand to SEQ ID NO: 1081090
aggauuaaggcucugaucg

SEQ ID NO: 1081092 - RNA, 19 nt, Artificial Sequence
  Description of Artificial Sequence: Synthetic oligonucleotide
  Sense strand starting at position 2499 of SEQ ID NO: 915455
aaauaagcuucuguggaga

SEQ ID NO: 1081093 - RNA, 19 nt, Artificial Sequence
  Description of Artificial Sequence: Synthetic oligonucleotide
  Antisense strand to SEQ ID NO: 1081092
ucuccacagaagcuuauuu

SEQ ID NO: 1081094 - RNA, 19 nt, Artificial Sequence
  Description of Artificial Sequence: Synthetic oligonucleotide
  Sense strand starting at position 2502 of SEQ ID NO: 915455
uaagcuucuguggagaacu

SEQ ID NO: 1081095 - RNA, 19 nt, Artificial Sequence
  Description of Artificial Sequence: Synthetic oligonucleotide
  Antisense strand to SEQ ID NO: 1081094
aguucuccacagaagcuua

SEQ ID NO: 1081096 - RNA, 19 nt, Artificial Sequence
  Description of Artificial Sequence: Synthetic oligonucleotide
  Sense strand starting at position 2625 of SEQ ID NO: 915455
uccagugccugacucauua

SEQ ID NO: 1081097 - RNA, 19 nt, Artificial Sequence
  Description of Artificial Sequence: Synthetic oligonucleotide
  Antisense strand to SEQ ID NO: 1081096
uaaugagucaggcacugga

SEQ ID NO: 1081098 - RNA, 19 nt, Artificial Sequence
  Description of Artificial Sequence: Synthetic oligonucleotide
  Sense strand starting at position 2637 of SEQ ID NO: 915455
cucauuaugagugauccgu

SEQ ID NO: 1081099 - RNA, 19 nt, Artificial Sequence
  Description of Artificial Sequence: Synthetic oligonucleotide
  Antisense strand to SEQ ID NO: 1081098
acggaucacucauaaugag

SEQ ID NO: 1081100 - RNA, 19 nt, Artificial Sequence
  Description of Artificial Sequence: Synthetic oligonucleotide
  Sense strand starting at position 2639 of SEQ ID NO: 915455
cauuaugagugauccguaa

SEQ ID NO: 1081101 - RNA, 19 nt, Artificial Sequence
  Description of Artificial Sequence: Synthetic oligonucleotide
  Antisense strand to SEQ ID NO: 1081100
uuacggaucacucauaaug

SEQ ID NO: 1081102 - RNA, 19 nt, Artificial Sequence
  Description of Artificial Sequence: Synthetic oligonucleotide
  Sense strand starting at position 2641 of SEQ ID NO: 915455
uuaugagugauccguaaag

SEQ ID NO: 1081103 - RNA, 19 nt, Artificial Sequence
  Description of Artificial Sequence: Synthetic oligonucleotide
  Antisense strand to SEQ ID NO: 1081102
cuuuacggaucacucauaa

SEQ ID NO: 1081104 - RNA, 19 nt, Artificial Sequence
  Description of Artificial Sequence: Synthetic oligonucleotide
  Sense strand starting at position 2643 of SEQ ID NO: 915455
augagugauccguaaagcu

SEQ ID NO: 1081105 - RNA, 19 nt, Artificial Sequence
  Description of Artificial Sequence: Synthetic oligonucleotide
  Antisense strand to SEQ ID NO: 1081104
agcuuuacggaucacucau

SEQ ID NO: 1081106 - RNA, 19 nt, Artificial Sequence
  Description of Artificial Sequence: Synthetic oligonucleotide
  Sense strand starting at position 2716 of SEQ ID NO: 915455
ggauccucggcaggaguau

SEQ ID NO: 1081107 - RNA, 19 nt, Artificial Sequence
  Description of Artificial Sequence: Synthetic oligonucleotide
  Antisense strand to SEQ ID NO: 1081106
auacuccugccgaggaucc

SEQ ID NO: 1081108 - RNA, 19 nt, Artificial Sequence
  Description of Artificial Sequence: Synthetic oligonucleotide
  Sense strand starting at position 2746 of SEQ ID NO: 915455
uggaaaggugguuggagua

SEQ ID NO: 1081109 - RNA, 19 nt, Artificial Sequence
  Description of Artificial Sequence: Synthetic oligonucleotide
  Antisense strand to SEQ ID NO: 1081108
uacuccaaccaccuuucca

SEQ ID NO: 1081110 - RNA, 19 nt, Artificial Sequence
  Description of Artificial Sequence: Synthetic oligonucleotide
  Sense strand starting at position 2747 of SEQ ID NO: 915455
ggaaaggugguuggaguaa

SEQ ID NO: 1081111 - RNA, 19 nt, Artificial Sequence
  Description of Artificial Sequence: Synthetic oligonucleotide
  Antisense strand to SEQ ID NO: 1081110
uuacuccaaccaccuuucc

SEQ ID NO: 1081112 - RNA, 19 nt, Artificial Sequence
  Description of Artificial Sequence: Synthetic oligonucleotide
  Sense strand starting at position 2792 of SEQ ID NO: 915455
ccaagagccuguguccaua

SEQ ID NO: 1081113 - RNA, 19 nt, Artificial Sequence
  Description of Artificial Sequence: Synthetic oligonucleotide
  Antisense strand to SEQ ID NO: 1081112
uauggacacaggcucuugg

SEQ ID NO: 1081114 - RNA, 19 nt, Artificial Sequence
  Description of Artificial Sequence: Synthetic oligonucleotide
  Sense strand starting at position 2794 of SEQ ID NO: 915455
aagagccuguguccauaua

SEQ ID NO: 1081115 - RNA, 19 nt, Artificial Sequence
  Description of Artificial Sequence: Synthetic oligonucleotide
  Antisense strand to SEQ ID NO: 1081114
uauauggacacaggcucuu

SEQ ID NO: 1081116 - RNA, 19 nt, Artificial Sequence
  Description of Artificial Sequence: Synthetic oligonucleotide
  Sense strand starting at position 2795 of SEQ ID NO: 915455
agagccuguguccauauau

SEQ ID NO: 1081117 - RNA, 19 nt, Artificial Sequence
  Description of Artificial Sequence: Synthetic oligonucleotide
  Antisense strand to SEQ ID NO: 1081116
auauauggacacaggcucu

SEQ ID NO: 1081118 - RNA, 19 nt, Artificial Sequence
  Description of Artificial Sequence: Synthetic oligonucleotide
  Sense strand starting at position 3250 of SEQ ID NO: 915455
ggaguuugcagaggcuaaa

SEQ ID NO: 1081119 - RNA, 19 nt, Artificial Sequence
  Description of Artificial Sequence: Synthetic oligonucleotide
  Antisense strand to SEQ ID NO: 1081118
uuuagccucugcaaacucc

SEQ ID NO: 1081120 - RNA, 19 nt, Artificial Sequence
  Description of Artificial Sequence: Synthetic oligonucleotide
  Sense strand starting at position 3403 of SEQ ID NO: 915455
ccaaauucuguggguguau

SEQ ID NO: 1081121 - RNA, 19 nt, Artificial Sequence
  Description of Artificial Sequence: Synthetic oligonucleotide
  Antisense strand to SEQ ID NO: 1081120
auacacccacagaauuugg

SEQ ID NO: 1081122 - RNA, 19 nt, Artificial Sequence
  Description of Artificial Sequence: Synthetic oligonucleotide
  Sense strand starting at position 3412 of SEQ ID NO: 915455
guggguguauccuuacacu

SEQ ID NO: 1081123 - RNA, 19 nt, Artificial Sequence
  Description of Artificial Sequence: Synthetic oligonucleotide
  Antisense strand to SEQ ID NO: 1081122
aguguaaggauacacccac

SEQ ID NO: 1081124 - RNA, 19 nt, Artificial Sequence
  Description of Artificial Sequence: Synthetic oligonucleotide
  Sense strand starting at position 3702 of SEQ ID NO: 915455
ugggauaagcugggagauu

SEQ ID NO: 1081125 - RNA, 19 nt, Artificial Sequence
  Description of Artificial Sequence: Synthetic oligonucleotide
  Antisense strand to SEQ ID NO: 1081124
aaucucccagcuuauccca

SEQ ID NO: 1081126 - RNA, 19 nt, Artificial Sequence
  Description of Artificial Sequence: Synthetic oligonucleotide
  Sense strand starting at position 3711 of SEQ ID NO: 915455
cugggagauucccacagga

SEQ ID NO: 1081127 - RNA, 19 nt, Artificial Sequence
  Description of Artificial Sequence: Synthetic oligonucleotide
  Antisense strand to SEQ ID NO: 1081126
uccugugggaaucucccag

SEQ ID NO: 1081128 - RNA, 19 nt, Artificial Sequence
  Description of Artificial Sequence: Synthetic oligonucleotide
  Sense strand starting at position 3724 of SEQ ID NO: 915455
acaggauguguccauauuc

SEQ ID NO: 1081129 - RNA, 19 nt, Artificial Sequence
  Description of Artificial Sequence: Synthetic oligonucleotide
  Antisense strand to SEQ ID NO: 1081128
gaauauggacacauccugu

SEQ ID NO: 1081130 - RNA, 19 nt, Artificial Sequence
  Description of Artificial Sequence: Synthetic oligonucleotide
  Sense strand starting at position 3759 of SEQ ID NO: 915455
aaaucagcuucuguggaga

SEQ ID NO: 1081131 - RNA, 19 nt, Artificial Sequence
  Description of Artificial Sequence: Synthetic oligonucleotide
  Antisense strand to SEQ ID NO: 1081130
ucuccacagaagcugauuu

SEQ ID NO: 1081132 - RNA, 19 nt, Artificial Sequence
  Description of Artificial Sequence: Synthetic oligonucleotide
  Sense strand starting at position 3770 of SEQ ID NO: 915455
uguggagaccuugggcaaa

SEQ ID NO: 1081133 - RNA, 19 nt, Artificial Sequence
  Description of Artificial Sequence: Synthetic oligonucleotide
  Antisense strand to SEQ ID NO: 1081132
uuugcccaaggucuccaca

SEQ ID NO: 1081134 - RNA, 19 nt, Artificial Sequence
  Description of Artificial Sequence: Synthetic oligonucleotide
  Sense strand starting at position 3901 of SEQ ID NO: 915455
cauccagugccugaugcau

SEQ ID NO: 1081135 - RNA, 19 nt, Artificial Sequence
  Description of Artificial Sequence: Synthetic oligonucleotide
  Antisense strand to SEQ ID NO: 1081134
augcaucaggcacuggaug

SEQ ID NO: 1081136 - RNA, 19 nt, Artificial Sequence
  Description of Artificial Sequence: Synthetic oligonucleotide
  Sense strand starting at position 3915 of SEQ ID NO: 915455
ugcauuaugagugauccgu

SEQ ID NO: 1081137 - RNA, 19 nt, Artificial Sequence
  Description of Artificial Sequence: Synthetic oligonucleotide
  Antisense strand to SEQ ID NO: 1081136
acggaucacucauaaugca

SEQ ID NO: 1081138 - RNA, 19 nt, Artificial Sequence
  Description of Artificial Sequence: Synthetic oligonucleotide
  Sense strand starting at position 3928 of SEQ ID NO: 915455
auccguaaagcugagcuaa

SEQ ID NO: 1081139 - RNA, 19 nt, Artificial Sequence
  Description of Artificial Sequence: Synthetic oligonucleotide
  Antisense strand to SEQ ID NO: 1081138
uuagcucagcuuuacggau

SEQ ID NO: 1081140 - RNA, 19 nt, Artificial Sequence
  Description of Artificial Sequence: Synthetic oligonucleotide
  Sense strand starting at position 3968 of SEQ ID NO: 915455
gcagaauggagucgaguuu

SEQ ID NO: 1081141 - RNA, 19 nt, Artificial Sequence
  Description of Artificial Sequence: Synthetic oligonucleotide
  Antisense strand to SEQ ID NO: 1081140
aaacucgacuccauucugc

SEQ ID NO: 1081142 - RNA, 19 nt, Artificial Sequence
  Description of Artificial Sequence: Synthetic oligonucleotide
  Sense strand starting at position 3969 of SEQ ID NO: 915455
cagaauggagucgaguuua

SEQ ID NO: 1081143 - RNA, 19 nt, Artificial Sequence
  Description of Artificial Sequence: Synthetic oligonucleotide
  Antisense strand to SEQ ID NO: 1081142
uaaacucgacuccauucug

SEQ ID NO: 1081144 - RNA, 19 nt, Artificial Sequence
  Description of Artificial Sequence: Synthetic oligonucleotide
  Sense strand starting at position 210 of SEQ ID NO: 915456
ggaggugucagaugcuuug

SEQ ID NO: 1081145 - RNA, 19 nt, Artificial Sequence
  Description of Artificial Sequence: Synthetic oligonucleotide
  Antisense strand to SEQ ID NO: 1081144
caaagcaucugacaccucc

SEQ ID NO: 1081146 - RNA, 19 nt, Artificial Sequence
  Description of Artificial Sequence: Synthetic oligonucleotide
  Sense strand starting at position 216 of SEQ ID NO: 915456
gucagaugcuuugcugacu

SEQ ID NO: 1081147 - RNA, 19 nt, Artificial Sequence
  Description of Artificial Sequence: Synthetic oligonucleotide
  Antisense strand to SEQ ID NO: 1081146
agucagcaaagcaucugac

SEQ ID NO: 1081148 - RNA, 19 nt, Artificial Sequence
  Description of Artificial Sequence: Synthetic oligonucleotide
  Sense strand starting at position 505 of SEQ ID NO: 915456
ggguuaggaugucuggaga

SEQ ID NO: 1081149 - RNA, 19 nt, Artificial Sequence
  Description of Artificial Sequence: Synthetic oligonucleotide
  Antisense strand to SEQ ID NO: 1081148
ucuccagacauccuaaccc

SEQ ID NO: 1081150 - RNA, 19 nt, Artificial Sequence
  Description of Artificial Sequence: Synthetic oligonucleotide
  Sense strand starting at position 587 of SEQ ID NO: 915456
uuuacugacugcuguacua

SEQ ID NO: 1081151 - RNA, 19 nt, Artificial Sequence
  Description of Artificial Sequence: Synthetic oligonucleotide
  Antisense strand to SEQ ID NO: 1081150
uaguacagcagucaguaaa

SEQ ID NO: 1081152 - RNA, 19 nt, Artificial Sequence
  Description of Artificial Sequence: Synthetic oligonucleotide
  Sense strand starting at position 693 of SEQ ID NO: 915456
cagggugguuugguaacau

SEQ ID NO: 1081153 - RNA, 19 nt, Artificial Sequence
  Description of Artificial Sequence: Synthetic oligonucleotide
  Antisense strand to SEQ ID NO: 1081152
auguuaccaaaccacccug

SEQ ID NO: 1081154 - RNA, 19 nt, Artificial Sequence
  Description of Artificial Sequence: Synthetic oligonucleotide
  Sense strand starting at position 704 of SEQ ID NO: 915456
gguaacaugcccuggguuu

SEQ ID NO: 1081155 - RNA, 19 nt, Artificial Sequence
  Description of Artificial Sequence: Synthetic oligonucleotide
  Antisense strand to SEQ ID NO: 1081154
aaacccagggcauguuacc

SEQ ID NO: 1081156 - RNA, 19 nt, Artificial Sequence
  Description of Artificial Sequence: Synthetic oligonucleotide
  Sense strand starting at position 761 of SEQ ID NO: 915456
gccacuauguucuacuuau

SEQ ID NO: 1081157 - RNA, 19 nt, Artificial Sequence
  Description of Artificial Sequence: Synthetic oligonucleotide
  Antisense strand to SEQ ID NO: 1081156
auaaguagaacauaguggc

SEQ ID NO: 1081158 - RNA, 19 nt, Artificial Sequence
  Description of Artificial Sequence: Synthetic oligonucleotide
  Sense strand starting at position 2564 of SEQ ID NO: 915456
ggccucuucucgugguauu

SEQ ID NO: 1081159 - RNA, 19 nt, Artificial Sequence
  Description of Artificial Sequence: Synthetic oligonucleotide
  Antisense strand to SEQ ID NO: 1081158
aauaccacgagaagaggcc

SEQ ID NO: 1081160 - RNA, 19 nt, Artificial Sequence
  Description of Artificial Sequence: Synthetic oligonucleotide
  Sense strand starting at position 2565 of SEQ ID NO: 915456
gccucuucucgugguauuu

SEQ ID NO: 1081161 - RNA, 19 nt, Artificial Sequence
  Description of Artificial Sequence: Synthetic oligonucleotide
  Antisense strand to SEQ ID NO: 1081160
aaauaccacgagaagaggc

SEQ ID NO: 1081162 - RNA, 19 nt, Artificial Sequence
  Description of Artificial Sequence: Synthetic oligonucleotide
  Sense strand starting at position 2574 of SEQ ID NO: 915456
cgugguauuucaggucuuu

SEQ ID NO: 1081163 - RNA, 19 nt, Artificial Sequence
  Description of Artificial Sequence: Synthetic oligonucleotide
  Antisense strand to SEQ ID NO: 1081162
aaagaccugaaauaccacg

SEQ ID NO: 1081164 - RNA, 19 nt, Artificial Sequence
  Description of Artificial Sequence: Synthetic oligonucleotide
  Sense strand starting at position 2688 of SEQ ID NO: 915456
cuggguccucaguaugacu

SEQ ID NO: 1081165 - RNA, 19 nt, Artificial Sequence
  Description of Artificial Sequence: Synthetic oligonucleotide
  Antisense strand to SEQ ID NO: 1081164
agucauacugaggacccag

SEQ ID NO: 1081166 - RNA, 19 nt, Artificial Sequence
  Description of Artificial Sequence: Synthetic oligonucleotide
  Sense strand starting at position 2935 of SEQ ID NO: 915456
ggagcuuugccagguuucu

SEQ ID NO: 1081167 - RNA, 19 nt, Artificial Sequence
  Description of Artificial Sequence: Synthetic oligonucleotide
  Antisense strand to SEQ ID NO: 1081166
agaaaccuggcaaagcucc

SEQ ID NO: 1081168 - RNA, 19 nt, Artificial Sequence
  Description of Artificial Sequence: Synthetic oligonucleotide
  Sense strand starting at position 2974 of SEQ ID NO: 915456
ggcccuugauccuuuacca

SEQ ID NO: 1081169 - RNA, 19 nt, Artificial Sequence
  Description of Artificial Sequence: Synthetic oligonucleotide
  Antisense strand to SEQ ID NO: 1081168
ugguaaaggaucaagggcc

SEQ ID NO: 1081170 - RNA, 19 nt, Artificial Sequence
  Description of Artificial Sequence: Synthetic oligonucleotide
  Sense strand starting at position 3052 of SEQ ID NO: 915456
accggacacauguaaaguu

SEQ ID NO: 1081171 - RNA, 19 nt, Artificial Sequence
  Description of Artificial Sequence: Synthetic oligonucleotide
  Antisense strand to SEQ ID NO: 1081170
aacuuuacauguguccggu

SEQ ID NO: 1081172 - RNA, 19 nt, Artificial Sequence
  Description of Artificial Sequence: Synthetic oligonucleotide
  Sense strand starting at position 3093 of SEQ ID NO: 915456
acgcuuucuucaggugaug

SEQ ID NO: 1081173 - RNA, 19 nt, Artificial Sequence
  Description of Artificial Sequence: Synthetic oligonucleotide
  Antisense strand to SEQ ID NO: 1081172
caucaccugaagaaagcgu

SEQ ID NO: 1081174 - RNA, 19 nt, Artificial Sequence
  Description of Artificial Sequence: Synthetic oligonucleotide
  Sense strand starting at position 3316 of SEQ ID NO: 915456
agguaugcaugucaucaca

SEQ ID NO: 1081175 - RNA, 19 nt, Artificial Sequence
  Description of Artificial Sequence: Synthetic oligonucleotide
  Antisense strand to SEQ ID NO: 1081174
ugugaugacaugcauaccu

SEQ ID NO: 1081176 - RNA, 19 nt, Artificial Sequence
  Description of Artificial Sequence: Synthetic oligonucleotide
  Sense strand starting at position 3694 of SEQ ID NO: 915456
gugguaggauugcagagua

SEQ ID NO: 1081177 - RNA, 19 nt, Artificial Sequence
  Description of Artificial Sequence: Synthetic oligonucleotide
  Antisense strand to SEQ ID NO: 1081176
uacucugcaauccuaccac

SEQ ID NO: 1081178 - RNA, 19 nt, Artificial Sequence
  Description of Artificial Sequence: Synthetic oligonucleotide
  Sense strand starting at position 3797 of SEQ ID NO: 915456
ggcagaagcucuccaggaa

SEQ ID NO: 1081179 - RNA, 19 nt, Artificial Sequence
  Description of Artificial Sequence: Synthetic oligonucleotide
  Antisense strand to SEQ ID NO: 1081178
uuccuggagagcuucugcc

SEQ ID NO: 1081180 - RNA, 19 nt, Artificial Sequence
  Description of Artificial Sequence: Synthetic oligonucleotide
  Sense strand starting at position 35 of SEQ ID NO: 915457
acgucuucugaauagccaa

SEQ ID NO: 1081181 - RNA, 19 nt, Artificial Sequence
  Description of Artificial Sequence: Synthetic oligonucleotide
  Antisense strand to SEQ ID NO: 1081180
uuggcuauucagaagacgu

SEQ ID NO: 1081182 - RNA, 19 nt, Artificial Sequence
  Description of Artificial Sequence: Synthetic oligonucleotide
  Sense strand starting at position 84 of SEQ ID NO: 915457
gaaugugaagcaugucucu

SEQ ID NO: 1081183 - RNA, 19 nt, Artificial Sequence
  Description of Artificial Sequence: Synthetic oligonucleotide
  Antisense strand to SEQ ID NO: 1081182
agagacaugcuucacauuc

SEQ ID NO: 1081184 - RNA, 19 nt, Artificial Sequence
  Description of Artificial Sequence: Synthetic oligonucleotide
  Sense strand starting at position 208 of SEQ ID NO: 915457
gacucuagccucgaugaca

SEQ ID NO: 1081185 - RNA, 19 nt, Artificial Sequence
  Description of Artificial Sequence: Synthetic oligonucleotide
  Antisense strand to SEQ ID NO: 1081184
ugucaucgaggcuagaguc

SEQ ID NO: 1081186 - RNA, 19 nt, Artificial Sequence
  Description of Artificial Sequence: Synthetic oligonucleotide
  Sense strand starting at position 272 of SEQ ID NO: 915457
aggcaaggcuugcuucuaa

SEQ ID NO: 1081187 - RNA, 19 nt, Artificial Sequence
  Description of Artificial Sequence: Synthetic oligonucleotide
  Antisense strand to SEQ ID NO: 1081186
uuagaagcaagccuugccu

SEQ ID NO: 1081188 - RNA, 19 nt, Artificial Sequence
  Description of Artificial Sequence: Synthetic oligonucleotide
  Sense strand starting at position 327 of SEQ ID NO: 915457
cucccaagcugugucaaua

SEQ ID NO: 1081189 - RNA, 19 nt, Artificial Sequence
  Description of Artificial Sequence: Synthetic oligonucleotide
  Antisense strand to SEQ ID NO: 1081188
uauugacacagcuugggag

SEQ ID NO: 1081190 - RNA, 19 nt, Artificial Sequence
  Description of Artificial Sequence: Synthetic oligonucleotide
  Sense strand starting at position 362 of SEQ ID NO: 915457
acuuacuauuugucgaagu

SEQ ID NO: 1081191 - RNA, 19 nt, Artificial Sequence
  Description of Artificial Sequence: Synthetic oligonucleotide
  Antisense strand to SEQ ID NO: 1081190
acuucgacaaauaguaagu

SEQ ID NO: 1081192 - RNA, 19 nt, Artificial Sequence
  Description of Artificial Sequence: Synthetic oligonucleotide
  Sense strand starting at position 435 of SEQ ID NO: 915457
ggugcuugccugcaggaau

SEQ ID NO: 1081193 - RNA, 19 nt, Artificial Sequence
  Description of Artificial Sequence: Synthetic oligonucleotide
  Antisense strand to SEQ ID NO: 1081192
auuccugcaggcaagcacc

SEQ ID NO: 1081194 - RNA, 19 nt, Artificial Sequence
  Description of Artificial Sequence: Synthetic oligonucleotide
  Sense strand starting at position 620 of SEQ ID NO: 915457
ggcgcacaccuguaauauc

SEQ ID NO: 1081195 - RNA, 19 nt, Artificial Sequence
  Description of Artificial Sequence: Synthetic oligonucleotide
  Antisense strand to SEQ ID NO: 1081194
gauauuacaggugugcgcc

SEQ ID NO: 1081196 - RNA, 19 nt, Artificial Sequence
  Description of Artificial Sequence: Synthetic oligonucleotide
  Sense strand starting at position 729 of SEQ ID NO: 915457
gggcgacagugaucagucu

SEQ ID NO: 1081197 - RNA, 19 nt, Artificial Sequence
  Description of Artificial Sequence: Synthetic oligonucleotide
  Antisense strand to SEQ ID NO: 1081196
agacugaucacugucgccc

SEQ ID NO: 1081198 - RNA, 19 nt, Artificial Sequence
  Description of Artificial Sequence: Synthetic oligonucleotide
  Sense strand starting at position 821 of SEQ ID NO: 915457
gaguguuucccagacuucu

SEQ ID NO: 1081199 - RNA, 19 nt, Artificial Sequence
  Description of Artificial Sequence: Synthetic oligonucleotide
  Antisense strand to SEQ ID NO: 1081198
agaagucugggaaacacuc

SEQ ID NO: 1081200 - RNA, 19 nt, Artificial Sequence
  Description of Artificial Sequence: Synthetic oligonucleotide
  Sense strand starting at position 833 of SEQ ID NO: 915457
gacuucugugucccgcuua

SEQ ID NO: 1081201 - RNA, 19 nt, Artificial Sequence
  Description of Artificial Sequence: Synthetic oligonucleotide
  Antisense strand to SEQ ID NO: 1081200
uaagcgggacacagaaguc

SEQ ID NO: 1081202 - RNA, 19 nt, Artificial Sequence
  Description of Artificial Sequence: Synthetic oligonucleotide
  Sense strand starting at position 885 of SEQ ID NO: 915457
caaugcgauuacuuuagga

SEQ ID NO: 1081203 - RNA, 19 nt, Artificial Sequence
  Description of Artificial Sequence: Synthetic oligonucleotide
  Antisense strand to SEQ ID NO: 1081202
uccuaaaguaaucgcauug

SEQ ID NO: 1081204 - RNA, 19 nt, Artificial Sequence
  Description of Artificial Sequence: Synthetic oligonucleotide
  Sense strand starting at position 887 of SEQ ID NO: 915457
augcgauuacuuuaggauu

SEQ ID NO: 1081205 - RNA, 19 nt, Artificial Sequence
  Description of Artificial Sequence: Synthetic oligonucleotide
  Antisense strand to SEQ ID NO: 1081204
aauccuaaaguaaucgcau

SEQ ID NO: 1081206 - RNA, 19 nt, Artificial Sequence
  Description of Artificial Sequence: Synthetic oligonucleotide
  Sense strand starting at position 899 of SEQ ID NO: 915457
uaggauuccgggugaaaca

SEQ ID NO: 1081207 - RNA, 19 nt, Artificial Sequence
  Description of Artificial Sequence: Synthetic oligonucleotide
  Antisense strand to SEQ ID NO: 1081206
uguuucacccggaauccua

SEQ ID NO: 1081208 - RNA, 19 nt, Artificial Sequence
  Description of Artificial Sequence: Synthetic oligonucleotide
  Sense strand starting at position 937 of SEQ ID NO: 915457
acagcauucccacaguacu

SEQ ID NO: 1081209 - RNA, 19 nt, Artificial Sequence
  Description of Artificial Sequence: Synthetic oligonucleotide
  Antisense strand to SEQ ID NO: 1081208
aguacugugggaaugcugu

SEQ ID NO: 1081210 - RNA, 19 nt, Artificial Sequence
  Description of Artificial Sequence: Synthetic oligonucleotide
  Sense strand starting at position 1035 of SEQ ID NO: 915457
acuagaggaucgucagaaa

SEQ ID NO: 1081211 - RNA, 19 nt, Artificial Sequence
  Description of Artificial Sequence: Synthetic oligonucleotide
  Antisense strand to SEQ ID NO: 1081210
uuucugacgauccucuagu

SEQ ID NO: 1081212 - RNA, 19 nt, Artificial Sequence
  Description of Artificial Sequence: Synthetic oligonucleotide
  Sense strand starting at position 1265 of SEQ ID NO: 915457
ggugguaaggccuaaggaa

SEQ ID NO: 1081213 - RNA, 19 nt, Artificial Sequence
  Description of Artificial Sequence: Synthetic oligonucleotide
  Antisense strand to SEQ ID NO: 1081212
uuccuuaggccuuaccacc

SEQ ID NO: 1081214 - RNA, 19 nt, Artificial Sequence
  Description of Artificial Sequence: Synthetic oligonucleotide
  Sense strand starting at position 1427 of SEQ ID NO: 915457
gcguguccuagagauccga

SEQ ID NO: 1081215 - RNA, 19 nt, Artificial Sequence
  Description of Artificial Sequence: Synthetic oligonucleotide
  Antisense strand to SEQ ID NO: 1081214
ucggaucucuaggacacgc

SEQ ID NO: 1081216 - RNA, 19 nt, Artificial Sequence
  Description of Artificial Sequence: Synthetic oligonucleotide
  Sense strand starting at position 2002 of SEQ ID NO: 915457
gucugagcuccucaccaaa

SEQ ID NO: 1081217 - RNA, 19 nt, Artificial Sequence
  Description of Artificial Sequence: Synthetic oligonucleotide
  Antisense strand to SEQ ID NO: 1081216
uuuggugaggagcucagac

SEQ ID NO: 1081218 - RNA, 19 nt, Artificial Sequence
  Description of Artificial Sequence: Synthetic oligonucleotide
  Sense strand starting at position 2123 of SEQ ID NO: 915457
ccgcgaggcccucuuuaau

SEQ ID NO: 1081219 - RNA, 19 nt, Artificial Sequence
  Description of Artificial Sequence: Synthetic oligonucleotide
  Antisense strand to SEQ ID NO: 1081218
auuaaagagggccucgcgg

SEQ ID NO: 1081220 - RNA, 19 nt, Artificial Sequence
  Description of Artificial Sequence: Synthetic oligonucleotide
  Sense strand starting at position 2132 of SEQ ID NO: 915457
ccucuuuaauccucagugu

SEQ ID NO: 1081221 - RNA, 19 nt, Artificial Sequence
  Description of Artificial Sequence: Synthetic oligonucleotide
  Antisense strand to SEQ ID NO: 1081220
acacugaggauuaaagagg

SEQ ID NO: 1081222 - RNA, 19 nt, Artificial Sequence
  Description of Artificial Sequence: Synthetic oligonucleotide
  Sense strand starting at position 2279 of SEQ ID NO: 915457
uccucucaaguuugagcaa

SEQ ID NO: 1081223 - RNA, 19 nt, Artificial Sequence
  Description of Artificial Sequence: Synthetic oligonucleotide
  Antisense strand to SEQ ID NO: 1081222
uugcucaaacuugagagga

SEQ ID NO: 1081224 - RNA, 19 nt, Artificial Sequence
  Description of Artificial Sequence: Synthetic oligonucleotide
  Sense strand starting at position 2282 of SEQ ID NO: 915457
ucucaaguuugagcaacuu

SEQ ID NO: 1081225 - RNA, 19 nt, Artificial Sequence
  Description of Artificial Sequence: Synthetic oligonucleotide
  Antisense strand to SEQ ID NO: 1081224
aaguugcucaaacuugaga

SEQ ID NO: 1081226 - RNA, 19 nt, Artificial Sequence
  Description of Artificial Sequence: Synthetic oligonucleotide
  Sense strand starting at position 2577 of SEQ ID NO: 915457
ugacccuuuccuggacaca

SEQ ID NO: 1081227 - RNA, 19 nt, Artificial Sequence
  Description of Artificial Sequence: Synthetic oligonucleotide
  Antisense strand to SEQ ID NO: 1081226
uguguccaggaaaggguca

SEQ ID NO: 1081228 - RNA, 19 nt, Artificial Sequence
  Description of Artificial Sequence: Synthetic oligonucleotide
  Sense strand starting at position 2655 of SEQ ID NO: 915457
guaauuuauugaccuacgu

SEQ ID NO: 1081229 - RNA, 19 nt, Artificial Sequence
  Description of Artificial Sequence: Synthetic oligonucleotide
  Antisense strand to SEQ ID NO: 1081228
acguaggucaauaaauuac

SEQ ID NO: 1081230 - RNA, 19 nt, Artificial Sequence
  Description of Artificial Sequence: Synthetic oligonucleotide
  Sense strand starting at position 2672 of SEQ ID NO: 915457
guuugucuucccuacuaga

SEQ ID NO: 1081231 - RNA, 19 nt, Artificial Sequence
  Description of Artificial Sequence: Synthetic oligonucleotide
  Antisense strand to SEQ ID NO: 1081230
ucuaguagggaagacaaac

SEQ ID NO: 1081232 - RNA, 19 nt, Artificial Sequence
  Description of Artificial Sequence: Synthetic oligonucleotide
  Sense strand starting at position 2696 of SEQ ID NO: 915457
uuccuuauguggucaagga

SEQ ID NO: 1081233 - RNA, 19 nt, Artificial Sequence
  Description of Artificial Sequence: Synthetic oligonucleotide
  Antisense strand to SEQ ID NO: 1081232
uccuugaccacauaaggaa

SEQ ID NO: 1081234 - RNA, 19 nt, Artificial Sequence
  Description of Artificial Sequence: Synthetic oligonucleotide
  Sense strand starting at position 2734 of SEQ ID NO: 915457
cucaacuagugauuguuga

SEQ ID NO: 1081235 - RNA, 19 nt, Artificial Sequence
  Description of Artificial Sequence: Synthetic oligonucleotide
  Antisense strand to SEQ ID NO: 1081234
ucaacaaucacuaguugag

SEQ ID NO: 1081236 - RNA, 19 nt, Artificial Sequence
  Description of Artificial Sequence: Synthetic oligonucleotide
  Sense strand starting at position 2741 of SEQ ID NO: 915457
agugauuguugagugaaua

SEQ ID NO: 1081237 - RNA, 19 nt, Artificial Sequence
  Description of Artificial Sequence: Synthetic oligonucleotide
  Antisense strand to SEQ ID NO: 1081236
uauucacucaacaaucacu

SEQ ID NO: 1081238 - RNA, 19 nt, Artificial Sequence
  Description of Artificial Sequence: Synthetic oligonucleotide
  Sense strand starting at position 2742 of SEQ ID NO: 915457
gugauuguugagugaauaa

SEQ ID NO: 1081239 - RNA, 19 nt, Artificial Sequence
  Description of Artificial Sequence: Synthetic oligonucleotide
  Antisense strand to SEQ ID NO: 1081238
uuauucacucaacaaucac

SEQ ID NO: 1081240 - RNA, 19 nt, Artificial Sequence
  Description of Artificial Sequence: Synthetic oligonucleotide
  Sense strand starting at position 2799 of SEQ ID NO: 915457
gcaugucuucgcucuuaag

SEQ ID NO: 1081241 - RNA, 19 nt, Artificial Sequence
  Description of Artificial Sequence: Synthetic oligonucleotide
  Antisense strand to SEQ ID NO: 1081240
cuuaagagcgaagacaugc

SEQ ID NO: 1081242 - RNA, 19 nt, Artificial Sequence
  Description of Artificial Sequence: Synthetic oligonucleotide
  Sense strand starting at position 2864 of SEQ ID NO: 915457
auuaauagaucccauggga

SEQ ID NO: 1081243 - RNA, 19 nt, Artificial Sequence
  Description of Artificial Sequence: Synthetic oligonucleotide
  Antisense strand to SEQ ID NO: 1081242
ucccaugggaucuauuaau

SEQ ID NO: 1081244 - RNA, 19 nt, Artificial Sequence
  Description of Artificial Sequence: Synthetic oligonucleotide
  Sense strand starting at position 2932 of SEQ ID NO: 915457
guaugugugagcguguauu

SEQ ID NO: 1081245 - RNA, 19 nt, Artificial Sequence
  Description of Artificial Sequence: Synthetic oligonucleotide
  Antisense strand to SEQ ID NO: 1081244
aauacacgcucacacauac

SEQ ID NO: 1081246 - RNA, 19 nt, Artificial Sequence
  Description of Artificial Sequence: Synthetic oligonucleotide
  Sense strand starting at position 3621 of SEQ ID NO: 915457
agcguuguccaccauuuga

SEQ ID NO: 1081247 - RNA, 19 nt, Artificial Sequence
  Description of Artificial Sequence: Synthetic oligonucleotide
  Antisense strand to SEQ ID NO: 1081246
ucaaaugguggacaacgcu

SEQ ID NO: 1081248 - RNA, 19 nt, Artificial Sequence
  Description of Artificial Sequence: Synthetic oligonucleotide
  Sense strand starting at position 3642 of SEQ ID NO: 915457
guugauguuccucagccuu

SEQ ID NO: 1081249 - RNA, 19 nt, Artificial Sequence
  Description of Artificial Sequence: Synthetic oligonucleotide
  Antisense strand to SEQ ID NO: 1081248
aaggcugaggaacaucaac

SEQ ID NO: 1081250 - RNA, 19 nt, Artificial Sequence
  Description of Artificial Sequence: Synthetic oligonucleotide
  Sense strand starting at position 3737 of SEQ ID NO: 915457
acacccauauggucacuua

SEQ ID NO: 1081251 - RNA, 19 nt, Artificial Sequence
  Description of Artificial Sequence: Synthetic oligonucleotide
  Antisense strand to SEQ ID NO: 1081250
uaagugaccauaugggugu

SEQ ID NO: 1081252 - RNA, 19 nt, Artificial Sequence
  Description of Artificial Sequence: Synthetic oligonucleotide
  Sense strand starting at position 3748 of SEQ ID NO: 915457
gucacuuaauuacugguua

SEQ ID NO: 1081253 - RNA, 19 nt, Artificial Sequence
  Description of Artificial Sequence: Synthetic oligonucleotide
  Antisense strand to SEQ ID NO: 1081252
uaaccaguaauuaagugac

SEQ ID NO: 1081254 - RNA, 19 nt, Artificial Sequence
  Description of Artificial Sequence: Synthetic oligonucleotide
  Sense strand starting at position 3752 of SEQ ID NO: 915457
cuuaauuacugguuaguau

SEQ ID NO: 1081255 - RNA, 19 nt, Artificial Sequence
  Description of Artificial Sequence: Synthetic oligonucleotide
  Antisense strand to SEQ ID NO: 1081254
auacuaaccaguaauuaag

SEQ ID NO: 1081256 - RNA, 19 nt, Artificial Sequence
  Description of Artificial Sequence: Synthetic oligonucleotide
  Sense strand starting at position 3763 of SEQ ID NO: 915457
guuaguauuccuuggacau

SEQ ID NO: 1081257 - RNA, 19 nt, Artificial Sequence
  Description of Artificial Sequence: Synthetic oligonucleotide
  Antisense strand to SEQ ID NO: 1081256
auguccaaggaauacuaac

SEQ ID NO: 1081258 - RNA, 19 nt, Artificial Sequence
  Description of Artificial Sequence: Synthetic oligonucleotide
  Sense strand starting at position 3767 of SEQ ID NO: 915457
guauuccuuggacauucua

SEQ ID NO: 1081259 - RNA, 19 nt, Artificial Sequence
  Description of Artificial Sequence: Synthetic oligonucleotide
  Antisense strand to SEQ ID NO: 1081258
uagaauguccaaggaauac

SEQ ID NO: 1081260 - RNA, 19 nt, Artificial Sequence
  Description of Artificial Sequence: Synthetic oligonucleotide
  Sense strand starting at position 72 of SEQ ID NO: 915458
accuaaacgucugcugaga

SEQ ID NO: 1081261 - RNA, 19 nt, Artificial Sequence
  Description of Artificial Sequence: Synthetic oligonucleotide
  Antisense strand to SEQ ID NO: 1081260
ucucagcagacguuuaggu

SEQ ID NO: 1081262 - RNA, 19 nt, Artificial Sequence
  Description of Artificial Sequence: Synthetic oligonucleotide
  Sense strand starting at position 74 of SEQ ID NO: 915458
cuaaacgucugcugagaac

SEQ ID NO: 1081263 - RNA, 19 nt, Artificial Sequence
  Description of Artificial Sequence: Synthetic oligonucleotide
  Antisense strand to SEQ ID NO: 1081262
guucucagcagacguuuag

SEQ ID NO: 1081264 - RNA, 19 nt, Artificial Sequence
  Description of Artificial Sequence: Synthetic oligonucleotide
  Sense strand starting at position 117 of SEQ ID NO: 915458
uccugagagugucuagaag

SEQ ID NO: 1081265 - RNA, 19 nt, Artificial Sequence
  Description of Artificial Sequence: Synthetic oligonucleotide
  Antisense strand to SEQ ID NO: 1081264
cuucuagacacucucagga

SEQ ID NO: 1081266 - RNA, 19 nt, Artificial Sequence
  Description of Artificial Sequence: Synthetic oligonucleotide
  Sense strand starting at position 357 of SEQ ID NO: 915458
cagggcuguuaccaggaau

SEQ ID NO: 1081267 - RNA, 19 nt, Artificial Sequence
  Description of Artificial Sequence: Synthetic oligonucleotide
  Antisense strand to SEQ ID NO: 1081266
auuccugguaacagcccug

SEQ ID NO: 1081268 - RNA, 19 nt, Artificial Sequence
  Description of Artificial Sequence: Synthetic oligonucleotide
  Sense strand starting at position 360 of SEQ ID NO: 915458
ggcuguuaccaggaaugua

SEQ ID NO: 1081269 - RNA, 19 nt, Artificial Sequence
  Description of Artificial Sequence: Synthetic oligonucleotide
  Antisense strand to SEQ ID NO: 1081268
uacauuccugguaacagcc

SEQ ID NO: 1081270 - RNA, 19 nt, Artificial Sequence
  Description of Artificial Sequence: Synthetic oligonucleotide
  Sense strand starting at position 368 of SEQ ID NO: 915458
ccaggaauguacgauugua

SEQ ID NO: 1081271 - RNA, 19 nt, Artificial Sequence
  Description of Artificial Sequence: Synthetic oligonucleotide
  Antisense strand to SEQ ID NO: 1081270
uacaaucguacauuccugg

SEQ ID NO: 1081272 - RNA, 19 nt, Artificial Sequence
  Description of Artificial Sequence: Synthetic oligonucleotide
  Sense strand starting at position 437 of SEQ ID NO: 915458
gggaauaggcccugaaguu

SEQ ID NO: 1081273 - RNA, 19 nt, Artificial Sequence
  Description of Artificial Sequence: Synthetic oligonucleotide
  Antisense strand to SEQ ID NO: 1081272
aacuucagggccuauuccc

SEQ ID NO: 1081274 - RNA, 19 nt, Artificial Sequence
  Description of Artificial Sequence: Synthetic oligonucleotide
  Sense strand starting at position 438 of SEQ ID NO: 915458
ggaauaggcccugaaguuu

SEQ ID NO: 1081275 - RNA, 19 nt, Artificial Sequence
  Description of Artificial Sequence: Synthetic oligonucleotide
  Antisense strand to SEQ ID NO: 1081274
aaacuucagggccuauucc

SEQ ID NO: 1081276 - RNA, 19 nt, Artificial Sequence
  Description of Artificial Sequence: Synthetic oligonucleotide
  Sense strand starting at position 446 of SEQ ID NO: 915458
cccugaaguuuccagaacu

SEQ ID NO: 1081277 - RNA, 19 nt, Artificial Sequence
  Description of Artificial Sequence: Synthetic oligonucleotide
  Antisense strand to SEQ ID NO: 1081276
aguucuggaaacuucaggg

SEQ ID NO: 1081278 - RNA, 19 nt, Artificial Sequence
  Description of Artificial Sequence: Synthetic oligonucleotide
  Sense strand starting at position 491 of SEQ ID NO: 915458
ucacuugggaagugauaua

SEQ ID NO: 1081279 - RNA, 19 nt, Artificial Sequence
  Description of Artificial Sequence: Synthetic oligonucleotide
  Antisense strand to SEQ ID NO: 1081278
uauaucacuucccaaguga

SEQ ID NO: 1081280 - RNA, 19 nt, Artificial Sequence
  Description of Artificial Sequence: Synthetic oligonucleotide
  Sense strand starting at position 560 of SEQ ID NO: 915458
agggcaucucacuacuuau

SEQ ID NO: 1081281 - RNA, 19 nt, Artificial Sequence
  Description of Artificial Sequence: Synthetic oligonucleotide
  Antisense strand to SEQ ID NO: 1081280
auaaguagugagaugcccu

SEQ ID NO: 1081282 - RNA, 19 nt, Artificial Sequence
  Description of Artificial Sequence: Synthetic oligonucleotide
  Sense strand starting at position 563 of SEQ ID NO: 915458
gcaucucacuacuuauguu

SEQ ID NO: 1081283 - RNA, 19 nt, Artificial Sequence
  Description of Artificial Sequence: Synthetic oligonucleotide
  Antisense strand to SEQ ID NO: 1081282
aacauaaguagugagaugc

SEQ ID NO: 1081284 - RNA, 19 nt, Artificial Sequence
  Description of Artificial Sequence: Synthetic oligonucleotide
  Sense strand starting at position 573 of SEQ ID NO: 915458
acuuauguugacuacucau

SEQ ID NO: 1081285 - RNA, 19 nt, Artificial Sequence
  Description of Artificial Sequence: Synthetic oligonucleotide
  Antisense strand to SEQ ID NO: 1081284
augaguagucaacauaagu

SEQ ID NO: 1081286 - RNA, 19 nt, Artificial Sequence
  Description of Artificial Sequence: Synthetic oligonucleotide
  Sense strand starting at position 579 of SEQ ID NO: 915458
guugacuacucauagguau

SEQ ID NO: 1081287 - RNA, 19 nt, Artificial Sequence
  Description of Artificial Sequence: Synthetic oligonucleotide
  Antisense strand to SEQ ID NO: 1081286
auaccuaugaguagucaac

SEQ ID NO: 1081288 - RNA, 19 nt, Artificial Sequence
  Description of Artificial Sequence: Synthetic oligonucleotide
  Sense strand starting at position 626 of SEQ ID NO: 915458
ugaaauugacuuugacuuc

SEQ ID NO: 1081289 - RNA, 19 nt, Artificial Sequence
  Description of Artificial Sequence: Synthetic oligonucleotide
  Antisense strand to SEQ ID NO: 1081288
gaagucaaagucaauuuca

SEQ ID NO: 1081290 - RNA, 19 nt, Artificial Sequence
  Description of Artificial Sequence: Synthetic oligonucleotide
  Sense strand starting at position 775 of SEQ ID NO: 915458
gaggccugguucuguuaga

SEQ ID NO: 1081291 - RNA, 19 nt, Artificial Sequence
  Description of Artificial Sequence: Synthetic oligonucleotide
  Antisense strand to SEQ ID NO: 1081290
ucuaacagaaccaggccuc

SEQ ID NO: 1081292 - RNA, 19 nt, Artificial Sequence
  Description of Artificial Sequence: Synthetic oligonucleotide
  Sense strand starting at position 853 of SEQ ID NO: 915458
ccgcaucagccucaugagu

SEQ ID NO: 1081293 - RNA, 19 nt, Artificial Sequence
  Description of Artificial Sequence: Synthetic oligonucleotide
  Antisense strand to SEQ ID NO: 1081292
acucaugaggcugaugcgg

SEQ ID NO: 1081294 - RNA, 19 nt, Artificial Sequence
  Description of Artificial Sequence: Synthetic oligonucleotide
  Sense strand starting at position 1066 of SEQ ID NO: 915458
gcagcucacugguauuaaa

SEQ ID NO: 1081295 - RNA, 19 nt, Artificial Sequence
  Description of Artificial Sequence: Synthetic oligonucleotide
  Antisense strand to SEQ ID NO: 1081294
uuuaauaccagugagcugc

SEQ ID NO: 1081296 - RNA, 19 nt, Artificial Sequence
  Description of Artificial Sequence: Synthetic oligonucleotide
  Sense strand starting at position 1069 of SEQ ID NO: 915458
gcucacugguauuaaacuu

SEQ ID NO: 1081297 - RNA, 19 nt, Artificial Sequence
  Description of Artificial Sequence: Synthetic oligonucleotide
  Antisense strand to SEQ ID NO: 1081296
aaguuuaauaccagugagc

SEQ ID NO: 1081298 - RNA, 19 nt, Artificial Sequence
  Description of Artificial Sequence: Synthetic oligonucleotide
  Sense strand starting at position 1090 of SEQ ID NO: 915458
aaagcuuguuaaucacgau

SEQ ID NO: 1081299 - RNA, 19 nt, Artificial Sequence
  Description of Artificial Sequence: Synthetic oligonucleotide
  Antisense strand to SEQ ID NO: 1081298
aucgugauuaacaagcuuu

SEQ ID NO: 1081300 - RNA, 19 nt, Artificial Sequence
  Description of Artificial Sequence: Synthetic oligonucleotide
  Sense strand starting at position 1432 of SEQ ID NO: 915458
cggcuuacuucucuaucca

SEQ ID NO: 1081301 - RNA, 19 nt, Artificial Sequence
  Description of Artificial Sequence: Synthetic oligonucleotide
  Antisense strand to SEQ ID NO: 1081300
uggauagagaaguaagccg

SEQ ID NO: 1081302 - RNA, 19 nt, Artificial Sequence
  Description of Artificial Sequence: Synthetic oligonucleotide
  Sense strand starting at position 1448 of SEQ ID NO: 915458
ccaagaaaucgccaacuag

SEQ ID NO: 1081303 - RNA, 19 nt, Artificial Sequence
  Description of Artificial Sequence: Synthetic oligonucleotide
  Antisense strand to SEQ ID NO: 1081302
cuaguuggcgauuucuugg

SEQ ID NO: 1081304 - RNA, 19 nt, Artificial Sequence
  Description of Artificial Sequence: Synthetic oligonucleotide
  Sense strand starting at position 1514 of SEQ ID NO: 915458
gcagaagaaucgccuguau

SEQ ID NO: 1081305 - RNA, 19 nt, Artificial Sequence
  Description of Artificial Sequence: Synthetic oligonucleotide
  Antisense strand to SEQ ID NO: 1081304
auacaggcgauucuucugc

SEQ ID NO: 1081306 - RNA, 19 nt, Artificial Sequence
  Description of Artificial Sequence: Synthetic oligonucleotide
  Sense strand starting at position 1516 of SEQ ID NO: 915458
agaagaaucgccuguaugg

SEQ ID NO: 1081307 - RNA, 19 nt, Artificial Sequence
  Description of Artificial Sequence: Synthetic oligonucleotide
  Antisense strand to SEQ ID NO: 1081306
ccauacaggcgauucuucu

SEQ ID NO: 1081308 - RNA, 19 nt, Artificial Sequence
  Description of Artificial Sequence: Synthetic oligonucleotide
  Sense strand starting at position 1518 of SEQ ID NO: 915458
aagaaucgccuguauggga

SEQ ID NO: 1081309 - RNA, 19 nt, Artificial Sequence
  Description of Artificial Sequence: Synthetic oligonucleotide
  Antisense strand to SEQ ID NO: 1081308
ucccauacaggcgauucuu

SEQ ID NO: 1081310 - RNA, 19 nt, Artificial Sequence
  Description of Artificial Sequence: Synthetic oligonucleotide
  Sense strand starting at position 2163 of SEQ ID NO: 915458
gcagcaguuccggaaguga

SEQ ID NO: 1081311 - RNA, 19 nt, Artificial Sequence
  Description of Artificial Sequence: Synthetic oligonucleotide
  Antisense strand to SEQ ID NO: 1081310
ucacuuccggaacugcugc

SEQ ID NO: 1081312 - RNA, 19 nt, Artificial Sequence
  Description of Artificial Sequence: Synthetic oligonucleotide
  Sense strand starting at position 2174 of SEQ ID NO: 915458
ggaagugacugcucuuaua

SEQ ID NO: 1081313 - RNA, 19 nt, Artificial Sequence
  Description of Artificial Sequence: Synthetic oligonucleotide
  Antisense strand to SEQ ID NO: 1081312
uauaagagcagucacuucc

SEQ ID NO: 1081314 - RNA, 19 nt, Artificial Sequence
  Description of Artificial Sequence: Synthetic oligonucleotide
  Sense strand starting at position 2459 of SEQ ID NO: 915458
ccuugacuccuuggugguu

SEQ ID NO: 1081315 - RNA, 19 nt, Artificial Sequence
  Description of Artificial Sequence: Synthetic oligonucleotide
  Antisense strand to SEQ ID NO: 1081314
aaccaccaaggagucaagg

SEQ ID NO: 1081316 - RNA, 19 nt, Artificial Sequence
  Description of Artificial Sequence: Synthetic oligonucleotide
  Sense strand starting at position 2822 of SEQ ID NO: 915458
uugaguucuugugcgagga

SEQ ID NO: 1081317 - RNA, 19 nt, Artificial Sequence
  Description of Artificial Sequence: Synthetic oligonucleotide
  Antisense strand to SEQ ID NO: 1081316
uccucgcacaagaacucaa

SEQ ID NO: 1081318 - RNA, 19 nt, Artificial Sequence
  Description of Artificial Sequence: Synthetic oligonucleotide
  Sense strand starting at position 2823 of SEQ ID NO: 915458
ugaguucuugugcgaggac

SEQ ID NO: 1081319 - RNA, 19 nt, Artificial Sequence
  Description of Artificial Sequence: Synthetic oligonucleotide
  Antisense strand to SEQ ID NO: 1081318
guccucgcacaagaacuca

SEQ ID NO: 1081320 - RNA, 19 nt, Artificial Sequence
  Description of Artificial Sequence: Synthetic oligonucleotide
  Sense strand starting at position 2908 of SEQ ID NO: 915458
cugagaaagcuugagcuga

SEQ ID NO: 1081321 - RNA, 19 nt, Artificial Sequence
  Description of Artificial Sequence: Synthetic oligonucleotide
  Antisense strand to SEQ ID NO: 1081320
ucagcucaagcuuucucag

SEQ ID NO: 1081322 - RNA, 19 nt, Artificial Sequence
  Description of Artificial Sequence: Synthetic oligonucleotide
  Sense strand starting at position 2910 of SEQ ID NO: 915458
gagaaagcuugagcugaga

SEQ ID NO: 1081323 - RNA, 19 nt, Artificial Sequence
  Description of Artificial Sequence: Synthetic oligonucleotide
  Antisense strand to SEQ ID NO: 1081322
ucucagcucaagcuuucuc

SEQ ID NO: 1081324 - RNA, 19 nt, Artificial Sequence
  Description of Artificial Sequence: Synthetic oligonucleotide
  Sense strand starting at position 2912 of SEQ ID NO: 915458
gaaagcuugagcugagaga

SEQ ID NO: 1081325 - RNA, 19 nt, Artificial Sequence
  Description of Artificial Sequence: Synthetic oligonucleotide
  Antisense strand to SEQ ID NO: 1081324
ucucucagcucaagcuuuc

SEQ ID NO: 1081326 - RNA, 19 nt, Artificial Sequence
  Description of Artificial Sequence: Synthetic oligonucleotide
  Sense strand starting at position 2936 of SEQ ID NO: 915458
aggagccaucccugccaau

SEQ ID NO: 1081327 - RNA, 19 nt, Artificial Sequence
  Description of Artificial Sequence: Synthetic oligonucleotide
  Antisense strand to SEQ ID NO: 1081326
auuggcagggauggcuccu

SEQ ID NO: 1081328 - RNA, 19 nt, Artificial Sequence
  Description of Artificial Sequence: Synthetic oligonucleotide
  Sense strand starting at position 2980 of SEQ ID NO: 915458
gucagaugcagguaucuac

SEQ ID NO: 1081329 - RNA, 19 nt, Artificial Sequence
  Description of Artificial Sequence: Synthetic oligonucleotide
  Antisense strand to SEQ ID NO: 1081328
guagauaccugcaucugac

SEQ ID NO: 1081330 - RNA, 19 nt, Artificial Sequence
  Description of Artificial Sequence: Synthetic oligonucleotide
  Sense strand starting at position 3098 of SEQ ID NO: 915458
uucuguggccucguuauca

SEQ ID NO: 1081331 - RNA, 19 nt, Artificial Sequence
  Description of Artificial Sequence: Synthetic oligonucleotide
  Antisense strand to SEQ ID NO: 1081330
ugauaacgaggccacagaa

SEQ ID NO: 1081332 - RNA, 19 nt, Artificial Sequence
  Description of Artificial Sequence: Synthetic oligonucleotide
  Sense strand starting at position 3194 of SEQ ID NO: 915458
gggaaaccaucuugggaac

SEQ ID NO: 1081333 - RNA, 19 nt, Artificial Sequence
  Description of Artificial Sequence: Synthetic oligonucleotide
  Antisense strand to SEQ ID NO: 1081332
guucccaagaugguuuccc

SEQ ID NO: 1081334 - RNA, 19 nt, Artificial Sequence
  Description of Artificial Sequence: Synthetic oligonucleotide
  Sense strand starting at position 3397 of SEQ ID NO: 915458
uagagacagcguuguccaa

SEQ ID NO: 1081335 - RNA, 19 nt, Artificial Sequence
  Description of Artificial Sequence: Synthetic oligonucleotide
  Antisense strand to SEQ ID NO: 1081334
uuggacaacgcugucucua

SEQ ID NO: 1081336 - RNA, 19 nt, Artificial Sequence
  Description of Artificial Sequence: Synthetic oligonucleotide
  Sense strand starting at position 3399 of SEQ ID NO: 915458
gagacagcguuguccaaca

SEQ ID NO: 1081337 - RNA, 19 nt, Artificial Sequence
  Description of Artificial Sequence: Synthetic oligonucleotide
  Antisense strand to SEQ ID NO: 1081336
uguuggacaacgcugucuc

SEQ ID NO: 1081338 - RNA, 19 nt, Artificial Sequence
  Description of Artificial Sequence: Synthetic oligonucleotide
  Sense strand starting at position 3826 of SEQ ID NO: 915458
cucuguaccuauuaaaguc

SEQ ID NO: 1081339 - RNA, 19 nt, Artificial Sequence
  Description of Artificial Sequence: Synthetic oligonucleotide
  Antisense strand to SEQ ID NO: 1081338
gacuuuaauagguacagag

SEQ ID NO: 1081340 - RNA, 19 nt, Artificial Sequence
  Description of Artificial Sequence: Synthetic oligonucleotide
  Sense strand starting at position 33 of SEQ ID NO: 915459
auaguuuccuaucuguaag

SEQ ID NO: 1081341 - RNA, 19 nt, Artificial Sequence
  Description of Artificial Sequence: Synthetic oligonucleotide
  Antisense strand to SEQ ID NO: 1081340
cuuacagauaggaaacuau

SEQ ID NO: 1081342 - RNA, 19 nt, Artificial Sequence
  Description of Artificial Sequence: Synthetic oligonucleotide
  Sense strand starting at position 147 of SEQ ID NO: 915459
aaccuuucugguggaaacu

SEQ ID NO: 1081343 - RNA, 19 nt, Artificial Sequence
  Description of Artificial Sequence: Synthetic oligonucleotide
  Antisense strand to SEQ ID NO: 1081342
aguuuccaccagaaagguu

SEQ ID NO: 1081344 - RNA, 19 nt, Artificial Sequence
  Description of Artificial Sequence: Synthetic oligonucleotide
  Sense strand starting at position 181 of SEQ ID NO: 915459
ccaucaucacagugagcuu

SEQ ID NO: 1081345 - RNA, 19 nt, Artificial Sequence
  Description of Artificial Sequence: Synthetic oligonucleotide
  Antisense strand to SEQ ID NO: 1081344
aagcucacugugaugaugg

SEQ ID NO: 1081346 - RNA, 19 nt, Artificial Sequence
  Description of Artificial Sequence: Synthetic oligonucleotide
  Sense strand starting at position 253 of SEQ ID NO: 915459
ugagaacucuggucagaua

SEQ ID NO: 1081347 - RNA, 19 nt, Artificial Sequence
  Description of Artificial Sequence: Synthetic oligonucleotide
  Antisense strand to SEQ ID NO: 1081346
uaucugaccagaguucuca

SEQ ID NO: 1081348 - RNA, 19 nt, Artificial Sequence
  Description of Artificial Sequence: Synthetic oligonucleotide
  Sense strand starting at position 261 of SEQ ID NO: 915459
cuggucagauauucuucua

SEQ ID NO: 1081349 - RNA, 19 nt, Artificial Sequence
  Description of Artificial Sequence: Synthetic oligonucleotide
  Antisense strand to SEQ ID NO: 1081348
uagaagaauaucugaccag

SEQ ID NO: 1081350 - RNA, 19 nt, Artificial Sequence
  Description of Artificial Sequence: Synthetic oligonucleotide
  Sense strand starting at position 309 of SEQ ID NO: 915459
ucuaaugagcucugacuac

SEQ ID NO: 1081351 - RNA, 19 nt, Artificial Sequence
  Description of Artificial Sequence: Synthetic oligonucleotide
  Antisense strand to SEQ ID NO: 1081350
guagucagagcucauuaga

SEQ ID NO: 1081352 - RNA, 19 nt, Artificial Sequence
  Description of Artificial Sequence: Synthetic oligonucleotide
  Sense strand starting at position 357 of SEQ ID NO: 915459
gugucauaccuccaauuag

SEQ ID NO: 1081353 - RNA, 19 nt, Artificial Sequence
  Description of Artificial Sequence: Synthetic oligonucleotide
  Antisense strand to SEQ ID NO: 1081352
cuaauuggagguaugacac

SEQ ID NO: 1081354 - RNA, 19 nt, Artificial Sequence
  Description of Artificial Sequence: Synthetic oligonucleotide
  Sense strand starting at position 700 of SEQ ID NO: 915459
aagugagaaucggucucaa

SEQ ID NO: 1081355 - RNA, 19 nt, Artificial Sequence
  Description of Artificial Sequence: Synthetic oligonucleotide
  Antisense strand to SEQ ID NO: 1081354
uugagaccgauucucacuu

SEQ ID NO: 1081356 - RNA, 19 nt, Artificial Sequence
  Description of Artificial Sequence: Synthetic oligonucleotide
  Sense strand starting at position 1219 of SEQ ID NO: 915459
cuugacagcugugugauuu

SEQ ID NO: 1081357 - RNA, 19 nt, Artificial Sequence
  Description of Artificial Sequence: Synthetic oligonucleotide
  Antisense strand to SEQ ID NO: 1081356
aaaucacacagcugucaag

SEQ ID NO: 1081358 - RNA, 19 nt, Artificial Sequence
  Description of Artificial Sequence: Synthetic oligonucleotide
  Sense strand starting at position 1292 of SEQ ID NO: 915459
gggugaaagccaugaagau

SEQ ID NO: 1081359 - RNA, 19 nt, Artificial Sequence
  Description of Artificial Sequence: Synthetic oligonucleotide
  Antisense strand to SEQ ID NO: 1081358
aucuucauggcuuucaccc

SEQ ID NO: 1081360 - RNA, 19 nt, Artificial Sequence
  Description of Artificial Sequence: Synthetic oligonucleotide
  Sense strand starting at position 1318 of SEQ ID NO: 915459
aaaguauuguggucagaau

SEQ ID NO: 1081361 - RNA, 19 nt, Artificial Sequence
  Description of Artificial Sequence: Synthetic oligonucleotide
  Antisense strand to SEQ ID NO: 1081360
auucugaccacaauacuuu

SEQ ID NO: 1081362 - RNA, 19 nt, Artificial Sequence
  Description of Artificial Sequence: Synthetic oligonucleotide
  Sense strand starting at position 1319 of SEQ ID NO: 915459
aaguauuguggucagaauu

SEQ ID NO: 1081363 - RNA, 19 nt, Artificial Sequence
  Description of Artificial Sequence: Synthetic oligonucleotide
  Antisense strand to SEQ ID NO: 1081362
aauucugaccacaauacuu

SEQ ID NO: 1081364 - RNA, 19 nt, Artificial Sequence
  Description of Artificial Sequence: Synthetic oligonucleotide
  Sense strand starting at position 1325 of SEQ ID NO: 915459
uguggucagaauuaaacga

SEQ ID NO: 1081365 - RNA, 19 nt, Artificial Sequence
  Description of Artificial Sequence: Synthetic oligonucleotide
  Antisense strand to SEQ ID NO: 1081364
ucguuuaauucugaccaca

SEQ ID NO: 1081366 - RNA, 19 nt, Artificial Sequence
  Description of Artificial Sequence: Synthetic oligonucleotide
  Sense strand starting at position 1338 of SEQ ID NO: 915459
aaacgaaaucaguacaugu

SEQ ID NO: 1081367 - RNA, 19 nt, Artificial Sequence
  Description of Artificial Sequence: Synthetic oligonucleotide
  Antisense strand to SEQ ID NO: 1081366
acauguacugauuucguuu

SEQ ID NO: 1081368 - RNA, 19 nt, Artificial Sequence
  Description of Artificial Sequence: Synthetic oligonucleotide
  Sense strand starting at position 1340 of SEQ ID NO: 915459
acgaaaucaguacauguga

SEQ ID NO: 1081369 - RNA, 19 nt, Artificial Sequence
  Description of Artificial Sequence: Synthetic oligonucleotide
  Antisense strand to SEQ ID NO: 1081368
ucacauguacugauuucgu

SEQ ID NO: 1081370 - RNA, 19 nt, Artificial Sequence
  Description of Artificial Sequence: Synthetic oligonucleotide
  Sense strand starting at position 1353 of SEQ ID NO: 915459
augugaagugcuuacaaug

SEQ ID NO: 1081371 - RNA, 19 nt, Artificial Sequence
  Description of Artificial Sequence: Synthetic oligonucleotide
  Antisense strand to SEQ ID NO: 1081370
cauuguaagcacuucacau

SEQ ID NO: 1081372 - RNA, 19 nt, Artificial Sequence
  Description of Artificial Sequence: Synthetic oligonucleotide
  Sense strand starting at position 1461 of SEQ ID NO: 915459
ggcgaaauaggcuauguua

SEQ ID NO: 1081373 - RNA, 19 nt, Artificial Sequence
  Description of Artificial Sequence: Synthetic oligonucleotide
  Antisense strand to SEQ ID NO: 1081372
uaacauagccuauuucgcc

SEQ ID NO: 1081374 - RNA, 19 nt, Artificial Sequence
  Description of Artificial Sequence: Synthetic oligonucleotide
  Sense strand starting at position 1463 of SEQ ID NO: 915459
cgaaauaggcuauguuaga

SEQ ID NO: 1081375 - RNA, 19 nt, Artificial Sequence
  Description of Artificial Sequence: Synthetic oligonucleotide
  Antisense strand to SEQ ID NO: 1081374
ucuaacauagccuauuucg

SEQ ID NO: 1081376 - RNA, 19 nt, Artificial Sequence
  Description of Artificial Sequence: Synthetic oligonucleotide
  Sense strand starting at position 1464 of SEQ ID NO: 915459
gaaauaggcuauguuagac

SEQ ID NO: 1081377 - RNA, 19 nt, Artificial Sequence
  Description of Artificial Sequence: Synthetic oligonucleotide
  Antisense strand to SEQ ID NO: 1081376
gucuaacauagccuauuuc

SEQ ID NO: 1081378 - RNA, 19 nt, Artificial Sequence
  Description of Artificial Sequence: Synthetic oligonucleotide
  Sense strand starting at position 1490 of SEQ ID NO: 915459
cucaccgaucugugaagga

SEQ ID NO: 1081379 - RNA, 19 nt, Artificial Sequence
  Description of Artificial Sequence: Synthetic oligonucleotide
  Antisense strand to SEQ ID NO: 1081378
uccuucacagaucggugag

SEQ ID NO: 1081380 - RNA, 19 nt, Artificial Sequence
  Description of Artificial Sequence: Synthetic oligonucleotide
  Sense strand starting at position 1689 of SEQ ID NO: 915459
gucgcuucacccgagacaa

SEQ ID NO: 1081381 - RNA, 19 nt, Artificial Sequence
  Description of Artificial Sequence: Synthetic oligonucleotide
  Antisense strand to SEQ ID NO: 1081380
uugucucgggugaagcgac

SEQ ID NO: 1081382 - RNA, 19 nt, Artificial Sequence
  Description of Artificial Sequence: Synthetic oligonucleotide
  Sense strand starting at position 2112 of SEQ ID NO: 915459
gugacuacaucucccgaaa

SEQ ID NO: 1081383 - RNA, 19 nt, Artificial Sequence
  Description of Artificial Sequence: Synthetic oligonucleotide
  Antisense strand to SEQ ID NO: 1081382
uuucgggagauguagucac

SEQ ID NO: 1081384 - RNA, 19 nt, Artificial Sequence
  Description of Artificial Sequence: Synthetic oligonucleotide
  Sense strand starting at position 2145 of SEQ ID NO: 915459
gcaagagaucgucaaucca

SEQ ID NO: 1081385 - RNA, 19 nt, Artificial Sequence
  Description of Artificial Sequence: Synthetic oligonucleotide
  Antisense strand to SEQ ID NO: 1081384
uggauugacgaucucuugc

SEQ ID NO: 1081386 - RNA, 19 nt, Artificial Sequence
  Description of Artificial Sequence: Synthetic oligonucleotide
  Sense strand starting at position 2417 of SEQ ID NO: 915459
gauacaauagcaugugaug

SEQ ID NO: 1081387 - RNA, 19 nt, Artificial Sequence
  Description of Artificial Sequence: Synthetic oligonucleotide
  Antisense strand to SEQ ID NO: 1081386
caucacaugcuauuguauc

SEQ ID NO: 1081388 - RNA, 19 nt, Artificial Sequence
  Description of Artificial Sequence: Synthetic oligonucleotide
  Sense strand starting at position 2535 of SEQ ID NO: 915459
cggugaagaaccggucuaa

SEQ ID NO: 1081389 - RNA, 19 nt, Artificial Sequence
  Description of Artificial Sequence: Synthetic oligonucleotide
  Antisense strand to SEQ ID NO: 1081388
uuagaccgguucuucaccg

SEQ ID NO: 1081390 - RNA, 19 nt, Artificial Sequence
  Description of Artificial Sequence: Synthetic oligonucleotide
  Sense strand starting at position 2547 of SEQ ID NO: 915459
ggucuaaggaguugaacca

SEQ ID NO: 1081391 - RNA, 19 nt, Artificial Sequence
  Description of Artificial Sequence: Synthetic oligonucleotide
  Antisense strand to SEQ ID NO: 1081390
ugguucaacuccuuagacc

SEQ ID NO: 1081392 - RNA, 19 nt, Artificial Sequence
  Description of Artificial Sequence: Synthetic oligonucleotide
  Sense strand starting at position 2665 of SEQ ID NO: 915459
ggagcuauguucccaagug

SEQ ID NO: 1081393 - RNA, 19 nt, Artificial Sequence
  Description of Artificial Sequence: Synthetic oligonucleotide
  Antisense strand to SEQ ID NO: 1081392
cacuugggaacauagcucc

SEQ ID NO: 1081394 - RNA, 19 nt, Artificial Sequence
  Description of Artificial Sequence: Synthetic oligonucleotide
  Sense strand starting at position 3361 of SEQ ID NO: 915459
acacaacaaugcguugaaa

SEQ ID NO: 1081395 - RNA, 19 nt, Artificial Sequence
  Description of Artificial Sequence: Synthetic oligonucleotide
  Antisense strand to SEQ ID NO: 1081394
uuucaacgcauuguugugu

SEQ ID NO: 1081396 - RNA, 19 nt, Artificial Sequence
  Description of Artificial Sequence: Synthetic oligonucleotide
  Sense strand starting at position 3363 of SEQ ID NO: 915459
acaacaaugcguugaaaga

SEQ ID NO: 1081397 - RNA, 19 nt, Artificial Sequence
  Description of Artificial Sequence: Synthetic oligonucleotide
  Antisense strand to SEQ ID NO: 1081396
ucuuucaacgcauuguugu

SEQ ID NO: 1081398 - RNA, 19 nt, Artificial Sequence
  Description of Artificial Sequence: Synthetic oligonucleotide
  Sense strand starting at position 3364 of SEQ ID NO: 915459
caacaaugcguugaaagaa

SEQ ID NO: 1081399 - RNA, 19 nt, Artificial Sequence
  Description of Artificial Sequence: Synthetic oligonucleotide
  Antisense strand to SEQ ID NO: 1081398
uucuuucaacgcauuguug

SEQ ID NO: 1081400 - RNA, 19 nt, Artificial Sequence
  Description of Artificial Sequence: Synthetic oligonucleotide
  Sense strand starting at position 3372 of SEQ ID NO: 915459
cguugaaagaaugggcaaa

SEQ ID NO: 1081401 - RNA, 19 nt, Artificial Sequence
  Description of Artificial Sequence: Synthetic oligonucleotide
  Antisense strand to SEQ ID NO: 1081400
uuugcccauucuuucaacg

SEQ ID NO: 1081402 - RNA, 19 nt, Artificial Sequence
  Description of Artificial Sequence: Synthetic oligonucleotide
  Sense strand starting at position 3373 of SEQ ID NO: 915459
guugaaagaaugggcaaau

SEQ ID NO: 1081403 - RNA, 19 nt, Artificial Sequence
  Description of Artificial Sequence: Synthetic oligonucleotide
  Antisense strand to SEQ ID NO: 1081402
auuugcccauucuuucaac

SEQ ID NO: 1081404 - RNA, 19 nt, Artificial Sequence
  Description of Artificial Sequence: Synthetic oligonucleotide
  Sense strand starting at position 3419 of SEQ ID NO: 915459
uaagcauagcucuaggaag

SEQ ID NO: 1081405 - RNA, 19 nt, Artificial Sequence
  Description of Artificial Sequence: Synthetic oligonucleotide
  Antisense strand to SEQ ID NO: 1081404
cuuccuagagcuaugcuua

SEQ ID NO: 1081406 - RNA, 19 nt, Artificial Sequence
  Description of Artificial Sequence: Synthetic oligonucleotide
  Sense strand starting at position 3421 of SEQ ID NO: 915459
agcauagcucuaggaagga

SEQ ID NO: 1081407 - RNA, 19 nt, Artificial Sequence
  Description of Artificial Sequence: Synthetic oligonucleotide
  Antisense strand to SEQ ID NO: 1081406
uccuuccuagagcuaugcu

SEQ ID NO: 1081408 - RNA, 19 nt, Artificial Sequence
  Description of Artificial Sequence: Synthetic oligonucleotide
  Sense strand starting at position 3438 of SEQ ID NO: 915459
gagggaggucagugaaauc

SEQ ID NO: 1081409 - RNA, 19 nt, Artificial Sequence
  Description of Artificial Sequence: Synthetic oligonucleotide
  Antisense strand to SEQ ID NO: 1081408
gauuucacugaccucccuc

SEQ ID NO: 1081410 - RNA, 19 nt, Artificial Sequence
  Description of Artificial Sequence: Synthetic oligonucleotide
  Sense strand starting at position 3464 of SEQ ID NO: 915459
ugucgacaagcuuaaagua

SEQ ID NO: 1081411 - RNA, 19 nt, Artificial Sequence
  Description of Artificial Sequence: Synthetic oligonucleotide
  Antisense strand to SEQ ID NO: 1081410
uacuuuaagcuugucgaca

SEQ ID NO: 1081412 - RNA, 19 nt, Artificial Sequence
  Description of Artificial Sequence: Synthetic oligonucleotide
  Sense strand starting at position 3509 of SEQ ID NO: 915459
acugaaacauccgcucuua

SEQ ID NO: 1081413 - RNA, 19 nt, Artificial Sequence
  Description of Artificial Sequence: Synthetic oligonucleotide
  Antisense strand to SEQ ID NO: 1081412
uaagagcggauguuucagu

SEQ ID NO: 1081414 - RNA, 19 nt, Artificial Sequence
  Description of Artificial Sequence: Synthetic oligonucleotide
  Sense strand starting at position 3553 of SEQ ID NO: 915459
uaaaguuaucagggauagc

SEQ ID NO: 1081415 - RNA, 19 nt, Artificial Sequence
  Description of Artificial Sequence: Synthetic oligonucleotide
  Antisense strand to SEQ ID NO: 1081414
gcuaucccugauaacuuua

SEQ ID NO: 1081416 - RNA, 19 nt, Artificial Sequence
  Description of Artificial Sequence: Synthetic oligonucleotide
  Sense strand starting at position 3897 of SEQ ID NO: 915459
acgggucaguucuccaaga

SEQ ID NO: 1081417 - RNA, 19 nt, Artificial Sequence
  Description of Artificial Sequence: Synthetic oligonucleotide
  Antisense strand to SEQ ID NO: 1081416
ucuuggagaacugacccgu

SEQ ID NO: 1081418 - RNA, 19 nt, Artificial Sequence
  Description of Artificial Sequence: Synthetic oligonucleotide
  Sense strand starting at position 3898 of SEQ ID NO: 915459
cgggucaguucuccaagaa

SEQ ID NO: 1081419 - RNA, 19 nt, Artificial Sequence
  Description of Artificial Sequence: Synthetic oligonucleotide
  Antisense strand to SEQ ID NO: 1081418
uucuuggagaacugacccg

SEQ ID NO: 1081420 - RNA, 19 nt, Artificial Sequence
  Description of Artificial Sequence: Synthetic oligonucleotide
  Sense strand starting at position 73 of SEQ ID NO: 915460
aagacagaguucucucaga

SEQ ID NO: 1081421 - RNA, 19 nt, Artificial Sequence
  Description of Artificial Sequence: Synthetic oligonucleotide
  Antisense strand to SEQ ID NO: 1081420
ucugagagaacucugucuu

SEQ ID NO: 1081422 - RNA, 19 nt, Artificial Sequence
  Description of Artificial Sequence: Synthetic oligonucleotide
  Sense strand starting at position 186 of SEQ ID NO: 915460
gcuccagaauugcuuaauc

SEQ ID NO: 1081423 - RNA, 19 nt, Artificial Sequence
  Description of Artificial Sequence: Synthetic oligonucleotide
  Antisense strand to SEQ ID NO: 1081422
gauuaagcaauucuggagc

SEQ ID NO: 1081424 - RNA, 19 nt, Artificial Sequence
  Description of Artificial Sequence: Synthetic oligonucleotide
  Sense strand starting at position 188 of SEQ ID NO: 915460
uccagaauugcuuaaucug

SEQ ID NO: 1081425 - RNA, 19 nt, Artificial Sequence
  Description of Artificial Sequence: Synthetic oligonucleotide
  Antisense strand to SEQ ID NO: 1081424
cagauuaagcaauucugga

SEQ ID NO: 1081426 - RNA, 19 nt, Artificial Sequence
  Description of Artificial Sequence: Synthetic oligonucleotide
  Sense strand starting at position 197 of SEQ ID NO: 915460
gcuuaaucugacguucggu

SEQ ID NO: 1081427 - RNA, 19 nt, Artificial Sequence
  Description of Artificial Sequence: Synthetic oligonucleotide
  Antisense strand to SEQ ID NO: 1081426
accgaacgucagauuaagc

SEQ ID NO: 1081428 - RNA, 19 nt, Artificial Sequence
  Description of Artificial Sequence: Synthetic oligonucleotide
  Sense strand starting at position 540 of SEQ ID NO: 915460
gcuagaauuauagacguuc

SEQ ID NO: 1081429 - RNA, 19 nt, Artificial Sequence
  Description of Artificial Sequence: Synthetic oligonucleotide
  Antisense strand to SEQ ID NO: 1081428
gaacgucuauaauucuagc

SEQ ID NO: 1081430 - RNA, 19 nt, Artificial Sequence
  Description of Artificial Sequence: Synthetic oligonucleotide
  Sense strand starting at position 566 of SEQ ID NO: 915460
auaguuagcugagccuuau

SEQ ID NO: 1081431 - RNA, 19 nt, Artificial Sequence
  Description of Artificial Sequence: Synthetic oligonucleotide
  Antisense strand to SEQ ID NO: 1081430
auaaggcucagcuaacuau

SEQ ID NO: 1081432 - RNA, 19 nt, Artificial Sequence
  Description of Artificial Sequence: Synthetic oligonucleotide
  Sense strand starting at position 570 of SEQ ID NO: 915460
uuagcugagccuuauuauu

SEQ ID NO: 1081433 - RNA, 19 nt, Artificial Sequence
  Description of Artificial Sequence: Synthetic oligonucleotide
  Antisense strand to SEQ ID NO: 1081432
aauaauaaggcucagcuaa

SEQ ID NO: 1081434 - RNA, 19 nt, Artificial Sequence
  Description of Artificial Sequence: Synthetic oligonucleotide
  Sense strand starting at position 592 of SEQ ID NO: 915460
gaauuaugguaaucagacc

SEQ ID NO: 1081435 - RNA, 19 nt, Artificial Sequence
  Description of Artificial Sequence: Synthetic oligonucleotide
  Antisense strand to SEQ ID NO: 1081434
ggucugauuaccauaauuc

SEQ ID NO: 1081436 - RNA, 19 nt, Artificial Sequence
  Description of Artificial Sequence: Synthetic oligonucleotide
  Sense strand starting at position 617 of SEQ ID NO: 915460
cugaguagaccguacuaaa

SEQ ID NO: 1081437 - RNA, 19 nt, Artificial Sequence
  Description of Artificial Sequence: Synthetic oligonucleotide
  Antisense strand to SEQ ID NO: 1081436
uuuaguacggucuacucag

SEQ ID NO: 1081438 - RNA, 19 nt, Artificial Sequence
  Description of Artificial Sequence: Synthetic oligonucleotide
  Sense strand starting at position 620 of SEQ ID NO: 915460
aguagaccguacuaaauuu

SEQ ID NO: 1081439 - RNA, 19 nt, Artificial Sequence
  Description of Artificial Sequence: Synthetic oligonucleotide
  Antisense strand to SEQ ID NO: 1081438
aaauuuaguacggucuacu

SEQ ID NO: 1081440 - RNA, 19 nt, Artificial Sequence
  Description of Artificial Sequence: Synthetic oligonucleotide
  Sense strand starting at position 627 of SEQ ID NO: 915460
cguacuaaauuucugguuu

SEQ ID NO: 1081441 - RNA, 19 nt, Artificial Sequence
  Description of Artificial Sequence: Synthetic oligonucleotide
  Antisense strand to SEQ ID NO: 1081440
aaaccagaaauuuaguacg

SEQ ID NO: 1081442 - RNA, 19 nt, Artificial Sequence
  Description of Artificial Sequence: Synthetic oligonucleotide
  Sense strand starting at position 829 of SEQ ID NO: 915460
ggcuaagaacccugagaau

SEQ ID NO: 1081443 - RNA, 19 nt, Artificial Sequence
  Description of Artificial Sequence: Synthetic oligonucleotide
  Antisense strand to SEQ ID NO: 1081442
auucucaggguucuuagcc

SEQ ID NO: 1081444 - RNA, 19 nt, Artificial Sequence
  Description of Artificial Sequence: Synthetic oligonucleotide
  Sense strand starting at position 862 of SEQ ID NO: 915460
ggaguaagacgucagaauu

SEQ ID NO: 1081445 - RNA, 19 nt, Artificial Sequence
  Description of Artificial Sequence: Synthetic oligonucleotide
  Antisense strand to SEQ ID NO: 1081444
aauucugacgucuuacucc

SEQ ID NO: 1081446 - RNA, 19 nt, Artificial Sequence
  Description of Artificial Sequence: Synthetic oligonucleotide
  Sense strand starting at position 955 of SEQ ID NO: 915460
gcuuaacauggucaagaca

SEQ ID NO: 1081447 - RNA, 19 nt, Artificial Sequence
  Description of Artificial Sequence: Synthetic oligonucleotide
  Antisense strand to SEQ ID NO: 1081446
ugucuugaccauguuaagc

SEQ ID NO: 1081448 - RNA, 19 nt, Artificial Sequence
  Description of Artificial Sequence: Synthetic oligonucleotide
  Sense strand starting at position 1125 of SEQ ID NO: 915460
aguuuaucauagguagcuu

SEQ ID NO: 1081449 - RNA, 19 nt, Artificial Sequence
  Description of Artificial Sequence: Synthetic oligonucleotide
  Antisense strand to SEQ ID NO: 1081448
aagcuaccuaugauaaacu

SEQ ID NO: 1081450 - RNA, 19 nt, Artificial Sequence
  Description of Artificial Sequence: Synthetic oligonucleotide
  Sense strand starting at position 1249 of SEQ ID NO: 915460
ccuuucccucucgaguaau

SEQ ID NO: 1081451 - RNA, 19 nt, Artificial Sequence
  Description of Artificial Sequence: Synthetic oligonucleotide
  Antisense strand to SEQ ID NO: 1081450
auuacucgagagggaaagg

SEQ ID NO: 1081452 - RNA, 19 nt, Artificial Sequence
  Description of Artificial Sequence: Synthetic oligonucleotide
  Sense strand starting at position 1262 of SEQ ID NO: 915460
aguaaucugcgucagagaa

SEQ ID NO: 1081453 - RNA, 19 nt, Artificial Sequence
  Description of Artificial Sequence: Synthetic oligonucleotide
  Antisense strand to SEQ ID NO: 1081452
uucucugacgcagauuacu

SEQ ID NO: 1081454 - RNA, 19 nt, Artificial Sequence
  Description of Artificial Sequence: Synthetic oligonucleotide
  Sense strand starting at position 1289 of SEQ ID NO: 915460
caccguuaucaaggauaaa

SEQ ID NO: 1081455 - RNA, 19 nt, Artificial Sequence
  Description of Artificial Sequence: Synthetic oligonucleotide
  Antisense strand to SEQ ID NO: 1081454
uuuauccuugauaacggug

SEQ ID NO: 1081456 - RNA, 19 nt, Artificial Sequence
  Description of Artificial Sequence: Synthetic oligonucleotide
  Sense strand starting at position 1419 of SEQ ID NO: 915460
agacacuucgcacaacaga

SEQ ID NO: 1081457 - RNA, 19 nt, Artificial Sequence
  Description of Artificial Sequence: Synthetic oligonucleotide
  Antisense strand to SEQ ID NO: 1081456
ucuguugugcgaagugucu

SEQ ID NO: 1081458 - RNA, 19 nt, Artificial Sequence
  Description of Artificial Sequence: Synthetic oligonucleotide
  Sense strand starting at position 1728 of SEQ ID NO: 915460
gcaaccagguccucaaaua

SEQ ID NO: 1081459 - RNA, 19 nt, Artificial Sequence
  Description of Artificial Sequence: Synthetic oligonucleotide
  Antisense strand to SEQ ID NO: 1081458
uauuugaggaccugguugc

SEQ ID NO: 1081460 - RNA, 19 nt, Artificial Sequence
  Description of Artificial Sequence: Synthetic oligonucleotide
  Sense strand starting at position 1926 of SEQ ID NO: 915460
gaagcuuaccauugcgaag

SEQ ID NO: 1081461 - RNA, 19 nt, Artificial Sequence
  Description of Artificial Sequence: Synthetic oligonucleotide
  Antisense strand to SEQ ID NO: 1081460
cuucgcaaugguaagcuuc

SEQ ID NO: 1081462 - RNA, 19 nt, Artificial Sequence
  Description of Artificial Sequence: Synthetic oligonucleotide
  Sense strand starting at position 1975 of SEQ ID NO: 915460
cgucaagaugucggacaaa

SEQ ID NO: 1081463 - RNA, 19 nt, Artificial Sequence
  Description of Artificial Sequence: Synthetic oligonucleotide
  Antisense strand to SEQ ID NO: 1081462
uuuguccgacaucuugacg

SEQ ID NO: 1081464 - RNA, 19 nt, Artificial Sequence
  Description of Artificial Sequence: Synthetic oligonucleotide
  Sense strand starting at position 2073 of SEQ ID NO: 915460
gaagaagucccacggcgaa

SEQ ID NO: 1081465 - RNA, 19 nt, Artificial Sequence
  Description of Artificial Sequence: Synthetic oligonucleotide
  Antisense strand to SEQ ID NO: 1081464
uucgccgugggacuucuuc

SEQ ID NO: 1081466 - RNA, 19 nt, Artificial Sequence
  Description of Artificial Sequence: Synthetic oligonucleotide
  Sense strand starting at position 2126 of SEQ ID NO: 915460
aguggauucuaguucccaa

SEQ ID NO: 1081467 - RNA, 19 nt, Artificial Sequence
  Description of Artificial Sequence: Synthetic oligonucleotide
  Antisense strand to SEQ ID NO: 1081466
uugggaacuagaauccacu

SEQ ID NO: 1081468 - RNA, 19 nt, Artificial Sequence
  Description of Artificial Sequence: Synthetic oligonucleotide
  Sense strand starting at position 2168 of SEQ ID NO: 915460
gagucugcgcuaguuguga

SEQ ID NO: 1081469 - RNA, 19 nt, Artificial Sequence
  Description of Artificial Sequence: Synthetic oligonucleotide
  Antisense strand to SEQ ID NO: 1081468
ucacaacuagcgcagacuc

SEQ ID NO: 1081470 - RNA, 19 nt, Artificial Sequence
  Description of Artificial Sequence: Synthetic oligonucleotide
  Sense strand starting at position 2176 of SEQ ID NO: 915460
gcuaguugugacgcauacu

SEQ ID NO: 1081471 - RNA, 19 nt, Artificial Sequence
  Description of Artificial Sequence: Synthetic oligonucleotide
  Antisense strand to SEQ ID NO: 1081470
aguaugcgucacaacuagc

SEQ ID NO: 1081472 - RNA, 19 nt, Artificial Sequence
  Description of Artificial Sequence: Synthetic oligonucleotide
  Sense strand starting at position 2177 of SEQ ID NO: 915460
cuaguugugacgcauacua

SEQ ID NO: 1081473 - RNA, 19 nt, Artificial Sequence
  Description of Artificial Sequence: Synthetic oligonucleotide
  Antisense strand to SEQ ID NO: 1081472
uaguaugcgucacaacuag

SEQ ID NO: 1081474 - RNA, 19 nt, Artificial Sequence
  Description of Artificial Sequence: Synthetic oligonucleotide
  Sense strand starting at position 2179 of SEQ ID NO: 915460
aguugugacgcauacuaua

SEQ ID NO: 1081475 - RNA, 19 nt, Artificial Sequence
  Description of Artificial Sequence: Synthetic oligonucleotide
  Antisense strand to SEQ ID NO: 1081474
uauaguaugcgucacaacu

SEQ ID NO: 1081476 - RNA, 19 nt, Artificial Sequence
  Description of Artificial Sequence: Synthetic oligonucleotide
  Sense strand starting at position 2997 of SEQ ID NO: 915460
gcgcuuguaauuugucuac

SEQ ID NO: 1081477 - RNA, 19 nt, Artificial Sequence
  Description of Artificial Sequence: Synthetic oligonucleotide
  Antisense strand to SEQ ID NO: 1081476
guagacaaauuacaagcgc

SEQ ID NO: 1081478 - RNA, 19 nt, Artificial Sequence
  Description of Artificial Sequence: Synthetic oligonucleotide
  Sense strand starting at position 2999 of SEQ ID NO: 915460
gcuuguaauuugucuaccu

SEQ ID NO: 1081479 - RNA, 19 nt, Artificial Sequence
  Description of Artificial Sequence: Synthetic oligonucleotide
  Antisense strand to SEQ ID NO: 1081478
agguagacaaauuacaagc

SEQ ID NO: 1081480 - RNA, 19 nt, Artificial Sequence
  Description of Artificial Sequence: Synthetic oligonucleotide
  Sense strand starting at position 3000 of SEQ ID NO: 915460
cuuguaauuugucuaccuu

SEQ ID NO: 1081481 - RNA, 19 nt, Artificial Sequence
  Description of Artificial Sequence: Synthetic oligonucleotide
  Antisense strand to SEQ ID NO: 1081480
aagguagacaaauuacaag

SEQ ID NO: 1081482 - RNA, 19 nt, Artificial Sequence
  Description of Artificial Sequence: Synthetic oligonucleotide
  Sense strand starting at position 3028 of SEQ ID NO: 915460
cgucguucugguguuauga

SEQ ID NO: 1081483 - RNA, 19 nt, Artificial Sequence
  Description of Artificial Sequence: Synthetic oligonucleotide
  Antisense strand to SEQ ID NO: 1081482
ucauaacaccagaacgacg

SEQ ID NO: 1081484 - RNA, 19 nt, Artificial Sequence
  Description of Artificial Sequence: Synthetic oligonucleotide
  Sense strand starting at position 3396 of SEQ ID NO: 915460
ggugucaucuuacuuaaag

SEQ ID NO: 1081485 - RNA, 19 nt, Artificial Sequence
  Description of Artificial Sequence: Synthetic oligonucleotide
  Antisense strand to SEQ ID NO: 1081484
cuuuaaguaagaugacacc

SEQ ID NO: 1081486 - RNA, 19 nt, Artificial Sequence
  Description of Artificial Sequence: Synthetic oligonucleotide
  Sense strand starting at position 3397 of SEQ ID NO: 915460
gugucaucuuacuuaaagu

SEQ ID NO: 1081487 - RNA, 19 nt, Artificial Sequence
  Description of Artificial Sequence: Synthetic oligonucleotide
  Antisense strand to SEQ ID NO: 1081486
acuuuaaguaagaugacac

SEQ ID NO: 1081488 - RNA, 19 nt, Artificial Sequence
  Description of Artificial Sequence: Synthetic oligonucleotide
  Sense strand starting at position 3552 of SEQ ID NO: 915460
uggcacauauuccuagagu

SEQ ID NO: 1081489 - RNA, 19 nt, Artificial Sequence
  Description of Artificial Sequence: Synthetic oligonucleotide
  Antisense strand to SEQ ID NO: 1081488
acucuaggaauaugugcca

SEQ ID NO: 1081490 - RNA, 19 nt, Artificial Sequence
  Description of Artificial Sequence: Synthetic oligonucleotide
  Sense strand starting at position 3715 of SEQ ID NO: 915460
augugaacuccucagcaaa

SEQ ID NO: 1081491 - RNA, 19 nt, Artificial Sequence
  Description of Artificial Sequence: Synthetic oligonucleotide
  Antisense strand to SEQ ID NO: 1081490
uuugcugaggaguucacau

SEQ ID NO: 1081492 - RNA, 19 nt, Artificial Sequence
  Description of Artificial Sequence: Synthetic oligonucleotide
  Sense strand starting at position 3717 of SEQ ID NO: 915460
gugaacuccucagcaaaua

SEQ ID NO: 1081493 - RNA, 19 nt, Artificial Sequence
  Description of Artificial Sequence: Synthetic oligonucleotide
  Antisense strand to SEQ ID NO: 1081492
uauuugcugaggaguucac

SEQ ID NO: 1081494 - RNA, 19 nt, Artificial Sequence
  Description of Artificial Sequence: Synthetic oligonucleotide
  Sense strand starting at position 3736 of SEQ ID NO: 915460
gggacacuucaguggaagu

SEQ ID NO: 1081495 - RNA, 19 nt, Artificial Sequence
  Description of Artificial Sequence: Synthetic oligonucleotide
  Antisense strand to SEQ ID NO: 1081494
acuuccacugaaguguccc

SEQ ID NO: 1081496 - RNA, 19 nt, Artificial Sequence
  Description of Artificial Sequence: Synthetic oligonucleotide
  Sense strand starting at position 3762 of SEQ ID NO: 915460
gcacuccuuccuuagagca

SEQ ID NO: 1081497 - RNA, 19 nt, Artificial Sequence
  Description of Artificial Sequence: Synthetic oligonucleotide
  Antisense strand to SEQ ID NO: 1081496
ugcucuaaggaaggagugc

SEQ ID NO: 1081498 - RNA, 19 nt, Artificial Sequence
  Description of Artificial Sequence: Synthetic oligonucleotide
  Sense strand starting at position 3954 of SEQ ID NO: 915460
aagagauacugauaaguuu

SEQ ID NO: 1081499 - RNA, 19 nt, Artificial Sequence
  Description of Artificial Sequence: Synthetic oligonucleotide
  Antisense strand to SEQ ID NO: 1081498
aaacuuaucaguaucucuu

SEQ ID NO: 1081500 - RNA, 19 nt, Artificial Sequence
  Description of Artificial Sequence: Synthetic oligonucleotide
  Sense strand starting at position 638 of SEQ ID NO: 915461
auaggugauggccagucaa

SEQ ID NO: 1081501 - RNA, 19 nt, Artificial Sequence
  Description of Artificial Sequence: Synthetic oligonucleotide
  Antisense strand to SEQ ID NO: 1081500
uugacuggccaucaccuau

SEQ ID NO: 1081502 - RNA, 19 nt, Artificial Sequence
  Description of Artificial Sequence: Synthetic oligonucleotide
  Sense strand starting at position 646 of SEQ ID NO: 915461
uggccagucaaaugaguuu

SEQ ID NO: 1081503 - RNA, 19 nt, Artificial Sequence
  Description of Artificial Sequence: Synthetic oligonucleotide
  Antisense strand to SEQ ID NO: 1081502
aaacucauuugacuggcca

SEQ ID NO: 1081504 - RNA, 19 nt, Artificial Sequence
  Description of Artificial Sequence: Synthetic oligonucleotide
  Sense strand starting at position 664 of SEQ ID NO: 915461
uuaccugguggcuaagaua

SEQ ID NO: 1081505 - RNA, 19 nt, Artificial Sequence
  Description of Artificial Sequence: Synthetic oligonucleotide
  Antisense strand to SEQ ID NO: 1081504
uaucuuagccaccagguaa

SEQ ID NO: 1081506 - RNA, 19 nt, Artificial Sequence
  Description of Artificial Sequence: Synthetic oligonucleotide
  Sense strand starting at position 791 of SEQ ID NO: 915461
gcgacaaacuaauccaaac

SEQ ID NO: 1081507 - RNA, 19 nt, Artificial Sequence
  Description of Artificial Sequence: Synthetic oligonucleotide
  Antisense strand to SEQ ID NO: 1081506
guuuggauuaguuugucgc

SEQ ID NO: 1081508 - RNA, 19 nt, Artificial Sequence
  Description of Artificial Sequence: Synthetic oligonucleotide
  Sense strand starting at position 823 of SEQ ID NO: 915461
aaauuaggagaucggugua

SEQ ID NO: 1081509 - RNA, 19 nt, Artificial Sequence
  Description of Artificial Sequence: Synthetic oligonucleotide
  Antisense strand to SEQ ID NO: 1081508
uacaccgaucuccuaauuu

SEQ ID NO: 1081510 - RNA, 19 nt, Artificial Sequence
  Description of Artificial Sequence: Synthetic oligonucleotide
  Sense strand starting at position 857 of SEQ ID NO: 915461
gagccagucuagucuuauu

SEQ ID NO: 1081511 - RNA, 19 nt, Artificial Sequence
  Description of Artificial Sequence: Synthetic oligonucleotide
  Antisense strand to SEQ ID NO: 1081510
aauaagacuagacuggcuc

SEQ ID NO: 1081512 - RNA, 19 nt, Artificial Sequence
  Description of Artificial Sequence: Synthetic oligonucleotide
  Sense strand starting at position 862 of SEQ ID NO: 915461
agucuagucuuauuaguca

SEQ ID NO: 1081513 - RNA, 19 nt, Artificial Sequence
  Description of Artificial Sequence: Synthetic oligonucleotide
  Antisense strand to SEQ ID NO: 1081512
ugacuaauaagacuagacu

SEQ ID NO: 1081514 - RNA, 19 nt, Artificial Sequence
  Description of Artificial Sequence: Synthetic oligonucleotide
  Sense strand starting at position 919 of SEQ ID NO: 915461
guuccaaacccuuguucca

SEQ ID NO: 1081515 - RNA, 19 nt, Artificial Sequence
  Description of Artificial Sequence: Synthetic oligonucleotide
  Antisense strand to SEQ ID NO: 1081514
uggaacaaggguuuggaac

SEQ ID NO: 1081516 - RNA, 19 nt, Artificial Sequence
  Description of Artificial Sequence: Synthetic oligonucleotide
  Sense strand starting at position 1127 of SEQ ID NO: 915461
acaagaaacugcucuaaug

SEQ ID NO: 1081517 - RNA, 19 nt, Artificial Sequence
  Description of Artificial Sequence: Synthetic oligonucleotide
  Antisense strand to SEQ ID NO: 1081516
cauuagagcaguuucuugu

SEQ ID NO: 1081518 - RNA, 19 nt, Artificial Sequence
  Description of Artificial Sequence: Synthetic oligonucleotide
  Sense strand starting at position 1180 of SEQ ID NO: 915461
cuguacuugucacuguuaa

SEQ ID NO: 1081519 - RNA, 19 nt, Artificial Sequence
  Description of Artificial Sequence: Synthetic oligonucleotide
  Antisense strand to SEQ ID NO: 1081518
uuaacagugacaaguacag

SEQ ID NO: 1081520 - RNA, 19 nt, Artificial Sequence
  Description of Artificial Sequence: Synthetic oligonucleotide
  Sense strand starting at position 1181 of SEQ ID NO: 915461
uguacuugucacuguuaag

SEQ ID NO: 1081521 - RNA, 19 nt, Artificial Sequence
  Description of Artificial Sequence: Synthetic oligonucleotide
  Antisense strand to SEQ ID NO: 1081520
cuuaacagugacaaguaca

SEQ ID NO: 1081522 - RNA, 19 nt, Artificial Sequence
  Description of Artificial Sequence: Synthetic oligonucleotide
  Sense strand starting at position 1198 of SEQ ID NO: 915461
aggaauagauaguagacuu

SEQ ID NO: 1081523 - RNA, 19 nt, Artificial Sequence
  Description of Artificial Sequence: Synthetic oligonucleotide
  Antisense strand to SEQ ID NO: 1081522
aagucuacuaucuauuccu

SEQ ID NO: 1081524 - RNA, 19 nt, Artificial Sequence
  Description of Artificial Sequence: Synthetic oligonucleotide
  Sense strand starting at position 1247 of SEQ ID NO: 915461
accugcaccgucuaaagaa

SEQ ID NO: 1081525 - RNA, 19 nt, Artificial Sequence
  Description of Artificial Sequence: Synthetic oligonucleotide
  Antisense strand to SEQ ID NO: 1081524
uucuuuagacggugcaggu

SEQ ID NO: 1081526 - RNA, 19 nt, Artificial Sequence
  Description of Artificial Sequence: Synthetic oligonucleotide
  Sense strand starting at position 1276 of SEQ ID NO: 915461
guuauuuggcuuuacggua

SEQ ID NO: 1081527 - RNA, 19 nt, Artificial Sequence
  Description of Artificial Sequence: Synthetic oligonucleotide
  Antisense strand to SEQ ID NO: 1081526
uaccguaaagccaaauaac

SEQ ID NO: 1081528 - RNA, 19 nt, Artificial Sequence
  Description of Artificial Sequence: Synthetic oligonucleotide
  Sense strand starting at position 1311 of SEQ ID NO: 915461
auccuaacucucgagaagu

SEQ ID NO: 1081529 - RNA, 19 nt, Artificial Sequence
  Description of Artificial Sequence: Synthetic oligonucleotide
  Antisense strand to SEQ ID NO: 1081528
acuucucgagaguuaggau

SEQ ID NO: 1081530 - RNA, 19 nt, Artificial Sequence
  Description of Artificial Sequence: Synthetic oligonucleotide
  Sense strand starting at position 1343 of SEQ ID NO: 915461
uugacaucgaaguguauau

SEQ ID NO: 1081531 - RNA, 19 nt, Artificial Sequence
  Description of Artificial Sequence: Synthetic oligonucleotide
  Antisense strand to SEQ ID NO: 1081530
auauacacuucgaugucaa

SEQ ID NO: 1081532 - RNA, 19 nt, Artificial Sequence
  Description of Artificial Sequence: Synthetic oligonucleotide
  Sense strand starting at position 1347 of SEQ ID NO: 915461
caucgaaguguauauacga

SEQ ID NO: 1081533 - RNA, 19 nt, Artificial Sequence
  Description of Artificial Sequence: Synthetic oligonucleotide
  Antisense strand to SEQ ID NO: 1081532
ucguauauacacuucgaug

SEQ ID NO: 1081534 - RNA, 19 nt, Artificial Sequence
  Description of Artificial Sequence: Synthetic oligonucleotide
  Sense strand starting at position 1407 of SEQ ID NO: 915461
aguucuaucccauguaaug

SEQ ID NO: 1081535 - RNA, 19 nt, Artificial Sequence
  Description of Artificial Sequence: Synthetic oligonucleotide
  Antisense strand to SEQ ID NO: 1081534
cauuacaugggauagaacu

SEQ ID NO: 1081536 - RNA, 19 nt, Artificial Sequence
  Description of Artificial Sequence: Synthetic oligonucleotide
  Sense strand starting at position 1418 of SEQ ID NO: 915461
auguaaugacaaggcguua

SEQ ID NO: 1081537 - RNA, 19 nt, Artificial Sequence
  Description of Artificial Sequence: Synthetic oligonucleotide
  Antisense strand to SEQ ID NO: 1081536
uaacgccuugucauuacau

SEQ ID NO: 1081538 - RNA, 19 nt, Artificial Sequence
  Description of Artificial Sequence: Synthetic oligonucleotide
  Sense strand starting at position 1632 of SEQ ID NO: 915461
uacuaauuccguugaccga

SEQ ID NO: 1081539 - RNA, 19 nt, Artificial Sequence
  Description of Artificial Sequence: Synthetic oligonucleotide
  Antisense strand to SEQ ID NO: 1081538
ucggucaacggaauuagua

SEQ ID NO: 1081540 - RNA, 19 nt, Artificial Sequence
  Description of Artificial Sequence: Synthetic oligonucleotide
  Sense strand starting at position 1646 of SEQ ID NO: 915461
accgacaaaugcucacaaa

SEQ ID NO: 1081541 - RNA, 19 nt, Artificial Sequence
  Description of Artificial Sequence: Synthetic oligonucleotide
  Antisense strand to SEQ ID NO: 1081540
uuugugagcauuugucggu

SEQ ID NO: 1081542 - RNA, 19 nt, Artificial Sequence
  Description of Artificial Sequence: Synthetic oligonucleotide
  Sense strand starting at position 1647 of SEQ ID NO: 915461
ccgacaaaugcucacaaac

SEQ ID NO: 1081543 - RNA, 19 nt, Artificial Sequence
  Description of Artificial Sequence: Synthetic oligonucleotide
  Antisense strand to SEQ ID NO: 1081542
guuugugagcauuugucgg

SEQ ID NO: 1081544 - RNA, 19 nt, Artificial Sequence
  Description of Artificial Sequence: Synthetic oligonucleotide
  Sense strand starting at position 1664 of SEQ ID NO: 915461
acgccuucuccgggacaga

SEQ ID NO: 1081545 - RNA, 19 nt, Artificial Sequence
  Description of Artificial Sequence: Synthetic oligonucleotide
  Antisense strand to SEQ ID NO: 1081544
ucugucccggagaaggcgu

SEQ ID NO: 1081546 - RNA, 19 nt, Artificial Sequence
  Description of Artificial Sequence: Synthetic oligonucleotide
  Sense strand starting at position 1665 of SEQ ID NO: 915461
cgccuucuccgggacagaa

SEQ ID NO: 1081547 - RNA, 19 nt, Artificial Sequence
  Description of Artificial Sequence: Synthetic oligonucleotide
  Antisense strand to SEQ ID NO: 1081546
uucugucccggagaaggcg

SEQ ID NO: 1081548 - RNA, 19 nt, Artificial Sequence
  Description of Artificial Sequence: Synthetic oligonucleotide
  Sense strand starting at position 1987 of SEQ ID NO: 915461
ggcggaagugaguauaaag

SEQ ID NO: 1081549 - RNA, 19 nt, Artificial Sequence
  Description of Artificial Sequence: Synthetic oligonucleotide
  Antisense strand to SEQ ID NO: 1081548
cuuuauacucacuuccgcc

SEQ ID NO: 1081550 - RNA, 19 nt, Artificial Sequence
  Description of Artificial Sequence: Synthetic oligonucleotide
  Sense strand starting at position 2046 of SEQ ID NO: 915461
gugggugcucaugggaaau

SEQ ID NO: 1081551 - RNA, 19 nt, Artificial Sequence
  Description of Artificial Sequence: Synthetic oligonucleotide
  Antisense strand to SEQ ID NO: 1081550
auuucccaugagcacccac

SEQ ID NO: 1081552 - RNA, 19 nt, Artificial Sequence
  Description of Artificial Sequence: Synthetic oligonucleotide
  Sense strand starting at position 2202 of SEQ ID NO: 915461
ggugcagagguggaaauua

SEQ ID NO: 1081553 - RNA, 19 nt, Artificial Sequence
  Description of Artificial Sequence: Synthetic oligonucleotide
  Antisense strand to SEQ ID NO: 1081552
uaauuuccaccucugcacc

SEQ ID NO: 1081554 - RNA, 19 nt, Artificial Sequence
  Description of Artificial Sequence: Synthetic oligonucleotide
  Sense strand starting at position 2211 of SEQ ID NO: 915461
guggaaauuacagguauaa

SEQ ID NO: 1081555 - RNA, 19 nt, Artificial Sequence
  Description of Artificial Sequence: Synthetic oligonucleotide
  Antisense strand to SEQ ID NO: 1081554
uuauaccuguaauuuccac

SEQ ID NO: 1081556 - RNA, 19 nt, Artificial Sequence
  Description of Artificial Sequence: Synthetic oligonucleotide
  Sense strand starting at position 2245 of SEQ ID NO: 915461
gagauuaaccagcguggaa

SEQ ID NO: 1081557 - RNA, 19 nt, Artificial Sequence
  Description of Artificial Sequence: Synthetic oligonucleotide
  Antisense strand to SEQ ID NO: 1081556
uuccacgcugguuaaucuc

SEQ ID NO: 1081558 - RNA, 19 nt, Artificial Sequence
  Description of Artificial Sequence: Synthetic oligonucleotide
  Sense strand starting at position 2310 of SEQ ID NO: 915461
ugaaaucccucagugaaac

SEQ ID NO: 1081559 - RNA, 19 nt, Artificial Sequence
  Description of Artificial Sequence: Synthetic oligonucleotide
  Antisense strand to SEQ ID NO: 1081558
guuucacugagggauuuca

SEQ ID NO: 1081560 - RNA, 19 nt, Artificial Sequence
  Description of Artificial Sequence: Synthetic oligonucleotide
  Sense strand starting at position 2674 of SEQ ID NO: 915461
accugauacuuacuaagug

SEQ ID NO: 1081561 - RNA, 19 nt, Artificial Sequence
  Description of Artificial Sequence: Synthetic oligonucleotide
  Antisense strand to SEQ ID NO: 1081560
cacuuaguaaguaucaggu

SEQ ID NO: 1081562 - RNA, 19 nt, Artificial Sequence
  Description of Artificial Sequence: Synthetic oligonucleotide
  Sense strand starting at position 2702 of SEQ ID NO: 915461
cugcguucuguguccuuua

SEQ ID NO: 1081563 - RNA, 19 nt, Artificial Sequence
  Description of Artificial Sequence: Synthetic oligonucleotide
  Antisense strand to SEQ ID NO: 1081562
uaaaggacacagaacgcag

SEQ ID NO: 1081564 - RNA, 19 nt, Artificial Sequence
  Description of Artificial Sequence: Synthetic oligonucleotide
  Sense strand starting at position 2714 of SEQ ID NO: 915461
uccuuuauguuguucucau

SEQ ID NO: 1081565 - RNA, 19 nt, Artificial Sequence
  Description of Artificial Sequence: Synthetic oligonucleotide
  Antisense strand to SEQ ID NO: 1081564
augagaacaacauaaagga

SEQ ID NO: 1081566 - RNA, 19 nt, Artificial Sequence
  Description of Artificial Sequence: Synthetic oligonucleotide
  Sense strand starting at position 2715 of SEQ ID NO: 915461
ccuuuauguuguucucauu

SEQ ID NO: 1081567 - RNA, 19 nt, Artificial Sequence
  Description of Artificial Sequence: Synthetic oligonucleotide
  Antisense strand to SEQ ID NO: 1081566
aaugagaacaacauaaagg

SEQ ID NO: 1081568 - RNA, 19 nt, Artificial Sequence
  Description of Artificial Sequence: Synthetic oligonucleotide
  Sense strand starting at position 3548 of SEQ ID NO: 915461
gggaauugagaaugaugcu

SEQ ID NO: 1081569 - RNA, 19 nt, Artificial Sequence
  Description of Artificial Sequence: Synthetic oligonucleotide
  Antisense strand to SEQ ID NO: 1081568
agcaucauucucaauuccc

SEQ ID NO: 1081570 - RNA, 19 nt, Artificial Sequence
  Description of Artificial Sequence: Synthetic oligonucleotide
  Sense strand starting at position 3585 of SEQ ID NO: 915461
uugcuuuaucguggaucua

SEQ ID NO: 1081571 - RNA, 19 nt, Artificial Sequence
  Description of Artificial Sequence: Synthetic oligonucleotide
  Antisense strand to SEQ ID NO: 1081570
uagauccacgauaaagcaa

SEQ ID NO: 1081572 - RNA, 19 nt, Artificial Sequence
  Description of Artificial Sequence: Synthetic oligonucleotide
  Sense strand starting at position 3586 of SEQ ID NO: 915461
ugcuuuaucguggaucuac

SEQ ID NO: 1081573 - RNA, 19 nt, Artificial Sequence
  Description of Artificial Sequence: Synthetic oligonucleotide
  Antisense strand to SEQ ID NO: 1081572
guagauccacgauaaagca

SEQ ID NO: 1081574 - RNA, 19 nt, Artificial Sequence
  Description of Artificial Sequence: Synthetic oligonucleotide
  Sense strand starting at position 3651 of SEQ ID NO: 915461
guaaguugcagacauuggu

SEQ ID NO: 1081575 - RNA, 19 nt, Artificial Sequence
  Description of Artificial Sequence: Synthetic oligonucleotide
  Antisense strand to SEQ ID NO: 1081574
accaaugucugcaacuuac

SEQ ID NO: 1081576 - RNA, 19 nt, Artificial Sequence
  Description of Artificial Sequence: Synthetic oligonucleotide
  Sense strand starting at position 3654 of SEQ ID NO: 915461
aguugcagacauugguaaa

SEQ ID NO: 1081577 - RNA, 19 nt, Artificial Sequence
  Description of Artificial Sequence: Synthetic oligonucleotide
  Antisense strand to SEQ ID NO: 1081576
uuuaccaaugucugcaacu

SEQ ID NO: 1081578 - RNA, 19 nt, Artificial Sequence
  Description of Artificial Sequence: Synthetic oligonucleotide
  Sense strand starting at position 3655 of SEQ ID NO: 915461
guugcagacauugguaaac

SEQ ID NO: 1081579 - RNA, 19 nt, Artificial Sequence
  Description of Artificial Sequence: Synthetic oligonucleotide
  Antisense strand to SEQ ID NO: 1081578
guuuaccaaugucugcaac

SEQ ID NO: 1081580 - RNA, 19 nt, Artificial Sequence
  Description of Artificial Sequence: Synthetic oligonucleotide
  Sense strand starting at position 113 of SEQ ID NO: 915462
cagagaaagucaucugccu

SEQ ID NO: 1081581 - RNA, 19 nt, Artificial Sequence
  Description of Artificial Sequence: Synthetic oligonucleotide
  Antisense strand to SEQ ID NO: 1081580
aggcagaugacuuucucug

SEQ ID NO: 1081582 - RNA, 19 nt, Artificial Sequence
  Description of Artificial Sequence: Synthetic oligonucleotide
  Sense strand starting at position 118 of SEQ ID NO: 915462
aaagucaucugccuguaga

SEQ ID NO: 1081583 - RNA, 19 nt, Artificial Sequence
  Description of Artificial Sequence: Synthetic oligonucleotide
  Antisense strand to SEQ ID NO: 1081582
ucuacaggcagaugacuuu

SEQ ID NO: 1081584 - RNA, 19 nt, Artificial Sequence
  Description of Artificial Sequence: Synthetic oligonucleotide
  Sense strand starting at position 119 of SEQ ID NO: 915462
aagucaucugccuguagag

SEQ ID NO: 1081585 - RNA, 19 nt, Artificial Sequence
  Description of Artificial Sequence: Synthetic oligonucleotide
  Antisense strand to SEQ ID NO: 1081584
cucuacaggcagaugacuu

SEQ ID NO: 1081586 - RNA, 19 nt, Artificial Sequence
  Description of Artificial Sequence: Synthetic oligonucleotide
  Sense strand starting at position 233 of SEQ ID NO: 915462
agaggaaagucugugugaa

SEQ ID NO: 1081587 - RNA, 19 nt, Artificial Sequence
  Description of Artificial Sequence: Synthetic oligonucleotide
  Antisense strand to SEQ ID NO: 1081586
uucacacagacuuuccucu

SEQ ID NO: 1081588 - RNA, 19 nt, Artificial Sequence
  Description of Artificial Sequence: Synthetic oligonucleotide
  Sense strand starting at position 234 of SEQ ID NO: 915462
gaggaaagucugugugaag

SEQ ID NO: 1081589 - RNA, 19 nt, Artificial Sequence
  Description of Artificial Sequence: Synthetic oligonucleotide
  Antisense strand to SEQ ID NO: 1081588
cuucacacagacuuuccuc

SEQ ID NO: 1081590 - RNA, 19 nt, Artificial Sequence
  Description of Artificial Sequence: Synthetic oligonucleotide
  Sense strand starting at position 235 of SEQ ID NO: 915462
aggaaagucugugugaaga

SEQ ID NO: 1081591 - RNA, 19 nt, Artificial Sequence
  Description of Artificial Sequence: Synthetic oligonucleotide
  Antisense strand to SEQ ID NO: 1081590
ucuucacacagacuuuccu

SEQ ID NO: 1081592 - RNA, 19 nt, Artificial Sequence
  Description of Artificial Sequence: Synthetic oligonucleotide
  Sense strand starting at position 285 of SEQ ID NO: 915462
ccgugagguuuccauuuga

SEQ ID NO: 1081593 - RNA, 19 nt, Artificial Sequence
  Description of Artificial Sequence: Synthetic oligonucleotide
  Antisense strand to SEQ ID NO: 1081592
ucaaauggaaaccucacgg

SEQ ID NO: 1081594 - RNA, 19 nt, Artificial Sequence
  Description of Artificial Sequence: Synthetic oligonucleotide
  Sense strand starting at position 292 of SEQ ID NO: 915462
guuuccauuugaggaaguu

SEQ ID NO: 1081595 - RNA, 19 nt, Artificial Sequence
  Description of Artificial Sequence: Synthetic oligonucleotide
  Antisense strand to SEQ ID NO: 1081594
aacuuccucaaauggaaac

SEQ ID NO: 1081596 - RNA, 19 nt, Artificial Sequence
  Description of Artificial Sequence: Synthetic oligonucleotide
  Sense strand starting at position 492 of SEQ ID NO: 915462
gcgugcagauuccuuccaa

SEQ ID NO: 1081597 - RNA, 19 nt, Artificial Sequence
  Description of Artificial Sequence: Synthetic oligonucleotide
  Antisense strand to SEQ ID NO: 1081596
uuggaaggaaucugcacgc

SEQ ID NO: 1081598 - RNA, 19 nt, Artificial Sequence
  Description of Artificial Sequence: Synthetic oligonucleotide
  Sense strand starting at position 493 of SEQ ID NO: 915462
cgugcagauuccuuccaag

SEQ ID NO: 1081599 - RNA, 19 nt, Artificial Sequence
  Description of Artificial Sequence: Synthetic oligonucleotide
  Antisense strand to SEQ ID NO: 1081598
cuuggaaggaaucugcacg

SEQ ID NO: 1081600 - RNA, 19 nt, Artificial Sequence
  Description of Artificial Sequence: Synthetic oligonucleotide
  Sense strand starting at position 496 of SEQ ID NO: 915462
gcagauuccuuccaaggca

SEQ ID NO: 1081601 - RNA, 19 nt, Artificial Sequence
  Description of Artificial Sequence: Synthetic oligonucleotide
  Antisense strand to SEQ ID NO: 1081600
ugccuuggaaggaaucugc

SEQ ID NO: 1081602 - RNA, 19 nt, Artificial Sequence
  Description of Artificial Sequence: Synthetic oligonucleotide
  Sense strand starting at position 1020 of SEQ ID NO: 915462
gggcugugagcgggagauu

SEQ ID NO: 1081603 - RNA, 19 nt, Artificial Sequence
  Description of Artificial Sequence: Synthetic oligonucleotide
  Antisense strand to SEQ ID NO: 1081602
aaucucccgcucacagccc

SEQ ID NO: 1081604 - RNA, 19 nt, Artificial Sequence
  Description of Artificial Sequence: Synthetic oligonucleotide
  Sense strand starting at position 1031 of SEQ ID NO: 915462
gggagauuggugcaggcuu

SEQ ID NO: 1081605 - RNA, 19 nt, Artificial Sequence
  Description of Artificial Sequence: Synthetic oligonucleotide
  Antisense strand to SEQ ID NO: 1081604
aagccugcaccaaucuccc

SEQ ID NO: 1081606 - RNA, 19 nt, Artificial Sequence
  Description of Artificial Sequence: Synthetic oligonucleotide
  Sense strand starting at position 1263 of SEQ ID NO: 915462
uaugcaaaccugcgagaga

SEQ ID NO: 1081607 - RNA, 19 nt, Artificial Sequence
  Description of Artificial Sequence: Synthetic oligonucleotide
  Antisense strand to SEQ ID NO: 1081606
ucucucgcagguuugcaua

SEQ ID NO: 1081608 - RNA, 19 nt, Artificial Sequence
  Description of Artificial Sequence: Synthetic oligonucleotide
  Sense strand starting at position 1264 of SEQ ID NO: 915462
augcaaaccugcgagagau

SEQ ID NO: 1081609 - RNA, 19 nt, Artificial Sequence
  Description of Artificial Sequence: Synthetic oligonucleotide
  Antisense strand to SEQ ID NO: 1081608
aucucucgcagguuugcau

SEQ ID NO: 1081610 - RNA, 19 nt, Artificial Sequence
  Description of Artificial Sequence: Synthetic oligonucleotide
  Sense strand starting at position 1391 of SEQ ID NO: 915462
gggaucccauauuggaaga

SEQ ID NO: 1081611 - RNA, 19 nt, Artificial Sequence
  Description of Artificial Sequence: Synthetic oligonucleotide
  Antisense strand to SEQ ID NO: 1081610
ucuuccaauaugggauccc

SEQ ID NO: 1081612 - RNA, 19 nt, Artificial Sequence
  Description of Artificial Sequence: Synthetic oligonucleotide
  Sense strand starting at position 1420 of SEQ ID NO: 915462
cuaugcaaaucacuugaga

SEQ ID NO: 1081613 - RNA, 19 nt, Artificial Sequence
  Description of Artificial Sequence: Synthetic oligonucleotide
  Antisense strand to SEQ ID NO: 1081612
ucucaagugauuugcauag

SEQ ID NO: 1081614 - RNA, 19 nt, Artificial Sequence
  Description of Artificial Sequence: Synthetic oligonucleotide
  Sense strand starting at position 1511 of SEQ ID NO: 915462
gagugaugucaauguggag

SEQ ID NO: 1081615 - RNA, 19 nt, Artificial Sequence
  Description of Artificial Sequence: Synthetic oligonucleotide
  Antisense strand to SEQ ID NO: 1081614
cuccacauugacaucacuc

SEQ ID NO: 1081616 - RNA, 19 nt, Artificial Sequence
  Description of Artificial Sequence: Synthetic oligonucleotide
  Sense strand starting at position 1523 of SEQ ID NO: 915462
uguggagugcccuggaagu

SEQ ID NO: 1081617 - RNA, 19 nt, Artificial Sequence
  Description of Artificial Sequence: Synthetic oligonucleotide
  Antisense strand to SEQ ID NO: 1081616
acuuccagggcacuccaca

SEQ ID NO: 1081618 - RNA, 19 nt, Artificial Sequence
  Description of Artificial Sequence: Synthetic oligonucleotide
  Sense strand starting at position 2272 of SEQ ID NO: 915462
ccaggaaucugcccgggaa

SEQ ID NO: 1081619 - RNA, 19 nt, Artificial Sequence
  Description of Artificial Sequence: Synthetic oligonucleotide
  Antisense strand to SEQ ID NO: 1081618
uucccgggcagauuccugg

SEQ ID NO: 1081620 - RNA, 19 nt, Artificial Sequence
  Description of Artificial Sequence: Synthetic oligonucleotide
  Sense strand starting at position 2273 of SEQ ID NO: 915462
caggaaucugcccgggaau

SEQ ID NO: 1081621 - RNA, 19 nt, Artificial Sequence
  Description of Artificial Sequence: Synthetic oligonucleotide
  Antisense strand to SEQ ID NO: 1081620
auucccgggcagauuccug

SEQ ID NO: 1081622 - RNA, 19 nt, Artificial Sequence
  Description of Artificial Sequence: Synthetic oligonucleotide
  Sense strand starting at position 2379 of SEQ ID NO: 915462
gggucuggauccuggaagu

SEQ ID NO: 1081623 - RNA, 19 nt, Artificial Sequence
  Description of Artificial Sequence: Synthetic oligonucleotide
  Antisense strand to SEQ ID NO: 1081622
acuuccaggauccagaccc

SEQ ID NO: 1081624 - RNA, 19 nt, Artificial Sequence
  Description of Artificial Sequence: Synthetic oligonucleotide
  Sense strand starting at position 2489 of SEQ ID NO: 915462
ggaggagccucaucaccaa

SEQ ID NO: 1081625 - RNA, 19 nt, Artificial Sequence
  Description of Artificial Sequence: Synthetic oligonucleotide
  Antisense strand to SEQ ID NO: 1081624
uuggugaugaggcuccucc

SEQ ID NO: 1081626 - RNA, 19 nt, Artificial Sequence
  Description of Artificial Sequence: Synthetic oligonucleotide
  Sense strand starting at position 2719 of SEQ ID NO: 915462
aagagaugucagugccaca

SEQ ID NO: 1081627 - RNA, 19 nt, Artificial Sequence
  Description of Artificial Sequence: Synthetic oligonucleotide
  Antisense strand to SEQ ID NO: 1081626
uguggcacugacaucucuu

SEQ ID NO: 1081628 - RNA, 19 nt, Artificial Sequence
  Description of Artificial Sequence: Synthetic oligonucleotide
  Sense strand starting at position 658 of SEQ ID NO: 915463
uccagacacuguugucaaa

SEQ ID NO: 1081629 - RNA, 19 nt, Artificial Sequence
  Description of Artificial Sequence: Synthetic oligonucleotide
  Antisense strand to SEQ ID NO: 1081628
uuugacaacagugucugga

SEQ ID NO: 1081630 - RNA, 19 nt, Artificial Sequence
  Description of Artificial Sequence: Synthetic oligonucleotide
  Sense strand starting at position 660 of SEQ ID NO: 915463
cagacacuguugucaaaug

SEQ ID NO: 1081631 - RNA, 19 nt, Artificial Sequence
  Description of Artificial Sequence: Synthetic oligonucleotide
  Antisense strand to SEQ ID NO: 1081630
cauuugacaacagugucug

SEQ ID NO: 1081632 - RNA, 19 nt, Artificial Sequence
  Description of Artificial Sequence: Synthetic oligonucleotide
  Sense strand starting at position 661 of SEQ ID NO: 915463
agacacuguugucaaaugu

SEQ ID NO: 1081633 - RNA, 19 nt, Artificial Sequence
  Description of Artificial Sequence: Synthetic oligonucleotide
  Antisense strand to SEQ ID NO: 1081632
acauuugacaacagugucu

SEQ ID NO: 1081634 - RNA, 19 nt, Artificial Sequence
  Description of Artificial Sequence: Synthetic oligonucleotide
  Sense strand starting at position 670 of SEQ ID NO: 915463
ugucaaaugucugcuggga

SEQ ID NO: 1081635 - RNA, 19 nt, Artificial Sequence
  Description of Artificial Sequence: Synthetic oligonucleotide
  Antisense strand to SEQ ID NO: 1081634
ucccagcagacauuugaca

SEQ ID NO: 1081636 - RNA, 19 nt, Artificial Sequence
  Description of Artificial Sequence: Synthetic oligonucleotide
  Sense strand starting at position 672 of SEQ ID NO: 915463
ucaaaugucugcugggagu

SEQ ID NO: 1081637 - RNA, 19 nt, Artificial Sequence
  Description of Artificial Sequence: Synthetic oligonucleotide
  Antisense strand to SEQ ID NO: 1081636
acucccagcagacauuuga

SEQ ID NO: 1081638 - RNA, 19 nt, Artificial Sequence
  Description of Artificial Sequence: Synthetic oligonucleotide
  Sense strand starting at position 674 of SEQ ID NO: 915463
aaaugucugcugggaguca

SEQ ID NO: 1081639 - RNA, 19 nt, Artificial Sequence
  Description of Artificial Sequence: Synthetic oligonucleotide
  Antisense strand to SEQ ID NO: 1081638
ugacucccagcagacauuu

SEQ ID NO: 1081640 - RNA, 19 nt, Artificial Sequence
  Description of Artificial Sequence: Synthetic oligonucleotide
  Sense strand starting at position 675 of SEQ ID NO: 915463
aaugucugcugggagucaa

SEQ ID NO: 1081641 - RNA, 19 nt, Artificial Sequence
  Description of Artificial Sequence: Synthetic oligonucleotide
  Antisense strand to SEQ ID NO: 1081640
uugacucccagcagacauu

SEQ ID NO: 1081642 - RNA, 19 nt, Artificial Sequence
  Description of Artificial Sequence: Synthetic oligonucleotide
  Sense strand starting at position 838 of SEQ ID NO: 915463
cacaguauucguuggcuga

SEQ ID NO: 1081643 - RNA, 19 nt, Artificial Sequence
  Description of Artificial Sequence: Synthetic oligonucleotide
  Antisense strand to SEQ ID NO: 1081642
ucagccaacgaauacugug

SEQ ID NO: 1081644 - RNA, 19 nt, Artificial Sequence
  Description of Artificial Sequence: Synthetic oligonucleotide
  Sense strand starting at position 839 of SEQ ID NO: 915463
acaguauucguuggcugaa

SEQ ID NO: 1081645 - RNA, 19 nt, Artificial Sequence
  Description of Artificial Sequence: Synthetic oligonucleotide
  Antisense strand to SEQ ID NO: 1081644
uucagccaacgaauacugu

SEQ ID NO: 1081646 - RNA, 19 nt, Artificial Sequence
  Description of Artificial Sequence: Synthetic oligonucleotide
  Sense strand starting at position 840 of SEQ ID NO: 915463
caguauucguuggcugaac

SEQ ID NO: 1081647 - RNA, 19 nt, Artificial Sequence
  Description of Artificial Sequence: Synthetic oligonucleotide
  Antisense strand to SEQ ID NO: 1081646
guucagccaacgaauacug

SEQ ID NO: 1081648 - RNA, 19 nt, Artificial Sequence
  Description of Artificial Sequence: Synthetic oligonucleotide
  Sense strand starting at position 842 of SEQ ID NO: 915463
guauucguuggcugaacga

SEQ ID NO: 1081649 - RNA, 19 nt, Artificial Sequence
  Description of Artificial Sequence: Synthetic oligonucleotide
  Antisense strand to SEQ ID NO: 1081648
ucguucagccaacgaauac

SEQ ID NO: 1081650 - RNA, 19 nt, Artificial Sequence
  Description of Artificial Sequence: Synthetic oligonucleotide
  Sense strand starting at position 1100 of SEQ ID NO: 915463
uuauguuucuggcucugaa

SEQ ID NO: 1081651 - RNA, 19 nt, Artificial Sequence
  Description of Artificial Sequence: Synthetic oligonucleotide
  Antisense strand to SEQ ID NO: 1081650
uucagagccagaaacauaa

SEQ ID NO: 1081652 - RNA, 19 nt, Artificial Sequence
  Description of Artificial Sequence: Synthetic oligonucleotide
  Sense strand starting at position 1110 of SEQ ID NO: 915463
ggcucugaaucccauuaga

SEQ ID NO: 1081653 - RNA, 19 nt, Artificial Sequence
  Description of Artificial Sequence: Synthetic oligonucleotide
  Antisense strand to SEQ ID NO: 1081652
ucuaaugggauucagagcc

SEQ ID NO: 1081654 - RNA, 19 nt, Artificial Sequence
  Description of Artificial Sequence: Synthetic oligonucleotide
  Sense strand starting at position 1473 of SEQ ID NO: 915463
ggacaugcguccugugaga

SEQ ID NO: 1081655 - RNA, 19 nt, Artificial Sequence
  Description of Artificial Sequence: Synthetic oligonucleotide
  Antisense strand to SEQ ID NO: 1081654
ucucacaggacgcaugucc

SEQ ID NO: 1081656 - RNA, 19 nt, Artificial Sequence
  Description of Artificial Sequence: Synthetic oligonucleotide
  Sense strand starting at position 1475 of SEQ ID NO: 915463
acaugcguccugugagaaa

SEQ ID NO: 1081657 - RNA, 19 nt, Artificial Sequence
  Description of Artificial Sequence: Synthetic oligonucleotide
  Antisense strand to SEQ ID NO: 1081656
uuucucacaggacgcaugu

SEQ ID NO: 1081658 - RNA, 19 nt, Artificial Sequence
  Description of Artificial Sequence: Synthetic oligonucleotide
  Sense strand starting at position 1635 of SEQ ID NO: 915463
aagggagaaucgggagaaa

SEQ ID NO: 1081659 - RNA, 19 nt, Artificial Sequence
  Description of Artificial Sequence: Synthetic oligonucleotide
  Antisense strand to SEQ ID NO: 1081658
uuucucccgauucucccuu

SEQ ID NO: 1081660 - RNA, 19 nt, Artificial Sequence
  Description of Artificial Sequence: Synthetic oligonucleotide
  Sense strand starting at position 1725 of SEQ ID NO: 915463
ggaucugggucugcaaaga

SEQ ID NO: 1081661 - RNA, 19 nt, Artificial Sequence
  Description of Artificial Sequence: Synthetic oligonucleotide
  Antisense strand to SEQ ID NO: 1081660
ucuuugcagacccagaucc

SEQ ID NO: 1081662 - RNA, 19 nt, Artificial Sequence
  Description of Artificial Sequence: Synthetic oligonucleotide
  Sense strand starting at position 2106 of SEQ ID NO: 915463
cgggaauuguaguccuaga

SEQ ID NO: 1081663 - RNA, 19 nt, Artificial Sequence
  Description of Artificial Sequence: Synthetic oligonucleotide
  Antisense strand to SEQ ID NO: 1081662
ucuaggacuacaauucccg

SEQ ID NO: 1081664 - RNA, 19 nt, Artificial Sequence
  Description of Artificial Sequence: Synthetic oligonucleotide
  Sense strand starting at position 2251 of SEQ ID NO: 915463
aguguaugcaggugugaau

SEQ ID NO: 1081665 - RNA, 19 nt, Artificial Sequence
  Description of Artificial Sequence: Synthetic oligonucleotide
  Antisense strand to SEQ ID NO: 1081664
auucacaccugcauacacu

SEQ ID NO: 1081666 - RNA, 19 nt, Artificial Sequence
  Description of Artificial Sequence: Synthetic oligonucleotide
  Sense strand starting at position 2311 of SEQ ID NO: 915463
ggccggcugcgugaugaaa

SEQ ID NO: 1081667 - RNA, 19 nt, Artificial Sequence
  Description of Artificial Sequence: Synthetic oligonucleotide
  Antisense strand to SEQ ID NO: 1081666
uuucaucacgcagccggcc

SEQ ID NO: 1081668 - RNA, 19 nt, Artificial Sequence
  Description of Artificial Sequence: Synthetic oligonucleotide
  Sense strand starting at position 2375 of SEQ ID NO: 915463
gcaucagggucuccucaaa

SEQ ID NO: 1081669 - RNA, 19 nt, Artificial Sequence
  Description of Artificial Sequence: Synthetic oligonucleotide
  Antisense strand to SEQ ID NO: 1081668
uuugaggagacccugaugc

SEQ ID NO: 1081670 - RNA, 19 nt, Artificial Sequence
  Description of Artificial Sequence: Synthetic oligonucleotide
  Sense strand starting at position 2403 of SEQ ID NO: 915463
gcucgaggacccugcaaau

SEQ ID NO: 1081671 - RNA, 19 nt, Artificial Sequence
  Description of Artificial Sequence: Synthetic oligonucleotide
  Antisense strand to SEQ ID NO: 1081670
auuugcaggguccucgagc

SEQ ID NO: 1081672 - RNA, 19 nt, Artificial Sequence
  Description of Artificial Sequence: Synthetic oligonucleotide
  Sense strand starting at position 2507 of SEQ ID NO: 915463
accuguaaauaugggauuu

SEQ ID NO: 1081673 - RNA, 19 nt, Artificial Sequence
  Description of Artificial Sequence: Synthetic oligonucleotide
  Antisense strand to SEQ ID NO: 1081672
aaaucccauauuuacaggu

SEQ ID NO: 1081674 - RNA, 19 nt, Artificial Sequence
  Description of Artificial Sequence: Synthetic oligonucleotide
  Sense strand starting at position 2530 of SEQ ID NO: 915463
ggcguuuacucccuucuua

SEQ ID NO: 1081675 - RNA, 19 nt, Artificial Sequence
  Description of Artificial Sequence: Synthetic oligonucleotide
  Antisense strand to SEQ ID NO: 1081674
uaagaagggaguaaacgcc

SEQ ID NO: 1081676 - RNA, 19 nt, Artificial Sequence
  Description of Artificial Sequence: Synthetic oligonucleotide
  Sense strand starting at position 2964 of SEQ ID NO: 915463
cuugaacucgggcgauaga

SEQ ID NO: 1081677 - RNA, 19 nt, Artificial Sequence
  Description of Artificial Sequence: Synthetic oligonucleotide
  Antisense strand to SEQ ID NO: 1081676
ucuaucgcccgaguucaag

SEQ ID NO: 1081678 - RNA, 19 nt, Artificial Sequence
  Description of Artificial Sequence: Synthetic oligonucleotide
  Sense strand starting at position 3498 of SEQ ID NO: 915463
cuucuuggguuccagugau

SEQ ID NO: 1081679 - RNA, 19 nt, Artificial Sequence
  Description of Artificial Sequence: Synthetic oligonucleotide
  Antisense strand to SEQ ID NO: 1081678
aucacuggaacccaagaag

SEQ ID NO: 1081680 - RNA, 19 nt, Artificial Sequence
  Description of Artificial Sequence: Synthetic oligonucleotide
  Sense strand starting at position 147 of SEQ ID NO: 915464
ugaagugugguccagagac

SEQ ID NO: 1081681 - RNA, 19 nt, Artificial Sequence
  Description of Artificial Sequence: Synthetic oligonucleotide
  Antisense strand to SEQ ID NO: 1081680
gucucuggaccacacuuca

SEQ ID NO: 1081682 - RNA, 19 nt, Artificial Sequence
  Description of Artificial Sequence: Synthetic oligonucleotide
  Sense strand starting at position 149 of SEQ ID NO: 915464
aagugugguccagagacua

SEQ ID NO: 1081683 - RNA, 19 nt, Artificial Sequence
  Description of Artificial Sequence: Synthetic oligonucleotide
  Antisense strand to SEQ ID NO: 1081682
uagucucuggaccacacuu

SEQ ID NO: 1081684 - RNA, 19 nt, Artificial Sequence
  Description of Artificial Sequence: Synthetic oligonucleotide
  Sense strand starting at position 221 of SEQ ID NO: 915464
cuagacuacucagucagaa

SEQ ID NO: 1081685 - RNA, 19 nt, Artificial Sequence
  Description of Artificial Sequence: Synthetic oligonucleotide
  Antisense strand to SEQ ID NO: 1081684
uucugacugaguagucuag

SEQ ID NO: 1081686 - RNA, 19 nt, Artificial Sequence
  Description of Artificial Sequence: Synthetic oligonucleotide
  Sense strand starting at position 591 of SEQ ID NO: 915464
gugauuuaauuccuugucu

SEQ ID NO: 1081687 - RNA, 19 nt, Artificial Sequence
  Description of Artificial Sequence: Synthetic oligonucleotide
  Antisense strand to SEQ ID NO: 1081686
agacaaggaauuaaaucac

SEQ ID NO: 1081688 - RNA, 19 nt, Artificial Sequence
  Description of Artificial Sequence: Synthetic oligonucleotide
  Sense strand starting at position 605 of SEQ ID NO: 915464
ugucuuugugaacaacuau

SEQ ID NO: 1081689 - RNA, 19 nt, Artificial Sequence
  Description of Artificial Sequence: Synthetic oligonucleotide
  Antisense strand to SEQ ID NO: 1081688
auaguuguucacaaagaca

SEQ ID NO: 1081690 - RNA, 19 nt, Artificial Sequence
  Description of Artificial Sequence: Synthetic oligonucleotide
  Sense strand starting at position 890 of SEQ ID NO: 915464
cccaguucugauggaagau

SEQ ID NO: 1081691 - RNA, 19 nt, Artificial Sequence
  Description of Artificial Sequence: Synthetic oligonucleotide
  Antisense strand to SEQ ID NO: 1081690
aucuuccaucagaacuggg

SEQ ID NO: 1081692 - RNA, 19 nt, Artificial Sequence
  Description of Artificial Sequence: Synthetic oligonucleotide
  Sense strand starting at position 905 of SEQ ID NO: 915464
agauaaccuuuagucuaga

SEQ ID NO: 1081693 - RNA, 19 nt, Artificial Sequence
  Description of Artificial Sequence: Synthetic oligonucleotide
  Antisense strand to SEQ ID NO: 1081692
ucuagacuaaagguuaucu

SEQ ID NO: 1081694 - RNA, 19 nt, Artificial Sequence
  Description of Artificial Sequence: Synthetic oligonucleotide
  Sense strand starting at position 994 of SEQ ID NO: 915464
acugucagauguuuagaaa

SEQ ID NO: 1081695 - RNA, 19 nt, Artificial Sequence
  Description of Artificial Sequence: Synthetic oligonucleotide
  Antisense strand to SEQ ID NO: 1081694
uuucuaaacaucugacagu

SEQ ID NO: 1081696 - RNA, 19 nt, Artificial Sequence
  Description of Artificial Sequence: Synthetic oligonucleotide
  Sense strand starting at position 1059 of SEQ ID NO: 915464
uauauuggacgguaguuua

SEQ ID NO: 1081697 - RNA, 19 nt, Artificial Sequence
  Description of Artificial Sequence: Synthetic oligonucleotide
  Antisense strand to SEQ ID NO: 1081696
uaaacuaccguccaauaua

SEQ ID NO: 1081698 - RNA, 19 nt, Artificial Sequence
  Description of Artificial Sequence: Synthetic oligonucleotide
  Sense strand starting at position 1109 of SEQ ID NO: 915464
uagagugcaccacaaguaa

SEQ ID NO: 1081699 - RNA, 19 nt, Artificial Sequence
  Description of Artificial Sequence: Synthetic oligonucleotide
  Antisense strand to SEQ ID NO: 1081698
uuacuuguggugcacucua

SEQ ID NO: 1081700 - RNA, 19 nt, Artificial Sequence
  Description of Artificial Sequence: Synthetic oligonucleotide
  Sense strand starting at position 1219 of SEQ ID NO: 915464
gcuuauugaugaccacaag

SEQ ID NO: 1081701 - RNA, 19 nt, Artificial Sequence
  Description of Artificial Sequence: Synthetic oligonucleotide
  Antisense strand to SEQ ID NO: 1081700
cuuguggucaucaauaagc

SEQ ID NO: 1081702 - RNA, 19 nt, Artificial Sequence
  Description of Artificial Sequence: Synthetic oligonucleotide
  Sense strand starting at position 1241 of SEQ ID NO: 915464
cuuguccugguggagaauu

SEQ ID NO: 1081703 - RNA, 19 nt, Artificial Sequence
  Description of Artificial Sequence: Synthetic oligonucleotide
  Antisense strand to SEQ ID NO: 1081702
aauucuccaccaggacaag

SEQ ID NO: 1081704 - RNA, 19 nt, Artificial Sequence
  Description of Artificial Sequence: Synthetic oligonucleotide
  Sense strand starting at position 1252 of SEQ ID NO: 915464
ggagaauuccucgggucag

SEQ ID NO: 1081705 - RNA, 19 nt, Artificial Sequence
  Description of Artificial Sequence: Synthetic oligonucleotide
  Antisense strand to SEQ ID NO: 1081704
cugacccgaggaauucucc

SEQ ID NO: 1081706 - RNA, 19 nt, Artificial Sequence
  Description of Artificial Sequence: Synthetic oligonucleotide
  Sense strand starting at position 1422 of SEQ ID NO: 915464
uccauaaaggucuggguga

SEQ ID NO: 1081707 - RNA, 19 nt, Artificial Sequence
  Description of Artificial Sequence: Synthetic oligonucleotide
  Antisense strand to SEQ ID NO: 1081706
ucacccagaccuuuaugga

SEQ ID NO: 1081708 - RNA, 19 nt, Artificial Sequence
  Description of Artificial Sequence: Synthetic oligonucleotide
  Sense strand starting at position 1424 of SEQ ID NO: 915464
cauaaaggucugggugaga

SEQ ID NO: 1081709 - RNA, 19 nt, Artificial Sequence
  Description of Artificial Sequence: Synthetic oligonucleotide
  Antisense strand to SEQ ID NO: 1081708
ucucacccagaccuuuaug

SEQ ID NO: 1081710 - RNA, 19 nt, Artificial Sequence
  Description of Artificial Sequence: Synthetic oligonucleotide
  Sense strand starting at position 1437 of SEQ ID NO: 915464
gugagaaucugaguaggga

SEQ ID NO: 1081711 - RNA, 19 nt, Artificial Sequence
  Description of Artificial Sequence: Synthetic oligonucleotide
  Antisense strand to SEQ ID NO: 1081710
ucccuacucagauucucac

SEQ ID NO: 1081712 - RNA, 19 nt, Artificial Sequence
  Description of Artificial Sequence: Synthetic oligonucleotide
  Sense strand starting at position 1452 of SEQ ID NO: 915464
gggaaugacuaucuuugca

SEQ ID NO: 1081713 - RNA, 19 nt, Artificial Sequence
  Description of Artificial Sequence: Synthetic oligonucleotide
  Antisense strand to SEQ ID NO: 1081712
ugcaaagauagucauuccc

SEQ ID NO: 1081714 - RNA, 19 nt, Artificial Sequence
  Description of Artificial Sequence: Synthetic oligonucleotide
  Sense strand starting at position 1806 of SEQ ID NO: 915464
cgcuaaucucugggcauuu

SEQ ID NO: 1081715 - RNA, 19 nt, Artificial Sequence
  Description of Artificial Sequence: Synthetic oligonucleotide
  Antisense strand to SEQ ID NO: 1081714
aaaugcccagagauuagcg

SEQ ID NO: 1081716 - RNA, 19 nt, Artificial Sequence
  Description of Artificial Sequence: Synthetic oligonucleotide
  Sense strand starting at position 1807 of SEQ ID NO: 915464
gcuaaucucugggcauuua

SEQ ID NO: 1081717 - RNA, 19 nt, Artificial Sequence
  Description of Artificial Sequence: Synthetic oligonucleotide
  Antisense strand to SEQ ID NO: 1081716
uaaaugcccagagauuagc

SEQ ID NO: 1081718 - RNA, 19 nt, Artificial Sequence
  Description of Artificial Sequence: Synthetic oligonucleotide
  Sense strand starting at position 1817 of SEQ ID NO: 915464
gggcauuuauggccguaga

SEQ ID NO: 1081719 - RNA, 19 nt, Artificial Sequence
  Description of Artificial Sequence: Synthetic oligonucleotide
  Antisense strand to SEQ ID NO: 1081718
ucuacggccauaaaugccc

SEQ ID NO: 1081720 - RNA, 19 nt, Artificial Sequence
  Description of Artificial Sequence: Synthetic oligonucleotide
  Sense strand starting at position 1818 of SEQ ID NO: 915464
ggcauuuauggccguagag

SEQ ID NO: 1081721 - RNA, 19 nt, Artificial Sequence
  Description of Artificial Sequence: Synthetic oligonucleotide
  Antisense strand to SEQ ID NO: 1081720
cucuacggccauaaaugcc

SEQ ID NO: 1081722 - RNA, 19 nt, Artificial Sequence
  Description of Artificial Sequence: Synthetic oligonucleotide
  Sense strand starting at position 2230 of SEQ ID NO: 915464
agagcacuggucugagaaa

SEQ ID NO: 1081723 - RNA, 19 nt, Artificial Sequence
  Description of Artificial Sequence: Synthetic oligonucleotide
  Antisense strand to SEQ ID NO: 1081722
uuucucagaccagugcucu

SEQ ID NO: 1081724 - RNA, 19 nt, Artificial Sequence
  Description of Artificial Sequence: Synthetic oligonucleotide
  Sense strand starting at position 2829 of SEQ ID NO: 915464
auaaacaucuguuugggau

SEQ ID NO: 1081725 - RNA, 19 nt, Artificial Sequence
  Description of Artificial Sequence: Synthetic oligonucleotide
  Antisense strand to SEQ ID NO: 1081724
aucccaaacagauguuuau

SEQ ID NO: 1081726 - RNA, 19 nt, Artificial Sequence
  Description of Artificial Sequence: Synthetic oligonucleotide
  Sense strand starting at position 2830 of SEQ ID NO: 915464
uaaacaucuguuugggaug

SEQ ID NO: 1081727 - RNA, 19 nt, Artificial Sequence
  Description of Artificial Sequence: Synthetic oligonucleotide
  Antisense strand to SEQ ID NO: 1081726
caucccaaacagauguuua

SEQ ID NO: 1081728 - RNA, 19 nt, Artificial Sequence
  Description of Artificial Sequence: Synthetic oligonucleotide
  Sense strand starting at position 2966 of SEQ ID NO: 915464
uuaagacugcuuggaauga

SEQ ID NO: 1081729 - RNA, 19 nt, Artificial Sequence
  Description of Artificial Sequence: Synthetic oligonucleotide
  Antisense strand to SEQ ID NO: 1081728
ucauuccaagcagucuuaa

SEQ ID NO: 1081730 - RNA, 19 nt, Artificial Sequence
  Description of Artificial Sequence: Synthetic oligonucleotide
  Sense strand starting at position 3006 of SEQ ID NO: 915464
gagaauagguaguugaauu

SEQ ID NO: 1081731 - RNA, 19 nt, Artificial Sequence
  Description of Artificial Sequence: Synthetic oligonucleotide
  Antisense strand to SEQ ID NO: 1081730
aauucaacuaccuauucuc

SEQ ID NO: 1081732 - RNA, 19 nt, Artificial Sequence
  Description of Artificial Sequence: Synthetic oligonucleotide
  Sense strand starting at position 3007 of SEQ ID NO: 915464
agaauagguaguugaauua

SEQ ID NO: 1081733 - RNA, 19 nt, Artificial Sequence
  Description of Artificial Sequence: Synthetic oligonucleotide
  Antisense strand to SEQ ID NO: 1081732
uaauucaacuaccuauucu

SEQ ID NO: 1081734 - RNA, 19 nt, Artificial Sequence
  Description of Artificial Sequence: Synthetic oligonucleotide
  Sense strand starting at position 3121 of SEQ ID NO: 915464
aguugaagaguuugaacua

SEQ ID NO: 1081735 - RNA, 19 nt, Artificial Sequence
  Description of Artificial Sequence: Synthetic oligonucleotide
  Antisense strand to SEQ ID NO: 1081734
uaguucaaacucuucaacu

SEQ ID NO: 1081736 - RNA, 19 nt, Artificial Sequence
  Description of Artificial Sequence: Synthetic oligonucleotide
  Sense strand starting at position 3130 of SEQ ID NO: 915464
guuugaacuagaggugaua

SEQ ID NO: 1081737 - RNA, 19 nt, Artificial Sequence
  Description of Artificial Sequence: Synthetic oligonucleotide
  Antisense strand to SEQ ID NO: 1081736
uaucaccucuaguucaaac

SEQ ID NO: 1081738 - RNA, 19 nt, Artificial Sequence
  Description of Artificial Sequence: Synthetic oligonucleotide
  Sense strand starting at position 3211 of SEQ ID NO: 915464
uggaaaugaaucuggcagu

SEQ ID NO: 1081739 - RNA, 19 nt, Artificial Sequence
  Description of Artificial Sequence: Synthetic oligonucleotide
  Antisense strand to SEQ ID NO: 1081738
acugccagauucauuucca

SEQ ID NO: 1081740 - RNA, 19 nt, Artificial Sequence
  Description of Artificial Sequence: Synthetic oligonucleotide
  Sense strand starting at position 3250 of SEQ ID NO: 915464
aaggaaaggguuugauagu

SEQ ID NO: 1081741 - RNA, 19 nt, Artificial Sequence
  Description of Artificial Sequence: Synthetic oligonucleotide
  Antisense strand to SEQ ID NO: 1081740
acuaucaaacccuuuccuu

SEQ ID NO: 1081742 - RNA, 19 nt, Artificial Sequence
  Description of Artificial Sequence: Synthetic oligonucleotide
  Sense strand starting at position 3307 of SEQ ID NO: 915464
aaucuagguggucagugau

SEQ ID NO: 1081743 - RNA, 19 nt, Artificial Sequence
  Description of Artificial Sequence: Synthetic oligonucleotide
  Antisense strand to SEQ ID NO: 1081742
aucacugaccaccuagauu

SEQ ID NO: 1081744 - RNA, 19 nt, Artificial Sequence
  Description of Artificial Sequence: Synthetic oligonucleotide
  Sense strand starting at position 3421 of SEQ ID NO: 915464
cugugagucccuggaagaa

SEQ ID NO: 1081745 - RNA, 19 nt, Artificial Sequence
  Description of Artificial Sequence: Synthetic oligonucleotide
  Antisense strand to SEQ ID NO: 1081744
uucuuccagggacucacag

SEQ ID NO: 1081746 - RNA, 19 nt, Artificial Sequence
  Description of Artificial Sequence: Synthetic oligonucleotide
  Sense strand starting at position 3470 of SEQ ID NO: 915464
uaguaaacucgauaucugu

SEQ ID NO: 1081747 - RNA, 19 nt, Artificial Sequence
  Description of Artificial Sequence: Synthetic oligonucleotide
  Antisense strand to SEQ ID NO: 1081746
acagauaucgaguuuacua

SEQ ID NO: 1081748 - RNA, 19 nt, Artificial Sequence
  Description of Artificial Sequence: Synthetic oligonucleotide
  Sense strand starting at position 3495 of SEQ ID NO: 915464
gcugaagugcaucauaaau

SEQ ID NO: 1081749 - RNA, 19 nt, Artificial Sequence
  Description of Artificial Sequence: Synthetic oligonucleotide
  Antisense strand to SEQ ID NO: 1081748
auuuaugaugcacuucagc

SEQ ID NO: 1081750 - RNA, 19 nt, Artificial Sequence
  Description of Artificial Sequence: Synthetic oligonucleotide
  Sense strand starting at position 3539 of SEQ ID NO: 915464
ugaauugucuuauuucugu

SEQ ID NO: 1081751 - RNA, 19 nt, Artificial Sequence
  Description of Artificial Sequence: Synthetic oligonucleotide
  Antisense strand to SEQ ID NO: 1081750
acagaaauaagacaauuca

SEQ ID NO: 1081752 - RNA, 19 nt, Artificial Sequence
  Description of Artificial Sequence: Synthetic oligonucleotide
  Sense strand starting at position 3544 of SEQ ID NO: 915464
ugucuuauuucugucaaug

SEQ ID NO: 1081753 - RNA, 19 nt, Artificial Sequence
  Description of Artificial Sequence: Synthetic oligonucleotide
  Antisense strand to SEQ ID NO: 1081752
cauugacagaaauaagaca

SEQ ID NO: 1081754 - RNA, 19 nt, Artificial Sequence
  Description of Artificial Sequence: Synthetic oligonucleotide
  Sense strand starting at position 3559 of SEQ ID NO: 915464
aauguuuggccugaagaau

SEQ ID NO: 1081755 - RNA, 19 nt, Artificial Sequence
  Description of Artificial Sequence: Synthetic oligonucleotide
  Antisense strand to SEQ ID NO: 1081754
auucuucaggccaaacauu

SEQ ID NO: 1081756 - RNA, 19 nt, Artificial Sequence
  Description of Artificial Sequence: Synthetic oligonucleotide
  Sense strand starting at position 3674 of SEQ ID NO: 915464
ugcaaagauuuccaaggga

SEQ ID NO: 1081757 - RNA, 19 nt, Artificial Sequence
  Description of Artificial Sequence: Synthetic oligonucleotide
  Antisense strand to SEQ ID NO: 1081756
ucccuuggaaaucuuugca

SEQ ID NO: 1081758 - RNA, 19 nt, Artificial Sequence
  Description of Artificial Sequence: Synthetic oligonucleotide
  Sense strand starting at position 3698 of SEQ ID NO: 915464
ggaaacaucuguuucuccu

SEQ ID NO: 1081759 - RNA, 19 nt, Artificial Sequence
  Description of Artificial Sequence: Synthetic oligonucleotide
  Antisense strand to SEQ ID NO: 1081758
aggagaaacagauguuucc

SEQ ID NO: 1081760 - RNA, 19 nt, Artificial Sequence
  Description of Artificial Sequence: Synthetic oligonucleotide
  Sense strand starting at position 25 of SEQ ID NO: 915465
cucagagaggcugaguauu

SEQ ID NO: 1081761 - RNA, 19 nt, Artificial Sequence
  Description of Artificial Sequence: Synthetic oligonucleotide
  Antisense strand to SEQ ID NO: 1081760
aauacucagccucucugag

SEQ ID NO: 1081762 - RNA, 19 nt, Artificial Sequence
  Description of Artificial Sequence: Synthetic oligonucleotide
  Sense strand starting at position 52 of SEQ ID NO: 915465
guucucacagccgauaaau

SEQ ID NO: 1081763 - RNA, 19 nt, Artificial Sequence
  Description of Artificial Sequence: Synthetic oligonucleotide
  Antisense strand to SEQ ID NO: 1081762
auuuaucggcugugagaac

SEQ ID NO: 1081764 - RNA, 19 nt, Artificial Sequence
  Description of Artificial Sequence: Synthetic oligonucleotide
  Sense strand starting at position 54 of SEQ ID NO: 915465
ucucacagccgauaaauga

SEQ ID NO: 1081765 - RNA, 19 nt, Artificial Sequence
  Description of Artificial Sequence: Synthetic oligonucleotide
  Antisense strand to SEQ ID NO: 1081764
ucauuuaucggcugugaga

SEQ ID NO: 1081766 - RNA, 19 nt, Artificial Sequence
  Description of Artificial Sequence: Synthetic oligonucleotide
  Sense strand starting at position 63 of SEQ ID NO: 915465
cgauaaaugacagagcuuu

SEQ ID NO: 1081767 - RNA, 19 nt, Artificial Sequence
  Description of Artificial Sequence: Synthetic oligonucleotide
  Antisense strand to SEQ ID NO: 1081766
aaagcucugucauuuaucg

SEQ ID NO: 1081768 - RNA, 19 nt, Artificial Sequence
  Description of Artificial Sequence: Synthetic oligonucleotide
  Sense strand starting at position 94 of SEQ ID NO: 915465
ugcucaagucuguaagacu

SEQ ID NO: 1081769 - RNA, 19 nt, Artificial Sequence
  Description of Artificial Sequence: Synthetic oligonucleotide
  Antisense strand to SEQ ID NO: 1081768
agucuuacagacuugagca

SEQ ID NO: 1081770 - RNA, 19 nt, Artificial Sequence
  Description of Artificial Sequence: Synthetic oligonucleotide
  Sense strand starting at position 101 of SEQ ID NO: 915465
gucuguaagacucaagguu

SEQ ID NO: 1081771 - RNA, 19 nt, Artificial Sequence
  Description of Artificial Sequence: Synthetic oligonucleotide
  Antisense strand to SEQ ID NO: 1081770
aaccuugagucuuacagac

SEQ ID NO: 1081772 - RNA, 19 nt, Artificial Sequence
  Description of Artificial Sequence: Synthetic oligonucleotide
  Sense strand starting at position 804 of SEQ ID NO: 915465
cccaaaggguuagcuauaa

SEQ ID NO: 1081773 - RNA, 19 nt, Artificial Sequence
  Description of Artificial Sequence: Synthetic oligonucleotide
  Antisense strand to SEQ ID NO: 1081772
uuauagcuaacccuuuggg

SEQ ID NO: 1081774 - RNA, 19 nt, Artificial Sequence
  Description of Artificial Sequence: Synthetic oligonucleotide
  Sense strand starting at position 829 of SEQ ID NO: 915465
uugcuuugccauuagauac

SEQ ID NO: 1081775 - RNA, 19 nt, Artificial Sequence
  Description of Artificial Sequence: Synthetic oligonucleotide
  Antisense strand to SEQ ID NO: 1081774
guaucuaauggcaaagcaa

SEQ ID NO: 1081776 - RNA, 19 nt, Artificial Sequence
  Description of Artificial Sequence: Synthetic oligonucleotide
  Sense strand starting at position 836 of SEQ ID NO: 915465
gccauuagauacguacaau

SEQ ID NO: 1081777 - RNA, 19 nt, Artificial Sequence
  Description of Artificial Sequence: Synthetic oligonucleotide
  Antisense strand to SEQ ID NO: 1081776
auuguacguaucuaauggc

SEQ ID NO: 1081778 - RNA, 19 nt, Artificial Sequence
  Description of Artificial Sequence: Synthetic oligonucleotide
  Sense strand starting at position 1023 of SEQ ID NO: 915465
gcagcaguaauccagggaa

SEQ ID NO: 1081779 - RNA, 19 nt, Artificial Sequence
  Description of Artificial Sequence: Synthetic oligonucleotide
  Antisense strand to SEQ ID NO: 1081778
uucccuggauuacugcugc

SEQ ID NO: 1081780 - RNA, 19 nt, Artificial Sequence
  Description of Artificial Sequence: Synthetic oligonucleotide
  Sense strand starting at position 1025 of SEQ ID NO: 915465
agcaguaauccagggaaua

SEQ ID NO: 1081781 - RNA, 19 nt, Artificial Sequence
  Description of Artificial Sequence: Synthetic oligonucleotide
  Antisense strand to SEQ ID NO: 1081780
uauucccuggauuacugcu

SEQ ID NO: 1081782 - RNA, 19 nt, Artificial Sequence
  Description of Artificial Sequence: Synthetic oligonucleotide
  Sense strand starting at position 1026 of SEQ ID NO: 915465
gcaguaauccagggaauau

SEQ ID NO: 1081783 - RNA, 19 nt, Artificial Sequence
  Description of Artificial Sequence: Synthetic oligonucleotide
  Antisense strand to SEQ ID NO: 1081782
auauucccuggauuacugc

SEQ ID NO: 1081784 - RNA, 19 nt, Artificial Sequence
  Description of Artificial Sequence: Synthetic oligonucleotide
  Sense strand starting at position 1096 of SEQ ID NO: 915465
uuguuacaguacucaauau

SEQ ID NO: 1081785 - RNA, 19 nt, Artificial Sequence
  Description of Artificial Sequence: Synthetic oligonucleotide
  Antisense strand to SEQ ID NO: 1081784
auauugaguacuguaacaa

SEQ ID NO: 1081786 - RNA, 19 nt, Artificial Sequence
  Description of Artificial Sequence: Synthetic oligonucleotide
  Sense strand starting at position 1662 of SEQ ID NO: 915465
ccggacauauuaccuaaga

SEQ ID NO: 1081787 - RNA, 19 nt, Artificial Sequence
  Description of Artificial Sequence: Synthetic oligonucleotide
  Antisense strand to SEQ ID NO: 1081786
ucuuagguaauauguccgg

SEQ ID NO: 1081788 - RNA, 19 nt, Artificial Sequence
  Description of Artificial Sequence: Synthetic oligonucleotide
  Sense strand starting at position 2855 of SEQ ID NO: 915465
aagagugugucacccuaau

SEQ ID NO: 1081789 - RNA, 19 nt, Artificial Sequence
  Description of Artificial Sequence: Synthetic oligonucleotide
  Antisense strand to SEQ ID NO: 1081788
auuagggugacacacucuu

SEQ ID NO: 1081790 - RNA, 19 nt, Artificial Sequence
  Description of Artificial Sequence: Synthetic oligonucleotide
  Sense strand starting at position 2866 of SEQ ID NO: 915465
acccuaauugucuauguaa

SEQ ID NO: 1081791 - RNA, 19 nt, Artificial Sequence
  Description of Artificial Sequence: Synthetic oligonucleotide
  Antisense strand to SEQ ID NO: 1081790
uuacauagacaauuagggu

SEQ ID NO: 1081792 - RNA, 19 nt, Artificial Sequence
  Description of Artificial Sequence: Synthetic oligonucleotide
  Sense strand starting at position 2979 of SEQ ID NO: 915465
cugcuuuaagaguacagau

SEQ ID NO: 1081793 - RNA, 19 nt, Artificial Sequence
  Description of Artificial Sequence: Synthetic oligonucleotide
  Antisense strand to SEQ ID NO: 1081792
aucuguacucuuaaagcag

SEQ ID NO: 1081794 - RNA, 19 nt, Artificial Sequence
  Description of Artificial Sequence: Synthetic oligonucleotide
  Sense strand starting at position 2991 of SEQ ID NO: 915465
uacagauggugaccauauu

SEQ ID NO: 1081795 - RNA, 19 nt, Artificial Sequence
  Description of Artificial Sequence: Synthetic oligonucleotide
  Antisense strand to SEQ ID NO: 1081794
aauauggucaccaucugua

SEQ ID NO: 1081796 - RNA, 19 nt, Artificial Sequence
  Description of Artificial Sequence: Synthetic oligonucleotide
  Sense strand starting at position 3023 of SEQ ID NO: 915465
guaugugacagugauugag

SEQ ID NO: 1081797 - RNA, 19 nt, Artificial Sequence
  Description of Artificial Sequence: Synthetic oligonucleotide
  Antisense strand to SEQ ID NO: 1081796
cucaaucacugucacauac

SEQ ID NO: 1081798 - RNA, 19 nt, Artificial Sequence
  Description of Artificial Sequence: Synthetic oligonucleotide
  Sense strand starting at position 3025 of SEQ ID NO: 915465
augugacagugauugagga

SEQ ID NO: 1081799 - RNA, 19 nt, Artificial Sequence
  Description of Artificial Sequence: Synthetic oligonucleotide
  Antisense strand to SEQ ID NO: 1081798
uccucaaucacugucacau

SEQ ID NO: 1081800 - RNA, 19 nt, Artificial Sequence
  Description of Artificial Sequence: Synthetic oligonucleotide
  Sense strand starting at position 3026 of SEQ ID NO: 915465
ugugacagugauugaggau

SEQ ID NO: 1081801 - RNA, 19 nt, Artificial Sequence
  Description of Artificial Sequence: Synthetic oligonucleotide
  Antisense strand to SEQ ID NO: 1081800
auccucaaucacugucaca

SEQ ID NO: 1081802 - RNA, 19 nt, Artificial Sequence
  Description of Artificial Sequence: Synthetic oligonucleotide
  Sense strand starting at position 3033 of SEQ ID NO: 915465
gugauugaggauuagagcu

SEQ ID NO: 1081803 - RNA, 19 nt, Artificial Sequence
  Description of Artificial Sequence: Synthetic oligonucleotide
  Antisense strand to SEQ ID NO: 1081802
agcucuaauccucaaucac

SEQ ID NO: 1081804 - RNA, 19 nt, Artificial Sequence
  Description of Artificial Sequence: Synthetic oligonucleotide
  Sense strand starting at position 3039 of SEQ ID NO: 915465
gaggauuagagcuguguca

SEQ ID NO: 1081805 - RNA, 19 nt, Artificial Sequence
  Description of Artificial Sequence: Synthetic oligonucleotide
  Antisense strand to SEQ ID NO: 1081804
ugacacagcucuaauccuc

SEQ ID NO: 1081806 - RNA, 19 nt, Artificial Sequence
  Description of Artificial Sequence: Synthetic oligonucleotide
  Sense strand starting at position 3082 of SEQ ID NO: 915465
ggugguugugacaguguga

SEQ ID NO: 1081807 - RNA, 19 nt, Artificial Sequence
  Description of Artificial Sequence: Synthetic oligonucleotide
  Antisense strand to SEQ ID NO: 1081806
ucacacugucacaaccacc

SEQ ID NO: 1081808 - RNA, 19 nt, Artificial Sequence
  Description of Artificial Sequence: Synthetic oligonucleotide
  Sense strand starting at position 3095 of SEQ ID NO: 915465
gugugaagaaugggacagu

SEQ ID NO: 1081809 - RNA, 19 nt, Artificial Sequence
  Description of Artificial Sequence: Synthetic oligonucleotide
  Antisense strand to SEQ ID NO: 1081808
acugucccauucuucacac

SEQ ID NO: 1081810 - RNA, 19 nt, Artificial Sequence
  Description of Artificial Sequence: Synthetic oligonucleotide
  Sense strand starting at position 3112 of SEQ ID NO: 915465
guggcugagcauggagaau

SEQ ID NO: 1081811 - RNA, 19 nt, Artificial Sequence
  Description of Artificial Sequence: Synthetic oligonucleotide
  Antisense strand to SEQ ID NO: 1081810
auucuccaugcucagccac

SEQ ID NO: 1081812 - RNA, 19 nt, Artificial Sequence
  Description of Artificial Sequence: Synthetic oligonucleotide
  Sense strand starting at position 3125 of SEQ ID NO: 915465
gagaauaagucagugauug

SEQ ID NO: 1081813 - RNA, 19 nt, Artificial Sequence
  Description of Artificial Sequence: Synthetic oligonucleotide
  Antisense strand to SEQ ID NO: 1081812
caaucacugacuuauucuc

SEQ ID NO: 1081814 - RNA, 19 nt, Artificial Sequence
  Description of Artificial Sequence: Synthetic oligonucleotide
  Sense strand starting at position 3126 of SEQ ID NO: 915465
agaauaagucagugauuga

SEQ ID NO: 1081815 - RNA, 19 nt, Artificial Sequence
  Description of Artificial Sequence: Synthetic oligonucleotide
  Antisense strand to SEQ ID NO: 1081814
ucaaucacugacuuauucu

SEQ ID NO: 1081816 - RNA, 19 nt, Artificial Sequence
  Description of Artificial Sequence: Synthetic oligonucleotide
  Sense strand starting at position 3159 of SEQ ID NO: 915465
gacggaaugugacagauuu

SEQ ID NO: 1081817 - RNA, 19 nt, Artificial Sequence
  Description of Artificial Sequence: Synthetic oligonucleotide
  Antisense strand to SEQ ID NO: 1081816
aaaucugucacauuccguc

SEQ ID NO: 1081818 - RNA, 19 nt, Artificial Sequence
  Description of Artificial Sequence: Synthetic oligonucleotide
  Sense strand starting at position 3207 of SEQ ID NO: 915465
uauguuuaugugugacaaa

SEQ ID NO: 1081819 - RNA, 19 nt, Artificial Sequence
  Description of Artificial Sequence: Synthetic oligonucleotide
  Antisense strand to SEQ ID NO: 1081818
uuugucacacauaaacaua

SEQ ID NO: 1081820 - RNA, 19 nt, Artificial Sequence
  Description of Artificial Sequence: Synthetic oligonucleotide
  Sense strand starting at position 3218 of SEQ ID NO: 915465
gugacaaaugugcaguaau

SEQ ID NO: 1081821 - RNA, 19 nt, Artificial Sequence
  Description of Artificial Sequence: Synthetic oligonucleotide
  Antisense strand to SEQ ID NO: 1081820
auuacugcacauuugucac

SEQ ID NO: 1081822 - RNA, 19 nt, Artificial Sequence
  Description of Artificial Sequence: Synthetic oligonucleotide
  Sense strand starting at position 3225 of SEQ ID NO: 915465
augugcaguaauuggauau

SEQ ID NO: 1081823 - RNA, 19 nt, Artificial Sequence
  Description of Artificial Sequence: Synthetic oligonucleotide
  Antisense strand to SEQ ID NO: 1081822
auauccaauuacugcacau

SEQ ID NO: 1081824 - RNA, 19 nt, Artificial Sequence
  Description of Artificial Sequence: Synthetic oligonucleotide
  Sense strand starting at position 3238 of SEQ ID NO: 915465
ggauaugaggagugugagu

SEQ ID NO: 1081825 - RNA, 19 nt, Artificial Sequence
  Description of Artificial Sequence: Synthetic oligonucleotide
  Antisense strand to SEQ ID NO: 1081824
acucacacuccucauaucc

SEQ ID NO: 1081826 - RNA, 19 nt, Artificial Sequence
  Description of Artificial Sequence: Synthetic oligonucleotide
  Sense strand starting at position 3531 of SEQ ID NO: 915465
gcagcuguucucuugguau

SEQ ID NO: 1081827 - RNA, 19 nt, Artificial Sequence
  Description of Artificial Sequence: Synthetic oligonucleotide
  Antisense strand to SEQ ID NO: 1081826
auaccaagagaacagcugc

SEQ ID NO: 1081828 - RNA, 19 nt, Artificial Sequence
  Description of Artificial Sequence: Synthetic oligonucleotide
  Sense strand starting at position 3548 of SEQ ID NO: 915465
auucucacuccgggaggaa

SEQ ID NO: 1081829 - RNA, 19 nt, Artificial Sequence
  Description of Artificial Sequence: Synthetic oligonucleotide
  Antisense strand to SEQ ID NO: 1081828
uuccucccggagugagaau

SEQ ID NO: 1081830 - RNA, 19 nt, Artificial Sequence
  Description of Artificial Sequence: Synthetic oligonucleotide
  Sense strand starting at position 3569 of SEQ ID NO: 915465
aagucagaaguuugacuau

SEQ ID NO: 1081831 - RNA, 19 nt, Artificial Sequence
  Description of Artificial Sequence: Synthetic oligonucleotide
  Antisense strand to SEQ ID NO: 1081830
auagucaaacuucugacuu

SEQ ID NO: 1081832 - RNA, 19 nt, Artificial Sequence
  Description of Artificial Sequence: Synthetic oligonucleotide
  Sense strand starting at position 3589 of SEQ ID NO: 915465
auaagacugccaugcuaaa

SEQ ID NO: 1081833 - RNA, 19 nt, Artificial Sequence
  Description of Artificial Sequence: Synthetic oligonucleotide
  Antisense strand to SEQ ID NO: 1081832
uuuagcauggcagucuuau

SEQ ID NO: 1081834 - RNA, 19 nt, Artificial Sequence
  Description of Artificial Sequence: Synthetic oligonucleotide
  Sense strand starting at position 3627 of SEQ ID NO: 915465
ccagucgaagucugauuga

SEQ ID NO: 1081835 - RNA, 19 nt, Artificial Sequence
  Description of Artificial Sequence: Synthetic oligonucleotide
  Antisense strand to SEQ ID NO: 1081834
ucaaucagacuucgacugg

SEQ ID NO: 1081836 - RNA, 19 nt, Artificial Sequence
  Description of Artificial Sequence: Synthetic oligonucleotide
  Sense strand starting at position 3640 of SEQ ID NO: 915465
gauugauggccaggagcaa

SEQ ID NO: 1081837 - RNA, 19 nt, Artificial Sequence
  Description of Artificial Sequence: Synthetic oligonucleotide
  Antisense strand to SEQ ID NO: 1081836
uugcuccuggccaucaauc

SEQ ID NO: 1081838 - RNA, 19 nt, Artificial Sequence
  Description of Artificial Sequence: Synthetic oligonucleotide
  Sense strand starting at position 3736 of SEQ ID NO: 915465
gugagacaucuuggacacu

SEQ ID NO: 1081839 - RNA, 19 nt, Artificial Sequence
  Description of Artificial Sequence: Synthetic oligonucleotide
  Antisense strand to SEQ ID NO: 1081838
aguguccaagaugucucac

SEQ ID NO: 1081840 - RNA, 19 nt, Artificial Sequence
  Description of Artificial Sequence: Synthetic oligonucleotide
  Sense strand starting at position 20 of SEQ ID NO: 915466
ggaagaacuaguugucacu

SEQ ID NO: 1081841 - RNA, 19 nt, Artificial Sequence
  Description of Artificial Sequence: Synthetic oligonucleotide
  Antisense strand to SEQ ID NO: 1081840
agugacaacuaguucuucc

SEQ ID NO: 1081842 - RNA, 19 nt, Artificial Sequence
  Description of Artificial Sequence: Synthetic oligonucleotide
  Sense strand starting at position 137 of SEQ ID NO: 915466
ucuagaaccuuggaaagaa

SEQ ID NO: 1081843 - RNA, 19 nt, Artificial Sequence
  Description of Artificial Sequence: Synthetic oligonucleotide
  Antisense strand to SEQ ID NO: 1081842
uucuuuccaagguucuaga

SEQ ID NO: 1081844 - RNA, 19 nt, Artificial Sequence
  Description of Artificial Sequence: Synthetic oligonucleotide
  Sense strand starting at position 186 of SEQ ID NO: 915466
aagaaauccugugacaagg

SEQ ID NO: 1081845 - RNA, 19 nt, Artificial Sequence
  Description of Artificial Sequence: Synthetic oligonucleotide
  Antisense strand to SEQ ID NO: 1081844
ccuugucacaggauuucuu

SEQ ID NO: 1081846 - RNA, 19 nt, Artificial Sequence
  Description of Artificial Sequence: Synthetic oligonucleotide
  Sense strand starting at position 254 of SEQ ID NO: 915466
ggaaacaggucuccugacu

SEQ ID NO: 1081847 - RNA, 19 nt, Artificial Sequence
  Description of Artificial Sequence: Synthetic oligonucleotide
  Antisense strand to SEQ ID NO: 1081846
agucaggagaccuguuucc

SEQ ID NO: 1081848 - RNA, 19 nt, Artificial Sequence
  Description of Artificial Sequence: Synthetic oligonucleotide
  Sense strand starting at position 372 of SEQ ID NO: 915466
agcuguugacugcaucauu

SEQ ID NO: 1081849 - RNA, 19 nt, Artificial Sequence
  Description of Artificial Sequence: Synthetic oligonucleotide
  Antisense strand to SEQ ID NO: 1081848
aaugaugcagucaacagcu

SEQ ID NO: 1081850 - RNA, 19 nt, Artificial Sequence
  Description of Artificial Sequence: Synthetic oligonucleotide
  Sense strand starting at position 416 of SEQ ID NO: 915466
gcuaaaguguugucaagag

SEQ ID NO: 1081851 - RNA, 19 nt, Artificial Sequence
  Description of Artificial Sequence: Synthetic oligonucleotide
  Antisense strand to SEQ ID NO: 1081850
cucuugacaacacuuuagc

SEQ ID NO: 1081852 - RNA, 19 nt, Artificial Sequence
  Description of Artificial Sequence: Synthetic oligonucleotide
  Sense strand starting at position 513 of SEQ ID NO: 915466
uugaauugguugccgauau

SEQ ID NO: 1081853 - RNA, 19 nt, Artificial Sequence
  Description of Artificial Sequence: Synthetic oligonucleotide
  Antisense strand to SEQ ID NO: 1081852
auaucggcaaccaauucaa

SEQ ID NO: 1081854 - RNA, 19 nt, Artificial Sequence
  Description of Artificial Sequence: Synthetic oligonucleotide
  Sense strand starting at position 643 of SEQ ID NO: 915466
gcuaaauacugacugcguu

SEQ ID NO: 1081855 - RNA, 19 nt, Artificial Sequence
  Description of Artificial Sequence: Synthetic oligonucleotide
  Antisense strand to SEQ ID NO: 1081854
aacgcagucaguauuuagc

SEQ ID NO: 1081856 - RNA, 19 nt, Artificial Sequence
  Description of Artificial Sequence: Synthetic oligonucleotide
  Sense strand starting at position 739 of SEQ ID NO: 915466
uggcuuuagugggcuuuaa

SEQ ID NO: 1081857 - RNA, 19 nt, Artificial Sequence
  Description of Artificial Sequence: Synthetic oligonucleotide
  Antisense strand to SEQ ID NO: 1081856
uuaaagcccacuaaagcca

SEQ ID NO: 1081858 - RNA, 19 nt, Artificial Sequence
  Description of Artificial Sequence: Synthetic oligonucleotide
  Sense strand starting at position 751 of SEQ ID NO: 915466
gcuuuaagagcuugcaaau

SEQ ID NO: 1081859 - RNA, 19 nt, Artificial Sequence
  Description of Artificial Sequence: Synthetic oligonucleotide
  Antisense strand to SEQ ID NO: 1081858
auuugcaagcucuuaaagc

SEQ ID NO: 1081860 - RNA, 19 nt, Artificial Sequence
  Description of Artificial Sequence: Synthetic oligonucleotide
  Sense strand starting at position 776 of SEQ ID NO: 915466
augacaauguucuccacga

SEQ ID NO: 1081861 - RNA, 19 nt, Artificial Sequence
  Description of Artificial Sequence: Synthetic oligonucleotide
  Antisense strand to SEQ ID NO: 1081860
ucguggagaacauugucau

SEQ ID NO: 1081862 - RNA, 19 nt, Artificial Sequence
  Description of Artificial Sequence: Synthetic oligonucleotide
  Sense strand starting at position 777 of SEQ ID NO: 915466
ugacaauguucuccacgaa

SEQ ID NO: 1081863 - RNA, 19 nt, Artificial Sequence
  Description of Artificial Sequence: Synthetic oligonucleotide
  Antisense strand to SEQ ID NO: 1081862
uucguggagaacauuguca

SEQ ID NO: 1081864 - RNA, 19 nt, Artificial Sequence
  Description of Artificial Sequence: Synthetic oligonucleotide
  Sense strand starting at position 778 of SEQ ID NO: 915466
gacaauguucuccacgaag

SEQ ID NO: 1081865 - RNA, 19 nt, Artificial Sequence
  Description of Artificial Sequence: Synthetic oligonucleotide
  Antisense strand to SEQ ID NO: 1081864
cuucguggagaacauuguc

SEQ ID NO: 1081866 - RNA, 19 nt, Artificial Sequence
  Description of Artificial Sequence: Synthetic oligonucleotide
  Sense strand starting at position 780 of SEQ ID NO: 915466
caauguucuccacgaagga

SEQ ID NO: 1081867 - RNA, 19 nt, Artificial Sequence
  Description of Artificial Sequence: Synthetic oligonucleotide
  Antisense strand to SEQ ID NO: 1081866
uccuucguggagaacauug

SEQ ID NO: 1081868 - RNA, 19 nt, Artificial Sequence
  Description of Artificial Sequence: Synthetic oligonucleotide
  Sense strand starting at position 781 of SEQ ID NO: 915466
aauguucuccacgaaggau

SEQ ID NO: 1081869 - RNA, 19 nt, Artificial Sequence
  Description of Artificial Sequence: Synthetic oligonucleotide
  Antisense strand to SEQ ID NO: 1081868
auccuucguggagaacauu

SEQ ID NO: 1081870 - RNA, 19 nt, Artificial Sequence
  Description of Artificial Sequence: Synthetic oligonucleotide
  Sense strand starting at position 919 of SEQ ID NO: 915466
augagaaccucugaggaca

SEQ ID NO: 1081871 - RNA, 19 nt, Artificial Sequence
  Description of Artificial Sequence: Synthetic oligonucleotide
  Antisense strand to SEQ ID NO: 1081870
uguccucagagguucucau

SEQ ID NO: 1081872 - RNA, 19 nt, Artificial Sequence
  Description of Artificial Sequence: Synthetic oligonucleotide
  Sense strand starting at position 1830 of SEQ ID NO: 915466
aagaccuguuggccaaaga

SEQ ID NO: 1081873 - RNA, 19 nt, Artificial Sequence
  Description of Artificial Sequence: Synthetic oligonucleotide
  Antisense strand to SEQ ID NO: 1081872
ucuuuggccaacaggucuu

SEQ ID NO: 1081874 - RNA, 19 nt, Artificial Sequence
  Description of Artificial Sequence: Synthetic oligonucleotide
  Sense strand starting at position 1875 of SEQ ID NO: 915466
caauacuuaccauggguga

SEQ ID NO: 1081875 - RNA, 19 nt, Artificial Sequence
  Description of Artificial Sequence: Synthetic oligonucleotide
  Antisense strand to SEQ ID NO: 1081874
ucacccaugguaaguauug

SEQ ID NO: 1081876 - RNA, 19 nt, Artificial Sequence
  Description of Artificial Sequence: Synthetic oligonucleotide
  Sense strand starting at position 1876 of SEQ ID NO: 915466
aauacuuaccaugggugau

SEQ ID NO: 1081877 - RNA, 19 nt, Artificial Sequence
  Description of Artificial Sequence: Synthetic oligonucleotide
  Antisense strand to SEQ ID NO: 1081876
aucacccaugguaaguauu

SEQ ID NO: 1081878 - RNA, 19 nt, Artificial Sequence
  Description of Artificial Sequence: Synthetic oligonucleotide
  Sense strand starting at position 1983 of SEQ ID NO: 915466
gcugcaugcaucugagaug

SEQ ID NO: 1081879 - RNA, 19 nt, Artificial Sequence
  Description of Artificial Sequence: Synthetic oligonucleotide
  Antisense strand to SEQ ID NO: 1081878
caucucagaugcaugcagc

SEQ ID NO: 1081880 - RNA, 19 nt, Artificial Sequence
  Description of Artificial Sequence: Synthetic oligonucleotide
  Sense strand starting at position 1988 of SEQ ID NO: 915466
augcaucugagaugagaca

SEQ ID NO: 1081881 - RNA, 19 nt, Artificial Sequence
  Description of Artificial Sequence: Synthetic oligonucleotide
  Antisense strand to SEQ ID NO: 1081880
ugucucaucucagaugcau

SEQ ID NO: 1081882 - RNA, 19 nt, Artificial Sequence
  Description of Artificial Sequence: Synthetic oligonucleotide
  Sense strand starting at position 2033 of SEQ ID NO: 915466
agaucacauugcuaagaau

SEQ ID NO: 1081883 - RNA, 19 nt, Artificial Sequence
  Description of Artificial Sequence: Synthetic oligonucleotide
  Antisense strand to SEQ ID NO: 1081882
auucuuagcaaugugaucu

SEQ ID NO: 1081884 - RNA, 19 nt, Artificial Sequence
  Description of Artificial Sequence: Synthetic oligonucleotide
  Sense strand starting at position 2036 of SEQ ID NO: 915466
ucacauugcuaagaauaga

SEQ ID NO: 1081885 - RNA, 19 nt, Artificial Sequence
  Description of Artificial Sequence: Synthetic oligonucleotide
  Antisense strand to SEQ ID NO: 1081884
ucuauucuuagcaauguga

SEQ ID NO: 1081886 - RNA, 19 nt, Artificial Sequence
  Description of Artificial Sequence: Synthetic oligonucleotide
  Sense strand starting at position 2097 of SEQ ID NO: 915466
ugaggaaggccguaauggu

SEQ ID NO: 1081887 - RNA, 19 nt, Artificial Sequence
  Description of Artificial Sequence: Synthetic oligonucleotide
  Antisense strand to SEQ ID NO: 1081886
accauuacggccuuccuca

SEQ ID NO: 1081888 - RNA, 19 nt, Artificial Sequence
  Description of Artificial Sequence: Synthetic oligonucleotide
  Sense strand starting at position 2107 of SEQ ID NO: 915466
cguaauggugcuggagaaa

SEQ ID NO: 1081889 - RNA, 19 nt, Artificial Sequence
  Description of Artificial Sequence: Synthetic oligonucleotide
  Antisense strand to SEQ ID NO: 1081888
uuucuccagcaccauuacg

SEQ ID NO: 1081890 - RNA, 19 nt, Artificial Sequence
  Description of Artificial Sequence: Synthetic oligonucleotide
  Sense strand starting at position 2118 of SEQ ID NO: 915466
uggagaaauccgcagcuua

SEQ ID NO: 1081891 - RNA, 19 nt, Artificial Sequence
  Description of Artificial Sequence: Synthetic oligonucleotide
  Antisense strand to SEQ ID NO: 1081890
uaagcugcggauuucucca

SEQ ID NO: 1081892 - RNA, 19 nt, Artificial Sequence
  Description of Artificial Sequence: Synthetic oligonucleotide
  Sense strand starting at position 2139 of SEQ ID NO: 915466
agaggaugaucugagaauc

SEQ ID NO: 1081893 - RNA, 19 nt, Artificial Sequence
  Description of Artificial Sequence: Synthetic oligonucleotide
  Antisense strand to SEQ ID NO: 1081892
gauucucagaucauccucu

SEQ ID NO: 1081894 - RNA, 19 nt, Artificial Sequence
  Description of Artificial Sequence: Synthetic oligonucleotide
  Sense strand starting at position 2257 of SEQ ID NO: 915466
ccagcaucaccuggaaaua

SEQ ID NO: 1081895 - RNA, 19 nt, Artificial Sequence
  Description of Artificial Sequence: Synthetic oligonucleotide
  Antisense strand to SEQ ID NO: 1081894
uauuuccaggugaugcugg

SEQ ID NO: 1081896 - RNA, 19 nt, Artificial Sequence
  Description of Artificial Sequence: Synthetic oligonucleotide
  Sense strand starting at position 2431 of SEQ ID NO: 915466
ggagguauccaccauugca

SEQ ID NO: 1081897 - RNA, 19 nt, Artificial Sequence
  Description of Artificial Sequence: Synthetic oligonucleotide
  Antisense strand to SEQ ID NO: 1081896
ugcaaugguggauaccucc

SEQ ID NO: 1081898 - RNA, 19 nt, Artificial Sequence
  Description of Artificial Sequence: Synthetic oligonucleotide
  Sense strand starting at position 2744 of SEQ ID NO: 915466
cuggucuuaccauagaauu

SEQ ID NO: 1081899 - RNA, 19 nt, Artificial Sequence
  Description of Artificial Sequence: Synthetic oligonucleotide
  Antisense strand to SEQ ID NO: 1081898
aauucuaugguaagaccag

SEQ ID NO: 1081900 - RNA, 19 nt, Artificial Sequence
  Description of Artificial Sequence: Synthetic oligonucleotide
  Sense strand starting at position 2814 of SEQ ID NO: 915466
ugguuaaaucaaugaugca

SEQ ID NO: 1081901 - RNA, 19 nt, Artificial Sequence
  Description of Artificial Sequence: Synthetic oligonucleotide
  Antisense strand to SEQ ID NO: 1081900
ugcaucauugauuuaacca

SEQ ID NO: 1081902 - RNA, 19 nt, Artificial Sequence
  Description of Artificial Sequence: Synthetic oligonucleotide
  Sense strand starting at position 2836 of SEQ ID NO: 915466
gccacuauguggccauuaa

SEQ ID NO: 1081903 - RNA, 19 nt, Artificial Sequence
  Description of Artificial Sequence: Synthetic oligonucleotide
  Antisense strand to SEQ ID NO: 1081902
uuaauggccacauaguggc

SEQ ID NO: 1081904 - RNA, 19 nt, Artificial Sequence
  Description of Artificial Sequence: Synthetic oligonucleotide
  Sense strand starting at position 2837 of SEQ ID NO: 915466
ccacuauguggccauuaaa

SEQ ID NO: 1081905 - RNA, 19 nt, Artificial Sequence
  Description of Artificial Sequence: Synthetic oligonucleotide
  Antisense strand to SEQ ID NO: 1081904
uuuaauggccacauagugg

SEQ ID NO: 1081906 - RNA, 19 nt, Artificial Sequence
  Description of Artificial Sequence: Synthetic oligonucleotide
  Sense strand starting at position 2887 of SEQ ID NO: 915466
ggauaagugcuauggucua

SEQ ID NO: 1081907 - RNA, 19 nt, Artificial Sequence
  Description of Artificial Sequence: Synthetic oligonucleotide
  Antisense strand to SEQ ID NO: 1081906
uagaccauagcacuuaucc

SEQ ID NO: 1081908 - RNA, 19 nt, Artificial Sequence
  Description of Artificial Sequence: Synthetic oligonucleotide
  Sense strand starting at position 3006 of SEQ ID NO: 915466
ugggauuagugccucuauu

SEQ ID NO: 1081909 - RNA, 19 nt, Artificial Sequence
  Description of Artificial Sequence: Synthetic oligonucleotide
  Antisense strand to SEQ ID NO: 1081908
aauagaggcacuaauccca

SEQ ID NO: 1081910 - RNA, 19 nt, Artificial Sequence
  Description of Artificial Sequence: Synthetic oligonucleotide
  Sense strand starting at position 3111 of SEQ ID NO: 915466
aggagaguuuauuaacuau

SEQ ID NO: 1081911 - RNA, 19 nt, Artificial Sequence
  Description of Artificial Sequence: Synthetic oligonucleotide
  Antisense strand to SEQ ID NO: 1081910
auaguuaauaaacucuccu

SEQ ID NO: 1081912 - RNA, 19 nt, Artificial Sequence
  Description of Artificial Sequence: Synthetic oligonucleotide
  Sense strand starting at position 3342 of SEQ ID NO: 915466
auucgauugugcccaucua

SEQ ID NO: 1081913 - RNA, 19 nt, Artificial Sequence
  Description of Artificial Sequence: Synthetic oligonucleotide
  Antisense strand to SEQ ID NO: 1081912
uagaugggcacaaucgaau

SEQ ID NO: 1081914 - RNA, 19 nt, Artificial Sequence
  Description of Artificial Sequence: Synthetic oligonucleotide
  Sense strand starting at position 3391 of SEQ ID NO: 915466
acugacucagaauguuaau

SEQ ID NO: 1081915 - RNA, 19 nt, Artificial Sequence
  Description of Artificial Sequence: Synthetic oligonucleotide
  Antisense strand to SEQ ID NO: 1081914
auuaacauucugagucagu

SEQ ID NO: 1081916 - RNA, 19 nt, Artificial Sequence
  Description of Artificial Sequence: Synthetic oligonucleotide
  Sense strand starting at position 3524 of SEQ ID NO: 915466
ggaagacuguuugccucuu

SEQ ID NO: 1081917 - RNA, 19 nt, Artificial Sequence
  Description of Artificial Sequence: Synthetic oligonucleotide
  Antisense strand to SEQ ID NO: 1081916
aagaggcaaacagucuucc

SEQ ID NO: 1081918 - RNA, 19 nt, Artificial Sequence
  Description of Artificial Sequence: Synthetic oligonucleotide
  Sense strand starting at position 3661 of SEQ ID NO: 915466
uuauguugcuuauccauua

SEQ ID NO: 1081919 - RNA, 19 nt, Artificial Sequence
  Description of Artificial Sequence: Synthetic oligonucleotide
  Antisense strand to SEQ ID NO: 1081918
uaauggauaagcaacauaa

SEQ ID NO: 1081920 - RNA, 19 nt, Artificial Sequence
  Description of Artificial Sequence: Synthetic oligonucleotide
  Sense strand starting at position 67 of SEQ ID NO: 915467
cucagagaggcugaguauu

SEQ ID NO: 1081921 - RNA, 19 nt, Artificial Sequence
  Description of Artificial Sequence: Synthetic oligonucleotide
  Antisense strand to SEQ ID NO: 1081920
aauacucagccucucugag

SEQ ID NO: 1081922 - RNA, 19 nt, Artificial Sequence
  Description of Artificial Sequence: Synthetic oligonucleotide
  Sense strand starting at position 94 of SEQ ID NO: 915467
guucucacagccgauaaau

SEQ ID NO: 1081923 - RNA, 19 nt, Artificial Sequence
  Description of Artificial Sequence: Synthetic oligonucleotide
  Antisense strand to SEQ ID NO: 1081922
auuuaucggcugugagaac

SEQ ID NO: 1081924 - RNA, 19 nt, Artificial Sequence
  Description of Artificial Sequence: Synthetic oligonucleotide
  Sense strand starting at position 96 of SEQ ID NO: 915467
ucucacagccgauaaauga

SEQ ID NO: 1081925 - RNA, 19 nt, Artificial Sequence
  Description of Artificial Sequence: Synthetic oligonucleotide
  Antisense strand to SEQ ID NO: 1081924
ucauuuaucggcugugaga

SEQ ID NO: 1081926 - RNA, 19 nt, Artificial Sequence
  Description of Artificial Sequence: Synthetic oligonucleotide
  Sense strand starting at position 105 of SEQ ID NO: 915467
cgauaaaugacagagcuuu

SEQ ID NO: 1081927 - RNA, 19 nt, Artificial Sequence
  Description of Artificial Sequence: Synthetic oligonucleotide
  Antisense strand to SEQ ID NO: 1081926
aaagcucugucauuuaucg

SEQ ID NO: 1081928 - RNA, 19 nt, Artificial Sequence
  Description of Artificial Sequence: Synthetic oligonucleotide
  Sense strand starting at position 136 of SEQ ID NO: 915467
ugcucaagucuguaagacu

SEQ ID NO: 1081929 - RNA, 19 nt, Artificial Sequence
  Description of Artificial Sequence: Synthetic oligonucleotide
  Antisense strand to SEQ ID NO: 1081928
agucuuacagacuugagca

SEQ ID NO: 1081930 - RNA, 19 nt, Artificial Sequence
  Description of Artificial Sequence: Synthetic oligonucleotide
  Sense strand starting at position 143 of SEQ ID NO: 915467
gucuguaagacucaagguu

SEQ ID NO: 1081931 - RNA, 19 nt, Artificial Sequence
  Description of Artificial Sequence: Synthetic oligonucleotide
  Antisense strand to SEQ ID NO: 1081930
aaccuugagucuuacagac

SEQ ID NO: 1081932 - RNA, 19 nt, Artificial Sequence
  Description of Artificial Sequence: Synthetic oligonucleotide
  Sense strand starting at position 846 of SEQ ID NO: 915467
cccaaaggguuagcuauaa

SEQ ID NO: 1081933 - RNA, 19 nt, Artificial Sequence
  Description of Artificial Sequence: Synthetic oligonucleotide
  Antisense strand to SEQ ID NO: 1081932
uuauagcuaacccuuuggg

SEQ ID NO: 1081934 - RNA, 19 nt, Artificial Sequence
  Description of Artificial Sequence: Synthetic oligonucleotide
  Sense strand starting at position 871 of SEQ ID NO: 915467
uugcuuugccauuagauac

SEQ ID NO: 1081935 - RNA, 19 nt, Artificial Sequence
  Description of Artificial Sequence: Synthetic oligonucleotide
  Antisense strand to SEQ ID NO: 1081934
guaucuaauggcaaagcaa

SEQ ID NO: 1081936 - RNA, 19 nt, Artificial Sequence
  Description of Artificial Sequence: Synthetic oligonucleotide
  Sense strand starting at position 878 of SEQ ID NO: 915467
gccauuagauacguacaau

SEQ ID NO: 1081937 - RNA, 19 nt, Artificial Sequence
  Description of Artificial Sequence: Synthetic oligonucleotide
  Antisense strand to SEQ ID NO: 1081936
auuguacguaucuaauggc

SEQ ID NO: 1081938 - RNA, 19 nt, Artificial Sequence
  Description of Artificial Sequence: Synthetic oligonucleotide
  Sense strand starting at position 1065 of SEQ ID NO: 915467
gcagcaguaauccagggaa

SEQ ID NO: 1081939 - RNA, 19 nt, Artificial Sequence
  Description of Artificial Sequence: Synthetic oligonucleotide
  Antisense strand to SEQ ID NO: 1081938
uucccuggauuacugcugc

SEQ ID NO: 1081940 - RNA, 19 nt, Artificial Sequence
  Description of Artificial Sequence: Synthetic oligonucleotide
  Sense strand starting at position 1067 of SEQ ID NO: 915467
agcaguaauccagggaaua

SEQ ID NO: 1081941 - RNA, 19 nt, Artificial Sequence
  Description of Artificial Sequence: Synthetic oligonucleotide
  Antisense strand to SEQ ID NO: 1081940
uauucccuggauuacugcu

SEQ ID NO: 1081942 - RNA, 19 nt, Artificial Sequence
  Description of Artificial Sequence: Synthetic oligonucleotide
  Sense strand starting at position 1068 of SEQ ID NO: 915467
gcaguaauccagggaauau

SEQ ID NO: 1081943 - RNA, 19 nt, Artificial Sequence
  Description of Artificial Sequence: Synthetic oligonucleotide
  Antisense strand to SEQ ID NO: 1081942
auauucccuggauuacugc

SEQ ID NO: 1081944 - RNA, 19 nt, Artificial Sequence
  Description of Artificial Sequence: Synthetic oligonucleotide
  Sense strand starting at position 1138 of SEQ ID NO: 915467
uuguuacaguacucaauau

SEQ ID NO: 1081945 - RNA, 19 nt, Artificial Sequence
  Description of Artificial Sequence: Synthetic oligonucleotide
  Antisense strand to SEQ ID NO: 1081944
auauugaguacuguaacaa

SEQ ID NO: 1081946 - RNA, 19 nt, Artificial Sequence
  Description of Artificial Sequence: Synthetic oligonucleotide
  Sense strand starting at position 1704 of SEQ ID NO: 915467
ccggacauauuaccuaaga

SEQ ID NO: 1081947 - RNA, 19 nt, Artificial Sequence
  Description of Artificial Sequence: Synthetic oligonucleotide
  Antisense strand to SEQ ID NO: 1081946
ucuuagguaauauguccgg

SEQ ID NO: 1081948 - RNA, 19 nt, Artificial Sequence
  Description of Artificial Sequence: Synthetic oligonucleotide
  Sense strand starting at position 2897 of SEQ ID NO: 915467
aagagugugucacccuaau

SEQ ID NO: 1081949 - RNA, 19 nt, Artificial Sequence
  Description of Artificial Sequence: Synthetic oligonucleotide
  Antisense strand to SEQ ID NO: 1081948
auuagggugacacacucuu

SEQ ID NO: 1081950 - RNA, 19 nt, Artificial Sequence
  Description of Artificial Sequence: Synthetic oligonucleotide
  Sense strand starting at position 2908 of SEQ ID NO: 915467
acccuaauugucuauguaa

SEQ ID NO: 1081951 - RNA, 19 nt, Artificial Sequence
  Description of Artificial Sequence: Synthetic oligonucleotide
  Antisense strand to SEQ ID NO: 1081950
uuacauagacaauuagggu

SEQ ID NO: 1081952 - RNA, 19 nt, Artificial Sequence
  Description of Artificial Sequence: Synthetic oligonucleotide
  Sense strand starting at position 3021 of SEQ ID NO: 915467
cugcuuuaagaguacagau

SEQ ID NO: 1081953 - RNA, 19 nt, Artificial Sequence
  Description of Artificial Sequence: Synthetic oligonucleotide
  Antisense strand to SEQ ID NO: 1081952
aucuguacucuuaaagcag

SEQ ID NO: 1081954 - RNA, 19 nt, Artificial Sequence
  Description of Artificial Sequence: Synthetic oligonucleotide
  Sense strand starting at position 3033 of SEQ ID NO: 915467
uacagauggugaccauauu

SEQ ID NO: 1081955 - RNA, 19 nt, Artificial Sequence
  Description of Artificial Sequence: Synthetic oligonucleotide
  Antisense strand to SEQ ID NO: 1081954
aauauggucaccaucugua

SEQ ID NO: 1081956 - RNA, 19 nt, Artificial Sequence
  Description of Artificial Sequence: Synthetic oligonucleotide
  Sense strand starting at position 3065 of SEQ ID NO: 915467
guaugugacagugauugag

SEQ ID NO: 1081957 - RNA, 19 nt, Artificial Sequence
  Description of Artificial Sequence: Synthetic oligonucleotide
  Antisense strand to SEQ ID NO: 1081956
cucaaucacugucacauac

SEQ ID NO: 1081958 - RNA, 19 nt, Artificial Sequence
  Description of Artificial Sequence: Synthetic oligonucleotide
  Sense strand starting at position 3067 of SEQ ID NO: 915467
augugacagugauugagga

SEQ ID NO: 1081959 - RNA, 19 nt, Artificial Sequence
  Description of Artificial Sequence: Synthetic oligonucleotide
  Antisense strand to SEQ ID NO: 1081958
uccucaaucacugucacau

SEQ ID NO: 1081960 - RNA, 19 nt, Artificial Sequence
  Description of Artificial Sequence: Synthetic oligonucleotide
  Sense strand starting at position 3068 of SEQ ID NO: 915467
ugugacagugauugaggau

SEQ ID NO: 1081961 - RNA, 19 nt, Artificial Sequence
  Description of Artificial Sequence: Synthetic oligonucleotide
  Antisense strand to SEQ ID NO: 1081960
auccucaaucacugucaca

SEQ ID NO: 1081962 - RNA, 19 nt, Artificial Sequence
  Description of Artificial Sequence: Synthetic oligonucleotide
  Sense strand starting at position 3075 of SEQ ID NO: 915467
gugauugaggauuagagcu

SEQ ID NO: 1081963 - RNA, 19 nt, Artificial Sequence
  Description of Artificial Sequence: Synthetic oligonucleotide
  Antisense strand to SEQ ID NO: 1081962
agcucuaauccucaaucac

SEQ ID NO: 1081964 - RNA, 19 nt, Artificial Sequence
  Description of Artificial Sequence: Synthetic oligonucleotide
  Sense strand starting at position 3081 of SEQ ID NO: 915467
gaggauuagagcuguguca

SEQ ID NO: 1081965 - RNA, 19 nt, Artificial Sequence
  Description of Artificial Sequence: Synthetic oligonucleotide
  Antisense strand to SEQ ID NO: 1081964
ugacacagcucuaauccuc

SEQ ID NO: 1081966 - RNA, 19 nt, Artificial Sequence
  Description of Artificial Sequence: Synthetic oligonucleotide
  Sense strand starting at position 3124 of SEQ ID NO: 915467
ggugguugugacaguguga

SEQ ID NO: 1081967 - RNA, 19 nt, Artificial Sequence
  Description of Artificial Sequence: Synthetic oligonucleotide
  Antisense strand to SEQ ID NO: 1081966
ucacacugucacaaccacc

SEQ ID NO: 1081968 - RNA, 19 nt, Artificial Sequence
  Description of Artificial Sequence: Synthetic oligonucleotide
  Sense strand starting at position 3137 of SEQ ID NO: 915467
gugugaagaaugggacagu

SEQ ID NO: 1081969 - RNA, 19 nt, Artificial Sequence
  Description of Artificial Sequence: Synthetic oligonucleotide
  Antisense strand to SEQ ID NO: 1081968
acugucccauucuucacac

SEQ ID NO: 1081970 - RNA, 19 nt, Artificial Sequence
  Description of Artificial Sequence: Synthetic oligonucleotide
  Sense strand starting at position 3154 of SEQ ID NO: 915467
guggcugagcauggagaau

SEQ ID NO: 1081971 - RNA, 19 nt, Artificial Sequence
  Description of Artificial Sequence: Synthetic oligonucleotide
  Antisense strand to SEQ ID NO: 1081970
auucuccaugcucagccac

SEQ ID NO: 1081972 - RNA, 19 nt, Artificial Sequence
  Description of Artificial Sequence: Synthetic oligonucleotide
  Sense strand starting at position 3167 of SEQ ID NO: 915467
gagaauaagucagugauug

SEQ ID NO: 1081973 - RNA, 19 nt, Artificial Sequence
  Description of Artificial Sequence: Synthetic oligonucleotide
  Antisense strand to SEQ ID NO: 1081972
caaucacugacuuauucuc

SEQ ID NO: 1081974 - RNA, 19 nt, Artificial Sequence
  Description of Artificial Sequence: Synthetic oligonucleotide
  Sense strand starting at position 3168 of SEQ ID NO: 915467
agaauaagucagugauuga

SEQ ID NO: 1081975 - RNA, 19 nt, Artificial Sequence
  Description of Artificial Sequence: Synthetic oligonucleotide
  Antisense strand to SEQ ID NO: 1081974
ucaaucacugacuuauucu

SEQ ID NO: 1081976 - RNA, 19 nt, Artificial Sequence
  Description of Artificial Sequence: Synthetic oligonucleotide
  Sense strand starting at position 3201 of SEQ ID NO: 915467
gacggaaugugacagauuu

SEQ ID NO: 1081977 - RNA, 19 nt, Artificial Sequence
  Description of Artificial Sequence: Synthetic oligonucleotide
  Antisense strand to SEQ ID NO: 1081976
aaaucugucacauuccguc

SEQ ID NO: 1081978 - RNA, 19 nt, Artificial Sequence
  Description of Artificial Sequence: Synthetic oligonucleotide
  Sense strand starting at position 3249 of SEQ ID NO: 915467
uauguuuaugugugacaaa

SEQ ID NO: 1081979 - RNA, 19 nt, Artificial Sequence
  Description of Artificial Sequence: Synthetic oligonucleotide
  Antisense strand to SEQ ID NO: 1081978
uuugucacacauaaacaua

SEQ ID NO: 1081980 - RNA, 19 nt, Artificial Sequence
  Description of Artificial Sequence: Synthetic oligonucleotide
  Sense strand starting at position 3260 of SEQ ID NO: 915467
gugacaaaugugcaguaau

SEQ ID NO: 1081981 - RNA, 19 nt, Artificial Sequence
  Description of Artificial Sequence: Synthetic oligonucleotide
  Antisense strand to SEQ ID NO: 1081980
auuacugcacauuugucac

SEQ ID NO: 1081982 - RNA, 19 nt, Artificial Sequence
  Description of Artificial Sequence: Synthetic oligonucleotide
  Sense strand starting at position 3267 of SEQ ID NO: 915467
augugcaguaauuggauau

SEQ ID NO: 1081983 - RNA, 19 nt, Artificial Sequence
  Description of Artificial Sequence: Synthetic oligonucleotide
  Antisense strand to SEQ ID NO: 1081982
auauccaauuacugcacau

SEQ ID NO: 1081984 - RNA, 19 nt, Artificial Sequence
  Description of Artificial Sequence: Synthetic oligonucleotide
  Sense strand starting at position 3280 of SEQ ID NO: 915467
ggauaugaggagugugagu

SEQ ID NO: 1081985 - RNA, 19 nt, Artificial Sequence
  Description of Artificial Sequence: Synthetic oligonucleotide
  Antisense strand to SEQ ID NO: 1081984
acucacacuccucauaucc

SEQ ID NO: 1081986 - RNA, 19 nt, Artificial Sequence
  Description of Artificial Sequence: Synthetic oligonucleotide
  Sense strand starting at position 3573 of SEQ ID NO: 915467
gcagcuguucucuugguau

SEQ ID NO: 1081987 - RNA, 19 nt, Artificial Sequence
  Description of Artificial Sequence: Synthetic oligonucleotide
  Antisense strand to SEQ ID NO: 1081986
auaccaagagaacagcugc

SEQ ID NO: 1081988 - RNA, 19 nt, Artificial Sequence
  Description of Artificial Sequence: Synthetic oligonucleotide
  Sense strand starting at position 3590 of SEQ ID NO: 915467
auucucacuccgggaggaa

SEQ ID NO: 1081989 - RNA, 19 nt, Artificial Sequence
  Description of Artificial Sequence: Synthetic oligonucleotide
  Antisense strand to SEQ ID NO: 1081988
uuccucccggagugagaau

SEQ ID NO: 1081990 - RNA, 19 nt, Artificial Sequence
  Description of Artificial Sequence: Synthetic oligonucleotide
  Sense strand starting at position 3611 of SEQ ID NO: 915467
aagucagaaguuugacuau

SEQ ID NO: 1081991 - RNA, 19 nt, Artificial Sequence
  Description of Artificial Sequence: Synthetic oligonucleotide
  Antisense strand to SEQ ID NO: 1081990
auagucaaacuucugacuu

SEQ ID NO: 1081992 - RNA, 19 nt, Artificial Sequence
  Description of Artificial Sequence: Synthetic oligonucleotide
  Sense strand starting at position 3631 of SEQ ID NO: 915467
auaagacugccaugcuaaa

SEQ ID NO: 1081993 - RNA, 19 nt, Artificial Sequence
  Description of Artificial Sequence: Synthetic oligonucleotide
  Antisense strand to SEQ ID NO: 1081992
uuuagcauggcagucuuau

SEQ ID NO: 1081994 - RNA, 19 nt, Artificial Sequence
  Description of Artificial Sequence: Synthetic oligonucleotide
  Sense strand starting at position 3669 of SEQ ID NO: 915467
ccagucgaagucugauuga

SEQ ID NO: 1081995 - RNA, 19 nt, Artificial Sequence
  Description of Artificial Sequence: Synthetic oligonucleotide
  Antisense strand to SEQ ID NO: 1081994
ucaaucagacuucgacugg

SEQ ID NO: 1081996 - RNA, 19 nt, Artificial Sequence
  Description of Artificial Sequence: Synthetic oligonucleotide
  Sense strand starting at position 3682 of SEQ ID NO: 915467
gauugauggccaggagcaa

SEQ ID NO: 1081997 - RNA, 19 nt, Artificial Sequence
  Description of Artificial Sequence: Synthetic oligonucleotide
  Antisense strand to SEQ ID NO: 1081996
uugcuccuggccaucaauc

SEQ ID NO: 1081998 - RNA, 19 nt, Artificial Sequence
  Description of Artificial Sequence: Synthetic oligonucleotide
  Sense strand starting at position 3778 of SEQ ID NO: 915467
gugagacaucuuggacacu

SEQ ID NO: 1081999 - RNA, 19 nt, Artificial Sequence
  Description of Artificial Sequence: Synthetic oligonucleotide
  Antisense strand to SEQ ID NO: 1081998
aguguccaagaugucucac

SEQ ID NO: 1082000 - RNA, 19 nt, Artificial Sequence
  Description of Artificial Sequence: Synthetic oligonucleotide
  Sense strand starting at position 147 of SEQ ID NO: 915468
cccaaaggguuagcuauaa

SEQ ID NO: 1082001 - RNA, 19 nt, Artificial Sequence
  Description of Artificial Sequence: Synthetic oligonucleotide
  Antisense strand to SEQ ID NO: 1082000
uuauagcuaacccuuuggg

SEQ ID NO: 1082002 - RNA, 19 nt, Artificial Sequence
  Description of Artificial Sequence: Synthetic oligonucleotide
  Sense strand starting at position 172 of SEQ ID NO: 915468
uugcuuugccauuagauac

SEQ ID NO: 1082003 - RNA, 19 nt, Artificial Sequence
  Description of Artificial Sequence: Synthetic oligonucleotide
  Antisense strand to SEQ ID NO: 1082002
guaucuaauggcaaagcaa

SEQ ID NO: 1082004 - RNA, 19 nt, Artificial Sequence
  Description of Artificial Sequence: Synthetic oligonucleotide
  Sense strand starting at position 179 of SEQ ID NO: 915468
gccauuagauacguacaau

SEQ ID NO: 1082005 - RNA, 19 nt, Artificial Sequence
  Description of Artificial Sequence: Synthetic oligonucleotide
  Antisense strand to SEQ ID NO: 1082004
auuguacguaucuaauggc

SEQ ID NO: 1082006 - RNA, 19 nt, Artificial Sequence
  Description of Artificial Sequence: Synthetic oligonucleotide
  Sense strand starting at position 366 of SEQ ID NO: 915468
gcagcaguaauccagggaa

SEQ ID NO: 1082007 - RNA, 19 nt, Artificial Sequence
  Description of Artificial Sequence: Synthetic oligonucleotide
  Antisense strand to SEQ ID NO: 1082006
uucccuggauuacugcugc

SEQ ID NO: 1082008 - RNA, 19 nt, Artificial Sequence
  Description of Artificial Sequence: Synthetic oligonucleotide
  Sense strand starting at position 368 of SEQ ID NO: 915468
agcaguaauccagggaaua

SEQ ID NO: 1082009 - RNA, 19 nt, Artificial Sequence
  Description of Artificial Sequence: Synthetic oligonucleotide
  Antisense strand to SEQ ID NO: 1082008
uauucccuggauuacugcu

SEQ ID NO: 1082010 - RNA, 19 nt, Artificial Sequence
  Description of Artificial Sequence: Synthetic oligonucleotide
  Sense strand starting at position 369 of SEQ ID NO: 915468
gcaguaauccagggaauau

SEQ ID NO: 1082011 - RNA, 19 nt, Artificial Sequence
  Description of Artificial Sequence: Synthetic oligonucleotide
  Antisense strand to SEQ ID NO: 1082010
auauucccuggauuacugc

SEQ ID NO: 1082012 - RNA, 19 nt, Artificial Sequence
  Description of Artificial Sequence: Synthetic oligonucleotide
  Sense strand starting at position 439 of SEQ ID NO: 915468
uuguuacaguacucaauau

SEQ ID NO: 1082013 - RNA, 19 nt, Artificial Sequence
  Description of Artificial Sequence: Synthetic oligonucleotide
  Antisense strand to SEQ ID NO: 1082012
auauugaguacuguaacaa

SEQ ID NO: 1082014 - RNA, 19 nt, Artificial Sequence
  Description of Artificial Sequence: Synthetic oligonucleotide
  Sense strand starting at position 1005 of SEQ ID NO: 915468
ccggacauauuaccuaaga

SEQ ID NO: 1082015 - RNA, 19 nt, Artificial Sequence
  Description of Artificial Sequence: Synthetic oligonucleotide
  Antisense strand to SEQ ID NO: 1082014
ucuuagguaauauguccgg

SEQ ID NO: 1082016 - RNA, 19 nt, Artificial Sequence
  Description of Artificial Sequence: Synthetic oligonucleotide
  Sense strand starting at position 2198 of SEQ ID NO: 915468
aagagugugucacccuaau

SEQ ID NO: 1082017 - RNA, 19 nt, Artificial Sequence
  Description of Artificial Sequence: Synthetic oligonucleotide
  Antisense strand to SEQ ID NO: 1082016
auuagggugacacacucuu

SEQ ID NO: 1082018 - RNA, 19 nt, Artificial Sequence
  Description of Artificial Sequence: Synthetic oligonucleotide
  Sense strand starting at position 2209 of SEQ ID NO: 915468
acccuaauugucuauguaa

SEQ ID NO: 1082019 - RNA, 19 nt, Artificial Sequence
  Description of Artificial Sequence: Synthetic oligonucleotide
  Antisense strand to SEQ ID NO: 1082018
uuacauagacaauuagggu

SEQ ID NO: 1082020 - RNA, 19 nt, Artificial Sequence
  Description of Artificial Sequence: Synthetic oligonucleotide
  Sense strand starting at position 2217 of SEQ ID NO: 915468
ugucuauguaagggauugu

SEQ ID NO: 1082021 - RNA, 19 nt, Artificial Sequence
  Description of Artificial Sequence: Synthetic oligonucleotide
  Antisense strand to SEQ ID NO: 1082020
acaaucccuuacauagaca

SEQ ID NO: 1082022 - RNA, 19 nt, Artificial Sequence
  Description of Artificial Sequence: Synthetic oligonucleotide
  Sense strand starting at position 2322 of SEQ ID NO: 915468
cugcuuuaagaguacagau

SEQ ID NO: 1082023 - RNA, 19 nt, Artificial Sequence
  Description of Artificial Sequence: Synthetic oligonucleotide
  Antisense strand to SEQ ID NO: 1082022
aucuguacucuuaaagcag

SEQ ID NO: 1082024 - RNA, 19 nt, Artificial Sequence
  Description of Artificial Sequence: Synthetic oligonucleotide
  Sense strand starting at position 2334 of SEQ ID NO: 915468
uacagauggugaccauauu

SEQ ID NO: 1082025 - RNA, 19 nt, Artificial Sequence
  Description of Artificial Sequence: Synthetic oligonucleotide
  Antisense strand to SEQ ID NO: 1082024
aauauggucaccaucugua

SEQ ID NO: 1082026 - RNA, 19 nt, Artificial Sequence
  Description of Artificial Sequence: Synthetic oligonucleotide
  Sense strand starting at position 2366 of SEQ ID NO: 915468
guaugugacagugauugag

SEQ ID NO: 1082027 - RNA, 19 nt, Artificial Sequence
  Description of Artificial Sequence: Synthetic oligonucleotide
  Antisense strand to SEQ ID NO: 1082026
cucaaucacugucacauac

SEQ ID NO: 1082028 - RNA, 19 nt, Artificial Sequence
  Description of Artificial Sequence: Synthetic oligonucleotide
  Sense strand starting at position 2368 of SEQ ID NO: 915468
augugacagugauugagga

SEQ ID NO: 1082029 - RNA, 19 nt, Artificial Sequence
  Description of Artificial Sequence: Synthetic oligonucleotide
  Antisense strand to SEQ ID NO: 1082028
uccucaaucacugucacau

SEQ ID NO: 1082030 - RNA, 19 nt, Artificial Sequence
  Description of Artificial Sequence: Synthetic oligonucleotide
  Sense strand starting at position 2369 of SEQ ID NO: 915468
ugugacagugauugaggau

SEQ ID NO: 1082031 - RNA, 19 nt, Artificial Sequence
  Description of Artificial Sequence: Synthetic oligonucleotide
  Antisense strand to SEQ ID NO: 1082030
auccucaaucacugucaca

SEQ ID NO: 1082032 - RNA, 19 nt, Artificial Sequence
  Description of Artificial Sequence: Synthetic oligonucleotide
  Sense strand starting at position 2376 of SEQ ID NO: 915468
gugauugaggauuagagcu

SEQ ID NO: 1082033 - RNA, 19 nt, Artificial Sequence
  Description of Artificial Sequence: Synthetic oligonucleotide
  Antisense strand to SEQ ID NO: 1082032
agcucuaauccucaaucac

SEQ ID NO: 1082034 - RNA, 19 nt, Artificial Sequence
  Description of Artificial Sequence: Synthetic oligonucleotide
  Sense strand starting at position 2382 of SEQ ID NO: 915468
gaggauuagagcuguguca

SEQ ID NO: 1082035 - RNA, 19 nt, Artificial Sequence
  Description of Artificial Sequence: Synthetic oligonucleotide
  Antisense strand to SEQ ID NO: 1082034
ugacacagcucuaauccuc

SEQ ID NO: 1082036 - RNA, 19 nt, Artificial Sequence
  Description of Artificial Sequence: Synthetic oligonucleotide
  Sense strand starting at position 2384 of SEQ ID NO: 915468
ggauuagagcugugucaca

SEQ ID NO: 1082037 - RNA, 19 nt, Artificial Sequence
  Description of Artificial Sequence: Synthetic oligonucleotide
  Antisense strand to SEQ ID NO: 1082036
ugugacacagcucuaaucc

SEQ ID NO: 1082038 - RNA, 19 nt, Artificial Sequence
  Description of Artificial Sequence: Synthetic oligonucleotide
  Sense strand starting at position 2425 of SEQ ID NO: 915468
ggugguugugacaguguga

SEQ ID NO: 1082039 - RNA, 19 nt, Artificial Sequence
  Description of Artificial Sequence: Synthetic oligonucleotide
  Antisense strand to SEQ ID NO: 1082038
ucacacugucacaaccacc

SEQ ID NO: 1082040 - RNA, 19 nt, Artificial Sequence
  Description of Artificial Sequence: Synthetic oligonucleotide
  Sense strand starting at position 2438 of SEQ ID NO: 915468
gugugaagaaugggacagu

SEQ ID NO: 1082041 - RNA, 19 nt, Artificial Sequence
  Description of Artificial Sequence: Synthetic oligonucleotide
  Antisense strand to SEQ ID NO: 1082040
acugucccauucuucacac

SEQ ID NO: 1082042 - RNA, 19 nt, Artificial Sequence
  Description of Artificial Sequence: Synthetic oligonucleotide
  Sense strand starting at position 2455 of SEQ ID NO: 915468
guggcugagcauggagaau

SEQ ID NO: 1082043 - RNA, 19 nt, Artificial Sequence
  Description of Artificial Sequence: Synthetic oligonucleotide
  Antisense strand to SEQ ID NO: 1082042
auucuccaugcucagccac

SEQ ID NO: 1082044 - RNA, 19 nt, Artificial Sequence
  Description of Artificial Sequence: Synthetic oligonucleotide
  Sense strand starting at position 2468 of SEQ ID NO: 915468
gagaauaagucagugauug

SEQ ID NO: 1082045 - RNA, 19 nt, Artificial Sequence
  Description of Artificial Sequence: Synthetic oligonucleotide
  Antisense strand to SEQ ID NO: 1082044
caaucacugacuuauucuc

SEQ ID NO: 1082046 - RNA, 19 nt, Artificial Sequence
  Description of Artificial Sequence: Synthetic oligonucleotide
  Sense strand starting at position 2469 of SEQ ID NO: 915468
agaauaagucagugauuga

SEQ ID NO: 1082047 - RNA, 19 nt, Artificial Sequence
  Description of Artificial Sequence: Synthetic oligonucleotide
  Antisense strand to SEQ ID NO: 1082046
ucaaucacugacuuauucu

SEQ ID NO: 1082048 - RNA, 19 nt, Artificial Sequence
  Description of Artificial Sequence: Synthetic oligonucleotide
  Sense strand starting at position 2502 of SEQ ID NO: 915468
gacggaaugugacagauuu

SEQ ID NO: 1082049 - RNA, 19 nt, Artificial Sequence
  Description of Artificial Sequence: Synthetic oligonucleotide
  Antisense strand to SEQ ID NO: 1082048
aaaucugucacauuccguc

SEQ ID NO: 1082050 - RNA, 19 nt, Artificial Sequence
  Description of Artificial Sequence: Synthetic oligonucleotide
  Sense strand starting at position 2549 of SEQ ID NO: 915468
cuauguuuaugugugacaa

SEQ ID NO: 1082051 - RNA, 19 nt, Artificial Sequence
  Description of Artificial Sequence: Synthetic oligonucleotide
  Antisense strand to SEQ ID NO: 1082050
uugucacacauaaacauag

SEQ ID NO: 1082052 - RNA, 19 nt, Artificial Sequence
  Description of Artificial Sequence: Synthetic oligonucleotide
  Sense strand starting at position 2550 of SEQ ID NO: 915468
uauguuuaugugugacaaa

SEQ ID NO: 1082053 - RNA, 19 nt, Artificial Sequence
  Description of Artificial Sequence: Synthetic oligonucleotide
  Antisense strand to SEQ ID NO: 1082052
uuugucacacauaaacaua

SEQ ID NO: 1082054 - RNA, 19 nt, Artificial Sequence
  Description of Artificial Sequence: Synthetic oligonucleotide
  Sense strand starting at position 2561 of SEQ ID NO: 915468
gugacaaaugugcaguaau

SEQ ID NO: 1082055 - RNA, 19 nt, Artificial Sequence
  Description of Artificial Sequence: Synthetic oligonucleotide
  Antisense strand to SEQ ID NO: 1082054
auuacugcacauuugucac

SEQ ID NO: 1082056 - RNA, 19 nt, Artificial Sequence
  Description of Artificial Sequence: Synthetic oligonucleotide
  Sense strand starting at position 2568 of SEQ ID NO: 915468
augugcaguaauuggauau

SEQ ID NO: 1082057 - RNA, 19 nt, Artificial Sequence
  Description of Artificial Sequence: Synthetic oligonucleotide
  Antisense strand to SEQ ID NO: 1082056
auauccaauuacugcacau

SEQ ID NO: 1082058 - RNA, 19 nt, Artificial Sequence
  Description of Artificial Sequence: Synthetic oligonucleotide
  Sense strand starting at position 2581 of SEQ ID NO: 915468
ggauaugaggagugugagu

SEQ ID NO: 1082059 - RNA, 19 nt, Artificial Sequence
  Description of Artificial Sequence: Synthetic oligonucleotide
  Antisense strand to SEQ ID NO: 1082058
acucacacuccucauaucc

SEQ ID NO: 1082060 - RNA, 19 nt, Artificial Sequence
  Description of Artificial Sequence: Synthetic oligonucleotide
  Sense strand starting at position 2874 of SEQ ID NO: 915468
gcagcuguucucuugguau

SEQ ID NO: 1082061 - RNA, 19 nt, Artificial Sequence
  Description of Artificial Sequence: Synthetic oligonucleotide
  Antisense strand to SEQ ID NO: 1082060
auaccaagagaacagcugc

SEQ ID NO: 1082062 - RNA, 19 nt, Artificial Sequence
  Description of Artificial Sequence: Synthetic oligonucleotide
  Sense strand starting at position 2891 of SEQ ID NO: 915468
auucucacuccgggaggaa

SEQ ID NO: 1082063 - RNA, 19 nt, Artificial Sequence
  Description of Artificial Sequence: Synthetic oligonucleotide
  Antisense strand to SEQ ID NO: 1082062
uuccucccggagugagaau

SEQ ID NO: 1082064 - RNA, 19 nt, Artificial Sequence
  Description of Artificial Sequence: Synthetic oligonucleotide
  Sense strand starting at position 2912 of SEQ ID NO: 915468
aagucagaaguuugacuau

SEQ ID NO: 1082065 - RNA, 19 nt, Artificial Sequence
  Description of Artificial Sequence: Synthetic oligonucleotide
  Antisense strand to SEQ ID NO: 1082064
auagucaaacuucugacuu

SEQ ID NO: 1082066 - RNA, 19 nt, Artificial Sequence
  Description of Artificial Sequence: Synthetic oligonucleotide
  Sense strand starting at position 2932 of SEQ ID NO: 915468
auaagacugccaugcuaaa

SEQ ID NO: 1082067 - RNA, 19 nt, Artificial Sequence
  Description of Artificial Sequence: Synthetic oligonucleotide
  Antisense strand to SEQ ID NO: 1082066
uuuagcauggcagucuuau

SEQ ID NO: 1082068 - RNA, 19 nt, Artificial Sequence
  Description of Artificial Sequence: Synthetic oligonucleotide
  Sense strand starting at position 2970 of SEQ ID NO: 915468
ccagucgaagucugauuga

SEQ ID NO: 1082069 - RNA, 19 nt, Artificial Sequence
  Description of Artificial Sequence: Synthetic oligonucleotide
  Antisense strand to SEQ ID NO: 1082068
ucaaucagacuucgacugg

SEQ ID NO: 1082070 - RNA, 19 nt, Artificial Sequence
  Description of Artificial Sequence: Synthetic oligonucleotide
  Sense strand starting at position 2983 of SEQ ID NO: 915468
gauugauggccaggagcaa

SEQ ID NO: 1082071 - RNA, 19 nt, Artificial Sequence
  Description of Artificial Sequence: Synthetic oligonucleotide
  Antisense strand to SEQ ID NO: 1082070
uugcuccuggccaucaauc

SEQ ID NO: 1082072 - RNA, 19 nt, Artificial Sequence
  Description of Artificial Sequence: Synthetic oligonucleotide
  Sense strand starting at position 3079 of SEQ ID NO: 915468
gugagacaucuuggacacu

SEQ ID NO: 1082073 - RNA, 19 nt, Artificial Sequence
  Description of Artificial Sequence: Synthetic oligonucleotide
  Antisense strand to SEQ ID NO: 1082072
aguguccaagaugucucac

SEQ ID NO: 1082074 - RNA, 19 nt, Artificial Sequence
  Description of Artificial Sequence: Synthetic oligonucleotide
  Sense strand starting at position 3359 of SEQ ID NO: 915468
ggcacaugccaucaagauc

SEQ ID NO: 1082075 - RNA, 19 nt, Artificial Sequence
  Description of Artificial Sequence: Synthetic oligonucleotide
  Antisense strand to SEQ ID NO: 1082074
gaucuugauggcaugugcc

SEQ ID NO: 1082076 - RNA, 19 nt, Artificial Sequence
  Description of Artificial Sequence: Synthetic oligonucleotide
  Sense strand starting at position 3608 of SEQ ID NO: 915468
gcacuuguacucuccgcua

SEQ ID NO: 1082077 - RNA, 19 nt, Artificial Sequence
  Description of Artificial Sequence: Synthetic oligonucleotide
  Antisense strand to SEQ ID NO: 1082076
uagcggagaguacaagugc

SEQ ID NO: 1082078 - RNA, 19 nt, Artificial Sequence
  Description of Artificial Sequence: Synthetic oligonucleotide
  Sense strand starting at position 3874 of SEQ ID NO: 915468
ggcggauugcucgcuugag

SEQ ID NO: 1082079 - RNA, 19 nt, Artificial Sequence
  Description of Artificial Sequence: Synthetic oligonucleotide
  Antisense strand to SEQ ID NO: 1082078
cucaagcgagcaauccgcc

SEQ ID NO: 1082080 - RNA, 19 nt, Artificial Sequence
  Description of Artificial Sequence: Synthetic oligonucleotide
  Sense strand starting at position 112 of SEQ ID NO: 915469
uugcucuuuggucagcuaa

SEQ ID NO: 1082081 - RNA, 19 nt, Artificial Sequence
  Description of Artificial Sequence: Synthetic oligonucleotide
  Antisense strand to SEQ ID NO: 1082080
uuagcugaccaaagagcaa

SEQ ID NO: 1082082 - RNA, 19 nt, Artificial Sequence
  Description of Artificial Sequence: Synthetic oligonucleotide
  Sense strand starting at position 151 of SEQ ID NO: 915469
acagaaugauguucucaag

SEQ ID NO: 1082083 - RNA, 19 nt, Artificial Sequence
  Description of Artificial Sequence: Synthetic oligonucleotide
  Antisense strand to SEQ ID NO: 1082082
cuugagaacaucauucugu

SEQ ID NO: 1082084 - RNA, 19 nt, Artificial Sequence
  Description of Artificial Sequence: Synthetic oligonucleotide
  Sense strand starting at position 154 of SEQ ID NO: 915469
gaaugauguucucaagaua

SEQ ID NO: 1082085 - RNA, 19 nt, Artificial Sequence
  Description of Artificial Sequence: Synthetic oligonucleotide
  Antisense strand to SEQ ID NO: 1082084
uaucuugagaacaucauuc

SEQ ID NO: 1082086 - RNA, 19 nt, Artificial Sequence
  Description of Artificial Sequence: Synthetic oligonucleotide
  Sense strand starting at position 207 of SEQ ID NO: 915469
ccaacucuugucuguaguu

SEQ ID NO: 1082087 - RNA, 19 nt, Artificial Sequence
  Description of Artificial Sequence: Synthetic oligonucleotide
  Antisense strand to SEQ ID NO: 1082086
aacuacagacaagaguugg

SEQ ID NO: 1082088 - RNA, 19 nt, Artificial Sequence
  Description of Artificial Sequence: Synthetic oligonucleotide
  Sense strand starting at position 236 of SEQ ID NO: 915469
ggacauuggcuguaguuaa

SEQ ID NO: 1082089 - RNA, 19 nt, Artificial Sequence
  Description of Artificial Sequence: Synthetic oligonucleotide
  Antisense strand to SEQ ID NO: 1082088
uuaacuacagccaaugucc

SEQ ID NO: 1082090 - RNA, 19 nt, Artificial Sequence
  Description of Artificial Sequence: Synthetic oligonucleotide
  Sense strand starting at position 354 of SEQ ID NO: 915469
ugugcuaaacgugaacaga

SEQ ID NO: 1082091 - RNA, 19 nt, Artificial Sequence
  Description of Artificial Sequence: Synthetic oligonucleotide
  Antisense strand to SEQ ID NO: 1082090
ucuguucacguuuagcaca

SEQ ID NO: 1082092 - RNA, 19 nt, Artificial Sequence
  Description of Artificial Sequence: Synthetic oligonucleotide
  Sense strand starting at position 377 of SEQ ID NO: 915469
ucuccaucuugcuuguauu

SEQ ID NO: 1082093 - RNA, 19 nt, Artificial Sequence
  Description of Artificial Sequence: Synthetic oligonucleotide
  Antisense strand to SEQ ID NO: 1082092
aauacaagcaagauggaga

SEQ ID NO: 1082094 - RNA, 19 nt, Artificial Sequence
  Description of Artificial Sequence: Synthetic oligonucleotide
  Sense strand starting at position 657 of SEQ ID NO: 915469
agucuccaucuuugaaaug

SEQ ID NO: 1082095 - RNA, 19 nt, Artificial Sequence
  Description of Artificial Sequence: Synthetic oligonucleotide
  Antisense strand to SEQ ID NO: 1082094
cauuucaaagauggagacu

SEQ ID NO: 1082096 - RNA, 19 nt, Artificial Sequence
  Description of Artificial Sequence: Synthetic oligonucleotide
  Sense strand starting at position 744 of SEQ ID NO: 915469
uugaaaucauuguauugcu

SEQ ID NO: 1082097 - RNA, 19 nt, Artificial Sequence
  Description of Artificial Sequence: Synthetic oligonucleotide
  Antisense strand to SEQ ID NO: 1082096
agcaauacaaugauuucaa

SEQ ID NO: 1082098 - RNA, 19 nt, Artificial Sequence
  Description of Artificial Sequence: Synthetic oligonucleotide
  Sense strand starting at position 804 of SEQ ID NO: 915469
guaucucaugcgguuguua

SEQ ID NO: 1082099 - RNA, 19 nt, Artificial Sequence
  Description of Artificial Sequence: Synthetic oligonucleotide
  Antisense strand to SEQ ID NO: 1082098
uaacaaccgcaugagauac

SEQ ID NO: 1082100 - RNA, 19 nt, Artificial Sequence
  Description of Artificial Sequence: Synthetic oligonucleotide
  Sense strand starting at position 806 of SEQ ID NO: 915469
aucucaugcgguuguuaaa

SEQ ID NO: 1082101 - RNA, 19 nt, Artificial Sequence
  Description of Artificial Sequence: Synthetic oligonucleotide
  Antisense strand to SEQ ID NO: 1082100
uuuaacaaccgcaugagau

SEQ ID NO: 1082102 - RNA, 19 nt, Artificial Sequence
  Description of Artificial Sequence: Synthetic oligonucleotide
  Sense strand starting at position 823 of SEQ ID NO: 915469
aaaguauguugcucuuguu

SEQ ID NO: 1082103 - RNA, 19 nt, Artificial Sequence
  Description of Artificial Sequence: Synthetic oligonucleotide
  Antisense strand to SEQ ID NO: 1082102
aacaagagcaacauacuuu

SEQ ID NO: 1082104 - RNA, 19 nt, Artificial Sequence
  Description of Artificial Sequence: Synthetic oligonucleotide
  Sense strand starting at position 874 of SEQ ID NO: 915469
gggacugucuccuccuaca

SEQ ID NO: 1082105 - RNA, 19 nt, Artificial Sequence
  Description of Artificial Sequence: Synthetic oligonucleotide
  Antisense strand to SEQ ID NO: 1082104
uguaggaggagacaguccc

SEQ ID NO: 1082106 - RNA, 19 nt, Artificial Sequence
  Description of Artificial Sequence: Synthetic oligonucleotide
  Sense strand starting at position 953 of SEQ ID NO: 915469
aagaacuguugagaaagaa

SEQ ID NO: 1082107 - RNA, 19 nt, Artificial Sequence
  Description of Artificial Sequence: Synthetic oligonucleotide
  Antisense strand to SEQ ID NO: 1082106
uucuuucucaacaguucuu

SEQ ID NO: 1082108 - RNA, 19 nt, Artificial Sequence
  Description of Artificial Sequence: Synthetic oligonucleotide
  Sense strand starting at position 971 of SEQ ID NO: 915469
auacgaguuccugacucuu

SEQ ID NO: 1082109 - RNA, 19 nt, Artificial Sequence
  Description of Artificial Sequence: Synthetic oligonucleotide
  Antisense strand to SEQ ID NO: 1082108
aagagucaggaacucguau

SEQ ID NO: 1082110 - RNA, 19 nt, Artificial Sequence
  Description of Artificial Sequence: Synthetic oligonucleotide
  Sense strand starting at position 997 of SEQ ID NO: 915469
cccaucuugucagaagaug

SEQ ID NO: 1082111 - RNA, 19 nt, Artificial Sequence
  Description of Artificial Sequence: Synthetic oligonucleotide
  Antisense strand to SEQ ID NO: 1082110
caucuucugacaagauggg

SEQ ID NO: 1082112 - RNA, 19 nt, Artificial Sequence
  Description of Artificial Sequence: Synthetic oligonucleotide
  Sense strand starting at position 1073 of SEQ ID NO: 915469
ggugcugucugucugggau

SEQ ID NO: 1082113 - RNA, 19 nt, Artificial Sequence
  Description of Artificial Sequence: Synthetic oligonucleotide
  Antisense strand to SEQ ID NO: 1082112
aucccagacagacagcacc

SEQ ID NO: 1082114 - RNA, 19 nt, Artificial Sequence
  Description of Artificial Sequence: Synthetic oligonucleotide
  Sense strand starting at position 1251 of SEQ ID NO: 915469
cguauugucaccuaugggu

SEQ ID NO: 1082115 - RNA, 19 nt, Artificial Sequence
  Description of Artificial Sequence: Synthetic oligonucleotide
  Antisense strand to SEQ ID NO: 1082114
acccauaggugacaauacg

SEQ ID NO: 1082116 - RNA, 19 nt, Artificial Sequence
  Description of Artificial Sequence: Synthetic oligonucleotide
  Sense strand starting at position 1253 of SEQ ID NO: 915469
uauugucaccuauggguga

SEQ ID NO: 1082117 - RNA, 19 nt, Artificial Sequence
  Description of Artificial Sequence: Synthetic oligonucleotide
  Antisense strand to SEQ ID NO: 1082116
ucacccauaggugacaaua

SEQ ID NO: 1082118 - RNA, 19 nt, Artificial Sequence
  Description of Artificial Sequence: Synthetic oligonucleotide
  Sense strand starting at position 1257 of SEQ ID NO: 915469
gucaccuaugggugacuuu

SEQ ID NO: 1082119 - RNA, 19 nt, Artificial Sequence
  Description of Artificial Sequence: Synthetic oligonucleotide
  Antisense strand to SEQ ID NO: 1082118
aaagucacccauaggugac

SEQ ID NO: 1082120 - RNA, 19 nt, Artificial Sequence
  Description of Artificial Sequence: Synthetic oligonucleotide
  Sense strand starting at position 2043 of SEQ ID NO: 915469
ggacaugcccggcggaaau

SEQ ID NO: 1082121 - RNA, 19 nt, Artificial Sequence
  Description of Artificial Sequence: Synthetic oligonucleotide
  Antisense strand to SEQ ID NO: 1082120
auuuccgccgggcaugucc

SEQ ID NO: 1082122 - RNA, 19 nt, Artificial Sequence
  Description of Artificial Sequence: Synthetic oligonucleotide
  Sense strand starting at position 2389 of SEQ ID NO: 915469
ggccgauggcguuuggauu

SEQ ID NO: 1082123 - RNA, 19 nt, Artificial Sequence
  Description of Artificial Sequence: Synthetic oligonucleotide
  Antisense strand to SEQ ID NO: 1082122
aauccaaacgccaucggcc

SEQ ID NO: 1082124 - RNA, 19 nt, Artificial Sequence
  Description of Artificial Sequence: Synthetic oligonucleotide
  Sense strand starting at position 2506 of SEQ ID NO: 915469
ggguauuugccuuguggag

SEQ ID NO: 1082125 - RNA, 19 nt, Artificial Sequence
  Description of Artificial Sequence: Synthetic oligonucleotide
  Antisense strand to SEQ ID NO: 1082124
cuccacaaggcaaauaccc

SEQ ID NO: 1082126 - RNA, 19 nt, Artificial Sequence
  Description of Artificial Sequence: Synthetic oligonucleotide
  Sense strand starting at position 2538 of SEQ ID NO: 915469
ggugacuuagaguggagaa

SEQ ID NO: 1082127 - RNA, 19 nt, Artificial Sequence
  Description of Artificial Sequence: Synthetic oligonucleotide
  Antisense strand to SEQ ID NO: 1082126
uucuccacucuaagucacc

SEQ ID NO: 1082128 - RNA, 19 nt, Artificial Sequence
  Description of Artificial Sequence: Synthetic oligonucleotide
  Sense strand starting at position 2539 of SEQ ID NO: 915469
gugacuuagaguggagaau

SEQ ID NO: 1082129 - RNA, 19 nt, Artificial Sequence
  Description of Artificial Sequence: Synthetic oligonucleotide
  Antisense strand to SEQ ID NO: 1082128
auucuccacucuaagucac

SEQ ID NO: 1082130 - RNA, 19 nt, Artificial Sequence
  Description of Artificial Sequence: Synthetic oligonucleotide
  Sense strand starting at position 2562 of SEQ ID NO: 915469
auagaugagaaccguaaua

SEQ ID NO: 1082131 - RNA, 19 nt, Artificial Sequence
  Description of Artificial Sequence: Synthetic oligonucleotide
  Antisense strand to SEQ ID NO: 1082130
uauuacgguucucaucuau

SEQ ID NO: 1082132 - RNA, 19 nt, Artificial Sequence
  Description of Artificial Sequence: Synthetic oligonucleotide
  Sense strand starting at position 2567 of SEQ ID NO: 915469
ugagaaccguaauauguaa

SEQ ID NO: 1082133 - RNA, 19 nt, Artificial Sequence
  Description of Artificial Sequence: Synthetic oligonucleotide
  Antisense strand to SEQ ID NO: 1082132
uuacauauuacgguucuca

SEQ ID NO: 1082134 - RNA, 19 nt, Artificial Sequence
  Description of Artificial Sequence: Synthetic oligonucleotide
  Sense strand starting at position 2592 of SEQ ID NO: 915469
uguagaagcuucugauuug

SEQ ID NO: 1082135 - RNA, 19 nt, Artificial Sequence
  Description of Artificial Sequence: Synthetic oligonucleotide
  Antisense strand to SEQ ID NO: 1082134
caaaucagaagcuucuaca

SEQ ID NO: 1082136 - RNA, 19 nt, Artificial Sequence
  Description of Artificial Sequence: Synthetic oligonucleotide
  Sense strand starting at position 2621 of SEQ ID NO: 915469
agcgaucuuuaugaaauuu

SEQ ID NO: 1082137 - RNA, 19 nt, Artificial Sequence
  Description of Artificial Sequence: Synthetic oligonucleotide
  Antisense strand to SEQ ID NO: 1082136
aaauuucauaaagaucgcu

SEQ ID NO: 1082138 - RNA, 19 nt, Artificial Sequence
  Description of Artificial Sequence: Synthetic oligonucleotide
  Sense strand starting at position 2702 of SEQ ID NO: 915469
ccaggcucccugugaagua

SEQ ID NO: 1082139 - RNA, 19 nt, Artificial Sequence
  Description of Artificial Sequence: Synthetic oligonucleotide
  Antisense strand to SEQ ID NO: 1082138
uacuucacagggagccugg

SEQ ID NO: 1082140 - RNA, 19 nt, Artificial Sequence
  Description of Artificial Sequence: Synthetic oligonucleotide
  Sense strand starting at position 2732 of SEQ ID NO: 915469
cauggaaagucguaaguga

SEQ ID NO: 1082141 - RNA, 19 nt, Artificial Sequence
  Description of Artificial Sequence: Synthetic oligonucleotide
  Antisense strand to SEQ ID NO: 1082140
ucacuuacgacuuuccaug

SEQ ID NO: 1082142 - RNA, 19 nt, Artificial Sequence
  Description of Artificial Sequence: Synthetic oligonucleotide
  Sense strand starting at position 2798 of SEQ ID NO: 915469
aggccagguguugagauaa

SEQ ID NO: 1082143 - RNA, 19 nt, Artificial Sequence
  Description of Artificial Sequence: Synthetic oligonucleotide
  Antisense strand to SEQ ID NO: 1082142
uuaucucaacaccuggccu

SEQ ID NO: 1082144 - RNA, 19 nt, Artificial Sequence
  Description of Artificial Sequence: Synthetic oligonucleotide
  Sense strand starting at position 3052 of SEQ ID NO: 915469
gaagaaucgcuugaacgcu

SEQ ID NO: 1082145 - RNA, 19 nt, Artificial Sequence
  Description of Artificial Sequence: Synthetic oligonucleotide
  Antisense strand to SEQ ID NO: 1082144
agcguucaagcgauucuuc

SEQ ID NO: 1082146 - RNA, 19 nt, Artificial Sequence
  Description of Artificial Sequence: Synthetic oligonucleotide
  Sense strand starting at position 3193 of SEQ ID NO: 915469
aaagucguaagugaaguua

SEQ ID NO: 1082147 - RNA, 19 nt, Artificial Sequence
  Description of Artificial Sequence: Synthetic oligonucleotide
  Antisense strand to SEQ ID NO: 1082146
uaacuucacuuacgacuuu

SEQ ID NO: 1082148 - RNA, 19 nt, Artificial Sequence
  Description of Artificial Sequence: Synthetic oligonucleotide
  Sense strand starting at position 3224 of SEQ ID NO: 915469
ggucaaguuuacccagaca

SEQ ID NO: 1082149 - RNA, 19 nt, Artificial Sequence
  Description of Artificial Sequence: Synthetic oligonucleotide
  Antisense strand to SEQ ID NO: 1082148
ugucuggguaaacuugacc

SEQ ID NO: 1082150 - RNA, 19 nt, Artificial Sequence
  Description of Artificial Sequence: Synthetic oligonucleotide
  Sense strand starting at position 3239 of SEQ ID NO: 915469
gacauaggguuucccaauu

SEQ ID NO: 1082151 - RNA, 19 nt, Artificial Sequence
  Description of Artificial Sequence: Synthetic oligonucleotide
  Antisense strand to SEQ ID NO: 1082150
aauugggaaacccuauguc

SEQ ID NO: 1082152 - RNA, 19 nt, Artificial Sequence
  Description of Artificial Sequence: Synthetic oligonucleotide
  Sense strand starting at position 3268 of SEQ ID NO: 915469
aaaugugucccagauacug

SEQ ID NO: 1082153 - RNA, 19 nt, Artificial Sequence
  Description of Artificial Sequence: Synthetic oligonucleotide
  Antisense strand to SEQ ID NO: 1082152
caguaucugggacacauuu

SEQ ID NO: 1082154 - RNA, 19 nt, Artificial Sequence
  Description of Artificial Sequence: Synthetic oligonucleotide
  Sense strand starting at position 3277 of SEQ ID NO: 915469
ccagauacugcaugagaga

SEQ ID NO: 1082155 - RNA, 19 nt, Artificial Sequence
  Description of Artificial Sequence: Synthetic oligonucleotide
  Antisense strand to SEQ ID NO: 1082154
ucucucaugcaguaucugg

SEQ ID NO: 1082156 - RNA, 19 nt, Artificial Sequence
  Description of Artificial Sequence: Synthetic oligonucleotide
  Sense strand starting at position 3418 of SEQ ID NO: 915469
aaggaaagauugucucuuu

SEQ ID NO: 1082157 - RNA, 19 nt, Artificial Sequence
  Description of Artificial Sequence: Synthetic oligonucleotide
  Antisense strand to SEQ ID NO: 1082156
aaagagacaaucuuuccuu

SEQ ID NO: 1082158 - RNA, 19 nt, Artificial Sequence
  Description of Artificial Sequence: Synthetic oligonucleotide
  Sense strand starting at position 3419 of SEQ ID NO: 915469
aggaaagauugucucuuua

SEQ ID NO: 1082159 - RNA, 19 nt, Artificial Sequence
  Description of Artificial Sequence: Synthetic oligonucleotide
  Antisense strand to SEQ ID NO: 1082158
uaaagagacaaucuuuccu

SEQ ID NO: 1082160 - RNA, 19 nt, Artificial Sequence
  Description of Artificial Sequence: Synthetic oligonucleotide
  Sense strand starting at position 29 of SEQ ID NO: 915470
auaccucugucuuugagau

SEQ ID NO: 1082161 - RNA, 19 nt, Artificial Sequence
  Description of Artificial Sequence: Synthetic oligonucleotide
  Antisense strand to SEQ ID NO: 1082160
aucucaaagacagagguau

SEQ ID NO: 1082162 - RNA, 19 nt, Artificial Sequence
  Description of Artificial Sequence: Synthetic oligonucleotide
  Sense strand starting at position 51 of SEQ ID NO: 915470
gacuguggccugcagagaa

SEQ ID NO: 1082163 - RNA, 19 nt, Artificial Sequence
  Description of Artificial Sequence: Synthetic oligonucleotide
  Antisense strand to SEQ ID NO: 1082162
uucucugcaggccacaguc

SEQ ID NO: 1082164 - RNA, 19 nt, Artificial Sequence
  Description of Artificial Sequence: Synthetic oligonucleotide
  Sense strand starting at position 74 of SEQ ID NO: 915470
uucuuauugccugaguaca

SEQ ID NO: 1082165 - RNA, 19 nt, Artificial Sequence
  Description of Artificial Sequence: Synthetic oligonucleotide
  Antisense strand to SEQ ID NO: 1082164
uguacucaggcaauaagaa

SEQ ID NO: 1082166 - RNA, 19 nt, Artificial Sequence
  Description of Artificial Sequence: Synthetic oligonucleotide
  Sense strand starting at position 106 of SEQ ID NO: 915470
uccuaauggcaguggauaa

SEQ ID NO: 1082167 - RNA, 19 nt, Artificial Sequence
  Description of Artificial Sequence: Synthetic oligonucleotide
  Antisense strand to SEQ ID NO: 1082166
uuauccacugccauuagga

SEQ ID NO: 1082168 - RNA, 19 nt, Artificial Sequence
  Description of Artificial Sequence: Synthetic oligonucleotide
  Sense strand starting at position 107 of SEQ ID NO: 915470
ccuaauggcaguggauaau

SEQ ID NO: 1082169 - RNA, 19 nt, Artificial Sequence
  Description of Artificial Sequence: Synthetic oligonucleotide
  Antisense strand to SEQ ID NO: 1082168
auuauccacugccauuagg

SEQ ID NO: 1082170 - RNA, 19 nt, Artificial Sequence
  Description of Artificial Sequence: Synthetic oligonucleotide
  Sense strand starting at position 124 of SEQ ID NO: 915470
aucacucuuguauguagaa

SEQ ID NO: 1082171 - RNA, 19 nt, Artificial Sequence
  Description of Artificial Sequence: Synthetic oligonucleotide
  Antisense strand to SEQ ID NO: 1082170
uucuacauacaagagugau

SEQ ID NO: 1082172 - RNA, 19 nt, Artificial Sequence
  Description of Artificial Sequence: Synthetic oligonucleotide
  Sense strand starting at position 333 of SEQ ID NO: 915470
ucuacuucuuccucagagu

SEQ ID NO: 1082173 - RNA, 19 nt, Artificial Sequence
  Description of Artificial Sequence: Synthetic oligonucleotide
  Antisense strand to SEQ ID NO: 1082172
acucugaggaagaaguaga

SEQ ID NO: 1082174 - RNA, 19 nt, Artificial Sequence
  Description of Artificial Sequence: Synthetic oligonucleotide
  Sense strand starting at position 438 of SEQ ID NO: 915470
gggcauuucuucuuccuuu

SEQ ID NO: 1082175 - RNA, 19 nt, Artificial Sequence
  Description of Artificial Sequence: Synthetic oligonucleotide
  Antisense strand to SEQ ID NO: 1082174
aaaggaagaagaaaugccc

SEQ ID NO: 1082176 - RNA, 19 nt, Artificial Sequence
  Description of Artificial Sequence: Synthetic oligonucleotide
  Sense strand starting at position 777 of SEQ ID NO: 915470
guguaaaugagcuaaugga

SEQ ID NO: 1082177 - RNA, 19 nt, Artificial Sequence
  Description of Artificial Sequence: Synthetic oligonucleotide
  Antisense strand to SEQ ID NO: 1082176
uccauuagcucauuuacac

SEQ ID NO: 1082178 - RNA, 19 nt, Artificial Sequence
  Description of Artificial Sequence: Synthetic oligonucleotide
  Sense strand starting at position 880 of SEQ ID NO: 915470
uugccuagagcugauacau

SEQ ID NO: 1082179 - RNA, 19 nt, Artificial Sequence
  Description of Artificial Sequence: Synthetic oligonucleotide
  Antisense strand to SEQ ID NO: 1082178
auguaucagcucuaggcaa

SEQ ID NO: 1082180 - RNA, 19 nt, Artificial Sequence
  Description of Artificial Sequence: Synthetic oligonucleotide
  Sense strand starting at position 895 of SEQ ID NO: 915470
acauuucuguaagagguaa

SEQ ID NO: 1082181 - RNA, 19 nt, Artificial Sequence
  Description of Artificial Sequence: Synthetic oligonucleotide
  Antisense strand to SEQ ID NO: 1082180
uuaccucuuacagaaaugu

SEQ ID NO: 1082182 - RNA, 19 nt, Artificial Sequence
  Description of Artificial Sequence: Synthetic oligonucleotide
  Sense strand starting at position 1031 of SEQ ID NO: 915470
cggcuuggacaaugguaau

SEQ ID NO: 1082183 - RNA, 19 nt, Artificial Sequence
  Description of Artificial Sequence: Synthetic oligonucleotide
  Antisense strand to SEQ ID NO: 1082182
auuaccauuguccaagccg

SEQ ID NO: 1082184 - RNA, 19 nt, Artificial Sequence
  Description of Artificial Sequence: Synthetic oligonucleotide
  Sense strand starting at position 1167 of SEQ ID NO: 915470
gaagauguauugucgggaa

SEQ ID NO: 1082185 - RNA, 19 nt, Artificial Sequence
  Description of Artificial Sequence: Synthetic oligonucleotide
  Antisense strand to SEQ ID NO: 1082184
uucccgacaauacaucuuc

SEQ ID NO: 1082186 - RNA, 19 nt, Artificial Sequence
  Description of Artificial Sequence: Synthetic oligonucleotide
  Sense strand starting at position 1171 of SEQ ID NO: 915470
auguauugucgggaaggcu

SEQ ID NO: 1082187 - RNA, 19 nt, Artificial Sequence
  Description of Artificial Sequence: Synthetic oligonucleotide
  Antisense strand to SEQ ID NO: 1082186
agccuucccgacaauacau

SEQ ID NO: 1082188 - RNA, 19 nt, Artificial Sequence
  Description of Artificial Sequence: Synthetic oligonucleotide
  Sense strand starting at position 1187 of SEQ ID NO: 915470
gcugauucuguguugcagu

SEQ ID NO: 1082189 - RNA, 19 nt, Artificial Sequence
  Description of Artificial Sequence: Synthetic oligonucleotide
  Antisense strand to SEQ ID NO: 1082188
acugcaacacagaaucagc

SEQ ID NO: 1082190 - RNA, 19 nt, Artificial Sequence
  Description of Artificial Sequence: Synthetic oligonucleotide
  Sense strand starting at position 1228 of SEQ ID NO: 915470
ggcacuuacccugauucua

SEQ ID NO: 1082191 - RNA, 19 nt, Artificial Sequence
  Description of Artificial Sequence: Synthetic oligonucleotide
  Antisense strand to SEQ ID NO: 1082190
uagaaucaggguaagugcc

SEQ ID NO: 1082192 - RNA, 19 nt, Artificial Sequence
  Description of Artificial Sequence: Synthetic oligonucleotide
  Sense strand starting at position 1611 of SEQ ID NO: 915470
uuggaaguucucggaucuu

SEQ ID NO: 1082193 - RNA, 19 nt, Artificial Sequence
  Description of Artificial Sequence: Synthetic oligonucleotide
  Antisense strand to SEQ ID NO: 1082192
aagauccgagaacuuccaa

SEQ ID NO: 1082194 - RNA, 19 nt, Artificial Sequence
  Description of Artificial Sequence: Synthetic oligonucleotide
  Sense strand starting at position 1705 of SEQ ID NO: 915470
uccgcuucgcggccugaaa

SEQ ID NO: 1082195 - RNA, 19 nt, Artificial Sequence
  Description of Artificial Sequence: Synthetic oligonucleotide
  Antisense strand to SEQ ID NO: 1082194
uuucaggccgcgaagcgga

SEQ ID NO: 1082196 - RNA, 19 nt, Artificial Sequence
  Description of Artificial Sequence: Synthetic oligonucleotide
  Sense strand starting at position 2866 of SEQ ID NO: 915470
gcaguuugagcugaaucuu

SEQ ID NO: 1082197 - RNA, 19 nt, Artificial Sequence
  Description of Artificial Sequence: Synthetic oligonucleotide
  Antisense strand to SEQ ID NO: 1082196
aagauucagcucaaacugc

SEQ ID NO: 1082198 - RNA, 19 nt, Artificial Sequence
  Description of Artificial Sequence: Synthetic oligonucleotide
  Sense strand starting at position 2875 of SEQ ID NO: 915470
gcugaaucuugacugcaga

SEQ ID NO: 1082199 - RNA, 19 nt, Artificial Sequence
  Description of Artificial Sequence: Synthetic oligonucleotide
  Antisense strand to SEQ ID NO: 1082198
ucugcagucaagauucagc

SEQ ID NO: 1082200 - RNA, 19 nt, Artificial Sequence
  Description of Artificial Sequence: Synthetic oligonucleotide
  Sense strand starting at position 2876 of SEQ ID NO: 915470
cugaaucuugacugcagaa

SEQ ID NO: 1082201 - RNA, 19 nt, Artificial Sequence
  Description of Artificial Sequence: Synthetic oligonucleotide
  Antisense strand to SEQ ID NO: 1082200
uucugcagucaagauucag

SEQ ID NO: 1082202 - RNA, 19 nt, Artificial Sequence
  Description of Artificial Sequence: Synthetic oligonucleotide
  Sense strand starting at position 2987 of SEQ ID NO: 915470
acaggaaauugucuggagu

SEQ ID NO: 1082203 - RNA, 19 nt, Artificial Sequence
  Description of Artificial Sequence: Synthetic oligonucleotide
  Antisense strand to SEQ ID NO: 1082202
acuccagacaauuuccugu

SEQ ID NO: 1082204 - RNA, 19 nt, Artificial Sequence
  Description of Artificial Sequence: Synthetic oligonucleotide
  Sense strand starting at position 2988 of SEQ ID NO: 915470
caggaaauugucuggaguu

SEQ ID NO: 1082205 - RNA, 19 nt, Artificial Sequence
  Description of Artificial Sequence: Synthetic oligonucleotide
  Antisense strand to SEQ ID NO: 1082204
aacuccagacaauuuccug

SEQ ID NO: 1082206 - RNA, 19 nt, Artificial Sequence
  Description of Artificial Sequence: Synthetic oligonucleotide
  Sense strand starting at position 2998 of SEQ ID NO: 915470
ucuggaguuccauauggcu

SEQ ID NO: 1082207 - RNA, 19 nt, Artificial Sequence
  Description of Artificial Sequence: Synthetic oligonucleotide
  Antisense strand to SEQ ID NO: 1082206
agccauauggaacuccaga

SEQ ID NO: 1082208 - RNA, 19 nt, Artificial Sequence
  Description of Artificial Sequence: Synthetic oligonucleotide
  Sense strand starting at position 3004 of SEQ ID NO: 915470
guuccauauggcuggagga

SEQ ID NO: 1082209 - RNA, 19 nt, Artificial Sequence
  Description of Artificial Sequence: Synthetic oligonucleotide
  Antisense strand to SEQ ID NO: 1082208
uccuccagccauauggaac

SEQ ID NO: 1082210 - RNA, 19 nt, Artificial Sequence
  Description of Artificial Sequence: Synthetic oligonucleotide
  Sense strand starting at position 3005 of SEQ ID NO: 915470
uuccauauggcuggaggau

SEQ ID NO: 1082211 - RNA, 19 nt, Artificial Sequence
  Description of Artificial Sequence: Synthetic oligonucleotide
  Antisense strand to SEQ ID NO: 1082210
auccuccagccauauggaa

SEQ ID NO: 1082212 - RNA, 19 nt, Artificial Sequence
  Description of Artificial Sequence: Synthetic oligonucleotide
  Sense strand starting at position 3018 of SEQ ID NO: 915470
gaggauagaugaucucugu

SEQ ID NO: 1082213 - RNA, 19 nt, Artificial Sequence
  Description of Artificial Sequence: Synthetic oligonucleotide
  Antisense strand to SEQ ID NO: 1082212
acagagaucaucuauccuc

SEQ ID NO: 1082214 - RNA, 19 nt, Artificial Sequence
  Description of Artificial Sequence: Synthetic oligonucleotide
  Sense strand starting at position 3022 of SEQ ID NO: 915470
auagaugaucucugugggu

SEQ ID NO: 1082215 - RNA, 19 nt, Artificial Sequence
  Description of Artificial Sequence: Synthetic oligonucleotide
  Antisense strand to SEQ ID NO: 1082214
acccacagagaucaucuau

SEQ ID NO: 1082216 - RNA, 19 nt, Artificial Sequence
  Description of Artificial Sequence: Synthetic oligonucleotide
  Sense strand starting at position 3041 of SEQ ID NO: 915470
cggagcauuggguacaaga

SEQ ID NO: 1082217 - RNA, 19 nt, Artificial Sequence
  Description of Artificial Sequence: Synthetic oligonucleotide
  Antisense strand to SEQ ID NO: 1082216
ucuuguacccaaugcuccg

SEQ ID NO: 1082218 - RNA, 19 nt, Artificial Sequence
  Description of Artificial Sequence: Synthetic oligonucleotide
  Sense strand starting at position 3082 of SEQ ID NO: 915470
uguagaggucuccaaggau

SEQ ID NO: 1082219 - RNA, 19 nt, Artificial Sequence
  Description of Artificial Sequence: Synthetic oligonucleotide
  Antisense strand to SEQ ID NO: 1082218
auccuuggagaccucuaca

SEQ ID NO: 1082220 - RNA, 19 nt, Artificial Sequence
  Description of Artificial Sequence: Synthetic oligonucleotide
  Sense strand starting at position 3125 of SEQ ID NO: 915470
aggcuauaagaaggucuuu

SEQ ID NO: 1082221 - RNA, 19 nt, Artificial Sequence
  Description of Artificial Sequence: Synthetic oligonucleotide
  Antisense strand to SEQ ID NO: 1082220
aaagaccuucuuauagccu

SEQ ID NO: 1082222 - RNA, 19 nt, Artificial Sequence
  Description of Artificial Sequence: Synthetic oligonucleotide
  Sense strand starting at position 3177 of SEQ ID NO: 915470
acauaaugagauuguccau

SEQ ID NO: 1082223 - RNA, 19 nt, Artificial Sequence
  Description of Artificial Sequence: Synthetic oligonucleotide
  Antisense strand to SEQ ID NO: 1082222
auggacaaucucauuaugu

SEQ ID NO: 1082224 - RNA, 19 nt, Artificial Sequence
  Description of Artificial Sequence: Synthetic oligonucleotide
  Sense strand starting at position 3209 of SEQ ID NO: 915470
cuuggaugcuuugugaaga

SEQ ID NO: 1082225 - RNA, 19 nt, Artificial Sequence
  Description of Artificial Sequence: Synthetic oligonucleotide
  Antisense strand to SEQ ID NO: 1082224
ucuucacaaagcauccaag

SEQ ID NO: 1082226 - RNA, 19 nt, Artificial Sequence
  Description of Artificial Sequence: Synthetic oligonucleotide
  Sense strand starting at position 3265 of SEQ ID NO: 915470
aaguaaugaugucuuggac

SEQ ID NO: 1082227 - RNA, 19 nt, Artificial Sequence
  Description of Artificial Sequence: Synthetic oligonucleotide
  Antisense strand to SEQ ID NO: 1082226
guccaagacaucauuacuu

SEQ ID NO: 1082228 - RNA, 19 nt, Artificial Sequence
  Description of Artificial Sequence: Synthetic oligonucleotide
  Sense strand starting at position 3268 of SEQ ID NO: 915470
uaaugaugucuuggacuag

SEQ ID NO: 1082229 - RNA, 19 nt, Artificial Sequence
  Description of Artificial Sequence: Synthetic oligonucleotide
  Antisense strand to SEQ ID NO: 1082228
cuaguccaagacaucauua

SEQ ID NO: 1082230 - RNA, 19 nt, Artificial Sequence
  Description of Artificial Sequence: Synthetic oligonucleotide
  Sense strand starting at position 3283 of SEQ ID NO: 915470
cuagaauuagggugaguga

SEQ ID NO: 1082231 - RNA, 19 nt, Artificial Sequence
  Description of Artificial Sequence: Synthetic oligonucleotide
  Antisense strand to SEQ ID NO: 1082230
ucacucacccuaauucuag

SEQ ID NO: 1082232 - RNA, 19 nt, Artificial Sequence
  Description of Artificial Sequence: Synthetic oligonucleotide
  Sense strand starting at position 3326 of SEQ ID NO: 915470
aagucuuuaggacgaagaa

SEQ ID NO: 1082233 - RNA, 19 nt, Artificial Sequence
  Description of Artificial Sequence: Synthetic oligonucleotide
  Antisense strand to SEQ ID NO: 1082232
uucuucguccuaaagacuu

SEQ ID NO: 1082234 - RNA, 19 nt, Artificial Sequence
  Description of Artificial Sequence: Synthetic oligonucleotide
  Sense strand starting at position 3625 of SEQ ID NO: 915470
ugaagacgugguugugaag

SEQ ID NO: 1082235 - RNA, 19 nt, Artificial Sequence
  Description of Artificial Sequence: Synthetic oligonucleotide
  Antisense strand to SEQ ID NO: 1082234
cuucacaaccacgucuuca

SEQ ID NO: 1082236 - RNA, 19 nt, Artificial Sequence
  Description of Artificial Sequence: Synthetic oligonucleotide
  Sense strand starting at position 3744 of SEQ ID NO: 915470
gugaguaaagcuuacagaa

SEQ ID NO: 1082237 - RNA, 19 nt, Artificial Sequence
  Description of Artificial Sequence: Synthetic oligonucleotide
  Antisense strand to SEQ ID NO: 1082236
uucuguaagcuuuacucac

SEQ ID NO: 1082238 - RNA, 19 nt, Artificial Sequence
  Description of Artificial Sequence: Synthetic oligonucleotide
  Sense strand starting at position 3898 of SEQ ID NO: 915470
guuuguuggauggguaaac

SEQ ID NO: 1082239 - RNA, 19 nt, Artificial Sequence
  Description of Artificial Sequence: Synthetic oligonucleotide
  Antisense strand to SEQ ID NO: 1082238
guuuacccauccaacaaac

SEQ ID NO: 1082240 - RNA, 19 nt, Artificial Sequence
  Description of Artificial Sequence: Synthetic oligonucleotide
  Sense strand starting at position 40 of SEQ ID NO: 915471
gugagaagccuuuauauaa

SEQ ID NO: 1082241 - RNA, 19 nt, Artificial Sequence
  Description of Artificial Sequence: Synthetic oligonucleotide
  Antisense strand to SEQ ID NO: 1082240
uuauauaaaggcuucucac

SEQ ID NO: 1082242 - RNA, 19 nt, Artificial Sequence
  Description of Artificial Sequence: Synthetic oligonucleotide
  Sense strand starting at position 114 of SEQ ID NO: 915471
caguuuguuacagguagag

SEQ ID NO: 1082243 - RNA, 19 nt, Artificial Sequence
  Description of Artificial Sequence: Synthetic oligonucleotide
  Antisense strand to SEQ ID NO: 1082242
cucuaccuguaacaaacug

SEQ ID NO: 1082244 - RNA, 19 nt, Artificial Sequence
  Description of Artificial Sequence: Synthetic oligonucleotide
  Sense strand starting at position 152 of SEQ ID NO: 915471
acagauuacuaggcuuaua

SEQ ID NO: 1082245 - RNA, 19 nt, Artificial Sequence
  Description of Artificial Sequence: Synthetic oligonucleotide
  Antisense strand to SEQ ID NO: 1082244
uauaagccuaguaaucugu

SEQ ID NO: 1082246 - RNA, 19 nt, Artificial Sequence
  Description of Artificial Sequence: Synthetic oligonucleotide
  Sense strand starting at position 180 of SEQ ID NO: 915471
cuguauuaauuugagucuu

SEQ ID NO: 1082247 - RNA, 19 nt, Artificial Sequence
  Description of Artificial Sequence: Synthetic oligonucleotide
  Antisense strand to SEQ ID NO: 1082246
aagacucaaauuaauacag

SEQ ID NO: 1082248 - RNA, 19 nt, Artificial Sequence
  Description of Artificial Sequence: Synthetic oligonucleotide
  Sense strand starting at position 190 of SEQ ID NO: 915471
uugagucuucgguagccau

SEQ ID NO: 1082249 - RNA, 19 nt, Artificial Sequence
  Description of Artificial Sequence: Synthetic oligonucleotide
  Antisense strand to SEQ ID NO: 1082248
auggcuaccgaagacucaa

SEQ ID NO: 1082250 - RNA, 19 nt, Artificial Sequence
  Description of Artificial Sequence: Synthetic oligonucleotide
  Sense strand starting at position 217 of SEQ ID NO: 915471
acagauucuuuauagguaa

SEQ ID NO: 1082251 - RNA, 19 nt, Artificial Sequence
  Description of Artificial Sequence: Synthetic oligonucleotide
  Antisense strand to SEQ ID NO: 1082250
uuaccuauaaagaaucugu

SEQ ID NO: 1082252 - RNA, 19 nt, Artificial Sequence
  Description of Artificial Sequence: Synthetic oligonucleotide
  Sense strand starting at position 230 of SEQ ID NO: 915471
agguaauauucugaagaac

SEQ ID NO: 1082253 - RNA, 19 nt, Artificial Sequence
  Description of Artificial Sequence: Synthetic oligonucleotide
  Antisense strand to SEQ ID NO: 1082252
guucuucagaauauuaccu

SEQ ID NO: 1082254 - RNA, 19 nt, Artificial Sequence
  Description of Artificial Sequence: Synthetic oligonucleotide
  Sense strand starting at position 261 of SEQ ID NO: 915471
gcuuccuagcaaugcaaau

SEQ ID NO: 1082255 - RNA, 19 nt, Artificial Sequence
  Description of Artificial Sequence: Synthetic oligonucleotide
  Antisense strand to SEQ ID NO: 1082254
auuugcauugcuaggaagc

SEQ ID NO: 1082256 - RNA, 19 nt, Artificial Sequence
  Description of Artificial Sequence: Synthetic oligonucleotide
  Sense strand starting at position 347 of SEQ ID NO: 915471
ggaaacagcuaucugucuu

SEQ ID NO: 1082257 - RNA, 19 nt, Artificial Sequence
  Description of Artificial Sequence: Synthetic oligonucleotide
  Antisense strand to SEQ ID NO: 1082256
aagacagauagcuguuucc

SEQ ID NO: 1082258 - RNA, 19 nt, Artificial Sequence
  Description of Artificial Sequence: Synthetic oligonucleotide
  Sense strand starting at position 427 of SEQ ID NO: 915471
acguuucuucuccagccaa

SEQ ID NO: 1082259 - RNA, 19 nt, Artificial Sequence
  Description of Artificial Sequence: Synthetic oligonucleotide
  Antisense strand to SEQ ID NO: 1082258
uuggcuggagaagaaacgu

SEQ ID NO: 1082260 - RNA, 19 nt, Artificial Sequence
  Description of Artificial Sequence: Synthetic oligonucleotide
  Sense strand starting at position 461 of SEQ ID NO: 915471
aaaggcaaugcucagagua

SEQ ID NO: 1082261 - RNA, 19 nt, Artificial Sequence
  Description of Artificial Sequence: Synthetic oligonucleotide
  Antisense strand to SEQ ID NO: 1082260
uacucugagcauugccuuu

SEQ ID NO: 1082262 - RNA, 19 nt, Artificial Sequence
  Description of Artificial Sequence: Synthetic oligonucleotide
  Sense strand starting at position 850 of SEQ ID NO: 915471
agacgacuucuucgccuaa

SEQ ID NO: 1082263 - RNA, 19 nt, Artificial Sequence
  Description of Artificial Sequence: Synthetic oligonucleotide
  Antisense strand to SEQ ID NO: 1082262
uuaggcgaagaagucgucu

SEQ ID NO: 1082264 - RNA, 19 nt, Artificial Sequence
  Description of Artificial Sequence: Synthetic oligonucleotide
  Sense strand starting at position 910 of SEQ ID NO: 915471
gggagaugcucgccuauua

SEQ ID NO: 1082265 - RNA, 19 nt, Artificial Sequence
  Description of Artificial Sequence: Synthetic oligonucleotide
  Antisense strand to SEQ ID NO: 1082264
uaauaggcgagcaucuccc

SEQ ID NO: 1082266 - RNA, 19 nt, Artificial Sequence
  Description of Artificial Sequence: Synthetic oligonucleotide
  Sense strand starting at position 1244 of SEQ ID NO: 915471
cgagauggucgggaagacu

SEQ ID NO: 1082267 - RNA, 19 nt, Artificial Sequence
  Description of Artificial Sequence: Synthetic oligonucleotide
  Antisense strand to SEQ ID NO: 1082266
agucuucccgaccaucucg

SEQ ID NO: 1082268 - RNA, 19 nt, Artificial Sequence
  Description of Artificial Sequence: Synthetic oligonucleotide
  Sense strand starting at position 1778 of SEQ ID NO: 915471
gcccguagcgcuccaagaa

SEQ ID NO: 1082269 - RNA, 19 nt, Artificial Sequence
  Description of Artificial Sequence: Synthetic oligonucleotide
  Antisense strand to SEQ ID NO: 1082268
uucuuggagcgcuacgggc

SEQ ID NO: 1082270 - RNA, 19 nt, Artificial Sequence
  Description of Artificial Sequence: Synthetic oligonucleotide
  Sense strand starting at position 1925 of SEQ ID NO: 915471
aguuguggugccgagggau

SEQ ID NO: 1082271 - RNA, 19 nt, Artificial Sequence
  Description of Artificial Sequence: Synthetic oligonucleotide
  Antisense strand to SEQ ID NO: 1082270
aucccucggcaccacaacu

SEQ ID NO: 1082272 - RNA, 19 nt, Artificial Sequence
  Description of Artificial Sequence: Synthetic oligonucleotide
  Sense strand starting at position 2220 of SEQ ID NO: 915471
gggcgggacuucucgagaa

SEQ ID NO: 1082273 - RNA, 19 nt, Artificial Sequence
  Description of Artificial Sequence: Synthetic oligonucleotide
  Antisense strand to SEQ ID NO: 1082272
uucucgagaagucccgccc

SEQ ID NO: 1082274 - RNA, 19 nt, Artificial Sequence
  Description of Artificial Sequence: Synthetic oligonucleotide
  Sense strand starting at position 2222 of SEQ ID NO: 915471
gcgggacuucucgagaaca

SEQ ID NO: 1082275 - RNA, 19 nt, Artificial Sequence
  Description of Artificial Sequence: Synthetic oligonucleotide
  Antisense strand to SEQ ID NO: 1082274
uguucucgagaagucccgc

SEQ ID NO: 1082276 - RNA, 19 nt, Artificial Sequence
  Description of Artificial Sequence: Synthetic oligonucleotide
  Sense strand starting at position 2292 of SEQ ID NO: 915471
ggcguauucccggagggca

SEQ ID NO: 1082277 - RNA, 19 nt, Artificial Sequence
  Description of Artificial Sequence: Synthetic oligonucleotide
  Antisense strand to SEQ ID NO: 1082276
ugcccuccgggaauacgcc

SEQ ID NO: 1082278 - RNA, 19 nt, Artificial Sequence
  Description of Artificial Sequence: Synthetic oligonucleotide
  Sense strand starting at position 2440 of SEQ ID NO: 915471
acgagaugguggagagguu

SEQ ID NO: 1082279 - RNA, 19 nt, Artificial Sequence
  Description of Artificial Sequence: Synthetic oligonucleotide
  Antisense strand to SEQ ID NO: 1082278
aaccucuccaccaucucgu

SEQ ID NO: 1082280 - RNA, 19 nt, Artificial Sequence
  Description of Artificial Sequence: Synthetic oligonucleotide
  Sense strand starting at position 2449 of SEQ ID NO: 915471
uggagagguugaggagaau

SEQ ID NO: 1082281 - RNA, 19 nt, Artificial Sequence
  Description of Artificial Sequence: Synthetic oligonucleotide
  Antisense strand to SEQ ID NO: 1082280
auucuccucaaccucucca

SEQ ID NO: 1082282 - RNA, 19 nt, Artificial Sequence
  Description of Artificial Sequence: Synthetic oligonucleotide
  Sense strand starting at position 2504 of SEQ ID NO: 915471
acaguugugggagaagguu

SEQ ID NO: 1082283 - RNA, 19 nt, Artificial Sequence
  Description of Artificial Sequence: Synthetic oligonucleotide
  Antisense strand to SEQ ID NO: 1082282
aaccuucucccacaacugu

SEQ ID NO: 1082284 - RNA, 19 nt, Artificial Sequence
  Description of Artificial Sequence: Synthetic oligonucleotide
  Sense strand starting at position 2566 of SEQ ID NO: 915471
cugggaccucgguaagaug

SEQ ID NO: 1082285 - RNA, 19 nt, Artificial Sequence
  Description of Artificial Sequence: Synthetic oligonucleotide
  Antisense strand to SEQ ID NO: 1082284
caucuuaccgaggucccag

SEQ ID NO: 1082286 - RNA, 19 nt, Artificial Sequence
  Description of Artificial Sequence: Synthetic oligonucleotide
  Sense strand starting at position 2577 of SEQ ID NO: 915471
guaagaugucucuguggaa

SEQ ID NO: 1082287 - RNA, 19 nt, Artificial Sequence
  Description of Artificial Sequence: Synthetic oligonucleotide
  Antisense strand to SEQ ID NO: 1082286
uuccacagagacaucuuac

SEQ ID NO: 1082288 - RNA, 19 nt, Artificial Sequence
  Description of Artificial Sequence: Synthetic oligonucleotide
  Sense strand starting at position 2578 of SEQ ID NO: 915471
uaagaugucucuguggaag

SEQ ID NO: 1082289 - RNA, 19 nt, Artificial Sequence
  Description of Artificial Sequence: Synthetic oligonucleotide
  Antisense strand to SEQ ID NO: 1082288
cuuccacagagacaucuua

SEQ ID NO: 1082290 - RNA, 19 nt, Artificial Sequence
  Description of Artificial Sequence: Synthetic oligonucleotide
  Sense strand starting at position 2581 of SEQ ID NO: 915471
gaugucucuguggaaguuu

SEQ ID NO: 1082291 - RNA, 19 nt, Artificial Sequence
  Description of Artificial Sequence: Synthetic oligonucleotide
  Antisense strand to SEQ ID NO: 1082290
aaacuuccacagagacauc

SEQ ID NO: 1082292 - RNA, 19 nt, Artificial Sequence
  Description of Artificial Sequence: Synthetic oligonucleotide
  Sense strand starting at position 2904 of SEQ ID NO: 915471
agugaacauucccacaaag

SEQ ID NO: 1082293 - RNA, 19 nt, Artificial Sequence
  Description of Artificial Sequence: Synthetic oligonucleotide
  Antisense strand to SEQ ID NO: 1082292
cuuugugggaauguucacu

SEQ ID NO: 1082294 - RNA, 19 nt, Artificial Sequence
  Description of Artificial Sequence: Synthetic oligonucleotide
  Sense strand starting at position 2991 of SEQ ID NO: 915471
ugcuuagaagccugagcuu

SEQ ID NO: 1082295 - RNA, 19 nt, Artificial Sequence
  Description of Artificial Sequence: Synthetic oligonucleotide
  Antisense strand to SEQ ID NO: 1082294
aagcucaggcuucuaagca

SEQ ID NO: 1082296 - RNA, 19 nt, Artificial Sequence
  Description of Artificial Sequence: Synthetic oligonucleotide
  Sense strand starting at position 3074 of SEQ ID NO: 915471
cuuugaacuccuuagagug

SEQ ID NO: 1082297 - RNA, 19 nt, Artificial Sequence
  Description of Artificial Sequence: Synthetic oligonucleotide
  Antisense strand to SEQ ID NO: 1082296
cacucuaaggaguucaaag

SEQ ID NO: 1082298 - RNA, 19 nt, Artificial Sequence
  Description of Artificial Sequence: Synthetic oligonucleotide
  Sense strand starting at position 3138 of SEQ ID NO: 915471
caguaaagugauuagcaca

SEQ ID NO: 1082299 - RNA, 19 nt, Artificial Sequence
  Description of Artificial Sequence: Synthetic oligonucleotide
  Antisense strand to SEQ ID NO: 1082298
ugugcuaaucacuuuacug

SEQ ID NO: 1082300 - RNA, 19 nt, Artificial Sequence
  Description of Artificial Sequence: Synthetic oligonucleotide
  Sense strand starting at position 3165 of SEQ ID NO: 915471
gcacauagugaguacuuua

SEQ ID NO: 1082301 - RNA, 19 nt, Artificial Sequence
  Description of Artificial Sequence: Synthetic oligonucleotide
  Antisense strand to SEQ ID NO: 1082300
uaaaguacucacuaugugc

SEQ ID NO: 1082302 - RNA, 19 nt, Artificial Sequence
  Description of Artificial Sequence: Synthetic oligonucleotide
  Sense strand starting at position 3296 of SEQ ID NO: 915471
uguaguaccuaauuccuaa

SEQ ID NO: 1082303 - RNA, 19 nt, Artificial Sequence
  Description of Artificial Sequence: Synthetic oligonucleotide
  Antisense strand to SEQ ID NO: 1082302
uuaggaauuagguacuaca

SEQ ID NO: 1082304 - RNA, 19 nt, Artificial Sequence
  Description of Artificial Sequence: Synthetic oligonucleotide
  Sense strand starting at position 3761 of SEQ ID NO: 915471
aaaccauaaggguguguau

SEQ ID NO: 1082305 - RNA, 19 nt, Artificial Sequence
  Description of Artificial Sequence: Synthetic oligonucleotide
  Antisense strand to SEQ ID NO: 1082304
auacacacccuuaugguuu

SEQ ID NO: 1082306 - RNA, 19 nt, Artificial Sequence
  Description of Artificial Sequence: Synthetic oligonucleotide
  Sense strand starting at position 3763 of SEQ ID NO: 915471
accauaaggguguguauua

SEQ ID NO: 1082307 - RNA, 19 nt, Artificial Sequence
  Description of Artificial Sequence: Synthetic oligonucleotide
  Antisense strand to SEQ ID NO: 1082306
uaauacacacccuuauggu

SEQ ID NO: 1082308 - RNA, 19 nt, Artificial Sequence
  Description of Artificial Sequence: Synthetic oligonucleotide
  Sense strand starting at position 3764 of SEQ ID NO: 915471
ccauaaggguguguauuau

SEQ ID NO: 1082309 - RNA, 19 nt, Artificial Sequence
  Description of Artificial Sequence: Synthetic oligonucleotide
  Antisense strand to SEQ ID NO: 1082308
auaauacacacccuuaugg

SEQ ID NO: 1082310 - RNA, 19 nt, Artificial Sequence
  Description of Artificial Sequence: Synthetic oligonucleotide
  Sense strand starting at position 3770 of SEQ ID NO: 915471
ggguguguauuauucccau

SEQ ID NO: 1082311 - RNA, 19 nt, Artificial Sequence
  Description of Artificial Sequence: Synthetic oligonucleotide
  Antisense strand to SEQ ID NO: 1082310
augggaauaauacacaccc

SEQ ID NO: 1082312 - RNA, 19 nt, Artificial Sequence
  Description of Artificial Sequence: Synthetic oligonucleotide
  Sense strand starting at position 3773 of SEQ ID NO: 915471
uguguauuauucccauuau

SEQ ID NO: 1082313 - RNA, 19 nt, Artificial Sequence
  Description of Artificial Sequence: Synthetic oligonucleotide
  Antisense strand to SEQ ID NO: 1082312
auaaugggaauaauacaca

SEQ ID NO: 1082314 - RNA, 19 nt, Artificial Sequence
  Description of Artificial Sequence: Synthetic oligonucleotide
  Sense strand starting at position 3868 of SEQ ID NO: 915471
cauagucuugagugguaua

SEQ ID NO: 1082315 - RNA, 19 nt, Artificial Sequence
  Description of Artificial Sequence: Synthetic oligonucleotide
  Antisense strand to SEQ ID NO: 1082314
uauaccacucaagacuaug

SEQ ID NO: 1082316 - RNA, 19 nt, Artificial Sequence
  Description of Artificial Sequence: Synthetic oligonucleotide
  Sense strand starting at position 3869 of SEQ ID NO: 915471
auagucuugagugguauac

SEQ ID NO: 1082317 - RNA, 19 nt, Artificial Sequence
  Description of Artificial Sequence: Synthetic oligonucleotide
  Antisense strand to SEQ ID NO: 1082316
guauaccacucaagacuau

SEQ ID NO: 1082318 - RNA, 19 nt, Artificial Sequence
  Description of Artificial Sequence: Synthetic oligonucleotide
  Sense strand starting at position 3873 of SEQ ID NO: 915471
ucuugagugguauacaaac

SEQ ID NO: 1082319 - RNA, 19 nt, Artificial Sequence
  Description of Artificial Sequence: Synthetic oligonucleotide
  Antisense strand to SEQ ID NO: 1082318
guuuguauaccacucaaga

SEQ ID NO: 1082320 - RNA, 19 nt, Artificial Sequence
  Description of Artificial Sequence: Synthetic oligonucleotide
  Sense strand starting at position 125 of SEQ ID NO: 915472
ucaaguugcuaaguuauaa

SEQ ID NO: 1082321 - RNA, 19 nt, Artificial Sequence
  Description of Artificial Sequence: Synthetic oligonucleotide
  Antisense strand to SEQ ID NO: 1082320
uuauaacuuagcaacuuga

SEQ ID NO: 1082322 - RNA, 19 nt, Artificial Sequence
  Description of Artificial Sequence: Synthetic oligonucleotide
  Sense strand starting at position 198 of SEQ ID NO: 915472
gcuggugguuuaaaggaga

SEQ ID NO: 1082323 - RNA, 19 nt, Artificial Sequence
  Description of Artificial Sequence: Synthetic oligonucleotide
  Antisense strand to SEQ ID NO: 1082322
ucuccuuuaaaccaccagc

SEQ ID NO: 1082324 - RNA, 19 nt, Artificial Sequence
  Description of Artificial Sequence: Synthetic oligonucleotide
  Sense strand starting at position 213 of SEQ ID NO: 915472
gagacaggguucuaaauuu

SEQ ID NO: 1082325 - RNA, 19 nt, Artificial Sequence
  Description of Artificial Sequence: Synthetic oligonucleotide
  Antisense strand to SEQ ID NO: 1082324
aaauuuagaacccugucuc

SEQ ID NO: 1082326 - RNA, 19 nt, Artificial Sequence
  Description of Artificial Sequence: Synthetic oligonucleotide
  Sense strand starting at position 327 of SEQ ID NO: 915472
agcucucagacaggugaaa

SEQ ID NO: 1082327 - RNA, 19 nt, Artificial Sequence
  Description of Artificial Sequence: Synthetic oligonucleotide
  Antisense strand to SEQ ID NO: 1082326
uuucaccugucugagagcu

SEQ ID NO: 1082328 - RNA, 19 nt, Artificial Sequence
  Description of Artificial Sequence: Synthetic oligonucleotide
  Sense strand starting at position 365 of SEQ ID NO: 915472
cguagagaauaauacauuu

SEQ ID NO: 1082329 - RNA, 19 nt, Artificial Sequence
  Description of Artificial Sequence: Synthetic oligonucleotide
  Antisense strand to SEQ ID NO: 1082328
aaauguauuauucucuacg

SEQ ID NO: 1082330 - RNA, 19 nt, Artificial Sequence
  Description of Artificial Sequence: Synthetic oligonucleotide
  Sense strand starting at position 380 of SEQ ID NO: 915472
auuuaagguuaagaucaga

SEQ ID NO: 1082331 - RNA, 19 nt, Artificial Sequence
  Description of Artificial Sequence: Synthetic oligonucleotide
  Antisense strand to SEQ ID NO: 1082330
ucugaucuuaaccuuaaau

SEQ ID NO: 1082332 - RNA, 19 nt, Artificial Sequence
  Description of Artificial Sequence: Synthetic oligonucleotide
  Sense strand starting at position 385 of SEQ ID NO: 915472
agguuaagaucagaaauuu

SEQ ID NO: 1082333 - RNA, 19 nt, Artificial Sequence
  Description of Artificial Sequence: Synthetic oligonucleotide
  Antisense strand to SEQ ID NO: 1082332
aaauuucugaucuuaaccu

SEQ ID NO: 1082334 - RNA, 19 nt, Artificial Sequence
  Description of Artificial Sequence: Synthetic oligonucleotide
  Sense strand starting at position 560 of SEQ ID NO: 915472
agacuccguuccuuugaga

SEQ ID NO: 1082335 - RNA, 19 nt, Artificial Sequence
  Description of Artificial Sequence: Synthetic oligonucleotide
  Antisense strand to SEQ ID NO: 1082334
ucucaaaggaacggagucu

SEQ ID NO: 1082336 - RNA, 19 nt, Artificial Sequence
  Description of Artificial Sequence: Synthetic oligonucleotide
  Sense strand starting at position 822 of SEQ ID NO: 915472
uuuguuauacuucgaucaa

SEQ ID NO: 1082337 - RNA, 19 nt, Artificial Sequence
  Description of Artificial Sequence: Synthetic oligonucleotide
  Antisense strand to SEQ ID NO: 1082336
uugaucgaaguauaacaaa

SEQ ID NO: 1082338 - RNA, 19 nt, Artificial Sequence
  Description of Artificial Sequence: Synthetic oligonucleotide
  Sense strand starting at position 826 of SEQ ID NO: 915472
uuauacuucgaucaauagu

SEQ ID NO: 1082339 - RNA, 19 nt, Artificial Sequence
  Description of Artificial Sequence: Synthetic oligonucleotide
  Antisense strand to SEQ ID NO: 1082338
acuauugaucgaaguauaa

SEQ ID NO: 1082340 - RNA, 19 nt, Artificial Sequence
  Description of Artificial Sequence: Synthetic oligonucleotide
  Sense strand starting at position 837 of SEQ ID NO: 915472
ucaauaguagcccacagaa

SEQ ID NO: 1082341 - RNA, 19 nt, Artificial Sequence
  Description of Artificial Sequence: Synthetic oligonucleotide
  Antisense strand to SEQ ID NO: 1082340
uucugugggcuacuauuga

SEQ ID NO: 1082342 - RNA, 19 nt, Artificial Sequence
  Description of Artificial Sequence: Synthetic oligonucleotide
  Sense strand starting at position 870 of SEQ ID NO: 915472
acauguugauagcuuagca

SEQ ID NO: 1082343 - RNA, 19 nt, Artificial Sequence
  Description of Artificial Sequence: Synthetic oligonucleotide
  Antisense strand to SEQ ID NO: 1082342
ugcuaagcuaucaacaugu

SEQ ID NO: 1082344 - RNA, 19 nt, Artificial Sequence
  Description of Artificial Sequence: Synthetic oligonucleotide
  Sense strand starting at position 880 of SEQ ID NO: 915472
agcuuagcaugacucuauu

SEQ ID NO: 1082345 - RNA, 19 nt, Artificial Sequence
  Description of Artificial Sequence: Synthetic oligonucleotide
  Antisense strand to SEQ ID NO: 1082344
aauagagucaugcuaagcu

SEQ ID NO: 1082346 - RNA, 19 nt, Artificial Sequence
  Description of Artificial Sequence: Synthetic oligonucleotide
  Sense strand starting at position 1198 of SEQ ID NO: 915472
ucaugaaugcuugauuaug

SEQ ID NO: 1082347 - RNA, 19 nt, Artificial Sequence
  Description of Artificial Sequence: Synthetic oligonucleotide
  Antisense strand to SEQ ID NO: 1082346
cauaaucaagcauucauga

SEQ ID NO: 1082348 - RNA, 19 nt, Artificial Sequence
  Description of Artificial Sequence: Synthetic oligonucleotide
  Sense strand starting at position 1204 of SEQ ID NO: 915472
augcuugauuaugucaaca

SEQ ID NO: 1082349 - RNA, 19 nt, Artificial Sequence
  Description of Artificial Sequence: Synthetic oligonucleotide
  Antisense strand to SEQ ID NO: 1082348
uguugacauaaucaagcau

SEQ ID NO: 1082350 - RNA, 19 nt, Artificial Sequence
  Description of Artificial Sequence: Synthetic oligonucleotide
  Sense strand starting at position 1209 of SEQ ID NO: 915472
ugauuaugucaacaccugu

SEQ ID NO: 1082351 - RNA, 19 nt, Artificial Sequence
  Description of Artificial Sequence: Synthetic oligonucleotide
  Antisense strand to SEQ ID NO: 1082350
acagguguugacauaauca

SEQ ID NO: 1082352 - RNA, 19 nt, Artificial Sequence
  Description of Artificial Sequence: Synthetic oligonucleotide
  Sense strand starting at position 1216 of SEQ ID NO: 915472
gucaacaccugucugcaaa

SEQ ID NO: 1082353 - RNA, 19 nt, Artificial Sequence
  Description of Artificial Sequence: Synthetic oligonucleotide
  Antisense strand to SEQ ID NO: 1082352
uuugcagacagguguugac

SEQ ID NO: 1082354 - RNA, 19 nt, Artificial Sequence
  Description of Artificial Sequence: Synthetic oligonucleotide
  Sense strand starting at position 1563 of SEQ ID NO: 915472
ucaguagucgaggguaauu

SEQ ID NO: 1082355 - RNA, 19 nt, Artificial Sequence
  Description of Artificial Sequence: Synthetic oligonucleotide
  Antisense strand to SEQ ID NO: 1082354
aauuacccucgacuacuga

SEQ ID NO: 1082356 - RNA, 19 nt, Artificial Sequence
  Description of Artificial Sequence: Synthetic oligonucleotide
  Sense strand starting at position 1572 of SEQ ID NO: 915472
gaggguaauucguccuccu

SEQ ID NO: 1082357 - RNA, 19 nt, Artificial Sequence
  Description of Artificial Sequence: Synthetic oligonucleotide
  Antisense strand to SEQ ID NO: 1082356
aggaggacgaauuacccuc

SEQ ID NO: 1082358 - RNA, 19 nt, Artificial Sequence
  Description of Artificial Sequence: Synthetic oligonucleotide
  Sense strand starting at position 2210 of SEQ ID NO: 915472
ggagcugcgggauaguauu

SEQ ID NO: 1082359 - RNA, 19 nt, Artificial Sequence
  Description of Artificial Sequence: Synthetic oligonucleotide
  Antisense strand to SEQ ID NO: 1082358
aauacuaucccgcagcucc

SEQ ID NO: 1082360 - RNA, 19 nt, Artificial Sequence
  Description of Artificial Sequence: Synthetic oligonucleotide
  Sense strand starting at position 2284 of SEQ ID NO: 915472
guagaaaugucuuugggcu

SEQ ID NO: 1082361 - RNA, 19 nt, Artificial Sequence
  Description of Artificial Sequence: Synthetic oligonucleotide
  Antisense strand to SEQ ID NO: 1082360
agcccaaagacauuucuac

SEQ ID NO: 1082362 - RNA, 19 nt, Artificial Sequence
  Description of Artificial Sequence: Synthetic oligonucleotide
  Sense strand starting at position 2285 of SEQ ID NO: 915472
uagaaaugucuuugggcuu

SEQ ID NO: 1082363 - RNA, 19 nt, Artificial Sequence
  Description of Artificial Sequence: Synthetic oligonucleotide
  Antisense strand to SEQ ID NO: 1082362
aagcccaaagacauuucua

SEQ ID NO: 1082364 - RNA, 19 nt, Artificial Sequence
  Description of Artificial Sequence: Synthetic oligonucleotide
  Sense strand starting at position 2296 of SEQ ID NO: 915472
uugggcuuccauuauggaa

SEQ ID NO: 1082365 - RNA, 19 nt, Artificial Sequence
  Description of Artificial Sequence: Synthetic oligonucleotide
  Antisense strand to SEQ ID NO: 1082364
uuccauaauggaagcccaa

SEQ ID NO: 1082366 - RNA, 19 nt, Artificial Sequence
  Description of Artificial Sequence: Synthetic oligonucleotide
  Sense strand starting at position 2452 of SEQ ID NO: 915472
guaauaucuccucaccgag

SEQ ID NO: 1082367 - RNA, 19 nt, Artificial Sequence
  Description of Artificial Sequence: Synthetic oligonucleotide
  Antisense strand to SEQ ID NO: 1082366
cucggugaggagauauuac

SEQ ID NO: 1082368 - RNA, 19 nt, Artificial Sequence
  Description of Artificial Sequence: Synthetic oligonucleotide
  Sense strand starting at position 2502 of SEQ ID NO: 915472
gguggagaaagaugcuaua

SEQ ID NO: 1082369 - RNA, 19 nt, Artificial Sequence
  Description of Artificial Sequence: Synthetic oligonucleotide
  Antisense strand to SEQ ID NO: 1082368
uauagcaucuuucuccacc

SEQ ID NO: 1082370 - RNA, 19 nt, Artificial Sequence
  Description of Artificial Sequence: Synthetic oligonucleotide
  Sense strand starting at position 2644 of SEQ ID NO: 915472
cuccgaauagacugucaga

SEQ ID NO: 1082371 - RNA, 19 nt, Artificial Sequence
  Description of Artificial Sequence: Synthetic oligonucleotide
  Antisense strand to SEQ ID NO: 1082370
ucugacagucuauucggag

SEQ ID NO: 1082372 - RNA, 19 nt, Artificial Sequence
  Description of Artificial Sequence: Synthetic oligonucleotide
  Sense strand starting at position 2657 of SEQ ID NO: 915472
gucagauagagacgacaua

SEQ ID NO: 1082373 - RNA, 19 nt, Artificial Sequence
  Description of Artificial Sequence: Synthetic oligonucleotide
  Antisense strand to SEQ ID NO: 1082372
uaugucgucucuaucugac

SEQ ID NO: 1082374 - RNA, 19 nt, Artificial Sequence
  Description of Artificial Sequence: Synthetic oligonucleotide
  Sense strand starting at position 2730 of SEQ ID NO: 915472
aaauguuggcugugauuau

SEQ ID NO: 1082375 - RNA, 19 nt, Artificial Sequence
  Description of Artificial Sequence: Synthetic oligonucleotide
  Antisense strand to SEQ ID NO: 1082374
auaaucacagccaacauuu

SEQ ID NO: 1082376 - RNA, 19 nt, Artificial Sequence
  Description of Artificial Sequence: Synthetic oligonucleotide
  Sense strand starting at position 3104 of SEQ ID NO: 915472
uggaaaggugcauagucuu

SEQ ID NO: 1082377 - RNA, 19 nt, Artificial Sequence
  Description of Artificial Sequence: Synthetic oligonucleotide
  Antisense strand to SEQ ID NO: 1082376
aagacuaugcaccuuucca

SEQ ID NO: 1082378 - RNA, 19 nt, Artificial Sequence
  Description of Artificial Sequence: Synthetic oligonucleotide
  Sense strand starting at position 3112 of SEQ ID NO: 915472
ugcauagucuuuguuaaag

SEQ ID NO: 1082379 - RNA, 19 nt, Artificial Sequence
  Description of Artificial Sequence: Synthetic oligonucleotide
  Antisense strand to SEQ ID NO: 1082378
cuuuaacaaagacuaugca

SEQ ID NO: 1082380 - RNA, 19 nt, Artificial Sequence
  Description of Artificial Sequence: Synthetic oligonucleotide
  Sense strand starting at position 3405 of SEQ ID NO: 915472
agagcaaaucuccgucaaa

SEQ ID NO: 1082381 - RNA, 19 nt, Artificial Sequence
  Description of Artificial Sequence: Synthetic oligonucleotide
  Antisense strand to SEQ ID NO: 1082380
uuugacggagauuugcucu

SEQ ID NO: 1082382 - RNA, 19 nt, Artificial Sequence
  Description of Artificial Sequence: Synthetic oligonucleotide
  Sense strand starting at position 3406 of SEQ ID NO: 915472
gagcaaaucuccgucaaau

SEQ ID NO: 1082383 - RNA, 19 nt, Artificial Sequence
  Description of Artificial Sequence: Synthetic oligonucleotide
  Antisense strand to SEQ ID NO: 1082382
auuugacggagauuugcuc

SEQ ID NO: 1082384 - RNA, 19 nt, Artificial Sequence
  Description of Artificial Sequence: Synthetic oligonucleotide
  Sense strand starting at position 3408 of SEQ ID NO: 915472
gcaaaucuccgucaaauaa

SEQ ID NO: 1082385 - RNA, 19 nt, Artificial Sequence
  Description of Artificial Sequence: Synthetic oligonucleotide
  Antisense strand to SEQ ID NO: 1082384
uuauuugacggagauuugc

SEQ ID NO: 1082386 - RNA, 19 nt, Artificial Sequence
  Description of Artificial Sequence: Synthetic oligonucleotide
  Sense strand starting at position 3600 of SEQ ID NO: 915472
cgaucugaccaguggaaau

SEQ ID NO: 1082387 - RNA, 19 nt, Artificial Sequence
  Description of Artificial Sequence: Synthetic oligonucleotide
  Antisense strand to SEQ ID NO: 1082386
auuuccacuggucagaucg

SEQ ID NO: 1082388 - RNA, 19 nt, Artificial Sequence
  Description of Artificial Sequence: Synthetic oligonucleotide
  Sense strand starting at position 3623 of SEQ ID NO: 915472
uagaacaagcuguguacua

SEQ ID NO: 1082389 - RNA, 19 nt, Artificial Sequence
  Description of Artificial Sequence: Synthetic oligonucleotide
  Antisense strand to SEQ ID NO: 1082388
uaguacacagcuuguucua

SEQ ID NO: 1082390 - RNA, 19 nt, Artificial Sequence
  Description of Artificial Sequence: Synthetic oligonucleotide
  Sense strand starting at position 3625 of SEQ ID NO: 915472
gaacaagcuguguacuaca

SEQ ID NO: 1082391 - RNA, 19 nt, Artificial Sequence
  Description of Artificial Sequence: Synthetic oligonucleotide
  Antisense strand to SEQ ID NO: 1082390
uguaguacacagcuuguuc

SEQ ID NO: 1082392 - RNA, 19 nt, Artificial Sequence
  Description of Artificial Sequence: Synthetic oligonucleotide
  Sense strand starting at position 3801 of SEQ ID NO: 915472
agcaaacugucucuuggau

SEQ ID NO: 1082393 - RNA, 19 nt, Artificial Sequence
  Description of Artificial Sequence: Synthetic oligonucleotide
  Antisense strand to SEQ ID NO: 1082392
auccaagagacaguuugcu

SEQ ID NO: 1082394 - RNA, 19 nt, Artificial Sequence
  Description of Artificial Sequence: Synthetic oligonucleotide
  Sense strand starting at position 3807 of SEQ ID NO: 915472
cugucucuuggauggcaaa

SEQ ID NO: 1082395 - RNA, 19 nt, Artificial Sequence
  Description of Artificial Sequence: Synthetic oligonucleotide
  Antisense strand to SEQ ID NO: 1082394
uuugccauccaagagacag

SEQ ID NO: 1082396 - RNA, 19 nt, Artificial Sequence
  Description of Artificial Sequence: Synthetic oligonucleotide
  Sense strand starting at position 3870 of SEQ ID NO: 915472
uucugauacgugcauaugu

SEQ ID NO: 1082397 - RNA, 19 nt, Artificial Sequence
  Description of Artificial Sequence: Synthetic oligonucleotide
  Antisense strand to SEQ ID NO: 1082396
acauaugcacguaucagaa

SEQ ID NO: 1082398 - RNA, 19 nt, Artificial Sequence
  Description of Artificial Sequence: Synthetic oligonucleotide
  Sense strand starting at position 3872 of SEQ ID NO: 915472
cugauacgugcauauguuu

SEQ ID NO: 1082399 - RNA, 19 nt, Artificial Sequence
  Description of Artificial Sequence: Synthetic oligonucleotide
  Antisense strand to SEQ ID NO: 1082398
aaacauaugcacguaucag

SEQ ID NO: 1082400 - RNA, 19 nt, Artificial Sequence
  Description of Artificial Sequence: Synthetic oligonucleotide
  Sense strand starting at position 37 of SEQ ID NO: 915473
aaaggaugcucccuggaaa

SEQ ID NO: 1082401 - RNA, 19 nt, Artificial Sequence
  Description of Artificial Sequence: Synthetic oligonucleotide
  Antisense strand to SEQ ID NO: 1082400
uuuccagggagcauccuuu

SEQ ID NO: 1082402 - RNA, 19 nt, Artificial Sequence
  Description of Artificial Sequence: Synthetic oligonucleotide
  Sense strand starting at position 38 of SEQ ID NO: 915473
aaggaugcucccuggaaag

SEQ ID NO: 1082403 - RNA, 19 nt, Artificial Sequence
  Description of Artificial Sequence: Synthetic oligonucleotide
  Antisense strand to SEQ ID NO: 1082402
cuuuccagggagcauccuu

SEQ ID NO: 1082404 - RNA, 19 nt, Artificial Sequence
  Description of Artificial Sequence: Synthetic oligonucleotide
  Sense strand starting at position 297 of SEQ ID NO: 915473
cucacucugccagaaugua

SEQ ID NO: 1082405 - RNA, 19 nt, Artificial Sequence
  Description of Artificial Sequence: Synthetic oligonucleotide
  Antisense strand to SEQ ID NO: 1082404
uacauucuggcagagugag

SEQ ID NO: 1082406 - RNA, 19 nt, Artificial Sequence
  Description of Artificial Sequence: Synthetic oligonucleotide
  Sense strand starting at position 367 of SEQ ID NO: 915473
acguccaggccggauaaau

SEQ ID NO: 1082407 - RNA, 19 nt, Artificial Sequence
  Description of Artificial Sequence: Synthetic oligonucleotide
  Antisense strand to SEQ ID NO: 1082406
auuuauccggccuggacgu

SEQ ID NO: 1082408 - RNA, 19 nt, Artificial Sequence
  Description of Artificial Sequence: Synthetic oligonucleotide
  Sense strand starting at position 519 of SEQ ID NO: 915473
gccacucccugagagaaga

SEQ ID NO: 1082409 - RNA, 19 nt, Artificial Sequence
  Description of Artificial Sequence: Synthetic oligonucleotide
  Antisense strand to SEQ ID NO: 1082408
ucuucucucagggaguggc

SEQ ID NO: 1082410 - RNA, 19 nt, Artificial Sequence
  Description of Artificial Sequence: Synthetic oligonucleotide
  Sense strand starting at position 566 of SEQ ID NO: 915473
gagggcuucccacguggaa

SEQ ID NO: 1082411 - RNA, 19 nt, Artificial Sequence
  Description of Artificial Sequence: Synthetic oligonucleotide
  Antisense strand to SEQ ID NO: 1082410
uuccacgugggaagcccuc

SEQ ID NO: 1082412 - RNA, 19 nt, Artificial Sequence
  Description of Artificial Sequence: Synthetic oligonucleotide
  Sense strand starting at position 578 of SEQ ID NO: 915473
cguggaagugguuaccaga

SEQ ID NO: 1082413 - RNA, 19 nt, Artificial Sequence
  Description of Artificial Sequence: Synthetic oligonucleotide
  Antisense strand to SEQ ID NO: 1082412
ucugguaaccacuuccacg

SEQ ID NO: 1082414 - RNA, 19 nt, Artificial Sequence
  Description of Artificial Sequence: Synthetic oligonucleotide
  Sense strand starting at position 775 of SEQ ID NO: 915473
gguuucugaucuuuccauu

SEQ ID NO: 1082415 - RNA, 19 nt, Artificial Sequence
  Description of Artificial Sequence: Synthetic oligonucleotide
  Antisense strand to SEQ ID NO: 1082414
aauggaaagaucagaaacc

SEQ ID NO: 1082416 - RNA, 19 nt, Artificial Sequence
  Description of Artificial Sequence: Synthetic oligonucleotide
  Sense strand starting at position 1040 of SEQ ID NO: 915473
cuuucuccaucuuugaguu

SEQ ID NO: 1082417 - RNA, 19 nt, Artificial Sequence
  Description of Artificial Sequence: Synthetic oligonucleotide
  Antisense strand to SEQ ID NO: 1082416
aacucaaagauggagaaag

SEQ ID NO: 1082418 - RNA, 19 nt, Artificial Sequence
  Description of Artificial Sequence: Synthetic oligonucleotide
  Sense strand starting at position 2019 of SEQ ID NO: 915473
cgaggaagcucuucccaac

SEQ ID NO: 1082419 - RNA, 19 nt, Artificial Sequence
  Description of Artificial Sequence: Synthetic oligonucleotide
  Antisense strand to SEQ ID NO: 1082418
guugggaagagcuuccucg

SEQ ID NO: 1082420 - RNA, 19 nt, Artificial Sequence
  Description of Artificial Sequence: Synthetic oligonucleotide
  Sense strand starting at position 2118 of SEQ ID NO: 915473
ggcgggagcggcuuucuaa

SEQ ID NO: 1082421 - RNA, 19 nt, Artificial Sequence
  Description of Artificial Sequence: Synthetic oligonucleotide
  Antisense strand to SEQ ID NO: 1082420
uuagaaagccgcucccgcc

SEQ ID NO: 1082422 - RNA, 19 nt, Artificial Sequence
  Description of Artificial Sequence: Synthetic oligonucleotide
  Sense strand starting at position 2205 of SEQ ID NO: 915473
gcgccacucuucuagagaa

SEQ ID NO: 1082423 - RNA, 19 nt, Artificial Sequence
  Description of Artificial Sequence: Synthetic oligonucleotide
  Antisense strand to SEQ ID NO: 1082422
uucucuagaagaguggcgc

SEQ ID NO: 1082424 - RNA, 19 nt, Artificial Sequence
  Description of Artificial Sequence: Synthetic oligonucleotide
  Sense strand starting at position 2207 of SEQ ID NO: 915473
gccacucuucuagagaaau

SEQ ID NO: 1082425 - RNA, 19 nt, Artificial Sequence
  Description of Artificial Sequence: Synthetic oligonucleotide
  Antisense strand to SEQ ID NO: 1082424
auuucucuagaagaguggc

SEQ ID NO: 1082426 - RNA, 19 nt, Artificial Sequence
  Description of Artificial Sequence: Synthetic oligonucleotide
  Sense strand starting at position 2440 of SEQ ID NO: 915473
gugcgacuauaagaauagu

SEQ ID NO: 1082427 - RNA, 19 nt, Artificial Sequence
  Description of Artificial Sequence: Synthetic oligonucleotide
  Antisense strand to SEQ ID NO: 1082426
acuauucuuauagucgcac

SEQ ID NO: 1082428 - RNA, 19 nt, Artificial Sequence
  Description of Artificial Sequence: Synthetic oligonucleotide
  Sense strand starting at position 2463 of SEQ ID NO: 915473
gcaagaguuugugcgugca

SEQ ID NO: 1082429 - RNA, 19 nt, Artificial Sequence
  Description of Artificial Sequence: Synthetic oligonucleotide
  Antisense strand to SEQ ID NO: 1082428
ugcacgcacaaacucuugc

SEQ ID NO: 1082430 - RNA, 19 nt, Artificial Sequence
  Description of Artificial Sequence: Synthetic oligonucleotide
  Sense strand starting at position 2465 of SEQ ID NO: 915473
aagaguuugugcgugcaag

SEQ ID NO: 1082431 - RNA, 19 nt, Artificial Sequence
  Description of Artificial Sequence: Synthetic oligonucleotide
  Antisense strand to SEQ ID NO: 1082430
cuugcacgcacaaacucuu

SEQ ID NO: 1082432 - RNA, 19 nt, Artificial Sequence
  Description of Artificial Sequence: Synthetic oligonucleotide
  Sense strand starting at position 2466 of SEQ ID NO: 915473
agaguuugugcgugcaaga

SEQ ID NO: 1082433 - RNA, 19 nt, Artificial Sequence
  Description of Artificial Sequence: Synthetic oligonucleotide
  Antisense strand to SEQ ID NO: 1082432
ucuugcacgcacaaacucu

SEQ ID NO: 1082434 - RNA, 19 nt, Artificial Sequence
  Description of Artificial Sequence: Synthetic oligonucleotide
  Sense strand starting at position 2467 of SEQ ID NO: 915473
gaguuugugcgugcaagau

SEQ ID NO: 1082435 - RNA, 19 nt, Artificial Sequence
  Description of Artificial Sequence: Synthetic oligonucleotide
  Antisense strand to SEQ ID NO: 1082434
aucuugcacgcacaaacuc

SEQ ID NO: 1082436 - RNA, 19 nt, Artificial Sequence
  Description of Artificial Sequence: Synthetic oligonucleotide
  Sense strand starting at position 2476 of SEQ ID NO: 915473
cgugcaagaucgagugcau

SEQ ID NO: 1082437 - RNA, 19 nt, Artificial Sequence
  Description of Artificial Sequence: Synthetic oligonucleotide
  Antisense strand to SEQ ID NO: 1082436
augcacucgaucuugcacg

SEQ ID NO: 1082438 - RNA, 19 nt, Artificial Sequence
  Description of Artificial Sequence: Synthetic oligonucleotide
  Sense strand starting at position 2527 of SEQ ID NO: 915473
gcaggugugacucaggaug

SEQ ID NO: 1082439 - RNA, 19 nt, Artificial Sequence
  Description of Artificial Sequence: Synthetic oligonucleotide
  Antisense strand to SEQ ID NO: 1082438
cauccugagucacaccugc

SEQ ID NO: 1082440 - RNA, 19 nt, Artificial Sequence
  Description of Artificial Sequence: Synthetic oligonucleotide
  Sense strand starting at position 2538 of SEQ ID NO: 915473
ucaggaugcuugcccguua

SEQ ID NO: 1082441 - RNA, 19 nt, Artificial Sequence
  Description of Artificial Sequence: Synthetic oligonucleotide
  Antisense strand to SEQ ID NO: 1082440
uaacgggcaagcauccuga

SEQ ID NO: 1082442 - RNA, 19 nt, Artificial Sequence
  Description of Artificial Sequence: Synthetic oligonucleotide
  Sense strand starting at position 2608 of SEQ ID NO: 915473
cgggugagccgcugaaagu

SEQ ID NO: 1082443 - RNA, 19 nt, Artificial Sequence
  Description of Artificial Sequence: Synthetic oligonucleotide
  Antisense strand to SEQ ID NO: 1082442
acuuucagcggcucacccg

SEQ ID NO: 1082444 - RNA, 19 nt, Artificial Sequence
  Description of Artificial Sequence: Synthetic oligonucleotide
  Sense strand starting at position 2708 of SEQ ID NO: 915473
agaaauaugugcccggugu

SEQ ID NO: 1082445 - RNA, 19 nt, Artificial Sequence
  Description of Artificial Sequence: Synthetic oligonucleotide
  Antisense strand to SEQ ID NO: 1082444
acaccgggcacauauuucu

SEQ ID NO: 1082446 - RNA, 19 nt, Artificial Sequence
  Description of Artificial Sequence: Synthetic oligonucleotide
  Sense strand starting at position 2867 of SEQ ID NO: 915473
ggagaagacuguuggcuuc

SEQ ID NO: 1082447 - RNA, 19 nt, Artificial Sequence
  Description of Artificial Sequence: Synthetic oligonucleotide
  Antisense strand to SEQ ID NO: 1082446
gaagccaacagucuucucc

SEQ ID NO: 1082448 - RNA, 19 nt, Artificial Sequence
  Description of Artificial Sequence: Synthetic oligonucleotide
  Sense strand starting at position 2873 of SEQ ID NO: 915473
gacuguuggcuucgcguga

SEQ ID NO: 1082449 - RNA, 19 nt, Artificial Sequence
  Description of Artificial Sequence: Synthetic oligonucleotide
  Antisense strand to SEQ ID NO: 1082448
ucacgcgaagccaacaguc

SEQ ID NO: 1082450 - RNA, 19 nt, Artificial Sequence
  Description of Artificial Sequence: Synthetic oligonucleotide
  Sense strand starting at position 2874 of SEQ ID NO: 915473
acuguuggcuucgcgugaa

SEQ ID NO: 1082451 - RNA, 19 nt, Artificial Sequence
  Description of Artificial Sequence: Synthetic oligonucleotide
  Antisense strand to SEQ ID NO: 1082450
uucacgcgaagccaacagu

SEQ ID NO: 1082452 - RNA, 19 nt, Artificial Sequence
  Description of Artificial Sequence: Synthetic oligonucleotide
  Sense strand starting at position 2877 of SEQ ID NO: 915473
guuggcuucgcgugaacuu

SEQ ID NO: 1082453 - RNA, 19 nt, Artificial Sequence
  Description of Artificial Sequence: Synthetic oligonucleotide
  Antisense strand to SEQ ID NO: 1082452
aaguucacgcgaagccaac

SEQ ID NO: 1082454 - RNA, 19 nt, Artificial Sequence
  Description of Artificial Sequence: Synthetic oligonucleotide
  Sense strand starting at position 2918 of SEQ ID NO: 915473
ggcggauuauggucucacu

SEQ ID NO: 1082455 - RNA, 19 nt, Artificial Sequence
  Description of Artificial Sequence: Synthetic oligonucleotide
  Antisense strand to SEQ ID NO: 1082454
agugagaccauaauccgcc

SEQ ID NO: 1082456 - RNA, 19 nt, Artificial Sequence
  Description of Artificial Sequence: Synthetic oligonucleotide
  Sense strand starting at position 2921 of SEQ ID NO: 915473
ggauuauggucucacugga

SEQ ID NO: 1082457 - RNA, 19 nt, Artificial Sequence
  Description of Artificial Sequence: Synthetic oligonucleotide
  Antisense strand to SEQ ID NO: 1082456
uccagugagaccauaaucc

SEQ ID NO: 1082458 - RNA, 19 nt, Artificial Sequence
  Description of Artificial Sequence: Synthetic oligonucleotide
  Sense strand starting at position 2971 of SEQ ID NO: 915473
gcgguaucagcagacccau

SEQ ID NO: 1082459 - RNA, 19 nt, Artificial Sequence
  Description of Artificial Sequence: Synthetic oligonucleotide
  Antisense strand to SEQ ID NO: 1082458
augggucugcugauaccgc

SEQ ID NO: 1082460 - RNA, 19 nt, Artificial Sequence
  Description of Artificial Sequence: Synthetic oligonucleotide
  Sense strand starting at position 3292 of SEQ ID NO: 915473
acagucggcucuugauaaa

SEQ ID NO: 1082461 - RNA, 19 nt, Artificial Sequence
  Description of Artificial Sequence: Synthetic oligonucleotide
  Antisense strand to SEQ ID NO: 1082460
uuuaucaagagccgacugu

SEQ ID NO: 1082462 - RNA, 19 nt, Artificial Sequence
  Description of Artificial Sequence: Synthetic oligonucleotide
  Sense strand starting at position 3302 of SEQ ID NO: 915473
cuugauaaauguuggucuu

SEQ ID NO: 1082463 - RNA, 19 nt, Artificial Sequence
  Description of Artificial Sequence: Synthetic oligonucleotide
  Antisense strand to SEQ ID NO: 1082462
aagaccaacauuuaucaag

SEQ ID NO: 1082464 - RNA, 19 nt, Artificial Sequence
  Description of Artificial Sequence: Synthetic oligonucleotide
  Sense strand starting at position 3303 of SEQ ID NO: 915473
uugauaaauguuggucuua

SEQ ID NO: 1082465 - RNA, 19 nt, Artificial Sequence
  Description of Artificial Sequence: Synthetic oligonucleotide
  Antisense strand to SEQ ID NO: 1082464
uaagaccaacauuuaucaa

SEQ ID NO: 1082466 - RNA, 19 nt, Artificial Sequence
  Description of Artificial Sequence: Synthetic oligonucleotide
  Sense strand starting at position 3304 of SEQ ID NO: 915473
ugauaaauguuggucuuau

SEQ ID NO: 1082467 - RNA, 19 nt, Artificial Sequence
  Description of Artificial Sequence: Synthetic oligonucleotide
  Antisense strand to SEQ ID NO: 1082466
auaagaccaacauuuauca

SEQ ID NO: 1082468 - RNA, 19 nt, Artificial Sequence
  Description of Artificial Sequence: Synthetic oligonucleotide
  Sense strand starting at position 3305 of SEQ ID NO: 915473
gauaaauguuggucuuauu

SEQ ID NO: 1082469 - RNA, 19 nt, Artificial Sequence
  Description of Artificial Sequence: Synthetic oligonucleotide
  Antisense strand to SEQ ID NO: 1082468
aauaagaccaacauuuauc

SEQ ID NO: 1082470 - RNA, 19 nt, Artificial Sequence
  Description of Artificial Sequence: Synthetic oligonucleotide
  Sense strand starting at position 3314 of SEQ ID NO: 915473
uggucuuauucuucccauu

SEQ ID NO: 1082471 - RNA, 19 nt, Artificial Sequence
  Description of Artificial Sequence: Synthetic oligonucleotide
  Antisense strand to SEQ ID NO: 1082470
aaugggaagaauaagacca

SEQ ID NO: 1082472 - RNA, 19 nt, Artificial Sequence
  Description of Artificial Sequence: Synthetic oligonucleotide
  Sense strand starting at position 3360 of SEQ ID NO: 915473
guucuucucgcguucucau

SEQ ID NO: 1082473 - RNA, 19 nt, Artificial Sequence
  Description of Artificial Sequence: Synthetic oligonucleotide
  Antisense strand to SEQ ID NO: 1082472
augagaacgcgagaagaac

SEQ ID NO: 1082474 - RNA, 19 nt, Artificial Sequence
  Description of Artificial Sequence: Synthetic oligonucleotide
  Sense strand starting at position 3361 of SEQ ID NO: 915473
uucuucucgcguucucauu

SEQ ID NO: 1082475 - RNA, 19 nt, Artificial Sequence
  Description of Artificial Sequence: Synthetic oligonucleotide
  Antisense strand to SEQ ID NO: 1082474
aaugagaacgcgagaagaa

SEQ ID NO: 1082476 - RNA, 19 nt, Artificial Sequence
  Description of Artificial Sequence: Synthetic oligonucleotide
  Sense strand starting at position 3411 of SEQ ID NO: 915473
cucauauuucguggucucu

SEQ ID NO: 1082477 - RNA, 19 nt, Artificial Sequence
  Description of Artificial Sequence: Synthetic oligonucleotide
  Antisense strand to SEQ ID NO: 1082476
agagaccacgaaauaugag

SEQ ID NO: 1082478 - RNA, 19 nt, Artificial Sequence
  Description of Artificial Sequence: Synthetic oligonucleotide
  Sense strand starting at position 3474 of SEQ ID NO: 915473
ugucucuacucgucuguuu

SEQ ID NO: 1082479 - RNA, 19 nt, Artificial Sequence
  Description of Artificial Sequence: Synthetic oligonucleotide
  Antisense strand to SEQ ID NO: 1082478
aaacagacgaguagagaca

SEQ ID NO: 1082480 - RNA, 19 nt, Artificial Sequence
  Description of Artificial Sequence: Synthetic oligonucleotide
  Sense strand starting at position 251 of SEQ ID NO: 915474
aguugaaggcauggguauu

SEQ ID NO: 1082481 - RNA, 19 nt, Artificial Sequence
  Description of Artificial Sequence: Synthetic oligonucleotide
  Antisense strand to SEQ ID NO: 1082480
aauacccaugccuucaacu

SEQ ID NO: 1082482 - RNA, 19 nt, Artificial Sequence
  Description of Artificial Sequence: Synthetic oligonucleotide
  Sense strand starting at position 281 of SEQ ID NO: 915474
caaggugugccugagauuc

SEQ ID NO: 1082483 - RNA, 19 nt, Artificial Sequence
  Description of Artificial Sequence: Synthetic oligonucleotide
  Antisense strand to SEQ ID NO: 1082482
gaaucucaggcacaccuug

SEQ ID NO: 1082484 - RNA, 19 nt, Artificial Sequence
  Description of Artificial Sequence: Synthetic oligonucleotide
  Sense strand starting at position 314 of SEQ ID NO: 915474
cuaggagguggucagugau

SEQ ID NO: 1082485 - RNA, 19 nt, Artificial Sequence
  Description of Artificial Sequence: Synthetic oligonucleotide
  Antisense strand to SEQ ID NO: 1082484
aucacugaccaccuccuag

SEQ ID NO: 1082486 - RNA, 19 nt, Artificial Sequence
  Description of Artificial Sequence: Synthetic oligonucleotide
  Sense strand starting at position 324 of SEQ ID NO: 915474
gucagugaugcgucuaccu

SEQ ID NO: 1082487 - RNA, 19 nt, Artificial Sequence
  Description of Artificial Sequence: Synthetic oligonucleotide
  Antisense strand to SEQ ID NO: 1082486
agguagacgcaucacugac

SEQ ID NO: 1082488 - RNA, 19 nt, Artificial Sequence
  Description of Artificial Sequence: Synthetic oligonucleotide
  Sense strand starting at position 406 of SEQ ID NO: 915474
caguaagucccugggcauu

SEQ ID NO: 1082489 - RNA, 19 nt, Artificial Sequence
  Description of Artificial Sequence: Synthetic oligonucleotide
  Antisense strand to SEQ ID NO: 1082488
aaugcccagggacuuacug

SEQ ID NO: 1082490 - RNA, 19 nt, Artificial Sequence
  Description of Artificial Sequence: Synthetic oligonucleotide
  Sense strand starting at position 491 of SEQ ID NO: 915474
ggaagauugcgucacagag

SEQ ID NO: 1082491 - RNA, 19 nt, Artificial Sequence
  Description of Artificial Sequence: Synthetic oligonucleotide
  Antisense strand to SEQ ID NO: 1082490
cucugugacgcaaucuucc

SEQ ID NO: 1082492 - RNA, 19 nt, Artificial Sequence
  Description of Artificial Sequence: Synthetic oligonucleotide
  Sense strand starting at position 495 of SEQ ID NO: 915474
gauugcgucacagagucau

SEQ ID NO: 1082493 - RNA, 19 nt, Artificial Sequence
  Description of Artificial Sequence: Synthetic oligonucleotide
  Antisense strand to SEQ ID NO: 1082492
augacucugugacgcaauc

SEQ ID NO: 1082494 - RNA, 19 nt, Artificial Sequence
  Description of Artificial Sequence: Synthetic oligonucleotide
  Sense strand starting at position 501 of SEQ ID NO: 915474
gucacagagucauucugaa

SEQ ID NO: 1082495 - RNA, 19 nt, Artificial Sequence
  Description of Artificial Sequence: Synthetic oligonucleotide
  Antisense strand to SEQ ID NO: 1082494
uucagaaugacucugugac

SEQ ID NO: 1082496 - RNA, 19 nt, Artificial Sequence
  Description of Artificial Sequence: Synthetic oligonucleotide
  Sense strand starting at position 574 of SEQ ID NO: 915474
agcucuugucaagaaggcu

SEQ ID NO: 1082497 - RNA, 19 nt, Artificial Sequence
  Description of Artificial Sequence: Synthetic oligonucleotide
  Antisense strand to SEQ ID NO: 1082496
agccuucuugacaagagcu

SEQ ID NO: 1082498 - RNA, 19 nt, Artificial Sequence
  Description of Artificial Sequence: Synthetic oligonucleotide
  Sense strand starting at position 649 of SEQ ID NO: 915474
gcuaaagagcccuguacau

SEQ ID NO: 1082499 - RNA, 19 nt, Artificial Sequence
  Description of Artificial Sequence: Synthetic oligonucleotide
  Antisense strand to SEQ ID NO: 1082498
auguacagggcucuuuagc

SEQ ID NO: 1082500 - RNA, 19 nt, Artificial Sequence
  Description of Artificial Sequence: Synthetic oligonucleotide
  Sense strand starting at position 713 of SEQ ID NO: 915474
agucaacagccuuagucau

SEQ ID NO: 1082501 - RNA, 19 nt, Artificial Sequence
  Description of Artificial Sequence: Synthetic oligonucleotide
  Antisense strand to SEQ ID NO: 1082500
augacuaaggcuguugacu

SEQ ID NO: 1082502 - RNA, 19 nt, Artificial Sequence
  Description of Artificial Sequence: Synthetic oligonucleotide
  Sense strand starting at position 728 of SEQ ID NO: 915474
ucauacuccuaugcgauuu

SEQ ID NO: 1082503 - RNA, 19 nt, Artificial Sequence
  Description of Artificial Sequence: Synthetic oligonucleotide
  Antisense strand to SEQ ID NO: 1082502
aaaucgcauaggaguauga

SEQ ID NO: 1082504 - RNA, 19 nt, Artificial Sequence
  Description of Artificial Sequence: Synthetic oligonucleotide
  Sense strand starting at position 742 of SEQ ID NO: 915474
gauuuaugcugagggacau

SEQ ID NO: 1082505 - RNA, 19 nt, Artificial Sequence
  Description of Artificial Sequence: Synthetic oligonucleotide
  Antisense strand to SEQ ID NO: 1082504
augucccucagcauaaauc

SEQ ID NO: 1082506 - RNA, 19 nt, Artificial Sequence
  Description of Artificial Sequence: Synthetic oligonucleotide
  Sense strand starting at position 833 of SEQ ID NO: 915474
gauuguucuuucucugagu

SEQ ID NO: 1082507 - RNA, 19 nt, Artificial Sequence
  Description of Artificial Sequence: Synthetic oligonucleotide
  Antisense strand to SEQ ID NO: 1082506
acucagagaaagaacaauc

SEQ ID NO: 1082508 - RNA, 19 nt, Artificial Sequence
  Description of Artificial Sequence: Synthetic oligonucleotide
  Sense strand starting at position 834 of SEQ ID NO: 915474
auuguucuuucucugagua

SEQ ID NO: 1082509 - RNA, 19 nt, Artificial Sequence
  Description of Artificial Sequence: Synthetic oligonucleotide
  Antisense strand to SEQ ID NO: 1082508
uacucagagaaagaacaau

SEQ ID NO: 1082510 - RNA, 19 nt, Artificial Sequence
  Description of Artificial Sequence: Synthetic oligonucleotide
  Sense strand starting at position 835 of SEQ ID NO: 915474
uuguucuuucucugaguaa

SEQ ID NO: 1082511 - RNA, 19 nt, Artificial Sequence
  Description of Artificial Sequence: Synthetic oligonucleotide
  Antisense strand to SEQ ID NO: 1082510
uuacucagagaaagaacaa

SEQ ID NO: 1082512 - RNA, 19 nt, Artificial Sequence
  Description of Artificial Sequence: Synthetic oligonucleotide
  Sense strand starting at position 839 of SEQ ID NO: 915474
ucuuucucugaguaacuga

SEQ ID NO: 1082513 - RNA, 19 nt, Artificial Sequence
  Description of Artificial Sequence: Synthetic oligonucleotide
  Antisense strand to SEQ ID NO: 1082512
ucaguuacucagagaaaga

SEQ ID NO: 1082514 - RNA, 19 nt, Artificial Sequence
  Description of Artificial Sequence: Synthetic oligonucleotide
  Sense strand starting at position 867 of SEQ ID NO: 915474
ucgacucucuaaucuguuu

SEQ ID NO: 1082515 - RNA, 19 nt, Artificial Sequence
  Description of Artificial Sequence: Synthetic oligonucleotide
  Antisense strand to SEQ ID NO: 1082514
aaacagauuagagagucga

SEQ ID NO: 1082516 - RNA, 19 nt, Artificial Sequence
  Description of Artificial Sequence: Synthetic oligonucleotide
  Sense strand starting at position 872 of SEQ ID NO: 915474
ucucuaaucuguuuagcag

SEQ ID NO: 1082517 - RNA, 19 nt, Artificial Sequence
  Description of Artificial Sequence: Synthetic oligonucleotide
  Antisense strand to SEQ ID NO: 1082516
cugcuaaacagauuagaga

SEQ ID NO: 1082518 - RNA, 19 nt, Artificial Sequence
  Description of Artificial Sequence: Synthetic oligonucleotide
  Sense strand starting at position 1028 of SEQ ID NO: 915474
cggcuucugaaaugugauc

SEQ ID NO: 1082519 - RNA, 19 nt, Artificial Sequence
  Description of Artificial Sequence: Synthetic oligonucleotide
  Antisense strand to SEQ ID NO: 1082518
gaucacauuucagaagccg

SEQ ID NO: 1082520 - RNA, 19 nt, Artificial Sequence
  Description of Artificial Sequence: Synthetic oligonucleotide
  Sense strand starting at position 1105 of SEQ ID NO: 915474
cucugaaagacucgagaca

SEQ ID NO: 1082521 - RNA, 19 nt, Artificial Sequence
  Description of Artificial Sequence: Synthetic oligonucleotide
  Antisense strand to SEQ ID NO: 1082520
ugucucgagucuuucagag

SEQ ID NO: 1082522 - RNA, 19 nt, Artificial Sequence
  Description of Artificial Sequence: Synthetic oligonucleotide
  Sense strand starting at position 1225 of SEQ ID NO: 915474
uuaucagguccagggugau

SEQ ID NO: 1082523 - RNA, 19 nt, Artificial Sequence
  Description of Artificial Sequence: Synthetic oligonucleotide
  Antisense strand to SEQ ID NO: 1082522
aucacccuggaccugauaa

SEQ ID NO: 1082524 - RNA, 19 nt, Artificial Sequence
  Description of Artificial Sequence: Synthetic oligonucleotide
  Sense strand starting at position 1237 of SEQ ID NO: 915474
gggugauguuucucuucag

SEQ ID NO: 1082525 - RNA, 19 nt, Artificial Sequence
  Description of Artificial Sequence: Synthetic oligonucleotide
  Antisense strand to SEQ ID NO: 1082524
cugaagagaaacaucaccc

SEQ ID NO: 1082526 - RNA, 19 nt, Artificial Sequence
  Description of Artificial Sequence: Synthetic oligonucleotide
  Sense strand starting at position 1438 of SEQ ID NO: 915474
cuuauauuccgacgagagc

SEQ ID NO: 1082527 - RNA, 19 nt, Artificial Sequence
  Description of Artificial Sequence: Synthetic oligonucleotide
  Antisense strand to SEQ ID NO: 1082526
gcucucgucggaauauaag

SEQ ID NO: 1082528 - RNA, 19 nt, Artificial Sequence
  Description of Artificial Sequence: Synthetic oligonucleotide
  Sense strand starting at position 1449 of SEQ ID NO: 915474
acgagagccugguuauuuc

SEQ ID NO: 1082529 - RNA, 19 nt, Artificial Sequence
  Description of Artificial Sequence: Synthetic oligonucleotide
  Antisense strand to SEQ ID NO: 1082528
gaaauaaccaggcucucgu

SEQ ID NO: 1082530 - RNA, 19 nt, Artificial Sequence
  Description of Artificial Sequence: Synthetic oligonucleotide
  Sense strand starting at position 1456 of SEQ ID NO: 915474
ccugguuauuuccacugga

SEQ ID NO: 1082531 - RNA, 19 nt, Artificial Sequence
  Description of Artificial Sequence: Synthetic oligonucleotide
  Antisense strand to SEQ ID NO: 1082530
uccaguggaaauaaccagg

SEQ ID NO: 1082532 - RNA, 19 nt, Artificial Sequence
  Description of Artificial Sequence: Synthetic oligonucleotide
  Sense strand starting at position 1566 of SEQ ID NO: 915474
gaagccugacugcauaaga

SEQ ID NO: 1082533 - RNA, 19 nt, Artificial Sequence
  Description of Artificial Sequence: Synthetic oligonucleotide
  Antisense strand to SEQ ID NO: 1082532
ucuuaugcagucaggcuuc

SEQ ID NO: 1082534 - RNA, 19 nt, Artificial Sequence
  Description of Artificial Sequence: Synthetic oligonucleotide
  Sense strand starting at position 2047 of SEQ ID NO: 915474
guuucuugggagcgaagaa

SEQ ID NO: 1082535 - RNA, 19 nt, Artificial Sequence
  Description of Artificial Sequence: Synthetic oligonucleotide
  Antisense strand to SEQ ID NO: 1082534
uucuucgcucccaagaaac

SEQ ID NO: 1082536 - RNA, 19 nt, Artificial Sequence
  Description of Artificial Sequence: Synthetic oligonucleotide
  Sense strand starting at position 2161 of SEQ ID NO: 915474
cgggucauuuaucccaguu

SEQ ID NO: 1082537 - RNA, 19 nt, Artificial Sequence
  Description of Artificial Sequence: Synthetic oligonucleotide
  Antisense strand to SEQ ID NO: 1082536
aacugggauaaaugacccg

SEQ ID NO: 1082538 - RNA, 19 nt, Artificial Sequence
  Description of Artificial Sequence: Synthetic oligonucleotide
  Sense strand starting at position 2395 of SEQ ID NO: 915474
ggcagaugccucugaaaug

SEQ ID NO: 1082539 - RNA, 19 nt, Artificial Sequence
  Description of Artificial Sequence: Synthetic oligonucleotide
  Antisense strand to SEQ ID NO: 1082538
cauuucagaggcaucugcc

SEQ ID NO: 1082540 - RNA, 19 nt, Artificial Sequence
  Description of Artificial Sequence: Synthetic oligonucleotide
  Sense strand starting at position 2563 of SEQ ID NO: 915474
agaucuugucucuacgaaa

SEQ ID NO: 1082541 - RNA, 19 nt, Artificial Sequence
  Description of Artificial Sequence: Synthetic oligonucleotide
  Antisense strand to SEQ ID NO: 1082540
uuucguagagacaagaucu

SEQ ID NO: 1082542 - RNA, 19 nt, Artificial Sequence
  Description of Artificial Sequence: Synthetic oligonucleotide
  Sense strand starting at position 2786 of SEQ ID NO: 915474
ucucaugugugcccuggaa

SEQ ID NO: 1082543 - RNA, 19 nt, Artificial Sequence
  Description of Artificial Sequence: Synthetic oligonucleotide
  Antisense strand to SEQ ID NO: 1082542
uuccagggcacacaugaga

SEQ ID NO: 1082544 - RNA, 19 nt, Artificial Sequence
  Description of Artificial Sequence: Synthetic oligonucleotide
  Sense strand starting at position 2821 of SEQ ID NO: 915474
cagucuagauauccagaga

SEQ ID NO: 1082545 - RNA, 19 nt, Artificial Sequence
  Description of Artificial Sequence: Synthetic oligonucleotide
  Antisense strand to SEQ ID NO: 1082544
ucucuggauaucuagacug

SEQ ID NO: 1082546 - RNA, 19 nt, Artificial Sequence
  Description of Artificial Sequence: Synthetic oligonucleotide
  Sense strand starting at position 2905 of SEQ ID NO: 915474
ggaaguggucaguaccaga

SEQ ID NO: 1082547 - RNA, 19 nt, Artificial Sequence
  Description of Artificial Sequence: Synthetic oligonucleotide
  Antisense strand to SEQ ID NO: 1082546
ucugguacugaccacuucc

SEQ ID NO: 1082548 - RNA, 19 nt, Artificial Sequence
  Description of Artificial Sequence: Synthetic oligonucleotide
  Sense strand starting at position 3654 of SEQ ID NO: 915474
uuaagugauccuugcaucu

SEQ ID NO: 1082549 - RNA, 19 nt, Artificial Sequence
  Description of Artificial Sequence: Synthetic oligonucleotide
  Antisense strand to SEQ ID NO: 1082548
agaugcaaggaucacuuaa

SEQ ID NO: 1082550 - RNA, 19 nt, Artificial Sequence
  Description of Artificial Sequence: Synthetic oligonucleotide
  Sense strand starting at position 3704 of SEQ ID NO: 915474
uugccaauauguuugagua

SEQ ID NO: 1082551 - RNA, 19 nt, Artificial Sequence
  Description of Artificial Sequence: Synthetic oligonucleotide
  Antisense strand to SEQ ID NO: 1082550
uacucaaacauauuggcaa

SEQ ID NO: 1082552 - RNA, 19 nt, Artificial Sequence
  Description of Artificial Sequence: Synthetic oligonucleotide
  Sense strand starting at position 3705 of SEQ ID NO: 915474
ugccaauauguuugaguaa

SEQ ID NO: 1082553 - RNA, 19 nt, Artificial Sequence
  Description of Artificial Sequence: Synthetic oligonucleotide
  Antisense strand to SEQ ID NO: 1082552
uuacucaaacauauuggca

SEQ ID NO: 1082554 - RNA, 19 nt, Artificial Sequence
  Description of Artificial Sequence: Synthetic oligonucleotide
  Sense strand starting at position 3928 of SEQ ID NO: 915474
cgaggaguugugggaaguu

SEQ ID NO: 1082555 - RNA, 19 nt, Artificial Sequence
  Description of Artificial Sequence: Synthetic oligonucleotide
  Antisense strand to SEQ ID NO: 1082554
aacuucccacaacuccucg

SEQ ID NO: 1082556 - RNA, 19 nt, Artificial Sequence
  Description of Artificial Sequence: Synthetic oligonucleotide
  Sense strand starting at position 3938 of SEQ ID NO: 915474
ugggaaguuucagaagaga

SEQ ID NO: 1082557 - RNA, 19 nt, Artificial Sequence
  Description of Artificial Sequence: Synthetic oligonucleotide
  Antisense strand to SEQ ID NO: 1082556
ucucuucugaaacuuccca

SEQ ID NO: 1082558 - RNA, 19 nt, Artificial Sequence
  Description of Artificial Sequence: Synthetic oligonucleotide
  Sense strand starting at position 3970 of SEQ ID NO: 915474
gcagacaucuaggaaagga

SEQ ID NO: 1082559 - RNA, 19 nt, Artificial Sequence
  Description of Artificial Sequence: Synthetic oligonucleotide
  Antisense strand to SEQ ID NO: 1082558
uccuuuccuagaugucugc

SEQ ID NO: 1082560 - RNA, 19 nt, Artificial Sequence
  Description of Artificial Sequence: Synthetic oligonucleotide
  Sense strand starting at position 309 of SEQ ID NO: 915475
gucagugaugcgucuaccu

SEQ ID NO: 1082561 - RNA, 19 nt, Artificial Sequence
  Description of Artificial Sequence: Synthetic oligonucleotide
  Antisense strand to SEQ ID NO: 1082560
agguagacgcaucacugac

SEQ ID NO: 1082562 - RNA, 19 nt, Artificial Sequence
  Description of Artificial Sequence: Synthetic oligonucleotide
  Sense strand starting at position 537 of SEQ ID NO: 915475
agcucuugucaagaaggcu

SEQ ID NO: 1082563 - RNA, 19 nt, Artificial Sequence
  Description of Artificial Sequence: Synthetic oligonucleotide
  Antisense strand to SEQ ID NO: 1082562
agccuucuugacaagagcu

SEQ ID NO: 1082564 - RNA, 19 nt, Artificial Sequence
  Description of Artificial Sequence: Synthetic oligonucleotide
  Sense strand starting at position 676 of SEQ ID NO: 915475
agucaacagccuuagucau

SEQ ID NO: 1082565 - RNA, 19 nt, Artificial Sequence
  Description of Artificial Sequence: Synthetic oligonucleotide
  Antisense strand to SEQ ID NO: 1082564
augacuaaggcuguugacu

SEQ ID NO: 1082566 - RNA, 19 nt, Artificial Sequence
  Description of Artificial Sequence: Synthetic oligonucleotide
  Sense strand starting at position 691 of SEQ ID NO: 915475
ucauacuccuaugcgauuu

SEQ ID NO: 1082567 - RNA, 19 nt, Artificial Sequence
  Description of Artificial Sequence: Synthetic oligonucleotide
  Antisense strand to SEQ ID NO: 1082566
aaaucgcauaggaguauga

SEQ ID NO: 1082568 - RNA, 19 nt, Artificial Sequence
  Description of Artificial Sequence: Synthetic oligonucleotide
  Sense strand starting at position 802 of SEQ ID NO: 915475
ucuuucucugaguaacuga

SEQ ID NO: 1082569 - RNA, 19 nt, Artificial Sequence
  Description of Artificial Sequence: Synthetic oligonucleotide
  Antisense strand to SEQ ID NO: 1082568
ucaguuacucagagaaaga

SEQ ID NO: 1082570 - RNA, 19 nt, Artificial Sequence
  Description of Artificial Sequence: Synthetic oligonucleotide
  Sense strand starting at position 1053 of SEQ ID NO: 915475
ggauauucccagcagcucu

SEQ ID NO: 1082571 - RNA, 19 nt, Artificial Sequence
  Description of Artificial Sequence: Synthetic oligonucleotide
  Antisense strand to SEQ ID NO: 1082570
agagcugcugggaauaucc

SEQ ID NO: 1082572 - RNA, 19 nt, Artificial Sequence
  Description of Artificial Sequence: Synthetic oligonucleotide
  Sense strand starting at position 1068 of SEQ ID NO: 915475
cucugaaagacucgagaca

SEQ ID NO: 1082573 - RNA, 19 nt, Artificial Sequence
  Description of Artificial Sequence: Synthetic oligonucleotide
  Antisense strand to SEQ ID NO: 1082572
ugucucgagucuuucagag

SEQ ID NO: 1082574 - RNA, 19 nt, Artificial Sequence
  Description of Artificial Sequence: Synthetic oligonucleotide
  Sense strand starting at position 1412 of SEQ ID NO: 915475
acgagagccugguuauuuc

SEQ ID NO: 1082575 - RNA, 19 nt, Artificial Sequence
  Description of Artificial Sequence: Synthetic oligonucleotide
  Antisense strand to SEQ ID NO: 1082574
gaaauaaccaggcucucgu

SEQ ID NO: 1082576 - RNA, 19 nt, Artificial Sequence
  Description of Artificial Sequence: Synthetic oligonucleotide
  Sense strand starting at position 1529 of SEQ ID NO: 915475
gaagccugacugcauaaga

SEQ ID NO: 1082577 - RNA, 19 nt, Artificial Sequence
  Description of Artificial Sequence: Synthetic oligonucleotide
  Antisense strand to SEQ ID NO: 1082576
ucuuaugcagucaggcuuc

SEQ ID NO: 1082578 - RNA, 19 nt, Artificial Sequence
  Description of Artificial Sequence: Synthetic oligonucleotide
  Sense strand starting at position 1856 of SEQ ID NO: 915475
aggaaaugauaaucuuguu

SEQ ID NO: 1082579 - RNA, 19 nt, Artificial Sequence
  Description of Artificial Sequence: Synthetic oligonucleotide
  Antisense strand to SEQ ID NO: 1082578
aacaagauuaucauuuccu

SEQ ID NO: 1082580 - RNA, 19 nt, Artificial Sequence
  Description of Artificial Sequence: Synthetic oligonucleotide
  Sense strand starting at position 1861 of SEQ ID NO: 915475
augauaaucuuguugggaa

SEQ ID NO: 1082581 - RNA, 19 nt, Artificial Sequence
  Description of Artificial Sequence: Synthetic oligonucleotide
  Antisense strand to SEQ ID NO: 1082580
uucccaacaagauuaucau

SEQ ID NO: 1082582 - RNA, 19 nt, Artificial Sequence
  Description of Artificial Sequence: Synthetic oligonucleotide
  Sense strand starting at position 1976 of SEQ ID NO: 915475
gguggcugcuauuuauagu

SEQ ID NO: 1082583 - RNA, 19 nt, Artificial Sequence
  Description of Artificial Sequence: Synthetic oligonucleotide
  Antisense strand to SEQ ID NO: 1082582
acuauaaauagcagccacc

SEQ ID NO: 1082584 - RNA, 19 nt, Artificial Sequence
  Description of Artificial Sequence: Synthetic oligonucleotide
  Sense strand starting at position 2069 of SEQ ID NO: 915475
ccuacaaacuggucuaaga

SEQ ID NO: 1082585 - RNA, 19 nt, Artificial Sequence
  Description of Artificial Sequence: Synthetic oligonucleotide
  Antisense strand to SEQ ID NO: 1082584
ucuuagaccaguuuguagg

SEQ ID NO: 1082586 - RNA, 19 nt, Artificial Sequence
  Description of Artificial Sequence: Synthetic oligonucleotide
  Sense strand starting at position 2120 of SEQ ID NO: 915475
cgggucauuuaucccaguu

SEQ ID NO: 1082587 - RNA, 19 nt, Artificial Sequence
  Description of Artificial Sequence: Synthetic oligonucleotide
  Antisense strand to SEQ ID NO: 1082586
aacugggauaaaugacccg

SEQ ID NO: 1082588 - RNA, 19 nt, Artificial Sequence
  Description of Artificial Sequence: Synthetic oligonucleotide
  Sense strand starting at position 2130 of SEQ ID NO: 915475
aucccaguuguguaaccua

SEQ ID NO: 1082589 - RNA, 19 nt, Artificial Sequence
  Description of Artificial Sequence: Synthetic oligonucleotide
  Antisense strand to SEQ ID NO: 1082588
uagguuacacaacugggau

SEQ ID NO: 1082590 - RNA, 19 nt, Artificial Sequence
  Description of Artificial Sequence: Synthetic oligonucleotide
  Sense strand starting at position 2135 of SEQ ID NO: 915475
aguuguguaaccuauggga

SEQ ID NO: 1082591 - RNA, 19 nt, Artificial Sequence
  Description of Artificial Sequence: Synthetic oligonucleotide
  Antisense strand to SEQ ID NO: 1082590
ucccauagguuacacaacu

SEQ ID NO: 1082592 - RNA, 19 nt, Artificial Sequence
  Description of Artificial Sequence: Synthetic oligonucleotide
  Sense strand starting at position 2137 of SEQ ID NO: 915475
uuguguaaccuaugggaac

SEQ ID NO: 1082593 - RNA, 19 nt, Artificial Sequence
  Description of Artificial Sequence: Synthetic oligonucleotide
  Antisense strand to SEQ ID NO: 1082592
guucccauagguuacacaa

SEQ ID NO: 1082594 - RNA, 19 nt, Artificial Sequence
  Description of Artificial Sequence: Synthetic oligonucleotide
  Sense strand starting at position 2139 of SEQ ID NO: 915475
guguaaccuaugggaacaa

SEQ ID NO: 1082595 - RNA, 19 nt, Artificial Sequence
  Description of Artificial Sequence: Synthetic oligonucleotide
  Antisense strand to SEQ ID NO: 1082594
uuguucccauagguuacac

SEQ ID NO: 1082596 - RNA, 19 nt, Artificial Sequence
  Description of Artificial Sequence: Synthetic oligonucleotide
  Sense strand starting at position 2163 of SEQ ID NO: 915475
guuugcugugccuuggcaa

SEQ ID NO: 1082597 - RNA, 19 nt, Artificial Sequence
  Description of Artificial Sequence: Synthetic oligonucleotide
  Antisense strand to SEQ ID NO: 1082596
uugccaaggcacagcaaac

SEQ ID NO: 1082598 - RNA, 19 nt, Artificial Sequence
  Description of Artificial Sequence: Synthetic oligonucleotide
  Sense strand starting at position 2364 of SEQ ID NO: 915475
ggcagaugacccugacuga

SEQ ID NO: 1082599 - RNA, 19 nt, Artificial Sequence
  Description of Artificial Sequence: Synthetic oligonucleotide
  Antisense strand to SEQ ID NO: 1082598
ucagucagggucaucugcc

SEQ ID NO: 1082600 - RNA, 19 nt, Artificial Sequence
  Description of Artificial Sequence: Synthetic oligonucleotide
  Sense strand starting at position 2377 of SEQ ID NO: 915475
gacugaaaucccugugagu

SEQ ID NO: 1082601 - RNA, 19 nt, Artificial Sequence
  Description of Artificial Sequence: Synthetic oligonucleotide
  Antisense strand to SEQ ID NO: 1082600
acucacagggauuucaguc

SEQ ID NO: 1082602 - RNA, 19 nt, Artificial Sequence
  Description of Artificial Sequence: Synthetic oligonucleotide
  Sense strand starting at position 2476 of SEQ ID NO: 915475
cccucuggauguccugaua

SEQ ID NO: 1082603 - RNA, 19 nt, Artificial Sequence
  Description of Artificial Sequence: Synthetic oligonucleotide
  Antisense strand to SEQ ID NO: 1082602
uaucaggacauccagaggg

SEQ ID NO: 1082604 - RNA, 19 nt, Artificial Sequence
  Description of Artificial Sequence: Synthetic oligonucleotide
  Sense strand starting at position 2711 of SEQ ID NO: 915475
gcucuuggucugcuguauu

SEQ ID NO: 1082605 - RNA, 19 nt, Artificial Sequence
  Description of Artificial Sequence: Synthetic oligonucleotide
  Antisense strand to SEQ ID NO: 1082604
aauacagcagaccaagagc

SEQ ID NO: 1082606 - RNA, 19 nt, Artificial Sequence
  Description of Artificial Sequence: Synthetic oligonucleotide
  Sense strand starting at position 2754 of SEQ ID NO: 915475
gcagaucacucucucauga

SEQ ID NO: 1082607 - RNA, 19 nt, Artificial Sequence
  Description of Artificial Sequence: Synthetic oligonucleotide
  Antisense strand to SEQ ID NO: 1082606
ucaugagagagugaucugc

SEQ ID NO: 1082608 - RNA, 19 nt, Artificial Sequence
  Description of Artificial Sequence: Synthetic oligonucleotide
  Sense strand starting at position 2816 of SEQ ID NO: 915475
gagcaugguggccagagau

SEQ ID NO: 1082609 - RNA, 19 nt, Artificial Sequence
  Description of Artificial Sequence: Synthetic oligonucleotide
  Antisense strand to SEQ ID NO: 1082608
aucucuggccaccaugcuc

SEQ ID NO: 1082610 - RNA, 19 nt, Artificial Sequence
  Description of Artificial Sequence: Synthetic oligonucleotide
  Sense strand starting at position 2947 of SEQ ID NO: 915475
aggcauuuguaauaacaaa

SEQ ID NO: 1082611 - RNA, 19 nt, Artificial Sequence
  Description of Artificial Sequence: Synthetic oligonucleotide
  Antisense strand to SEQ ID NO: 1082610
uuuguuauuacaaaugccu

SEQ ID NO: 1082612 - RNA, 19 nt, Artificial Sequence
  Description of Artificial Sequence: Synthetic oligonucleotide
  Sense strand starting at position 2978 of SEQ ID NO: 915475
uuagaaaugggccaggcau

SEQ ID NO: 1082613 - RNA, 19 nt, Artificial Sequence
  Description of Artificial Sequence: Synthetic oligonucleotide
  Antisense strand to SEQ ID NO: 1082612
augccuggcccauuucuaa

SEQ ID NO: 1082614 - RNA, 19 nt, Artificial Sequence
  Description of Artificial Sequence: Synthetic oligonucleotide
  Sense strand starting at position 3143 of SEQ ID NO: 915475
aguaaaggauggccaaaua

SEQ ID NO: 1082615 - RNA, 19 nt, Artificial Sequence
  Description of Artificial Sequence: Synthetic oligonucleotide
  Antisense strand to SEQ ID NO: 1082614
uauuuggccauccuuuacu

SEQ ID NO: 1082616 - RNA, 19 nt, Artificial Sequence
  Description of Artificial Sequence: Synthetic oligonucleotide
  Sense strand starting at position 3204 of SEQ ID NO: 915475
auuauagacucuguucuga

SEQ ID NO: 1082617 - RNA, 19 nt, Artificial Sequence
  Description of Artificial Sequence: Synthetic oligonucleotide
  Antisense strand to SEQ ID NO: 1082616
ucagaacagagucuauaau

SEQ ID NO: 1082618 - RNA, 19 nt, Artificial Sequence
  Description of Artificial Sequence: Synthetic oligonucleotide
  Sense strand starting at position 3206 of SEQ ID NO: 915475
uauagacucuguucugaga

SEQ ID NO: 1082619 - RNA, 19 nt, Artificial Sequence
  Description of Artificial Sequence: Synthetic oligonucleotide
  Antisense strand to SEQ ID NO: 1082618
ucucagaacagagucuaua

SEQ ID NO: 1082620 - RNA, 19 nt, Artificial Sequence
  Description of Artificial Sequence: Synthetic oligonucleotide
  Sense strand starting at position 3217 of SEQ ID NO: 915475
uucugagaccuaugcauug

SEQ ID NO: 1082621 - RNA, 19 nt, Artificial Sequence
  Description of Artificial Sequence: Synthetic oligonucleotide
  Antisense strand to SEQ ID NO: 1082620
caaugcauaggucucagaa

SEQ ID NO: 1082622 - RNA, 19 nt, Artificial Sequence
  Description of Artificial Sequence: Synthetic oligonucleotide
  Sense strand starting at position 3452 of SEQ ID NO: 915475
auagcacaucgugauuaac

SEQ ID NO: 1082623 - RNA, 19 nt, Artificial Sequence
  Description of Artificial Sequence: Synthetic oligonucleotide
  Antisense strand to SEQ ID NO: 1082622
guuaaucacgaugugcuau

SEQ ID NO: 1082624 - RNA, 19 nt, Artificial Sequence
  Description of Artificial Sequence: Synthetic oligonucleotide
  Sense strand starting at position 3462 of SEQ ID NO: 915475
gugauuaaccagggcuuau

SEQ ID NO: 1082625 - RNA, 19 nt, Artificial Sequence
  Description of Artificial Sequence: Synthetic oligonucleotide
  Antisense strand to SEQ ID NO: 1082624
auaagcccugguuaaucac

SEQ ID NO: 1082626 - RNA, 19 nt, Artificial Sequence
  Description of Artificial Sequence: Synthetic oligonucleotide
  Sense strand starting at position 3473 of SEQ ID NO: 915475
gggcuuauuccagggaguc

SEQ ID NO: 1082627 - RNA, 19 nt, Artificial Sequence
  Description of Artificial Sequence: Synthetic oligonucleotide
  Antisense strand to SEQ ID NO: 1082626
gacucccuggaauaagccc

SEQ ID NO: 1082628 - RNA, 19 nt, Artificial Sequence
  Description of Artificial Sequence: Synthetic oligonucleotide
  Sense strand starting at position 3474 of SEQ ID NO: 915475
ggcuuauuccagggaguca

SEQ ID NO: 1082629 - RNA, 19 nt, Artificial Sequence
  Description of Artificial Sequence: Synthetic oligonucleotide
  Antisense strand to SEQ ID NO: 1082628
ugacucccuggaauaagcc

SEQ ID NO: 1082630 - RNA, 19 nt, Artificial Sequence
  Description of Artificial Sequence: Synthetic oligonucleotide
  Sense strand starting at position 3475 of SEQ ID NO: 915475
gcuuauuccagggagucaa

SEQ ID NO: 1082631 - RNA, 19 nt, Artificial Sequence
  Description of Artificial Sequence: Synthetic oligonucleotide
  Antisense strand to SEQ ID NO: 1082630
uugacucccuggaauaagc

SEQ ID NO: 1082632 - RNA, 19 nt, Artificial Sequence
  Description of Artificial Sequence: Synthetic oligonucleotide
  Sense strand starting at position 3645 of SEQ ID NO: 915475
gagaccauuucugacuuga

SEQ ID NO: 1082633 - RNA, 19 nt, Artificial Sequence
  Description of Artificial Sequence: Synthetic oligonucleotide
  Antisense strand to SEQ ID NO: 1082632
ucaagucagaaauggucuc

SEQ ID NO: 1082634 - RNA, 19 nt, Artificial Sequence
  Description of Artificial Sequence: Synthetic oligonucleotide
  Sense strand starting at position 3828 of SEQ ID NO: 915475
augacaaguuaguugauau

SEQ ID NO: 1082635 - RNA, 19 nt, Artificial Sequence
  Description of Artificial Sequence: Synthetic oligonucleotide
  Antisense strand to SEQ ID NO: 1082634
auaucaacuaacuugucau

SEQ ID NO: 1082636 - RNA, 19 nt, Artificial Sequence
  Description of Artificial Sequence: Synthetic oligonucleotide
  Sense strand starting at position 3829 of SEQ ID NO: 915475
ugacaaguuaguugauaug

SEQ ID NO: 1082637 - RNA, 19 nt, Artificial Sequence
  Description of Artificial Sequence: Synthetic oligonucleotide
  Antisense strand to SEQ ID NO: 1082636
cauaucaacuaacuuguca

SEQ ID NO: 1082638 - RNA, 19 nt, Artificial Sequence
  Description of Artificial Sequence: Synthetic oligonucleotide
  Sense strand starting at position 3838 of SEQ ID NO: 915475
aguugauaugaguguggau

SEQ ID NO: 1082639 - RNA, 19 nt, Artificial Sequence
  Description of Artificial Sequence: Synthetic oligonucleotide
  Antisense strand to SEQ ID NO: 1082638
auccacacucauaucaacu

SEQ ID NO: 1082640 - RNA, 19 nt, Artificial Sequence
  Description of Artificial Sequence: Synthetic oligonucleotide
  Sense strand starting at position 309 of SEQ ID NO: 915476
gucagugaugcgucuaccu

SEQ ID NO: 1082641 - RNA, 19 nt, Artificial Sequence
  Description of Artificial Sequence: Synthetic oligonucleotide
  Antisense strand to SEQ ID NO: 1082640
agguagacgcaucacugac

SEQ ID NO: 1082642 - RNA, 19 nt, Artificial Sequence
  Description of Artificial Sequence: Synthetic oligonucleotide
  Sense strand starting at position 537 of SEQ ID NO: 915476
agcucuugucaagaaggcu

SEQ ID NO: 1082643 - RNA, 19 nt, Artificial Sequence
  Description of Artificial Sequence: Synthetic oligonucleotide
  Antisense strand to SEQ ID NO: 1082642
agccuucuugacaagagcu

SEQ ID NO: 1082644 - RNA, 19 nt, Artificial Sequence
  Description of Artificial Sequence: Synthetic oligonucleotide
  Sense strand starting at position 676 of SEQ ID NO: 915476
agucaacagccuuagucau

SEQ ID NO: 1082645 - RNA, 19 nt, Artificial Sequence
  Description of Artificial Sequence: Synthetic oligonucleotide
  Antisense strand to SEQ ID NO: 1082644
augacuaaggcuguugacu

SEQ ID NO: 1082646 - RNA, 19 nt, Artificial Sequence
  Description of Artificial Sequence: Synthetic oligonucleotide
  Sense strand starting at position 691 of SEQ ID NO: 915476
ucauacuccuaugcgauuu

SEQ ID NO: 1082647 - RNA, 19 nt, Artificial Sequence
  Description of Artificial Sequence: Synthetic oligonucleotide
  Antisense strand to SEQ ID NO: 1082646
aaaucgcauaggaguauga

SEQ ID NO: 1082648 - RNA, 19 nt, Artificial Sequence
  Description of Artificial Sequence: Synthetic oligonucleotide
  Sense strand starting at position 802 of SEQ ID NO: 915476
ucuuucucugaguaacuga

SEQ ID NO: 1082649 - RNA, 19 nt, Artificial Sequence
  Description of Artificial Sequence: Synthetic oligonucleotide
  Antisense strand to SEQ ID NO: 1082648
ucaguuacucagagaaaga

SEQ ID NO: 1082650 - RNA, 19 nt, Artificial Sequence
  Description of Artificial Sequence: Synthetic oligonucleotide
  Sense strand starting at position 1053 of SEQ ID NO: 915476
ggauauucccagcagcucu

SEQ ID NO: 1082651 - RNA, 19 nt, Artificial Sequence
  Description of Artificial Sequence: Synthetic oligonucleotide
  Antisense strand to SEQ ID NO: 1082650
agagcugcugggaauaucc

SEQ ID NO: 1082652 - RNA, 19 nt, Artificial Sequence
  Description of Artificial Sequence: Synthetic oligonucleotide
  Sense strand starting at position 1068 of SEQ ID NO: 915476
cucugaaagacucgagaca

SEQ ID NO: 1082653 - RNA, 19 nt, Artificial Sequence
  Description of Artificial Sequence: Synthetic oligonucleotide
  Antisense strand to SEQ ID NO: 1082652
ugucucgagucuuucagag

SEQ ID NO: 1082654 - RNA, 19 nt, Artificial Sequence
  Description of Artificial Sequence: Synthetic oligonucleotide
  Sense strand starting at position 1412 of SEQ ID NO: 915476
acgagagccugguuauuuc

SEQ ID NO: 1082655 - RNA, 19 nt, Artificial Sequence
  Description of Artificial Sequence: Synthetic oligonucleotide
  Antisense strand to SEQ ID NO: 1082654
gaaauaaccaggcucucgu

SEQ ID NO: 1082656 - RNA, 19 nt, Artificial Sequence
  Description of Artificial Sequence: Synthetic oligonucleotide
  Sense strand starting at position 1529 of SEQ ID NO: 915476
gaagccugacugcauaaga

SEQ ID NO: 1082657 - RNA, 19 nt, Artificial Sequence
  Description of Artificial Sequence: Synthetic oligonucleotide
  Antisense strand to SEQ ID NO: 1082656
ucuuaugcagucaggcuuc

SEQ ID NO: 1082658 - RNA, 19 nt, Artificial Sequence
  Description of Artificial Sequence: Synthetic oligonucleotide
  Sense strand starting at position 1856 of SEQ ID NO: 915476
aggaaaugauaaucuuguu

SEQ ID NO: 1082659 - RNA, 19 nt, Artificial Sequence
  Description of Artificial Sequence: Synthetic oligonucleotide
  Antisense strand to SEQ ID NO: 1082658
aacaagauuaucauuuccu

SEQ ID NO: 1082660 - RNA, 19 nt, Artificial Sequence
  Description of Artificial Sequence: Synthetic oligonucleotide
  Sense strand starting at position 1861 of SEQ ID NO: 915476
augauaaucuuguugggaa

SEQ ID NO: 1082661 - RNA, 19 nt, Artificial Sequence
  Description of Artificial Sequence: Synthetic oligonucleotide
  Antisense strand to SEQ ID NO: 1082660
uucccaacaagauuaucau

SEQ ID NO: 1082662 - RNA, 19 nt, Artificial Sequence
  Description of Artificial Sequence: Synthetic oligonucleotide
  Sense strand starting at position 1976 of SEQ ID NO: 915476
gguggcugcuauuuauagu

SEQ ID NO: 1082663 - RNA, 19 nt, Artificial Sequence
  Description of Artificial Sequence: Synthetic oligonucleotide
  Antisense strand to SEQ ID NO: 1082662
acuauaaauagcagccacc

SEQ ID NO: 1082664 - RNA, 19 nt, Artificial Sequence
  Description of Artificial Sequence: Synthetic oligonucleotide
  Sense strand starting at position 2069 of SEQ ID NO: 915476
ccuacaaacuggucuaaga

SEQ ID NO: 1082665 - RNA, 19 nt, Artificial Sequence
  Description of Artificial Sequence: Synthetic oligonucleotide
  Antisense strand to SEQ ID NO: 1082664
ucuuagaccaguuuguagg

SEQ ID NO: 1082666 - RNA, 19 nt, Artificial Sequence
  Description of Artificial Sequence: Synthetic oligonucleotide
  Sense strand starting at position 2120 of SEQ ID NO: 915476
cgggucauuuaucccaguu

SEQ ID NO: 1082667 - RNA, 19 nt, Artificial Sequence
  Description of Artificial Sequence: Synthetic oligonucleotide
  Antisense strand to SEQ ID NO: 1082666
aacugggauaaaugacccg

SEQ ID NO: 1082668 - RNA, 19 nt, Artificial Sequence
  Description of Artificial Sequence: Synthetic oligonucleotide
  Sense strand starting at position 2130 of SEQ ID NO: 915476
aucccaguuguguaaccua

SEQ ID NO: 1082669 - RNA, 19 nt, Artificial Sequence
  Description of Artificial Sequence: Synthetic oligonucleotide
  Antisense strand to SEQ ID NO: 1082668
uagguuacacaacugggau

SEQ ID NO: 1082670 - RNA, 19 nt, Artificial Sequence
  Description of Artificial Sequence: Synthetic oligonucleotide
  Sense strand starting at position 2135 of SEQ ID NO: 915476
aguuguguaaccuauggga

SEQ ID NO: 1082671 - RNA, 19 nt, Artificial Sequence
  Description of Artificial Sequence: Synthetic oligonucleotide
  Antisense strand to SEQ ID NO: 1082670
ucccauagguuacacaacu

SEQ ID NO: 1082672 - RNA, 19 nt, Artificial Sequence
  Description of Artificial Sequence: Synthetic oligonucleotide
  Sense strand starting at position 2137 of SEQ ID NO: 915476
uuguguaaccuaugggaac

SEQ ID NO: 1082673 - RNA, 19 nt, Artificial Sequence
  Description of Artificial Sequence: Synthetic oligonucleotide
  Antisense strand to SEQ ID NO: 1082672
guucccauagguuacacaa

SEQ ID NO: 1082674 - RNA, 19 nt, Artificial Sequence
  Description of Artificial Sequence: Synthetic oligonucleotide
  Sense strand starting at position 2139 of SEQ ID NO: 915476
guguaaccuaugggaacaa

SEQ ID NO: 1082675 - RNA, 19 nt, Artificial Sequence
  Description of Artificial Sequence: Synthetic oligonucleotide
  Antisense strand to SEQ ID NO: 1082674
uuguucccauagguuacac

SEQ ID NO: 1082676 - RNA, 19 nt, Artificial Sequence
  Description of Artificial Sequence: Synthetic oligonucleotide
  Sense strand starting at position 2163 of SEQ ID NO: 915476
guuugcugugccuuggcaa

SEQ ID NO: 1082677 - RNA, 19 nt, Artificial Sequence
  Description of Artificial Sequence: Synthetic oligonucleotide
  Antisense strand to SEQ ID NO: 1082676
uugccaaggcacagcaaac

SEQ ID NO: 1082678 - RNA, 19 nt, Artificial Sequence
  Description of Artificial Sequence: Synthetic oligonucleotide
  Sense strand starting at position 2364 of SEQ ID NO: 915476
ggcagaugacccugacuga

SEQ ID NO: 1082679 - RNA, 19 nt, Artificial Sequence
  Description of Artificial Sequence: Synthetic oligonucleotide
  Antisense strand to SEQ ID NO: 1082678
ucagucagggucaucugcc

SEQ ID NO: 1082680 - RNA, 19 nt, Artificial Sequence
  Description of Artificial Sequence: Synthetic oligonucleotide
  Sense strand starting at position 2377 of SEQ ID NO: 915476
gacugaaaucccugugagu

SEQ ID NO: 1082681 - RNA, 19 nt, Artificial Sequence
  Description of Artificial Sequence: Synthetic oligonucleotide
  Antisense strand to SEQ ID NO: 1082680
acucacagggauuucaguc

SEQ ID NO: 1082682 - RNA, 19 nt, Artificial Sequence
  Description of Artificial Sequence: Synthetic oligonucleotide
  Sense strand starting at position 2476 of SEQ ID NO: 915476
cccucuggauguccugaua

SEQ ID NO: 1082683 - RNA, 19 nt, Artificial Sequence
  Description of Artificial Sequence: Synthetic oligonucleotide
  Antisense strand to SEQ ID NO: 1082682
uaucaggacauccagaggg

SEQ ID NO: 1082684 - RNA, 19 nt, Artificial Sequence
  Description of Artificial Sequence: Synthetic oligonucleotide
  Sense strand starting at position 2711 of SEQ ID NO: 915476
gcucuuggucugcuguauu

SEQ ID NO: 1082685 - RNA, 19 nt, Artificial Sequence
  Description of Artificial Sequence: Synthetic oligonucleotide
  Antisense strand to SEQ ID NO: 1082684
aauacagcagaccaagagc

SEQ ID NO: 1082686 - RNA, 19 nt, Artificial Sequence
  Description of Artificial Sequence: Synthetic oligonucleotide
  Sense strand starting at position 2754 of SEQ ID NO: 915476
gcagaucacucucucauga

SEQ ID NO: 1082687 - RNA, 19 nt, Artificial Sequence
  Description of Artificial Sequence: Synthetic oligonucleotide
  Antisense strand to SEQ ID NO: 1082686
ucaugagagagugaucugc

SEQ ID NO: 1082688 - RNA, 19 nt, Artificial Sequence
  Description of Artificial Sequence: Synthetic oligonucleotide
  Sense strand starting at position 2816 of SEQ ID NO: 915476
gagcaugguggccagagau

SEQ ID NO: 1082689 - RNA, 19 nt, Artificial Sequence
  Description of Artificial Sequence: Synthetic oligonucleotide
  Antisense strand to SEQ ID NO: 1082688
aucucuggccaccaugcuc

SEQ ID NO: 1082690 - RNA, 19 nt, Artificial Sequence
  Description of Artificial Sequence: Synthetic oligonucleotide
  Sense strand starting at position 2947 of SEQ ID NO: 915476
aggcauuuguaauaacaaa

SEQ ID NO: 1082691 - RNA, 19 nt, Artificial Sequence
  Description of Artificial Sequence: Synthetic oligonucleotide
  Antisense strand to SEQ ID NO: 1082690
uuuguuauuacaaaugccu

SEQ ID NO: 1082692 - RNA, 19 nt, Artificial Sequence
  Description of Artificial Sequence: Synthetic oligonucleotide
  Sense strand starting at position 2978 of SEQ ID NO: 915476
uuagaaaugggccaggcau

SEQ ID NO: 1082693 - RNA, 19 nt, Artificial Sequence
  Description of Artificial Sequence: Synthetic oligonucleotide
  Antisense strand to SEQ ID NO: 1082692
augccuggcccauuucuaa

SEQ ID NO: 1082694 - RNA, 19 nt, Artificial Sequence
  Description of Artificial Sequence: Synthetic oligonucleotide
  Sense strand starting at position 3143 of SEQ ID NO: 915476
aguaaaggauggccaaaua

SEQ ID NO: 1082695 - RNA, 19 nt, Artificial Sequence
  Description of Artificial Sequence: Synthetic oligonucleotide
  Antisense strand to SEQ ID NO: 1082694
uauuuggccauccuuuacu

SEQ ID NO: 1082696 - RNA, 19 nt, Artificial Sequence
  Description of Artificial Sequence: Synthetic oligonucleotide
  Sense strand starting at position 3204 of SEQ ID NO: 915476
auuauagacucuguucuga

SEQ ID NO: 1082697 - RNA, 19 nt, Artificial Sequence
  Description of Artificial Sequence: Synthetic oligonucleotide
  Antisense strand to SEQ ID NO: 1082696
ucagaacagagucuauaau

SEQ ID NO: 1082698 - RNA, 19 nt, Artificial Sequence
  Description of Artificial Sequence: Synthetic oligonucleotide
  Sense strand starting at position 3206 of SEQ ID NO: 915476
uauagacucuguucugaga

SEQ ID NO: 1082699 - RNA, 19 nt, Artificial Sequence
  Description of Artificial Sequence: Synthetic oligonucleotide
  Antisense strand to SEQ ID NO: 1082698
ucucagaacagagucuaua

SEQ ID NO: 1082700 - RNA, 19 nt, Artificial Sequence
  Description of Artificial Sequence: Synthetic oligonucleotide
  Sense strand starting at position 3217 of SEQ ID NO: 915476
uucugagaccuaugcauug

SEQ ID NO: 1082701 - RNA, 19 nt, Artificial Sequence
  Description of Artificial Sequence: Synthetic oligonucleotide
  Antisense strand to SEQ ID NO: 1082700
caaugcauaggucucagaa

SEQ ID NO: 1082702 - RNA, 19 nt, Artificial Sequence
  Description of Artificial Sequence: Synthetic oligonucleotide
  Sense strand starting at position 3452 of SEQ ID NO: 915476
auagcacaucgugauuaac

SEQ ID NO: 1082703 - RNA, 19 nt, Artificial Sequence
  Description of Artificial Sequence: Synthetic oligonucleotide
  Antisense strand to SEQ ID NO: 1082702
guuaaucacgaugugcuau

SEQ ID NO: 1082704 - RNA, 19 nt, Artificial Sequence
  Description of Artificial Sequence: Synthetic oligonucleotide
  Sense strand starting at position 3462 of SEQ ID NO: 915476
gugauuaaccagggcuuau

SEQ ID NO: 1082705 - RNA, 19 nt, Artificial Sequence
  Description of Artificial Sequence: Synthetic oligonucleotide
  Antisense strand to SEQ ID NO: 1082704
auaagcccugguuaaucac

SEQ ID NO: 1082706 - RNA, 19 nt, Artificial Sequence
  Description of Artificial Sequence: Synthetic oligonucleotide
  Sense strand starting at position 3473 of SEQ ID NO: 915476
gggcuuauuccagggaguc

SEQ ID NO: 1082707 - RNA, 19 nt, Artificial Sequence
  Description of Artificial Sequence: Synthetic oligonucleotide
  Antisense strand to SEQ ID NO: 1082706
gacucccuggaauaagccc

SEQ ID NO: 1082708 - RNA, 19 nt, Artificial Sequence
  Description of Artificial Sequence: Synthetic oligonucleotide
  Sense strand starting at position 3474 of SEQ ID NO: 915476
ggcuuauuccagggaguca

SEQ ID NO: 1082709 - RNA, 19 nt, Artificial Sequence
  Description of Artificial Sequence: Synthetic oligonucleotide
  Antisense strand to SEQ ID NO: 1082708
ugacucccuggaauaagcc

SEQ ID NO: 1082710 - RNA, 19 nt, Artificial Sequence
  Description of Artificial Sequence: Synthetic oligonucleotide
  Sense strand starting at position 3475 of SEQ ID NO: 915476
gcuuauuccagggagucaa

SEQ ID NO: 1082711 - RNA, 19 nt, Artificial Sequence
  Description of Artificial Sequence: Synthetic oligonucleotide
  Antisense strand to SEQ ID NO: 1082710
uugacucccuggaauaagc

SEQ ID NO: 1082712 - RNA, 19 nt, Artificial Sequence
  Description of Artificial Sequence: Synthetic oligonucleotide
  Sense strand starting at position 3645 of SEQ ID NO: 915476
gagaccauuucugacuuga

SEQ ID NO: 1082713 - RNA, 19 nt, Artificial Sequence
  Description of Artificial Sequence: Synthetic oligonucleotide
  Antisense strand to SEQ ID NO: 1082712
ucaagucagaaauggucuc

SEQ ID NO: 1082714 - RNA, 19 nt, Artificial Sequence
  Description of Artificial Sequence: Synthetic oligonucleotide
  Sense strand starting at position 3828 of SEQ ID NO: 915476
augacaaguuaguugauau

SEQ ID NO: 1082715 - RNA, 19 nt, Artificial Sequence
  Description of Artificial Sequence: Synthetic oligonucleotide
  Antisense strand to SEQ ID NO: 1082714
auaucaacuaacuugucau

SEQ ID NO: 1082716 - RNA, 19 nt, Artificial Sequence
  Description of Artificial Sequence: Synthetic oligonucleotide
  Sense strand starting at position 3829 of SEQ ID NO: 915476
ugacaaguuaguugauaug

SEQ ID NO: 1082717 - RNA, 19 nt, Artificial Sequence
  Description of Artificial Sequence: Synthetic oligonucleotide
  Antisense strand to SEQ ID NO: 1082716
cauaucaacuaacuuguca

SEQ ID NO: 1082718 - RNA, 19 nt, Artificial Sequence
  Description of Artificial Sequence: Synthetic oligonucleotide
  Sense strand starting at position 3838 of SEQ ID NO: 915476
aguugauaugaguguggau

SEQ ID NO: 1082719 - RNA, 19 nt, Artificial Sequence
  Description of Artificial Sequence: Synthetic oligonucleotide
  Antisense strand to SEQ ID NO: 1082718
auccacacucauaucaacu

SEQ ID NO: 1082720 - RNA, 19 nt, Artificial Sequence
  Description of Artificial Sequence: Synthetic oligonucleotide
  Sense strand starting at position 78 of SEQ ID NO: 915477
cuaagauucugacucagua

SEQ ID NO: 1082721 - RNA, 19 nt, Artificial Sequence
  Description of Artificial Sequence: Synthetic oligonucleotide
  Antisense strand to SEQ ID NO: 1082720
uacugagucagaaucuuag

SEQ ID NO: 1082722 - RNA, 19 nt, Artificial Sequence
  Description of Artificial Sequence: Synthetic oligonucleotide
  Sense strand starting at position 207 of SEQ ID NO: 915477
ucucuacuaugugcagaaa

SEQ ID NO: 1082723 - RNA, 19 nt, Artificial Sequence
  Description of Artificial Sequence: Synthetic oligonucleotide
  Antisense strand to SEQ ID NO: 1082722
uuucugcacauaguagaga

SEQ ID NO: 1082724 - RNA, 19 nt, Artificial Sequence
  Description of Artificial Sequence: Synthetic oligonucleotide
  Sense strand starting at position 419 of SEQ ID NO: 915477
acagcuagucaauaagauu

SEQ ID NO: 1082725 - RNA, 19 nt, Artificial Sequence
  Description of Artificial Sequence: Synthetic oligonucleotide
  Antisense strand to SEQ ID NO: 1082724
aaucuuauugacuagcugu

SEQ ID NO: 1082726 - RNA, 19 nt, Artificial Sequence
  Description of Artificial Sequence: Synthetic oligonucleotide
  Sense strand starting at position 462 of SEQ ID NO: 915477
gucaguuucccagccguau

SEQ ID NO: 1082727 - RNA, 19 nt, Artificial Sequence
  Description of Artificial Sequence: Synthetic oligonucleotide
  Antisense strand to SEQ ID NO: 1082726
auacggcugggaaacugac

SEQ ID NO: 1082728 - RNA, 19 nt, Artificial Sequence
  Description of Artificial Sequence: Synthetic oligonucleotide
  Sense strand starting at position 492 of SEQ ID NO: 915477
uguggcuaaucaguagaaa

SEQ ID NO: 1082729 - RNA, 19 nt, Artificial Sequence
  Description of Artificial Sequence: Synthetic oligonucleotide
  Antisense strand to SEQ ID NO: 1082728
uuucuacugauuagccaca

SEQ ID NO: 1082730 - RNA, 19 nt, Artificial Sequence
  Description of Artificial Sequence: Synthetic oligonucleotide
  Sense strand starting at position 493 of SEQ ID NO: 915477
guggcuaaucaguagaaau

SEQ ID NO: 1082731 - RNA, 19 nt, Artificial Sequence
  Description of Artificial Sequence: Synthetic oligonucleotide
  Antisense strand to SEQ ID NO: 1082730
auuucuacugauuagccac

SEQ ID NO: 1082732 - RNA, 19 nt, Artificial Sequence
  Description of Artificial Sequence: Synthetic oligonucleotide
  Sense strand starting at position 577 of SEQ ID NO: 915477
ggccauuugcuuggguaca

SEQ ID NO: 1082733 - RNA, 19 nt, Artificial Sequence
  Description of Artificial Sequence: Synthetic oligonucleotide
  Antisense strand to SEQ ID NO: 1082732
uguacccaagcaaauggcc

SEQ ID NO: 1082734 - RNA, 19 nt, Artificial Sequence
  Description of Artificial Sequence: Synthetic oligonucleotide
  Sense strand starting at position 630 of SEQ ID NO: 915477
ucagucuuggaguauaauu

SEQ ID NO: 1082735 - RNA, 19 nt, Artificial Sequence
  Description of Artificial Sequence: Synthetic oligonucleotide
  Antisense strand to SEQ ID NO: 1082734
aauuauacuccaagacuga

SEQ ID NO: 1082736 - RNA, 19 nt, Artificial Sequence
  Description of Artificial Sequence: Synthetic oligonucleotide
  Sense strand starting at position 635 of SEQ ID NO: 915477
cuuggaguauaauugugaa

SEQ ID NO: 1082737 - RNA, 19 nt, Artificial Sequence
  Description of Artificial Sequence: Synthetic oligonucleotide
  Antisense strand to SEQ ID NO: 1082736
uucacaauuauacuccaag

SEQ ID NO: 1082738 - RNA, 19 nt, Artificial Sequence
  Description of Artificial Sequence: Synthetic oligonucleotide
  Sense strand starting at position 647 of SEQ ID NO: 915477
uugugaacucaguauauuc

SEQ ID NO: 1082739 - RNA, 19 nt, Artificial Sequence
  Description of Artificial Sequence: Synthetic oligonucleotide
  Antisense strand to SEQ ID NO: 1082738
gaauauacugaguucacaa

SEQ ID NO: 1082740 - RNA, 19 nt, Artificial Sequence
  Description of Artificial Sequence: Synthetic oligonucleotide
  Sense strand starting at position 668 of SEQ ID NO: 915477
ugagguggaugagcuaaau

SEQ ID NO: 1082741 - RNA, 19 nt, Artificial Sequence
  Description of Artificial Sequence: Synthetic oligonucleotide
  Antisense strand to SEQ ID NO: 1082740
auuuagcucauccaccuca

SEQ ID NO: 1082742 - RNA, 19 nt, Artificial Sequence
  Description of Artificial Sequence: Synthetic oligonucleotide
  Sense strand starting at position 922 of SEQ ID NO: 915477
acucacauccagugaguau

SEQ ID NO: 1082743 - RNA, 19 nt, Artificial Sequence
  Description of Artificial Sequence: Synthetic oligonucleotide
  Antisense strand to SEQ ID NO: 1082742
auacucacuggaugugagu

SEQ ID NO: 1082744 - RNA, 19 nt, Artificial Sequence
  Description of Artificial Sequence: Synthetic oligonucleotide
  Sense strand starting at position 1038 of SEQ ID NO: 915477
uggugacucccaugaccaa

SEQ ID NO: 1082745 - RNA, 19 nt, Artificial Sequence
  Description of Artificial Sequence: Synthetic oligonucleotide
  Antisense strand to SEQ ID NO: 1082744
uuggucaugggagucacca

SEQ ID NO: 1082746 - RNA, 19 nt, Artificial Sequence
  Description of Artificial Sequence: Synthetic oligonucleotide
  Sense strand starting at position 1084 of SEQ ID NO: 915477
ccucauugugcugaagaga

SEQ ID NO: 1082747 - RNA, 19 nt, Artificial Sequence
  Description of Artificial Sequence: Synthetic oligonucleotide
  Antisense strand to SEQ ID NO: 1082746
ucucuucagcacaaugagg

SEQ ID NO: 1082748 - RNA, 19 nt, Artificial Sequence
  Description of Artificial Sequence: Synthetic oligonucleotide
  Sense strand starting at position 1589 of SEQ ID NO: 915477
gaaagauugaaacggguuu

SEQ ID NO: 1082749 - RNA, 19 nt, Artificial Sequence
  Description of Artificial Sequence: Synthetic oligonucleotide
  Antisense strand to SEQ ID NO: 1082748
aaacccguuucaaucuuuc

SEQ ID NO: 1082750 - RNA, 19 nt, Artificial Sequence
  Description of Artificial Sequence: Synthetic oligonucleotide
  Sense strand starting at position 1648 of SEQ ID NO: 915477
uagaaagaauaagaggauu

SEQ ID NO: 1082751 - RNA, 19 nt, Artificial Sequence
  Description of Artificial Sequence: Synthetic oligonucleotide
  Antisense strand to SEQ ID NO: 1082750
aauccucuuauucuuucua

SEQ ID NO: 1082752 - RNA, 19 nt, Artificial Sequence
  Description of Artificial Sequence: Synthetic oligonucleotide
  Sense strand starting at position 1659 of SEQ ID NO: 915477
agaggauuccaacguguua

SEQ ID NO: 1082753 - RNA, 19 nt, Artificial Sequence
  Description of Artificial Sequence: Synthetic oligonucleotide
  Antisense strand to SEQ ID NO: 1082752
uaacacguuggaauccucu

SEQ ID NO: 1082754 - RNA, 19 nt, Artificial Sequence
  Description of Artificial Sequence: Synthetic oligonucleotide
  Sense strand starting at position 1674 of SEQ ID NO: 915477
guuauuuggucugugguca

SEQ ID NO: 1082755 - RNA, 19 nt, Artificial Sequence
  Description of Artificial Sequence: Synthetic oligonucleotide
  Antisense strand to SEQ ID NO: 1082754
ugaccacagaccaaauaac

SEQ ID NO: 1082756 - RNA, 19 nt, Artificial Sequence
  Description of Artificial Sequence: Synthetic oligonucleotide
  Sense strand starting at position 1675 of SEQ ID NO: 915477
uuauuuggucuguggucaa

SEQ ID NO: 1082757 - RNA, 19 nt, Artificial Sequence
  Description of Artificial Sequence: Synthetic oligonucleotide
  Antisense strand to SEQ ID NO: 1082756
uugaccacagaccaaauaa

SEQ ID NO: 1082758 - RNA, 19 nt, Artificial Sequence
  Description of Artificial Sequence: Synthetic oligonucleotide
  Sense strand starting at position 1678 of SEQ ID NO: 915477
uuuggucuguggucaauuu

SEQ ID NO: 1082759 - RNA, 19 nt, Artificial Sequence
  Description of Artificial Sequence: Synthetic oligonucleotide
  Antisense strand to SEQ ID NO: 1082758
aaauugaccacagaccaaa

SEQ ID NO: 1082760 - RNA, 19 nt, Artificial Sequence
  Description of Artificial Sequence: Synthetic oligonucleotide
  Sense strand starting at position 1686 of SEQ ID NO: 915477
guggucaauuugucaccca

SEQ ID NO: 1082761 - RNA, 19 nt, Artificial Sequence
  Description of Artificial Sequence: Synthetic oligonucleotide
  Antisense strand to SEQ ID NO: 1082760
ugggugacaaauugaccac

SEQ ID NO: 1082762 - RNA, 19 nt, Artificial Sequence
  Description of Artificial Sequence: Synthetic oligonucleotide
  Sense strand starting at position 1731 of SEQ ID NO: 915477
agcauuuccugaguuccua

SEQ ID NO: 1082763 - RNA, 19 nt, Artificial Sequence
  Description of Artificial Sequence: Synthetic oligonucleotide
  Antisense strand to SEQ ID NO: 1082762
uaggaacucaggaaaugcu

SEQ ID NO: 1082764 - RNA, 19 nt, Artificial Sequence
  Description of Artificial Sequence: Synthetic oligonucleotide
  Sense strand starting at position 1881 of SEQ ID NO: 915477
uguggaccuuucuccagau

SEQ ID NO: 1082765 - RNA, 19 nt, Artificial Sequence
  Description of Artificial Sequence: Synthetic oligonucleotide
  Antisense strand to SEQ ID NO: 1082764
aucuggagaaagguccaca

SEQ ID NO: 1082766 - RNA, 19 nt, Artificial Sequence
  Description of Artificial Sequence: Synthetic oligonucleotide
  Sense strand starting at position 1969 of SEQ ID NO: 915477
uuuggcauuaaugggagaa

SEQ ID NO: 1082767 - RNA, 19 nt, Artificial Sequence
  Description of Artificial Sequence: Synthetic oligonucleotide
  Antisense strand to SEQ ID NO: 1082766
uucucccauuaaugccaaa

SEQ ID NO: 1082768 - RNA, 19 nt, Artificial Sequence
  Description of Artificial Sequence: Synthetic oligonucleotide
  Sense strand starting at position 1970 of SEQ ID NO: 915477
uuggcauuaaugggagaac

SEQ ID NO: 1082769 - RNA, 19 nt, Artificial Sequence
  Description of Artificial Sequence: Synthetic oligonucleotide
  Antisense strand to SEQ ID NO: 1082768
guucucccauuaaugccaa

SEQ ID NO: 1082770 - RNA, 19 nt, Artificial Sequence
  Description of Artificial Sequence: Synthetic oligonucleotide
  Sense strand starting at position 1973 of SEQ ID NO: 915477
gcauuaaugggagaacggu

SEQ ID NO: 1082771 - RNA, 19 nt, Artificial Sequence
  Description of Artificial Sequence: Synthetic oligonucleotide
  Antisense strand to SEQ ID NO: 1082770
accguucucccauuaaugc

SEQ ID NO: 1082772 - RNA, 19 nt, Artificial Sequence
  Description of Artificial Sequence: Synthetic oligonucleotide
  Sense strand starting at position 2076 of SEQ ID NO: 915477
uuuccuuaucuagaaguag

SEQ ID NO: 1082773 - RNA, 19 nt, Artificial Sequence
  Description of Artificial Sequence: Synthetic oligonucleotide
  Antisense strand to SEQ ID NO: 1082772
cuacuucuagauaaggaaa

SEQ ID NO: 1082774 - RNA, 19 nt, Artificial Sequence
  Description of Artificial Sequence: Synthetic oligonucleotide
  Sense strand starting at position 2100 of SEQ ID NO: 915477
caaauugggucaucaaggu

SEQ ID NO: 1082775 - RNA, 19 nt, Artificial Sequence
  Description of Artificial Sequence: Synthetic oligonucleotide
  Antisense strand to SEQ ID NO: 1082774
accuugaugacccaauuug

SEQ ID NO: 1082776 - RNA, 19 nt, Artificial Sequence
  Description of Artificial Sequence: Synthetic oligonucleotide
  Sense strand starting at position 2163 of SEQ ID NO: 915477
uuuaguuuccuguaucaca

SEQ ID NO: 1082777 - RNA, 19 nt, Artificial Sequence
  Description of Artificial Sequence: Synthetic oligonucleotide
  Antisense strand to SEQ ID NO: 1082776
ugugauacaggaaacuaaa

SEQ ID NO: 1082778 - RNA, 19 nt, Artificial Sequence
  Description of Artificial Sequence: Synthetic oligonucleotide
  Sense strand starting at position 2309 of SEQ ID NO: 915477
gcuguaggaagugaucaau

SEQ ID NO: 1082779 - RNA, 19 nt, Artificial Sequence
  Description of Artificial Sequence: Synthetic oligonucleotide
  Antisense strand to SEQ ID NO: 1082778
auugaucacuuccuacagc

SEQ ID NO: 1082780 - RNA, 19 nt, Artificial Sequence
  Description of Artificial Sequence: Synthetic oligonucleotide
  Sense strand starting at position 2360 of SEQ ID NO: 915477
ugugacuucucucuaaaga

SEQ ID NO: 1082781 - RNA, 19 nt, Artificial Sequence
  Description of Artificial Sequence: Synthetic oligonucleotide
  Antisense strand to SEQ ID NO: 1082780
ucuuuagagagaagucaca

SEQ ID NO: 1082782 - RNA, 19 nt, Artificial Sequence
  Description of Artificial Sequence: Synthetic oligonucleotide
  Sense strand starting at position 2398 of SEQ ID NO: 915477
gcaagacuugacuguacca

SEQ ID NO: 1082783 - RNA, 19 nt, Artificial Sequence
  Description of Artificial Sequence: Synthetic oligonucleotide
  Antisense strand to SEQ ID NO: 1082782
ugguacagucaagucuugc

SEQ ID NO: 1082784 - RNA, 19 nt, Artificial Sequence
  Description of Artificial Sequence: Synthetic oligonucleotide
  Sense strand starting at position 2414 of SEQ ID NO: 915477
ccauucaugggaugaggua

SEQ ID NO: 1082785 - RNA, 19 nt, Artificial Sequence
  Description of Artificial Sequence: Synthetic oligonucleotide
  Antisense strand to SEQ ID NO: 1082784
uaccucaucccaugaaugg

SEQ ID NO: 1082786 - RNA, 19 nt, Artificial Sequence
  Description of Artificial Sequence: Synthetic oligonucleotide
  Sense strand starting at position 3154 of SEQ ID NO: 915477
ccaugagggcuguaucaau

SEQ ID NO: 1082787 - RNA, 19 nt, Artificial Sequence
  Description of Artificial Sequence: Synthetic oligonucleotide
  Antisense strand to SEQ ID NO: 1082786
auugauacagcccucaugg

SEQ ID NO: 1082788 - RNA, 19 nt, Artificial Sequence
  Description of Artificial Sequence: Synthetic oligonucleotide
  Sense strand starting at position 3196 of SEQ ID NO: 915477
gaaagaacuugguuccaca

SEQ ID NO: 1082789 - RNA, 19 nt, Artificial Sequence
  Description of Artificial Sequence: Synthetic oligonucleotide
  Antisense strand to SEQ ID NO: 1082788
uguggaaccaaguucuuuc

SEQ ID NO: 1082790 - RNA, 19 nt, Artificial Sequence
  Description of Artificial Sequence: Synthetic oligonucleotide
  Sense strand starting at position 3462 of SEQ ID NO: 915477
augaguauguuaucuagga

SEQ ID NO: 1082791 - RNA, 19 nt, Artificial Sequence
  Description of Artificial Sequence: Synthetic oligonucleotide
  Antisense strand to SEQ ID NO: 1082790
uccuagauaacauacucau

SEQ ID NO: 1082792 - RNA, 19 nt, Artificial Sequence
  Description of Artificial Sequence: Synthetic oligonucleotide
  Sense strand starting at position 3463 of SEQ ID NO: 915477
ugaguauguuaucuaggau

SEQ ID NO: 1082793 - RNA, 19 nt, Artificial Sequence
  Description of Artificial Sequence: Synthetic oligonucleotide
  Antisense strand to SEQ ID NO: 1082792
auccuagauaacauacuca

SEQ ID NO: 1082794 - RNA, 19 nt, Artificial Sequence
  Description of Artificial Sequence: Synthetic oligonucleotide
  Sense strand starting at position 3466 of SEQ ID NO: 915477
guauguuaucuaggauaug

SEQ ID NO: 1082795 - RNA, 19 nt, Artificial Sequence
  Description of Artificial Sequence: Synthetic oligonucleotide
  Antisense strand to SEQ ID NO: 1082794
cauauccuagauaacauac

SEQ ID NO: 1082796 - RNA, 19 nt, Artificial Sequence
  Description of Artificial Sequence: Synthetic oligonucleotide
  Sense strand starting at position 3469 of SEQ ID NO: 915477
uguuaucuaggauaugagu

SEQ ID NO: 1082797 - RNA, 19 nt, Artificial Sequence
  Description of Artificial Sequence: Synthetic oligonucleotide
  Antisense strand to SEQ ID NO: 1082796
acucauauccuagauaaca

SEQ ID NO: 1082798 - RNA, 19 nt, Artificial Sequence
  Description of Artificial Sequence: Synthetic oligonucleotide
  Sense strand starting at position 3584 of SEQ ID NO: 915477
uuaguugucuucucaauuu

SEQ ID NO: 1082799 - RNA, 19 nt, Artificial Sequence
  Description of Artificial Sequence: Synthetic oligonucleotide
  Antisense strand to SEQ ID NO: 1082798
aaauugagaagacaacuaa

SEQ ID NO: 1082800 - RNA, 19 nt, Artificial Sequence
  Description of Artificial Sequence: Synthetic oligonucleotide
  Sense strand starting at position 12 of SEQ ID NO: 915478
ugauguucuuguguccaga

SEQ ID NO: 1082801 - RNA, 19 nt, Artificial Sequence
  Description of Artificial Sequence: Synthetic oligonucleotide
  Antisense strand to SEQ ID NO: 1082800
ucuggacacaagaacauca

SEQ ID NO: 1082802 - RNA, 19 nt, Artificial Sequence
  Description of Artificial Sequence: Synthetic oligonucleotide
  Sense strand starting at position 14 of SEQ ID NO: 915478
auguucuuguguccagaaa

SEQ ID NO: 1082803 - RNA, 19 nt, Artificial Sequence
  Description of Artificial Sequence: Synthetic oligonucleotide
  Antisense strand to SEQ ID NO: 1082802
uuucuggacacaagaacau

SEQ ID NO: 1082804 - RNA, 19 nt, Artificial Sequence
  Description of Artificial Sequence: Synthetic oligonucleotide
  Sense strand starting at position 15 of SEQ ID NO: 915478
uguucuuguguccagaaau

SEQ ID NO: 1082805 - RNA, 19 nt, Artificial Sequence
  Description of Artificial Sequence: Synthetic oligonucleotide
  Antisense strand to SEQ ID NO: 1082804
auuucuggacacaagaaca

SEQ ID NO: 1082806 - RNA, 19 nt, Artificial Sequence
  Description of Artificial Sequence: Synthetic oligonucleotide
  Sense strand starting at position 62 of SEQ ID NO: 915478
aucaauuagcuaugguaaa

SEQ ID NO: 1082807 - RNA, 19 nt, Artificial Sequence
  Description of Artificial Sequence: Synthetic oligonucleotide
  Antisense strand to SEQ ID NO: 1082806
uuuaccauagcuaauugau

SEQ ID NO: 1082808 - RNA, 19 nt, Artificial Sequence
  Description of Artificial Sequence: Synthetic oligonucleotide
  Sense strand starting at position 143 of SEQ ID NO: 915478
gugagcacuuacuuuaaua

SEQ ID NO: 1082809 - RNA, 19 nt, Artificial Sequence
  Description of Artificial Sequence: Synthetic oligonucleotide
  Antisense strand to SEQ ID NO: 1082808
uauuaaaguaagugcucac

SEQ ID NO: 1082810 - RNA, 19 nt, Artificial Sequence
  Description of Artificial Sequence: Synthetic oligonucleotide
  Sense strand starting at position 166 of SEQ ID NO: 915478
cccauaaucguuuagaagu

SEQ ID NO: 1082811 - RNA, 19 nt, Artificial Sequence
  Description of Artificial Sequence: Synthetic oligonucleotide
  Antisense strand to SEQ ID NO: 1082810
acuucuaaacgauuauggg

SEQ ID NO: 1082812 - RNA, 19 nt, Artificial Sequence
  Description of Artificial Sequence: Synthetic oligonucleotide
  Sense strand starting at position 190 of SEQ ID NO: 915478
agaggcuaucagcaaagua

SEQ ID NO: 1082813 - RNA, 19 nt, Artificial Sequence
  Description of Artificial Sequence: Synthetic oligonucleotide
  Antisense strand to SEQ ID NO: 1082812
uacuuugcugauagccucu

SEQ ID NO: 1082814 - RNA, 19 nt, Artificial Sequence
  Description of Artificial Sequence: Synthetic oligonucleotide
  Sense strand starting at position 396 of SEQ ID NO: 915478
aagggauagucauauuaga

SEQ ID NO: 1082815 - RNA, 19 nt, Artificial Sequence
  Description of Artificial Sequence: Synthetic oligonucleotide
  Antisense strand to SEQ ID NO: 1082814
ucuaauaugacuaucccuu

SEQ ID NO: 1082816 - RNA, 19 nt, Artificial Sequence
  Description of Artificial Sequence: Synthetic oligonucleotide
  Sense strand starting at position 480 of SEQ ID NO: 915478
accuauuccuaggagaaga

SEQ ID NO: 1082817 - RNA, 19 nt, Artificial Sequence
  Description of Artificial Sequence: Synthetic oligonucleotide
  Antisense strand to SEQ ID NO: 1082816
ucuucuccuaggaauaggu

SEQ ID NO: 1082818 - RNA, 19 nt, Artificial Sequence
  Description of Artificial Sequence: Synthetic oligonucleotide
  Sense strand starting at position 545 of SEQ ID NO: 915478
gaagaauaguaguuuguca

SEQ ID NO: 1082819 - RNA, 19 nt, Artificial Sequence
  Description of Artificial Sequence: Synthetic oligonucleotide
  Antisense strand to SEQ ID NO: 1082818
ugacaaacuacuauucuuc

SEQ ID NO: 1082820 - RNA, 19 nt, Artificial Sequence
  Description of Artificial Sequence: Synthetic oligonucleotide
  Sense strand starting at position 547 of SEQ ID NO: 915478
agaauaguaguuugucaug

SEQ ID NO: 1082821 - RNA, 19 nt, Artificial Sequence
  Description of Artificial Sequence: Synthetic oligonucleotide
  Antisense strand to SEQ ID NO: 1082820
caugacaaacuacuauucu

SEQ ID NO: 1082822 - RNA, 19 nt, Artificial Sequence
  Description of Artificial Sequence: Synthetic oligonucleotide
  Sense strand starting at position 662 of SEQ ID NO: 915478
gauggaacacaguguauca

SEQ ID NO: 1082823 - RNA, 19 nt, Artificial Sequence
  Description of Artificial Sequence: Synthetic oligonucleotide
  Antisense strand to SEQ ID NO: 1082822
ugauacacuguguuccauc

SEQ ID NO: 1082824 - RNA, 19 nt, Artificial Sequence
  Description of Artificial Sequence: Synthetic oligonucleotide
  Sense strand starting at position 783 of SEQ ID NO: 915478
auagcccugucuuuaaaga

SEQ ID NO: 1082825 - RNA, 19 nt, Artificial Sequence
  Description of Artificial Sequence: Synthetic oligonucleotide
  Antisense strand to SEQ ID NO: 1082824
ucuuuaaagacagggcuau

SEQ ID NO: 1082826 - RNA, 19 nt, Artificial Sequence
  Description of Artificial Sequence: Synthetic oligonucleotide
  Sense strand starting at position 1406 of SEQ ID NO: 915478
guuguauaacccuaaaguc

SEQ ID NO: 1082827 - RNA, 19 nt, Artificial Sequence
  Description of Artificial Sequence: Synthetic oligonucleotide
  Antisense strand to SEQ ID NO: 1082826
gacuuuaggguuauacaac

SEQ ID NO: 1082828 - RNA, 19 nt, Artificial Sequence
  Description of Artificial Sequence: Synthetic oligonucleotide
  Sense strand starting at position 1432 of SEQ ID NO: 915478
auucuauuacaacgauagu

SEQ ID NO: 1082829 - RNA, 19 nt, Artificial Sequence
  Description of Artificial Sequence: Synthetic oligonucleotide
  Antisense strand to SEQ ID NO: 1082828
acuaucguuguaauagaau

SEQ ID NO: 1082830 - RNA, 19 nt, Artificial Sequence
  Description of Artificial Sequence: Synthetic oligonucleotide
  Sense strand starting at position 1442 of SEQ ID NO: 915478
aacgauaguccaugaaaua

SEQ ID NO: 1082831 - RNA, 19 nt, Artificial Sequence
  Description of Artificial Sequence: Synthetic oligonucleotide
  Antisense strand to SEQ ID NO: 1082830
uauuucauggacuaucguu

SEQ ID NO: 1082832 - RNA, 19 nt, Artificial Sequence
  Description of Artificial Sequence: Synthetic oligonucleotide
  Sense strand starting at position 1516 of SEQ ID NO: 915478
gaggaaugcaguuacacga

SEQ ID NO: 1082833 - RNA, 19 nt, Artificial Sequence
  Description of Artificial Sequence: Synthetic oligonucleotide
  Antisense strand to SEQ ID NO: 1082832
ucguguaacugcauuccuc

SEQ ID NO: 1082834 - RNA, 19 nt, Artificial Sequence
  Description of Artificial Sequence: Synthetic oligonucleotide
  Sense strand starting at position 1524 of SEQ ID NO: 915478
caguuacacgaucauguau

SEQ ID NO: 1082835 - RNA, 19 nt, Artificial Sequence
  Description of Artificial Sequence: Synthetic oligonucleotide
  Antisense strand to SEQ ID NO: 1082834
auacaugaucguguaacug

SEQ ID NO: 1082836 - RNA, 19 nt, Artificial Sequence
  Description of Artificial Sequence: Synthetic oligonucleotide
  Sense strand starting at position 1818 of SEQ ID NO: 915478
ggaugaguccgcugaggac

SEQ ID NO: 1082837 - RNA, 19 nt, Artificial Sequence
  Description of Artificial Sequence: Synthetic oligonucleotide
  Antisense strand to SEQ ID NO: 1082836
guccucagcggacucaucc

SEQ ID NO: 1082838 - RNA, 19 nt, Artificial Sequence
  Description of Artificial Sequence: Synthetic oligonucleotide
  Sense strand starting at position 1836 of SEQ ID NO: 915478
cgccgaagagccaguguuu

SEQ ID NO: 1082839 - RNA, 19 nt, Artificial Sequence
  Description of Artificial Sequence: Synthetic oligonucleotide
  Antisense strand to SEQ ID NO: 1082838
aaacacuggcucuucggcg

SEQ ID NO: 1082840 - RNA, 19 nt, Artificial Sequence
  Description of Artificial Sequence: Synthetic oligonucleotide
  Sense strand starting at position 2134 of SEQ ID NO: 915478
gcacgaacauacucauaau

SEQ ID NO: 1082841 - RNA, 19 nt, Artificial Sequence
  Description of Artificial Sequence: Synthetic oligonucleotide
  Antisense strand to SEQ ID NO: 1082840
auuaugaguauguucgugc

SEQ ID NO: 1082842 - RNA, 19 nt, Artificial Sequence
  Description of Artificial Sequence: Synthetic oligonucleotide
  Sense strand starting at position 2194 of SEQ ID NO: 915478
gagcucuuagacugauuga

SEQ ID NO: 1082843 - RNA, 19 nt, Artificial Sequence
  Description of Artificial Sequence: Synthetic oligonucleotide
  Antisense strand to SEQ ID NO: 1082842
ucaaucagucuaagagcuc

SEQ ID NO: 1082844 - RNA, 19 nt, Artificial Sequence
  Description of Artificial Sequence: Synthetic oligonucleotide
  Sense strand starting at position 2525 of SEQ ID NO: 915478
gauccaaagugauucgaaa

SEQ ID NO: 1082845 - RNA, 19 nt, Artificial Sequence
  Description of Artificial Sequence: Synthetic oligonucleotide
  Antisense strand to SEQ ID NO: 1082844
uuucgaaucacuuuggauc

SEQ ID NO: 1082846 - RNA, 19 nt, Artificial Sequence
  Description of Artificial Sequence: Synthetic oligonucleotide
  Sense strand starting at position 2597 of SEQ ID NO: 915478
cugcauacggauuauacaa

SEQ ID NO: 1082847 - RNA, 19 nt, Artificial Sequence
  Description of Artificial Sequence: Synthetic oligonucleotide
  Antisense strand to SEQ ID NO: 1082846
uuguauaauccguaugcag

SEQ ID NO: 1082848 - RNA, 19 nt, Artificial Sequence
  Description of Artificial Sequence: Synthetic oligonucleotide
  Sense strand starting at position 2743 of SEQ ID NO: 915478
acuuaaaccuuagaagaag

SEQ ID NO: 1082849 - RNA, 19 nt, Artificial Sequence
  Description of Artificial Sequence: Synthetic oligonucleotide
  Antisense strand to SEQ ID NO: 1082848
cuucuucuaagguuuaagu

SEQ ID NO: 1082850 - RNA, 19 nt, Artificial Sequence
  Description of Artificial Sequence: Synthetic oligonucleotide
  Sense strand starting at position 2783 of SEQ ID NO: 915478
ggaggagcuugacucauua

SEQ ID NO: 1082851 - RNA, 19 nt, Artificial Sequence
  Description of Artificial Sequence: Synthetic oligonucleotide
  Antisense strand to SEQ ID NO: 1082850
uaaugagucaagcuccucc

SEQ ID NO: 1082852 - RNA, 19 nt, Artificial Sequence
  Description of Artificial Sequence: Synthetic oligonucleotide
  Sense strand starting at position 2803 of SEQ ID NO: 915478
ugagucaucucauuauuga

SEQ ID NO: 1082853 - RNA, 19 nt, Artificial Sequence
  Description of Artificial Sequence: Synthetic oligonucleotide
  Antisense strand to SEQ ID NO: 1082852
ucaauaaugagaugacuca

SEQ ID NO: 1082854 - RNA, 19 nt, Artificial Sequence
  Description of Artificial Sequence: Synthetic oligonucleotide
  Sense strand starting at position 2806 of SEQ ID NO: 915478
gucaucucauuauugaagu

SEQ ID NO: 1082855 - RNA, 19 nt, Artificial Sequence
  Description of Artificial Sequence: Synthetic oligonucleotide
  Antisense strand to SEQ ID NO: 1082854
acuucaauaaugagaugac

SEQ ID NO: 1082856 - RNA, 19 nt, Artificial Sequence
  Description of Artificial Sequence: Synthetic oligonucleotide
  Sense strand starting at position 2820 of SEQ ID NO: 915478
gaaguuacauguuuauguu

SEQ ID NO: 1082857 - RNA, 19 nt, Artificial Sequence
  Description of Artificial Sequence: Synthetic oligonucleotide
  Antisense strand to SEQ ID NO: 1082856
aacauaaacauguaacuuc

SEQ ID NO: 1082858 - RNA, 19 nt, Artificial Sequence
  Description of Artificial Sequence: Synthetic oligonucleotide
  Sense strand starting at position 2888 of SEQ ID NO: 915478
agucgcuuccuuucgugua

SEQ ID NO: 1082859 - RNA, 19 nt, Artificial Sequence
  Description of Artificial Sequence: Synthetic oligonucleotide
  Antisense strand to SEQ ID NO: 1082858
uacacgaaaggaagcgacu

SEQ ID NO: 1082860 - RNA, 19 nt, Artificial Sequence
  Description of Artificial Sequence: Synthetic oligonucleotide
  Sense strand starting at position 2922 of SEQ ID NO: 915478
gugaccaaauuauuaguga

SEQ ID NO: 1082861 - RNA, 19 nt, Artificial Sequence
  Description of Artificial Sequence: Synthetic oligonucleotide
  Antisense strand to SEQ ID NO: 1082860
ucacuaauaauuuggucac

SEQ ID NO: 1082862 - RNA, 19 nt, Artificial Sequence
  Description of Artificial Sequence: Synthetic oligonucleotide
  Sense strand starting at position 2986 of SEQ ID NO: 915478
agaaacacgucaccuaaau

SEQ ID NO: 1082863 - RNA, 19 nt, Artificial Sequence
  Description of Artificial Sequence: Synthetic oligonucleotide
  Antisense strand to SEQ ID NO: 1082862
auuuaggugacguguuucu

SEQ ID NO: 1082864 - RNA, 19 nt, Artificial Sequence
  Description of Artificial Sequence: Synthetic oligonucleotide
  Sense strand starting at position 3095 of SEQ ID NO: 915478
caguuugcugcagaaucuu

SEQ ID NO: 1082865 - RNA, 19 nt, Artificial Sequence
  Description of Artificial Sequence: Synthetic oligonucleotide
  Antisense strand to SEQ ID NO: 1082864
aagauucugcagcaaacug

SEQ ID NO: 1082866 - RNA, 19 nt, Artificial Sequence
  Description of Artificial Sequence: Synthetic oligonucleotide
  Sense strand starting at position 3108 of SEQ ID NO: 915478
aaucuugcauguuucgaau

SEQ ID NO: 1082867 - RNA, 19 nt, Artificial Sequence
  Description of Artificial Sequence: Synthetic oligonucleotide
  Antisense strand to SEQ ID NO: 1082866
auucgaaacaugcaagauu

SEQ ID NO: 1082868 - RNA, 19 nt, Artificial Sequence
  Description of Artificial Sequence: Synthetic oligonucleotide
  Sense strand starting at position 3257 of SEQ ID NO: 915478
uauugugugcguguguuua

SEQ ID NO: 1082869 - RNA, 19 nt, Artificial Sequence
  Description of Artificial Sequence: Synthetic oligonucleotide
  Antisense strand to SEQ ID NO: 1082868
uaaacacacgcacacaaua

SEQ ID NO: 1082870 - RNA, 19 nt, Artificial Sequence
  Description of Artificial Sequence: Synthetic oligonucleotide
  Sense strand starting at position 3295 of SEQ ID NO: 915478
acaacagaccugcauagua

SEQ ID NO: 1082871 - RNA, 19 nt, Artificial Sequence
  Description of Artificial Sequence: Synthetic oligonucleotide
  Antisense strand to SEQ ID NO: 1082870
uacuaugcaggucuguugu

SEQ ID NO: 1082872 - RNA, 19 nt, Artificial Sequence
  Description of Artificial Sequence: Synthetic oligonucleotide
  Sense strand starting at position 3305 of SEQ ID NO: 915478
ugcauaguauuaguauuga

SEQ ID NO: 1082873 - RNA, 19 nt, Artificial Sequence
  Description of Artificial Sequence: Synthetic oligonucleotide
  Antisense strand to SEQ ID NO: 1082872
ucaauacuaauacuaugca

SEQ ID NO: 1082874 - RNA, 19 nt, Artificial Sequence
  Description of Artificial Sequence: Synthetic oligonucleotide
  Sense strand starting at position 3383 of SEQ ID NO: 915478
uuuguaauugcagaauuac

SEQ ID NO: 1082875 - RNA, 19 nt, Artificial Sequence
  Description of Artificial Sequence: Synthetic oligonucleotide
  Antisense strand to SEQ ID NO: 1082874
guaauucugcaauuacaaa

SEQ ID NO: 1082876 - RNA, 19 nt, Artificial Sequence
  Description of Artificial Sequence: Synthetic oligonucleotide
  Sense strand starting at position 3434 of SEQ ID NO: 915478
cagugucaucuugaaauag

SEQ ID NO: 1082877 - RNA, 19 nt, Artificial Sequence
  Description of Artificial Sequence: Synthetic oligonucleotide
  Antisense strand to SEQ ID NO: 1082876
cuauuucaagaugacacug

SEQ ID NO: 1082878 - RNA, 19 nt, Artificial Sequence
  Description of Artificial Sequence: Synthetic oligonucleotide
  Sense strand starting at position 3548 of SEQ ID NO: 915478
ggaauugauuuacaaguac

SEQ ID NO: 1082879 - RNA, 19 nt, Artificial Sequence
  Description of Artificial Sequence: Synthetic oligonucleotide
  Antisense strand to SEQ ID NO: 1082878
guacuuguaaaucaauucc

SEQ ID NO: 1082880 - RNA, 19 nt, Artificial Sequence
  Description of Artificial Sequence: Synthetic oligonucleotide
  Sense strand starting at position 369 of SEQ ID NO: 915479
auaagaguuuauuggaaug

SEQ ID NO: 1082881 - RNA, 19 nt, Artificial Sequence
  Description of Artificial Sequence: Synthetic oligonucleotide
  Antisense strand to SEQ ID NO: 1082880
cauuccaauaaacucuuau

SEQ ID NO: 1082882 - RNA, 19 nt, Artificial Sequence
  Description of Artificial Sequence: Synthetic oligonucleotide
  Sense strand starting at position 371 of SEQ ID NO: 915479
aagaguuuauuggaaugca

SEQ ID NO: 1082883 - RNA, 19 nt, Artificial Sequence
  Description of Artificial Sequence: Synthetic oligonucleotide
  Antisense strand to SEQ ID NO: 1082882
ugcauuccaauaaacucuu

SEQ ID NO: 1082884 - RNA, 19 nt, Artificial Sequence
  Description of Artificial Sequence: Synthetic oligonucleotide
  Sense strand starting at position 383 of SEQ ID NO: 915479
gaaugcaucgcccauagaa

SEQ ID NO: 1082885 - RNA, 19 nt, Artificial Sequence
  Description of Artificial Sequence: Synthetic oligonucleotide
  Antisense strand to SEQ ID NO: 1082884
uucuaugggcgaugcauuc

SEQ ID NO: 1082886 - RNA, 19 nt, Artificial Sequence
  Description of Artificial Sequence: Synthetic oligonucleotide
  Sense strand starting at position 385 of SEQ ID NO: 915479
augcaucgcccauagaaag

SEQ ID NO: 1082887 - RNA, 19 nt, Artificial Sequence
  Description of Artificial Sequence: Synthetic oligonucleotide
  Antisense strand to SEQ ID NO: 1082886
cuuucuaugggcgaugcau

SEQ ID NO: 1082888 - RNA, 19 nt, Artificial Sequence
  Description of Artificial Sequence: Synthetic oligonucleotide
  Sense strand starting at position 421 of SEQ ID NO: 915479
acuucugucucagguauau

SEQ ID NO: 1082889 - RNA, 19 nt, Artificial Sequence
  Description of Artificial Sequence: Synthetic oligonucleotide
  Antisense strand to SEQ ID NO: 1082888
auauaccugagacagaagu

SEQ ID NO: 1082890 - RNA, 19 nt, Artificial Sequence
  Description of Artificial Sequence: Synthetic oligonucleotide
  Sense strand starting at position 430 of SEQ ID NO: 915479
ucagguauauucgugggca

SEQ ID NO: 1082891 - RNA, 19 nt, Artificial Sequence
  Description of Artificial Sequence: Synthetic oligonucleotide
  Antisense strand to SEQ ID NO: 1082890
ugcccacgaauauaccuga

SEQ ID NO: 1082892 - RNA, 19 nt, Artificial Sequence
  Description of Artificial Sequence: Synthetic oligonucleotide
  Sense strand starting at position 431 of SEQ ID NO: 915479
cagguauauucgugggcau

SEQ ID NO: 1082893 - RNA, 19 nt, Artificial Sequence
  Description of Artificial Sequence: Synthetic oligonucleotide
  Antisense strand to SEQ ID NO: 1082892
augcccacgaauauaccug

SEQ ID NO: 1082894 - RNA, 19 nt, Artificial Sequence
  Description of Artificial Sequence: Synthetic oligonucleotide
  Sense strand starting at position 432 of SEQ ID NO: 915479
agguauauucgugggcaua

SEQ ID NO: 1082895 - RNA, 19 nt, Artificial Sequence
  Description of Artificial Sequence: Synthetic oligonucleotide
  Antisense strand to SEQ ID NO: 1082894
uaugcccacgaauauaccu

SEQ ID NO: 1082896 - RNA, 19 nt, Artificial Sequence
  Description of Artificial Sequence: Synthetic oligonucleotide
  Sense strand starting at position 433 of SEQ ID NO: 915479
gguauauucgugggcauau

SEQ ID NO: 1082897 - RNA, 19 nt, Artificial Sequence
  Description of Artificial Sequence: Synthetic oligonucleotide
  Antisense strand to SEQ ID NO: 1082896
auaugcccacgaauauacc

SEQ ID NO: 1082898 - RNA, 19 nt, Artificial Sequence
  Description of Artificial Sequence: Synthetic oligonucleotide
  Sense strand starting at position 434 of SEQ ID NO: 915479
guauauucgugggcauaug

SEQ ID NO: 1082899 - RNA, 19 nt, Artificial Sequence
  Description of Artificial Sequence: Synthetic oligonucleotide
  Antisense strand to SEQ ID NO: 1082898
cauaugcccacgaauauac

SEQ ID NO: 1082900 - RNA, 19 nt, Artificial Sequence
  Description of Artificial Sequence: Synthetic oligonucleotide
  Sense strand starting at position 444 of SEQ ID NO: 915479
gggcauauguguucuuguu

SEQ ID NO: 1082901 - RNA, 19 nt, Artificial Sequence
  Description of Artificial Sequence: Synthetic oligonucleotide
  Antisense strand to SEQ ID NO: 1082900
aacaagaacacauaugccc

SEQ ID NO: 1082902 - RNA, 19 nt, Artificial Sequence
  Description of Artificial Sequence: Synthetic oligonucleotide
  Sense strand starting at position 446 of SEQ ID NO: 915479
gcauauguguucuuguuug

SEQ ID NO: 1082903 - RNA, 19 nt, Artificial Sequence
  Description of Artificial Sequence: Synthetic oligonucleotide
  Antisense strand to SEQ ID NO: 1082902
caaacaagaacacauaugc

SEQ ID NO: 1082904 - RNA, 19 nt, Artificial Sequence
  Description of Artificial Sequence: Synthetic oligonucleotide
  Sense strand starting at position 935 of SEQ ID NO: 915479
ggcuaauggugagauguua

SEQ ID NO: 1082905 - RNA, 19 nt, Artificial Sequence
  Description of Artificial Sequence: Synthetic oligonucleotide
  Antisense strand to SEQ ID NO: 1082904
uaacaucucaccauuagcc

SEQ ID NO: 1082906 - RNA, 19 nt, Artificial Sequence
  Description of Artificial Sequence: Synthetic oligonucleotide
  Sense strand starting at position 1030 of SEQ ID NO: 915479
ccgacucacccagguuaua

SEQ ID NO: 1082907 - RNA, 19 nt, Artificial Sequence
  Description of Artificial Sequence: Synthetic oligonucleotide
  Antisense strand to SEQ ID NO: 1082906
uauaaccugggugagucgg

SEQ ID NO: 1082908 - RNA, 19 nt, Artificial Sequence
  Description of Artificial Sequence: Synthetic oligonucleotide
  Sense strand starting at position 2141 of SEQ ID NO: 915479
aucggcuuguccucuauuu

SEQ ID NO: 1082909 - RNA, 19 nt, Artificial Sequence
  Description of Artificial Sequence: Synthetic oligonucleotide
  Antisense strand to SEQ ID NO: 1082908
aaauagaggacaagccgau

SEQ ID NO: 1082910 - RNA, 19 nt, Artificial Sequence
  Description of Artificial Sequence: Synthetic oligonucleotide
  Sense strand starting at position 2154 of SEQ ID NO: 915479
cuauuucccugagacuaug

SEQ ID NO: 1082911 - RNA, 19 nt, Artificial Sequence
  Description of Artificial Sequence: Synthetic oligonucleotide
  Antisense strand to SEQ ID NO: 1082910
cauagucucagggaaauag

SEQ ID NO: 1082912 - RNA, 19 nt, Artificial Sequence
  Description of Artificial Sequence: Synthetic oligonucleotide
  Sense strand starting at position 2162 of SEQ ID NO: 915479
cugagacuaugcucccuau

SEQ ID NO: 1082913 - RNA, 19 nt, Artificial Sequence
  Description of Artificial Sequence: Synthetic oligonucleotide
  Antisense strand to SEQ ID NO: 1082912
auagggagcauagucucag

SEQ ID NO: 1082914 - RNA, 19 nt, Artificial Sequence
  Description of Artificial Sequence: Synthetic oligonucleotide
  Sense strand starting at position 2238 of SEQ ID NO: 915479
gggauuugcaggcggcaaa

SEQ ID NO: 1082915 - RNA, 19 nt, Artificial Sequence
  Description of Artificial Sequence: Synthetic oligonucleotide
  Antisense strand to SEQ ID NO: 1082914
uuugccgccugcaaauccc

SEQ ID NO: 1082916 - RNA, 19 nt, Artificial Sequence
  Description of Artificial Sequence: Synthetic oligonucleotide
  Sense strand starting at position 2293 of SEQ ID NO: 915479
cgcgaaagcagcuaucaca

SEQ ID NO: 1082917 - RNA, 19 nt, Artificial Sequence
  Description of Artificial Sequence: Synthetic oligonucleotide
  Antisense strand to SEQ ID NO: 1082916
ugugauagcugcuuucgcg

SEQ ID NO: 1082918 - RNA, 19 nt, Artificial Sequence
  Description of Artificial Sequence: Synthetic oligonucleotide
  Sense strand starting at position 2318 of SEQ ID NO: 915479
aaugaauuagccugguugu

SEQ ID NO: 1082919 - RNA, 19 nt, Artificial Sequence
  Description of Artificial Sequence: Synthetic oligonucleotide
  Antisense strand to SEQ ID NO: 1082918
acaaccaggcuaauucauu

SEQ ID NO: 1082920 - RNA, 19 nt, Artificial Sequence
  Description of Artificial Sequence: Synthetic oligonucleotide
  Sense strand starting at position 2321 of SEQ ID NO: 915479
gaauuagccugguuguguu

SEQ ID NO: 1082921 - RNA, 19 nt, Artificial Sequence
  Description of Artificial Sequence: Synthetic oligonucleotide
  Antisense strand to SEQ ID NO: 1082920
aacacaaccaggcuaauuc

SEQ ID NO: 1082922 - RNA, 19 nt, Artificial Sequence
  Description of Artificial Sequence: Synthetic oligonucleotide
  Sense strand starting at position 2329 of SEQ ID NO: 915479
cugguuguguuccaacaaa

SEQ ID NO: 1082923 - RNA, 19 nt, Artificial Sequence
  Description of Artificial Sequence: Synthetic oligonucleotide
  Antisense strand to SEQ ID NO: 1082922
uuuguuggaacacaaccag

SEQ ID NO: 1082924 - RNA, 19 nt, Artificial Sequence
  Description of Artificial Sequence: Synthetic oligonucleotide
  Sense strand starting at position 3278 of SEQ ID NO: 915479
cuggucggguccuuuacaa

SEQ ID NO: 1082925 - RNA, 19 nt, Artificial Sequence
  Description of Artificial Sequence: Synthetic oligonucleotide
  Antisense strand to SEQ ID NO: 1082924
uuguaaaggacccgaccag

SEQ ID NO: 1082926 - RNA, 19 nt, Artificial Sequence
  Description of Artificial Sequence: Synthetic oligonucleotide
  Sense strand starting at position 3291 of SEQ ID NO: 915479
uuacaauucgcagagcauc

SEQ ID NO: 1082927 - RNA, 19 nt, Artificial Sequence
  Description of Artificial Sequence: Synthetic oligonucleotide
  Antisense strand to SEQ ID NO: 1082926
gaugcucugcgaauuguaa

SEQ ID NO: 1082928 - RNA, 19 nt, Artificial Sequence
  Description of Artificial Sequence: Synthetic oligonucleotide
  Sense strand starting at position 3959 of SEQ ID NO: 915479
gcuggucagugaggaguaa

SEQ ID NO: 1082929 - RNA, 19 nt, Artificial Sequence
  Description of Artificial Sequence: Synthetic oligonucleotide
  Antisense strand to SEQ ID NO: 1082928
uuacuccucacugaccagc

SEQ ID NO: 1082930 - RNA, 19 nt, Artificial Sequence
  Description of Artificial Sequence: Synthetic oligonucleotide
  Sense strand starting at position 3960 of SEQ ID NO: 915479
cuggucagugaggaguaaa

SEQ ID NO: 1082931 - RNA, 19 nt, Artificial Sequence
  Description of Artificial Sequence: Synthetic oligonucleotide
  Antisense strand to SEQ ID NO: 1082930
uuuacuccucacugaccag

SEQ ID NO: 1082932 - RNA, 19 nt, Artificial Sequence
  Description of Artificial Sequence: Synthetic oligonucleotide
  Sense strand starting at position 3980 of SEQ ID NO: 915479
gggcuccugauccgugauu

SEQ ID NO: 1082933 - RNA, 19 nt, Artificial Sequence
  Description of Artificial Sequence: Synthetic oligonucleotide
  Antisense strand to SEQ ID NO: 1082932
aaucacggaucaggagccc

SEQ ID NO: 1082934 - RNA, 19 nt, Artificial Sequence
  Description of Artificial Sequence: Synthetic oligonucleotide
  Sense strand starting at position 3981 of SEQ ID NO: 915479
ggcuccugauccgugauuu

SEQ ID NO: 1082935 - RNA, 19 nt, Artificial Sequence
  Description of Artificial Sequence: Synthetic oligonucleotide
  Antisense strand to SEQ ID NO: 1082934
aaaucacggaucaggagcc

SEQ ID NO: 1082936 - RNA, 19 nt, Artificial Sequence
  Description of Artificial Sequence: Synthetic oligonucleotide
  Sense strand starting at position 3982 of SEQ ID NO: 915479
gcuccugauccgugauuug

SEQ ID NO: 1082937 - RNA, 19 nt, Artificial Sequence
  Description of Artificial Sequence: Synthetic oligonucleotide
  Antisense strand to SEQ ID NO: 1082936
caaaucacggaucaggagc

SEQ ID NO: 1082938 - RNA, 19 nt, Artificial Sequence
  Description of Artificial Sequence: Synthetic oligonucleotide
  Sense strand starting at position 328 of SEQ ID NO: 915480
ccagccuccucguuucuaa

SEQ ID NO: 1082939 - RNA, 19 nt, Artificial Sequence
  Description of Artificial Sequence: Synthetic oligonucleotide
  Antisense strand to SEQ ID NO: 1082938
uuagaaacgaggaggcugg

SEQ ID NO: 1082940 - RNA, 19 nt, Artificial Sequence
  Description of Artificial Sequence: Synthetic oligonucleotide
  Sense strand starting at position 378 of SEQ ID NO: 915480
cuugaucuccugugguaug

SEQ ID NO: 1082941 - RNA, 19 nt, Artificial Sequence
  Description of Artificial Sequence: Synthetic oligonucleotide
  Antisense strand to SEQ ID NO: 1082940
cauaccacaggagaucaag

SEQ ID NO: 1082942 - RNA, 19 nt, Artificial Sequence
  Description of Artificial Sequence: Synthetic oligonucleotide
  Sense strand starting at position 532 of SEQ ID NO: 915480
gggcauuucucagguucua

SEQ ID NO: 1082943 - RNA, 19 nt, Artificial Sequence
  Description of Artificial Sequence: Synthetic oligonucleotide
  Antisense strand to SEQ ID NO: 1082942
uagaaccugagaaaugccc

SEQ ID NO: 1082944 - RNA, 19 nt, Artificial Sequence
  Description of Artificial Sequence: Synthetic oligonucleotide
  Sense strand starting at position 791 of SEQ ID NO: 915480
ggagucauccuccauuccu

SEQ ID NO: 1082945 - RNA, 19 nt, Artificial Sequence
  Description of Artificial Sequence: Synthetic oligonucleotide
  Antisense strand to SEQ ID NO: 1082944
aggaauggaggaugacucc

SEQ ID NO: 1082946 - RNA, 19 nt, Artificial Sequence
  Description of Artificial Sequence: Synthetic oligonucleotide
  Sense strand starting at position 988 of SEQ ID NO: 915480
uucucaauccagugauguu

SEQ ID NO: 1082947 - RNA, 19 nt, Artificial Sequence
  Description of Artificial Sequence: Synthetic oligonucleotide
  Antisense strand to SEQ ID NO: 1082946
aacaucacuggauugagaa

SEQ ID NO: 1082948 - RNA, 19 nt, Artificial Sequence
  Description of Artificial Sequence: Synthetic oligonucleotide
  Sense strand starting at position 1163 of SEQ ID NO: 915480
ccuacacgauucguccaau

SEQ ID NO: 1082949 - RNA, 19 nt, Artificial Sequence
  Description of Artificial Sequence: Synthetic oligonucleotide
  Antisense strand to SEQ ID NO: 1082948
auuggacgaaucguguagg

SEQ ID NO: 1082950 - RNA, 19 nt, Artificial Sequence
  Description of Artificial Sequence: Synthetic oligonucleotide
  Sense strand starting at position 1164 of SEQ ID NO: 915480
cuacacgauucguccaaua

SEQ ID NO: 1082951 - RNA, 19 nt, Artificial Sequence
  Description of Artificial Sequence: Synthetic oligonucleotide
  Antisense strand to SEQ ID NO: 1082950
uauuggacgaaucguguag

SEQ ID NO: 1082952 - RNA, 19 nt, Artificial Sequence
  Description of Artificial Sequence: Synthetic oligonucleotide
  Sense strand starting at position 1199 of SEQ ID NO: 915480
ucuguauaugcugacacua

SEQ ID NO: 1082953 - RNA, 19 nt, Artificial Sequence
  Description of Artificial Sequence: Synthetic oligonucleotide
  Antisense strand to SEQ ID NO: 1082952
uagugucagcauauacaga

SEQ ID NO: 1082954 - RNA, 19 nt, Artificial Sequence
  Description of Artificial Sequence: Synthetic oligonucleotide
  Sense strand starting at position 1242 of SEQ ID NO: 915480
uauugagaaucugauugua

SEQ ID NO: 1082955 - RNA, 19 nt, Artificial Sequence
  Description of Artificial Sequence: Synthetic oligonucleotide
  Antisense strand to SEQ ID NO: 1082954
uacaaucagauucucaaua

SEQ ID NO: 1082956 - RNA, 19 nt, Artificial Sequence
  Description of Artificial Sequence: Synthetic oligonucleotide
  Sense strand starting at position 1244 of SEQ ID NO: 915480
uugagaaucugauuguacc

SEQ ID NO: 1082957 - RNA, 19 nt, Artificial Sequence
  Description of Artificial Sequence: Synthetic oligonucleotide
  Antisense strand to SEQ ID NO: 1082956
gguacaaucagauucucaa

SEQ ID NO: 1082958 - RNA, 19 nt, Artificial Sequence
  Description of Artificial Sequence: Synthetic oligonucleotide
  Sense strand starting at position 1245 of SEQ ID NO: 915480
ugagaaucugauuguacca

SEQ ID NO: 1082959 - RNA, 19 nt, Artificial Sequence
  Description of Artificial Sequence: Synthetic oligonucleotide
  Antisense strand to SEQ ID NO: 1082958
ugguacaaucagauucuca

SEQ ID NO: 1082960 - RNA, 19 nt, Artificial Sequence
  Description of Artificial Sequence: Synthetic oligonucleotide
  Sense strand starting at position 1247 of SEQ ID NO: 915480
agaaucugauuguaccaga

SEQ ID NO: 1082961 - RNA, 19 nt, Artificial Sequence
  Description of Artificial Sequence: Synthetic oligonucleotide
  Antisense strand to SEQ ID NO: 1082960
ucugguacaaucagauucu

SEQ ID NO: 1082962 - RNA, 19 nt, Artificial Sequence
  Description of Artificial Sequence: Synthetic oligonucleotide
  Sense strand starting at position 1250 of SEQ ID NO: 915480
aucugauuguaccagacaa

SEQ ID NO: 1082963 - RNA, 19 nt, Artificial Sequence
  Description of Artificial Sequence: Synthetic oligonucleotide
  Antisense strand to SEQ ID NO: 1082962
uugucugguacaaucagau

SEQ ID NO: 1082964 - RNA, 19 nt, Artificial Sequence
  Description of Artificial Sequence: Synthetic oligonucleotide
  Sense strand starting at position 1465 of SEQ ID NO: 915480
uuuaauagagcugguaaac

SEQ ID NO: 1082965 - RNA, 19 nt, Artificial Sequence
  Description of Artificial Sequence: Synthetic oligonucleotide
  Antisense strand to SEQ ID NO: 1082964
guuuaccagcucuauuaaa

SEQ ID NO: 1082966 - RNA, 19 nt, Artificial Sequence
  Description of Artificial Sequence: Synthetic oligonucleotide
  Sense strand starting at position 2111 of SEQ ID NO: 915480
ggguggguucuuugagcga

SEQ ID NO: 1082967 - RNA, 19 nt, Artificial Sequence
  Description of Artificial Sequence: Synthetic oligonucleotide
  Antisense strand to SEQ ID NO: 1082966
ucgcucaaagaacccaccc

SEQ ID NO: 1082968 - RNA, 19 nt, Artificial Sequence
  Description of Artificial Sequence: Synthetic oligonucleotide
  Sense strand starting at position 2116 of SEQ ID NO: 915480
gguucuuugagcgaguggu

SEQ ID NO: 1082969 - RNA, 19 nt, Artificial Sequence
  Description of Artificial Sequence: Synthetic oligonucleotide
  Antisense strand to SEQ ID NO: 1082968
accacucgcucaaagaacc

SEQ ID NO: 1082970 - RNA, 19 nt, Artificial Sequence
  Description of Artificial Sequence: Synthetic oligonucleotide
  Sense strand starting at position 2117 of SEQ ID NO: 915480
guucuuugagcgagugguc

SEQ ID NO: 1082971 - RNA, 19 nt, Artificial Sequence
  Description of Artificial Sequence: Synthetic oligonucleotide
  Antisense strand to SEQ ID NO: 1082970
gaccacucgcucaaagaac

SEQ ID NO: 1082972 - RNA, 19 nt, Artificial Sequence
  Description of Artificial Sequence: Synthetic oligonucleotide
  Sense strand starting at position 2163 of SEQ ID NO: 915480
gcggaauuaacccggaggu

SEQ ID NO: 1082973 - RNA, 19 nt, Artificial Sequence
  Description of Artificial Sequence: Synthetic oligonucleotide
  Antisense strand to SEQ ID NO: 1082972
accuccggguuaauuccgc

SEQ ID NO: 1082974 - RNA, 19 nt, Artificial Sequence
  Description of Artificial Sequence: Synthetic oligonucleotide
  Sense strand starting at position 2203 of SEQ ID NO: 915480
cuuagagcccauuaaguca

SEQ ID NO: 1082975 - RNA, 19 nt, Artificial Sequence
  Description of Artificial Sequence: Synthetic oligonucleotide
  Antisense strand to SEQ ID NO: 1082974
ugacuuaaugggcucuaag

SEQ ID NO: 1082976 - RNA, 19 nt, Artificial Sequence
  Description of Artificial Sequence: Synthetic oligonucleotide
  Sense strand starting at position 2210 of SEQ ID NO: 915480
cccauuaagucagugucuu

SEQ ID NO: 1082977 - RNA, 19 nt, Artificial Sequence
  Description of Artificial Sequence: Synthetic oligonucleotide
  Antisense strand to SEQ ID NO: 1082976
aagacacugacuuaauggg

SEQ ID NO: 1082978 - RNA, 19 nt, Artificial Sequence
  Description of Artificial Sequence: Synthetic oligonucleotide
  Sense strand starting at position 2211 of SEQ ID NO: 915480
ccauuaagucagugucuuc

SEQ ID NO: 1082979 - RNA, 19 nt, Artificial Sequence
  Description of Artificial Sequence: Synthetic oligonucleotide
  Antisense strand to SEQ ID NO: 1082978
gaagacacugacuuaaugg

SEQ ID NO: 1082980 - RNA, 19 nt, Artificial Sequence
  Description of Artificial Sequence: Synthetic oligonucleotide
  Sense strand starting at position 2221 of SEQ ID NO: 915480
agugucuucguggcuuuaa

SEQ ID NO: 1082981 - RNA, 19 nt, Artificial Sequence
  Description of Artificial Sequence: Synthetic oligonucleotide
  Antisense strand to SEQ ID NO: 1082980
uuaaagccacgaagacacu

SEQ ID NO: 1082982 - RNA, 19 nt, Artificial Sequence
  Description of Artificial Sequence: Synthetic oligonucleotide
  Sense strand starting at position 2222 of SEQ ID NO: 915480
gugucuucguggcuuuaag

SEQ ID NO: 1082983 - RNA, 19 nt, Artificial Sequence
  Description of Artificial Sequence: Synthetic oligonucleotide
  Antisense strand to SEQ ID NO: 1082982
cuuaaagccacgaagacac

SEQ ID NO: 1082984 - RNA, 19 nt, Artificial Sequence
  Description of Artificial Sequence: Synthetic oligonucleotide
  Sense strand starting at position 2223 of SEQ ID NO: 915480
ugucuucguggcuuuaagu

SEQ ID NO: 1082985 - RNA, 19 nt, Artificial Sequence
  Description of Artificial Sequence: Synthetic oligonucleotide
  Antisense strand to SEQ ID NO: 1082984
acuuaaagccacgaagaca

SEQ ID NO: 1082986 - RNA, 19 nt, Artificial Sequence
  Description of Artificial Sequence: Synthetic oligonucleotide
  Sense strand starting at position 2224 of SEQ ID NO: 915480
gucuucguggcuuuaaguu

SEQ ID NO: 1082987 - RNA, 19 nt, Artificial Sequence
  Description of Artificial Sequence: Synthetic oligonucleotide
  Antisense strand to SEQ ID NO: 1082986
aacuuaaagccacgaagac

SEQ ID NO: 1082988 - RNA, 19 nt, Artificial Sequence
  Description of Artificial Sequence: Synthetic oligonucleotide
  Sense strand starting at position 2297 of SEQ ID NO: 915480
cacggucuuuccguagaca

SEQ ID NO: 1082989 - RNA, 19 nt, Artificial Sequence
  Description of Artificial Sequence: Synthetic oligonucleotide
  Antisense strand to SEQ ID NO: 1082988
ugucuacggaaagaccgug

SEQ ID NO: 1082990 - RNA, 19 nt, Artificial Sequence
  Description of Artificial Sequence: Synthetic oligonucleotide
  Sense strand starting at position 2424 of SEQ ID NO: 915480
uaaccaguaucgucaggga

SEQ ID NO: 1082991 - RNA, 19 nt, Artificial Sequence
  Description of Artificial Sequence: Synthetic oligonucleotide
  Antisense strand to SEQ ID NO: 1082990
ucccugacgauacugguua

SEQ ID NO: 1082992 - RNA, 19 nt, Artificial Sequence
  Description of Artificial Sequence: Synthetic oligonucleotide
  Sense strand starting at position 2831 of SEQ ID NO: 915480
cuguuaagauuguuuagga

SEQ ID NO: 1082993 - RNA, 19 nt, Artificial Sequence
  Description of Artificial Sequence: Synthetic oligonucleotide
  Antisense strand to SEQ ID NO: 1082992
uccuaaacaaucuuaacag

SEQ ID NO: 1082994 - RNA, 19 nt, Artificial Sequence
  Description of Artificial Sequence: Synthetic oligonucleotide
  Sense strand starting at position 2832 of SEQ ID NO: 915480
uguuaagauuguuuaggag

SEQ ID NO: 1082995 - RNA, 19 nt, Artificial Sequence
  Description of Artificial Sequence: Synthetic oligonucleotide
  Antisense strand to SEQ ID NO: 1082994
cuccuaaacaaucuuaaca

SEQ ID NO: 1082996 - RNA, 19 nt, Artificial Sequence
  Description of Artificial Sequence: Synthetic oligonucleotide
  Sense strand starting at position 2903 of SEQ ID NO: 915480
guggcacaucuguguguau

SEQ ID NO: 1082997 - RNA, 19 nt, Artificial Sequence
  Description of Artificial Sequence: Synthetic oligonucleotide
  Antisense strand to SEQ ID NO: 1082996
auacacacagaugugccac

SEQ ID NO: 1082998 - RNA, 19 nt, Artificial Sequence
  Description of Artificial Sequence: Synthetic oligonucleotide
  Sense strand starting at position 2905 of SEQ ID NO: 915480
ggcacaucuguguguauga

SEQ ID NO: 1082999 - RNA, 19 nt, Artificial Sequence
  Description of Artificial Sequence: Synthetic oligonucleotide
  Antisense strand to SEQ ID NO: 1082998
ucauacacacagaugugcc

SEQ ID NO: 1083000 - RNA, 19 nt, Artificial Sequence
  Description of Artificial Sequence: Synthetic oligonucleotide
  Sense strand starting at position 2907 of SEQ ID NO: 915480
cacaucuguguguaugagu

SEQ ID NO: 1083001 - RNA, 19 nt, Artificial Sequence
  Description of Artificial Sequence: Synthetic oligonucleotide
  Antisense strand to SEQ ID NO: 1083000
acucauacacacagaugug

SEQ ID NO: 1083002 - RNA, 19 nt, Artificial Sequence
  Description of Artificial Sequence: Synthetic oligonucleotide
  Sense strand starting at position 3370 of SEQ ID NO: 915480
gcauguguuaggcuauguu

SEQ ID NO: 1083003 - RNA, 19 nt, Artificial Sequence
  Description of Artificial Sequence: Synthetic oligonucleotide
  Antisense strand to SEQ ID NO: 1083002
aacauagccuaacacaugc

SEQ ID NO: 1083004 - RNA, 19 nt, Artificial Sequence
  Description of Artificial Sequence: Synthetic oligonucleotide
  Sense strand starting at position 3373 of SEQ ID NO: 915480
uguguuaggcuauguugua

SEQ ID NO: 1083005 - RNA, 19 nt, Artificial Sequence
  Description of Artificial Sequence: Synthetic oligonucleotide
  Antisense strand to SEQ ID NO: 1083004
uacaacauagccuaacaca

SEQ ID NO: 1083006 - RNA, 19 nt, Artificial Sequence
  Description of Artificial Sequence: Synthetic oligonucleotide
  Sense strand starting at position 3374 of SEQ ID NO: 915480
guguuaggcuauguuguau

SEQ ID NO: 1083007 - RNA, 19 nt, Artificial Sequence
  Description of Artificial Sequence: Synthetic oligonucleotide
  Antisense strand to SEQ ID NO: 1083006
auacaacauagccuaacac

SEQ ID NO: 1083008 - RNA, 19 nt, Artificial Sequence
  Description of Artificial Sequence: Synthetic oligonucleotide
  Sense strand starting at position 3522 of SEQ ID NO: 915480
agcucuugcucuuugagau

SEQ ID NO: 1083009 - RNA, 19 nt, Artificial Sequence
  Description of Artificial Sequence: Synthetic oligonucleotide
  Antisense strand to SEQ ID NO: 1083008
aucucaaagagcaagagcu

SEQ ID NO: 1083010 - RNA, 19 nt, Artificial Sequence
  Description of Artificial Sequence: Synthetic oligonucleotide
  Sense strand starting at position 3523 of SEQ ID NO: 915480
gcucuugcucuuugagaug

SEQ ID NO: 1083011 - RNA, 19 nt, Artificial Sequence
  Description of Artificial Sequence: Synthetic oligonucleotide
  Antisense strand to SEQ ID NO: 1083010
caucucaaagagcaagagc

SEQ ID NO: 1083012 - RNA, 19 nt, Artificial Sequence
  Description of Artificial Sequence: Synthetic oligonucleotide
  Sense strand starting at position 3705 of SEQ ID NO: 915480
ccagaaaucucauacugug

SEQ ID NO: 1083013 - RNA, 19 nt, Artificial Sequence
  Description of Artificial Sequence: Synthetic oligonucleotide
  Antisense strand to SEQ ID NO: 1083012
cacaguaugagauuucugg

SEQ ID NO: 1083014 - RNA, 19 nt, Artificial Sequence
  Description of Artificial Sequence: Synthetic oligonucleotide
  Sense strand starting at position 3714 of SEQ ID NO: 915480
ucauacuguguuugccaua

SEQ ID NO: 1083015 - RNA, 19 nt, Artificial Sequence
  Description of Artificial Sequence: Synthetic oligonucleotide
  Antisense strand to SEQ ID NO: 1083014
uauggcaaacacaguauga

SEQ ID NO: 1083016 - RNA, 19 nt, Artificial Sequence
  Description of Artificial Sequence: Synthetic oligonucleotide
  Sense strand starting at position 3978 of SEQ ID NO: 915480
gugugauccugggcaaagu

SEQ ID NO: 1083017 - RNA, 19 nt, Artificial Sequence
  Description of Artificial Sequence: Synthetic oligonucleotide
  Antisense strand to SEQ ID NO: 1083016
acuuugcccaggaucacac

SEQ ID NO: 1083018 - RNA, 19 nt, Artificial Sequence
  Description of Artificial Sequence: Synthetic oligonucleotide
  Sense strand starting at position 14 of SEQ ID NO: 915481
guuauuacacugugaucau

SEQ ID NO: 1083019 - RNA, 19 nt, Artificial Sequence
  Description of Artificial Sequence: Synthetic oligonucleotide
  Antisense strand to SEQ ID NO: 1083018
augaucacaguguaauaac

SEQ ID NO: 1083020 - RNA, 19 nt, Artificial Sequence
  Description of Artificial Sequence: Synthetic oligonucleotide
  Sense strand starting at position 17 of SEQ ID NO: 915481
auuacacugugaucaugua

SEQ ID NO: 1083021 - RNA, 19 nt, Artificial Sequence
  Description of Artificial Sequence: Synthetic oligonucleotide
  Antisense strand to SEQ ID NO: 1083020
uacaugaucacaguguaau

SEQ ID NO: 1083022 - RNA, 19 nt, Artificial Sequence
  Description of Artificial Sequence: Synthetic oligonucleotide
  Sense strand starting at position 38 of SEQ ID NO: 915481
agaacauucuuguuugcag

SEQ ID NO: 1083023 - RNA, 19 nt, Artificial Sequence
  Description of Artificial Sequence: Synthetic oligonucleotide
  Antisense strand to SEQ ID NO: 1083022
cugcaaacaagaauguucu

SEQ ID NO: 1083024 - RNA, 19 nt, Artificial Sequence
  Description of Artificial Sequence: Synthetic oligonucleotide
  Sense strand starting at position 39 of SEQ ID NO: 915481
gaacauucuuguuugcaga

SEQ ID NO: 1083025 - RNA, 19 nt, Artificial Sequence
  Description of Artificial Sequence: Synthetic oligonucleotide
  Antisense strand to SEQ ID NO: 1083024
ucugcaaacaagaauguuc

SEQ ID NO: 1083026 - RNA, 19 nt, Artificial Sequence
  Description of Artificial Sequence: Synthetic oligonucleotide
  Sense strand starting at position 41 of SEQ ID NO: 915481
acauucuuguuugcagaaa

SEQ ID NO: 1083027 - RNA, 19 nt, Artificial Sequence
  Description of Artificial Sequence: Synthetic oligonucleotide
  Antisense strand to SEQ ID NO: 1083026
uuucugcaaacaagaaugu

SEQ ID NO: 1083028 - RNA, 19 nt, Artificial Sequence
  Description of Artificial Sequence: Synthetic oligonucleotide
  Sense strand starting at position 64 of SEQ ID NO: 915481
acauuaaaguauucuggga

SEQ ID NO: 1083029 - RNA, 19 nt, Artificial Sequence
  Description of Artificial Sequence: Synthetic oligonucleotide
  Antisense strand to SEQ ID NO: 1083028
ucccagaauacuuuaaugu

SEQ ID NO: 1083030 - RNA, 19 nt, Artificial Sequence
  Description of Artificial Sequence: Synthetic oligonucleotide
  Sense strand starting at position 68 of SEQ ID NO: 915481
uaaaguauucugggaugac

SEQ ID NO: 1083031 - RNA, 19 nt, Artificial Sequence
  Description of Artificial Sequence: Synthetic oligonucleotide
  Antisense strand to SEQ ID NO: 1083030
gucaucccagaauacuuua

SEQ ID NO: 1083032 - RNA, 19 nt, Artificial Sequence
  Description of Artificial Sequence: Synthetic oligonucleotide
  Sense strand starting at position 670 of SEQ ID NO: 915481
ccucaaucaggucaugacu

SEQ ID NO: 1083033 - RNA, 19 nt, Artificial Sequence
  Description of Artificial Sequence: Synthetic oligonucleotide
  Antisense strand to SEQ ID NO: 1083032
agucaugaccugauugagg

SEQ ID NO: 1083034 - RNA, 19 nt, Artificial Sequence
  Description of Artificial Sequence: Synthetic oligonucleotide
  Sense strand starting at position 676 of SEQ ID NO: 915481
ucaggucaugacuggugaa

SEQ ID NO: 1083035 - RNA, 19 nt, Artificial Sequence
  Description of Artificial Sequence: Synthetic oligonucleotide
  Antisense strand to SEQ ID NO: 1083034
uucaccagucaugaccuga

SEQ ID NO: 1083036 - RNA, 19 nt, Artificial Sequence
  Description of Artificial Sequence: Synthetic oligonucleotide
  Sense strand starting at position 677 of SEQ ID NO: 915481
caggucaugacuggugaaa

SEQ ID NO: 1083037 - RNA, 19 nt, Artificial Sequence
  Description of Artificial Sequence: Synthetic oligonucleotide
  Antisense strand to SEQ ID NO: 1083036
uuucaccagucaugaccug

SEQ ID NO: 1083038 - RNA, 19 nt, Artificial Sequence
  Description of Artificial Sequence: Synthetic oligonucleotide
  Sense strand starting at position 777 of SEQ ID NO: 915481
uggguagaacaaugguauu

SEQ ID NO: 1083039 - RNA, 19 nt, Artificial Sequence
  Description of Artificial Sequence: Synthetic oligonucleotide
  Antisense strand to SEQ ID NO: 1083038
aauaccauuguucuaccca

SEQ ID NO: 1083040 - RNA, 19 nt, Artificial Sequence
  Description of Artificial Sequence: Synthetic oligonucleotide
  Sense strand starting at position 788 of SEQ ID NO: 915481
augguauucugagcuacca

SEQ ID NO: 1083041 - RNA, 19 nt, Artificial Sequence
  Description of Artificial Sequence: Synthetic oligonucleotide
  Antisense strand to SEQ ID NO: 1083040
ugguagcucagaauaccau

SEQ ID NO: 1083042 - RNA, 19 nt, Artificial Sequence
  Description of Artificial Sequence: Synthetic oligonucleotide
  Sense strand starting at position 859 of SEQ ID NO: 915481
ggcuguagagcugauaucu

SEQ ID NO: 1083043 - RNA, 19 nt, Artificial Sequence
  Description of Artificial Sequence: Synthetic oligonucleotide
  Antisense strand to SEQ ID NO: 1083042
agauaucagcucuacagcc

SEQ ID NO: 1083044 - RNA, 19 nt, Artificial Sequence
  Description of Artificial Sequence: Synthetic oligonucleotide
  Sense strand starting at position 897 of SEQ ID NO: 915481
ggacuagaauugcccuaaa

SEQ ID NO: 1083045 - RNA, 19 nt, Artificial Sequence
  Description of Artificial Sequence: Synthetic oligonucleotide
  Antisense strand to SEQ ID NO: 1083044
uuuagggcaauucuagucc

SEQ ID NO: 1083046 - RNA, 19 nt, Artificial Sequence
  Description of Artificial Sequence: Synthetic oligonucleotide
  Sense strand starting at position 992 of SEQ ID NO: 915481
gaaauaaacgugcaugaac

SEQ ID NO: 1083047 - RNA, 19 nt, Artificial Sequence
  Description of Artificial Sequence: Synthetic oligonucleotide
  Antisense strand to SEQ ID NO: 1083046
guucaugcacguuuauuuc

SEQ ID NO: 1083048 - RNA, 19 nt, Artificial Sequence
  Description of Artificial Sequence: Synthetic oligonucleotide
  Sense strand starting at position 1029 of SEQ ID NO: 915481
guggaaguccgucaauuaa

SEQ ID NO: 1083049 - RNA, 19 nt, Artificial Sequence
  Description of Artificial Sequence: Synthetic oligonucleotide
  Antisense strand to SEQ ID NO: 1083048
uuaauugacggacuuccac

SEQ ID NO: 1083050 - RNA, 19 nt, Artificial Sequence
  Description of Artificial Sequence: Synthetic oligonucleotide
  Sense strand starting at position 1183 of SEQ ID NO: 915481
caagucaugucacugugaa

SEQ ID NO: 1083051 - RNA, 19 nt, Artificial Sequence
  Description of Artificial Sequence: Synthetic oligonucleotide
  Antisense strand to SEQ ID NO: 1083050
uucacagugacaugacuug

SEQ ID NO: 1083052 - RNA, 19 nt, Artificial Sequence
  Description of Artificial Sequence: Synthetic oligonucleotide
  Sense strand starting at position 1184 of SEQ ID NO: 915481
aagucaugucacugugaag

SEQ ID NO: 1083053 - RNA, 19 nt, Artificial Sequence
  Description of Artificial Sequence: Synthetic oligonucleotide
  Antisense strand to SEQ ID NO: 1083052
cuucacagugacaugacuu

SEQ ID NO: 1083054 - RNA, 19 nt, Artificial Sequence
  Description of Artificial Sequence: Synthetic oligonucleotide
  Sense strand starting at position 1206 of SEQ ID NO: 915481
ccgucacauuuguccugaa

SEQ ID NO: 1083055 - RNA, 19 nt, Artificial Sequence
  Description of Artificial Sequence: Synthetic oligonucleotide
  Antisense strand to SEQ ID NO: 1083054
uucaggacaaaugugacgg

SEQ ID NO: 1083056 - RNA, 19 nt, Artificial Sequence
  Description of Artificial Sequence: Synthetic oligonucleotide
  Sense strand starting at position 1207 of SEQ ID NO: 915481
cgucacauuuguccugaaa

SEQ ID NO: 1083057 - RNA, 19 nt, Artificial Sequence
  Description of Artificial Sequence: Synthetic oligonucleotide
  Antisense strand to SEQ ID NO: 1083056
uuucaggacaaaugugacg

SEQ ID NO: 1083058 - RNA, 19 nt, Artificial Sequence
  Description of Artificial Sequence: Synthetic oligonucleotide
  Sense strand starting at position 1231 of SEQ ID NO: 915481
gggagcauuuccuagaaag

SEQ ID NO: 1083059 - RNA, 19 nt, Artificial Sequence
  Description of Artificial Sequence: Synthetic oligonucleotide
  Antisense strand to SEQ ID NO: 1083058
cuuucuaggaaaugcuccc

SEQ ID NO: 1083060 - RNA, 19 nt, Artificial Sequence
  Description of Artificial Sequence: Synthetic oligonucleotide
  Sense strand starting at position 1389 of SEQ ID NO: 915481
acugguuacucacucagga

SEQ ID NO: 1083061 - RNA, 19 nt, Artificial Sequence
  Description of Artificial Sequence: Synthetic oligonucleotide
  Antisense strand to SEQ ID NO: 1083060
uccugagugaguaaccagu

SEQ ID NO: 1083062 - RNA, 19 nt, Artificial Sequence
  Description of Artificial Sequence: Synthetic oligonucleotide
  Sense strand starting at position 2429 of SEQ ID NO: 915481
gcacguuuccuguuuaugu

SEQ ID NO: 1083063 - RNA, 19 nt, Artificial Sequence
  Description of Artificial Sequence: Synthetic oligonucleotide
  Antisense strand to SEQ ID NO: 1083062
acauaaacaggaaacgugc

SEQ ID NO: 1083064 - RNA, 19 nt, Artificial Sequence
  Description of Artificial Sequence: Synthetic oligonucleotide
  Sense strand starting at position 2442 of SEQ ID NO: 915481
uuauguuguguagauggga

SEQ ID NO: 1083065 - RNA, 19 nt, Artificial Sequence
  Description of Artificial Sequence: Synthetic oligonucleotide
  Antisense strand to SEQ ID NO: 1083064
ucccaucuacacaacauaa

SEQ ID NO: 1083066 - RNA, 19 nt, Artificial Sequence
  Description of Artificial Sequence: Synthetic oligonucleotide
  Sense strand starting at position 2592 of SEQ ID NO: 915481
gccagauuccaccgaggaa

SEQ ID NO: 1083067 - RNA, 19 nt, Artificial Sequence
  Description of Artificial Sequence: Synthetic oligonucleotide
  Antisense strand to SEQ ID NO: 1083066
uuccucgguggaaucuggc

SEQ ID NO: 1083068 - RNA, 19 nt, Artificial Sequence
  Description of Artificial Sequence: Synthetic oligonucleotide
  Sense strand starting at position 2780 of SEQ ID NO: 915481
ccgucucgggauuaucaaa

SEQ ID NO: 1083069 - RNA, 19 nt, Artificial Sequence
  Description of Artificial Sequence: Synthetic oligonucleotide
  Antisense strand to SEQ ID NO: 1083068
uuugauaaucccgagacgg

SEQ ID NO: 1083070 - RNA, 19 nt, Artificial Sequence
  Description of Artificial Sequence: Synthetic oligonucleotide
  Sense strand starting at position 2836 of SEQ ID NO: 915481
ucgaauuuggcugguguga

SEQ ID NO: 1083071 - RNA, 19 nt, Artificial Sequence
  Description of Artificial Sequence: Synthetic oligonucleotide
  Antisense strand to SEQ ID NO: 1083070
ucacaccagccaaauucga

SEQ ID NO: 1083072 - RNA, 19 nt, Artificial Sequence
  Description of Artificial Sequence: Synthetic oligonucleotide
  Sense strand starting at position 2867 of SEQ ID NO: 915481
cucacuuugucauuuguua

SEQ ID NO: 1083073 - RNA, 19 nt, Artificial Sequence
  Description of Artificial Sequence: Synthetic oligonucleotide
  Antisense strand to SEQ ID NO: 1083072
uaacaaaugacaaagugag

SEQ ID NO: 1083074 - RNA, 19 nt, Artificial Sequence
  Description of Artificial Sequence: Synthetic oligonucleotide
  Sense strand starting at position 2883 of SEQ ID NO: 915481
uuaauaucucacgaaguuu

SEQ ID NO: 1083075 - RNA, 19 nt, Artificial Sequence
  Description of Artificial Sequence: Synthetic oligonucleotide
  Antisense strand to SEQ ID NO: 1083074
aaacuucgugagauauuaa

SEQ ID NO: 1083076 - RNA, 19 nt, Artificial Sequence
  Description of Artificial Sequence: Synthetic oligonucleotide
  Sense strand starting at position 2939 of SEQ ID NO: 915481
aaaucuccgugguuuagaa

SEQ ID NO: 1083077 - RNA, 19 nt, Artificial Sequence
  Description of Artificial Sequence: Synthetic oligonucleotide
  Antisense strand to SEQ ID NO: 1083076
uucuaaaccacggagauuu

SEQ ID NO: 1083078 - RNA, 19 nt, Artificial Sequence
  Description of Artificial Sequence: Synthetic oligonucleotide
  Sense strand starting at position 2988 of SEQ ID NO: 915481
cuauuaauugaggguuuga

SEQ ID NO: 1083079 - RNA, 19 nt, Artificial Sequence
  Description of Artificial Sequence: Synthetic oligonucleotide
  Antisense strand to SEQ ID NO: 1083078
ucaaacccucaauuaauag

SEQ ID NO: 1083080 - RNA, 19 nt, Artificial Sequence
  Description of Artificial Sequence: Synthetic oligonucleotide
  Sense strand starting at position 3056 of SEQ ID NO: 915481
uauaguaggugccuacaaa

SEQ ID NO: 1083081 - RNA, 19 nt, Artificial Sequence
  Description of Artificial Sequence: Synthetic oligonucleotide
  Antisense strand to SEQ ID NO: 1083080
uuuguaggcaccuacuaua

SEQ ID NO: 1083082 - RNA, 19 nt, Artificial Sequence
  Description of Artificial Sequence: Synthetic oligonucleotide
  Sense strand starting at position 3084 of SEQ ID NO: 915481
augaguaaaugugcgauuu

SEQ ID NO: 1083083 - RNA, 19 nt, Artificial Sequence
  Description of Artificial Sequence: Synthetic oligonucleotide
  Antisense strand to SEQ ID NO: 1083082
aaaucgcacauuuacucau

SEQ ID NO: 1083084 - RNA, 19 nt, Artificial Sequence
  Description of Artificial Sequence: Synthetic oligonucleotide
  Sense strand starting at position 3160 of SEQ ID NO: 915481
aucucagcuccugaagauu

SEQ ID NO: 1083085 - RNA, 19 nt, Artificial Sequence
  Description of Artificial Sequence: Synthetic oligonucleotide
  Antisense strand to SEQ ID NO: 1083084
aaucuucaggagcugagau

SEQ ID NO: 1083086 - RNA, 19 nt, Artificial Sequence
  Description of Artificial Sequence: Synthetic oligonucleotide
  Sense strand starting at position 3350 of SEQ ID NO: 915481
aagauaguuugauccugaa

SEQ ID NO: 1083087 - RNA, 19 nt, Artificial Sequence
  Description of Artificial Sequence: Synthetic oligonucleotide
  Antisense strand to SEQ ID NO: 1083086
uucaggaucaaacuaucuu

SEQ ID NO: 1083088 - RNA, 19 nt, Artificial Sequence
  Description of Artificial Sequence: Synthetic oligonucleotide
  Sense strand starting at position 3423 of SEQ ID NO: 915481
ucuguaacuucccugagag

SEQ ID NO: 1083089 - RNA, 19 nt, Artificial Sequence
  Description of Artificial Sequence: Synthetic oligonucleotide
  Antisense strand to SEQ ID NO: 1083088
cucucagggaaguuacaga

SEQ ID NO: 1083090 - RNA, 19 nt, Artificial Sequence
  Description of Artificial Sequence: Synthetic oligonucleotide
  Sense strand starting at position 3425 of SEQ ID NO: 915481
uguaacuucccugagagcu

SEQ ID NO: 1083091 - RNA, 19 nt, Artificial Sequence
  Description of Artificial Sequence: Synthetic oligonucleotide
  Antisense strand to SEQ ID NO: 1083090
agcucucagggaaguuaca

SEQ ID NO: 1083092 - RNA, 19 nt, Artificial Sequence
  Description of Artificial Sequence: Synthetic oligonucleotide
  Sense strand starting at position 3516 of SEQ ID NO: 915481
acagcccuauuguuagaaa

SEQ ID NO: 1083093 - RNA, 19 nt, Artificial Sequence
  Description of Artificial Sequence: Synthetic oligonucleotide
  Antisense strand to SEQ ID NO: 1083092
uuucuaacaauagggcugu

SEQ ID NO: 1083094 - RNA, 19 nt, Artificial Sequence
  Description of Artificial Sequence: Synthetic oligonucleotide
  Sense strand starting at position 3755 of SEQ ID NO: 915481
guacaacuaccaugucuau

SEQ ID NO: 1083095 - RNA, 19 nt, Artificial Sequence
  Description of Artificial Sequence: Synthetic oligonucleotide
  Antisense strand to SEQ ID NO: 1083094
auagacaugguaguuguac

SEQ ID NO: 1083096 - RNA, 19 nt, Artificial Sequence
  Description of Artificial Sequence: Synthetic oligonucleotide
  Sense strand starting at position 3766 of SEQ ID NO: 915481
augucuaucuaguuacaaa

SEQ ID NO: 1083097 - RNA, 19 nt, Artificial Sequence
  Description of Artificial Sequence: Synthetic oligonucleotide
  Antisense strand to SEQ ID NO: 1083096
uuuguaacuagauagacau

SEQ ID NO: 1083098 - RNA, 19 nt, Artificial Sequence
  Description of Artificial Sequence: Synthetic oligonucleotide
  Sense strand starting at position 72 of SEQ ID NO: 915482
aauaguaucgugcaaccaa

SEQ ID NO: 1083099 - RNA, 19 nt, Artificial Sequence
  Description of Artificial Sequence: Synthetic oligonucleotide
  Antisense strand to SEQ ID NO: 1083098
uugguugcacgauacuauu

SEQ ID NO: 1083100 - RNA, 19 nt, Artificial Sequence
  Description of Artificial Sequence: Synthetic oligonucleotide
  Sense strand starting at position 182 of SEQ ID NO: 915482
ucuauaugauuaucacugu

SEQ ID NO: 1083101 - RNA, 19 nt, Artificial Sequence
  Description of Artificial Sequence: Synthetic oligonucleotide
  Antisense strand to SEQ ID NO: 1083100
acagugauaaucauauaga

SEQ ID NO: 1083102 - RNA, 19 nt, Artificial Sequence
  Description of Artificial Sequence: Synthetic oligonucleotide
  Sense strand starting at position 279 of SEQ ID NO: 915482
cugacaguaguugauagua

SEQ ID NO: 1083103 - RNA, 19 nt, Artificial Sequence
  Description of Artificial Sequence: Synthetic oligonucleotide
  Antisense strand to SEQ ID NO: 1083102
uacuaucaacuacugucag

SEQ ID NO: 1083104 - RNA, 19 nt, Artificial Sequence
  Description of Artificial Sequence: Synthetic oligonucleotide
  Sense strand starting at position 428 of SEQ ID NO: 915482
cuugcauagggucauaaga

SEQ ID NO: 1083105 - RNA, 19 nt, Artificial Sequence
  Description of Artificial Sequence: Synthetic oligonucleotide
  Antisense strand to SEQ ID NO: 1083104
ucuuaugacccuaugcaag

SEQ ID NO: 1083106 - RNA, 19 nt, Artificial Sequence
  Description of Artificial Sequence: Synthetic oligonucleotide
  Sense strand starting at position 607 of SEQ ID NO: 915482
gguuauaagcccugaaguu

SEQ ID NO: 1083107 - RNA, 19 nt, Artificial Sequence
  Description of Artificial Sequence: Synthetic oligonucleotide
  Antisense strand to SEQ ID NO: 1083106
aacuucagggcuuauaacc

SEQ ID NO: 1083108 - RNA, 19 nt, Artificial Sequence
  Description of Artificial Sequence: Synthetic oligonucleotide
  Sense strand starting at position 608 of SEQ ID NO: 915482
guuauaagcccugaaguua

SEQ ID NO: 1083109 - RNA, 19 nt, Artificial Sequence
  Description of Artificial Sequence: Synthetic oligonucleotide
  Antisense strand to SEQ ID NO: 1083108
uaacuucagggcuuauaac

SEQ ID NO: 1083110 - RNA, 19 nt, Artificial Sequence
  Description of Artificial Sequence: Synthetic oligonucleotide
  Sense strand starting at position 678 of SEQ ID NO: 915482
auacuuuguccuugcagaa

SEQ ID NO: 1083111 - RNA, 19 nt, Artificial Sequence
  Description of Artificial Sequence: Synthetic oligonucleotide
  Antisense strand to SEQ ID NO: 1083110
uucugcaaggacaaaguau

SEQ ID NO: 1083112 - RNA, 19 nt, Artificial Sequence
  Description of Artificial Sequence: Synthetic oligonucleotide
  Sense strand starting at position 813 of SEQ ID NO: 915482
uauugagaaccagguauua

SEQ ID NO: 1083113 - RNA, 19 nt, Artificial Sequence
  Description of Artificial Sequence: Synthetic oligonucleotide
  Antisense strand to SEQ ID NO: 1083112
uaauaccugguucucaaua

SEQ ID NO: 1083114 - RNA, 19 nt, Artificial Sequence
  Description of Artificial Sequence: Synthetic oligonucleotide
  Sense strand starting at position 867 of SEQ ID NO: 915482
ugagauagguacuucuaug

SEQ ID NO: 1083115 - RNA, 19 nt, Artificial Sequence
  Description of Artificial Sequence: Synthetic oligonucleotide
  Antisense strand to SEQ ID NO: 1083114
cauagaaguaccuaucuca

SEQ ID NO: 1083116 - RNA, 19 nt, Artificial Sequence
  Description of Artificial Sequence: Synthetic oligonucleotide
  Sense strand starting at position 1008 of SEQ ID NO: 915482
acguuauguuaucucucaa

SEQ ID NO: 1083117 - RNA, 19 nt, Artificial Sequence
  Description of Artificial Sequence: Synthetic oligonucleotide
  Antisense strand to SEQ ID NO: 1083116
uugagagauaacauaacgu

SEQ ID NO: 1083118 - RNA, 19 nt, Artificial Sequence
  Description of Artificial Sequence: Synthetic oligonucleotide
  Sense strand starting at position 1015 of SEQ ID NO: 915482
guuaucucucaagauguuu

SEQ ID NO: 1083119 - RNA, 19 nt, Artificial Sequence
  Description of Artificial Sequence: Synthetic oligonucleotide
  Antisense strand to SEQ ID NO: 1083118
aaacaucuugagagauaac

SEQ ID NO: 1083120 - RNA, 19 nt, Artificial Sequence
  Description of Artificial Sequence: Synthetic oligonucleotide
  Sense strand starting at position 1032 of SEQ ID NO: 915482
uuuauaugcagaugaggga

SEQ ID NO: 1083121 - RNA, 19 nt, Artificial Sequence
  Description of Artificial Sequence: Synthetic oligonucleotide
  Antisense strand to SEQ ID NO: 1083120
ucccucaucugcauauaaa

SEQ ID NO: 1083122 - RNA, 19 nt, Artificial Sequence
  Description of Artificial Sequence: Synthetic oligonucleotide
  Sense strand starting at position 1045 of SEQ ID NO: 915482
gagggauucugaguaccac

SEQ ID NO: 1083123 - RNA, 19 nt, Artificial Sequence
  Description of Artificial Sequence: Synthetic oligonucleotide
  Antisense strand to SEQ ID NO: 1083122
gugguacucagaaucccuc

SEQ ID NO: 1083124 - RNA, 19 nt, Artificial Sequence
  Description of Artificial Sequence: Synthetic oligonucleotide
  Sense strand starting at position 1105 of SEQ ID NO: 915482
cucuguaaaugaucaagga

SEQ ID NO: 1083125 - RNA, 19 nt, Artificial Sequence
  Description of Artificial Sequence: Synthetic oligonucleotide
  Antisense strand to SEQ ID NO: 1083124
uccuugaucauuuacagag

SEQ ID NO: 1083126 - RNA, 19 nt, Artificial Sequence
  Description of Artificial Sequence: Synthetic oligonucleotide
  Sense strand starting at position 1115 of SEQ ID NO: 915482
gaucaaggaucaguuauua

SEQ ID NO: 1083127 - RNA, 19 nt, Artificial Sequence
  Description of Artificial Sequence: Synthetic oligonucleotide
  Antisense strand to SEQ ID NO: 1083126
uaauaacugauccuugauc

SEQ ID NO: 1083128 - RNA, 19 nt, Artificial Sequence
  Description of Artificial Sequence: Synthetic oligonucleotide
  Sense strand starting at position 1195 of SEQ ID NO: 915482
uccagaggguuuccucuaa

SEQ ID NO: 1083129 - RNA, 19 nt, Artificial Sequence
  Description of Artificial Sequence: Synthetic oligonucleotide
  Antisense strand to SEQ ID NO: 1083128
uuagaggaaacccucugga

SEQ ID NO: 1083130 - RNA, 19 nt, Artificial Sequence
  Description of Artificial Sequence: Synthetic oligonucleotide
  Sense strand starting at position 1244 of SEQ ID NO: 915482
uggaaacucuauguacuga

SEQ ID NO: 1083131 - RNA, 19 nt, Artificial Sequence
  Description of Artificial Sequence: Synthetic oligonucleotide
  Antisense strand to SEQ ID NO: 1083130
ucaguacauagaguuucca

SEQ ID NO: 1083132 - RNA, 19 nt, Artificial Sequence
  Description of Artificial Sequence: Synthetic oligonucleotide
  Sense strand starting at position 1484 of SEQ ID NO: 915482
ugauucuucuggccuuuaa

SEQ ID NO: 1083133 - RNA, 19 nt, Artificial Sequence
  Description of Artificial Sequence: Synthetic oligonucleotide
  Antisense strand to SEQ ID NO: 1083132
uuaaaggccagaagaauca

SEQ ID NO: 1083134 - RNA, 19 nt, Artificial Sequence
  Description of Artificial Sequence: Synthetic oligonucleotide
  Sense strand starting at position 1562 of SEQ ID NO: 915482
ccagaauucccuugaguaa

SEQ ID NO: 1083135 - RNA, 19 nt, Artificial Sequence
  Description of Artificial Sequence: Synthetic oligonucleotide
  Antisense strand to SEQ ID NO: 1083134
uuacucaagggaauucugg

SEQ ID NO: 1083136 - RNA, 19 nt, Artificial Sequence
  Description of Artificial Sequence: Synthetic oligonucleotide
  Sense strand starting at position 1766 of SEQ ID NO: 915482
gccagucuucgggaugcca

SEQ ID NO: 1083137 - RNA, 19 nt, Artificial Sequence
  Description of Artificial Sequence: Synthetic oligonucleotide
  Antisense strand to SEQ ID NO: 1083136
uggcaucccgaagacuggc

SEQ ID NO: 1083138 - RNA, 19 nt, Artificial Sequence
  Description of Artificial Sequence: Synthetic oligonucleotide
  Sense strand starting at position 2011 of SEQ ID NO: 915482
agguguauuccgcuuccuu

SEQ ID NO: 1083139 - RNA, 19 nt, Artificial Sequence
  Description of Artificial Sequence: Synthetic oligonucleotide
  Antisense strand to SEQ ID NO: 1083138
aaggaagcggaauacaccu

SEQ ID NO: 1083140 - RNA, 19 nt, Artificial Sequence
  Description of Artificial Sequence: Synthetic oligonucleotide
  Sense strand starting at position 2012 of SEQ ID NO: 915482
gguguauuccgcuuccuuc

SEQ ID NO: 1083141 - RNA, 19 nt, Artificial Sequence
  Description of Artificial Sequence: Synthetic oligonucleotide
  Antisense strand to SEQ ID NO: 1083140
gaaggaagcggaauacacc

SEQ ID NO: 1083142 - RNA, 19 nt, Artificial Sequence
  Description of Artificial Sequence: Synthetic oligonucleotide
  Sense strand starting at position 2394 of SEQ ID NO: 915482
guuuacgguguuuauacaa

SEQ ID NO: 1083143 - RNA, 19 nt, Artificial Sequence
  Description of Artificial Sequence: Synthetic oligonucleotide
  Antisense strand to SEQ ID NO: 1083142
uuguauaaacaccguaaac

SEQ ID NO: 1083144 - RNA, 19 nt, Artificial Sequence
  Description of Artificial Sequence: Synthetic oligonucleotide
  Sense strand starting at position 2431 of SEQ ID NO: 915482
cccugcguugagggaaaua

SEQ ID NO: 1083145 - RNA, 19 nt, Artificial Sequence
  Description of Artificial Sequence: Synthetic oligonucleotide
  Antisense strand to SEQ ID NO: 1083144
uauuucccucaacgcaggg

SEQ ID NO: 1083146 - RNA, 19 nt, Artificial Sequence
  Description of Artificial Sequence: Synthetic oligonucleotide
  Sense strand starting at position 2675 of SEQ ID NO: 915482
aagguuaacgcagaucuaa

SEQ ID NO: 1083147 - RNA, 19 nt, Artificial Sequence
  Description of Artificial Sequence: Synthetic oligonucleotide
  Antisense strand to SEQ ID NO: 1083146
uuagaucugcguuaaccuu

SEQ ID NO: 1083148 - RNA, 19 nt, Artificial Sequence
  Description of Artificial Sequence: Synthetic oligonucleotide
  Sense strand starting at position 2696 of SEQ ID NO: 915482
ggcuuugauuugcuacaca

SEQ ID NO: 1083149 - RNA, 19 nt, Artificial Sequence
  Description of Artificial Sequence: Synthetic oligonucleotide
  Antisense strand to SEQ ID NO: 1083148
uguguagcaaaucaaagcc

SEQ ID NO: 1083150 - RNA, 19 nt, Artificial Sequence
  Description of Artificial Sequence: Synthetic oligonucleotide
  Sense strand starting at position 2939 of SEQ ID NO: 915482
gggaauacaugacagaaau

SEQ ID NO: 1083151 - RNA, 19 nt, Artificial Sequence
  Description of Artificial Sequence: Synthetic oligonucleotide
  Antisense strand to SEQ ID NO: 1083150
auuucugucauguauuccc

SEQ ID NO: 1083152 - RNA, 19 nt, Artificial Sequence
  Description of Artificial Sequence: Synthetic oligonucleotide
  Sense strand starting at position 3141 of SEQ ID NO: 915482
gucuacuucguuuaacaca

SEQ ID NO: 1083153 - RNA, 19 nt, Artificial Sequence
  Description of Artificial Sequence: Synthetic oligonucleotide
  Antisense strand to SEQ ID NO: 1083152
uguguuaaacgaaguagac

SEQ ID NO: 1083154 - RNA, 19 nt, Artificial Sequence
  Description of Artificial Sequence: Synthetic oligonucleotide
  Sense strand starting at position 3232 of SEQ ID NO: 915482
uuaugugcugugggagaaa

SEQ ID NO: 1083155 - RNA, 19 nt, Artificial Sequence
  Description of Artificial Sequence: Synthetic oligonucleotide
  Antisense strand to SEQ ID NO: 1083154
uuucucccacagcacauaa

SEQ ID NO: 1083156 - RNA, 19 nt, Artificial Sequence
  Description of Artificial Sequence: Synthetic oligonucleotide
  Sense strand starting at position 3245 of SEQ ID NO: 915482
gagaaaugggcauguauaa

SEQ ID NO: 1083157 - RNA, 19 nt, Artificial Sequence
  Description of Artificial Sequence: Synthetic oligonucleotide
  Antisense strand to SEQ ID NO: 1083156
uuauacaugcccauuucuc

SEQ ID NO: 1083158 - RNA, 19 nt, Artificial Sequence
  Description of Artificial Sequence: Synthetic oligonucleotide
  Sense strand starting at position 3268 of SEQ ID NO: 915482
cuauguugcuuauuacaag

SEQ ID NO: 1083159 - RNA, 19 nt, Artificial Sequence
  Description of Artificial Sequence: Synthetic oligonucleotide
  Antisense strand to SEQ ID NO: 1083158
cuuguaauaagcaacauag

SEQ ID NO: 1083160 - RNA, 19 nt, Artificial Sequence
  Description of Artificial Sequence: Synthetic oligonucleotide
  Sense strand starting at position 3299 of SEQ ID NO: 915482
acaguaauuggugguauag

SEQ ID NO: 1083161 - RNA, 19 nt, Artificial Sequence
  Description of Artificial Sequence: Synthetic oligonucleotide
  Antisense strand to SEQ ID NO: 1083160
cuauaccaccaauuacugu

SEQ ID NO: 1083162 - RNA, 19 nt, Artificial Sequence
  Description of Artificial Sequence: Synthetic oligonucleotide
  Sense strand starting at position 3410 of SEQ ID NO: 915482
aaauguuauugagcauaga

SEQ ID NO: 1083163 - RNA, 19 nt, Artificial Sequence
  Description of Artificial Sequence: Synthetic oligonucleotide
  Antisense strand to SEQ ID NO: 1083162
ucuaugcucaauaacauuu

SEQ ID NO: 1083164 - RNA, 19 nt, Artificial Sequence
  Description of Artificial Sequence: Synthetic oligonucleotide
  Sense strand starting at position 3411 of SEQ ID NO: 915482
aauguuauugagcauagau

SEQ ID NO: 1083165 - RNA, 19 nt, Artificial Sequence
  Description of Artificial Sequence: Synthetic oligonucleotide
  Antisense strand to SEQ ID NO: 1083164
aucuaugcucaauaacauu

SEQ ID NO: 1083166 - RNA, 19 nt, Artificial Sequence
  Description of Artificial Sequence: Synthetic oligonucleotide
  Sense strand starting at position 3413 of SEQ ID NO: 915482
uguuauugagcauagauga

SEQ ID NO: 1083167 - RNA, 19 nt, Artificial Sequence
  Description of Artificial Sequence: Synthetic oligonucleotide
  Antisense strand to SEQ ID NO: 1083166
ucaucuaugcucaauaaca

SEQ ID NO: 1083168 - RNA, 19 nt, Artificial Sequence
  Description of Artificial Sequence: Synthetic oligonucleotide
  Sense strand starting at position 3517 of SEQ ID NO: 915482
uugaauaugccuuagcuau

SEQ ID NO: 1083169 - RNA, 19 nt, Artificial Sequence
  Description of Artificial Sequence: Synthetic oligonucleotide
  Antisense strand to SEQ ID NO: 1083168
auagcuaaggcauauucaa

SEQ ID NO: 1083170 - RNA, 19 nt, Artificial Sequence
  Description of Artificial Sequence: Synthetic oligonucleotide
  Sense strand starting at position 3542 of SEQ ID NO: 915482
uggucuuuauucuugguga

SEQ ID NO: 1083171 - RNA, 19 nt, Artificial Sequence
  Description of Artificial Sequence: Synthetic oligonucleotide
  Antisense strand to SEQ ID NO: 1083170
ucaccaagaauaaagacca

SEQ ID NO: 1083172 - RNA, 19 nt, Artificial Sequence
  Description of Artificial Sequence: Synthetic oligonucleotide
  Sense strand starting at position 3544 of SEQ ID NO: 915482
gucuuuauucuuggugacu

SEQ ID NO: 1083173 - RNA, 19 nt, Artificial Sequence
  Description of Artificial Sequence: Synthetic oligonucleotide
  Antisense strand to SEQ ID NO: 1083172
agucaccaagaauaaagac

SEQ ID NO: 1083174 - RNA, 19 nt, Artificial Sequence
  Description of Artificial Sequence: Synthetic oligonucleotide
  Sense strand starting at position 3545 of SEQ ID NO: 915482
ucuuuauucuuggugacuu

SEQ ID NO: 1083175 - RNA, 19 nt, Artificial Sequence
  Description of Artificial Sequence: Synthetic oligonucleotide
  Antisense strand to SEQ ID NO: 1083174
aagucaccaagaauaaaga

SEQ ID NO: 1083176 - RNA, 19 nt, Artificial Sequence
  Description of Artificial Sequence: Synthetic oligonucleotide
  Sense strand starting at position 3609 of SEQ ID NO: 915482
guaauaaguuaaccucaag

SEQ ID NO: 1083177 - RNA, 19 nt, Artificial Sequence
  Description of Artificial Sequence: Synthetic oligonucleotide
  Antisense strand to SEQ ID NO: 1083176
cuugagguuaacuuauuac

SEQ ID NO: 1083178 - RNA, 19 nt, Artificial Sequence
  Description of Artificial Sequence: Synthetic oligonucleotide
  Sense strand starting at position 90 of SEQ ID NO: 915483
cugacaguaguugauagua

SEQ ID NO: 1083179 - RNA, 19 nt, Artificial Sequence
  Description of Artificial Sequence: Synthetic oligonucleotide
  Antisense strand to SEQ ID NO: 1083178
uacuaucaacuacugucag

SEQ ID NO: 1083180 - RNA, 19 nt, Artificial Sequence
  Description of Artificial Sequence: Synthetic oligonucleotide
  Sense strand starting at position 239 of SEQ ID NO: 915483
cuugcauagggucauaaga

SEQ ID NO: 1083181 - RNA, 19 nt, Artificial Sequence
  Description of Artificial Sequence: Synthetic oligonucleotide
  Antisense strand to SEQ ID NO: 1083180
ucuuaugacccuaugcaag

SEQ ID NO: 1083182 - RNA, 19 nt, Artificial Sequence
  Description of Artificial Sequence: Synthetic oligonucleotide
  Sense strand starting at position 418 of SEQ ID NO: 915483
gguuauaagcccugaaguu

SEQ ID NO: 1083183 - RNA, 19 nt, Artificial Sequence
  Description of Artificial Sequence: Synthetic oligonucleotide
  Antisense strand to SEQ ID NO: 1083182
aacuucagggcuuauaacc

SEQ ID NO: 1083184 - RNA, 19 nt, Artificial Sequence
  Description of Artificial Sequence: Synthetic oligonucleotide
  Sense strand starting at position 419 of SEQ ID NO: 915483
guuauaagcccugaaguua

SEQ ID NO: 1083185 - RNA, 19 nt, Artificial Sequence
  Description of Artificial Sequence: Synthetic oligonucleotide
  Antisense strand to SEQ ID NO: 1083184
uaacuucagggcuuauaac

SEQ ID NO: 1083186 - RNA, 19 nt, Artificial Sequence
  Description of Artificial Sequence: Synthetic oligonucleotide
  Sense strand starting at position 489 of SEQ ID NO: 915483
auacuuuguccuugcagaa

SEQ ID NO: 1083187 - RNA, 19 nt, Artificial Sequence
  Description of Artificial Sequence: Synthetic oligonucleotide
  Antisense strand to SEQ ID NO: 1083186
uucugcaaggacaaaguau

SEQ ID NO: 1083188 - RNA, 19 nt, Artificial Sequence
  Description of Artificial Sequence: Synthetic oligonucleotide
  Sense strand starting at position 624 of SEQ ID NO: 915483
uauugagaaccagguauua

SEQ ID NO: 1083189 - RNA, 19 nt, Artificial Sequence
  Description of Artificial Sequence: Synthetic oligonucleotide
  Antisense strand to SEQ ID NO: 1083188
uaauaccugguucucaaua

SEQ ID NO: 1083190 - RNA, 19 nt, Artificial Sequence
  Description of Artificial Sequence: Synthetic oligonucleotide
  Sense strand starting at position 678 of SEQ ID NO: 915483
ugagauagguacuucuaug

SEQ ID NO: 1083191 - RNA, 19 nt, Artificial Sequence
  Description of Artificial Sequence: Synthetic oligonucleotide
  Antisense strand to SEQ ID NO: 1083190
cauagaaguaccuaucuca

SEQ ID NO: 1083192 - RNA, 19 nt, Artificial Sequence
  Description of Artificial Sequence: Synthetic oligonucleotide
  Sense strand starting at position 819 of SEQ ID NO: 915483
acguuauguuaucucucaa

SEQ ID NO: 1083193 - RNA, 19 nt, Artificial Sequence
  Description of Artificial Sequence: Synthetic oligonucleotide
  Antisense strand to SEQ ID NO: 1083192
uugagagauaacauaacgu

SEQ ID NO: 1083194 - RNA, 19 nt, Artificial Sequence
  Description of Artificial Sequence: Synthetic oligonucleotide
  Sense strand starting at position 826 of SEQ ID NO: 915483
guuaucucucaagauguuu

SEQ ID NO: 1083195 - RNA, 19 nt, Artificial Sequence
  Description of Artificial Sequence: Synthetic oligonucleotide
  Antisense strand to SEQ ID NO: 1083194
aaacaucuugagagauaac

SEQ ID NO: 1083196 - RNA, 19 nt, Artificial Sequence
  Description of Artificial Sequence: Synthetic oligonucleotide
  Sense strand starting at position 843 of SEQ ID NO: 915483
uuuauaugcagaugaggga

SEQ ID NO: 1083197 - RNA, 19 nt, Artificial Sequence
  Description of Artificial Sequence: Synthetic oligonucleotide
  Antisense strand to SEQ ID NO: 1083196
ucccucaucugcauauaaa

SEQ ID NO: 1083198 - RNA, 19 nt, Artificial Sequence
  Description of Artificial Sequence: Synthetic oligonucleotide
  Sense strand starting at position 856 of SEQ ID NO: 915483
gagggauucugaguaccac

SEQ ID NO: 1083199 - RNA, 19 nt, Artificial Sequence
  Description of Artificial Sequence: Synthetic oligonucleotide
  Antisense strand to SEQ ID NO: 1083198
gugguacucagaaucccuc

SEQ ID NO: 1083200 - RNA, 19 nt, Artificial Sequence
  Description of Artificial Sequence: Synthetic oligonucleotide
  Sense strand starting at position 916 of SEQ ID NO: 915483
cucuguaaaugaucaagga

SEQ ID NO: 1083201 - RNA, 19 nt, Artificial Sequence
  Description of Artificial Sequence: Synthetic oligonucleotide
  Antisense strand to SEQ ID NO: 1083200
uccuugaucauuuacagag

SEQ ID NO: 1083202 - RNA, 19 nt, Artificial Sequence
  Description of Artificial Sequence: Synthetic oligonucleotide
  Sense strand starting at position 926 of SEQ ID NO: 915483
gaucaaggaucaguuauua

SEQ ID NO: 1083203 - RNA, 19 nt, Artificial Sequence
  Description of Artificial Sequence: Synthetic oligonucleotide
  Antisense strand to SEQ ID NO: 1083202
uaauaacugauccuugauc

SEQ ID NO: 1083204 - RNA, 19 nt, Artificial Sequence
  Description of Artificial Sequence: Synthetic oligonucleotide
  Sense strand starting at position 1006 of SEQ ID NO: 915483
uccagaggguuuccucuaa

SEQ ID NO: 1083205 - RNA, 19 nt, Artificial Sequence
  Description of Artificial Sequence: Synthetic oligonucleotide
  Antisense strand to SEQ ID NO: 1083204
uuagaggaaacccucugga

SEQ ID NO: 1083206 - RNA, 19 nt, Artificial Sequence
  Description of Artificial Sequence: Synthetic oligonucleotide
  Sense strand starting at position 1055 of SEQ ID NO: 915483
uggaaacucuauguacuga

SEQ ID NO: 1083207 - RNA, 19 nt, Artificial Sequence
  Description of Artificial Sequence: Synthetic oligonucleotide
  Antisense strand to SEQ ID NO: 1083206
ucaguacauagaguuucca

SEQ ID NO: 1083208 - RNA, 19 nt, Artificial Sequence
  Description of Artificial Sequence: Synthetic oligonucleotide
  Sense strand starting at position 1295 of SEQ ID NO: 915483
ugauucuucuggccuuuaa

SEQ ID NO: 1083209 - RNA, 19 nt, Artificial Sequence
  Description of Artificial Sequence: Synthetic oligonucleotide
  Antisense strand to SEQ ID NO: 1083208
uuaaaggccagaagaauca

SEQ ID NO: 1083210 - RNA, 19 nt, Artificial Sequence
  Description of Artificial Sequence: Synthetic oligonucleotide
  Sense strand starting at position 1373 of SEQ ID NO: 915483
ccagaauucccuugaguaa

SEQ ID NO: 1083211 - RNA, 19 nt, Artificial Sequence
  Description of Artificial Sequence: Synthetic oligonucleotide
  Antisense strand to SEQ ID NO: 1083210
uuacucaagggaauucugg

SEQ ID NO: 1083212 - RNA, 19 nt, Artificial Sequence
  Description of Artificial Sequence: Synthetic oligonucleotide
  Sense strand starting at position 1822 of SEQ ID NO: 915483
agguguauuccgcuuccuu

SEQ ID NO: 1083213 - RNA, 19 nt, Artificial Sequence
  Description of Artificial Sequence: Synthetic oligonucleotide
  Antisense strand to SEQ ID NO: 1083212
aaggaagcggaauacaccu

SEQ ID NO: 1083214 - RNA, 19 nt, Artificial Sequence
  Description of Artificial Sequence: Synthetic oligonucleotide
  Sense strand starting at position 1823 of SEQ ID NO: 915483
gguguauuccgcuuccuuc

SEQ ID NO: 1083215 - RNA, 19 nt, Artificial Sequence
  Description of Artificial Sequence: Synthetic oligonucleotide
  Antisense strand to SEQ ID NO: 1083214
gaaggaagcggaauacacc

SEQ ID NO: 1083216 - RNA, 19 nt, Artificial Sequence
  Description of Artificial Sequence: Synthetic oligonucleotide
  Sense strand starting at position 2205 of SEQ ID NO: 915483
guuuacgguguuuauacaa

SEQ ID NO: 1083217 - RNA, 19 nt, Artificial Sequence
  Description of Artificial Sequence: Synthetic oligonucleotide
  Antisense strand to SEQ ID NO: 1083216
uuguauaaacaccguaaac

SEQ ID NO: 1083218 - RNA, 19 nt, Artificial Sequence
  Description of Artificial Sequence: Synthetic oligonucleotide
  Sense strand starting at position 2242 of SEQ ID NO: 915483
cccugcguugagggaaaua

SEQ ID NO: 1083219 - RNA, 19 nt, Artificial Sequence
  Description of Artificial Sequence: Synthetic oligonucleotide
  Antisense strand to SEQ ID NO: 1083218
uauuucccucaacgcaggg

SEQ ID NO: 1083220 - RNA, 19 nt, Artificial Sequence
  Description of Artificial Sequence: Synthetic oligonucleotide
  Sense strand starting at position 2486 of SEQ ID NO: 915483
aagguuaacgcagaucuaa

SEQ ID NO: 1083221 - RNA, 19 nt, Artificial Sequence
  Description of Artificial Sequence: Synthetic oligonucleotide
  Antisense strand to SEQ ID NO: 1083220
uuagaucugcguuaaccuu

SEQ ID NO: 1083222 - RNA, 19 nt, Artificial Sequence
  Description of Artificial Sequence: Synthetic oligonucleotide
  Sense strand starting at position 2507 of SEQ ID NO: 915483
ggcuuugauuugcuacaca

SEQ ID NO: 1083223 - RNA, 19 nt, Artificial Sequence
  Description of Artificial Sequence: Synthetic oligonucleotide
  Antisense strand to SEQ ID NO: 1083222
uguguagcaaaucaaagcc

SEQ ID NO: 1083224 - RNA, 19 nt, Artificial Sequence
  Description of Artificial Sequence: Synthetic oligonucleotide
  Sense strand starting at position 2750 of SEQ ID NO: 915483
gggaauacaugacagaaau

SEQ ID NO: 1083225 - RNA, 19 nt, Artificial Sequence
  Description of Artificial Sequence: Synthetic oligonucleotide
  Antisense strand to SEQ ID NO: 1083224
auuucugucauguauuccc

SEQ ID NO: 1083226 - RNA, 19 nt, Artificial Sequence
  Description of Artificial Sequence: Synthetic oligonucleotide
  Sense strand starting at position 2952 of SEQ ID NO: 915483
gucuacuucguuuaacaca

SEQ ID NO: 1083227 - RNA, 19 nt, Artificial Sequence
  Description of Artificial Sequence: Synthetic oligonucleotide
  Antisense strand to SEQ ID NO: 1083226
uguguuaaacgaaguagac

SEQ ID NO: 1083228 - RNA, 19 nt, Artificial Sequence
  Description of Artificial Sequence: Synthetic oligonucleotide
  Sense strand starting at position 3043 of SEQ ID NO: 915483
uuaugugcugugggagaaa

SEQ ID NO: 1083229 - RNA, 19 nt, Artificial Sequence
  Description of Artificial Sequence: Synthetic oligonucleotide
  Antisense strand to SEQ ID NO: 1083228
uuucucccacagcacauaa

SEQ ID NO: 1083230 - RNA, 19 nt, Artificial Sequence
  Description of Artificial Sequence: Synthetic oligonucleotide
  Sense strand starting at position 3056 of SEQ ID NO: 915483
gagaaaugggcauguauaa

SEQ ID NO: 1083231 - RNA, 19 nt, Artificial Sequence
  Description of Artificial Sequence: Synthetic oligonucleotide
  Antisense strand to SEQ ID NO: 1083230
uuauacaugcccauuucuc

SEQ ID NO: 1083232 - RNA, 19 nt, Artificial Sequence
  Description of Artificial Sequence: Synthetic oligonucleotide
  Sense strand starting at position 3079 of SEQ ID NO: 915483
cuauguugcuuauuacaag

SEQ ID NO: 1083233 - RNA, 19 nt, Artificial Sequence
  Description of Artificial Sequence: Synthetic oligonucleotide
  Antisense strand to SEQ ID NO: 1083232
cuuguaauaagcaacauag

SEQ ID NO: 1083234 - RNA, 19 nt, Artificial Sequence
  Description of Artificial Sequence: Synthetic oligonucleotide
  Sense strand starting at position 3110 of SEQ ID NO: 915483
acaguaauuggugguauag

SEQ ID NO: 1083235 - RNA, 19 nt, Artificial Sequence
  Description of Artificial Sequence: Synthetic oligonucleotide
  Antisense strand to SEQ ID NO: 1083234
cuauaccaccaauuacugu

SEQ ID NO: 1083236 - RNA, 19 nt, Artificial Sequence
  Description of Artificial Sequence: Synthetic oligonucleotide
  Sense strand starting at position 3221 of SEQ ID NO: 915483
aaauguuauugagcauaga

SEQ ID NO: 1083237 - RNA, 19 nt, Artificial Sequence
  Description of Artificial Sequence: Synthetic oligonucleotide
  Antisense strand to SEQ ID NO: 1083236
ucuaugcucaauaacauuu

SEQ ID NO: 1083238 - RNA, 19 nt, Artificial Sequence
  Description of Artificial Sequence: Synthetic oligonucleotide
  Sense strand starting at position 3222 of SEQ ID NO: 915483
aauguuauugagcauagau

SEQ ID NO: 1083239 - RNA, 19 nt, Artificial Sequence
  Description of Artificial Sequence: Synthetic oligonucleotide
  Antisense strand to SEQ ID NO: 1083238
aucuaugcucaauaacauu

SEQ ID NO: 1083240 - RNA, 19 nt, Artificial Sequence
  Description of Artificial Sequence: Synthetic oligonucleotide
  Sense strand starting at position 3224 of SEQ ID NO: 915483
uguuauugagcauagauga

SEQ ID NO: 1083241 - RNA, 19 nt, Artificial Sequence
  Description of Artificial Sequence: Synthetic oligonucleotide
  Antisense strand to SEQ ID NO: 1083240
ucaucuaugcucaauaaca

SEQ ID NO: 1083242 - RNA, 19 nt, Artificial Sequence
  Description of Artificial Sequence: Synthetic oligonucleotide
  Sense strand starting at position 3328 of SEQ ID NO: 915483
uugaauaugccuuagcuau

SEQ ID NO: 1083243 - RNA, 19 nt, Artificial Sequence
  Description of Artificial Sequence: Synthetic oligonucleotide
  Antisense strand to SEQ ID NO: 1083242
auagcuaaggcauauucaa

SEQ ID NO: 1083244 - RNA, 19 nt, Artificial Sequence
  Description of Artificial Sequence: Synthetic oligonucleotide
  Sense strand starting at position 3353 of SEQ ID NO: 915483
uggucuuuauucuugguga

SEQ ID NO: 1083245 - RNA, 19 nt, Artificial Sequence
  Description of Artificial Sequence: Synthetic oligonucleotide
  Antisense strand to SEQ ID NO: 1083244
ucaccaagaauaaagacca

SEQ ID NO: 1083246 - RNA, 19 nt, Artificial Sequence
  Description of Artificial Sequence: Synthetic oligonucleotide
  Sense strand starting at position 3355 of SEQ ID NO: 915483
gucuuuauucuuggugacu

SEQ ID NO: 1083247 - RNA, 19 nt, Artificial Sequence
  Description of Artificial Sequence: Synthetic oligonucleotide
  Antisense strand to SEQ ID NO: 1083246
agucaccaagaauaaagac

SEQ ID NO: 1083248 - RNA, 19 nt, Artificial Sequence
  Description of Artificial Sequence: Synthetic oligonucleotide
  Sense strand starting at position 3356 of SEQ ID NO: 915483
ucuuuauucuuggugacuu

SEQ ID NO: 1083249 - RNA, 19 nt, Artificial Sequence
  Description of Artificial Sequence: Synthetic oligonucleotide
  Antisense strand to SEQ ID NO: 1083248
aagucaccaagaauaaaga

SEQ ID NO: 1083250 - RNA, 19 nt, Artificial Sequence
  Description of Artificial Sequence: Synthetic oligonucleotide
  Sense strand starting at position 3420 of SEQ ID NO: 915483
guaauaaguuaaccucaag

SEQ ID NO: 1083251 - RNA, 19 nt, Artificial Sequence
  Description of Artificial Sequence: Synthetic oligonucleotide
  Antisense strand to SEQ ID NO: 1083250
cuugagguuaacuuauuac

SEQ ID NO: 1083252 - RNA, 19 nt, Artificial Sequence
  Description of Artificial Sequence: Synthetic oligonucleotide
  Sense strand starting at position 3865 of SEQ ID NO: 915483
gguguauaaguguauuaau

SEQ ID NO: 1083253 - RNA, 19 nt, Artificial Sequence
  Description of Artificial Sequence: Synthetic oligonucleotide
  Antisense strand to SEQ ID NO: 1083252
auuaauacacuuauacacc

SEQ ID NO: 1083254 - RNA, 19 nt, Artificial Sequence
  Description of Artificial Sequence: Synthetic oligonucleotide
  Sense strand starting at position 3899 of SEQ ID NO: 915483
gcagcauuccuacaugucu

SEQ ID NO: 1083255 - RNA, 19 nt, Artificial Sequence
  Description of Artificial Sequence: Synthetic oligonucleotide
  Antisense strand to SEQ ID NO: 1083254
agacauguaggaaugcugc

SEQ ID NO: 1083256 - RNA, 19 nt, Artificial Sequence
  Description of Artificial Sequence: Synthetic oligonucleotide
  Sense strand starting at position 3966 of SEQ ID NO: 915483
uuugcaagggucuauggua

SEQ ID NO: 1083257 - RNA, 19 nt, Artificial Sequence
  Description of Artificial Sequence: Synthetic oligonucleotide
  Antisense strand to SEQ ID NO: 1083256
uaccauagacccuugcaaa

SEQ ID NO: 1083258 - RNA, 19 nt, Artificial Sequence
  Description of Artificial Sequence: Synthetic oligonucleotide
  Sense strand starting at position 765 of SEQ ID NO: 915484
cauugugugaaguaagugu

SEQ ID NO: 1083259 - RNA, 19 nt, Artificial Sequence
  Description of Artificial Sequence: Synthetic oligonucleotide
  Antisense strand to SEQ ID NO: 1083258
acacuuacuucacacaaug

SEQ ID NO: 1083260 - RNA, 19 nt, Artificial Sequence
  Description of Artificial Sequence: Synthetic oligonucleotide
  Sense strand starting at position 769 of SEQ ID NO: 915484
gugugaaguaaguguuaaa

SEQ ID NO: 1083261 - RNA, 19 nt, Artificial Sequence
  Description of Artificial Sequence: Synthetic oligonucleotide
  Antisense strand to SEQ ID NO: 1083260
uuuaacacuuacuucacac

SEQ ID NO: 1083262 - RNA, 19 nt, Artificial Sequence
  Description of Artificial Sequence: Synthetic oligonucleotide
  Sense strand starting at position 1026 of SEQ ID NO: 915484
aacuuaucuccaugggugu

SEQ ID NO: 1083263 - RNA, 19 nt, Artificial Sequence
  Description of Artificial Sequence: Synthetic oligonucleotide
  Antisense strand to SEQ ID NO: 1083262
acacccauggagauaaguu

SEQ ID NO: 1083264 - RNA, 19 nt, Artificial Sequence
  Description of Artificial Sequence: Synthetic oligonucleotide
  Sense strand starting at position 1044 of SEQ ID NO: 915484
uugugaagcuuuccaagug

SEQ ID NO: 1083265 - RNA, 19 nt, Artificial Sequence
  Description of Artificial Sequence: Synthetic oligonucleotide
  Antisense strand to SEQ ID NO: 1083264
cacuuggaaagcuucacaa

SEQ ID NO: 1083266 - RNA, 19 nt, Artificial Sequence
  Description of Artificial Sequence: Synthetic oligonucleotide
  Sense strand starting at position 1059 of SEQ ID NO: 915484
agugaauuaauuggaguuu

SEQ ID NO: 1083267 - RNA, 19 nt, Artificial Sequence
  Description of Artificial Sequence: Synthetic oligonucleotide
  Antisense strand to SEQ ID NO: 1083266
aaacuccaauuaauucacu

SEQ ID NO: 1083268 - RNA, 19 nt, Artificial Sequence
  Description of Artificial Sequence: Synthetic oligonucleotide
  Sense strand starting at position 1144 of SEQ ID NO: 915484
agaguuagauaacccaguu

SEQ ID NO: 1083269 - RNA, 19 nt, Artificial Sequence
  Description of Artificial Sequence: Synthetic oligonucleotide
  Antisense strand to SEQ ID NO: 1083268
aacuggguuaucuaacucu

SEQ ID NO: 1083270 - RNA, 19 nt, Artificial Sequence
  Description of Artificial Sequence: Synthetic oligonucleotide
  Sense strand starting at position 1180 of SEQ ID NO: 915484
cuuggagagagcugugauc

SEQ ID NO: 1083271 - RNA, 19 nt, Artificial Sequence
  Description of Artificial Sequence: Synthetic oligonucleotide
  Antisense strand to SEQ ID NO: 1083270
gaucacagcucucuccaag

SEQ ID NO: 1083272 - RNA, 19 nt, Artificial Sequence
  Description of Artificial Sequence: Synthetic oligonucleotide
  Sense strand starting at position 1191 of SEQ ID NO: 915484
cugugauccuucuuuccuu

SEQ ID NO: 1083273 - RNA, 19 nt, Artificial Sequence
  Description of Artificial Sequence: Synthetic oligonucleotide
  Antisense strand to SEQ ID NO: 1083272
aaggaaagaaggaucacag

SEQ ID NO: 1083274 - RNA, 19 nt, Artificial Sequence
  Description of Artificial Sequence: Synthetic oligonucleotide
  Sense strand starting at position 1371 of SEQ ID NO: 915484
gcucucuuucuggaauauu

SEQ ID NO: 1083275 - RNA, 19 nt, Artificial Sequence
  Description of Artificial Sequence: Synthetic oligonucleotide
  Antisense strand to SEQ ID NO: 1083274
aauauuccagaaagagagc

SEQ ID NO: 1083276 - RNA, 19 nt, Artificial Sequence
  Description of Artificial Sequence: Synthetic oligonucleotide
  Sense strand starting at position 1387 of SEQ ID NO: 915484
auuccucugugcccagaau

SEQ ID NO: 1083277 - RNA, 19 nt, Artificial Sequence
  Description of Artificial Sequence: Synthetic oligonucleotide
  Antisense strand to SEQ ID NO: 1083276
auucugggcacagaggaau

SEQ ID NO: 1083278 - RNA, 19 nt, Artificial Sequence
  Description of Artificial Sequence: Synthetic oligonucleotide
  Sense strand starting at position 1406 of SEQ ID NO: 915484
gagagaccuugucuugggu

SEQ ID NO: 1083279 - RNA, 19 nt, Artificial Sequence
  Description of Artificial Sequence: Synthetic oligonucleotide
  Antisense strand to SEQ ID NO: 1083278
acccaagacaaggucucuc

SEQ ID NO: 1083280 - RNA, 19 nt, Artificial Sequence
  Description of Artificial Sequence: Synthetic oligonucleotide
  Sense strand starting at position 1533 of SEQ ID NO: 915484
cuuggagucuguccagauc

SEQ ID NO: 1083281 - RNA, 19 nt, Artificial Sequence
  Description of Artificial Sequence: Synthetic oligonucleotide
  Antisense strand to SEQ ID NO: 1083280
gaucuggacagacuccaag

SEQ ID NO: 1083282 - RNA, 19 nt, Artificial Sequence
  Description of Artificial Sequence: Synthetic oligonucleotide
  Sense strand starting at position 1569 of SEQ ID NO: 915484
uauuccuaugcuggaugua

SEQ ID NO: 1083283 - RNA, 19 nt, Artificial Sequence
  Description of Artificial Sequence: Synthetic oligonucleotide
  Antisense strand to SEQ ID NO: 1083282
uacauccagcauaggaaua

SEQ ID NO: 1083284 - RNA, 19 nt, Artificial Sequence
  Description of Artificial Sequence: Synthetic oligonucleotide
  Sense strand starting at position 1639 of SEQ ID NO: 915484
ugggauucugaggguuguu

SEQ ID NO: 1083285 - RNA, 19 nt, Artificial Sequence
  Description of Artificial Sequence: Synthetic oligonucleotide
  Antisense strand to SEQ ID NO: 1083284
aacaacccucagaauccca

SEQ ID NO: 1083286 - RNA, 19 nt, Artificial Sequence
  Description of Artificial Sequence: Synthetic oligonucleotide
  Sense strand starting at position 1642 of SEQ ID NO: 915484
gauucugaggguuguugga

SEQ ID NO: 1083287 - RNA, 19 nt, Artificial Sequence
  Description of Artificial Sequence: Synthetic oligonucleotide
  Antisense strand to SEQ ID NO: 1083286
uccaacaacccucagaauc

SEQ ID NO: 1083288 - RNA, 19 nt, Artificial Sequence
  Description of Artificial Sequence: Synthetic oligonucleotide
  Sense strand starting at position 1644 of SEQ ID NO: 915484
uucugaggguuguuggaua

SEQ ID NO: 1083289 - RNA, 19 nt, Artificial Sequence
  Description of Artificial Sequence: Synthetic oligonucleotide
  Antisense strand to SEQ ID NO: 1083288
uauccaacaacccucagaa

SEQ ID NO: 1083290 - RNA, 19 nt, Artificial Sequence
  Description of Artificial Sequence: Synthetic oligonucleotide
  Sense strand starting at position 1810 of SEQ ID NO: 915484
ccuucuucugagcagaacu

SEQ ID NO: 1083291 - RNA, 19 nt, Artificial Sequence
  Description of Artificial Sequence: Synthetic oligonucleotide
  Antisense strand to SEQ ID NO: 1083290
aguucugcucagaagaagg

SEQ ID NO: 1083292 - RNA, 19 nt, Artificial Sequence
  Description of Artificial Sequence: Synthetic oligonucleotide
  Sense strand starting at position 1835 of SEQ ID NO: 915484
uccugagaguuccuaaguc

SEQ ID NO: 1083293 - RNA, 19 nt, Artificial Sequence
  Description of Artificial Sequence: Synthetic oligonucleotide
  Antisense strand to SEQ ID NO: 1083292
gacuuaggaacucucagga

SEQ ID NO: 1083294 - RNA, 19 nt, Artificial Sequence
  Description of Artificial Sequence: Synthetic oligonucleotide
  Sense strand starting at position 2068 of SEQ ID NO: 915484
gggcaagggcucuacauaa

SEQ ID NO: 1083295 - RNA, 19 nt, Artificial Sequence
  Description of Artificial Sequence: Synthetic oligonucleotide
  Antisense strand to SEQ ID NO: 1083294
uuauguagagcccuugccc

SEQ ID NO: 1083296 - RNA, 19 nt, Artificial Sequence
  Description of Artificial Sequence: Synthetic oligonucleotide
  Sense strand starting at position 2112 of SEQ ID NO: 915484
ggcuuggugggauagguaa

SEQ ID NO: 1083297 - RNA, 19 nt, Artificial Sequence
  Description of Artificial Sequence: Synthetic oligonucleotide
  Antisense strand to SEQ ID NO: 1083296
uuaccuaucccaccaagcc

SEQ ID NO: 1083298 - RNA, 19 nt, Artificial Sequence
  Description of Artificial Sequence: Synthetic oligonucleotide
  Sense strand starting at position 2114 of SEQ ID NO: 915484
cuuggugggauagguaaau

SEQ ID NO: 1083299 - RNA, 19 nt, Artificial Sequence
  Description of Artificial Sequence: Synthetic oligonucleotide
  Antisense strand to SEQ ID NO: 1083298
auuuaccuaucccaccaag

SEQ ID NO: 1083300 - RNA, 19 nt, Artificial Sequence
  Description of Artificial Sequence: Synthetic oligonucleotide
  Sense strand starting at position 2486 of SEQ ID NO: 915484
cauugcuguggucagacuu

SEQ ID NO: 1083301 - RNA, 19 nt, Artificial Sequence
  Description of Artificial Sequence: Synthetic oligonucleotide
  Antisense strand to SEQ ID NO: 1083300
aagucugaccacagcaaug

SEQ ID NO: 1083302 - RNA, 19 nt, Artificial Sequence
  Description of Artificial Sequence: Synthetic oligonucleotide
  Sense strand starting at position 2515 of SEQ ID NO: 915484
uggauugaagcauguugaa

SEQ ID NO: 1083303 - RNA, 19 nt, Artificial Sequence
  Description of Artificial Sequence: Synthetic oligonucleotide
  Antisense strand to SEQ ID NO: 1083302
uucaacaugcuucaaucca

SEQ ID NO: 1083304 - RNA, 19 nt, Artificial Sequence
  Description of Artificial Sequence: Synthetic oligonucleotide
  Sense strand starting at position 2738 of SEQ ID NO: 915484
gccucaguucuuuccuguu

SEQ ID NO: 1083305 - RNA, 19 nt, Artificial Sequence
  Description of Artificial Sequence: Synthetic oligonucleotide
  Antisense strand to SEQ ID NO: 1083304
aacaggaaagaacugaggc

SEQ ID NO: 1083306 - RNA, 19 nt, Artificial Sequence
  Description of Artificial Sequence: Synthetic oligonucleotide
  Sense strand starting at position 2778 of SEQ ID NO: 915484
ucuuguucucuuuagaugu

SEQ ID NO: 1083307 - RNA, 19 nt, Artificial Sequence
  Description of Artificial Sequence: Synthetic oligonucleotide
  Antisense strand to SEQ ID NO: 1083306
acaucuaaagagaacaaga

SEQ ID NO: 1083308 - RNA, 19 nt, Artificial Sequence
  Description of Artificial Sequence: Synthetic oligonucleotide
  Sense strand starting at position 2785 of SEQ ID NO: 915484
cucuuuagauguuuauucu

SEQ ID NO: 1083309 - RNA, 19 nt, Artificial Sequence
  Description of Artificial Sequence: Synthetic oligonucleotide
  Antisense strand to SEQ ID NO: 1083308
agaauaaacaucuaaagag

SEQ ID NO: 1083310 - RNA, 19 nt, Artificial Sequence
  Description of Artificial Sequence: Synthetic oligonucleotide
  Sense strand starting at position 2805 of SEQ ID NO: 915484
uacuguucuuaaguguuga

SEQ ID NO: 1083311 - RNA, 19 nt, Artificial Sequence
  Description of Artificial Sequence: Synthetic oligonucleotide
  Antisense strand to SEQ ID NO: 1083310
ucaacacuuaagaacagua

SEQ ID NO: 1083312 - RNA, 19 nt, Artificial Sequence
  Description of Artificial Sequence: Synthetic oligonucleotide
  Sense strand starting at position 2806 of SEQ ID NO: 915484
acuguucuuaaguguugau

SEQ ID NO: 1083313 - RNA, 19 nt, Artificial Sequence
  Description of Artificial Sequence: Synthetic oligonucleotide
  Antisense strand to SEQ ID NO: 1083312
aucaacacuuaagaacagu

SEQ ID NO: 1083314 - RNA, 19 nt, Artificial Sequence
  Description of Artificial Sequence: Synthetic oligonucleotide
  Sense strand starting at position 2810 of SEQ ID NO: 915484
uucuuaaguguugaugguu

SEQ ID NO: 1083315 - RNA, 19 nt, Artificial Sequence
  Description of Artificial Sequence: Synthetic oligonucleotide
  Antisense strand to SEQ ID NO: 1083314
aaccaucaacacuuaagaa

SEQ ID NO: 1083316 - RNA, 19 nt, Artificial Sequence
  Description of Artificial Sequence: Synthetic oligonucleotide
  Sense strand starting at position 2865 of SEQ ID NO: 915484
uugccauuuccugguucuu

SEQ ID NO: 1083317 - RNA, 19 nt, Artificial Sequence
  Description of Artificial Sequence: Synthetic oligonucleotide
  Antisense strand to SEQ ID NO: 1083316
aagaaccaggaaauggcaa

SEQ ID NO: 1083318 - RNA, 19 nt, Artificial Sequence
  Description of Artificial Sequence: Synthetic oligonucleotide
  Sense strand starting at position 2909 of SEQ ID NO: 915484
cuaaccuggccuggucaaa

SEQ ID NO: 1083319 - RNA, 19 nt, Artificial Sequence
  Description of Artificial Sequence: Synthetic oligonucleotide
  Antisense strand to SEQ ID NO: 1083318
uuugaccaggccagguuag

SEQ ID NO: 1083320 - RNA, 19 nt, Artificial Sequence
  Description of Artificial Sequence: Synthetic oligonucleotide
  Sense strand starting at position 2984 of SEQ ID NO: 915484
aggccaucagaaugaucuu

SEQ ID NO: 1083321 - RNA, 19 nt, Artificial Sequence
  Description of Artificial Sequence: Synthetic oligonucleotide
  Antisense strand to SEQ ID NO: 1083320
aagaucauucugauggccu

SEQ ID NO: 1083322 - RNA, 19 nt, Artificial Sequence
  Description of Artificial Sequence: Synthetic oligonucleotide
  Sense strand starting at position 3020 of SEQ ID NO: 915484
guguccuucuucuugaaac

SEQ ID NO: 1083323 - RNA, 19 nt, Artificial Sequence
  Description of Artificial Sequence: Synthetic oligonucleotide
  Antisense strand to SEQ ID NO: 1083322
guuucaagaagaaggacac

SEQ ID NO: 1083324 - RNA, 19 nt, Artificial Sequence
  Description of Artificial Sequence: Synthetic oligonucleotide
  Sense strand starting at position 3171 of SEQ ID NO: 915484
auuuguggauucgagaaug

SEQ ID NO: 1083325 - RNA, 19 nt, Artificial Sequence
  Description of Artificial Sequence: Synthetic oligonucleotide
  Antisense strand to SEQ ID NO: 1083324
cauucucgaauccacaaau

SEQ ID NO: 1083326 - RNA, 19 nt, Artificial Sequence
  Description of Artificial Sequence: Synthetic oligonucleotide
  Sense strand starting at position 3176 of SEQ ID NO: 915484
uggauucgagaauguucca

SEQ ID NO: 1083327 - RNA, 19 nt, Artificial Sequence
  Description of Artificial Sequence: Synthetic oligonucleotide
  Antisense strand to SEQ ID NO: 1083326
uggaacauucucgaaucca

SEQ ID NO: 1083328 - RNA, 19 nt, Artificial Sequence
  Description of Artificial Sequence: Synthetic oligonucleotide
  Sense strand starting at position 3179 of SEQ ID NO: 915484
auucgagaauguuccaugu

SEQ ID NO: 1083329 - RNA, 19 nt, Artificial Sequence
  Description of Artificial Sequence: Synthetic oligonucleotide
  Antisense strand to SEQ ID NO: 1083328
acauggaacauucucgaau

SEQ ID NO: 1083330 - RNA, 19 nt, Artificial Sequence
  Description of Artificial Sequence: Synthetic oligonucleotide
  Sense strand starting at position 3230 of SEQ ID NO: 915484
agccucaugccugaauaca

SEQ ID NO: 1083331 - RNA, 19 nt, Artificial Sequence
  Description of Artificial Sequence: Synthetic oligonucleotide
  Antisense strand to SEQ ID NO: 1083330
uguauucaggcaugaggcu

SEQ ID NO: 1083332 - RNA, 19 nt, Artificial Sequence
  Description of Artificial Sequence: Synthetic oligonucleotide
  Sense strand starting at position 3880 of SEQ ID NO: 915484
ugggaagcucuugaagguu

SEQ ID NO: 1083333 - RNA, 19 nt, Artificial Sequence
  Description of Artificial Sequence: Synthetic oligonucleotide
  Antisense strand to SEQ ID NO: 1083332
aaccuucaagagcuuccca

SEQ ID NO: 1083334 - RNA, 19 nt, Artificial Sequence
  Description of Artificial Sequence: Synthetic oligonucleotide
  Sense strand starting at position 3909 of SEQ ID NO: 915484
agugacauggucugauauc

SEQ ID NO: 1083335 - RNA, 19 nt, Artificial Sequence
  Description of Artificial Sequence: Synthetic oligonucleotide
  Antisense strand to SEQ ID NO: 1083334
gauaucagaccaugucacu

SEQ ID NO: 1083336 - RNA, 19 nt, Artificial Sequence
  Description of Artificial Sequence: Synthetic oligonucleotide
  Sense strand starting at position 3976 of SEQ ID NO: 915484
guuauuuccugacacagag

SEQ ID NO: 1083337 - RNA, 19 nt, Artificial Sequence
  Description of Artificial Sequence: Synthetic oligonucleotide
  Antisense strand to SEQ ID NO: 1083336
cucugugucaggaaauaac

SEQ ID NO: 1083338 - RNA, 19 nt, Artificial Sequence
  Description of Artificial Sequence: Synthetic oligonucleotide
  Sense strand starting at position 2364 of SEQ ID NO: 915485
gcgaaucccuccucuuauc

SEQ ID NO: 1083339 - RNA, 19 nt, Artificial Sequence
  Description of Artificial Sequence: Synthetic oligonucleotide
  Antisense strand to SEQ ID NO: 1083338
gauaagaggagggauucgc

SEQ ID NO: 1083340 - RNA, 19 nt, Artificial Sequence
  Description of Artificial Sequence: Synthetic oligonucleotide
  Sense strand starting at position 3125 of SEQ ID NO: 915485
ggaucaacguugguuagga

SEQ ID NO: 1083341 - RNA, 19 nt, Artificial Sequence
  Description of Artificial Sequence: Synthetic oligonucleotide
  Antisense strand to SEQ ID NO: 1083340
uccuaaccaacguugaucc

SEQ ID NO: 1083342 - RNA, 19 nt, Artificial Sequence
  Description of Artificial Sequence: Synthetic oligonucleotide
  Sense strand starting at position 3310 of SEQ ID NO: 915485
cgcuguguuccacuggcaa

SEQ ID NO: 1083343 - RNA, 19 nt, Artificial Sequence
  Description of Artificial Sequence: Synthetic oligonucleotide
  Antisense strand to SEQ ID NO: 1083342
uugccaguggaacacagcg

SEQ ID NO: 1083344 - RNA, 19 nt, Artificial Sequence
  Description of Artificial Sequence: Synthetic oligonucleotide
  Sense strand starting at position 174 of SEQ ID NO: 915486
acugcauuugcuggagcaa

SEQ ID NO: 1083345 - RNA, 19 nt, Artificial Sequence
  Description of Artificial Sequence: Synthetic oligonucleotide
  Antisense strand to SEQ ID NO: 1083344
uugcuccagcaaaugcagu

SEQ ID NO: 1083346 - RNA, 19 nt, Artificial Sequence
  Description of Artificial Sequence: Synthetic oligonucleotide
  Sense strand starting at position 212 of SEQ ID NO: 915486
guguaaggaaaucaguguu

SEQ ID NO: 1083347 - RNA, 19 nt, Artificial Sequence
  Description of Artificial Sequence: Synthetic oligonucleotide
  Antisense strand to SEQ ID NO: 1083346
aacacugauuuccuuacac

SEQ ID NO: 1083348 - RNA, 19 nt, Artificial Sequence
  Description of Artificial Sequence: Synthetic oligonucleotide
  Sense strand starting at position 215 of SEQ ID NO: 915486
uaaggaaaucaguguuucu

SEQ ID NO: 1083349 - RNA, 19 nt, Artificial Sequence
  Description of Artificial Sequence: Synthetic oligonucleotide
  Antisense strand to SEQ ID NO: 1083348
agaaacacugauuuccuua

SEQ ID NO: 1083350 - RNA, 19 nt, Artificial Sequence
  Description of Artificial Sequence: Synthetic oligonucleotide
  Sense strand starting at position 299 of SEQ ID NO: 915486
ugccaaugacaaugucaga

SEQ ID NO: 1083351 - RNA, 19 nt, Artificial Sequence
  Description of Artificial Sequence: Synthetic oligonucleotide
  Antisense strand to SEQ ID NO: 1083350
ucugacauugucauuggca

SEQ ID NO: 1083352 - RNA, 19 nt, Artificial Sequence
  Description of Artificial Sequence: Synthetic oligonucleotide
  Sense strand starting at position 328 of SEQ ID NO: 915486
ugugacuuccuugagguca

SEQ ID NO: 1083353 - RNA, 19 nt, Artificial Sequence
  Description of Artificial Sequence: Synthetic oligonucleotide
  Antisense strand to SEQ ID NO: 1083352
ugaccucaaggaagucaca

SEQ ID NO: 1083354 - RNA, 19 nt, Artificial Sequence
  Description of Artificial Sequence: Synthetic oligonucleotide
  Sense strand starting at position 435 of SEQ ID NO: 915486
uuccaaagcuucucuggau

SEQ ID NO: 1083355 - RNA, 19 nt, Artificial Sequence
  Description of Artificial Sequence: Synthetic oligonucleotide
  Antisense strand to SEQ ID NO: 1083354
auccagagaagcuuuggaa

SEQ ID NO: 1083356 - RNA, 19 nt, Artificial Sequence
  Description of Artificial Sequence: Synthetic oligonucleotide
  Sense strand starting at position 515 of SEQ ID NO: 915486
acacuuuauuagucuugga

SEQ ID NO: 1083357 - RNA, 19 nt, Artificial Sequence
  Description of Artificial Sequence: Synthetic oligonucleotide
  Antisense strand to SEQ ID NO: 1083356
uccaagacuaauaaagugu

SEQ ID NO: 1083358 - RNA, 19 nt, Artificial Sequence
  Description of Artificial Sequence: Synthetic oligonucleotide
  Sense strand starting at position 519 of SEQ ID NO: 915486
uuuauuagucuuggacauu

SEQ ID NO: 1083359 - RNA, 19 nt, Artificial Sequence
  Description of Artificial Sequence: Synthetic oligonucleotide
  Antisense strand to SEQ ID NO: 1083358
aauguccaagacuaauaaa

SEQ ID NO: 1083360 - RNA, 19 nt, Artificial Sequence
  Description of Artificial Sequence: Synthetic oligonucleotide
  Sense strand starting at position 525 of SEQ ID NO: 915486
agucuuggacauuggugaa

SEQ ID NO: 1083361 - RNA, 19 nt, Artificial Sequence
  Description of Artificial Sequence: Synthetic oligonucleotide
  Antisense strand to SEQ ID NO: 1083360
uucaccaauguccaagacu

SEQ ID NO: 1083362 - RNA, 19 nt, Artificial Sequence
  Description of Artificial Sequence: Synthetic oligonucleotide
  Sense strand starting at position 549 of SEQ ID NO: 915486
ggcuuugaguaaucaaauu

SEQ ID NO: 1083363 - RNA, 19 nt, Artificial Sequence
  Description of Artificial Sequence: Synthetic oligonucleotide
  Antisense strand to SEQ ID NO: 1083362
aauuugauuacucaaagcc

SEQ ID NO: 1083364 - RNA, 19 nt, Artificial Sequence
  Description of Artificial Sequence: Synthetic oligonucleotide
  Sense strand starting at position 669 of SEQ ID NO: 915486
uugagaacaaguuguagaa

SEQ ID NO: 1083365 - RNA, 19 nt, Artificial Sequence
  Description of Artificial Sequence: Synthetic oligonucleotide
  Antisense strand to SEQ ID NO: 1083364
uucuacaacuuguucucaa

SEQ ID NO: 1083366 - RNA, 19 nt, Artificial Sequence
  Description of Artificial Sequence: Synthetic oligonucleotide
  Sense strand starting at position 791 of SEQ ID NO: 915486
ggaaauuguacuuggccca

SEQ ID NO: 1083367 - RNA, 19 nt, Artificial Sequence
  Description of Artificial Sequence: Synthetic oligonucleotide
  Antisense strand to SEQ ID NO: 1083366
ugggccaaguacaauuucc

SEQ ID NO: 1083368 - RNA, 19 nt, Artificial Sequence
  Description of Artificial Sequence: Synthetic oligonucleotide
  Sense strand starting at position 792 of SEQ ID NO: 915486
gaaauuguacuuggcccau

SEQ ID NO: 1083369 - RNA, 19 nt, Artificial Sequence
  Description of Artificial Sequence: Synthetic oligonucleotide
  Antisense strand to SEQ ID NO: 1083368
augggccaaguacaauuuc

SEQ ID NO: 1083370 - RNA, 19 nt, Artificial Sequence
  Description of Artificial Sequence: Synthetic oligonucleotide
  Sense strand starting at position 1196 of SEQ ID NO: 915486
gaggcuaaccauuguagua

SEQ ID NO: 1083371 - RNA, 19 nt, Artificial Sequence
  Description of Artificial Sequence: Synthetic oligonucleotide
  Antisense strand to SEQ ID NO: 1083370
uacuacaaugguuagccuc

SEQ ID NO: 1083372 - RNA, 19 nt, Artificial Sequence
  Description of Artificial Sequence: Synthetic oligonucleotide
  Sense strand starting at position 1283 of SEQ ID NO: 915486
gcaggcuucuuauugagag

SEQ ID NO: 1083373 - RNA, 19 nt, Artificial Sequence
  Description of Artificial Sequence: Synthetic oligonucleotide
  Antisense strand to SEQ ID NO: 1083372
cucucaauaagaagccugc

SEQ ID NO: 1083374 - RNA, 19 nt, Artificial Sequence
  Description of Artificial Sequence: Synthetic oligonucleotide
  Sense strand starting at position 1314 of SEQ ID NO: 915486
ccaucucuucuuggacuga

SEQ ID NO: 1083375 - RNA, 19 nt, Artificial Sequence
  Description of Artificial Sequence: Synthetic oligonucleotide
  Antisense strand to SEQ ID NO: 1083374
ucaguccaagaagagaugg

SEQ ID NO: 1083376 - RNA, 19 nt, Artificial Sequence
  Description of Artificial Sequence: Synthetic oligonucleotide
  Sense strand starting at position 1319 of SEQ ID NO: 915486
ucuucuuggacugagaguu

SEQ ID NO: 1083377 - RNA, 19 nt, Artificial Sequence
  Description of Artificial Sequence: Synthetic oligonucleotide
  Antisense strand to SEQ ID NO: 1083376
aacucucaguccaagaaga

SEQ ID NO: 1083378 - RNA, 19 nt, Artificial Sequence
  Description of Artificial Sequence: Synthetic oligonucleotide
  Sense strand starting at position 1327 of SEQ ID NO: 915486
gacugagaguucuccaagg

SEQ ID NO: 1083379 - RNA, 19 nt, Artificial Sequence
  Description of Artificial Sequence: Synthetic oligonucleotide
  Antisense strand to SEQ ID NO: 1083378
ccuuggagaacucucaguc

SEQ ID NO: 1083380 - RNA, 19 nt, Artificial Sequence
  Description of Artificial Sequence: Synthetic oligonucleotide
  Sense strand starting at position 1332 of SEQ ID NO: 915486
agaguucuccaaggauccu

SEQ ID NO: 1083381 - RNA, 19 nt, Artificial Sequence
  Description of Artificial Sequence: Synthetic oligonucleotide
  Antisense strand to SEQ ID NO: 1083380
aggauccuuggagaacucu

SEQ ID NO: 1083382 - RNA, 19 nt, Artificial Sequence
  Description of Artificial Sequence: Synthetic oligonucleotide
  Sense strand starting at position 1338 of SEQ ID NO: 915486
cuccaaggauccuucgaga

SEQ ID NO: 1083383 - RNA, 19 nt, Artificial Sequence
  Description of Artificial Sequence: Synthetic oligonucleotide
  Antisense strand to SEQ ID NO: 1083382
ucucgaaggauccuuggag

SEQ ID NO: 1083384 - RNA, 19 nt, Artificial Sequence
  Description of Artificial Sequence: Synthetic oligonucleotide
  Sense strand starting at position 1524 of SEQ ID NO: 915486
agcucuaagcaccagagau

SEQ ID NO: 1083385 - RNA, 19 nt, Artificial Sequence
  Description of Artificial Sequence: Synthetic oligonucleotide
  Antisense strand to SEQ ID NO: 1083384
aucucuggugcuuagagcu

SEQ ID NO: 1083386 - RNA, 19 nt, Artificial Sequence
  Description of Artificial Sequence: Synthetic oligonucleotide
  Sense strand starting at position 1681 of SEQ ID NO: 915486
uaacguucgccugcauuga

SEQ ID NO: 1083387 - RNA, 19 nt, Artificial Sequence
  Description of Artificial Sequence: Synthetic oligonucleotide
  Antisense strand to SEQ ID NO: 1083386
ucaaugcaggcgaacguua

SEQ ID NO: 1083388 - RNA, 19 nt, Artificial Sequence
  Description of Artificial Sequence: Synthetic oligonucleotide
  Sense strand starting at position 1779 of SEQ ID NO: 915486
aggauaagguuuggaauuu

SEQ ID NO: 1083389 - RNA, 19 nt, Artificial Sequence
  Description of Artificial Sequence: Synthetic oligonucleotide
  Antisense strand to SEQ ID NO: 1083388
aaauuccaaaccuuauccu

SEQ ID NO: 1083390 - RNA, 19 nt, Artificial Sequence
  Description of Artificial Sequence: Synthetic oligonucleotide
  Sense strand starting at position 1834 of SEQ ID NO: 915486
ugaccucgugcucagagaa

SEQ ID NO: 1083391 - RNA, 19 nt, Artificial Sequence
  Description of Artificial Sequence: Synthetic oligonucleotide
  Antisense strand to SEQ ID NO: 1083390
uucucugagcacgagguca

SEQ ID NO: 1083392 - RNA, 19 nt, Artificial Sequence
  Description of Artificial Sequence: Synthetic oligonucleotide
  Sense strand starting at position 1876 of SEQ ID NO: 915486
uggacucaugacugaugua

SEQ ID NO: 1083393 - RNA, 19 nt, Artificial Sequence
  Description of Artificial Sequence: Synthetic oligonucleotide
  Antisense strand to SEQ ID NO: 1083392
uacaucagucaugagucca

SEQ ID NO: 1083394 - RNA, 19 nt, Artificial Sequence
  Description of Artificial Sequence: Synthetic oligonucleotide
  Sense strand starting at position 2257 of SEQ ID NO: 915486
cuggcaauguucccuggaa

SEQ ID NO: 1083395 - RNA, 19 nt, Artificial Sequence
  Description of Artificial Sequence: Synthetic oligonucleotide
  Antisense strand to SEQ ID NO: 1083394
uuccagggaacauugccag

SEQ ID NO: 1083396 - RNA, 19 nt, Artificial Sequence
  Description of Artificial Sequence: Synthetic oligonucleotide
  Sense strand starting at position 2258 of SEQ ID NO: 915486
uggcaauguucccuggaac

SEQ ID NO: 1083397 - RNA, 19 nt, Artificial Sequence
  Description of Artificial Sequence: Synthetic oligonucleotide
  Antisense strand to SEQ ID NO: 1083396
guuccagggaacauugcca

SEQ ID NO: 1083398 - RNA, 19 nt, Artificial Sequence
  Description of Artificial Sequence: Synthetic oligonucleotide
  Sense strand starting at position 2298 of SEQ ID NO: 915486
ugaggauuaucucucuguu

SEQ ID NO: 1083399 - RNA, 19 nt, Artificial Sequence
  Description of Artificial Sequence: Synthetic oligonucleotide
  Antisense strand to SEQ ID NO: 1083398
aacagagagauaauccuca

SEQ ID NO: 1083400 - RNA, 19 nt, Artificial Sequence
  Description of Artificial Sequence: Synthetic oligonucleotide
  Sense strand starting at position 2300 of SEQ ID NO: 915486
aggauuaucucucuguucu

SEQ ID NO: 1083401 - RNA, 19 nt, Artificial Sequence
  Description of Artificial Sequence: Synthetic oligonucleotide
  Antisense strand to SEQ ID NO: 1083400
agaacagagagauaauccu

SEQ ID NO: 1083402 - RNA, 19 nt, Artificial Sequence
  Description of Artificial Sequence: Synthetic oligonucleotide
  Sense strand starting at position 2333 of SEQ ID NO: 915486
gggcaaaugugaguucuca

SEQ ID NO: 1083403 - RNA, 19 nt, Artificial Sequence
  Description of Artificial Sequence: Synthetic oligonucleotide
  Antisense strand to SEQ ID NO: 1083402
ugagaacucacauuugccc

SEQ ID NO: 1083404 - RNA, 19 nt, Artificial Sequence
  Description of Artificial Sequence: Synthetic oligonucleotide
  Sense strand starting at position 2671 of SEQ ID NO: 915486
uggaguugucaacauagca

SEQ ID NO: 1083405 - RNA, 19 nt, Artificial Sequence
  Description of Artificial Sequence: Synthetic oligonucleotide
  Antisense strand to SEQ ID NO: 1083404
ugcuauguugacaacucca

SEQ ID NO: 1083406 - RNA, 19 nt, Artificial Sequence
  Description of Artificial Sequence: Synthetic oligonucleotide
  Sense strand starting at position 2963 of SEQ ID NO: 915486
ugggucaucucauuguuga

SEQ ID NO: 1083407 - RNA, 19 nt, Artificial Sequence
  Description of Artificial Sequence: Synthetic oligonucleotide
  Antisense strand to SEQ ID NO: 1083406
ucaacaaugagaugaccca

SEQ ID NO: 1083408 - RNA, 19 nt, Artificial Sequence
  Description of Artificial Sequence: Synthetic oligonucleotide
  Sense strand starting at position 3042 of SEQ ID NO: 915486
ugccaucauuuggugagua

SEQ ID NO: 1083409 - RNA, 19 nt, Artificial Sequence
  Description of Artificial Sequence: Synthetic oligonucleotide
  Antisense strand to SEQ ID NO: 1083408
uacucaccaaaugauggca

SEQ ID NO: 1083410 - RNA, 19 nt, Artificial Sequence
  Description of Artificial Sequence: Synthetic oligonucleotide
  Sense strand starting at position 3076 of SEQ ID NO: 915486
uuuggcucuuaagugaaca

SEQ ID NO: 1083411 - RNA, 19 nt, Artificial Sequence
  Description of Artificial Sequence: Synthetic oligonucleotide
  Antisense strand to SEQ ID NO: 1083410
uguucacuuaagagccaaa

SEQ ID NO: 1083412 - RNA, 19 nt, Artificial Sequence
  Description of Artificial Sequence: Synthetic oligonucleotide
  Sense strand starting at position 3092 of SEQ ID NO: 915486
acacacauuugagaacagu

SEQ ID NO: 1083413 - RNA, 19 nt, Artificial Sequence
  Description of Artificial Sequence: Synthetic oligonucleotide
  Antisense strand to SEQ ID NO: 1083412
acuguucucaaaugugugu

SEQ ID NO: 1083414 - RNA, 19 nt, Artificial Sequence
  Description of Artificial Sequence: Synthetic oligonucleotide
  Sense strand starting at position 3505 of SEQ ID NO: 915486
augucuaugggcuauugaa

SEQ ID NO: 1083415 - RNA, 19 nt, Artificial Sequence
  Description of Artificial Sequence: Synthetic oligonucleotide
  Antisense strand to SEQ ID NO: 1083414
uucaauagcccauagacau

SEQ ID NO: 1083416 - RNA, 19 nt, Artificial Sequence
  Description of Artificial Sequence: Synthetic oligonucleotide
  Sense strand starting at position 3589 of SEQ ID NO: 915486
cuacaucauuggguugaua

SEQ ID NO: 1083417 - RNA, 19 nt, Artificial Sequence
  Description of Artificial Sequence: Synthetic oligonucleotide
  Antisense strand to SEQ ID NO: 1083416
uaucaacccaaugauguag

SEQ ID NO: 1083418 - RNA, 19 nt, Artificial Sequence
  Description of Artificial Sequence: Synthetic oligonucleotide
  Sense strand starting at position 3591 of SEQ ID NO: 915486
acaucauuggguugauaga

SEQ ID NO: 1083419 - RNA, 19 nt, Artificial Sequence
  Description of Artificial Sequence: Synthetic oligonucleotide
  Antisense strand to SEQ ID NO: 1083418
ucuaucaacccaaugaugu

SEQ ID NO: 1083420 - RNA, 19 nt, Artificial Sequence
  Description of Artificial Sequence: Synthetic oligonucleotide
  Sense strand starting at position 3966 of SEQ ID NO: 915486
aggucugacauguaguaaa

SEQ ID NO: 1083421 - RNA, 19 nt, Artificial Sequence
  Description of Artificial Sequence: Synthetic oligonucleotide
  Antisense strand to SEQ ID NO: 1083420
uuuacuacaugucagaccu

SEQ ID NO: 1083422 - RNA, 19 nt, Artificial Sequence
  Description of Artificial Sequence: Synthetic oligonucleotide
  Sense strand starting at position 3980 of SEQ ID NO: 915486
guaaacgcucaauaaaugu

SEQ ID NO: 1083423 - RNA, 19 nt, Artificial Sequence
  Description of Artificial Sequence: Synthetic oligonucleotide
  Antisense strand to SEQ ID NO: 1083422
acauuuauugagcguuuac

SEQ ID NO: 1083424 - RNA, 19 nt, Artificial Sequence
  Description of Artificial Sequence: Synthetic oligonucleotide
  Sense strand starting at position 406 of SEQ ID NO: 915487
agugacuguguccauuaca

SEQ ID NO: 1083425 - RNA, 19 nt, Artificial Sequence
  Description of Artificial Sequence: Synthetic oligonucleotide
  Antisense strand to SEQ ID NO: 1083424
uguaauggacacagucacu

SEQ ID NO: 1083426 - RNA, 19 nt, Artificial Sequence
  Description of Artificial Sequence: Synthetic oligonucleotide
  Sense strand starting at position 409 of SEQ ID NO: 915487
gacuguguccauuacauga

SEQ ID NO: 1083427 - RNA, 19 nt, Artificial Sequence
  Description of Artificial Sequence: Synthetic oligonucleotide
  Antisense strand to SEQ ID NO: 1083426
ucauguaauggacacaguc

SEQ ID NO: 1083428 - RNA, 19 nt, Artificial Sequence
  Description of Artificial Sequence: Synthetic oligonucleotide
  Sense strand starting at position 765 of SEQ ID NO: 915487
gaaagaaguuaccaggacu

SEQ ID NO: 1083429 - RNA, 19 nt, Artificial Sequence
  Description of Artificial Sequence: Synthetic oligonucleotide
  Antisense strand to SEQ ID NO: 1083428
aguccugguaacuucuuuc

SEQ ID NO: 1083430 - RNA, 19 nt, Artificial Sequence
  Description of Artificial Sequence: Synthetic oligonucleotide
  Sense strand starting at position 985 of SEQ ID NO: 915487
uauaguugauguuaggaaa

SEQ ID NO: 1083431 - RNA, 19 nt, Artificial Sequence
  Description of Artificial Sequence: Synthetic oligonucleotide
  Antisense strand to SEQ ID NO: 1083430
uuuccuaacaucaacuaua

SEQ ID NO: 1083432 - RNA, 19 nt, Artificial Sequence
  Description of Artificial Sequence: Synthetic oligonucleotide
  Sense strand starting at position 1068 of SEQ ID NO: 915487
auacauuuguugugcugau

SEQ ID NO: 1083433 - RNA, 19 nt, Artificial Sequence
  Description of Artificial Sequence: Synthetic oligonucleotide
  Antisense strand to SEQ ID NO: 1083432
aucagcacaacaaauguau

SEQ ID NO: 1083434 - RNA, 19 nt, Artificial Sequence
  Description of Artificial Sequence: Synthetic oligonucleotide
  Sense strand starting at position 1552 of SEQ ID NO: 915487
ugagcauugugcccaaggu

SEQ ID NO: 1083435 - RNA, 19 nt, Artificial Sequence
  Description of Artificial Sequence: Synthetic oligonucleotide
  Antisense strand to SEQ ID NO: 1083434
accuugggcacaaugcuca

SEQ ID NO: 1083436 - RNA, 19 nt, Artificial Sequence
  Description of Artificial Sequence: Synthetic oligonucleotide
  Sense strand starting at position 1556 of SEQ ID NO: 915487
cauugugcccaaggucaaa

SEQ ID NO: 1083437 - RNA, 19 nt, Artificial Sequence
  Description of Artificial Sequence: Synthetic oligonucleotide
  Antisense strand to SEQ ID NO: 1083436
uuugaccuugggcacaaug

SEQ ID NO: 1083438 - RNA, 19 nt, Artificial Sequence
  Description of Artificial Sequence: Synthetic oligonucleotide
  Sense strand starting at position 1660 of SEQ ID NO: 915487
gcagaagaauuccuaauau

SEQ ID NO: 1083439 - RNA, 19 nt, Artificial Sequence
  Description of Artificial Sequence: Synthetic oligonucleotide
  Antisense strand to SEQ ID NO: 1083438
auauuaggaauucuucugc

SEQ ID NO: 1083440 - RNA, 19 nt, Artificial Sequence
  Description of Artificial Sequence: Synthetic oligonucleotide
  Sense strand starting at position 1672 of SEQ ID NO: 915487
cuaauauuugccugcacug

SEQ ID NO: 1083441 - RNA, 19 nt, Artificial Sequence
  Description of Artificial Sequence: Synthetic oligonucleotide
  Antisense strand to SEQ ID NO: 1083440
cagugcaggcaaauauuag

SEQ ID NO: 1083442 - RNA, 19 nt, Artificial Sequence
  Description of Artificial Sequence: Synthetic oligonucleotide
  Sense strand starting at position 1727 of SEQ ID NO: 915487
agaaauagcucugaacuug

SEQ ID NO: 1083443 - RNA, 19 nt, Artificial Sequence
  Description of Artificial Sequence: Synthetic oligonucleotide
  Antisense strand to SEQ ID NO: 1083442
caaguucagagcuauuucu

SEQ ID NO: 1083444 - RNA, 19 nt, Artificial Sequence
  Description of Artificial Sequence: Synthetic oligonucleotide
  Sense strand starting at position 1825 of SEQ ID NO: 915487
ugaccucgugcuuggaaga

SEQ ID NO: 1083445 - RNA, 19 nt, Artificial Sequence
  Description of Artificial Sequence: Synthetic oligonucleotide
  Antisense strand to SEQ ID NO: 1083444
ucuuccaagcacgagguca

SEQ ID NO: 1083446 - RNA, 19 nt, Artificial Sequence
  Description of Artificial Sequence: Synthetic oligonucleotide
  Sense strand starting at position 1863 of SEQ ID NO: 915487
gagcuagacucaugacuga

SEQ ID NO: 1083447 - RNA, 19 nt, Artificial Sequence
  Description of Artificial Sequence: Synthetic oligonucleotide
  Antisense strand to SEQ ID NO: 1083446
ucagucaugagucuagcuc

SEQ ID NO: 1083448 - RNA, 19 nt, Artificial Sequence
  Description of Artificial Sequence: Synthetic oligonucleotide
  Sense strand starting at position 1867 of SEQ ID NO: 915487
uagacucaugacugaugua

SEQ ID NO: 1083449 - RNA, 19 nt, Artificial Sequence
  Description of Artificial Sequence: Synthetic oligonucleotide
  Antisense strand to SEQ ID NO: 1083448
uacaucagucaugagucua

SEQ ID NO: 1083450 - RNA, 19 nt, Artificial Sequence
  Description of Artificial Sequence: Synthetic oligonucleotide
  Sense strand starting at position 1984 of SEQ ID NO: 915487
augagugauuuggacucca

SEQ ID NO: 1083451 - RNA, 19 nt, Artificial Sequence
  Description of Artificial Sequence: Synthetic oligonucleotide
  Antisense strand to SEQ ID NO: 1083450
uggaguccaaaucacucau

SEQ ID NO: 1083452 - RNA, 19 nt, Artificial Sequence
  Description of Artificial Sequence: Synthetic oligonucleotide
  Sense strand starting at position 2197 of SEQ ID NO: 915487
cucuguguuccaggugaau

SEQ ID NO: 1083453 - RNA, 19 nt, Artificial Sequence
  Description of Artificial Sequence: Synthetic oligonucleotide
  Antisense strand to SEQ ID NO: 1083452
auucaccuggaacacagag

SEQ ID NO: 1083454 - RNA, 19 nt, Artificial Sequence
  Description of Artificial Sequence: Synthetic oligonucleotide
  Sense strand starting at position 2199 of SEQ ID NO: 915487
cuguguuccaggugaaugu

SEQ ID NO: 1083455 - RNA, 19 nt, Artificial Sequence
  Description of Artificial Sequence: Synthetic oligonucleotide
  Antisense strand to SEQ ID NO: 1083454
acauucaccuggaacacag

SEQ ID NO: 1083456 - RNA, 19 nt, Artificial Sequence
  Description of Artificial Sequence: Synthetic oligonucleotide
  Sense strand starting at position 2200 of SEQ ID NO: 915487
uguguuccaggugaauguu

SEQ ID NO: 1083457 - RNA, 19 nt, Artificial Sequence
  Description of Artificial Sequence: Synthetic oligonucleotide
  Antisense strand to SEQ ID NO: 1083456
aacauucaccuggaacaca

SEQ ID NO: 1083458 - RNA, 19 nt, Artificial Sequence
  Description of Artificial Sequence: Synthetic oligonucleotide
  Sense strand starting at position 2218 of SEQ ID NO: 915487
ucaggcaccucuggaaaua

SEQ ID NO: 1083459 - RNA, 19 nt, Artificial Sequence
  Description of Artificial Sequence: Synthetic oligonucleotide
  Antisense strand to SEQ ID NO: 1083458
uauuuccagaggugccuga

SEQ ID NO: 1083460 - RNA, 19 nt, Artificial Sequence
  Description of Artificial Sequence: Synthetic oligonucleotide
  Sense strand starting at position 2229 of SEQ ID NO: 915487
uggaaauauuccugggauu

SEQ ID NO: 1083461 - RNA, 19 nt, Artificial Sequence
  Description of Artificial Sequence: Synthetic oligonucleotide
  Antisense strand to SEQ ID NO: 1083460
aaucccaggaauauuucca

SEQ ID NO: 1083462 - RNA, 19 nt, Artificial Sequence
  Description of Artificial Sequence: Synthetic oligonucleotide
  Sense strand starting at position 2243 of SEQ ID NO: 915487
ggauucuguuuccuucuga

SEQ ID NO: 1083463 - RNA, 19 nt, Artificial Sequence
  Description of Artificial Sequence: Synthetic oligonucleotide
  Antisense strand to SEQ ID NO: 1083462
ucagaaggaaacagaaucc

SEQ ID NO: 1083464 - RNA, 19 nt, Artificial Sequence
  Description of Artificial Sequence: Synthetic oligonucleotide
  Sense strand starting at position 2304 of SEQ ID NO: 915487
cagguaaauucugacuuug

SEQ ID NO: 1083465 - RNA, 19 nt, Artificial Sequence
  Description of Artificial Sequence: Synthetic oligonucleotide
  Antisense strand to SEQ ID NO: 1083464
caaagucagaauuuaccug

SEQ ID NO: 1083466 - RNA, 19 nt, Artificial Sequence
  Description of Artificial Sequence: Synthetic oligonucleotide
  Sense strand starting at position 2306 of SEQ ID NO: 915487
gguaaauucugacuuugga

SEQ ID NO: 1083467 - RNA, 19 nt, Artificial Sequence
  Description of Artificial Sequence: Synthetic oligonucleotide
  Antisense strand to SEQ ID NO: 1083466
uccaaagucagaauuuacc

SEQ ID NO: 1083468 - RNA, 19 nt, Artificial Sequence
  Description of Artificial Sequence: Synthetic oligonucleotide
  Sense strand starting at position 2377 of SEQ ID NO: 915487
aggaaacccugcuuugauc

SEQ ID NO: 1083469 - RNA, 19 nt, Artificial Sequence
  Description of Artificial Sequence: Synthetic oligonucleotide
  Antisense strand to SEQ ID NO: 1083468
gaucaaagcaggguuuccu

SEQ ID NO: 1083470 - RNA, 19 nt, Artificial Sequence
  Description of Artificial Sequence: Synthetic oligonucleotide
  Sense strand starting at position 2526 of SEQ ID NO: 915487
gcaucuuaccuuuggagga

SEQ ID NO: 1083471 - RNA, 19 nt, Artificial Sequence
  Description of Artificial Sequence: Synthetic oligonucleotide
  Antisense strand to SEQ ID NO: 1083470
uccuccaaagguaagaugc

SEQ ID NO: 1083472 - RNA, 19 nt, Artificial Sequence
  Description of Artificial Sequence: Synthetic oligonucleotide
  Sense strand starting at position 2527 of SEQ ID NO: 915487
caucuuaccuuuggaggau

SEQ ID NO: 1083473 - RNA, 19 nt, Artificial Sequence
  Description of Artificial Sequence: Synthetic oligonucleotide
  Antisense strand to SEQ ID NO: 1083472
auccuccaaagguaagaug

SEQ ID NO: 1083474 - RNA, 19 nt, Artificial Sequence
  Description of Artificial Sequence: Synthetic oligonucleotide
  Sense strand starting at position 2528 of SEQ ID NO: 915487
aucuuaccuuuggaggauu

SEQ ID NO: 1083475 - RNA, 19 nt, Artificial Sequence
  Description of Artificial Sequence: Synthetic oligonucleotide
  Antisense strand to SEQ ID NO: 1083474
aauccuccaaagguaagau

SEQ ID NO: 1083476 - RNA, 19 nt, Artificial Sequence
  Description of Artificial Sequence: Synthetic oligonucleotide
  Sense strand starting at position 2599 of SEQ ID NO: 915487
accugagucuuguuuauga

SEQ ID NO: 1083477 - RNA, 19 nt, Artificial Sequence
  Description of Artificial Sequence: Synthetic oligonucleotide
  Antisense strand to SEQ ID NO: 1083476
ucauaaacaagacucaggu

SEQ ID NO: 1083478 - RNA, 19 nt, Artificial Sequence
  Description of Artificial Sequence: Synthetic oligonucleotide
  Sense strand starting at position 2601 of SEQ ID NO: 915487
cugagucuuguuuaugagu

SEQ ID NO: 1083479 - RNA, 19 nt, Artificial Sequence
  Description of Artificial Sequence: Synthetic oligonucleotide
  Antisense strand to SEQ ID NO: 1083478
acucauaaacaagacucag

SEQ ID NO: 1083480 - RNA, 19 nt, Artificial Sequence
  Description of Artificial Sequence: Synthetic oligonucleotide
  Sense strand starting at position 2609 of SEQ ID NO: 915487
uguuuaugagugcagcuau

SEQ ID NO: 1083481 - RNA, 19 nt, Artificial Sequence
  Description of Artificial Sequence: Synthetic oligonucleotide
  Antisense strand to SEQ ID NO: 1083480
auagcugcacucauaaaca

SEQ ID NO: 1083482 - RNA, 19 nt, Artificial Sequence
  Description of Artificial Sequence: Synthetic oligonucleotide
  Sense strand starting at position 2662 of SEQ ID NO: 915487
ggagcaagcuuucugugau

SEQ ID NO: 1083483 - RNA, 19 nt, Artificial Sequence
  Description of Artificial Sequence: Synthetic oligonucleotide
  Antisense strand to SEQ ID NO: 1083482
aucacagaaagcuugcucc

SEQ ID NO: 1083484 - RNA, 19 nt, Artificial Sequence
  Description of Artificial Sequence: Synthetic oligonucleotide
  Sense strand starting at position 2665 of SEQ ID NO: 915487
gcaagcuuucugugaugug

SEQ ID NO: 1083485 - RNA, 19 nt, Artificial Sequence
  Description of Artificial Sequence: Synthetic oligonucleotide
  Antisense strand to SEQ ID NO: 1083484
cacaucacagaaagcuugc

SEQ ID NO: 1083486 - RNA, 19 nt, Artificial Sequence
  Description of Artificial Sequence: Synthetic oligonucleotide
  Sense strand starting at position 2775 of SEQ ID NO: 915487
cggacagguacugagaguu

SEQ ID NO: 1083487 - RNA, 19 nt, Artificial Sequence
  Description of Artificial Sequence: Synthetic oligonucleotide
  Antisense strand to SEQ ID NO: 1083486
aacucucaguaccuguccg

SEQ ID NO: 1083488 - RNA, 19 nt, Artificial Sequence
  Description of Artificial Sequence: Synthetic oligonucleotide
  Sense strand starting at position 2783 of SEQ ID NO: 915487
uacugagaguucuuugcuc

SEQ ID NO: 1083489 - RNA, 19 nt, Artificial Sequence
  Description of Artificial Sequence: Synthetic oligonucleotide
  Antisense strand to SEQ ID NO: 1083488
gagcaaagaacucucagua

SEQ ID NO: 1083490 - RNA, 19 nt, Artificial Sequence
  Description of Artificial Sequence: Synthetic oligonucleotide
  Sense strand starting at position 2839 of SEQ ID NO: 915487
acagaugaucagggugagu

SEQ ID NO: 1083491 - RNA, 19 nt, Artificial Sequence
  Description of Artificial Sequence: Synthetic oligonucleotide
  Antisense strand to SEQ ID NO: 1083490
acucacccugaucaucugu

SEQ ID NO: 1083492 - RNA, 19 nt, Artificial Sequence
  Description of Artificial Sequence: Synthetic oligonucleotide
  Sense strand starting at position 2989 of SEQ ID NO: 915487
ugcugugaugccuuugugu

SEQ ID NO: 1083493 - RNA, 19 nt, Artificial Sequence
  Description of Artificial Sequence: Synthetic oligonucleotide
  Antisense strand to SEQ ID NO: 1083492
acacaaaggcaucacagca

SEQ ID NO: 1083494 - RNA, 19 nt, Artificial Sequence
  Description of Artificial Sequence: Synthetic oligonucleotide
  Sense strand starting at position 3004 of SEQ ID NO: 915487
guguggugugagcaggaaa

SEQ ID NO: 1083495 - RNA, 19 nt, Artificial Sequence
  Description of Artificial Sequence: Synthetic oligonucleotide
  Antisense strand to SEQ ID NO: 1083494
uuuccugcucacaccacac

SEQ ID NO: 1083496 - RNA, 19 nt, Artificial Sequence
  Description of Artificial Sequence: Synthetic oligonucleotide
  Sense strand starting at position 3007 of SEQ ID NO: 915487
uggugugagcaggaaauca

SEQ ID NO: 1083497 - RNA, 19 nt, Artificial Sequence
  Description of Artificial Sequence: Synthetic oligonucleotide
  Antisense strand to SEQ ID NO: 1083496
ugauuuccugcucacacca

SEQ ID NO: 1083498 - RNA, 19 nt, Artificial Sequence
  Description of Artificial Sequence: Synthetic oligonucleotide
  Sense strand starting at position 3755 of SEQ ID NO: 915487
caugguggauaaguuuaau

SEQ ID NO: 1083499 - RNA, 19 nt, Artificial Sequence
  Description of Artificial Sequence: Synthetic oligonucleotide
  Antisense strand to SEQ ID NO: 1083498
auuaaacuuauccaccaug

SEQ ID NO: 1083500 - RNA, 19 nt, Artificial Sequence
  Description of Artificial Sequence: Synthetic oligonucleotide
  Sense strand starting at position 3767 of SEQ ID NO: 915487
guuuaaugcccacaagaga

SEQ ID NO: 1083501 - RNA, 19 nt, Artificial Sequence
  Description of Artificial Sequence: Synthetic oligonucleotide
  Antisense strand to SEQ ID NO: 1083500
ucucuugugggcauuaaac

SEQ ID NO: 1083502 - RNA, 19 nt, Artificial Sequence
  Description of Artificial Sequence: Synthetic oligonucleotide
  Sense strand starting at position 3878 of SEQ ID NO: 915487
uugaauaacuaagaucaga

SEQ ID NO: 1083503 - RNA, 19 nt, Artificial Sequence
  Description of Artificial Sequence: Synthetic oligonucleotide
  Antisense strand to SEQ ID NO: 1083502
ucugaucuuaguuauucaa

SEQ ID NO: 1083504 - RNA, 19 nt, Artificial Sequence
  Description of Artificial Sequence: Synthetic oligonucleotide
  Sense strand starting at position 419 of SEQ ID NO: 915488
caaugagagucguuucuua

SEQ ID NO: 1083505 - RNA, 19 nt, Artificial Sequence
  Description of Artificial Sequence: Synthetic oligonucleotide
  Antisense strand to SEQ ID NO: 1083504
uaagaaacgacucucauug

SEQ ID NO: 1083506 - RNA, 19 nt, Artificial Sequence
  Description of Artificial Sequence: Synthetic oligonucleotide
  Sense strand starting at position 439 of SEQ ID NO: 915488
aagauaucugaucggugca

SEQ ID NO: 1083507 - RNA, 19 nt, Artificial Sequence
  Description of Artificial Sequence: Synthetic oligonucleotide
  Antisense strand to SEQ ID NO: 1083506
ugcaccgaucagauaucuu

SEQ ID NO: 1083508 - RNA, 19 nt, Artificial Sequence
  Description of Artificial Sequence: Synthetic oligonucleotide
  Sense strand starting at position 496 of SEQ ID NO: 915488
guggauuaaguuuggcaac

SEQ ID NO: 1083509 - RNA, 19 nt, Artificial Sequence
  Description of Artificial Sequence: Synthetic oligonucleotide
  Antisense strand to SEQ ID NO: 1083508
guugccaaacuuaauccac

SEQ ID NO: 1083510 - RNA, 19 nt, Artificial Sequence
  Description of Artificial Sequence: Synthetic oligonucleotide
  Sense strand starting at position 498 of SEQ ID NO: 915488
ggauuaaguuuggcaacuu

SEQ ID NO: 1083511 - RNA, 19 nt, Artificial Sequence
  Description of Artificial Sequence: Synthetic oligonucleotide
  Antisense strand to SEQ ID NO: 1083510
aaguugccaaacuuaaucc

SEQ ID NO: 1083512 - RNA, 19 nt, Artificial Sequence
  Description of Artificial Sequence: Synthetic oligonucleotide
  Sense strand starting at position 544 of SEQ ID NO: 915488
auaagaagacugugaucuc

SEQ ID NO: 1083513 - RNA, 19 nt, Artificial Sequence
  Description of Artificial Sequence: Synthetic oligonucleotide
  Antisense strand to SEQ ID NO: 1083512
gagaucacagucuucuuau

SEQ ID NO: 1083514 - RNA, 19 nt, Artificial Sequence
  Description of Artificial Sequence: Synthetic oligonucleotide
  Sense strand starting at position 706 of SEQ ID NO: 915488
uauugugcugaugacaaua

SEQ ID NO: 1083515 - RNA, 19 nt, Artificial Sequence
  Description of Artificial Sequence: Synthetic oligonucleotide
  Antisense strand to SEQ ID NO: 1083514
uauugucaucagcacaaua

SEQ ID NO: 1083516 - RNA, 19 nt, Artificial Sequence
  Description of Artificial Sequence: Synthetic oligonucleotide
  Sense strand starting at position 725 of SEQ ID NO: 915488
ccagaaacuccagguguga

SEQ ID NO: 1083517 - RNA, 19 nt, Artificial Sequence
  Description of Artificial Sequence: Synthetic oligonucleotide
  Antisense strand to SEQ ID NO: 1083516
ucacaccuggaguuucugg

SEQ ID NO: 1083518 - RNA, 19 nt, Artificial Sequence
  Description of Artificial Sequence: Synthetic oligonucleotide
  Sense strand starting at position 727 of SEQ ID NO: 915488
agaaacuccaggugugacu

SEQ ID NO: 1083519 - RNA, 19 nt, Artificial Sequence
  Description of Artificial Sequence: Synthetic oligonucleotide
  Antisense strand to SEQ ID NO: 1083518
agucacaccuggaguuucu

SEQ ID NO: 1083520 - RNA, 19 nt, Artificial Sequence
  Description of Artificial Sequence: Synthetic oligonucleotide
  Sense strand starting at position 1183 of SEQ ID NO: 915488
agcuuuaaccaccagugau

SEQ ID NO: 1083521 - RNA, 19 nt, Artificial Sequence
  Description of Artificial Sequence: Synthetic oligonucleotide
  Antisense strand to SEQ ID NO: 1083520
aucacuggugguuaaagcu

SEQ ID NO: 1083522 - RNA, 19 nt, Artificial Sequence
  Description of Artificial Sequence: Synthetic oligonucleotide
  Sense strand starting at position 1223 of SEQ ID NO: 915488
gagcauugugcccaagauc

SEQ ID NO: 1083523 - RNA, 19 nt, Artificial Sequence
  Description of Artificial Sequence: Synthetic oligonucleotide
  Antisense strand to SEQ ID NO: 1083522
gaucuugggcacaaugcuc

SEQ ID NO: 1083524 - RNA, 19 nt, Artificial Sequence
  Description of Artificial Sequence: Synthetic oligonucleotide
  Sense strand starting at position 1826 of SEQ ID NO: 915488
ugaucuugugcucagaaga

SEQ ID NO: 1083525 - RNA, 19 nt, Artificial Sequence
  Description of Artificial Sequence: Synthetic oligonucleotide
  Antisense strand to SEQ ID NO: 1083524
ucuucugagcacaagauca

SEQ ID NO: 1083526 - RNA, 19 nt, Artificial Sequence
  Description of Artificial Sequence: Synthetic oligonucleotide
  Sense strand starting at position 1868 of SEQ ID NO: 915488
uggacucaugacugaugua

SEQ ID NO: 1083527 - RNA, 19 nt, Artificial Sequence
  Description of Artificial Sequence: Synthetic oligonucleotide
  Antisense strand to SEQ ID NO: 1083526
uacaucagucaugagucca

SEQ ID NO: 1083528 - RNA, 19 nt, Artificial Sequence
  Description of Artificial Sequence: Synthetic oligonucleotide
  Sense strand starting at position 1951 of SEQ ID NO: 915488
gcuuauucggcugugagcu

SEQ ID NO: 1083529 - RNA, 19 nt, Artificial Sequence
  Description of Artificial Sequence: Synthetic oligonucleotide
  Antisense strand to SEQ ID NO: 1083528
agcucacagccgaauaagc

SEQ ID NO: 1083530 - RNA, 19 nt, Artificial Sequence
  Description of Artificial Sequence: Synthetic oligonucleotide
  Sense strand starting at position 1981 of SEQ ID NO: 915488
augagugauuuggauucga

SEQ ID NO: 1083531 - RNA, 19 nt, Artificial Sequence
  Description of Artificial Sequence: Synthetic oligonucleotide
  Antisense strand to SEQ ID NO: 1083530
ucgaauccaaaucacucau

SEQ ID NO: 1083532 - RNA, 19 nt, Artificial Sequence
  Description of Artificial Sequence: Synthetic oligonucleotide
  Sense strand starting at position 2142 of SEQ ID NO: 915488
augucaccuccuuaggaau

SEQ ID NO: 1083533 - RNA, 19 nt, Artificial Sequence
  Description of Artificial Sequence: Synthetic oligonucleotide
  Antisense strand to SEQ ID NO: 1083532
auuccuaaggaggugacau

SEQ ID NO: 1083534 - RNA, 19 nt, Artificial Sequence
  Description of Artificial Sequence: Synthetic oligonucleotide
  Sense strand starting at position 2244 of SEQ ID NO: 915488
cuggaaauguuccugggau

SEQ ID NO: 1083535 - RNA, 19 nt, Artificial Sequence
  Description of Artificial Sequence: Synthetic oligonucleotide
  Antisense strand to SEQ ID NO: 1083534
aucccaggaacauuuccag

SEQ ID NO: 1083536 - RNA, 19 nt, Artificial Sequence
  Description of Artificial Sequence: Synthetic oligonucleotide
  Sense strand starting at position 2367 of SEQ ID NO: 915488
cuguguucucuuuauggga

SEQ ID NO: 1083537 - RNA, 19 nt, Artificial Sequence
  Description of Artificial Sequence: Synthetic oligonucleotide
  Antisense strand to SEQ ID NO: 1083536
ucccauaaagagaacacag

SEQ ID NO: 1083538 - RNA, 19 nt, Artificial Sequence
  Description of Artificial Sequence: Synthetic oligonucleotide
  Sense strand starting at position 2399 of SEQ ID NO: 915488
aggagacccugcuuugauc

SEQ ID NO: 1083539 - RNA, 19 nt, Artificial Sequence
  Description of Artificial Sequence: Synthetic oligonucleotide
  Antisense strand to SEQ ID NO: 1083538
gaucaaagcagggucuccu

SEQ ID NO: 1083540 - RNA, 19 nt, Artificial Sequence
  Description of Artificial Sequence: Synthetic oligonucleotide
  Sense strand starting at position 2623 of SEQ ID NO: 915488
uuguuuauacgugcaguua

SEQ ID NO: 1083541 - RNA, 19 nt, Artificial Sequence
  Description of Artificial Sequence: Synthetic oligonucleotide
  Antisense strand to SEQ ID NO: 1083540
uaacugcacguauaaacaa

SEQ ID NO: 1083542 - RNA, 19 nt, Artificial Sequence
  Description of Artificial Sequence: Synthetic oligonucleotide
  Sense strand starting at position 2714 of SEQ ID NO: 915488
uaucuuagggcugaucuga

SEQ ID NO: 1083543 - RNA, 19 nt, Artificial Sequence
  Description of Artificial Sequence: Synthetic oligonucleotide
  Antisense strand to SEQ ID NO: 1083542
ucagaucagcccuaagaua

SEQ ID NO: 1083544 - RNA, 19 nt, Artificial Sequence
  Description of Artificial Sequence: Synthetic oligonucleotide
  Sense strand starting at position 2801 of SEQ ID NO: 915488
ggcucuaggcugggaagau

SEQ ID NO: 1083545 - RNA, 19 nt, Artificial Sequence
  Description of Artificial Sequence: Synthetic oligonucleotide
  Antisense strand to SEQ ID NO: 1083544
aucuucccagccuagagcc

SEQ ID NO: 1083546 - RNA, 19 nt, Artificial Sequence
  Description of Artificial Sequence: Synthetic oligonucleotide
  Sense strand starting at position 3005 of SEQ ID NO: 915488
gugugaguuuaaucaccag

SEQ ID NO: 1083547 - RNA, 19 nt, Artificial Sequence
  Description of Artificial Sequence: Synthetic oligonucleotide
  Antisense strand to SEQ ID NO: 1083546
cuggugauuaaacucacac

SEQ ID NO: 1083548 - RNA, 19 nt, Artificial Sequence
  Description of Artificial Sequence: Synthetic oligonucleotide
  Sense strand starting at position 3043 of SEQ ID NO: 915488
acuuacauuugagaggagu

SEQ ID NO: 1083549 - RNA, 19 nt, Artificial Sequence
  Description of Artificial Sequence: Synthetic oligonucleotide
  Antisense strand to SEQ ID NO: 1083548
acuccucucaaauguaagu

SEQ ID NO: 1083550 - RNA, 19 nt, Artificial Sequence
  Description of Artificial Sequence: Synthetic oligonucleotide
  Sense strand starting at position 3100 of SEQ ID NO: 915488
gucaaaucacuuggagcuu

SEQ ID NO: 1083551 - RNA, 19 nt, Artificial Sequence
  Description of Artificial Sequence: Synthetic oligonucleotide
  Antisense strand to SEQ ID NO: 1083550
aagcuccaagugauuugac

SEQ ID NO: 1083552 - RNA, 19 nt, Artificial Sequence
  Description of Artificial Sequence: Synthetic oligonucleotide
  Sense strand starting at position 3371 of SEQ ID NO: 915488
gacggagucccugaaucag

SEQ ID NO: 1083553 - RNA, 19 nt, Artificial Sequence
  Description of Artificial Sequence: Synthetic oligonucleotide
  Antisense strand to SEQ ID NO: 1083552
cugauucagggacuccguc

SEQ ID NO: 1083554 - RNA, 19 nt, Artificial Sequence
  Description of Artificial Sequence: Synthetic oligonucleotide
  Sense strand starting at position 3518 of SEQ ID NO: 915488
gucaaaguaggcuacuaau

SEQ ID NO: 1083555 - RNA, 19 nt, Artificial Sequence
  Description of Artificial Sequence: Synthetic oligonucleotide
  Antisense strand to SEQ ID NO: 1083554
auuaguagccuacuuugac

SEQ ID NO: 1083556 - RNA, 19 nt, Artificial Sequence
  Description of Artificial Sequence: Synthetic oligonucleotide
  Sense strand starting at position 3531 of SEQ ID NO: 915488
acuaauggugccuacauca

SEQ ID NO: 1083557 - RNA, 19 nt, Artificial Sequence
  Description of Artificial Sequence: Synthetic oligonucleotide
  Antisense strand to SEQ ID NO: 1083556
ugauguaggcaccauuagu

SEQ ID NO: 1083558 - RNA, 19 nt, Artificial Sequence
  Description of Artificial Sequence: Synthetic oligonucleotide
  Sense strand starting at position 3542 of SEQ ID NO: 915488
cuacaucauuggguugaua

SEQ ID NO: 1083559 - RNA, 19 nt, Artificial Sequence
  Description of Artificial Sequence: Synthetic oligonucleotide
  Antisense strand to SEQ ID NO: 1083558
uaucaacccaaugauguag

SEQ ID NO: 1083560 - RNA, 19 nt, Artificial Sequence
  Description of Artificial Sequence: Synthetic oligonucleotide
  Sense strand starting at position 3544 of SEQ ID NO: 915488
acaucauuggguugauaga

SEQ ID NO: 1083561 - RNA, 19 nt, Artificial Sequence
  Description of Artificial Sequence: Synthetic oligonucleotide
  Antisense strand to SEQ ID NO: 1083560
ucuaucaacccaaugaugu

SEQ ID NO: 1083562 - RNA, 19 nt, Artificial Sequence
  Description of Artificial Sequence: Synthetic oligonucleotide
  Sense strand starting at position 3563 of SEQ ID NO: 915488
ugaucaaaugaguguguuc

SEQ ID NO: 1083563 - RNA, 19 nt, Artificial Sequence
  Description of Artificial Sequence: Synthetic oligonucleotide
  Antisense strand to SEQ ID NO: 1083562
gaacacacucauuugauca

SEQ ID NO: 1083564 - RNA, 19 nt, Artificial Sequence
  Description of Artificial Sequence: Synthetic oligonucleotide
  Sense strand starting at position 3609 of SEQ ID NO: 915488
caaguucugguacauagua

SEQ ID NO: 1083565 - RNA, 19 nt, Artificial Sequence
  Description of Artificial Sequence: Synthetic oligonucleotide
  Antisense strand to SEQ ID NO: 1083564
uacuauguaccagaacuug

SEQ ID NO: 1083566 - RNA, 19 nt, Artificial Sequence
  Description of Artificial Sequence: Synthetic oligonucleotide
  Sense strand starting at position 3617 of SEQ ID NO: 915488
gguacauaguaguucucaa

SEQ ID NO: 1083567 - RNA, 19 nt, Artificial Sequence
  Description of Artificial Sequence: Synthetic oligonucleotide
  Antisense strand to SEQ ID NO: 1083566
uugagaacuacuauguacc

SEQ ID NO: 1083568 - RNA, 19 nt, Artificial Sequence
  Description of Artificial Sequence: Synthetic oligonucleotide
  Sense strand starting at position 3624 of SEQ ID NO: 915488
aguaguucucaauguaaac

SEQ ID NO: 1083569 - RNA, 19 nt, Artificial Sequence
  Description of Artificial Sequence: Synthetic oligonucleotide
  Antisense strand to SEQ ID NO: 1083568
guuuacauugagaacuacu

SEQ ID NO: 1083570 - RNA, 19 nt, Artificial Sequence
  Description of Artificial Sequence: Synthetic oligonucleotide
  Sense strand starting at position 3686 of SEQ ID NO: 915488
aguaguuccuaguuuagag

SEQ ID NO: 1083571 - RNA, 19 nt, Artificial Sequence
  Description of Artificial Sequence: Synthetic oligonucleotide
  Antisense strand to SEQ ID NO: 1083570
cucuaaacuaggaacuacu

SEQ ID NO: 1083572 - RNA, 19 nt, Artificial Sequence
  Description of Artificial Sequence: Synthetic oligonucleotide
  Sense strand starting at position 3814 of SEQ ID NO: 915488
gcugcaaacccaugaauau

SEQ ID NO: 1083573 - RNA, 19 nt, Artificial Sequence
  Description of Artificial Sequence: Synthetic oligonucleotide
  Antisense strand to SEQ ID NO: 1083572
auauucauggguuugcagc

SEQ ID NO: 1083574 - RNA, 19 nt, Artificial Sequence
  Description of Artificial Sequence: Synthetic oligonucleotide
  Sense strand starting at position 3860 of SEQ ID NO: 915488
aguagacaggucugugaag

SEQ ID NO: 1083575 - RNA, 19 nt, Artificial Sequence
  Description of Artificial Sequence: Synthetic oligonucleotide
  Antisense strand to SEQ ID NO: 1083574
cuucacagaccugucuacu

SEQ ID NO: 1083576 - RNA, 19 nt, Artificial Sequence
  Description of Artificial Sequence: Synthetic oligonucleotide
  Sense strand starting at position 3862 of SEQ ID NO: 915488
uagacaggucugugaagca

SEQ ID NO: 1083577 - RNA, 19 nt, Artificial Sequence
  Description of Artificial Sequence: Synthetic oligonucleotide
  Antisense strand to SEQ ID NO: 1083576
ugcuucacagaccugucua

SEQ ID NO: 1083578 - RNA, 19 nt, Artificial Sequence
  Description of Artificial Sequence: Synthetic oligonucleotide
  Sense strand starting at position 3897 of SEQ ID NO: 915488
augagaguuuauccucacu

SEQ ID NO: 1083579 - RNA, 19 nt, Artificial Sequence
  Description of Artificial Sequence: Synthetic oligonucleotide
  Antisense strand to SEQ ID NO: 1083578
agugaggauaaacucucau

SEQ ID NO: 1083580 - RNA, 19 nt, Artificial Sequence
  Description of Artificial Sequence: Synthetic oligonucleotide
  Sense strand starting at position 3900 of SEQ ID NO: 915488
agaguuuauccucacucag

SEQ ID NO: 1083581 - RNA, 19 nt, Artificial Sequence
  Description of Artificial Sequence: Synthetic oligonucleotide
  Antisense strand to SEQ ID NO: 1083580
cugagugaggauaaacucu

SEQ ID NO: 1083582 - RNA, 19 nt, Artificial Sequence
  Description of Artificial Sequence: Synthetic oligonucleotide
  Sense strand starting at position 3910 of SEQ ID NO: 915488
cucacucaggcuugacauu

SEQ ID NO: 1083583 - RNA, 19 nt, Artificial Sequence
  Description of Artificial Sequence: Synthetic oligonucleotide
  Antisense strand to SEQ ID NO: 1083582
aaugucaagccugagugag

SEQ ID NO: 1083584 - RNA, 19 nt, Artificial Sequence
  Description of Artificial Sequence: Synthetic oligonucleotide
  Sense strand starting at position 16 of SEQ ID NO: 915489
gcugguucugaucagugau

SEQ ID NO: 1083585 - RNA, 19 nt, Artificial Sequence
  Description of Artificial Sequence: Synthetic oligonucleotide
  Antisense strand to SEQ ID NO: 1083584
aucacugaucagaaccagc

SEQ ID NO: 1083586 - RNA, 19 nt, Artificial Sequence
  Description of Artificial Sequence: Synthetic oligonucleotide
  Sense strand starting at position 296 of SEQ ID NO: 915489
gggccauuacuagaggugu

SEQ ID NO: 1083587 - RNA, 19 nt, Artificial Sequence
  Description of Artificial Sequence: Synthetic oligonucleotide
  Antisense strand to SEQ ID NO: 1083586
acaccucuaguaauggccc

SEQ ID NO: 1083588 - RNA, 19 nt, Artificial Sequence
  Description of Artificial Sequence: Synthetic oligonucleotide
  Sense strand starting at position 298 of SEQ ID NO: 915489
gccauuacuagagguguga

SEQ ID NO: 1083589 - RNA, 19 nt, Artificial Sequence
  Description of Artificial Sequence: Synthetic oligonucleotide
  Antisense strand to SEQ ID NO: 1083588
ucacaccucuaguaauggc

SEQ ID NO: 1083590 - RNA, 19 nt, Artificial Sequence
  Description of Artificial Sequence: Synthetic oligonucleotide
  Sense strand starting at position 334 of SEQ ID NO: 915489
uugggaagcuggcuaucuu

SEQ ID NO: 1083591 - RNA, 19 nt, Artificial Sequence
  Description of Artificial Sequence: Synthetic oligonucleotide
  Antisense strand to SEQ ID NO: 1083590
aagauagccagcuucccaa

SEQ ID NO: 1083592 - RNA, 19 nt, Artificial Sequence
  Description of Artificial Sequence: Synthetic oligonucleotide
  Sense strand starting at position 407 of SEQ ID NO: 915489
uucucaauucugggagugu

SEQ ID NO: 1083593 - RNA, 19 nt, Artificial Sequence
  Description of Artificial Sequence: Synthetic oligonucleotide
  Antisense strand to SEQ ID NO: 1083592
acacucccagaauugagaa

SEQ ID NO: 1083594 - RNA, 19 nt, Artificial Sequence
  Description of Artificial Sequence: Synthetic oligonucleotide
  Sense strand starting at position 411 of SEQ ID NO: 915489
caauucugggaguguaaac

SEQ ID NO: 1083595 - RNA, 19 nt, Artificial Sequence
  Description of Artificial Sequence: Synthetic oligonucleotide
  Antisense strand to SEQ ID NO: 1083594
guuuacacucccagaauug

SEQ ID NO: 1083596 - RNA, 19 nt, Artificial Sequence
  Description of Artificial Sequence: Synthetic oligonucleotide
  Sense strand starting at position 480 of SEQ ID NO: 915489
cuguguauucuuggugaag

SEQ ID NO: 1083597 - RNA, 19 nt, Artificial Sequence
  Description of Artificial Sequence: Synthetic oligonucleotide
  Antisense strand to SEQ ID NO: 1083596
cuucaccaagaauacacag

SEQ ID NO: 1083598 - RNA, 19 nt, Artificial Sequence
  Description of Artificial Sequence: Synthetic oligonucleotide
  Sense strand starting at position 481 of SEQ ID NO: 915489
uguguauucuuggugaaga

SEQ ID NO: 1083599 - RNA, 19 nt, Artificial Sequence
  Description of Artificial Sequence: Synthetic oligonucleotide
  Antisense strand to SEQ ID NO: 1083598
ucuucaccaagaauacaca

SEQ ID NO: 1083600 - RNA, 19 nt, Artificial Sequence
  Description of Artificial Sequence: Synthetic oligonucleotide
  Sense strand starting at position 507 of SEQ ID NO: 915489
cgagaaaugagguguucug

SEQ ID NO: 1083601 - RNA, 19 nt, Artificial Sequence
  Description of Artificial Sequence: Synthetic oligonucleotide
  Antisense strand to SEQ ID NO: 1083600
cagaacaccucauuucucg

SEQ ID NO: 1083602 - RNA, 19 nt, Artificial Sequence
  Description of Artificial Sequence: Synthetic oligonucleotide
  Sense strand starting at position 638 of SEQ ID NO: 915489
ggucuaggacauuguccau

SEQ ID NO: 1083603 - RNA, 19 nt, Artificial Sequence
  Description of Artificial Sequence: Synthetic oligonucleotide
  Antisense strand to SEQ ID NO: 1083602
auggacaauguccuagacc

SEQ ID NO: 1083604 - RNA, 19 nt, Artificial Sequence
  Description of Artificial Sequence: Synthetic oligonucleotide
  Sense strand starting at position 642 of SEQ ID NO: 915489
uaggacauuguccauuagu

SEQ ID NO: 1083605 - RNA, 19 nt, Artificial Sequence
  Description of Artificial Sequence: Synthetic oligonucleotide
  Antisense strand to SEQ ID NO: 1083604
acuaauggacaauguccua

SEQ ID NO: 1083606 - RNA, 19 nt, Artificial Sequence
  Description of Artificial Sequence: Synthetic oligonucleotide
  Sense strand starting at position 652 of SEQ ID NO: 915489
uccauuaguucuguugacu

SEQ ID NO: 1083607 - RNA, 19 nt, Artificial Sequence
  Description of Artificial Sequence: Synthetic oligonucleotide
  Antisense strand to SEQ ID NO: 1083606
agucaacagaacuaaugga

SEQ ID NO: 1083608 - RNA, 19 nt, Artificial Sequence
  Description of Artificial Sequence: Synthetic oligonucleotide
  Sense strand starting at position 655 of SEQ ID NO: 915489
auuaguucuguugacucua

SEQ ID NO: 1083609 - RNA, 19 nt, Artificial Sequence
  Description of Artificial Sequence: Synthetic oligonucleotide
  Antisense strand to SEQ ID NO: 1083608
uagagucaacagaacuaau

SEQ ID NO: 1083610 - RNA, 19 nt, Artificial Sequence
  Description of Artificial Sequence: Synthetic oligonucleotide
  Sense strand starting at position 685 of SEQ ID NO: 915489
gggaauguguggccaggua

SEQ ID NO: 1083611 - RNA, 19 nt, Artificial Sequence
  Description of Artificial Sequence: Synthetic oligonucleotide
  Antisense strand to SEQ ID NO: 1083610
uaccuggccacacauuccc

SEQ ID NO: 1083612 - RNA, 19 nt, Artificial Sequence
  Description of Artificial Sequence: Synthetic oligonucleotide
  Sense strand starting at position 884 of SEQ ID NO: 915489
ggagcauuacuugagccuu

SEQ ID NO: 1083613 - RNA, 19 nt, Artificial Sequence
  Description of Artificial Sequence: Synthetic oligonucleotide
  Antisense strand to SEQ ID NO: 1083612
aaggcucaaguaaugcucc

SEQ ID NO: 1083614 - RNA, 19 nt, Artificial Sequence
  Description of Artificial Sequence: Synthetic oligonucleotide
  Sense strand starting at position 1228 of SEQ ID NO: 915489
ggaauccaccuuugugaac

SEQ ID NO: 1083615 - RNA, 19 nt, Artificial Sequence
  Description of Artificial Sequence: Synthetic oligonucleotide
  Antisense strand to SEQ ID NO: 1083614
guucacaaagguggauucc

SEQ ID NO: 1083616 - RNA, 19 nt, Artificial Sequence
  Description of Artificial Sequence: Synthetic oligonucleotide
  Sense strand starting at position 1255 of SEQ ID NO: 915489
gcaggcuaccuauggaaau

SEQ ID NO: 1083617 - RNA, 19 nt, Artificial Sequence
  Description of Artificial Sequence: Synthetic oligonucleotide
  Antisense strand to SEQ ID NO: 1083616
auuuccauagguagccugc

SEQ ID NO: 1083618 - RNA, 19 nt, Artificial Sequence
  Description of Artificial Sequence: Synthetic oligonucleotide
  Sense strand starting at position 1317 of SEQ ID NO: 915489
aucuuuagugcuggaagga

SEQ ID NO: 1083619 - RNA, 19 nt, Artificial Sequence
  Description of Artificial Sequence: Synthetic oligonucleotide
  Antisense strand to SEQ ID NO: 1083618
uccuuccagcacuaaagau

SEQ ID NO: 1083620 - RNA, 19 nt, Artificial Sequence
  Description of Artificial Sequence: Synthetic oligonucleotide
  Sense strand starting at position 1345 of SEQ ID NO: 915489
gguugugaguucucaccug

SEQ ID NO: 1083621 - RNA, 19 nt, Artificial Sequence
  Description of Artificial Sequence: Synthetic oligonucleotide
  Antisense strand to SEQ ID NO: 1083620
caggugagaacucacaacc

SEQ ID NO: 1083622 - RNA, 19 nt, Artificial Sequence
  Description of Artificial Sequence: Synthetic oligonucleotide
  Sense strand starting at position 1366 of SEQ ID NO: 915489
ugccuugagccugaagcaa

SEQ ID NO: 1083623 - RNA, 19 nt, Artificial Sequence
  Description of Artificial Sequence: Synthetic oligonucleotide
  Antisense strand to SEQ ID NO: 1083622
uugcuucaggcucaaggca

SEQ ID NO: 1083624 - RNA, 19 nt, Artificial Sequence
  Description of Artificial Sequence: Synthetic oligonucleotide
  Sense strand starting at position 1503 of SEQ ID NO: 915489
uuuccuauuucguuccaua

SEQ ID NO: 1083625 - RNA, 19 nt, Artificial Sequence
  Description of Artificial Sequence: Synthetic oligonucleotide
  Antisense strand to SEQ ID NO: 1083624
uauggaacgaaauaggaaa

SEQ ID NO: 1083626 - RNA, 19 nt, Artificial Sequence
  Description of Artificial Sequence: Synthetic oligonucleotide
  Sense strand starting at position 1615 of SEQ ID NO: 915489
gagacucauccugguuucu

SEQ ID NO: 1083627 - RNA, 19 nt, Artificial Sequence
  Description of Artificial Sequence: Synthetic oligonucleotide
  Antisense strand to SEQ ID NO: 1083626
agaaaccaggaugagucuc

SEQ ID NO: 1083628 - RNA, 19 nt, Artificial Sequence
  Description of Artificial Sequence: Synthetic oligonucleotide
  Sense strand starting at position 1720 of SEQ ID NO: 915489
caugcuugauugucaggaa

SEQ ID NO: 1083629 - RNA, 19 nt, Artificial Sequence
  Description of Artificial Sequence: Synthetic oligonucleotide
  Antisense strand to SEQ ID NO: 1083628
uuccugacaaucaagcaug

SEQ ID NO: 1083630 - RNA, 19 nt, Artificial Sequence
  Description of Artificial Sequence: Synthetic oligonucleotide
  Sense strand starting at position 1800 of SEQ ID NO: 915489
gggauuagagguugggagu

SEQ ID NO: 1083631 - RNA, 19 nt, Artificial Sequence
  Description of Artificial Sequence: Synthetic oligonucleotide
  Antisense strand to SEQ ID NO: 1083630
acucccaaccucuaauccc

SEQ ID NO: 1083632 - RNA, 19 nt, Artificial Sequence
  Description of Artificial Sequence: Synthetic oligonucleotide
  Sense strand starting at position 1801 of SEQ ID NO: 915489
ggauuagagguugggaguu

SEQ ID NO: 1083633 - RNA, 19 nt, Artificial Sequence
  Description of Artificial Sequence: Synthetic oligonucleotide
  Antisense strand to SEQ ID NO: 1083632
aacucccaaccucuaaucc

SEQ ID NO: 1083634 - RNA, 19 nt, Artificial Sequence
  Description of Artificial Sequence: Synthetic oligonucleotide
  Sense strand starting at position 2266 of SEQ ID NO: 915489
gugaucuuguggucucaac

SEQ ID NO: 1083635 - RNA, 19 nt, Artificial Sequence
  Description of Artificial Sequence: Synthetic oligonucleotide
  Antisense strand to SEQ ID NO: 1083634
guugagaccacaagaucac

SEQ ID NO: 1083636 - RNA, 19 nt, Artificial Sequence
  Description of Artificial Sequence: Synthetic oligonucleotide
  Sense strand starting at position 2430 of SEQ ID NO: 915489
cgguccuggaaucaucaaa

SEQ ID NO: 1083637 - RNA, 19 nt, Artificial Sequence
  Description of Artificial Sequence: Synthetic oligonucleotide
  Antisense strand to SEQ ID NO: 1083636
uuugaugauuccaggaccg

SEQ ID NO: 1083638 - RNA, 19 nt, Artificial Sequence
  Description of Artificial Sequence: Synthetic oligonucleotide
  Sense strand starting at position 2448 of SEQ ID NO: 915489
auauuugggcuaugugcaa

SEQ ID NO: 1083639 - RNA, 19 nt, Artificial Sequence
  Description of Artificial Sequence: Synthetic oligonucleotide
  Antisense strand to SEQ ID NO: 1083638
uugcacauagcccaaauau

SEQ ID NO: 1083640 - RNA, 19 nt, Artificial Sequence
  Description of Artificial Sequence: Synthetic oligonucleotide
  Sense strand starting at position 2914 of SEQ ID NO: 915489
acugaaagcuucuuguuau

SEQ ID NO: 1083641 - RNA, 19 nt, Artificial Sequence
  Description of Artificial Sequence: Synthetic oligonucleotide
  Antisense strand to SEQ ID NO: 1083640
auaacaagaagcuuucagu

SEQ ID NO: 1083642 - RNA, 19 nt, Artificial Sequence
  Description of Artificial Sequence: Synthetic oligonucleotide
  Sense strand starting at position 3062 of SEQ ID NO: 915489
cugugagugaguggaguaa

SEQ ID NO: 1083643 - RNA, 19 nt, Artificial Sequence
  Description of Artificial Sequence: Synthetic oligonucleotide
  Antisense strand to SEQ ID NO: 1083642
uuacuccacucacucacag

SEQ ID NO: 1083644 - RNA, 19 nt, Artificial Sequence
  Description of Artificial Sequence: Synthetic oligonucleotide
  Sense strand starting at position 3128 of SEQ ID NO: 915489
gggugaugaugagauuuag

SEQ ID NO: 1083645 - RNA, 19 nt, Artificial Sequence
  Description of Artificial Sequence: Synthetic oligonucleotide
  Antisense strand to SEQ ID NO: 1083644
cuaaaucucaucaucaccc

SEQ ID NO: 1083646 - RNA, 19 nt, Artificial Sequence
  Description of Artificial Sequence: Synthetic oligonucleotide
  Sense strand starting at position 3134 of SEQ ID NO: 915489
ugaugagauuuaggugaua

SEQ ID NO: 1083647 - RNA, 19 nt, Artificial Sequence
  Description of Artificial Sequence: Synthetic oligonucleotide
  Antisense strand to SEQ ID NO: 1083646
uaucaccuaaaucucauca

SEQ ID NO: 1083648 - RNA, 19 nt, Artificial Sequence
  Description of Artificial Sequence: Synthetic oligonucleotide
  Sense strand starting at position 3139 of SEQ ID NO: 915489
agauuuaggugauaagauu

SEQ ID NO: 1083649 - RNA, 19 nt, Artificial Sequence
  Description of Artificial Sequence: Synthetic oligonucleotide
  Antisense strand to SEQ ID NO: 1083648
aaucuuaucaccuaaaucu

SEQ ID NO: 1083650 - RNA, 19 nt, Artificial Sequence
  Description of Artificial Sequence: Synthetic oligonucleotide
  Sense strand starting at position 3244 of SEQ ID NO: 915489
ccuuucugucuuugugaaa

SEQ ID NO: 1083651 - RNA, 19 nt, Artificial Sequence
  Description of Artificial Sequence: Synthetic oligonucleotide
  Antisense strand to SEQ ID NO: 1083650
uuucacaaagacagaaagg

SEQ ID NO: 1083652 - RNA, 19 nt, Artificial Sequence
  Description of Artificial Sequence: Synthetic oligonucleotide
  Sense strand starting at position 3245 of SEQ ID NO: 915489
cuuucugucuuugugaaac

SEQ ID NO: 1083653 - RNA, 19 nt, Artificial Sequence
  Description of Artificial Sequence: Synthetic oligonucleotide
  Antisense strand to SEQ ID NO: 1083652
guuucacaaagacagaaag

SEQ ID NO: 1083654 - RNA, 19 nt, Artificial Sequence
  Description of Artificial Sequence: Synthetic oligonucleotide
  Sense strand starting at position 3253 of SEQ ID NO: 915489
cuuugugaaacggguauaa

SEQ ID NO: 1083655 - RNA, 19 nt, Artificial Sequence
  Description of Artificial Sequence: Synthetic oligonucleotide
  Antisense strand to SEQ ID NO: 1083654
uuauacccguuucacaaag

SEQ ID NO: 1083656 - RNA, 19 nt, Artificial Sequence
  Description of Artificial Sequence: Synthetic oligonucleotide
  Sense strand starting at position 3255 of SEQ ID NO: 915489
uugugaaacggguauaagu

SEQ ID NO: 1083657 - RNA, 19 nt, Artificial Sequence
  Description of Artificial Sequence: Synthetic oligonucleotide
  Antisense strand to SEQ ID NO: 1083656
acuuauacccguuucacaa

SEQ ID NO: 1083658 - RNA, 19 nt, Artificial Sequence
  Description of Artificial Sequence: Synthetic oligonucleotide
  Sense strand starting at position 3601 of SEQ ID NO: 915489
gagagauacucuguaaauu

SEQ ID NO: 1083659 - RNA, 19 nt, Artificial Sequence
  Description of Artificial Sequence: Synthetic oligonucleotide
  Antisense strand to SEQ ID NO: 1083658
aauuuacagaguaucucuc

SEQ ID NO: 1083660 - RNA, 19 nt, Artificial Sequence
  Description of Artificial Sequence: Synthetic oligonucleotide
  Sense strand starting at position 3954 of SEQ ID NO: 915489
gccgacgcucuguaaauuu

SEQ ID NO: 1083661 - RNA, 19 nt, Artificial Sequence
  Description of Artificial Sequence: Synthetic oligonucleotide
  Antisense strand to SEQ ID NO: 1083660
aaauuuacagagcgucggc

SEQ ID NO: 1083662 - RNA, 19 nt, Artificial Sequence
  Description of Artificial Sequence: Synthetic oligonucleotide
  Sense strand starting at position 3981 of SEQ ID NO: 915489
gcagccaagcaugagauaa

SEQ ID NO: 1083663 - RNA, 19 nt, Artificial Sequence
  Description of Artificial Sequence: Synthetic oligonucleotide
  Antisense strand to SEQ ID NO: 1083662
uuaucucaugcuuggcugc

SEQ ID NO: 1083664 - RNA, 19 nt, Artificial Sequence
  Description of Artificial Sequence: Synthetic oligonucleotide
  Sense strand starting at position 21 of SEQ ID NO: 915490
guagaaagcgucaggguuu

SEQ ID NO: 1083665 - RNA, 19 nt, Artificial Sequence
  Description of Artificial Sequence: Synthetic oligonucleotide
  Antisense strand to SEQ ID NO: 1083664
aaacccugacgcuuucuac

SEQ ID NO: 1083666 - RNA, 19 nt, Artificial Sequence
  Description of Artificial Sequence: Synthetic oligonucleotide
  Sense strand starting at position 277 of SEQ ID NO: 915490
uggauaguccaagguuucu

SEQ ID NO: 1083667 - RNA, 19 nt, Artificial Sequence
  Description of Artificial Sequence: Synthetic oligonucleotide
  Antisense strand to SEQ ID NO: 1083666
agaaaccuuggacuaucca

SEQ ID NO: 1083668 - RNA, 19 nt, Artificial Sequence
  Description of Artificial Sequence: Synthetic oligonucleotide
  Sense strand starting at position 315 of SEQ ID NO: 915490
uuaugauugccuggaagug

SEQ ID NO: 1083669 - RNA, 19 nt, Artificial Sequence
  Description of Artificial Sequence: Synthetic oligonucleotide
  Antisense strand to SEQ ID NO: 1083668
cacuuccaggcaaucauaa

SEQ ID NO: 1083670 - RNA, 19 nt, Artificial Sequence
  Description of Artificial Sequence: Synthetic oligonucleotide
  Sense strand starting at position 362 of SEQ ID NO: 915490
auagaaucuugcucaaaug

SEQ ID NO: 1083671 - RNA, 19 nt, Artificial Sequence
  Description of Artificial Sequence: Synthetic oligonucleotide
  Antisense strand to SEQ ID NO: 1083670
cauuugagcaagauucuau

SEQ ID NO: 1083672 - RNA, 19 nt, Artificial Sequence
  Description of Artificial Sequence: Synthetic oligonucleotide
  Sense strand starting at position 462 of SEQ ID NO: 915490
ugcagauuggucuauaggu

SEQ ID NO: 1083673 - RNA, 19 nt, Artificial Sequence
  Description of Artificial Sequence: Synthetic oligonucleotide
  Antisense strand to SEQ ID NO: 1083672
accuauagaccaaucugca

SEQ ID NO: 1083674 - RNA, 19 nt, Artificial Sequence
  Description of Artificial Sequence: Synthetic oligonucleotide
  Sense strand starting at position 505 of SEQ ID NO: 915490
uucuguagagagugaacau

SEQ ID NO: 1083675 - RNA, 19 nt, Artificial Sequence
  Description of Artificial Sequence: Synthetic oligonucleotide
  Antisense strand to SEQ ID NO: 1083674
auguucacucucuacagaa

SEQ ID NO: 1083676 - RNA, 19 nt, Artificial Sequence
  Description of Artificial Sequence: Synthetic oligonucleotide
  Sense strand starting at position 514 of SEQ ID NO: 915490
gagugaacauauguuugua

SEQ ID NO: 1083677 - RNA, 19 nt, Artificial Sequence
  Description of Artificial Sequence: Synthetic oligonucleotide
  Antisense strand to SEQ ID NO: 1083676
uacaaacauauguucacuc

SEQ ID NO: 1083678 - RNA, 19 nt, Artificial Sequence
  Description of Artificial Sequence: Synthetic oligonucleotide
  Sense strand starting at position 629 of SEQ ID NO: 915490
ggugugauugugucugugu

SEQ ID NO: 1083679 - RNA, 19 nt, Artificial Sequence
  Description of Artificial Sequence: Synthetic oligonucleotide
  Antisense strand to SEQ ID NO: 1083678
acacagacacaaucacacc

SEQ ID NO: 1083680 - RNA, 19 nt, Artificial Sequence
  Description of Artificial Sequence: Synthetic oligonucleotide
  Sense strand starting at position 790 of SEQ ID NO: 915490
guuugugagcaugaauuag

SEQ ID NO: 1083681 - RNA, 19 nt, Artificial Sequence
  Description of Artificial Sequence: Synthetic oligonucleotide
  Antisense strand to SEQ ID NO: 1083680
cuaauucaugcucacaaac

SEQ ID NO: 1083682 - RNA, 19 nt, Artificial Sequence
  Description of Artificial Sequence: Synthetic oligonucleotide
  Sense strand starting at position 798 of SEQ ID NO: 915490
gcaugaauuagagagcucu

SEQ ID NO: 1083683 - RNA, 19 nt, Artificial Sequence
  Description of Artificial Sequence: Synthetic oligonucleotide
  Antisense strand to SEQ ID NO: 1083682
agagcucucuaauucaugc

SEQ ID NO: 1083684 - RNA, 19 nt, Artificial Sequence
  Description of Artificial Sequence: Synthetic oligonucleotide
  Sense strand starting at position 870 of SEQ ID NO: 915490
uuuaucauccacugaggau

SEQ ID NO: 1083685 - RNA, 19 nt, Artificial Sequence
  Description of Artificial Sequence: Synthetic oligonucleotide
  Antisense strand to SEQ ID NO: 1083684
auccucaguggaugauaaa

SEQ ID NO: 1083686 - RNA, 19 nt, Artificial Sequence
  Description of Artificial Sequence: Synthetic oligonucleotide
  Sense strand starting at position 883 of SEQ ID NO: 915490
gaggauucucuggguagag

SEQ ID NO: 1083687 - RNA, 19 nt, Artificial Sequence
  Description of Artificial Sequence: Synthetic oligonucleotide
  Antisense strand to SEQ ID NO: 1083686
cucuacccagagaauccuc

SEQ ID NO: 1083688 - RNA, 19 nt, Artificial Sequence
  Description of Artificial Sequence: Synthetic oligonucleotide
  Sense strand starting at position 884 of SEQ ID NO: 915490
aggauucucuggguagagu

SEQ ID NO: 1083689 - RNA, 19 nt, Artificial Sequence
  Description of Artificial Sequence: Synthetic oligonucleotide
  Antisense strand to SEQ ID NO: 1083688
acucuacccagagaauccu

SEQ ID NO: 1083690 - RNA, 19 nt, Artificial Sequence
  Description of Artificial Sequence: Synthetic oligonucleotide
  Sense strand starting at position 935 of SEQ ID NO: 915490
uggcaaagucauuagacua

SEQ ID NO: 1083691 - RNA, 19 nt, Artificial Sequence
  Description of Artificial Sequence: Synthetic oligonucleotide
  Antisense strand to SEQ ID NO: 1083690
uagucuaaugacuuugcca

SEQ ID NO: 1083692 - RNA, 19 nt, Artificial Sequence
  Description of Artificial Sequence: Synthetic oligonucleotide
  Sense strand starting at position 1006 of SEQ ID NO: 915490
uggcauugucagugagaaa

SEQ ID NO: 1083693 - RNA, 19 nt, Artificial Sequence
  Description of Artificial Sequence: Synthetic oligonucleotide
  Antisense strand to SEQ ID NO: 1083692
uuucucacugacaaugcca

SEQ ID NO: 1083694 - RNA, 19 nt, Artificial Sequence
  Description of Artificial Sequence: Synthetic oligonucleotide
  Sense strand starting at position 1007 of SEQ ID NO: 915490
ggcauugucagugagaaau

SEQ ID NO: 1083695 - RNA, 19 nt, Artificial Sequence
  Description of Artificial Sequence: Synthetic oligonucleotide
  Antisense strand to SEQ ID NO: 1083694
auuucucacugacaaugcc

SEQ ID NO: 1083696 - RNA, 19 nt, Artificial Sequence
  Description of Artificial Sequence: Synthetic oligonucleotide
  Sense strand starting at position 1294 of SEQ ID NO: 915490
gaaacaagcuugguacaga

SEQ ID NO: 1083697 - RNA, 19 nt, Artificial Sequence
  Description of Artificial Sequence: Synthetic oligonucleotide
  Antisense strand to SEQ ID NO: 1083696
ucuguaccaagcuuguuuc

SEQ ID NO: 1083698 - RNA, 19 nt, Artificial Sequence
  Description of Artificial Sequence: Synthetic oligonucleotide
  Sense strand starting at position 1390 of SEQ ID NO: 915490
ugaugcagaaucuagaguu

SEQ ID NO: 1083699 - RNA, 19 nt, Artificial Sequence
  Description of Artificial Sequence: Synthetic oligonucleotide
  Antisense strand to SEQ ID NO: 1083698
aacucuagauucugcauca

SEQ ID NO: 1083700 - RNA, 19 nt, Artificial Sequence
  Description of Artificial Sequence: Synthetic oligonucleotide
  Sense strand starting at position 1405 of SEQ ID NO: 915490
aguucucaaaucugggaga

SEQ ID NO: 1083701 - RNA, 19 nt, Artificial Sequence
  Description of Artificial Sequence: Synthetic oligonucleotide
  Antisense strand to SEQ ID NO: 1083700
ucucccagauuugagaacu

SEQ ID NO: 1083702 - RNA, 19 nt, Artificial Sequence
  Description of Artificial Sequence: Synthetic oligonucleotide
  Sense strand starting at position 1552 of SEQ ID NO: 915490
gaaguauaucgugaagauu

SEQ ID NO: 1083703 - RNA, 19 nt, Artificial Sequence
  Description of Artificial Sequence: Synthetic oligonucleotide
  Antisense strand to SEQ ID NO: 1083702
aaucuucacgauauacuuc

SEQ ID NO: 1083704 - RNA, 19 nt, Artificial Sequence
  Description of Artificial Sequence: Synthetic oligonucleotide
  Sense strand starting at position 1555 of SEQ ID NO: 915490
guauaucgugaagauuauu

SEQ ID NO: 1083705 - RNA, 19 nt, Artificial Sequence
  Description of Artificial Sequence: Synthetic oligonucleotide
  Antisense strand to SEQ ID NO: 1083704
aauaaucuucacgauauac

SEQ ID NO: 1083706 - RNA, 19 nt, Artificial Sequence
  Description of Artificial Sequence: Synthetic oligonucleotide
  Sense strand starting at position 1629 of SEQ ID NO: 915490
acagaagauuuccaaguau

SEQ ID NO: 1083707 - RNA, 19 nt, Artificial Sequence
  Description of Artificial Sequence: Synthetic oligonucleotide
  Antisense strand to SEQ ID NO: 1083706
auacuuggaaaucuucugu

SEQ ID NO: 1083708 - RNA, 19 nt, Artificial Sequence
  Description of Artificial Sequence: Synthetic oligonucleotide
  Sense strand starting at position 1789 of SEQ ID NO: 915490
cugaucucugcugagaauu

SEQ ID NO: 1083709 - RNA, 19 nt, Artificial Sequence
  Description of Artificial Sequence: Synthetic oligonucleotide
  Antisense strand to SEQ ID NO: 1083708
aauucucagcagagaucag

SEQ ID NO: 1083710 - RNA, 19 nt, Artificial Sequence
  Description of Artificial Sequence: Synthetic oligonucleotide
  Sense strand starting at position 1816 of SEQ ID NO: 915490
ggaguucuuccauagaggc

SEQ ID NO: 1083711 - RNA, 19 nt, Artificial Sequence
  Description of Artificial Sequence: Synthetic oligonucleotide
  Antisense strand to SEQ ID NO: 1083710
gccucuauggaagaacucc

SEQ ID NO: 1083712 - RNA, 19 nt, Artificial Sequence
  Description of Artificial Sequence: Synthetic oligonucleotide
  Sense strand starting at position 2235 of SEQ ID NO: 915490
gcaucaugucccguguauc

SEQ ID NO: 1083713 - RNA, 19 nt, Artificial Sequence
  Description of Artificial Sequence: Synthetic oligonucleotide
  Antisense strand to SEQ ID NO: 1083712
gauacacgggacaugaugc

SEQ ID NO: 1083714 - RNA, 19 nt, Artificial Sequence
  Description of Artificial Sequence: Synthetic oligonucleotide
  Sense strand starting at position 2246 of SEQ ID NO: 915490
cguguaucugugccagcuu

SEQ ID NO: 1083715 - RNA, 19 nt, Artificial Sequence
  Description of Artificial Sequence: Synthetic oligonucleotide
  Antisense strand to SEQ ID NO: 1083714
aagcuggcacagauacacg

SEQ ID NO: 1083716 - RNA, 19 nt, Artificial Sequence
  Description of Artificial Sequence: Synthetic oligonucleotide
  Sense strand starting at position 2249 of SEQ ID NO: 915490
guaucugugccagcuuauc

SEQ ID NO: 1083717 - RNA, 19 nt, Artificial Sequence
  Description of Artificial Sequence: Synthetic oligonucleotide
  Antisense strand to SEQ ID NO: 1083716
gauaagcuggcacagauac

SEQ ID NO: 1083718 - RNA, 19 nt, Artificial Sequence
  Description of Artificial Sequence: Synthetic oligonucleotide
  Sense strand starting at position 2349 of SEQ ID NO: 915490
aagggaugucugggaaagu

SEQ ID NO: 1083719 - RNA, 19 nt, Artificial Sequence
  Description of Artificial Sequence: Synthetic oligonucleotide
  Antisense strand to SEQ ID NO: 1083718
acuuucccagacaucccuu

SEQ ID NO: 1083720 - RNA, 19 nt, Artificial Sequence
  Description of Artificial Sequence: Synthetic oligonucleotide
  Sense strand starting at position 2425 of SEQ ID NO: 915490
aaggauuaucucgguuaau

SEQ ID NO: 1083721 - RNA, 19 nt, Artificial Sequence
  Description of Artificial Sequence: Synthetic oligonucleotide
  Antisense strand to SEQ ID NO: 1083720
auuaaccgagauaauccuu

SEQ ID NO: 1083722 - RNA, 19 nt, Artificial Sequence
  Description of Artificial Sequence: Synthetic oligonucleotide
  Sense strand starting at position 2426 of SEQ ID NO: 915490
aggauuaucucgguuaauu

SEQ ID NO: 1083723 - RNA, 19 nt, Artificial Sequence
  Description of Artificial Sequence: Synthetic oligonucleotide
  Antisense strand to SEQ ID NO: 1083722
aauuaaccgagauaauccu

SEQ ID NO: 1083724 - RNA, 19 nt, Artificial Sequence
  Description of Artificial Sequence: Synthetic oligonucleotide
  Sense strand starting at position 2428 of SEQ ID NO: 915490
gauuaucucgguuaauuau

SEQ ID NO: 1083725 - RNA, 19 nt, Artificial Sequence
  Description of Artificial Sequence: Synthetic oligonucleotide
  Antisense strand to SEQ ID NO: 1083724
auaauuaaccgagauaauc

SEQ ID NO: 1083726 - RNA, 19 nt, Artificial Sequence
  Description of Artificial Sequence: Synthetic oligonucleotide
  Sense strand starting at position 2522 of SEQ ID NO: 915490
gaauuaguagcguaacuga

SEQ ID NO: 1083727 - RNA, 19 nt, Artificial Sequence
  Description of Artificial Sequence: Synthetic oligonucleotide
  Antisense strand to SEQ ID NO: 1083726
ucaguuacgcuacuaauuc

SEQ ID NO: 1083728 - RNA, 19 nt, Artificial Sequence
  Description of Artificial Sequence: Synthetic oligonucleotide
  Sense strand starting at position 2698 of SEQ ID NO: 915490
ugggauagcaugcagaauu

SEQ ID NO: 1083729 - RNA, 19 nt, Artificial Sequence
  Description of Artificial Sequence: Synthetic oligonucleotide
  Antisense strand to SEQ ID NO: 1083728
aauucugcaugcuauccca

SEQ ID NO: 1083730 - RNA, 19 nt, Artificial Sequence
  Description of Artificial Sequence: Synthetic oligonucleotide
  Sense strand starting at position 3060 of SEQ ID NO: 915490
guacaaaguagucauguau

SEQ ID NO: 1083731 - RNA, 19 nt, Artificial Sequence
  Description of Artificial Sequence: Synthetic oligonucleotide
  Antisense strand to SEQ ID NO: 1083730
auacaugacuacuuuguac

SEQ ID NO: 1083732 - RNA, 19 nt, Artificial Sequence
  Description of Artificial Sequence: Synthetic oligonucleotide
  Sense strand starting at position 3066 of SEQ ID NO: 915490
aguagucauguauaaagac

SEQ ID NO: 1083733 - RNA, 19 nt, Artificial Sequence
  Description of Artificial Sequence: Synthetic oligonucleotide
  Antisense strand to SEQ ID NO: 1083732
gucuuuauacaugacuacu

SEQ ID NO: 1083734 - RNA, 19 nt, Artificial Sequence
  Description of Artificial Sequence: Synthetic oligonucleotide
  Sense strand starting at position 3153 of SEQ ID NO: 915490
ugagcugcacaccauaaau

SEQ ID NO: 1083735 - RNA, 19 nt, Artificial Sequence
  Description of Artificial Sequence: Synthetic oligonucleotide
  Antisense strand to SEQ ID NO: 1083734
auuuauggugugcagcuca

SEQ ID NO: 1083736 - RNA, 19 nt, Artificial Sequence
  Description of Artificial Sequence: Synthetic oligonucleotide
  Sense strand starting at position 3212 of SEQ ID NO: 915490
ggagcugacuuuccaauaa

SEQ ID NO: 1083737 - RNA, 19 nt, Artificial Sequence
  Description of Artificial Sequence: Synthetic oligonucleotide
  Antisense strand to SEQ ID NO: 1083736
uuauuggaaagucagcucc

SEQ ID NO: 1083738 - RNA, 19 nt, Artificial Sequence
  Description of Artificial Sequence: Synthetic oligonucleotide
  Sense strand starting at position 3273 of SEQ ID NO: 915490
aguaguaaucacugcaaag

SEQ ID NO: 1083739 - RNA, 19 nt, Artificial Sequence
  Description of Artificial Sequence: Synthetic oligonucleotide
  Antisense strand to SEQ ID NO: 1083738
cuuugcagugauuacuacu

SEQ ID NO: 1083740 - RNA, 19 nt, Artificial Sequence
  Description of Artificial Sequence: Synthetic oligonucleotide
  Sense strand starting at position 3974 of SEQ ID NO: 915490
auuauuugcuguccggauu

SEQ ID NO: 1083741 - RNA, 19 nt, Artificial Sequence
  Description of Artificial Sequence: Synthetic oligonucleotide
  Antisense strand to SEQ ID NO: 1083740
aauccggacagcaaauaau

SEQ ID NO: 1083742 - RNA, 19 nt, Artificial Sequence
  Description of Artificial Sequence: Synthetic oligonucleotide
  Sense strand starting at position 3975 of SEQ ID NO: 915490
uuauuugcuguccggauua

SEQ ID NO: 1083743 - RNA, 19 nt, Artificial Sequence
  Description of Artificial Sequence: Synthetic oligonucleotide
  Antisense strand to SEQ ID NO: 1083742
uaauccggacagcaaauaa

SEQ ID NO: 1083744 - RNA, 19 nt, Artificial Sequence
  Description of Artificial Sequence: Synthetic oligonucleotide
  Sense strand starting at position 11 of SEQ ID NO: 915491
cccacucagcuuugcagaa

SEQ ID NO: 1083745 - RNA, 19 nt, Artificial Sequence
  Description of Artificial Sequence: Synthetic oligonucleotide
  Antisense strand to SEQ ID NO: 1083744
uucugcaaagcugaguggg

SEQ ID NO: 1083746 - RNA, 19 nt, Artificial Sequence
  Description of Artificial Sequence: Synthetic oligonucleotide
  Sense strand starting at position 350 of SEQ ID NO: 915491
aguggaauccaacguuuaa

SEQ ID NO: 1083747 - RNA, 19 nt, Artificial Sequence
  Description of Artificial Sequence: Synthetic oligonucleotide
  Antisense strand to SEQ ID NO: 1083746
uuaaacguuggauuccacu

SEQ ID NO: 1083748 - RNA, 19 nt, Artificial Sequence
  Description of Artificial Sequence: Synthetic oligonucleotide
  Sense strand starting at position 368 of SEQ ID NO: 915491
agagaaugugcugaaguca

SEQ ID NO: 1083749 - RNA, 19 nt, Artificial Sequence
  Description of Artificial Sequence: Synthetic oligonucleotide
  Antisense strand to SEQ ID NO: 1083748
ugacuucagcacauucucu

SEQ ID NO: 1083750 - RNA, 19 nt, Artificial Sequence
  Description of Artificial Sequence: Synthetic oligonucleotide
  Sense strand starting at position 416 of SEQ ID NO: 915491
uuaccauagucaucuguuu

SEQ ID NO: 1083751 - RNA, 19 nt, Artificial Sequence
  Description of Artificial Sequence: Synthetic oligonucleotide
  Antisense strand to SEQ ID NO: 1083750
aaacagaugacuaugguaa

SEQ ID NO: 1083752 - RNA, 19 nt, Artificial Sequence
  Description of Artificial Sequence: Synthetic oligonucleotide
  Sense strand starting at position 439 of SEQ ID NO: 915491
ccuguaaccugaguauaau

SEQ ID NO: 1083753 - RNA, 19 nt, Artificial Sequence
  Description of Artificial Sequence: Synthetic oligonucleotide
  Antisense strand to SEQ ID NO: 1083752
auuauacucagguuacagg

SEQ ID NO: 1083754 - RNA, 19 nt, Artificial Sequence
  Description of Artificial Sequence: Synthetic oligonucleotide
  Sense strand starting at position 440 of SEQ ID NO: 915491
cuguaaccugaguauaaua

SEQ ID NO: 1083755 - RNA, 19 nt, Artificial Sequence
  Description of Artificial Sequence: Synthetic oligonucleotide
  Antisense strand to SEQ ID NO: 1083754
uauuauacucagguuacag

SEQ ID NO: 1083756 - RNA, 19 nt, Artificial Sequence
  Description of Artificial Sequence: Synthetic oligonucleotide
  Sense strand starting at position 469 of SEQ ID NO: 915491
ccgauugcugugagggcua

SEQ ID NO: 1083757 - RNA, 19 nt, Artificial Sequence
  Description of Artificial Sequence: Synthetic oligonucleotide
  Antisense strand to SEQ ID NO: 1083756
uagcccucacagcaaucgg

SEQ ID NO: 1083758 - RNA, 19 nt, Artificial Sequence
  Description of Artificial Sequence: Synthetic oligonucleotide
  Sense strand starting at position 471 of SEQ ID NO: 915491
gauugcugugagggcuaaa

SEQ ID NO: 1083759 - RNA, 19 nt, Artificial Sequence
  Description of Artificial Sequence: Synthetic oligonucleotide
  Antisense strand to SEQ ID NO: 1083758
uuuagcccucacagcaauc

SEQ ID NO: 1083760 - RNA, 19 nt, Artificial Sequence
  Description of Artificial Sequence: Synthetic oligonucleotide
  Sense strand starting at position 474 of SEQ ID NO: 915491
ugcugugagggcuaaacaa

SEQ ID NO: 1083761 - RNA, 19 nt, Artificial Sequence
  Description of Artificial Sequence: Synthetic oligonucleotide
  Antisense strand to SEQ ID NO: 1083760
uuguuuagcccucacagca

SEQ ID NO: 1083762 - RNA, 19 nt, Artificial Sequence
  Description of Artificial Sequence: Synthetic oligonucleotide
  Sense strand starting at position 593 of SEQ ID NO: 915491
uuaguuuacccgggaggga

SEQ ID NO: 1083763 - RNA, 19 nt, Artificial Sequence
  Description of Artificial Sequence: Synthetic oligonucleotide
  Antisense strand to SEQ ID NO: 1083762
ucccucccggguaaacuaa

SEQ ID NO: 1083764 - RNA, 19 nt, Artificial Sequence
  Description of Artificial Sequence: Synthetic oligonucleotide
  Sense strand starting at position 640 of SEQ ID NO: 915491
gccugugaucauuacguaa

SEQ ID NO: 1083765 - RNA, 19 nt, Artificial Sequence
  Description of Artificial Sequence: Synthetic oligonucleotide
  Antisense strand to SEQ ID NO: 1083764
uuacguaaugaucacaggc

SEQ ID NO: 1083766 - RNA, 19 nt, Artificial Sequence
  Description of Artificial Sequence: Synthetic oligonucleotide
  Sense strand starting at position 643 of SEQ ID NO: 915491
ugugaucauuacguaaaug

SEQ ID NO: 1083767 - RNA, 19 nt, Artificial Sequence
  Description of Artificial Sequence: Synthetic oligonucleotide
  Antisense strand to SEQ ID NO: 1083766
cauuuacguaaugaucaca

SEQ ID NO: 1083768 - RNA, 19 nt, Artificial Sequence
  Description of Artificial Sequence: Synthetic oligonucleotide
  Sense strand starting at position 644 of SEQ ID NO: 915491
gugaucauuacguaaauga

SEQ ID NO: 1083769 - RNA, 19 nt, Artificial Sequence
  Description of Artificial Sequence: Synthetic oligonucleotide
  Antisense strand to SEQ ID NO: 1083768
ucauuuacguaaugaucac

SEQ ID NO: 1083770 - RNA, 19 nt, Artificial Sequence
  Description of Artificial Sequence: Synthetic oligonucleotide
  Sense strand starting at position 660 of SEQ ID NO: 915491
ugacaaagguggcuugaaa

SEQ ID NO: 1083771 - RNA, 19 nt, Artificial Sequence
  Description of Artificial Sequence: Synthetic oligonucleotide
  Antisense strand to SEQ ID NO: 1083770
uuucaagccaccuuuguca

SEQ ID NO: 1083772 - RNA, 19 nt, Artificial Sequence
  Description of Artificial Sequence: Synthetic oligonucleotide
  Sense strand starting at position 716 of SEQ ID NO: 915491
ugauguuaauaugccaagu

SEQ ID NO: 1083773 - RNA, 19 nt, Artificial Sequence
  Description of Artificial Sequence: Synthetic oligonucleotide
  Antisense strand to SEQ ID NO: 1083772
acuuggcauauuaacauca

SEQ ID NO: 1083774 - RNA, 19 nt, Artificial Sequence
  Description of Artificial Sequence: Synthetic oligonucleotide
  Sense strand starting at position 883 of SEQ ID NO: 915491
cugcuccagcaauaaguaa

SEQ ID NO: 1083775 - RNA, 19 nt, Artificial Sequence
  Description of Artificial Sequence: Synthetic oligonucleotide
  Antisense strand to SEQ ID NO: 1083774
uuacuuauugcuggagcag

SEQ ID NO: 1083776 - RNA, 19 nt, Artificial Sequence
  Description of Artificial Sequence: Synthetic oligonucleotide
  Sense strand starting at position 970 of SEQ ID NO: 915491
ggaagucucugagugguca

SEQ ID NO: 1083777 - RNA, 19 nt, Artificial Sequence
  Description of Artificial Sequence: Synthetic oligonucleotide
  Antisense strand to SEQ ID NO: 1083776
ugaccacucagagacuucc

SEQ ID NO: 1083778 - RNA, 19 nt, Artificial Sequence
  Description of Artificial Sequence: Synthetic oligonucleotide
  Sense strand starting at position 971 of SEQ ID NO: 915491
gaagucucugaguggucaa

SEQ ID NO: 1083779 - RNA, 19 nt, Artificial Sequence
  Description of Artificial Sequence: Synthetic oligonucleotide
  Antisense strand to SEQ ID NO: 1083778
uugaccacucagagacuuc

SEQ ID NO: 1083780 - RNA, 19 nt, Artificial Sequence
  Description of Artificial Sequence: Synthetic oligonucleotide
  Sense strand starting at position 974 of SEQ ID NO: 915491
gucucugaguggucaaaua

SEQ ID NO: 1083781 - RNA, 19 nt, Artificial Sequence
  Description of Artificial Sequence: Synthetic oligonucleotide
  Antisense strand to SEQ ID NO: 1083780
uauuugaccacucagagac

SEQ ID NO: 1083782 - RNA, 19 nt, Artificial Sequence
  Description of Artificial Sequence: Synthetic oligonucleotide
  Sense strand starting at position 1633 of SEQ ID NO: 915491
gagggaaagcgcuagcaau

SEQ ID NO: 1083783 - RNA, 19 nt, Artificial Sequence
  Description of Artificial Sequence: Synthetic oligonucleotide
  Antisense strand to SEQ ID NO: 1083782
auugcuagcgcuuucccuc

SEQ ID NO: 1083784 - RNA, 19 nt, Artificial Sequence
  Description of Artificial Sequence: Synthetic oligonucleotide
  Sense strand starting at position 1641 of SEQ ID NO: 915491
gcgcuagcaaugucuucuu

SEQ ID NO: 1083785 - RNA, 19 nt, Artificial Sequence
  Description of Artificial Sequence: Synthetic oligonucleotide
  Antisense strand to SEQ ID NO: 1083784
aagaagacauugcuagcgc

SEQ ID NO: 1083786 - RNA, 19 nt, Artificial Sequence
  Description of Artificial Sequence: Synthetic oligonucleotide
  Sense strand starting at position 1720 of SEQ ID NO: 915491
ugcagaugugucuaacuua

SEQ ID NO: 1083787 - RNA, 19 nt, Artificial Sequence
  Description of Artificial Sequence: Synthetic oligonucleotide
  Antisense strand to SEQ ID NO: 1083786
uaaguuagacacaucugca

SEQ ID NO: 1083788 - RNA, 19 nt, Artificial Sequence
  Description of Artificial Sequence: Synthetic oligonucleotide
  Sense strand starting at position 1793 of SEQ ID NO: 915491
caggcaucucugugcauuu

SEQ ID NO: 1083789 - RNA, 19 nt, Artificial Sequence
  Description of Artificial Sequence: Synthetic oligonucleotide
  Antisense strand to SEQ ID NO: 1083788
aaaugcacagagaugccug

SEQ ID NO: 1083790 - RNA, 19 nt, Artificial Sequence
  Description of Artificial Sequence: Synthetic oligonucleotide
  Sense strand starting at position 1813 of SEQ ID NO: 915491
cagagacugagauguuagu

SEQ ID NO: 1083791 - RNA, 19 nt, Artificial Sequence
  Description of Artificial Sequence: Synthetic oligonucleotide
  Antisense strand to SEQ ID NO: 1083790
acuaacaucucagucucug

SEQ ID NO: 1083792 - RNA, 19 nt, Artificial Sequence
  Description of Artificial Sequence: Synthetic oligonucleotide
  Sense strand starting at position 1879 of SEQ ID NO: 915491
ggaggaaugguuggaugcu

SEQ ID NO: 1083793 - RNA, 19 nt, Artificial Sequence
  Description of Artificial Sequence: Synthetic oligonucleotide
  Antisense strand to SEQ ID NO: 1083792
agcauccaaccauuccucc

SEQ ID NO: 1083794 - RNA, 19 nt, Artificial Sequence
  Description of Artificial Sequence: Synthetic oligonucleotide
  Sense strand starting at position 2064 of SEQ ID NO: 915491
aaauauugugguuggugga

SEQ ID NO: 1083795 - RNA, 19 nt, Artificial Sequence
  Description of Artificial Sequence: Synthetic oligonucleotide
  Antisense strand to SEQ ID NO: 1083794
uccaccaaccacaauauuu

SEQ ID NO: 1083796 - RNA, 19 nt, Artificial Sequence
  Description of Artificial Sequence: Synthetic oligonucleotide
  Sense strand starting at position 2194 of SEQ ID NO: 915491
cugggaugauuguuggauu

SEQ ID NO: 1083797 - RNA, 19 nt, Artificial Sequence
  Description of Artificial Sequence: Synthetic oligonucleotide
  Antisense strand to SEQ ID NO: 1083796
aauccaacaaucaucccag

SEQ ID NO: 1083798 - RNA, 19 nt, Artificial Sequence
  Description of Artificial Sequence: Synthetic oligonucleotide
  Sense strand starting at position 2588 of SEQ ID NO: 915491
ggguaaugcuuuccucauu

SEQ ID NO: 1083799 - RNA, 19 nt, Artificial Sequence
  Description of Artificial Sequence: Synthetic oligonucleotide
  Antisense strand to SEQ ID NO: 1083798
aaugaggaaagcauuaccc

SEQ ID NO: 1083800 - RNA, 19 nt, Artificial Sequence
  Description of Artificial Sequence: Synthetic oligonucleotide
  Sense strand starting at position 3222 of SEQ ID NO: 915491
uuugcuugauaauugaaac

SEQ ID NO: 1083801 - RNA, 19 nt, Artificial Sequence
  Description of Artificial Sequence: Synthetic oligonucleotide
  Antisense strand to SEQ ID NO: 1083800
guuucaauuaucaagcaaa

SEQ ID NO: 1083802 - RNA, 19 nt, Artificial Sequence
  Description of Artificial Sequence: Synthetic oligonucleotide
  Sense strand starting at position 3243 of SEQ ID NO: 915491
gcuggugauggguguaaag

SEQ ID NO: 1083803 - RNA, 19 nt, Artificial Sequence
  Description of Artificial Sequence: Synthetic oligonucleotide
  Antisense strand to SEQ ID NO: 1083802
cuuuacacccaucaccagc

SEQ ID NO: 1083804 - RNA, 19 nt, Artificial Sequence
  Description of Artificial Sequence: Synthetic oligonucleotide
  Sense strand starting at position 3254 of SEQ ID NO: 915491
guguaaaggguuugucaua

SEQ ID NO: 1083805 - RNA, 19 nt, Artificial Sequence
  Description of Artificial Sequence: Synthetic oligonucleotide
  Antisense strand to SEQ ID NO: 1083804
uaugacaaacccuuuacac

SEQ ID NO: 1083806 - RNA, 19 nt, Artificial Sequence
  Description of Artificial Sequence: Synthetic oligonucleotide
  Sense strand starting at position 3255 of SEQ ID NO: 915491
uguaaaggguuugucauau

SEQ ID NO: 1083807 - RNA, 19 nt, Artificial Sequence
  Description of Artificial Sequence: Synthetic oligonucleotide
  Antisense strand to SEQ ID NO: 1083806
auaugacaaacccuuuaca

SEQ ID NO: 1083808 - RNA, 19 nt, Artificial Sequence
  Description of Artificial Sequence: Synthetic oligonucleotide
  Sense strand starting at position 3261 of SEQ ID NO: 915491
ggguuugucauauaguucu

SEQ ID NO: 1083809 - RNA, 19 nt, Artificial Sequence
  Description of Artificial Sequence: Synthetic oligonucleotide
  Antisense strand to SEQ ID NO: 1083808
agaacuauaugacaaaccc

SEQ ID NO: 1083810 - RNA, 19 nt, Artificial Sequence
  Description of Artificial Sequence: Synthetic oligonucleotide
  Sense strand starting at position 3330 of SEQ ID NO: 915491
auaagcuaacgucauaagu

SEQ ID NO: 1083811 - RNA, 19 nt, Artificial Sequence
  Description of Artificial Sequence: Synthetic oligonucleotide
  Antisense strand to SEQ ID NO: 1083810
acuuaugacguuagcuuau

SEQ ID NO: 1083812 - RNA, 19 nt, Artificial Sequence
  Description of Artificial Sequence: Synthetic oligonucleotide
  Sense strand starting at position 3417 of SEQ ID NO: 915491
gguuaaguagggcagagau

SEQ ID NO: 1083813 - RNA, 19 nt, Artificial Sequence
  Description of Artificial Sequence: Synthetic oligonucleotide
  Antisense strand to SEQ ID NO: 1083812
aucucugcccuacuuaacc

SEQ ID NO: 1083814 - RNA, 19 nt, Artificial Sequence
  Description of Artificial Sequence: Synthetic oligonucleotide
  Sense strand starting at position 3466 of SEQ ID NO: 915491
gggcccuuuguguaccaaa

SEQ ID NO: 1083815 - RNA, 19 nt, Artificial Sequence
  Description of Artificial Sequence: Synthetic oligonucleotide
  Antisense strand to SEQ ID NO: 1083814
uuugguacacaaagggccc

SEQ ID NO: 1083816 - RNA, 19 nt, Artificial Sequence
  Description of Artificial Sequence: Synthetic oligonucleotide
  Sense strand starting at position 3506 of SEQ ID NO: 915491
gagcauaaacucugugcca

SEQ ID NO: 1083817 - RNA, 19 nt, Artificial Sequence
  Description of Artificial Sequence: Synthetic oligonucleotide
  Antisense strand to SEQ ID NO: 1083816
uggcacagaguuuaugcuc

SEQ ID NO: 1083818 - RNA, 19 nt, Artificial Sequence
  Description of Artificial Sequence: Synthetic oligonucleotide
  Sense strand starting at position 3507 of SEQ ID NO: 915491
agcauaaacucugugccaa

SEQ ID NO: 1083819 - RNA, 19 nt, Artificial Sequence
  Description of Artificial Sequence: Synthetic oligonucleotide
  Antisense strand to SEQ ID NO: 1083818
uuggcacagaguuuaugcu

SEQ ID NO: 1083820 - RNA, 19 nt, Artificial Sequence
  Description of Artificial Sequence: Synthetic oligonucleotide
  Sense strand starting at position 3672 of SEQ ID NO: 915491
gugucucagccucaagagu

SEQ ID NO: 1083821 - RNA, 19 nt, Artificial Sequence
  Description of Artificial Sequence: Synthetic oligonucleotide
  Antisense strand to SEQ ID NO: 1083820
acucuugaggcugagacac

SEQ ID NO: 1083822 - RNA, 19 nt, Artificial Sequence
  Description of Artificial Sequence: Synthetic oligonucleotide
  Sense strand starting at position 3867 of SEQ ID NO: 915491
gguaucucaguuuaaucuu

SEQ ID NO: 1083823 - RNA, 19 nt, Artificial Sequence
  Description of Artificial Sequence: Synthetic oligonucleotide
  Antisense strand to SEQ ID NO: 1083822
aagauuaaacugagauacc

SEQ ID NO: 1083824 - RNA, 19 nt, Artificial Sequence
  Description of Artificial Sequence: Synthetic oligonucleotide
  Sense strand starting at position 55 of SEQ ID NO: 915492
gguagcuaagaucauguaa

SEQ ID NO: 1083825 - RNA, 19 nt, Artificial Sequence
  Description of Artificial Sequence: Synthetic oligonucleotide
  Antisense strand to SEQ ID NO: 1083824
uuacaugaucuuagcuacc

SEQ ID NO: 1083826 - RNA, 19 nt, Artificial Sequence
  Description of Artificial Sequence: Synthetic oligonucleotide
  Sense strand starting at position 201 of SEQ ID NO: 915492
ucagaugucuaugccaaca

SEQ ID NO: 1083827 - RNA, 19 nt, Artificial Sequence
  Description of Artificial Sequence: Synthetic oligonucleotide
  Antisense strand to SEQ ID NO: 1083826
uguuggcauagacaucuga

SEQ ID NO: 1083828 - RNA, 19 nt, Artificial Sequence
  Description of Artificial Sequence: Synthetic oligonucleotide
  Sense strand starting at position 381 of SEQ ID NO: 915492
cuguuccaaguguaagauu

SEQ ID NO: 1083829 - RNA, 19 nt, Artificial Sequence
  Description of Artificial Sequence: Synthetic oligonucleotide
  Antisense strand to SEQ ID NO: 1083828
aaucuuacacuuggaacag

SEQ ID NO: 1083830 - RNA, 19 nt, Artificial Sequence
  Description of Artificial Sequence: Synthetic oligonucleotide
  Sense strand starting at position 389 of SEQ ID NO: 915492
aguguaagauucccuuauu

SEQ ID NO: 1083831 - RNA, 19 nt, Artificial Sequence
  Description of Artificial Sequence: Synthetic oligonucleotide
  Antisense strand to SEQ ID NO: 1083830
aauaagggaaucuuacacu

SEQ ID NO: 1083832 - RNA, 19 nt, Artificial Sequence
  Description of Artificial Sequence: Synthetic oligonucleotide
  Sense strand starting at position 759 of SEQ ID NO: 915492
ccaguaagcuuuccaggag

SEQ ID NO: 1083833 - RNA, 19 nt, Artificial Sequence
  Description of Artificial Sequence: Synthetic oligonucleotide
  Antisense strand to SEQ ID NO: 1083832
cuccuggaaagcuuacugg

SEQ ID NO: 1083834 - RNA, 19 nt, Artificial Sequence
  Description of Artificial Sequence: Synthetic oligonucleotide
  Sense strand starting at position 763 of SEQ ID NO: 915492
uaagcuuuccaggaguaua

SEQ ID NO: 1083835 - RNA, 19 nt, Artificial Sequence
  Description of Artificial Sequence: Synthetic oligonucleotide
  Antisense strand to SEQ ID NO: 1083834
uauacuccuggaaagcuua

SEQ ID NO: 1083836 - RNA, 19 nt, Artificial Sequence
  Description of Artificial Sequence: Synthetic oligonucleotide
  Sense strand starting at position 776 of SEQ ID NO: 915492
aguauagacuccuugauga

SEQ ID NO: 1083837 - RNA, 19 nt, Artificial Sequence
  Description of Artificial Sequence: Synthetic oligonucleotide
  Antisense strand to SEQ ID NO: 1083836
ucaucaaggagucuauacu

SEQ ID NO: 1083838 - RNA, 19 nt, Artificial Sequence
  Description of Artificial Sequence: Synthetic oligonucleotide
  Sense strand starting at position 1063 of SEQ ID NO: 915492
caacgacaucaauguguua

SEQ ID NO: 1083839 - RNA, 19 nt, Artificial Sequence
  Description of Artificial Sequence: Synthetic oligonucleotide
  Antisense strand to SEQ ID NO: 1083838
uaacacauugaugucguug

SEQ ID NO: 1083840 - RNA, 19 nt, Artificial Sequence
  Description of Artificial Sequence: Synthetic oligonucleotide
  Sense strand starting at position 1143 of SEQ ID NO: 915492
aguagauaagcacgagaga

SEQ ID NO: 1083841 - RNA, 19 nt, Artificial Sequence
  Description of Artificial Sequence: Synthetic oligonucleotide
  Antisense strand to SEQ ID NO: 1083840
ucucucgugcuuaucuacu

SEQ ID NO: 1083842 - RNA, 19 nt, Artificial Sequence
  Description of Artificial Sequence: Synthetic oligonucleotide
  Sense strand starting at position 1227 of SEQ ID NO: 915492
gagagauucccucggucaa

SEQ ID NO: 1083843 - RNA, 19 nt, Artificial Sequence
  Description of Artificial Sequence: Synthetic oligonucleotide
  Antisense strand to SEQ ID NO: 1083842
uugaccgagggaaucucuc

SEQ ID NO: 1083844 - RNA, 19 nt, Artificial Sequence
  Description of Artificial Sequence: Synthetic oligonucleotide
  Sense strand starting at position 1228 of SEQ ID NO: 915492
agagauucccucggucaag

SEQ ID NO: 1083845 - RNA, 19 nt, Artificial Sequence
  Description of Artificial Sequence: Synthetic oligonucleotide
  Antisense strand to SEQ ID NO: 1083844
cuugaccgagggaaucucu

SEQ ID NO: 1083846 - RNA, 19 nt, Artificial Sequence
  Description of Artificial Sequence: Synthetic oligonucleotide
  Sense strand starting at position 1261 of SEQ ID NO: 915492
agauucuuucgaggaaacc

SEQ ID NO: 1083847 - RNA, 19 nt, Artificial Sequence
  Description of Artificial Sequence: Synthetic oligonucleotide
  Antisense strand to SEQ ID NO: 1083846
gguuuccucgaaagaaucu

SEQ ID NO: 1083848 - RNA, 19 nt, Artificial Sequence
  Description of Artificial Sequence: Synthetic oligonucleotide
  Sense strand starting at position 1306 of SEQ ID NO: 915492
cgacuuucugaccgaagga

SEQ ID NO: 1083849 - RNA, 19 nt, Artificial Sequence
  Description of Artificial Sequence: Synthetic oligonucleotide
  Antisense strand to SEQ ID NO: 1083848
uccuucggucagaaagucg

SEQ ID NO: 1083850 - RNA, 19 nt, Artificial Sequence
  Description of Artificial Sequence: Synthetic oligonucleotide
  Sense strand starting at position 2412 of SEQ ID NO: 915492
uugucuagccuugauuaau

SEQ ID NO: 1083851 - RNA, 19 nt, Artificial Sequence
  Description of Artificial Sequence: Synthetic oligonucleotide
  Antisense strand to SEQ ID NO: 1083850
auuaaucaaggcuagacaa

SEQ ID NO: 1083852 - RNA, 19 nt, Artificial Sequence
  Description of Artificial Sequence: Synthetic oligonucleotide
  Sense strand starting at position 2442 of SEQ ID NO: 915492
acagcaaacucagcaagau

SEQ ID NO: 1083853 - RNA, 19 nt, Artificial Sequence
  Description of Artificial Sequence: Synthetic oligonucleotide
  Antisense strand to SEQ ID NO: 1083852
aucuugcugaguuugcugu

SEQ ID NO: 1083854 - RNA, 19 nt, Artificial Sequence
  Description of Artificial Sequence: Synthetic oligonucleotide
  Sense strand starting at position 2454 of SEQ ID NO: 915492
gcaagauaaucccuguuua

SEQ ID NO: 1083855 - RNA, 19 nt, Artificial Sequence
  Description of Artificial Sequence: Synthetic oligonucleotide
  Antisense strand to SEQ ID NO: 1083854
uaaacagggauuaucuugc

SEQ ID NO: 1083856 - RNA, 19 nt, Artificial Sequence
  Description of Artificial Sequence: Synthetic oligonucleotide
  Sense strand starting at position 2650 of SEQ ID NO: 915492
uuguguuuggcgucuucca

SEQ ID NO: 1083857 - RNA, 19 nt, Artificial Sequence
  Description of Artificial Sequence: Synthetic oligonucleotide
  Antisense strand to SEQ ID NO: 1083856
uggaagacgccaaacacaa

SEQ ID NO: 1083858 - RNA, 19 nt, Artificial Sequence
  Description of Artificial Sequence: Synthetic oligonucleotide
  Sense strand starting at position 2651 of SEQ ID NO: 915492
uguguuuggcgucuuccaa

SEQ ID NO: 1083859 - RNA, 19 nt, Artificial Sequence
  Description of Artificial Sequence: Synthetic oligonucleotide
  Antisense strand to SEQ ID NO: 1083858
uuggaagacgccaaacaca

SEQ ID NO: 1083860 - RNA, 19 nt, Artificial Sequence
  Description of Artificial Sequence: Synthetic oligonucleotide
  Sense strand starting at position 2805 of SEQ ID NO: 915492
agaguaauccaagagcccu

SEQ ID NO: 1083861 - RNA, 19 nt, Artificial Sequence
  Description of Artificial Sequence: Synthetic oligonucleotide
  Antisense strand to SEQ ID NO: 1083860
agggcucuuggauuacucu

SEQ ID NO: 1083862 - RNA, 19 nt, Artificial Sequence
  Description of Artificial Sequence: Synthetic oligonucleotide
  Sense strand starting at position 2934 of SEQ ID NO: 915492
aggaaaugcucccuccuga

SEQ ID NO: 1083863 - RNA, 19 nt, Artificial Sequence
  Description of Artificial Sequence: Synthetic oligonucleotide
  Antisense strand to SEQ ID NO: 1083862
ucaggagggagcauuuccu

SEQ ID NO: 1083864 - RNA, 19 nt, Artificial Sequence
  Description of Artificial Sequence: Synthetic oligonucleotide
  Sense strand starting at position 3034 of SEQ ID NO: 915492
aggacuaggccuugaagca

SEQ ID NO: 1083865 - RNA, 19 nt, Artificial Sequence
  Description of Artificial Sequence: Synthetic oligonucleotide
  Antisense strand to SEQ ID NO: 1083864
ugcuucaaggccuaguccu

SEQ ID NO: 1083866 - RNA, 19 nt, Artificial Sequence
  Description of Artificial Sequence: Synthetic oligonucleotide
  Sense strand starting at position 3035 of SEQ ID NO: 915492
ggacuaggccuugaagcau

SEQ ID NO: 1083867 - RNA, 19 nt, Artificial Sequence
  Description of Artificial Sequence: Synthetic oligonucleotide
  Antisense strand to SEQ ID NO: 1083866
augcuucaaggccuagucc

SEQ ID NO: 1083868 - RNA, 19 nt, Artificial Sequence
  Description of Artificial Sequence: Synthetic oligonucleotide
  Sense strand starting at position 3061 of SEQ ID NO: 915492
guguuaaauuuggauggga

SEQ ID NO: 1083869 - RNA, 19 nt, Artificial Sequence
  Description of Artificial Sequence: Synthetic oligonucleotide
  Antisense strand to SEQ ID NO: 1083868
ucccauccaaauuuaacac

SEQ ID NO: 1083870 - RNA, 19 nt, Artificial Sequence
  Description of Artificial Sequence: Synthetic oligonucleotide
  Sense strand starting at position 3066 of SEQ ID NO: 915492
aaauuuggaugggaaguua

SEQ ID NO: 1083871 - RNA, 19 nt, Artificial Sequence
  Description of Artificial Sequence: Synthetic oligonucleotide
  Antisense strand to SEQ ID NO: 1083870
uaacuucccauccaaauuu

SEQ ID NO: 1083872 - RNA, 19 nt, Artificial Sequence
  Description of Artificial Sequence: Synthetic oligonucleotide
  Sense strand starting at position 3077 of SEQ ID NO: 915492
ggaaguuaaaguugaccua

SEQ ID NO: 1083873 - RNA, 19 nt, Artificial Sequence
  Description of Artificial Sequence: Synthetic oligonucleotide
  Antisense strand to SEQ ID NO: 1083872
uaggucaacuuuaacuucc

SEQ ID NO: 1083874 - RNA, 19 nt, Artificial Sequence
  Description of Artificial Sequence: Synthetic oligonucleotide
  Sense strand starting at position 3080 of SEQ ID NO: 915492
aguuaaaguugaccuaauu

SEQ ID NO: 1083875 - RNA, 19 nt, Artificial Sequence
  Description of Artificial Sequence: Synthetic oligonucleotide
  Antisense strand to SEQ ID NO: 1083874
aauuaggucaacuuuaacu

SEQ ID NO: 1083876 - RNA, 19 nt, Artificial Sequence
  Description of Artificial Sequence: Synthetic oligonucleotide
  Sense strand starting at position 3129 of SEQ ID NO: 915492
aagaacauuucggacgaau

SEQ ID NO: 1083877 - RNA, 19 nt, Artificial Sequence
  Description of Artificial Sequence: Synthetic oligonucleotide
  Antisense strand to SEQ ID NO: 1083876
auucguccgaaauguucuu

SEQ ID NO: 1083878 - RNA, 19 nt, Artificial Sequence
  Description of Artificial Sequence: Synthetic oligonucleotide
  Sense strand starting at position 3524 of SEQ ID NO: 915492
cucuucugaugcuuaagga

SEQ ID NO: 1083879 - RNA, 19 nt, Artificial Sequence
  Description of Artificial Sequence: Synthetic oligonucleotide
  Antisense strand to SEQ ID NO: 1083878
uccuuaagcaucagaagag

SEQ ID NO: 1083880 - RNA, 19 nt, Artificial Sequence
  Description of Artificial Sequence: Synthetic oligonucleotide
  Sense strand starting at position 3525 of SEQ ID NO: 915492
ucuucugaugcuuaaggaa

SEQ ID NO: 1083881 - RNA, 19 nt, Artificial Sequence
  Description of Artificial Sequence: Synthetic oligonucleotide
  Antisense strand to SEQ ID NO: 1083880
uuccuuaagcaucagaaga

SEQ ID NO: 1083882 - RNA, 19 nt, Artificial Sequence
  Description of Artificial Sequence: Synthetic oligonucleotide
  Sense strand starting at position 3537 of SEQ ID NO: 915492
uaaggaaguucuuuauguu

SEQ ID NO: 1083883 - RNA, 19 nt, Artificial Sequence
  Description of Artificial Sequence: Synthetic oligonucleotide
  Antisense strand to SEQ ID NO: 1083882
aacauaaagaacuuccuua

SEQ ID NO: 1083884 - RNA, 19 nt, Artificial Sequence
  Description of Artificial Sequence: Synthetic oligonucleotide
  Sense strand starting at position 3538 of SEQ ID NO: 915492
aaggaaguucuuuauguuc

SEQ ID NO: 1083885 - RNA, 19 nt, Artificial Sequence
  Description of Artificial Sequence: Synthetic oligonucleotide
  Antisense strand to SEQ ID NO: 1083884
gaacauaaagaacuuccuu

SEQ ID NO: 1083886 - RNA, 19 nt, Artificial Sequence
  Description of Artificial Sequence: Synthetic oligonucleotide
  Sense strand starting at position 3557 of SEQ ID NO: 915492
aguugaauuccguacacuc

SEQ ID NO: 1083887 - RNA, 19 nt, Artificial Sequence
  Description of Artificial Sequence: Synthetic oligonucleotide
  Antisense strand to SEQ ID NO: 1083886
gaguguacggaauucaacu

SEQ ID NO: 1083888 - RNA, 19 nt, Artificial Sequence
  Description of Artificial Sequence: Synthetic oligonucleotide
  Sense strand starting at position 3687 of SEQ ID NO: 915492
aguuucuuccaauguauuu

SEQ ID NO: 1083889 - RNA, 19 nt, Artificial Sequence
  Description of Artificial Sequence: Synthetic oligonucleotide
  Antisense strand to SEQ ID NO: 1083888
aaauacauuggaagaaacu

SEQ ID NO: 1083890 - RNA, 19 nt, Artificial Sequence
  Description of Artificial Sequence: Synthetic oligonucleotide
  Sense strand starting at position 3757 of SEQ ID NO: 915492
ucaguuucucagcaugauu

SEQ ID NO: 1083891 - RNA, 19 nt, Artificial Sequence
  Description of Artificial Sequence: Synthetic oligonucleotide
  Antisense strand to SEQ ID NO: 1083890
aaucaugcugagaaacuga

SEQ ID NO: 1083892 - RNA, 19 nt, Artificial Sequence
  Description of Artificial Sequence: Synthetic oligonucleotide
  Sense strand starting at position 3778 of SEQ ID NO: 915492
ccaagugacguccagaaca

SEQ ID NO: 1083893 - RNA, 19 nt, Artificial Sequence
  Description of Artificial Sequence: Synthetic oligonucleotide
  Antisense strand to SEQ ID NO: 1083892
uguucuggacgucacuugg

SEQ ID NO: 1083894 - RNA, 19 nt, Artificial Sequence
  Description of Artificial Sequence: Synthetic oligonucleotide
  Sense strand starting at position 3816 of SEQ ID NO: 915492
uggucugaccagcauaaau

SEQ ID NO: 1083895 - RNA, 19 nt, Artificial Sequence
  Description of Artificial Sequence: Synthetic oligonucleotide
  Antisense strand to SEQ ID NO: 1083894
auuuaugcuggucagacca

SEQ ID NO: 1083896 - RNA, 19 nt, Artificial Sequence
  Description of Artificial Sequence: Synthetic oligonucleotide
  Sense strand starting at position 3827 of SEQ ID NO: 915492
gcauaaauccaguggaauu

SEQ ID NO: 1083897 - RNA, 19 nt, Artificial Sequence
  Description of Artificial Sequence: Synthetic oligonucleotide
  Antisense strand to SEQ ID NO: 1083896
aauuccacuggauuuaugc

SEQ ID NO: 1083898 - RNA, 19 nt, Artificial Sequence
  Description of Artificial Sequence: Synthetic oligonucleotide
  Sense strand starting at position 3838 of SEQ ID NO: 915492
guggaauuauggcuacauu

SEQ ID NO: 1083899 - RNA, 19 nt, Artificial Sequence
  Description of Artificial Sequence: Synthetic oligonucleotide
  Antisense strand to SEQ ID NO: 1083898
aauguagccauaauuccac

SEQ ID NO: 1083900 - RNA, 19 nt, Artificial Sequence
  Description of Artificial Sequence: Synthetic oligonucleotide
  Sense strand starting at position 3847 of SEQ ID NO: 915492
uggcuacauuugcuuugaa

SEQ ID NO: 1083901 - RNA, 19 nt, Artificial Sequence
  Description of Artificial Sequence: Synthetic oligonucleotide
  Antisense strand to SEQ ID NO: 1083900
uucaaagcaaauguagcca

SEQ ID NO: 1083902 - RNA, 19 nt, Artificial Sequence
  Description of Artificial Sequence: Synthetic oligonucleotide
  Sense strand starting at position 3951 of SEQ ID NO: 915492
ugacuuguugcagagucau

SEQ ID NO: 1083903 - RNA, 19 nt, Artificial Sequence
  Description of Artificial Sequence: Synthetic oligonucleotide
  Antisense strand to SEQ ID NO: 1083902
augacucugcaacaaguca

SEQ ID NO: 1083904 - RNA, 19 nt, Artificial Sequence
  Description of Artificial Sequence: Synthetic oligonucleotide
  Sense strand starting at position 116 of SEQ ID NO: 915493
ggucuauacagcugaacag

SEQ ID NO: 1083905 - RNA, 19 nt, Artificial Sequence
  Description of Artificial Sequence: Synthetic oligonucleotide
  Antisense strand to SEQ ID NO: 1083904
cuguucagcuguauagacc

SEQ ID NO: 1083906 - RNA, 19 nt, Artificial Sequence
  Description of Artificial Sequence: Synthetic oligonucleotide
  Sense strand starting at position 126 of SEQ ID NO: 915493
gcugaacaguccuuggaga

SEQ ID NO: 1083907 - RNA, 19 nt, Artificial Sequence
  Description of Artificial Sequence: Synthetic oligonucleotide
  Antisense strand to SEQ ID NO: 1083906
ucuccaaggacuguucagc

SEQ ID NO: 1083908 - RNA, 19 nt, Artificial Sequence
  Description of Artificial Sequence: Synthetic oligonucleotide
  Sense strand starting at position 127 of SEQ ID NO: 915493
cugaacaguccuuggagaa

SEQ ID NO: 1083909 - RNA, 19 nt, Artificial Sequence
  Description of Artificial Sequence: Synthetic oligonucleotide
  Antisense strand to SEQ ID NO: 1083908
uucuccaaggacuguucag

SEQ ID NO: 1083910 - RNA, 19 nt, Artificial Sequence
  Description of Artificial Sequence: Synthetic oligonucleotide
  Sense strand starting at position 173 of SEQ ID NO: 915493
ccaagacugugccuacaau

SEQ ID NO: 1083911 - RNA, 19 nt, Artificial Sequence
  Description of Artificial Sequence: Synthetic oligonucleotide
  Antisense strand to SEQ ID NO: 1083910
auuguaggcacagucuugg

SEQ ID NO: 1083912 - RNA, 19 nt, Artificial Sequence
  Description of Artificial Sequence: Synthetic oligonucleotide
  Sense strand starting at position 273 of SEQ ID NO: 915493
cugguucuaugaguauucu

SEQ ID NO: 1083913 - RNA, 19 nt, Artificial Sequence
  Description of Artificial Sequence: Synthetic oligonucleotide
  Antisense strand to SEQ ID NO: 1083912
agaauacucauagaaccag

SEQ ID NO: 1083914 - RNA, 19 nt, Artificial Sequence
  Description of Artificial Sequence: Synthetic oligonucleotide
  Sense strand starting at position 274 of SEQ ID NO: 915493
ugguucuaugaguauucua

SEQ ID NO: 1083915 - RNA, 19 nt, Artificial Sequence
  Description of Artificial Sequence: Synthetic oligonucleotide
  Antisense strand to SEQ ID NO: 1083914
uagaauacucauagaacca

SEQ ID NO: 1083916 - RNA, 19 nt, Artificial Sequence
  Description of Artificial Sequence: Synthetic oligonucleotide
  Sense strand starting at position 352 of SEQ ID NO: 915493
uaguuuaaugacuggcuga

SEQ ID NO: 1083917 - RNA, 19 nt, Artificial Sequence
  Description of Artificial Sequence: Synthetic oligonucleotide
  Antisense strand to SEQ ID NO: 1083916
ucagccagucauuaaacua

SEQ ID NO: 1083918 - RNA, 19 nt, Artificial Sequence
  Description of Artificial Sequence: Synthetic oligonucleotide
  Sense strand starting at position 355 of SEQ ID NO: 915493
uuuaaugacuggcugaguu

SEQ ID NO: 1083919 - RNA, 19 nt, Artificial Sequence
  Description of Artificial Sequence: Synthetic oligonucleotide
  Antisense strand to SEQ ID NO: 1083918
aacucagccagucauuaaa

SEQ ID NO: 1083920 - RNA, 19 nt, Artificial Sequence
  Description of Artificial Sequence: Synthetic oligonucleotide
  Sense strand starting at position 359 of SEQ ID NO: 915493
augacuggcugaguuugaa

SEQ ID NO: 1083921 - RNA, 19 nt, Artificial Sequence
  Description of Artificial Sequence: Synthetic oligonucleotide
  Antisense strand to SEQ ID NO: 1083920
uucaaacucagccagucau

SEQ ID NO: 1083922 - RNA, 19 nt, Artificial Sequence
  Description of Artificial Sequence: Synthetic oligonucleotide
  Sense strand starting at position 371 of SEQ ID NO: 915493
guuugaauuccucagugau

SEQ ID NO: 1083923 - RNA, 19 nt, Artificial Sequence
  Description of Artificial Sequence: Synthetic oligonucleotide
  Antisense strand to SEQ ID NO: 1083922
aucacugaggaauucaaac

SEQ ID NO: 1083924 - RNA, 19 nt, Artificial Sequence
  Description of Artificial Sequence: Synthetic oligonucleotide
  Sense strand starting at position 374 of SEQ ID NO: 915493
ugaauuccucagugauccu

SEQ ID NO: 1083925 - RNA, 19 nt, Artificial Sequence
  Description of Artificial Sequence: Synthetic oligonucleotide
  Antisense strand to SEQ ID NO: 1083924
aggaucacugaggaauuca

SEQ ID NO: 1083926 - RNA, 19 nt, Artificial Sequence
  Description of Artificial Sequence: Synthetic oligonucleotide
  Sense strand starting at position 377 of SEQ ID NO: 915493
auuccucagugauccuuua

SEQ ID NO: 1083927 - RNA, 19 nt, Artificial Sequence
  Description of Artificial Sequence: Synthetic oligonucleotide
  Antisense strand to SEQ ID NO: 1083926
uaaaggaucacugaggaau

SEQ ID NO: 1083928 - RNA, 19 nt, Artificial Sequence
  Description of Artificial Sequence: Synthetic oligonucleotide
  Sense strand starting at position 515 of SEQ ID NO: 915493
ucauuaaggucacugugaa

SEQ ID NO: 1083929 - RNA, 19 nt, Artificial Sequence
  Description of Artificial Sequence: Synthetic oligonucleotide
  Antisense strand to SEQ ID NO: 1083928
uucacagugaccuuaauga

SEQ ID NO: 1083930 - RNA, 19 nt, Artificial Sequence
  Description of Artificial Sequence: Synthetic oligonucleotide
  Sense strand starting at position 516 of SEQ ID NO: 915493
cauuaaggucacugugaaa

SEQ ID NO: 1083931 - RNA, 19 nt, Artificial Sequence
  Description of Artificial Sequence: Synthetic oligonucleotide
  Antisense strand to SEQ ID NO: 1083930
uuucacagugaccuuaaug

SEQ ID NO: 1083932 - RNA, 19 nt, Artificial Sequence
  Description of Artificial Sequence: Synthetic oligonucleotide
  Sense strand starting at position 527 of SEQ ID NO: 915493
cugugaaaccagcaugaca

SEQ ID NO: 1083933 - RNA, 19 nt, Artificial Sequence
  Description of Artificial Sequence: Synthetic oligonucleotide
  Antisense strand to SEQ ID NO: 1083932
ugucaugcugguuucacag

SEQ ID NO: 1083934 - RNA, 19 nt, Artificial Sequence
  Description of Artificial Sequence: Synthetic oligonucleotide
  Sense strand starting at position 589 of SEQ ID NO: 915493
gcgguacagagguaaauaa

SEQ ID NO: 1083935 - RNA, 19 nt, Artificial Sequence
  Description of Artificial Sequence: Synthetic oligonucleotide
  Antisense strand to SEQ ID NO: 1083934
uuauuuaccucuguaccgc

SEQ ID NO: 1083936 - RNA, 19 nt, Artificial Sequence
  Description of Artificial Sequence: Synthetic oligonucleotide
  Sense strand starting at position 662 of SEQ ID NO: 915493
gcuagaucugcacacaguu

SEQ ID NO: 1083937 - RNA, 19 nt, Artificial Sequence
  Description of Artificial Sequence: Synthetic oligonucleotide
  Antisense strand to SEQ ID NO: 1083936
aacugugugcagaucuagc

SEQ ID NO: 1083938 - RNA, 19 nt, Artificial Sequence
  Description of Artificial Sequence: Synthetic oligonucleotide
  Sense strand starting at position 676 of SEQ ID NO: 915493
caguuuacauucgcagaaa

SEQ ID NO: 1083939 - RNA, 19 nt, Artificial Sequence
  Description of Artificial Sequence: Synthetic oligonucleotide
  Antisense strand to SEQ ID NO: 1083938
uuucugcgaauguaaacug

SEQ ID NO: 1083940 - RNA, 19 nt, Artificial Sequence
  Description of Artificial Sequence: Synthetic oligonucleotide
  Sense strand starting at position 679 of SEQ ID NO: 915493
uuuacauucgcagaaacag

SEQ ID NO: 1083941 - RNA, 19 nt, Artificial Sequence
  Description of Artificial Sequence: Synthetic oligonucleotide
  Antisense strand to SEQ ID NO: 1083940
cuguuucugcgaauguaaa

SEQ ID NO: 1083942 - RNA, 19 nt, Artificial Sequence
  Description of Artificial Sequence: Synthetic oligonucleotide
  Sense strand starting at position 818 of SEQ ID NO: 915493
ugccguugccagagaugga

SEQ ID NO: 1083943 - RNA, 19 nt, Artificial Sequence
  Description of Artificial Sequence: Synthetic oligonucleotide
  Antisense strand to SEQ ID NO: 1083942
uccaucucuggcaacggca

SEQ ID NO: 1083944 - RNA, 19 nt, Artificial Sequence
  Description of Artificial Sequence: Synthetic oligonucleotide
  Sense strand starting at position 827 of SEQ ID NO: 915493
cagagauggagucggcuua

SEQ ID NO: 1083945 - RNA, 19 nt, Artificial Sequence
  Description of Artificial Sequence: Synthetic oligonucleotide
  Antisense strand to SEQ ID NO: 1083944
uaagccgacuccaucucug

SEQ ID NO: 1083946 - RNA, 19 nt, Artificial Sequence
  Description of Artificial Sequence: Synthetic oligonucleotide
  Sense strand starting at position 847 of SEQ ID NO: 915493
auuaaagucuggcuaugau

SEQ ID NO: 1083947 - RNA, 19 nt, Artificial Sequence
  Description of Artificial Sequence: Synthetic oligonucleotide
  Antisense strand to SEQ ID NO: 1083946
aucauagccagacuuuaau

SEQ ID NO: 1083948 - RNA, 19 nt, Artificial Sequence
  Description of Artificial Sequence: Synthetic oligonucleotide
  Sense strand starting at position 860 of SEQ ID NO: 915493
uaugauuuaugaggagauu

SEQ ID NO: 1083949 - RNA, 19 nt, Artificial Sequence
  Description of Artificial Sequence: Synthetic oligonucleotide
  Antisense strand to SEQ ID NO: 1083948
aaucuccucauaaaucaua

SEQ ID NO: 1083950 - RNA, 19 nt, Artificial Sequence
  Description of Artificial Sequence: Synthetic oligonucleotide
  Sense strand starting at position 904 of SEQ ID NO: 915493
cccuaaucucuuggaguuu

SEQ ID NO: 1083951 - RNA, 19 nt, Artificial Sequence
  Description of Artificial Sequence: Synthetic oligonucleotide
  Antisense strand to SEQ ID NO: 1083950
aaacuccaagagauuaggg

SEQ ID NO: 1083952 - RNA, 19 nt, Artificial Sequence
  Description of Artificial Sequence: Synthetic oligonucleotide
  Sense strand starting at position 1046 of SEQ ID NO: 915493
acaggucuucccuacggaa

SEQ ID NO: 1083953 - RNA, 19 nt, Artificial Sequence
  Description of Artificial Sequence: Synthetic oligonucleotide
  Antisense strand to SEQ ID NO: 1083952
uuccguagggaagaccugu

SEQ ID NO: 1083954 - RNA, 19 nt, Artificial Sequence
  Description of Artificial Sequence: Synthetic oligonucleotide
  Sense strand starting at position 1059 of SEQ ID NO: 915493
acggaaucucuuuguagga

SEQ ID NO: 1083955 - RNA, 19 nt, Artificial Sequence
  Description of Artificial Sequence: Synthetic oligonucleotide
  Antisense strand to SEQ ID NO: 1083954
uccuacaaagagauuccgu

SEQ ID NO: 1083956 - RNA, 19 nt, Artificial Sequence
  Description of Artificial Sequence: Synthetic oligonucleotide
  Sense strand starting at position 1060 of SEQ ID NO: 915493
cggaaucucuuuguaggaa

SEQ ID NO: 1083957 - RNA, 19 nt, Artificial Sequence
  Description of Artificial Sequence: Synthetic oligonucleotide
  Antisense strand to SEQ ID NO: 1083956
uuccuacaaagagauuccg

SEQ ID NO: 1083958 - RNA, 19 nt, Artificial Sequence
  Description of Artificial Sequence: Synthetic oligonucleotide
  Sense strand starting at position 1095 of SEQ ID NO: 915493
ccuaaagggccuugaauga

SEQ ID NO: 1083959 - RNA, 19 nt, Artificial Sequence
  Description of Artificial Sequence: Synthetic oligonucleotide
  Antisense strand to SEQ ID NO: 1083958
ucauucaaggcccuuuagg

SEQ ID NO: 1083960 - RNA, 19 nt, Artificial Sequence
  Description of Artificial Sequence: Synthetic oligonucleotide
  Sense strand starting at position 2283 of SEQ ID NO: 915493
gccaauuaggagcauaguu

SEQ ID NO: 1083961 - RNA, 19 nt, Artificial Sequence
  Description of Artificial Sequence: Synthetic oligonucleotide
  Antisense strand to SEQ ID NO: 1083960
aacuaugcuccuaauuggc

SEQ ID NO: 1083962 - RNA, 19 nt, Artificial Sequence
  Description of Artificial Sequence: Synthetic oligonucleotide
  Sense strand starting at position 2877 of SEQ ID NO: 915493
ggaggaguccagggugaca

SEQ ID NO: 1083963 - RNA, 19 nt, Artificial Sequence
  Description of Artificial Sequence: Synthetic oligonucleotide
  Antisense strand to SEQ ID NO: 1083962
ugucacccuggacuccucc

SEQ ID NO: 1083964 - RNA, 19 nt, Artificial Sequence
  Description of Artificial Sequence: Synthetic oligonucleotide
  Sense strand starting at position 3223 of SEQ ID NO: 915493
gcugaaugucuguuugcuu

SEQ ID NO: 1083965 - RNA, 19 nt, Artificial Sequence
  Description of Artificial Sequence: Synthetic oligonucleotide
  Antisense strand to SEQ ID NO: 1083964
aagcaaacagacauucagc

SEQ ID NO: 1083966 - RNA, 19 nt, Artificial Sequence
  Description of Artificial Sequence: Synthetic oligonucleotide
  Sense strand starting at position 3313 of SEQ ID NO: 915493
uauggcuuugagcaaguua

SEQ ID NO: 1083967 - RNA, 19 nt, Artificial Sequence
  Description of Artificial Sequence: Synthetic oligonucleotide
  Antisense strand to SEQ ID NO: 1083966
uaacuugcucaaagccaua

SEQ ID NO: 1083968 - RNA, 19 nt, Artificial Sequence
  Description of Artificial Sequence: Synthetic oligonucleotide
  Sense strand starting at position 3372 of SEQ ID NO: 915493
uggugaaugcaaugauauu

SEQ ID NO: 1083969 - RNA, 19 nt, Artificial Sequence
  Description of Artificial Sequence: Synthetic oligonucleotide
  Antisense strand to SEQ ID NO: 1083968
aauaucauugcauucacca

SEQ ID NO: 1083970 - RNA, 19 nt, Artificial Sequence
  Description of Artificial Sequence: Synthetic oligonucleotide
  Sense strand starting at position 3394 of SEQ ID NO: 915493
cuccuaggcuuauuaagag

SEQ ID NO: 1083971 - RNA, 19 nt, Artificial Sequence
  Description of Artificial Sequence: Synthetic oligonucleotide
  Antisense strand to SEQ ID NO: 1083970
cucuuaauaagccuaggag

SEQ ID NO: 1083972 - RNA, 19 nt, Artificial Sequence
  Description of Artificial Sequence: Synthetic oligonucleotide
  Sense strand starting at position 3402 of SEQ ID NO: 915493
cuuauuaagagcgauguua

SEQ ID NO: 1083973 - RNA, 19 nt, Artificial Sequence
  Description of Artificial Sequence: Synthetic oligonucleotide
  Antisense strand to SEQ ID NO: 1083972
uaacaucgcucuuaauaag

SEQ ID NO: 1083974 - RNA, 19 nt, Artificial Sequence
  Description of Artificial Sequence: Synthetic oligonucleotide
  Sense strand starting at position 3571 of SEQ ID NO: 915493
uagacuguacuccagguau

SEQ ID NO: 1083975 - RNA, 19 nt, Artificial Sequence
  Description of Artificial Sequence: Synthetic oligonucleotide
  Antisense strand to SEQ ID NO: 1083974
auaccuggaguacagucua

SEQ ID NO: 1083976 - RNA, 19 nt, Artificial Sequence
  Description of Artificial Sequence: Synthetic oligonucleotide
  Sense strand starting at position 3573 of SEQ ID NO: 915493
gacuguacuccagguauca

SEQ ID NO: 1083977 - RNA, 19 nt, Artificial Sequence
  Description of Artificial Sequence: Synthetic oligonucleotide
  Antisense strand to SEQ ID NO: 1083976
ugauaccuggaguacaguc

SEQ ID NO: 1083978 - RNA, 19 nt, Artificial Sequence
  Description of Artificial Sequence: Synthetic oligonucleotide
  Sense strand starting at position 3772 of SEQ ID NO: 915493
gaguguguaccagagaaug

SEQ ID NO: 1083979 - RNA, 19 nt, Artificial Sequence
  Description of Artificial Sequence: Synthetic oligonucleotide
  Antisense strand to SEQ ID NO: 1083978
cauucucugguacacacuc

SEQ ID NO: 1083980 - RNA, 19 nt, Artificial Sequence
  Description of Artificial Sequence: Synthetic oligonucleotide
  Sense strand starting at position 3876 of SEQ ID NO: 915493
acacuuuguuauccugauu

SEQ ID NO: 1083981 - RNA, 19 nt, Artificial Sequence
  Description of Artificial Sequence: Synthetic oligonucleotide
  Antisense strand to SEQ ID NO: 1083980
aaucaggauaacaaagugu

SEQ ID NO: 1083982 - RNA, 19 nt, Artificial Sequence
  Description of Artificial Sequence: Synthetic oligonucleotide
  Sense strand starting at position 3925 of SEQ ID NO: 915493
guaccuuugcuccaggacu

SEQ ID NO: 1083983 - RNA, 19 nt, Artificial Sequence
  Description of Artificial Sequence: Synthetic oligonucleotide
  Antisense strand to SEQ ID NO: 1083982
aguccuggagcaaagguac

SEQ ID NO: 1083984 - RNA, 19 nt, Artificial Sequence
  Description of Artificial Sequence: Synthetic oligonucleotide
  Sense strand starting at position 16 of SEQ ID NO: 915494
uggaauacccaaugguauu

SEQ ID NO: 1083985 - RNA, 19 nt, Artificial Sequence
  Description of Artificial Sequence: Synthetic oligonucleotide
  Antisense strand to SEQ ID NO: 1083984
aauaccauuggguauucca

SEQ ID NO: 1083986 - RNA, 19 nt, Artificial Sequence
  Description of Artificial Sequence: Synthetic oligonucleotide
  Sense strand starting at position 355 of SEQ ID NO: 915494
acugcauacgucuaucaac

SEQ ID NO: 1083987 - RNA, 19 nt, Artificial Sequence
  Description of Artificial Sequence: Synthetic oligonucleotide
  Antisense strand to SEQ ID NO: 1083986
guugauagacguaugcagu

SEQ ID NO: 1083988 - RNA, 19 nt, Artificial Sequence
  Description of Artificial Sequence: Synthetic oligonucleotide
  Sense strand starting at position 394 of SEQ ID NO: 915494
cguggugcuggagauuauu

SEQ ID NO: 1083989 - RNA, 19 nt, Artificial Sequence
  Description of Artificial Sequence: Synthetic oligonucleotide
  Antisense strand to SEQ ID NO: 1083988
aauaaucuccagcaccacg

SEQ ID NO: 1083990 - RNA, 19 nt, Artificial Sequence
  Description of Artificial Sequence: Synthetic oligonucleotide
  Sense strand starting at position 400 of SEQ ID NO: 915494
gcuggagauuauucuccuu

SEQ ID NO: 1083991 - RNA, 19 nt, Artificial Sequence
  Description of Artificial Sequence: Synthetic oligonucleotide
  Antisense strand to SEQ ID NO: 1083990
aaggagaauaaucuccagc

SEQ ID NO: 1083992 - RNA, 19 nt, Artificial Sequence
  Description of Artificial Sequence: Synthetic oligonucleotide
  Sense strand starting at position 427 of SEQ ID NO: 915494
ucacauggcagguguauuu

SEQ ID NO: 1083993 - RNA, 19 nt, Artificial Sequence
  Description of Artificial Sequence: Synthetic oligonucleotide
  Antisense strand to SEQ ID NO: 1083992
aaauacaccugccauguga

SEQ ID NO: 1083994 - RNA, 19 nt, Artificial Sequence
  Description of Artificial Sequence: Synthetic oligonucleotide
  Sense strand starting at position 469 of SEQ ID NO: 915494
cccucagcacaauggaaau

SEQ ID NO: 1083995 - RNA, 19 nt, Artificial Sequence
  Description of Artificial Sequence: Synthetic oligonucleotide
  Antisense strand to SEQ ID NO: 1083994
auuuccauugugcugaggg

SEQ ID NO: 1083996 - RNA, 19 nt, Artificial Sequence
  Description of Artificial Sequence: Synthetic oligonucleotide
  Sense strand starting at position 475 of SEQ ID NO: 915494
gcacaauggaaauguuguu

SEQ ID NO: 1083997 - RNA, 19 nt, Artificial Sequence
  Description of Artificial Sequence: Synthetic oligonucleotide
  Antisense strand to SEQ ID NO: 1083996
aacaacauuuccauugugc

SEQ ID NO: 1083998 - RNA, 19 nt, Artificial Sequence
  Description of Artificial Sequence: Synthetic oligonucleotide
  Sense strand starting at position 493 of SEQ ID NO: 915494
ucaucuucuccuuaguaga

SEQ ID NO: 1083999 - RNA, 19 nt, Artificial Sequence
  Description of Artificial Sequence: Synthetic oligonucleotide
  Antisense strand to SEQ ID NO: 1083998
ucuacuaaggagaagauga

SEQ ID NO: 1084000 - RNA, 19 nt, Artificial Sequence
  Description of Artificial Sequence: Synthetic oligonucleotide
  Sense strand starting at position 516 of SEQ ID NO: 915494
accagagugaugcggucau

SEQ ID NO: 1084001 - RNA, 19 nt, Artificial Sequence
  Description of Artificial Sequence: Synthetic oligonucleotide
  Antisense strand to SEQ ID NO: 1084000
augaccgcaucacucuggu

SEQ ID NO: 1084002 - RNA, 19 nt, Artificial Sequence
  Description of Artificial Sequence: Synthetic oligonucleotide
  Sense strand starting at position 519 of SEQ ID NO: 915494
agagugaugcggucaucgu

SEQ ID NO: 1084003 - RNA, 19 nt, Artificial Sequence
  Description of Artificial Sequence: Synthetic oligonucleotide
  Antisense strand to SEQ ID NO: 1084002
acgaugaccgcaucacucu

SEQ ID NO: 1084004 - RNA, 19 nt, Artificial Sequence
  Description of Artificial Sequence: Synthetic oligonucleotide
  Sense strand starting at position 526 of SEQ ID NO: 915494
ugcggucaucgucuuucaa

SEQ ID NO: 1084005 - RNA, 19 nt, Artificial Sequence
  Description of Artificial Sequence: Synthetic oligonucleotide
  Antisense strand to SEQ ID NO: 1084004
uugaaagacgaugaccgca

SEQ ID NO: 1084006 - RNA, 19 nt, Artificial Sequence
  Description of Artificial Sequence: Synthetic oligonucleotide
  Sense strand starting at position 527 of SEQ ID NO: 915494
gcggucaucgucuuucaac

SEQ ID NO: 1084007 - RNA, 19 nt, Artificial Sequence
  Description of Artificial Sequence: Synthetic oligonucleotide
  Antisense strand to SEQ ID NO: 1084006
guugaaagacgaugaccgc

SEQ ID NO: 1084008 - RNA, 19 nt, Artificial Sequence
  Description of Artificial Sequence: Synthetic oligonucleotide
  Sense strand starting at position 529 of SEQ ID NO: 915494
ggucaucgucuuucaacgu

SEQ ID NO: 1084009 - RNA, 19 nt, Artificial Sequence
  Description of Artificial Sequence: Synthetic oligonucleotide
  Antisense strand to SEQ ID NO: 1084008
acguugaaagacgaugacc

SEQ ID NO: 1084010 - RNA, 19 nt, Artificial Sequence
  Description of Artificial Sequence: Synthetic oligonucleotide
  Sense strand starting at position 555 of SEQ ID NO: 915494
gggucagacuucucauucu

SEQ ID NO: 1084011 - RNA, 19 nt, Artificial Sequence
  Description of Artificial Sequence: Synthetic oligonucleotide
  Antisense strand to SEQ ID NO: 1084010
agaaugagaagucugaccc

SEQ ID NO: 1084012 - RNA, 19 nt, Artificial Sequence
  Description of Artificial Sequence: Synthetic oligonucleotide
  Sense strand starting at position 616 of SEQ ID NO: 915494
ugagaaaguagccgagaaa

SEQ ID NO: 1084013 - RNA, 19 nt, Artificial Sequence
  Description of Artificial Sequence: Synthetic oligonucleotide
  Antisense strand to SEQ ID NO: 1084012
uuucucggcuacuuucuca

SEQ ID NO: 1084014 - RNA, 19 nt, Artificial Sequence
  Description of Artificial Sequence: Synthetic oligonucleotide
  Sense strand starting at position 769 of SEQ ID NO: 915494
cugccugucuaaccugaau

SEQ ID NO: 1084015 - RNA, 19 nt, Artificial Sequence
  Description of Artificial Sequence: Synthetic oligonucleotide
  Antisense strand to SEQ ID NO: 1084014
auucagguuagacaggcag

SEQ ID NO: 1084016 - RNA, 19 nt, Artificial Sequence
  Description of Artificial Sequence: Synthetic oligonucleotide
  Sense strand starting at position 819 of SEQ ID NO: 915494
uuauuaaggucucccugga

SEQ ID NO: 1084017 - RNA, 19 nt, Artificial Sequence
  Description of Artificial Sequence: Synthetic oligonucleotide
  Antisense strand to SEQ ID NO: 1084016
uccagggagaccuuaauaa

SEQ ID NO: 1084018 - RNA, 19 nt, Artificial Sequence
  Description of Artificial Sequence: Synthetic oligonucleotide
  Sense strand starting at position 978 of SEQ ID NO: 915494
cugucaagaccuggaucaa

SEQ ID NO: 1084019 - RNA, 19 nt, Artificial Sequence
  Description of Artificial Sequence: Synthetic oligonucleotide
  Antisense strand to SEQ ID NO: 1084018
uugauccaggucuugacag

SEQ ID NO: 1084020 - RNA, 19 nt, Artificial Sequence
  Description of Artificial Sequence: Synthetic oligonucleotide
  Sense strand starting at position 990 of SEQ ID NO: 915494
ggaucaaucccacagcucu

SEQ ID NO: 1084021 - RNA, 19 nt, Artificial Sequence
  Description of Artificial Sequence: Synthetic oligonucleotide
  Antisense strand to SEQ ID NO: 1084020
agagcugugggauugaucc

SEQ ID NO: 1084022 - RNA, 19 nt, Artificial Sequence
  Description of Artificial Sequence: Synthetic oligonucleotide
  Sense strand starting at position 1104 of SEQ ID NO: 915494
auuguagagugaguacaau

SEQ ID NO: 1084023 - RNA, 19 nt, Artificial Sequence
  Description of Artificial Sequence: Synthetic oligonucleotide
  Antisense strand to SEQ ID NO: 1084022
auuguacucacucuacaau

SEQ ID NO: 1084024 - RNA, 19 nt, Artificial Sequence
  Description of Artificial Sequence: Synthetic oligonucleotide
  Sense strand starting at position 1446 of SEQ ID NO: 915494
aaagaauacugggagaaag

SEQ ID NO: 1084025 - RNA, 19 nt, Artificial Sequence
  Description of Artificial Sequence: Synthetic oligonucleotide
  Antisense strand to SEQ ID NO: 1084024
cuuucucccaguauucuuu

SEQ ID NO: 1084026 - RNA, 19 nt, Artificial Sequence
  Description of Artificial Sequence: Synthetic oligonucleotide
  Sense strand starting at position 1750 of SEQ ID NO: 915494
caggaagaggccuguguaa

SEQ ID NO: 1084027 - RNA, 19 nt, Artificial Sequence
  Description of Artificial Sequence: Synthetic oligonucleotide
  Antisense strand to SEQ ID NO: 1084026
uuacacaggccucuuccug

SEQ ID NO: 1084028 - RNA, 19 nt, Artificial Sequence
  Description of Artificial Sequence: Synthetic oligonucleotide
  Sense strand starting at position 2535 of SEQ ID NO: 915494
ugggaaagucaguggcaga

SEQ ID NO: 1084029 - RNA, 19 nt, Artificial Sequence
  Description of Artificial Sequence: Synthetic oligonucleotide
  Antisense strand to SEQ ID NO: 1084028
ucugccacugacuuuccca

SEQ ID NO: 1084030 - RNA, 19 nt, Artificial Sequence
  Description of Artificial Sequence: Synthetic oligonucleotide
  Sense strand starting at position 2536 of SEQ ID NO: 915494
gggaaagucaguggcagaa

SEQ ID NO: 1084031 - RNA, 19 nt, Artificial Sequence
  Description of Artificial Sequence: Synthetic oligonucleotide
  Antisense strand to SEQ ID NO: 1084030
uucugccacugacuuuccc

SEQ ID NO: 1084032 - RNA, 19 nt, Artificial Sequence
  Description of Artificial Sequence: Synthetic oligonucleotide
  Sense strand starting at position 3000 of SEQ ID NO: 915494
cccucuguugucuaacuua

SEQ ID NO: 1084033 - RNA, 19 nt, Artificial Sequence
  Description of Artificial Sequence: Synthetic oligonucleotide
  Antisense strand to SEQ ID NO: 1084032
uaaguuagacaacagaggg

SEQ ID NO: 1084034 - RNA, 19 nt, Artificial Sequence
  Description of Artificial Sequence: Synthetic oligonucleotide
  Sense strand starting at position 3003 of SEQ ID NO: 915494
ucuguugucuaacuuaauu

SEQ ID NO: 1084035 - RNA, 19 nt, Artificial Sequence
  Description of Artificial Sequence: Synthetic oligonucleotide
  Antisense strand to SEQ ID NO: 1084034
aauuaaguuagacaacaga

SEQ ID NO: 1084036 - RNA, 19 nt, Artificial Sequence
  Description of Artificial Sequence: Synthetic oligonucleotide
  Sense strand starting at position 3239 of SEQ ID NO: 915494
ggccauugucgcuaacaau

SEQ ID NO: 1084037 - RNA, 19 nt, Artificial Sequence
  Description of Artificial Sequence: Synthetic oligonucleotide
  Antisense strand to SEQ ID NO: 1084036
auuguuagcgacaauggcc

SEQ ID NO: 1084038 - RNA, 19 nt, Artificial Sequence
  Description of Artificial Sequence: Synthetic oligonucleotide
  Sense strand starting at position 3256 of SEQ ID NO: 915494
auaguacuagcugauauua

SEQ ID NO: 1084039 - RNA, 19 nt, Artificial Sequence
  Description of Artificial Sequence: Synthetic oligonucleotide
  Antisense strand to SEQ ID NO: 1084038
uaauaucagcuaguacuau

SEQ ID NO: 1084040 - RNA, 19 nt, Artificial Sequence
  Description of Artificial Sequence: Synthetic oligonucleotide
  Sense strand starting at position 3264 of SEQ ID NO: 915494
agcugauauuaacugagca

SEQ ID NO: 1084041 - RNA, 19 nt, Artificial Sequence
  Description of Artificial Sequence: Synthetic oligonucleotide
  Antisense strand to SEQ ID NO: 1084040
ugcucaguuaauaucagcu

SEQ ID NO: 1084042 - RNA, 19 nt, Artificial Sequence
  Description of Artificial Sequence: Synthetic oligonucleotide
  Sense strand starting at position 3334 of SEQ ID NO: 915494
guacuauuauagguccaca

SEQ ID NO: 1084043 - RNA, 19 nt, Artificial Sequence
  Description of Artificial Sequence: Synthetic oligonucleotide
  Antisense strand to SEQ ID NO: 1084042
uguggaccuauaauaguac

SEQ ID NO: 1084044 - RNA, 19 nt, Artificial Sequence
  Description of Artificial Sequence: Synthetic oligonucleotide
  Sense strand starting at position 3337 of SEQ ID NO: 915494
cuauuauagguccacauug

SEQ ID NO: 1084045 - RNA, 19 nt, Artificial Sequence
  Description of Artificial Sequence: Synthetic oligonucleotide
  Antisense strand to SEQ ID NO: 1084044
caauguggaccuauaauag

SEQ ID NO: 1084046 - RNA, 19 nt, Artificial Sequence
  Description of Artificial Sequence: Synthetic oligonucleotide
  Sense strand starting at position 3339 of SEQ ID NO: 915494
auuauagguccacauugua

SEQ ID NO: 1084047 - RNA, 19 nt, Artificial Sequence
  Description of Artificial Sequence: Synthetic oligonucleotide
  Antisense strand to SEQ ID NO: 1084046
uacaauguggaccuauaau

SEQ ID NO: 1084048 - RNA, 19 nt, Artificial Sequence
  Description of Artificial Sequence: Synthetic oligonucleotide
  Sense strand starting at position 3348 of SEQ ID NO: 915494
ccacauuguaggugagaca

SEQ ID NO: 1084049 - RNA, 19 nt, Artificial Sequence
  Description of Artificial Sequence: Synthetic oligonucleotide
  Antisense strand to SEQ ID NO: 1084048
ugucucaccuacaaugugg

SEQ ID NO: 1084050 - RNA, 19 nt, Artificial Sequence
  Description of Artificial Sequence: Synthetic oligonucleotide
  Sense strand starting at position 3426 of SEQ ID NO: 915494
ccaauuagugcugggaagu

SEQ ID NO: 1084051 - RNA, 19 nt, Artificial Sequence
  Description of Artificial Sequence: Synthetic oligonucleotide
  Antisense strand to SEQ ID NO: 1084050
acuucccagcacuaauugg

SEQ ID NO: 1084052 - RNA, 19 nt, Artificial Sequence
  Description of Artificial Sequence: Synthetic oligonucleotide
  Sense strand starting at position 3427 of SEQ ID NO: 915494
caauuagugcugggaaguu

SEQ ID NO: 1084053 - RNA, 19 nt, Artificial Sequence
  Description of Artificial Sequence: Synthetic oligonucleotide
  Antisense strand to SEQ ID NO: 1084052
aacuucccagcacuaauug

SEQ ID NO: 1084054 - RNA, 19 nt, Artificial Sequence
  Description of Artificial Sequence: Synthetic oligonucleotide
  Sense strand starting at position 3501 of SEQ ID NO: 915494
uuguucuagagccaugguu

SEQ ID NO: 1084055 - RNA, 19 nt, Artificial Sequence
  Description of Artificial Sequence: Synthetic oligonucleotide
  Antisense strand to SEQ ID NO: 1084054
aaccauggcucuagaacaa

SEQ ID NO: 1084056 - RNA, 19 nt, Artificial Sequence
  Description of Artificial Sequence: Synthetic oligonucleotide
  Sense strand starting at position 3628 of SEQ ID NO: 915494
ucgagaaaguucccaggga

SEQ ID NO: 1084057 - RNA, 19 nt, Artificial Sequence
  Description of Artificial Sequence: Synthetic oligonucleotide
  Antisense strand to SEQ ID NO: 1084056
ucccugggaacuuucucga

SEQ ID NO: 1084058 - RNA, 19 nt, Artificial Sequence
  Description of Artificial Sequence: Synthetic oligonucleotide
  Sense strand starting at position 3684 of SEQ ID NO: 915494
gcgagaggauuugugcaua

SEQ ID NO: 1084059 - RNA, 19 nt, Artificial Sequence
  Description of Artificial Sequence: Synthetic oligonucleotide
  Antisense strand to SEQ ID NO: 1084058
uaugcacaaauccucucgc

SEQ ID NO: 1084060 - RNA, 19 nt, Artificial Sequence
  Description of Artificial Sequence: Synthetic oligonucleotide
  Sense strand starting at position 3716 of SEQ ID NO: 915494
uuauuagaaugcucaaagg

SEQ ID NO: 1084061 - RNA, 19 nt, Artificial Sequence
  Description of Artificial Sequence: Synthetic oligonucleotide
  Antisense strand to SEQ ID NO: 1084060
ccuuugagcauucuaauaa

SEQ ID NO: 1084062 - RNA, 19 nt, Artificial Sequence
  Description of Artificial Sequence: Synthetic oligonucleotide
  Sense strand starting at position 3802 of SEQ ID NO: 915494
cagaguaaauggugaauuu

SEQ ID NO: 1084063 - RNA, 19 nt, Artificial Sequence
  Description of Artificial Sequence: Synthetic oligonucleotide
  Antisense strand to SEQ ID NO: 1084062
aaauucaccauuuacucug

SEQ ID NO: 1084064 - RNA, 19 nt, Artificial Sequence
  Description of Artificial Sequence: Synthetic oligonucleotide
  Sense strand starting at position 344 of SEQ ID NO: 915495
gccuuagugacugaggcua

SEQ ID NO: 1084065 - RNA, 19 nt, Artificial Sequence
  Description of Artificial Sequence: Synthetic oligonucleotide
  Antisense strand to SEQ ID NO: 1084064
uagccucagucacuaaggc

SEQ ID NO: 1084066 - RNA, 19 nt, Artificial Sequence
  Description of Artificial Sequence: Synthetic oligonucleotide
  Sense strand starting at position 898 of SEQ ID NO: 915495
cccagaauguuuccuaaug

SEQ ID NO: 1084067 - RNA, 19 nt, Artificial Sequence
  Description of Artificial Sequence: Synthetic oligonucleotide
  Antisense strand to SEQ ID NO: 1084066
cauuaggaaacauucuggg

SEQ ID NO: 1084068 - RNA, 19 nt, Artificial Sequence
  Description of Artificial Sequence: Synthetic oligonucleotide
  Sense strand starting at position 900 of SEQ ID NO: 915495
cagaauguuuccuaaugga

SEQ ID NO: 1084069 - RNA, 19 nt, Artificial Sequence
  Description of Artificial Sequence: Synthetic oligonucleotide
  Antisense strand to SEQ ID NO: 1084068
uccauuaggaaacauucug

SEQ ID NO: 1084070 - RNA, 19 nt, Artificial Sequence
  Description of Artificial Sequence: Synthetic oligonucleotide
  Sense strand starting at position 943 of SEQ ID NO: 915495
gcaguacuuagucgaggua

SEQ ID NO: 1084071 - RNA, 19 nt, Artificial Sequence
  Description of Artificial Sequence: Synthetic oligonucleotide
  Antisense strand to SEQ ID NO: 1084070
uaccucgacuaaguacugc

SEQ ID NO: 1084072 - RNA, 19 nt, Artificial Sequence
  Description of Artificial Sequence: Synthetic oligonucleotide
  Sense strand starting at position 946 of SEQ ID NO: 915495
guacuuagucgagguacag

SEQ ID NO: 1084073 - RNA, 19 nt, Artificial Sequence
  Description of Artificial Sequence: Synthetic oligonucleotide
  Antisense strand to SEQ ID NO: 1084072
cuguaccucgacuaaguac

SEQ ID NO: 1084074 - RNA, 19 nt, Artificial Sequence
  Description of Artificial Sequence: Synthetic oligonucleotide
  Sense strand starting at position 1139 of SEQ ID NO: 915495
gggucugauuccuccuuua

SEQ ID NO: 1084075 - RNA, 19 nt, Artificial Sequence
  Description of Artificial Sequence: Synthetic oligonucleotide
  Antisense strand to SEQ ID NO: 1084074
uaaaggaggaaucagaccc

SEQ ID NO: 1084076 - RNA, 19 nt, Artificial Sequence
  Description of Artificial Sequence: Synthetic oligonucleotide
  Sense strand starting at position 1289 of SEQ ID NO: 915495
gcgccagcugguucugaaa

SEQ ID NO: 1084077 - RNA, 19 nt, Artificial Sequence
  Description of Artificial Sequence: Synthetic oligonucleotide
  Antisense strand to SEQ ID NO: 1084076
uuucagaaccagcuggcgc

SEQ ID NO: 1084078 - RNA, 19 nt, Artificial Sequence
  Description of Artificial Sequence: Synthetic oligonucleotide
  Sense strand starting at position 1773 of SEQ ID NO: 915495
ggcugagcucgcuggugaa

SEQ ID NO: 1084079 - RNA, 19 nt, Artificial Sequence
  Description of Artificial Sequence: Synthetic oligonucleotide
  Antisense strand to SEQ ID NO: 1084078
uucaccagcgagcucagcc

SEQ ID NO: 1084080 - RNA, 19 nt, Artificial Sequence
  Description of Artificial Sequence: Synthetic oligonucleotide
  Sense strand starting at position 1787 of SEQ ID NO: 915495
gugaacgucccgucugagu

SEQ ID NO: 1084081 - RNA, 19 nt, Artificial Sequence
  Description of Artificial Sequence: Synthetic oligonucleotide
  Antisense strand to SEQ ID NO: 1084080
acucagacgggacguucac

SEQ ID NO: 1084082 - RNA, 19 nt, Artificial Sequence
  Description of Artificial Sequence: Synthetic oligonucleotide
  Sense strand starting at position 2365 of SEQ ID NO: 915495
gcgaguucgucuccagcuu

SEQ ID NO: 1084083 - RNA, 19 nt, Artificial Sequence
  Description of Artificial Sequence: Synthetic oligonucleotide
  Antisense strand to SEQ ID NO: 1084082
aagcuggagacgaacucgc

SEQ ID NO: 1084084 - RNA, 19 nt, Artificial Sequence
  Description of Artificial Sequence: Synthetic oligonucleotide
  Sense strand starting at position 2429 of SEQ ID NO: 915495
cuuugaagugcgcgauuca

SEQ ID NO: 1084085 - RNA, 19 nt, Artificial Sequence
  Description of Artificial Sequence: Synthetic oligonucleotide
  Antisense strand to SEQ ID NO: 1084084
ugaaucgcgcacuucaaag

SEQ ID NO: 1084086 - RNA, 19 nt, Artificial Sequence
  Description of Artificial Sequence: Synthetic oligonucleotide
  Sense strand starting at position 2892 of SEQ ID NO: 915495
ccuguccucccagaaugaa

SEQ ID NO: 1084087 - RNA, 19 nt, Artificial Sequence
  Description of Artificial Sequence: Synthetic oligonucleotide
  Antisense strand to SEQ ID NO: 1084086
uucauucugggaggacagg

SEQ ID NO: 1084088 - RNA, 19 nt, Artificial Sequence
  Description of Artificial Sequence: Synthetic oligonucleotide
  Sense strand starting at position 3092 of SEQ ID NO: 915495
gugggaaucuccuucccuu

SEQ ID NO: 1084089 - RNA, 19 nt, Artificial Sequence
  Description of Artificial Sequence: Synthetic oligonucleotide
  Antisense strand to SEQ ID NO: 1084088
aagggaaggagauucccac

SEQ ID NO: 1084090 - RNA, 19 nt, Artificial Sequence
  Description of Artificial Sequence: Synthetic oligonucleotide
  Sense strand starting at position 3216 of SEQ ID NO: 915495
gcgaguaacgcugcuguga

SEQ ID NO: 1084091 - RNA, 19 nt, Artificial Sequence
  Description of Artificial Sequence: Synthetic oligonucleotide
  Antisense strand to SEQ ID NO: 1084090
ucacagcagcguuacucgc

SEQ ID NO: 1084092 - RNA, 19 nt, Artificial Sequence
  Description of Artificial Sequence: Synthetic oligonucleotide
  Sense strand starting at position 3217 of SEQ ID NO: 915495
cgaguaacgcugcugugaa

SEQ ID NO: 1084093 - RNA, 19 nt, Artificial Sequence
  Description of Artificial Sequence: Synthetic oligonucleotide
  Antisense strand to SEQ ID NO: 1084092
uucacagcagcguuacucg

SEQ ID NO: 1084094 - RNA, 19 nt, Artificial Sequence
  Description of Artificial Sequence: Synthetic oligonucleotide
  Sense strand starting at position 3271 of SEQ ID NO: 915495
ucaagcguucuugguguau

SEQ ID NO: 1084095 - RNA, 19 nt, Artificial Sequence
  Description of Artificial Sequence: Synthetic oligonucleotide
  Antisense strand to SEQ ID NO: 1084094
auacaccaagaacgcuuga

SEQ ID NO: 1084096 - RNA, 19 nt, Artificial Sequence
  Description of Artificial Sequence: Synthetic oligonucleotide
  Sense strand starting at position 3274 of SEQ ID NO: 915495
agcguucuugguguauagu

SEQ ID NO: 1084097 - RNA, 19 nt, Artificial Sequence
  Description of Artificial Sequence: Synthetic oligonucleotide
  Antisense strand to SEQ ID NO: 1084096
acuauacaccaagaacgcu

SEQ ID NO: 1084098 - RNA, 19 nt, Artificial Sequence
  Description of Artificial Sequence: Synthetic oligonucleotide
  Sense strand starting at position 3275 of SEQ ID NO: 915495
gcguucuugguguauaguu

SEQ ID NO: 1084099 - RNA, 19 nt, Artificial Sequence
  Description of Artificial Sequence: Synthetic oligonucleotide
  Antisense strand to SEQ ID NO: 1084098
aacuauacaccaagaacgc

SEQ ID NO: 1084100 - RNA, 19 nt, Artificial Sequence
  Description of Artificial Sequence: Synthetic oligonucleotide
  Sense strand starting at position 3277 of SEQ ID NO: 915495
guucuugguguauaguuau

SEQ ID NO: 1084101 - RNA, 19 nt, Artificial Sequence
  Description of Artificial Sequence: Synthetic oligonucleotide
  Antisense strand to SEQ ID NO: 1084100
auaacuauacaccaagaac

SEQ ID NO: 1084102 - RNA, 19 nt, Artificial Sequence
  Description of Artificial Sequence: Synthetic oligonucleotide
  Sense strand starting at position 3283 of SEQ ID NO: 915495
gguguauaguuaugaggga

SEQ ID NO: 1084103 - RNA, 19 nt, Artificial Sequence
  Description of Artificial Sequence: Synthetic oligonucleotide
  Antisense strand to SEQ ID NO: 1084102
ucccucauaacuauacacc

SEQ ID NO: 1084104 - RNA, 19 nt, Artificial Sequence
  Description of Artificial Sequence: Synthetic oligonucleotide
  Sense strand starting at position 3284 of SEQ ID NO: 915495
guguauaguuaugagggaa

SEQ ID NO: 1084105 - RNA, 19 nt, Artificial Sequence
  Description of Artificial Sequence: Synthetic oligonucleotide
  Antisense strand to SEQ ID NO: 1084104
uucccucauaacuauacac

SEQ ID NO: 1084106 - RNA, 19 nt, Artificial Sequence
  Description of Artificial Sequence: Synthetic oligonucleotide
  Sense strand starting at position 3297 of SEQ ID NO: 915495
agggaauugcugggugaca

SEQ ID NO: 1084107 - RNA, 19 nt, Artificial Sequence
  Description of Artificial Sequence: Synthetic oligonucleotide
  Antisense strand to SEQ ID NO: 1084106
ugucacccagcaauucccu

SEQ ID NO: 1084108 - RNA, 19 nt, Artificial Sequence
  Description of Artificial Sequence: Synthetic oligonucleotide
  Sense strand starting at position 3299 of SEQ ID NO: 915495
ggaauugcugggugacaga

SEQ ID NO: 1084109 - RNA, 19 nt, Artificial Sequence
  Description of Artificial Sequence: Synthetic oligonucleotide
  Antisense strand to SEQ ID NO: 1084108
ucugucacccagcaauucc

SEQ ID NO: 1084110 - RNA, 19 nt, Artificial Sequence
  Description of Artificial Sequence: Synthetic oligonucleotide
  Sense strand starting at position 3314 of SEQ ID NO: 915495
cagaguaauuauguguuaa

SEQ ID NO: 1084111 - RNA, 19 nt, Artificial Sequence
  Description of Artificial Sequence: Synthetic oligonucleotide
  Antisense strand to SEQ ID NO: 1084110
uuaacacauaauuacucug

SEQ ID NO: 1084112 - RNA, 19 nt, Artificial Sequence
  Description of Artificial Sequence: Synthetic oligonucleotide
  Sense strand starting at position 3327 of SEQ ID NO: 915495
uguuaaauauucugaggaa

SEQ ID NO: 1084113 - RNA, 19 nt, Artificial Sequence
  Description of Artificial Sequence: Synthetic oligonucleotide
  Antisense strand to SEQ ID NO: 1084112
uuccucagaauauuuaaca

SEQ ID NO: 1084114 - RNA, 19 nt, Artificial Sequence
  Description of Artificial Sequence: Synthetic oligonucleotide
  Sense strand starting at position 3328 of SEQ ID NO: 915495
guuaaauauucugaggaaa

SEQ ID NO: 1084115 - RNA, 19 nt, Artificial Sequence
  Description of Artificial Sequence: Synthetic oligonucleotide
  Antisense strand to SEQ ID NO: 1084114
uuuccucagaauauuuaac

SEQ ID NO: 1084116 - RNA, 19 nt, Artificial Sequence
  Description of Artificial Sequence: Synthetic oligonucleotide
  Sense strand starting at position 3330 of SEQ ID NO: 915495
uaaauauucugaggaaacg

SEQ ID NO: 1084117 - RNA, 19 nt, Artificial Sequence
  Description of Artificial Sequence: Synthetic oligonucleotide
  Antisense strand to SEQ ID NO: 1084116
cguuuccucagaauauuua

SEQ ID NO: 1084118 - RNA, 19 nt, Artificial Sequence
  Description of Artificial Sequence: Synthetic oligonucleotide
  Sense strand starting at position 3382 of SEQ ID NO: 915495
cgguucuuguccucgccaa

SEQ ID NO: 1084119 - RNA, 19 nt, Artificial Sequence
  Description of Artificial Sequence: Synthetic oligonucleotide
  Antisense strand to SEQ ID NO: 1084118
uuggcgaggacaagaaccg

SEQ ID NO: 1084120 - RNA, 19 nt, Artificial Sequence
  Description of Artificial Sequence: Synthetic oligonucleotide
  Sense strand starting at position 3421 of SEQ ID NO: 915495
uuuguuugucgcguacuaa

SEQ ID NO: 1084121 - RNA, 19 nt, Artificial Sequence
  Description of Artificial Sequence: Synthetic oligonucleotide
  Antisense strand to SEQ ID NO: 1084120
uuaguacgcgacaaacaaa

SEQ ID NO: 1084122 - RNA, 19 nt, Artificial Sequence
  Description of Artificial Sequence: Synthetic oligonucleotide
  Sense strand starting at position 3422 of SEQ ID NO: 915495
uuguuugucgcguacuaac

SEQ ID NO: 1084123 - RNA, 19 nt, Artificial Sequence
  Description of Artificial Sequence: Synthetic oligonucleotide
  Antisense strand to SEQ ID NO: 1084122
guuaguacgcgacaaacaa

SEQ ID NO: 1084124 - RNA, 19 nt, Artificial Sequence
  Description of Artificial Sequence: Synthetic oligonucleotide
  Sense strand starting at position 3523 of SEQ ID NO: 915495
aagugucugugagccauuu

SEQ ID NO: 1084125 - RNA, 19 nt, Artificial Sequence
  Description of Artificial Sequence: Synthetic oligonucleotide
  Antisense strand to SEQ ID NO: 1084124
aaauggcucacagacacuu

SEQ ID NO: 1084126 - RNA, 19 nt, Artificial Sequence
  Description of Artificial Sequence: Synthetic oligonucleotide
  Sense strand starting at position 3525 of SEQ ID NO: 915495
gugucugugagccauuuau

SEQ ID NO: 1084127 - RNA, 19 nt, Artificial Sequence
  Description of Artificial Sequence: Synthetic oligonucleotide
  Antisense strand to SEQ ID NO: 1084126
auaaauggcucacagacac

SEQ ID NO: 1084128 - RNA, 19 nt, Artificial Sequence
  Description of Artificial Sequence: Synthetic oligonucleotide
  Sense strand starting at position 3531 of SEQ ID NO: 915495
gugagccauuuauacauca

SEQ ID NO: 1084129 - RNA, 19 nt, Artificial Sequence
  Description of Artificial Sequence: Synthetic oligonucleotide
  Antisense strand to SEQ ID NO: 1084128
ugauguauaaauggcucac

SEQ ID NO: 1084130 - RNA, 19 nt, Artificial Sequence
  Description of Artificial Sequence: Synthetic oligonucleotide
  Sense strand starting at position 3559 of SEQ ID NO: 915495
cggagaaauggccgucaag

SEQ ID NO: 1084131 - RNA, 19 nt, Artificial Sequence
  Description of Artificial Sequence: Synthetic oligonucleotide
  Antisense strand to SEQ ID NO: 1084130
cuugacggccauuucuccg

SEQ ID NO: 1084132 - RNA, 19 nt, Artificial Sequence
  Description of Artificial Sequence: Synthetic oligonucleotide
  Sense strand starting at position 3571 of SEQ ID NO: 915495
cgucaagcccuuugauguu

SEQ ID NO: 1084133 - RNA, 19 nt, Artificial Sequence
  Description of Artificial Sequence: Synthetic oligonucleotide
  Antisense strand to SEQ ID NO: 1084132
aacaucaaagggcuugacg

SEQ ID NO: 1084134 - RNA, 19 nt, Artificial Sequence
  Description of Artificial Sequence: Synthetic oligonucleotide
  Sense strand starting at position 3594 of SEQ ID NO: 915495
ugugguugcgagucaugca

SEQ ID NO: 1084135 - RNA, 19 nt, Artificial Sequence
  Description of Artificial Sequence: Synthetic oligonucleotide
  Antisense strand to SEQ ID NO: 1084134
ugcaugacucgcaaccaca

SEQ ID NO: 1084136 - RNA, 19 nt, Artificial Sequence
  Description of Artificial Sequence: Synthetic oligonucleotide
  Sense strand starting at position 3599 of SEQ ID NO: 915495
uugcgagucaugcacugua

SEQ ID NO: 1084137 - RNA, 19 nt, Artificial Sequence
  Description of Artificial Sequence: Synthetic oligonucleotide
  Antisense strand to SEQ ID NO: 1084136
uacagugcaugacucgcaa

SEQ ID NO: 1084138 - RNA, 19 nt, Artificial Sequence
  Description of Artificial Sequence: Synthetic oligonucleotide
  Sense strand starting at position 3601 of SEQ ID NO: 915495
gcgagucaugcacuguauc

SEQ ID NO: 1084139 - RNA, 19 nt, Artificial Sequence
  Description of Artificial Sequence: Synthetic oligonucleotide
  Antisense strand to SEQ ID NO: 1084138
gauacagugcaugacucgc

SEQ ID NO: 1084140 - RNA, 19 nt, Artificial Sequence
  Description of Artificial Sequence: Synthetic oligonucleotide
  Sense strand starting at position 3612 of SEQ ID NO: 915495
acuguauccgucuguuaaa

SEQ ID NO: 1084141 - RNA, 19 nt, Artificial Sequence
  Description of Artificial Sequence: Synthetic oligonucleotide
  Antisense strand to SEQ ID NO: 1084140
uuuaacagacggauacagu

SEQ ID NO: 1084142 - RNA, 19 nt, Artificial Sequence
  Description of Artificial Sequence: Synthetic oligonucleotide
  Sense strand starting at position 3613 of SEQ ID NO: 915495
cuguauccgucuguuaaau

SEQ ID NO: 1084143 - RNA, 19 nt, Artificial Sequence
  Description of Artificial Sequence: Synthetic oligonucleotide
  Antisense strand to SEQ ID NO: 1084142
auuuaacagacggauacag

SEQ ID NO: 1084144 - RNA, 19 nt, Artificial Sequence
  Description of Artificial Sequence: Synthetic oligonucleotide
  Sense strand starting at position 29 of SEQ ID NO: 915496
auaaguggccacugcaaga

SEQ ID NO: 1084145 - RNA, 19 nt, Artificial Sequence
  Description of Artificial Sequence: Synthetic oligonucleotide
  Antisense strand to SEQ ID NO: 1084144
ucuugcaguggccacuuau

SEQ ID NO: 1084146 - RNA, 19 nt, Artificial Sequence
  Description of Artificial Sequence: Synthetic oligonucleotide
  Sense strand starting at position 57 of SEQ ID NO: 915496
guaggagcuucccuacagu

SEQ ID NO: 1084147 - RNA, 19 nt, Artificial Sequence
  Description of Artificial Sequence: Synthetic oligonucleotide
  Antisense strand to SEQ ID NO: 1084146
acuguagggaagcuccuac

SEQ ID NO: 1084148 - RNA, 19 nt, Artificial Sequence
  Description of Artificial Sequence: Synthetic oligonucleotide
  Sense strand starting at position 208 of SEQ ID NO: 915496
ugggcacacucaucuacau

SEQ ID NO: 1084149 - RNA, 19 nt, Artificial Sequence
  Description of Artificial Sequence: Synthetic oligonucleotide
  Antisense strand to SEQ ID NO: 1084148
auguagaugagugugccca

SEQ ID NO: 1084150 - RNA, 19 nt, Artificial Sequence
  Description of Artificial Sequence: Synthetic oligonucleotide
  Sense strand starting at position 350 of SEQ ID NO: 915496
ugggaucccugggauaaac

SEQ ID NO: 1084151 - RNA, 19 nt, Artificial Sequence
  Description of Artificial Sequence: Synthetic oligonucleotide
  Antisense strand to SEQ ID NO: 1084150
guuuaucccagggauccca

SEQ ID NO: 1084152 - RNA, 19 nt, Artificial Sequence
  Description of Artificial Sequence: Synthetic oligonucleotide
  Sense strand starting at position 404 of SEQ ID NO: 915496
ccggacacucuacgugaaa

SEQ ID NO: 1084153 - RNA, 19 nt, Artificial Sequence
  Description of Artificial Sequence: Synthetic oligonucleotide
  Antisense strand to SEQ ID NO: 1084152
uuucacguagaguguccgg

SEQ ID NO: 1084154 - RNA, 19 nt, Artificial Sequence
  Description of Artificial Sequence: Synthetic oligonucleotide
  Sense strand starting at position 405 of SEQ ID NO: 915496
cggacacucuacgugaaau

SEQ ID NO: 1084155 - RNA, 19 nt, Artificial Sequence
  Description of Artificial Sequence: Synthetic oligonucleotide
  Antisense strand to SEQ ID NO: 1084154
auuucacguagaguguccg

SEQ ID NO: 1084156 - RNA, 19 nt, Artificial Sequence
  Description of Artificial Sequence: Synthetic oligonucleotide
  Sense strand starting at position 406 of SEQ ID NO: 915496
ggacacucuacgugaaauu

SEQ ID NO: 1084157 - RNA, 19 nt, Artificial Sequence
  Description of Artificial Sequence: Synthetic oligonucleotide
  Antisense strand to SEQ ID NO: 1084156
aauuucacguagagugucc

SEQ ID NO: 1084158 - RNA, 19 nt, Artificial Sequence
  Description of Artificial Sequence: Synthetic oligonucleotide
  Sense strand starting at position 407 of SEQ ID NO: 915496
gacacucuacgugaaauua

SEQ ID NO: 1084159 - RNA, 19 nt, Artificial Sequence
  Description of Artificial Sequence: Synthetic oligonucleotide
  Antisense strand to SEQ ID NO: 1084158
uaauuucacguagaguguc

SEQ ID NO: 1084160 - RNA, 19 nt, Artificial Sequence
  Description of Artificial Sequence: Synthetic oligonucleotide
  Sense strand starting at position 618 of SEQ ID NO: 915496
gucugugucccuuaugcca

SEQ ID NO: 1084161 - RNA, 19 nt, Artificial Sequence
  Description of Artificial Sequence: Synthetic oligonucleotide
  Antisense strand to SEQ ID NO: 1084160
uggcauaagggacacagac

SEQ ID NO: 1084162 - RNA, 19 nt, Artificial Sequence
  Description of Artificial Sequence: Synthetic oligonucleotide
  Sense strand starting at position 999 of SEQ ID NO: 915496
uagaguauuuaugggaagu

SEQ ID NO: 1084163 - RNA, 19 nt, Artificial Sequence
  Description of Artificial Sequence: Synthetic oligonucleotide
  Antisense strand to SEQ ID NO: 1084162
acuucccauaaauacucua

SEQ ID NO: 1084164 - RNA, 19 nt, Artificial Sequence
  Description of Artificial Sequence: Synthetic oligonucleotide
  Sense strand starting at position 1001 of SEQ ID NO: 915496
gaguauuuaugggaagucu

SEQ ID NO: 1084165 - RNA, 19 nt, Artificial Sequence
  Description of Artificial Sequence: Synthetic oligonucleotide
  Antisense strand to SEQ ID NO: 1084164
agacuucccauaaauacuc

SEQ ID NO: 1084166 - RNA, 19 nt, Artificial Sequence
  Description of Artificial Sequence: Synthetic oligonucleotide
  Sense strand starting at position 1146 of SEQ ID NO: 915496
agaaguauuuccuggguug

SEQ ID NO: 1084167 - RNA, 19 nt, Artificial Sequence
  Description of Artificial Sequence: Synthetic oligonucleotide
  Antisense strand to SEQ ID NO: 1084166
caacccaggaaauacuucu

SEQ ID NO: 1084168 - RNA, 19 nt, Artificial Sequence
  Description of Artificial Sequence: Synthetic oligonucleotide
  Sense strand starting at position 1238 of SEQ ID NO: 915496
cagaguccucucuggaaac

SEQ ID NO: 1084169 - RNA, 19 nt, Artificial Sequence
  Description of Artificial Sequence: Synthetic oligonucleotide
  Antisense strand to SEQ ID NO: 1084168
guuuccagagaggacucug

SEQ ID NO: 1084170 - RNA, 19 nt, Artificial Sequence
  Description of Artificial Sequence: Synthetic oligonucleotide
  Sense strand starting at position 1255 of SEQ ID NO: 915496
accaaaguucucugcugaa

SEQ ID NO: 1084171 - RNA, 19 nt, Artificial Sequence
  Description of Artificial Sequence: Synthetic oligonucleotide
  Antisense strand to SEQ ID NO: 1084170
uucagcagagaacuuuggu

SEQ ID NO: 1084172 - RNA, 19 nt, Artificial Sequence
  Description of Artificial Sequence: Synthetic oligonucleotide
  Sense strand starting at position 1297 of SEQ ID NO: 915496
ggguaauucccagaucgga

SEQ ID NO: 1084173 - RNA, 19 nt, Artificial Sequence
  Description of Artificial Sequence: Synthetic oligonucleotide
  Antisense strand to SEQ ID NO: 1084172
uccgaucugggaauuaccc

SEQ ID NO: 1084174 - RNA, 19 nt, Artificial Sequence
  Description of Artificial Sequence: Synthetic oligonucleotide
  Sense strand starting at position 1321 of SEQ ID NO: 915496
cgcuguuccgcugacagaa

SEQ ID NO: 1084175 - RNA, 19 nt, Artificial Sequence
  Description of Artificial Sequence: Synthetic oligonucleotide
  Antisense strand to SEQ ID NO: 1084174
uucugucagcggaacagcg

SEQ ID NO: 1084176 - RNA, 19 nt, Artificial Sequence
  Description of Artificial Sequence: Synthetic oligonucleotide
  Sense strand starting at position 2307 of SEQ ID NO: 915496
gcgccuguuccaguguguu

SEQ ID NO: 1084177 - RNA, 19 nt, Artificial Sequence
  Description of Artificial Sequence: Synthetic oligonucleotide
  Antisense strand to SEQ ID NO: 1084176
aacacacuggaacaggcgc

SEQ ID NO: 1084178 - RNA, 19 nt, Artificial Sequence
  Description of Artificial Sequence: Synthetic oligonucleotide
  Sense strand starting at position 2311 of SEQ ID NO: 915496
cuguuccaguguguuacaa

SEQ ID NO: 1084179 - RNA, 19 nt, Artificial Sequence
  Description of Artificial Sequence: Synthetic oligonucleotide
  Antisense strand to SEQ ID NO: 1084178
uuguaacacacuggaacag

SEQ ID NO: 1084180 - RNA, 19 nt, Artificial Sequence
  Description of Artificial Sequence: Synthetic oligonucleotide
  Sense strand starting at position 2358 of SEQ ID NO: 915496
acagcccuucuagauugaa

SEQ ID NO: 1084181 - RNA, 19 nt, Artificial Sequence
  Description of Artificial Sequence: Synthetic oligonucleotide
  Antisense strand to SEQ ID NO: 1084180
uucaaucuagaagggcugu

SEQ ID NO: 1084182 - RNA, 19 nt, Artificial Sequence
  Description of Artificial Sequence: Synthetic oligonucleotide
  Sense strand starting at position 2361 of SEQ ID NO: 915496
gcccuucuagauugaaaua

SEQ ID NO: 1084183 - RNA, 19 nt, Artificial Sequence
  Description of Artificial Sequence: Synthetic oligonucleotide
  Antisense strand to SEQ ID NO: 1084182
uauuucaaucuagaagggc

SEQ ID NO: 1084184 - RNA, 19 nt, Artificial Sequence
  Description of Artificial Sequence: Synthetic oligonucleotide
  Sense strand starting at position 2395 of SEQ ID NO: 915496
cccagaaaguguuccguau

SEQ ID NO: 1084185 - RNA, 19 nt, Artificial Sequence
  Description of Artificial Sequence: Synthetic oligonucleotide
  Antisense strand to SEQ ID NO: 1084184
auacggaacacuuucuggg

SEQ ID NO: 1084186 - RNA, 19 nt, Artificial Sequence
  Description of Artificial Sequence: Synthetic oligonucleotide
  Sense strand starting at position 2399 of SEQ ID NO: 915496
gaaaguguuccguauaguc

SEQ ID NO: 1084187 - RNA, 19 nt, Artificial Sequence
  Description of Artificial Sequence: Synthetic oligonucleotide
  Antisense strand to SEQ ID NO: 1084186
gacuauacggaacacuuuc

SEQ ID NO: 1084188 - RNA, 19 nt, Artificial Sequence
  Description of Artificial Sequence: Synthetic oligonucleotide
  Sense strand starting at position 2509 of SEQ ID NO: 915496
agcuguuugaauggagaag

SEQ ID NO: 1084189 - RNA, 19 nt, Artificial Sequence
  Description of Artificial Sequence: Synthetic oligonucleotide
  Antisense strand to SEQ ID NO: 1084188
cuucuccauucaaacagcu

SEQ ID NO: 1084190 - RNA, 19 nt, Artificial Sequence
  Description of Artificial Sequence: Synthetic oligonucleotide
  Sense strand starting at position 2666 of SEQ ID NO: 915496
cuagaaucccugcaagcua

SEQ ID NO: 1084191 - RNA, 19 nt, Artificial Sequence
  Description of Artificial Sequence: Synthetic oligonucleotide
  Antisense strand to SEQ ID NO: 1084190
uagcuugcagggauucuag

SEQ ID NO: 1084192 - RNA, 19 nt, Artificial Sequence
  Description of Artificial Sequence: Synthetic oligonucleotide
  Sense strand starting at position 2674 of SEQ ID NO: 915496
ccugcaagcuacuuaugua

SEQ ID NO: 1084193 - RNA, 19 nt, Artificial Sequence
  Description of Artificial Sequence: Synthetic oligonucleotide
  Antisense strand to SEQ ID NO: 1084192
uacauaaguagcuugcagg

SEQ ID NO: 1084194 - RNA, 19 nt, Artificial Sequence
  Description of Artificial Sequence: Synthetic oligonucleotide
  Sense strand starting at position 2681 of SEQ ID NO: 915496
gcuacuuauguauaucuca

SEQ ID NO: 1084195 - RNA, 19 nt, Artificial Sequence
  Description of Artificial Sequence: Synthetic oligonucleotide
  Antisense strand to SEQ ID NO: 1084194
ugagauauacauaaguagc

SEQ ID NO: 1084196 - RNA, 19 nt, Artificial Sequence
  Description of Artificial Sequence: Synthetic oligonucleotide
  Sense strand starting at position 2765 of SEQ ID NO: 915496
ccgacuuugccggaguaca

SEQ ID NO: 1084197 - RNA, 19 nt, Artificial Sequence
  Description of Artificial Sequence: Synthetic oligonucleotide
  Antisense strand to SEQ ID NO: 1084196
uguacuccggcaaagucgg

SEQ ID NO: 1084198 - RNA, 19 nt, Artificial Sequence
  Description of Artificial Sequence: Synthetic oligonucleotide
  Sense strand starting at position 2766 of SEQ ID NO: 915496
cgacuuugccggaguacag

SEQ ID NO: 1084199 - RNA, 19 nt, Artificial Sequence
  Description of Artificial Sequence: Synthetic oligonucleotide
  Antisense strand to SEQ ID NO: 1084198
cuguacuccggcaaagucg

SEQ ID NO: 1084200 - RNA, 19 nt, Artificial Sequence
  Description of Artificial Sequence: Synthetic oligonucleotide
  Sense strand starting at position 2856 of SEQ ID NO: 915496
ccuagccuuccaugaaaga

SEQ ID NO: 1084201 - RNA, 19 nt, Artificial Sequence
  Description of Artificial Sequence: Synthetic oligonucleotide
  Antisense strand to SEQ ID NO: 1084200
ucuuucauggaaggcuagg

SEQ ID NO: 1084202 - RNA, 19 nt, Artificial Sequence
  Description of Artificial Sequence: Synthetic oligonucleotide
  Sense strand starting at position 2869 of SEQ ID NO: 915496
gaaagacaguccuugcaag

SEQ ID NO: 1084203 - RNA, 19 nt, Artificial Sequence
  Description of Artificial Sequence: Synthetic oligonucleotide
  Antisense strand to SEQ ID NO: 1084202
cuugcaaggacugucuuuc

SEQ ID NO: 1084204 - RNA, 19 nt, Artificial Sequence
  Description of Artificial Sequence: Synthetic oligonucleotide
  Sense strand starting at position 2901 of SEQ ID NO: 915496
agggucuucccauaucaca

SEQ ID NO: 1084205 - RNA, 19 nt, Artificial Sequence
  Description of Artificial Sequence: Synthetic oligonucleotide
  Antisense strand to SEQ ID NO: 1084204
ugugauaugggaagacccu

SEQ ID NO: 1084206 - RNA, 19 nt, Artificial Sequence
  Description of Artificial Sequence: Synthetic oligonucleotide
  Sense strand starting at position 3031 of SEQ ID NO: 915496
cugagcuucuccguauuua

SEQ ID NO: 1084207 - RNA, 19 nt, Artificial Sequence
  Description of Artificial Sequence: Synthetic oligonucleotide
  Antisense strand to SEQ ID NO: 1084206
uaaauacggagaagcucag

SEQ ID NO: 1084208 - RNA, 19 nt, Artificial Sequence
  Description of Artificial Sequence: Synthetic oligonucleotide
  Sense strand starting at position 3032 of SEQ ID NO: 915496
ugagcuucuccguauuuau

SEQ ID NO: 1084209 - RNA, 19 nt, Artificial Sequence
  Description of Artificial Sequence: Synthetic oligonucleotide
  Antisense strand to SEQ ID NO: 1084208
auaaauacggagaagcuca

SEQ ID NO: 1084210 - RNA, 19 nt, Artificial Sequence
  Description of Artificial Sequence: Synthetic oligonucleotide
  Sense strand starting at position 3124 of SEQ ID NO: 915496
acaccauuccuuuggagau

SEQ ID NO: 1084211 - RNA, 19 nt, Artificial Sequence
  Description of Artificial Sequence: Synthetic oligonucleotide
  Antisense strand to SEQ ID NO: 1084210
aucuccaaaggaauggugu

SEQ ID NO: 1084212 - RNA, 19 nt, Artificial Sequence
  Description of Artificial Sequence: Synthetic oligonucleotide
  Sense strand starting at position 3330 of SEQ ID NO: 915496
gcuugauggagcuaucuga

SEQ ID NO: 1084213 - RNA, 19 nt, Artificial Sequence
  Description of Artificial Sequence: Synthetic oligonucleotide
  Antisense strand to SEQ ID NO: 1084212
ucagauagcuccaucaagc

SEQ ID NO: 1084214 - RNA, 19 nt, Artificial Sequence
  Description of Artificial Sequence: Synthetic oligonucleotide
  Sense strand starting at position 3475 of SEQ ID NO: 915496
uauuucuggucauaagggu

SEQ ID NO: 1084215 - RNA, 19 nt, Artificial Sequence
  Description of Artificial Sequence: Synthetic oligonucleotide
  Antisense strand to SEQ ID NO: 1084214
acccuuaugaccagaaaua

SEQ ID NO: 1084216 - RNA, 19 nt, Artificial Sequence
  Description of Artificial Sequence: Synthetic oligonucleotide
  Sense strand starting at position 3556 of SEQ ID NO: 915496
ccuuaaugguagccauaaa

SEQ ID NO: 1084217 - RNA, 19 nt, Artificial Sequence
  Description of Artificial Sequence: Synthetic oligonucleotide
  Antisense strand to SEQ ID NO: 1084216
uuuauggcuaccauuaagg

SEQ ID NO: 1084218 - RNA, 19 nt, Artificial Sequence
  Description of Artificial Sequence: Synthetic oligonucleotide
  Sense strand starting at position 3885 of SEQ ID NO: 915496
uuugucauguuucccagaa

SEQ ID NO: 1084219 - RNA, 19 nt, Artificial Sequence
  Description of Artificial Sequence: Synthetic oligonucleotide
  Antisense strand to SEQ ID NO: 1084218
uucugggaaacaugacaaa

SEQ ID NO: 1084220 - RNA, 19 nt, Artificial Sequence
  Description of Artificial Sequence: Synthetic oligonucleotide
  Sense strand starting at position 3886 of SEQ ID NO: 915496
uugucauguuucccagaaa

SEQ ID NO: 1084221 - RNA, 19 nt, Artificial Sequence
  Description of Artificial Sequence: Synthetic oligonucleotide
  Antisense strand to SEQ ID NO: 1084220
uuucugggaaacaugacaa

SEQ ID NO: 1084222 - RNA, 19 nt, Artificial Sequence
  Description of Artificial Sequence: Synthetic oligonucleotide
  Sense strand starting at position 3957 of SEQ ID NO: 915496
cgcugacauccuuacaaac

SEQ ID NO: 1084223 - RNA, 19 nt, Artificial Sequence
  Description of Artificial Sequence: Synthetic oligonucleotide
  Antisense strand to SEQ ID NO: 1084222
guuuguaaggaugucagcg

SEQ ID NO: 1084224 - RNA, 19 nt, Artificial Sequence
  Description of Artificial Sequence: Synthetic oligonucleotide
  Sense strand starting at position 393 of SEQ ID NO: 915497
ggcuaugucccucagcuga

SEQ ID NO: 1084225 - RNA, 19 nt, Artificial Sequence
  Description of Artificial Sequence: Synthetic oligonucleotide
  Antisense strand to SEQ ID NO: 1084224
ucagcugagggacauagcc

SEQ ID NO: 1084226 - RNA, 19 nt, Artificial Sequence
  Description of Artificial Sequence: Synthetic oligonucleotide
  Sense strand starting at position 642 of SEQ ID NO: 915497
gggagugccaacuagucua

SEQ ID NO: 1084227 - RNA, 19 nt, Artificial Sequence
  Description of Artificial Sequence: Synthetic oligonucleotide
  Antisense strand to SEQ ID NO: 1084226
uagacuaguuggcacuccc

SEQ ID NO: 1084228 - RNA, 19 nt, Artificial Sequence
  Description of Artificial Sequence: Synthetic oligonucleotide
  Sense strand starting at position 647 of SEQ ID NO: 915497
ugccaacuagucuaggagu

SEQ ID NO: 1084229 - RNA, 19 nt, Artificial Sequence
  Description of Artificial Sequence: Synthetic oligonucleotide
  Antisense strand to SEQ ID NO: 1084228
acuccuagacuaguuggca

SEQ ID NO: 1084230 - RNA, 19 nt, Artificial Sequence
  Description of Artificial Sequence: Synthetic oligonucleotide
  Sense strand starting at position 1210 of SEQ ID NO: 915497
agauaagcgacuugaaguu

SEQ ID NO: 1084231 - RNA, 19 nt, Artificial Sequence
  Description of Artificial Sequence: Synthetic oligonucleotide
  Antisense strand to SEQ ID NO: 1084230
aacuucaagucgcuuaucu

SEQ ID NO: 1084232 - RNA, 19 nt, Artificial Sequence
  Description of Artificial Sequence: Synthetic oligonucleotide
  Sense strand starting at position 1216 of SEQ ID NO: 915497
gcgacuugaaguugggaga

SEQ ID NO: 1084233 - RNA, 19 nt, Artificial Sequence
  Description of Artificial Sequence: Synthetic oligonucleotide
  Antisense strand to SEQ ID NO: 1084232
ucucccaacuucaagucgc

SEQ ID NO: 1084234 - RNA, 19 nt, Artificial Sequence
  Description of Artificial Sequence: Synthetic oligonucleotide
  Sense strand starting at position 1219 of SEQ ID NO: 915497
acuugaaguugggagagau

SEQ ID NO: 1084235 - RNA, 19 nt, Artificial Sequence
  Description of Artificial Sequence: Synthetic oligonucleotide
  Antisense strand to SEQ ID NO: 1084234
aucucucccaacuucaagu

SEQ ID NO: 1084236 - RNA, 19 nt, Artificial Sequence
  Description of Artificial Sequence: Synthetic oligonucleotide
  Sense strand starting at position 1525 of SEQ ID NO: 915497
cugagauggucccagagcu

SEQ ID NO: 1084237 - RNA, 19 nt, Artificial Sequence
  Description of Artificial Sequence: Synthetic oligonucleotide
  Antisense strand to SEQ ID NO: 1084236
agcucugggaccaucucag

SEQ ID NO: 1084238 - RNA, 19 nt, Artificial Sequence
  Description of Artificial Sequence: Synthetic oligonucleotide
  Sense strand starting at position 1542 of SEQ ID NO: 915497
cuguuguguggccggaaga

SEQ ID NO: 1084239 - RNA, 19 nt, Artificial Sequence
  Description of Artificial Sequence: Synthetic oligonucleotide
  Antisense strand to SEQ ID NO: 1084238
ucuuccggccacacaacag

SEQ ID NO: 1084240 - RNA, 19 nt, Artificial Sequence
  Description of Artificial Sequence: Synthetic oligonucleotide
  Sense strand starting at position 1544 of SEQ ID NO: 915497
guuguguggccggaagaca

SEQ ID NO: 1084241 - RNA, 19 nt, Artificial Sequence
  Description of Artificial Sequence: Synthetic oligonucleotide
  Antisense strand to SEQ ID NO: 1084240
ugucuuccggccacacaac

SEQ ID NO: 1084242 - RNA, 19 nt, Artificial Sequence
  Description of Artificial Sequence: Synthetic oligonucleotide
  Sense strand starting at position 2324 of SEQ ID NO: 915497
aggccuaaauccuaaagga

SEQ ID NO: 1084243 - RNA, 19 nt, Artificial Sequence
  Description of Artificial Sequence: Synthetic oligonucleotide
  Antisense strand to SEQ ID NO: 1084242
uccuuuaggauuuaggccu

SEQ ID NO: 1084244 - RNA, 19 nt, Artificial Sequence
  Description of Artificial Sequence: Synthetic oligonucleotide
  Sense strand starting at position 2358 of SEQ ID NO: 915497
ucuagcguacuguaaggau

SEQ ID NO: 1084245 - RNA, 19 nt, Artificial Sequence
  Description of Artificial Sequence: Synthetic oligonucleotide
  Antisense strand to SEQ ID NO: 1084244
auccuuacaguacgcuaga

SEQ ID NO: 1084246 - RNA, 19 nt, Artificial Sequence
  Description of Artificial Sequence: Synthetic oligonucleotide
  Sense strand starting at position 2362 of SEQ ID NO: 915497
gcguacuguaaggaugaga

SEQ ID NO: 1084247 - RNA, 19 nt, Artificial Sequence
  Description of Artificial Sequence: Synthetic oligonucleotide
  Antisense strand to SEQ ID NO: 1084246
ucucauccuuacaguacgc

SEQ ID NO: 1084248 - RNA, 19 nt, Artificial Sequence
  Description of Artificial Sequence: Synthetic oligonucleotide
  Sense strand starting at position 2367 of SEQ ID NO: 915497
cuguaaggaugagagcuua

SEQ ID NO: 1084249 - RNA, 19 nt, Artificial Sequence
  Description of Artificial Sequence: Synthetic oligonucleotide
  Antisense strand to SEQ ID NO: 1084248
uaagcucucauccuuacag

SEQ ID NO: 1084250 - RNA, 19 nt, Artificial Sequence
  Description of Artificial Sequence: Synthetic oligonucleotide
  Sense strand starting at position 2553 of SEQ ID NO: 915497
aggagucgguccuggugaa

SEQ ID NO: 1084251 - RNA, 19 nt, Artificial Sequence
  Description of Artificial Sequence: Synthetic oligonucleotide
  Antisense strand to SEQ ID NO: 1084250
uucaccaggaccgacuccu

SEQ ID NO: 1084252 - RNA, 19 nt, Artificial Sequence
  Description of Artificial Sequence: Synthetic oligonucleotide
  Sense strand starting at position 2631 of SEQ ID NO: 915497
gagugaauccaagguucca

SEQ ID NO: 1084253 - RNA, 19 nt, Artificial Sequence
  Description of Artificial Sequence: Synthetic oligonucleotide
  Antisense strand to SEQ ID NO: 1084252
uggaaccuuggauucacuc

SEQ ID NO: 1084254 - RNA, 19 nt, Artificial Sequence
  Description of Artificial Sequence: Synthetic oligonucleotide
  Sense strand starting at position 2868 of SEQ ID NO: 915497
cagccauggagugguguua

SEQ ID NO: 1084255 - RNA, 19 nt, Artificial Sequence
  Description of Artificial Sequence: Synthetic oligonucleotide
  Antisense strand to SEQ ID NO: 1084254
uaacaccacuccauggcug

SEQ ID NO: 1084256 - RNA, 19 nt, Artificial Sequence
  Description of Artificial Sequence: Synthetic oligonucleotide
  Sense strand starting at position 2953 of SEQ ID NO: 915497
agugguucuucugcuggua

SEQ ID NO: 1084257 - RNA, 19 nt, Artificial Sequence
  Description of Artificial Sequence: Synthetic oligonucleotide
  Antisense strand to SEQ ID NO: 1084256
uaccagcagaagaaccacu

SEQ ID NO: 1084258 - RNA, 19 nt, Artificial Sequence
  Description of Artificial Sequence: Synthetic oligonucleotide
  Sense strand starting at position 3027 of SEQ ID NO: 915497
gugagauucugggacuggu

SEQ ID NO: 1084259 - RNA, 19 nt, Artificial Sequence
  Description of Artificial Sequence: Synthetic oligonucleotide
  Antisense strand to SEQ ID NO: 1084258
accagucccagaaucucac

SEQ ID NO: 1084260 - RNA, 19 nt, Artificial Sequence
  Description of Artificial Sequence: Synthetic oligonucleotide
  Sense strand starting at position 3030 of SEQ ID NO: 915497
agauucugggacugguuau

SEQ ID NO: 1084261 - RNA, 19 nt, Artificial Sequence
  Description of Artificial Sequence: Synthetic oligonucleotide
  Antisense strand to SEQ ID NO: 1084260
auaaccagucccagaaucu

SEQ ID NO: 1084262 - RNA, 19 nt, Artificial Sequence
  Description of Artificial Sequence: Synthetic oligonucleotide
  Sense strand starting at position 3060 of SEQ ID NO: 915497
uugggaugccuuugggaga

SEQ ID NO: 1084263 - RNA, 19 nt, Artificial Sequence
  Description of Artificial Sequence: Synthetic oligonucleotide
  Antisense strand to SEQ ID NO: 1084262
ucucccaaaggcaucccaa

SEQ ID NO: 1084264 - RNA, 19 nt, Artificial Sequence
  Description of Artificial Sequence: Synthetic oligonucleotide
  Sense strand starting at position 3061 of SEQ ID NO: 915497
ugggaugccuuugggagau

SEQ ID NO: 1084265 - RNA, 19 nt, Artificial Sequence
  Description of Artificial Sequence: Synthetic oligonucleotide
  Antisense strand to SEQ ID NO: 1084264
aucucccaaaggcauccca

SEQ ID NO: 1084266 - RNA, 19 nt, Artificial Sequence
  Description of Artificial Sequence: Synthetic oligonucleotide
  Sense strand starting at position 3063 of SEQ ID NO: 915497
ggaugccuuugggagauaa

SEQ ID NO: 1084267 - RNA, 19 nt, Artificial Sequence
  Description of Artificial Sequence: Synthetic oligonucleotide
  Antisense strand to SEQ ID NO: 1084266
uuaucucccaaaggcaucc

SEQ ID NO: 1084268 - RNA, 19 nt, Artificial Sequence
  Description of Artificial Sequence: Synthetic oligonucleotide
  Sense strand starting at position 3138 of SEQ ID NO: 915497
ccucauuggaugugagaac

SEQ ID NO: 1084269 - RNA, 19 nt, Artificial Sequence
  Description of Artificial Sequence: Synthetic oligonucleotide
  Antisense strand to SEQ ID NO: 1084268
guucucacauccaaugagg

SEQ ID NO: 1084270 - RNA, 19 nt, Artificial Sequence
  Description of Artificial Sequence: Synthetic oligonucleotide
  Sense strand starting at position 3139 of SEQ ID NO: 915497
cucauuggaugugagaacu

SEQ ID NO: 1084271 - RNA, 19 nt, Artificial Sequence
  Description of Artificial Sequence: Synthetic oligonucleotide
  Antisense strand to SEQ ID NO: 1084270
aguucucacauccaaugag

SEQ ID NO: 1084272 - RNA, 19 nt, Artificial Sequence
  Description of Artificial Sequence: Synthetic oligonucleotide
  Sense strand starting at position 3689 of SEQ ID NO: 915497
gcaguaucaccgcuagcau

SEQ ID NO: 1084273 - RNA, 19 nt, Artificial Sequence
  Description of Artificial Sequence: Synthetic oligonucleotide
  Antisense strand to SEQ ID NO: 1084272
augcuagcggugauacugc

SEQ ID NO: 1084274 - RNA, 19 nt, Artificial Sequence
  Description of Artificial Sequence: Synthetic oligonucleotide
  Sense strand starting at position 3690 of SEQ ID NO: 915497
caguaucaccgcuagcaua

SEQ ID NO: 1084275 - RNA, 19 nt, Artificial Sequence
  Description of Artificial Sequence: Synthetic oligonucleotide
  Antisense strand to SEQ ID NO: 1084274
uaugcuagcggugauacug

SEQ ID NO: 1084276 - RNA, 19 nt, Artificial Sequence
  Description of Artificial Sequence: Synthetic oligonucleotide
  Sense strand starting at position 3752 of SEQ ID NO: 915497
gaaugacuggugggcuuua

SEQ ID NO: 1084277 - RNA, 19 nt, Artificial Sequence
  Description of Artificial Sequence: Synthetic oligonucleotide
  Antisense strand to SEQ ID NO: 1084276
uaaagcccaccagucauuc

SEQ ID NO: 1084278 - RNA, 19 nt, Artificial Sequence
  Description of Artificial Sequence: Synthetic oligonucleotide
  Sense strand starting at position 3781 of SEQ ID NO: 915497
uuccauucccagggacaua

SEQ ID NO: 1084279 - RNA, 19 nt, Artificial Sequence
  Description of Artificial Sequence: Synthetic oligonucleotide
  Antisense strand to SEQ ID NO: 1084278
uaugucccugggaauggaa

SEQ ID NO: 1084280 - RNA, 19 nt, Artificial Sequence
  Description of Artificial Sequence: Synthetic oligonucleotide
  Sense strand starting at position 3896 of SEQ ID NO: 915497
augguaaggucuuucccuu

SEQ ID NO: 1084281 - RNA, 19 nt, Artificial Sequence
  Description of Artificial Sequence: Synthetic oligonucleotide
  Antisense strand to SEQ ID NO: 1084280
aagggaaagaccuuaccau

SEQ ID NO: 1084282 - RNA, 19 nt, Artificial Sequence
  Description of Artificial Sequence: Synthetic oligonucleotide
  Sense strand starting at position 3923 of SEQ ID NO: 915497
gccauaucaggcugucuca

SEQ ID NO: 1084283 - RNA, 19 nt, Artificial Sequence
  Description of Artificial Sequence: Synthetic oligonucleotide
  Antisense strand to SEQ ID NO: 1084282
ugagacagccugauauggc

SEQ ID NO: 1084284 - RNA, 19 nt, Artificial Sequence
  Description of Artificial Sequence: Synthetic oligonucleotide
  Sense strand starting at position 453 of SEQ ID NO: 915498
acaugaaguggcugaauau

SEQ ID NO: 1084285 - RNA, 19 nt, Artificial Sequence
  Description of Artificial Sequence: Synthetic oligonucleotide
  Antisense strand to SEQ ID NO: 1084284
auauucagccacuucaugu

SEQ ID NO: 1084286 - RNA, 19 nt, Artificial Sequence
  Description of Artificial Sequence: Synthetic oligonucleotide
  Sense strand starting at position 527 of SEQ ID NO: 915498
ucuggaaaucaauggcaaa

SEQ ID NO: 1084287 - RNA, 19 nt, Artificial Sequence
  Description of Artificial Sequence: Synthetic oligonucleotide
  Antisense strand to SEQ ID NO: 1084286
uuugccauugauuuccaga

SEQ ID NO: 1084288 - RNA, 19 nt, Artificial Sequence
  Description of Artificial Sequence: Synthetic oligonucleotide
  Sense strand starting at position 858 of SEQ ID NO: 915498
gacggaucaccuuaagucu

SEQ ID NO: 1084289 - RNA, 19 nt, Artificial Sequence
  Description of Artificial Sequence: Synthetic oligonucleotide
  Antisense strand to SEQ ID NO: 1084288
agacuuaaggugauccguc

SEQ ID NO: 1084290 - RNA, 19 nt, Artificial Sequence
  Description of Artificial Sequence: Synthetic oligonucleotide
  Sense strand starting at position 1205 of SEQ ID NO: 915498
aguguaaacgccuacauca

SEQ ID NO: 1084291 - RNA, 19 nt, Artificial Sequence
  Description of Artificial Sequence: Synthetic oligonucleotide
  Antisense strand to SEQ ID NO: 1084290
ugauguaggcguuuacacu

SEQ ID NO: 1084292 - RNA, 19 nt, Artificial Sequence
  Description of Artificial Sequence: Synthetic oligonucleotide
  Sense strand starting at position 1207 of SEQ ID NO: 915498
uguaaacgccuacaucaaa

SEQ ID NO: 1084293 - RNA, 19 nt, Artificial Sequence
  Description of Artificial Sequence: Synthetic oligonucleotide
  Antisense strand to SEQ ID NO: 1084292
uuugauguaggcguuuaca

SEQ ID NO: 1084294 - RNA, 19 nt, Artificial Sequence
  Description of Artificial Sequence: Synthetic oligonucleotide
  Sense strand starting at position 1308 of SEQ ID NO: 915498
aggcaaaguuaguuacuuu

SEQ ID NO: 1084295 - RNA, 19 nt, Artificial Sequence
  Description of Artificial Sequence: Synthetic oligonucleotide
  Antisense strand to SEQ ID NO: 1084294
aaaguaacuaacuuugccu

SEQ ID NO: 1084296 - RNA, 19 nt, Artificial Sequence
  Description of Artificial Sequence: Synthetic oligonucleotide
  Sense strand starting at position 1394 of SEQ ID NO: 915498
cuaauaacacuguacugua

SEQ ID NO: 1084297 - RNA, 19 nt, Artificial Sequence
  Description of Artificial Sequence: Synthetic oligonucleotide
  Antisense strand to SEQ ID NO: 1084296
uacaguacaguguuauuag

SEQ ID NO: 1084298 - RNA, 19 nt, Artificial Sequence
  Description of Artificial Sequence: Synthetic oligonucleotide
  Sense strand starting at position 1404 of SEQ ID NO: 915498
uguacuguauaugucaaga

SEQ ID NO: 1084299 - RNA, 19 nt, Artificial Sequence
  Description of Artificial Sequence: Synthetic oligonucleotide
  Antisense strand to SEQ ID NO: 1084298
ucuugacauauacaguaca

SEQ ID NO: 1084300 - RNA, 19 nt, Artificial Sequence
  Description of Artificial Sequence: Synthetic oligonucleotide
  Sense strand starting at position 1409 of SEQ ID NO: 915498
uguauaugucaagaugcua

SEQ ID NO: 1084301 - RNA, 19 nt, Artificial Sequence
  Description of Artificial Sequence: Synthetic oligonucleotide
  Antisense strand to SEQ ID NO: 1084300
uagcaucuugacauauaca

SEQ ID NO: 1084302 - RNA, 19 nt, Artificial Sequence
  Description of Artificial Sequence: Synthetic oligonucleotide
  Sense strand starting at position 1494 of SEQ ID NO: 915498
cuacgcugauuugauuauu

SEQ ID NO: 1084303 - RNA, 19 nt, Artificial Sequence
  Description of Artificial Sequence: Synthetic oligonucleotide
  Antisense strand to SEQ ID NO: 1084302
aauaaucaaaucagcguag

SEQ ID NO: 1084304 - RNA, 19 nt, Artificial Sequence
  Description of Artificial Sequence: Synthetic oligonucleotide
  Sense strand starting at position 1502 of SEQ ID NO: 915498
auuugauuauucgauguac

SEQ ID NO: 1084305 - RNA, 19 nt, Artificial Sequence
  Description of Artificial Sequence: Synthetic oligonucleotide
  Antisense strand to SEQ ID NO: 1084304
guacaucgaauaaucaaau

SEQ ID NO: 1084306 - RNA, 19 nt, Artificial Sequence
  Description of Artificial Sequence: Synthetic oligonucleotide
  Sense strand starting at position 1504 of SEQ ID NO: 915498
uugauuauucgauguacac

SEQ ID NO: 1084307 - RNA, 19 nt, Artificial Sequence
  Description of Artificial Sequence: Synthetic oligonucleotide
  Antisense strand to SEQ ID NO: 1084306
guguacaucgaauaaucaa

SEQ ID NO: 1084308 - RNA, 19 nt, Artificial Sequence
  Description of Artificial Sequence: Synthetic oligonucleotide
  Sense strand starting at position 1706 of SEQ ID NO: 915498
ggucuuggacgaugacuga

SEQ ID NO: 1084309 - RNA, 19 nt, Artificial Sequence
  Description of Artificial Sequence: Synthetic oligonucleotide
  Antisense strand to SEQ ID NO: 1084308
ucagucaucguccaagacc

SEQ ID NO: 1084310 - RNA, 19 nt, Artificial Sequence
  Description of Artificial Sequence: Synthetic oligonucleotide
  Sense strand starting at position 1713 of SEQ ID NO: 915498
gacgaugacugaucguuua

SEQ ID NO: 1084311 - RNA, 19 nt, Artificial Sequence
  Description of Artificial Sequence: Synthetic oligonucleotide
  Antisense strand to SEQ ID NO: 1084310
uaaacgaucagucaucguc

SEQ ID NO: 1084312 - RNA, 19 nt, Artificial Sequence
  Description of Artificial Sequence: Synthetic oligonucleotide
  Sense strand starting at position 1716 of SEQ ID NO: 915498
gaugacugaucguuuaagc

SEQ ID NO: 1084313 - RNA, 19 nt, Artificial Sequence
  Description of Artificial Sequence: Synthetic oligonucleotide
  Antisense strand to SEQ ID NO: 1084312
gcuuaaacgaucagucauc

SEQ ID NO: 1084314 - RNA, 19 nt, Artificial Sequence
  Description of Artificial Sequence: Synthetic oligonucleotide
  Sense strand starting at position 1721 of SEQ ID NO: 915498
cugaucguuuaagcagaua

SEQ ID NO: 1084315 - RNA, 19 nt, Artificial Sequence
  Description of Artificial Sequence: Synthetic oligonucleotide
  Antisense strand to SEQ ID NO: 1084314
uaucugcuuaaacgaucag

SEQ ID NO: 1084316 - RNA, 19 nt, Artificial Sequence
  Description of Artificial Sequence: Synthetic oligonucleotide
  Sense strand starting at position 1781 of SEQ ID NO: 915498
cgaccuuuauuuccugagu

SEQ ID NO: 1084317 - RNA, 19 nt, Artificial Sequence
  Description of Artificial Sequence: Synthetic oligonucleotide
  Antisense strand to SEQ ID NO: 1084316
acucaggaaauaaaggucg

SEQ ID NO: 1084318 - RNA, 19 nt, Artificial Sequence
  Description of Artificial Sequence: Synthetic oligonucleotide
  Sense strand starting at position 1783 of SEQ ID NO: 915498
accuuuauuuccugaguug

SEQ ID NO: 1084319 - RNA, 19 nt, Artificial Sequence
  Description of Artificial Sequence: Synthetic oligonucleotide
  Antisense strand to SEQ ID NO: 1084318
caacucaggaaauaaaggu

SEQ ID NO: 1084320 - RNA, 19 nt, Artificial Sequence
  Description of Artificial Sequence: Synthetic oligonucleotide
  Sense strand starting at position 1837 of SEQ ID NO: 915498
gcgcuaucgggcagacgaa

SEQ ID NO: 1084321 - RNA, 19 nt, Artificial Sequence
  Description of Artificial Sequence: Synthetic oligonucleotide
  Antisense strand to SEQ ID NO: 1084320
uucgucugcccgauagcgc

SEQ ID NO: 1084322 - RNA, 19 nt, Artificial Sequence
  Description of Artificial Sequence: Synthetic oligonucleotide
  Sense strand starting at position 2835 of SEQ ID NO: 915498
guggcaucuuccuuacuuu

SEQ ID NO: 1084323 - RNA, 19 nt, Artificial Sequence
  Description of Artificial Sequence: Synthetic oligonucleotide
  Antisense strand to SEQ ID NO: 1084322
aaaguaaggaagaugccac

SEQ ID NO: 1084324 - RNA, 19 nt, Artificial Sequence
  Description of Artificial Sequence: Synthetic oligonucleotide
  Sense strand starting at position 2902 of SEQ ID NO: 915498
aguggacuugauugauaua

SEQ ID NO: 1084325 - RNA, 19 nt, Artificial Sequence
  Description of Artificial Sequence: Synthetic oligonucleotide
  Antisense strand to SEQ ID NO: 1084324
uauaucaaucaaguccacu

SEQ ID NO: 1084326 - RNA, 19 nt, Artificial Sequence
  Description of Artificial Sequence: Synthetic oligonucleotide
  Sense strand starting at position 2948 of SEQ ID NO: 915498
aggugucaucaggagcuuu

SEQ ID NO: 1084327 - RNA, 19 nt, Artificial Sequence
  Description of Artificial Sequence: Synthetic oligonucleotide
  Antisense strand to SEQ ID NO: 1084326
aaagcuccugaugacaccu

SEQ ID NO: 1084328 - RNA, 19 nt, Artificial Sequence
  Description of Artificial Sequence: Synthetic oligonucleotide
  Sense strand starting at position 2975 of SEQ ID NO: 915498
ccuugaucaucugaggaau

SEQ ID NO: 1084329 - RNA, 19 nt, Artificial Sequence
  Description of Artificial Sequence: Synthetic oligonucleotide
  Antisense strand to SEQ ID NO: 1084328
auuccucagaugaucaagg

SEQ ID NO: 1084330 - RNA, 19 nt, Artificial Sequence
  Description of Artificial Sequence: Synthetic oligonucleotide
  Sense strand starting at position 2977 of SEQ ID NO: 915498
uugaucaucugaggaauca

SEQ ID NO: 1084331 - RNA, 19 nt, Artificial Sequence
  Description of Artificial Sequence: Synthetic oligonucleotide
  Antisense strand to SEQ ID NO: 1084330
ugauuccucagaugaucaa

SEQ ID NO: 1084332 - RNA, 19 nt, Artificial Sequence
  Description of Artificial Sequence: Synthetic oligonucleotide
  Sense strand starting at position 3048 of SEQ ID NO: 915498
cgcgucuauccggucuaaa

SEQ ID NO: 1084333 - RNA, 19 nt, Artificial Sequence
  Description of Artificial Sequence: Synthetic oligonucleotide
  Antisense strand to SEQ ID NO: 1084332
uuuagaccggauagacgcg

SEQ ID NO: 1084334 - RNA, 19 nt, Artificial Sequence
  Description of Artificial Sequence: Synthetic oligonucleotide
  Sense strand starting at position 3175 of SEQ ID NO: 915498
gguguaauagaauggugaa

SEQ ID NO: 1084335 - RNA, 19 nt, Artificial Sequence
  Description of Artificial Sequence: Synthetic oligonucleotide
  Antisense strand to SEQ ID NO: 1084334
uucaccauucuauuacacc

SEQ ID NO: 1084336 - RNA, 19 nt, Artificial Sequence
  Description of Artificial Sequence: Synthetic oligonucleotide
  Sense strand starting at position 3176 of SEQ ID NO: 915498
guguaauagaauggugaau

SEQ ID NO: 1084337 - RNA, 19 nt, Artificial Sequence
  Description of Artificial Sequence: Synthetic oligonucleotide
  Antisense strand to SEQ ID NO: 1084336
auucaccauucuauuacac

SEQ ID NO: 1084338 - RNA, 19 nt, Artificial Sequence
  Description of Artificial Sequence: Synthetic oligonucleotide
  Sense strand starting at position 3188 of SEQ ID NO: 915498
ggugaaucaaccuguggaa

SEQ ID NO: 1084339 - RNA, 19 nt, Artificial Sequence
  Description of Artificial Sequence: Synthetic oligonucleotide
  Antisense strand to SEQ ID NO: 1084338
uuccacagguugauucacc

SEQ ID NO: 1084340 - RNA, 19 nt, Artificial Sequence
  Description of Artificial Sequence: Synthetic oligonucleotide
  Sense strand starting at position 3190 of SEQ ID NO: 915498
ugaaucaaccuguggaauu

SEQ ID NO: 1084341 - RNA, 19 nt, Artificial Sequence
  Description of Artificial Sequence: Synthetic oligonucleotide
  Antisense strand to SEQ ID NO: 1084340
aauuccacagguugauuca

SEQ ID NO: 1084342 - RNA, 19 nt, Artificial Sequence
  Description of Artificial Sequence: Synthetic oligonucleotide
  Sense strand starting at position 3222 of SEQ ID NO: 915498
gccaaaggugggugucaga

SEQ ID NO: 1084343 - RNA, 19 nt, Artificial Sequence
  Description of Artificial Sequence: Synthetic oligonucleotide
  Antisense strand to SEQ ID NO: 1084342
ucugacacccaccuuuggc

SEQ ID NO: 1084344 - RNA, 19 nt, Artificial Sequence
  Description of Artificial Sequence: Synthetic oligonucleotide
  Sense strand starting at position 3264 of SEQ ID NO: 915498
guacauuugcuacgguauu

SEQ ID NO: 1084345 - RNA, 19 nt, Artificial Sequence
  Description of Artificial Sequence: Synthetic oligonucleotide
  Antisense strand to SEQ ID NO: 1084344
aauaccguagcaaauguac

SEQ ID NO: 1084346 - RNA, 19 nt, Artificial Sequence
  Description of Artificial Sequence: Synthetic oligonucleotide
  Sense strand starting at position 3282 of SEQ ID NO: 915498
ucaugaggacaguguugau

SEQ ID NO: 1084347 - RNA, 19 nt, Artificial Sequence
  Description of Artificial Sequence: Synthetic oligonucleotide
  Antisense strand to SEQ ID NO: 1084346
aucaacacuguccucauga

SEQ ID NO: 1084348 - RNA, 19 nt, Artificial Sequence
  Description of Artificial Sequence: Synthetic oligonucleotide
  Sense strand starting at position 3298 of SEQ ID NO: 915498
gauaccgguuccuuuacau

SEQ ID NO: 1084349 - RNA, 19 nt, Artificial Sequence
  Description of Artificial Sequence: Synthetic oligonucleotide
  Antisense strand to SEQ ID NO: 1084348
auguaaaggaaccgguauc

SEQ ID NO: 1084350 - RNA, 19 nt, Artificial Sequence
  Description of Artificial Sequence: Synthetic oligonucleotide
  Sense strand starting at position 3440 of SEQ ID NO: 915498
guagguugacuccagucau

SEQ ID NO: 1084351 - RNA, 19 nt, Artificial Sequence
  Description of Artificial Sequence: Synthetic oligonucleotide
  Antisense strand to SEQ ID NO: 1084350
augacuggagucaaccuac

SEQ ID NO: 1084352 - RNA, 19 nt, Artificial Sequence
  Description of Artificial Sequence: Synthetic oligonucleotide
  Sense strand starting at position 3444 of SEQ ID NO: 915498
guugacuccagucaugaga

SEQ ID NO: 1084353 - RNA, 19 nt, Artificial Sequence
  Description of Artificial Sequence: Synthetic oligonucleotide
  Antisense strand to SEQ ID NO: 1084352
ucucaugacuggagucaac

SEQ ID NO: 1084354 - RNA, 19 nt, Artificial Sequence
  Description of Artificial Sequence: Synthetic oligonucleotide
  Sense strand starting at position 3494 of SEQ ID NO: 915498
auugguuaccuuuagucuu

SEQ ID NO: 1084355 - RNA, 19 nt, Artificial Sequence
  Description of Artificial Sequence: Synthetic oligonucleotide
  Antisense strand to SEQ ID NO: 1084354
aagacuaaagguaaccaau

SEQ ID NO: 1084356 - RNA, 19 nt, Artificial Sequence
  Description of Artificial Sequence: Synthetic oligonucleotide
  Sense strand starting at position 3507 of SEQ ID NO: 915498
agucuuucuagagggaaua

SEQ ID NO: 1084357 - RNA, 19 nt, Artificial Sequence
  Description of Artificial Sequence: Synthetic oligonucleotide
  Antisense strand to SEQ ID NO: 1084356
uauucccucuagaaagacu

SEQ ID NO: 1084358 - RNA, 19 nt, Artificial Sequence
  Description of Artificial Sequence: Synthetic oligonucleotide
  Sense strand starting at position 3508 of SEQ ID NO: 915498
gucuuucuagagggaauaa

SEQ ID NO: 1084359 - RNA, 19 nt, Artificial Sequence
  Description of Artificial Sequence: Synthetic oligonucleotide
  Antisense strand to SEQ ID NO: 1084358
uuauucccucuagaaagac

SEQ ID NO: 1084360 - RNA, 19 nt, Artificial Sequence
  Description of Artificial Sequence: Synthetic oligonucleotide
  Sense strand starting at position 3602 of SEQ ID NO: 915498
uuuauuguaccagggaaca

SEQ ID NO: 1084361 - RNA, 19 nt, Artificial Sequence
  Description of Artificial Sequence: Synthetic oligonucleotide
  Antisense strand to SEQ ID NO: 1084360
uguucccugguacaauaaa

SEQ ID NO: 1084362 - RNA, 19 nt, Artificial Sequence
  Description of Artificial Sequence: Synthetic oligonucleotide
  Sense strand starting at position 3780 of SEQ ID NO: 915498
acgagauaugguggcuugu

SEQ ID NO: 1084363 - RNA, 19 nt, Artificial Sequence
  Description of Artificial Sequence: Synthetic oligonucleotide
  Antisense strand to SEQ ID NO: 1084362
acaagccaccauaucucgu

SEQ ID NO: 1084364 - RNA, 19 nt, Artificial Sequence
  Description of Artificial Sequence: Synthetic oligonucleotide
  Sense strand starting at position 62 of SEQ ID NO: 915499
aggauauaacucugaguac

SEQ ID NO: 1084365 - RNA, 19 nt, Artificial Sequence
  Description of Artificial Sequence: Synthetic oligonucleotide
  Antisense strand to SEQ ID NO: 1084364
guacucagaguuauauccu

SEQ ID NO: 1084366 - RNA, 19 nt, Artificial Sequence
  Description of Artificial Sequence: Synthetic oligonucleotide
  Sense strand starting at position 110 of SEQ ID NO: 915499
gagagaagcuaucucuguu

SEQ ID NO: 1084367 - RNA, 19 nt, Artificial Sequence
  Description of Artificial Sequence: Synthetic oligonucleotide
  Antisense strand to SEQ ID NO: 1084366
aacagagauagcuucucuc

SEQ ID NO: 1084368 - RNA, 19 nt, Artificial Sequence
  Description of Artificial Sequence: Synthetic oligonucleotide
  Sense strand starting at position 650 of SEQ ID NO: 915499
gcuagaaggucuucuauga

SEQ ID NO: 1084369 - RNA, 19 nt, Artificial Sequence
  Description of Artificial Sequence: Synthetic oligonucleotide
  Antisense strand to SEQ ID NO: 1084368
ucauagaagaccuucuagc

SEQ ID NO: 1084370 - RNA, 19 nt, Artificial Sequence
  Description of Artificial Sequence: Synthetic oligonucleotide
  Sense strand starting at position 654 of SEQ ID NO: 915499
gaaggucuucuaugauuau

SEQ ID NO: 1084371 - RNA, 19 nt, Artificial Sequence
  Description of Artificial Sequence: Synthetic oligonucleotide
  Antisense strand to SEQ ID NO: 1084370
auaaucauagaagaccuuc

SEQ ID NO: 1084372 - RNA, 19 nt, Artificial Sequence
  Description of Artificial Sequence: Synthetic oligonucleotide
  Sense strand starting at position 657 of SEQ ID NO: 915499
ggucuucuaugauuauaaa

SEQ ID NO: 1084373 - RNA, 19 nt, Artificial Sequence
  Description of Artificial Sequence: Synthetic oligonucleotide
  Antisense strand to SEQ ID NO: 1084372
uuuauaaucauagaagacc

SEQ ID NO: 1084374 - RNA, 19 nt, Artificial Sequence
  Description of Artificial Sequence: Synthetic oligonucleotide
  Sense strand starting at position 705 of SEQ ID NO: 915499
ugcccaaagguguaaacua

SEQ ID NO: 1084375 - RNA, 19 nt, Artificial Sequence
  Description of Artificial Sequence: Synthetic oligonucleotide
  Antisense strand to SEQ ID NO: 1084374
uaguuuacaccuuugggca

SEQ ID NO: 1084376 - RNA, 19 nt, Artificial Sequence
  Description of Artificial Sequence: Synthetic oligonucleotide
  Sense strand starting at position 978 of SEQ ID NO: 915499
gagucauuaggaugaucau

SEQ ID NO: 1084377 - RNA, 19 nt, Artificial Sequence
  Description of Artificial Sequence: Synthetic oligonucleotide
  Antisense strand to SEQ ID NO: 1084376
augaucauccuaaugacuc

SEQ ID NO: 1084378 - RNA, 19 nt, Artificial Sequence
  Description of Artificial Sequence: Synthetic oligonucleotide
  Sense strand starting at position 1135 of SEQ ID NO: 915499
cagggaacaucugcauguu

SEQ ID NO: 1084379 - RNA, 19 nt, Artificial Sequence
  Description of Artificial Sequence: Synthetic oligonucleotide
  Antisense strand to SEQ ID NO: 1084378
aacaugcagauguucccug

SEQ ID NO: 1084380 - RNA, 19 nt, Artificial Sequence
  Description of Artificial Sequence: Synthetic oligonucleotide
  Sense strand starting at position 1192 of SEQ ID NO: 915499
cuaacucaguaaucuggaa

SEQ ID NO: 1084381 - RNA, 19 nt, Artificial Sequence
  Description of Artificial Sequence: Synthetic oligonucleotide
  Antisense strand to SEQ ID NO: 1084380
uuccagauuacugaguuag

SEQ ID NO: 1084382 - RNA, 19 nt, Artificial Sequence
  Description of Artificial Sequence: Synthetic oligonucleotide
  Sense strand starting at position 1264 of SEQ ID NO: 915499
cuuuaacaguucuugagac

SEQ ID NO: 1084383 - RNA, 19 nt, Artificial Sequence
  Description of Artificial Sequence: Synthetic oligonucleotide
  Antisense strand to SEQ ID NO: 1084382
gucucaagaacuguuaaag

SEQ ID NO: 1084384 - RNA, 19 nt, Artificial Sequence
  Description of Artificial Sequence: Synthetic oligonucleotide
  Sense strand starting at position 1407 of SEQ ID NO: 915499
guauccuagcauuacuaca

SEQ ID NO: 1084385 - RNA, 19 nt, Artificial Sequence
  Description of Artificial Sequence: Synthetic oligonucleotide
  Antisense strand to SEQ ID NO: 1084384
uguaguaaugcuaggauac

SEQ ID NO: 1084386 - RNA, 19 nt, Artificial Sequence
  Description of Artificial Sequence: Synthetic oligonucleotide
  Sense strand starting at position 1598 of SEQ ID NO: 915499
acagaacugcuauguggau

SEQ ID NO: 1084387 - RNA, 19 nt, Artificial Sequence
  Description of Artificial Sequence: Synthetic oligonucleotide
  Antisense strand to SEQ ID NO: 1084386
auccacauagcaguucugu

SEQ ID NO: 1084388 - RNA, 19 nt, Artificial Sequence
  Description of Artificial Sequence: Synthetic oligonucleotide
  Sense strand starting at position 1599 of SEQ ID NO: 915499
cagaacugcuauguggauu

SEQ ID NO: 1084389 - RNA, 19 nt, Artificial Sequence
  Description of Artificial Sequence: Synthetic oligonucleotide
  Antisense strand to SEQ ID NO: 1084388
aauccacauagcaguucug

SEQ ID NO: 1084390 - RNA, 19 nt, Artificial Sequence
  Description of Artificial Sequence: Synthetic oligonucleotide
  Sense strand starting at position 1600 of SEQ ID NO: 915499
agaacugcuauguggauua

SEQ ID NO: 1084391 - RNA, 19 nt, Artificial Sequence
  Description of Artificial Sequence: Synthetic oligonucleotide
  Antisense strand to SEQ ID NO: 1084390
uaauccacauagcaguucu

SEQ ID NO: 1084392 - RNA, 19 nt, Artificial Sequence
  Description of Artificial Sequence: Synthetic oligonucleotide
  Sense strand starting at position 1613 of SEQ ID NO: 915499
ggauuagccucaucaggac

SEQ ID NO: 1084393 - RNA, 19 nt, Artificial Sequence
  Description of Artificial Sequence: Synthetic oligonucleotide
  Antisense strand to SEQ ID NO: 1084392
guccugaugaggcuaaucc

SEQ ID NO: 1084394 - RNA, 19 nt, Artificial Sequence
  Description of Artificial Sequence: Synthetic oligonucleotide
  Sense strand starting at position 1694 of SEQ ID NO: 915499
gaaauauaccuucggguaa

SEQ ID NO: 1084395 - RNA, 19 nt, Artificial Sequence
  Description of Artificial Sequence: Synthetic oligonucleotide
  Antisense strand to SEQ ID NO: 1084394
uuacccgaagguauauuuc

SEQ ID NO: 1084396 - RNA, 19 nt, Artificial Sequence
  Description of Artificial Sequence: Synthetic oligonucleotide
  Sense strand starting at position 1698 of SEQ ID NO: 915499
uauaccuucggguaaacau

SEQ ID NO: 1084397 - RNA, 19 nt, Artificial Sequence
  Description of Artificial Sequence: Synthetic oligonucleotide
  Antisense strand to SEQ ID NO: 1084396
auguuuacccgaagguaua

SEQ ID NO: 1084398 - RNA, 19 nt, Artificial Sequence
  Description of Artificial Sequence: Synthetic oligonucleotide
  Sense strand starting at position 1736 of SEQ ID NO: 915499
uggucauugcugugauuuc

SEQ ID NO: 1084399 - RNA, 19 nt, Artificial Sequence
  Description of Artificial Sequence: Synthetic oligonucleotide
  Antisense strand to SEQ ID NO: 1084398
gaaaucacagcaaugacca

SEQ ID NO: 1084400 - RNA, 19 nt, Artificial Sequence
  Description of Artificial Sequence: Synthetic oligonucleotide
  Sense strand starting at position 2004 of SEQ ID NO: 915499
agaggaaaugcugggugaa

SEQ ID NO: 1084401 - RNA, 19 nt, Artificial Sequence
  Description of Artificial Sequence: Synthetic oligonucleotide
  Antisense strand to SEQ ID NO: 1084400
uucacccagcauuuccucu

SEQ ID NO: 1084402 - RNA, 19 nt, Artificial Sequence
  Description of Artificial Sequence: Synthetic oligonucleotide
  Sense strand starting at position 2005 of SEQ ID NO: 915499
gaggaaaugcugggugaac

SEQ ID NO: 1084403 - RNA, 19 nt, Artificial Sequence
  Description of Artificial Sequence: Synthetic oligonucleotide
  Antisense strand to SEQ ID NO: 1084402
guucacccagcauuuccuc

SEQ ID NO: 1084404 - RNA, 19 nt, Artificial Sequence
  Description of Artificial Sequence: Synthetic oligonucleotide
  Sense strand starting at position 2357 of SEQ ID NO: 915499
ucaggugccagguauauaa

SEQ ID NO: 1084405 - RNA, 19 nt, Artificial Sequence
  Description of Artificial Sequence: Synthetic oligonucleotide
  Antisense strand to SEQ ID NO: 1084404
uuauauaccuggcaccuga

SEQ ID NO: 1084406 - RNA, 19 nt, Artificial Sequence
  Description of Artificial Sequence: Synthetic oligonucleotide
  Sense strand starting at position 2410 of SEQ ID NO: 915499
ggaagauuugggcgacgca

SEQ ID NO: 1084407 - RNA, 19 nt, Artificial Sequence
  Description of Artificial Sequence: Synthetic oligonucleotide
  Antisense strand to SEQ ID NO: 1084406
ugcgucgcccaaaucuucc

SEQ ID NO: 1084408 - RNA, 19 nt, Artificial Sequence
  Description of Artificial Sequence: Synthetic oligonucleotide
  Sense strand starting at position 2472 of SEQ ID NO: 915499
auucgaaagaucuggguuc

SEQ ID NO: 1084409 - RNA, 19 nt, Artificial Sequence
  Description of Artificial Sequence: Synthetic oligonucleotide
  Antisense strand to SEQ ID NO: 1084408
gaacccagaucuuucgaau

SEQ ID NO: 1084410 - RNA, 19 nt, Artificial Sequence
  Description of Artificial Sequence: Synthetic oligonucleotide
  Sense strand starting at position 2591 of SEQ ID NO: 915499
ugaggaucauaugcgacaa

SEQ ID NO: 1084411 - RNA, 19 nt, Artificial Sequence
  Description of Artificial Sequence: Synthetic oligonucleotide
  Antisense strand to SEQ ID NO: 1084410
uugucgcauaugauccuca

SEQ ID NO: 1084412 - RNA, 19 nt, Artificial Sequence
  Description of Artificial Sequence: Synthetic oligonucleotide
  Sense strand starting at position 2595 of SEQ ID NO: 915499
gaucauaugcgacaaugua

SEQ ID NO: 1084413 - RNA, 19 nt, Artificial Sequence
  Description of Artificial Sequence: Synthetic oligonucleotide
  Antisense strand to SEQ ID NO: 1084412
uacauugucgcauaugauc

SEQ ID NO: 1084414 - RNA, 19 nt, Artificial Sequence
  Description of Artificial Sequence: Synthetic oligonucleotide
  Sense strand starting at position 2629 of SEQ ID NO: 915499
aacauuaucggaggaaggu

SEQ ID NO: 1084415 - RNA, 19 nt, Artificial Sequence
  Description of Artificial Sequence: Synthetic oligonucleotide
  Antisense strand to SEQ ID NO: 1084414
accuuccuccgauaauguu

SEQ ID NO: 1084416 - RNA, 19 nt, Artificial Sequence
  Description of Artificial Sequence: Synthetic oligonucleotide
  Sense strand starting at position 2642 of SEQ ID NO: 915499
gaagguggacucugaagua

SEQ ID NO: 1084417 - RNA, 19 nt, Artificial Sequence
  Description of Artificial Sequence: Synthetic oligonucleotide
  Antisense strand to SEQ ID NO: 1084416
uacuucagaguccaccuuc

SEQ ID NO: 1084418 - RNA, 19 nt, Artificial Sequence
  Description of Artificial Sequence: Synthetic oligonucleotide
  Sense strand starting at position 2667 of SEQ ID NO: 915499
guagacuauggauguagaa

SEQ ID NO: 1084419 - RNA, 19 nt, Artificial Sequence
  Description of Artificial Sequence: Synthetic oligonucleotide
  Antisense strand to SEQ ID NO: 1084418
uucuacauccauagucuac

SEQ ID NO: 1084420 - RNA, 19 nt, Artificial Sequence
  Description of Artificial Sequence: Synthetic oligonucleotide
  Sense strand starting at position 2739 of SEQ ID NO: 915499
gcuacaugaccuuggacua

SEQ ID NO: 1084421 - RNA, 19 nt, Artificial Sequence
  Description of Artificial Sequence: Synthetic oligonucleotide
  Antisense strand to SEQ ID NO: 1084420
uaguccaaggucauguagc

SEQ ID NO: 1084422 - RNA, 19 nt, Artificial Sequence
  Description of Artificial Sequence: Synthetic oligonucleotide
  Sense strand starting at position 2782 of SEQ ID NO: 915499
ggugaugacagcuauccuu

SEQ ID NO: 1084423 - RNA, 19 nt, Artificial Sequence
  Description of Artificial Sequence: Synthetic oligonucleotide
  Antisense strand to SEQ ID NO: 1084422
aaggauagcugucaucacc

SEQ ID NO: 1084424 - RNA, 19 nt, Artificial Sequence
  Description of Artificial Sequence: Synthetic oligonucleotide
  Sense strand starting at position 2788 of SEQ ID NO: 915499
gacagcuauccuugaggac

SEQ ID NO: 1084425 - RNA, 19 nt, Artificial Sequence
  Description of Artificial Sequence: Synthetic oligonucleotide
  Antisense strand to SEQ ID NO: 1084424
guccucaaggauagcuguc

SEQ ID NO: 1084426 - RNA, 19 nt, Artificial Sequence
  Description of Artificial Sequence: Synthetic oligonucleotide
  Sense strand starting at position 2926 of SEQ ID NO: 915499
agaaaucuuugggcccuga

SEQ ID NO: 1084427 - RNA, 19 nt, Artificial Sequence
  Description of Artificial Sequence: Synthetic oligonucleotide
  Antisense strand to SEQ ID NO: 1084426
ucagggcccaaagauuucu

SEQ ID NO: 1084428 - RNA, 19 nt, Artificial Sequence
  Description of Artificial Sequence: Synthetic oligonucleotide
  Sense strand starting at position 2963 of SEQ ID NO: 915499
acauaauuucugugccugu

SEQ ID NO: 1084429 - RNA, 19 nt, Artificial Sequence
  Description of Artificial Sequence: Synthetic oligonucleotide
  Antisense strand to SEQ ID NO: 1084428
acaggcacagaaauuaugu

SEQ ID NO: 1084430 - RNA, 19 nt, Artificial Sequence
  Description of Artificial Sequence: Synthetic oligonucleotide
  Sense strand starting at position 3030 of SEQ ID NO: 915499
gaagaauuaccuugucuag

SEQ ID NO: 1084431 - RNA, 19 nt, Artificial Sequence
  Description of Artificial Sequence: Synthetic oligonucleotide
  Antisense strand to SEQ ID NO: 1084430
cuagacaagguaauucuuc

SEQ ID NO: 1084432 - RNA, 19 nt, Artificial Sequence
  Description of Artificial Sequence: Synthetic oligonucleotide
  Sense strand starting at position 3071 of SEQ ID NO: 915499
agugcaauaguuugggaaa

SEQ ID NO: 1084433 - RNA, 19 nt, Artificial Sequence
  Description of Artificial Sequence: Synthetic oligonucleotide
  Antisense strand to SEQ ID NO: 1084432
uuucccaaacuauugcacu

SEQ ID NO: 1084434 - RNA, 19 nt, Artificial Sequence
  Description of Artificial Sequence: Synthetic oligonucleotide
  Sense strand starting at position 3195 of SEQ ID NO: 915499
ggaucaauauuggugacua

SEQ ID NO: 1084435 - RNA, 19 nt, Artificial Sequence
  Description of Artificial Sequence: Synthetic oligonucleotide
  Antisense strand to SEQ ID NO: 1084434
uagucaccaauauugaucc

SEQ ID NO: 1084436 - RNA, 19 nt, Artificial Sequence
  Description of Artificial Sequence: Synthetic oligonucleotide
  Sense strand starting at position 3245 of SEQ ID NO: 915499
gugacuccgugguugauuu

SEQ ID NO: 1084437 - RNA, 19 nt, Artificial Sequence
  Description of Artificial Sequence: Synthetic oligonucleotide
  Antisense strand to SEQ ID NO: 1084436
aaaucaaccacggagucac

SEQ ID NO: 1084438 - RNA, 19 nt, Artificial Sequence
  Description of Artificial Sequence: Synthetic oligonucleotide
  Sense strand starting at position 3246 of SEQ ID NO: 915499
ugacuccgugguugauuua

SEQ ID NO: 1084439 - RNA, 19 nt, Artificial Sequence
  Description of Artificial Sequence: Synthetic oligonucleotide
  Antisense strand to SEQ ID NO: 1084438
uaaaucaaccacggaguca

SEQ ID NO: 1084440 - RNA, 19 nt, Artificial Sequence
  Description of Artificial Sequence: Synthetic oligonucleotide
  Sense strand starting at position 3376 of SEQ ID NO: 915499
uggaguuauguugggauaa

SEQ ID NO: 1084441 - RNA, 19 nt, Artificial Sequence
  Description of Artificial Sequence: Synthetic oligonucleotide
  Antisense strand to SEQ ID NO: 1084440
uuaucccaacauaacucca

SEQ ID NO: 1084442 - RNA, 19 nt, Artificial Sequence
  Description of Artificial Sequence: Synthetic oligonucleotide
  Sense strand starting at position 3387 of SEQ ID NO: 915499
ugggauaaauguguggaga

SEQ ID NO: 1084443 - RNA, 19 nt, Artificial Sequence
  Description of Artificial Sequence: Synthetic oligonucleotide
  Antisense strand to SEQ ID NO: 1084442
ucuccacacauuuauccca

SEQ ID NO: 1084444 - RNA, 19 nt, Artificial Sequence
  Description of Artificial Sequence: Synthetic oligonucleotide
  Sense strand starting at position 79 of SEQ ID NO: 915500
uuuaguaccuuacuguauu

SEQ ID NO: 1084445 - RNA, 19 nt, Artificial Sequence
  Description of Artificial Sequence: Synthetic oligonucleotide
  Antisense strand to SEQ ID NO: 1084444
aauacaguaagguacuaaa

SEQ ID NO: 1084446 - RNA, 19 nt, Artificial Sequence
  Description of Artificial Sequence: Synthetic oligonucleotide
  Sense strand starting at position 87 of SEQ ID NO: 915500
cuuacuguauuuggaaaga

SEQ ID NO: 1084447 - RNA, 19 nt, Artificial Sequence
  Description of Artificial Sequence: Synthetic oligonucleotide
  Antisense strand to SEQ ID NO: 1084446
ucuuuccaaauacaguaag

SEQ ID NO: 1084448 - RNA, 19 nt, Artificial Sequence
  Description of Artificial Sequence: Synthetic oligonucleotide
  Sense strand starting at position 589 of SEQ ID NO: 915500
ccagucuccugccuggaaa

SEQ ID NO: 1084449 - RNA, 19 nt, Artificial Sequence
  Description of Artificial Sequence: Synthetic oligonucleotide
  Antisense strand to SEQ ID NO: 1084448
uuuccaggcaggagacugg

SEQ ID NO: 1084450 - RNA, 19 nt, Artificial Sequence
  Description of Artificial Sequence: Synthetic oligonucleotide
  Sense strand starting at position 751 of SEQ ID NO: 915500
ccuuguacugaucauuacu

SEQ ID NO: 1084451 - RNA, 19 nt, Artificial Sequence
  Description of Artificial Sequence: Synthetic oligonucleotide
  Antisense strand to SEQ ID NO: 1084450
aguaaugaucaguacaagg

SEQ ID NO: 1084452 - RNA, 19 nt, Artificial Sequence
  Description of Artificial Sequence: Synthetic oligonucleotide
  Sense strand starting at position 805 of SEQ ID NO: 915500
agcaauacagguuauaauu

SEQ ID NO: 1084453 - RNA, 19 nt, Artificial Sequence
  Description of Artificial Sequence: Synthetic oligonucleotide
  Antisense strand to SEQ ID NO: 1084452
aauuauaaccuguauugcu

SEQ ID NO: 1084454 - RNA, 19 nt, Artificial Sequence
  Description of Artificial Sequence: Synthetic oligonucleotide
  Sense strand starting at position 929 of SEQ ID NO: 915500
ucauucgucaacgaguauu

SEQ ID NO: 1084455 - RNA, 19 nt, Artificial Sequence
  Description of Artificial Sequence: Synthetic oligonucleotide
  Antisense strand to SEQ ID NO: 1084454
aauacucguugacgaauga

SEQ ID NO: 1084456 - RNA, 19 nt, Artificial Sequence
  Description of Artificial Sequence: Synthetic oligonucleotide
  Sense strand starting at position 1036 of SEQ ID NO: 915500
gccagagagacugacguua

SEQ ID NO: 1084457 - RNA, 19 nt, Artificial Sequence
  Description of Artificial Sequence: Synthetic oligonucleotide
  Antisense strand to SEQ ID NO: 1084456
uaacgucagucucucuggc

SEQ ID NO: 1084458 - RNA, 19 nt, Artificial Sequence
  Description of Artificial Sequence: Synthetic oligonucleotide
  Sense strand starting at position 1084 of SEQ ID NO: 915500
ugauacgugcuaugaagaa

SEQ ID NO: 1084459 - RNA, 19 nt, Artificial Sequence
  Description of Artificial Sequence: Synthetic oligonucleotide
  Antisense strand to SEQ ID NO: 1084458
uucuucauagcacguauca

SEQ ID NO: 1084460 - RNA, 19 nt, Artificial Sequence
  Description of Artificial Sequence: Synthetic oligonucleotide
  Sense strand starting at position 1276 of SEQ ID NO: 915500
agcagagugucagcaaaua

SEQ ID NO: 1084461 - RNA, 19 nt, Artificial Sequence
  Description of Artificial Sequence: Synthetic oligonucleotide
  Antisense strand to SEQ ID NO: 1084460
uauuugcugacacucugcu

SEQ ID NO: 1084462 - RNA, 19 nt, Artificial Sequence
  Description of Artificial Sequence: Synthetic oligonucleotide
  Sense strand starting at position 2287 of SEQ ID NO: 915500
cagcgauggcaucaccauu

SEQ ID NO: 1084463 - RNA, 19 nt, Artificial Sequence
  Description of Artificial Sequence: Synthetic oligonucleotide
  Antisense strand to SEQ ID NO: 1084462
aauggugaugccaucgcug

SEQ ID NO: 1084464 - RNA, 19 nt, Artificial Sequence
  Description of Artificial Sequence: Synthetic oligonucleotide
  Sense strand starting at position 2384 of SEQ ID NO: 915500
uuuggugugcguucgcaaa

SEQ ID NO: 1084465 - RNA, 19 nt, Artificial Sequence
  Description of Artificial Sequence: Synthetic oligonucleotide
  Antisense strand to SEQ ID NO: 1084464
uuugcgaacgcacaccaaa

SEQ ID NO: 1084466 - RNA, 19 nt, Artificial Sequence
  Description of Artificial Sequence: Synthetic oligonucleotide
  Sense strand starting at position 2585 of SEQ ID NO: 915500
acuggauaaucgucaccca

SEQ ID NO: 1084467 - RNA, 19 nt, Artificial Sequence
  Description of Artificial Sequence: Synthetic oligonucleotide
  Antisense strand to SEQ ID NO: 1084466
ugggugacgauuauccagu

SEQ ID NO: 1084468 - RNA, 19 nt, Artificial Sequence
  Description of Artificial Sequence: Synthetic oligonucleotide
  Sense strand starting at position 2586 of SEQ ID NO: 915500
cuggauaaucgucacccaa

SEQ ID NO: 1084469 - RNA, 19 nt, Artificial Sequence
  Description of Artificial Sequence: Synthetic oligonucleotide
  Antisense strand to SEQ ID NO: 1084468
uugggugacgauuauccag

SEQ ID NO: 1084470 - RNA, 19 nt, Artificial Sequence
  Description of Artificial Sequence: Synthetic oligonucleotide
  Sense strand starting at position 2826 of SEQ ID NO: 915500
ugggaagugucuccaauga

SEQ ID NO: 1084471 - RNA, 19 nt, Artificial Sequence
  Description of Artificial Sequence: Synthetic oligonucleotide
  Antisense strand to SEQ ID NO: 1084470
ucauuggagacacuuccca

SEQ ID NO: 1084472 - RNA, 19 nt, Artificial Sequence
  Description of Artificial Sequence: Synthetic oligonucleotide
  Sense strand starting at position 2944 of SEQ ID NO: 915500
accuguggcaucuggagaa

SEQ ID NO: 1084473 - RNA, 19 nt, Artificial Sequence
  Description of Artificial Sequence: Synthetic oligonucleotide
  Antisense strand to SEQ ID NO: 1084472
uucuccagaugccacaggu

SEQ ID NO: 1084474 - RNA, 19 nt, Artificial Sequence
  Description of Artificial Sequence: Synthetic oligonucleotide
  Sense strand starting at position 2957 of SEQ ID NO: 915500
ggagaacgucgaugaccau

SEQ ID NO: 1084475 - RNA, 19 nt, Artificial Sequence
  Description of Artificial Sequence: Synthetic oligonucleotide
  Antisense strand to SEQ ID NO: 1084474
auggucaucgacguucucc

SEQ ID NO: 1084476 - RNA, 19 nt, Artificial Sequence
  Description of Artificial Sequence: Synthetic oligonucleotide
  Sense strand starting at position 2958 of SEQ ID NO: 915500
gagaacgucgaugaccaua

SEQ ID NO: 1084477 - RNA, 19 nt, Artificial Sequence
  Description of Artificial Sequence: Synthetic oligonucleotide
  Antisense strand to SEQ ID NO: 1084476
uauggucaucgacguucuc

SEQ ID NO: 1084478 - RNA, 19 nt, Artificial Sequence
  Description of Artificial Sequence: Synthetic oligonucleotide
  Sense strand starting at position 3020 of SEQ ID NO: 915500
ucucuagggaucugaaugu

SEQ ID NO: 1084479 - RNA, 19 nt, Artificial Sequence
  Description of Artificial Sequence: Synthetic oligonucleotide
  Antisense strand to SEQ ID NO: 1084478
acauucagaucccuagaga

SEQ ID NO: 1084480 - RNA, 19 nt, Artificial Sequence
  Description of Artificial Sequence: Synthetic oligonucleotide
  Sense strand starting at position 3042 of SEQ ID NO: 915500
ggagcuauaccaugcuuac

SEQ ID NO: 1084481 - RNA, 19 nt, Artificial Sequence
  Description of Artificial Sequence: Synthetic oligonucleotide
  Antisense strand to SEQ ID NO: 1084480
guaagcaugguauagcucc

SEQ ID NO: 1084482 - RNA, 19 nt, Artificial Sequence
  Description of Artificial Sequence: Synthetic oligonucleotide
  Sense strand starting at position 3045 of SEQ ID NO: 915500
gcuauaccaugcuuacuga

SEQ ID NO: 1084483 - RNA, 19 nt, Artificial Sequence
  Description of Artificial Sequence: Synthetic oligonucleotide
  Antisense strand to SEQ ID NO: 1084482
ucaguaagcaugguauagc

SEQ ID NO: 1084484 - RNA, 19 nt, Artificial Sequence
  Description of Artificial Sequence: Synthetic oligonucleotide
  Sense strand starting at position 3053 of SEQ ID NO: 915500
augcuuacugacugucuua

SEQ ID NO: 1084485 - RNA, 19 nt, Artificial Sequence
  Description of Artificial Sequence: Synthetic oligonucleotide
  Antisense strand to SEQ ID NO: 1084484
uaagacagucaguaagcau

SEQ ID NO: 1084486 - RNA, 19 nt, Artificial Sequence
  Description of Artificial Sequence: Synthetic oligonucleotide
  Sense strand starting at position 3056 of SEQ ID NO: 915500
cuuacugacugucuuauga

SEQ ID NO: 1084487 - RNA, 19 nt, Artificial Sequence
  Description of Artificial Sequence: Synthetic oligonucleotide
  Antisense strand to SEQ ID NO: 1084486
ucauaagacagucaguaag

SEQ ID NO: 1084488 - RNA, 19 nt, Artificial Sequence
  Description of Artificial Sequence: Synthetic oligonucleotide
  Sense strand starting at position 3107 of SEQ ID NO: 915500
gcauguguaacaggaugua

SEQ ID NO: 1084489 - RNA, 19 nt, Artificial Sequence
  Description of Artificial Sequence: Synthetic oligonucleotide
  Antisense strand to SEQ ID NO: 1084488
uacauccuguuacacaugc

SEQ ID NO: 1084490 - RNA, 19 nt, Artificial Sequence
  Description of Artificial Sequence: Synthetic oligonucleotide
  Sense strand starting at position 3234 of SEQ ID NO: 915500
ucuagaaaccaguguauga

SEQ ID NO: 1084491 - RNA, 19 nt, Artificial Sequence
  Description of Artificial Sequence: Synthetic oligonucleotide
  Antisense strand to SEQ ID NO: 1084490
ucauacacugguuucuaga

SEQ ID NO: 1084492 - RNA, 19 nt, Artificial Sequence
  Description of Artificial Sequence: Synthetic oligonucleotide
  Sense strand starting at position 3238 of SEQ ID NO: 915500
gaaaccaguguaugacuuu

SEQ ID NO: 1084493 - RNA, 19 nt, Artificial Sequence
  Description of Artificial Sequence: Synthetic oligonucleotide
  Antisense strand to SEQ ID NO: 1084492
aaagucauacacugguuuc

SEQ ID NO: 1084494 - RNA, 19 nt, Artificial Sequence
  Description of Artificial Sequence: Synthetic oligonucleotide
  Sense strand starting at position 3297 of SEQ ID NO: 915500
uaggauauguggccacaau

SEQ ID NO: 1084495 - RNA, 19 nt, Artificial Sequence
  Description of Artificial Sequence: Synthetic oligonucleotide
  Antisense strand to SEQ ID NO: 1084494
auuguggccacauauccua

SEQ ID NO: 1084496 - RNA, 19 nt, Artificial Sequence
  Description of Artificial Sequence: Synthetic oligonucleotide
  Sense strand starting at position 3298 of SEQ ID NO: 915500
aggauauguggccacaauu

SEQ ID NO: 1084497 - RNA, 19 nt, Artificial Sequence
  Description of Artificial Sequence: Synthetic oligonucleotide
  Antisense strand to SEQ ID NO: 1084496
aauuguggccacauauccu

SEQ ID NO: 1084498 - RNA, 19 nt, Artificial Sequence
  Description of Artificial Sequence: Synthetic oligonucleotide
  Sense strand starting at position 3389 of SEQ ID NO: 915500
ugguaugcaucccucuaga

SEQ ID NO: 1084499 - RNA, 19 nt, Artificial Sequence
  Description of Artificial Sequence: Synthetic oligonucleotide
  Antisense strand to SEQ ID NO: 1084498
ucuagagggaugcauacca

SEQ ID NO: 1084500 - RNA, 19 nt, Artificial Sequence
  Description of Artificial Sequence: Synthetic oligonucleotide
  Sense strand starting at position 3453 of SEQ ID NO: 915500
aagggcuuguggcuggaua

SEQ ID NO: 1084501 - RNA, 19 nt, Artificial Sequence
  Description of Artificial Sequence: Synthetic oligonucleotide
  Antisense strand to SEQ ID NO: 1084500
uauccagccacaagcccuu

SEQ ID NO: 1084502 - RNA, 19 nt, Artificial Sequence
  Description of Artificial Sequence: Synthetic oligonucleotide
  Sense strand starting at position 3454 of SEQ ID NO: 915500
agggcuuguggcuggauau

SEQ ID NO: 1084503 - RNA, 19 nt, Artificial Sequence
  Description of Artificial Sequence: Synthetic oligonucleotide
  Antisense strand to SEQ ID NO: 1084502
auauccagccacaagcccu

SEQ ID NO: 1084504 - RNA, 19 nt, Artificial Sequence
  Description of Artificial Sequence: Synthetic oligonucleotide
  Sense strand starting at position 3465 of SEQ ID NO: 915500
cuggauaucugcucuaaua

SEQ ID NO: 1084505 - RNA, 19 nt, Artificial Sequence
  Description of Artificial Sequence: Synthetic oligonucleotide
  Antisense strand to SEQ ID NO: 1084504
uauuagagcagauauccag

SEQ ID NO: 1084506 - RNA, 19 nt, Artificial Sequence
  Description of Artificial Sequence: Synthetic oligonucleotide
  Sense strand starting at position 3467 of SEQ ID NO: 915500
ggauaucugcucuaauagc

SEQ ID NO: 1084507 - RNA, 19 nt, Artificial Sequence
  Description of Artificial Sequence: Synthetic oligonucleotide
  Antisense strand to SEQ ID NO: 1084506
gcuauuagagcagauaucc

SEQ ID NO: 1084508 - RNA, 19 nt, Artificial Sequence
  Description of Artificial Sequence: Synthetic oligonucleotide
  Sense strand starting at position 3475 of SEQ ID NO: 915500
gcucuaauagcugagcaaa

SEQ ID NO: 1084509 - RNA, 19 nt, Artificial Sequence
  Description of Artificial Sequence: Synthetic oligonucleotide
  Antisense strand to SEQ ID NO: 1084508
uuugcucagcuauuagagc

SEQ ID NO: 1084510 - RNA, 19 nt, Artificial Sequence
  Description of Artificial Sequence: Synthetic oligonucleotide
  Sense strand starting at position 3477 of SEQ ID NO: 915500
ucuaauagcugagcaaaga

SEQ ID NO: 1084511 - RNA, 19 nt, Artificial Sequence
  Description of Artificial Sequence: Synthetic oligonucleotide
  Antisense strand to SEQ ID NO: 1084510
ucuuugcucagcuauuaga

SEQ ID NO: 1084512 - RNA, 19 nt, Artificial Sequence
  Description of Artificial Sequence: Synthetic oligonucleotide
  Sense strand starting at position 3551 of SEQ ID NO: 915500
guccauuucccaugugagu

SEQ ID NO: 1084513 - RNA, 19 nt, Artificial Sequence
  Description of Artificial Sequence: Synthetic oligonucleotide
  Antisense strand to SEQ ID NO: 1084512
acucacaugggaaauggac

SEQ ID NO: 1084514 - RNA, 19 nt, Artificial Sequence
  Description of Artificial Sequence: Synthetic oligonucleotide
  Sense strand starting at position 3603 of SEQ ID NO: 915500
ggucuuagaccuuguccaa

SEQ ID NO: 1084515 - RNA, 19 nt, Artificial Sequence
  Description of Artificial Sequence: Synthetic oligonucleotide
  Antisense strand to SEQ ID NO: 1084514
uuggacaaggucuaagacc

SEQ ID NO: 1084516 - RNA, 19 nt, Artificial Sequence
  Description of Artificial Sequence: Synthetic oligonucleotide
  Sense strand starting at position 3656 of SEQ ID NO: 915500
gacagucgaucacuagauu

SEQ ID NO: 1084517 - RNA, 19 nt, Artificial Sequence
  Description of Artificial Sequence: Synthetic oligonucleotide
  Antisense strand to SEQ ID NO: 1084516
aaucuagugaucgacuguc

SEQ ID NO: 1084518 - RNA, 19 nt, Artificial Sequence
  Description of Artificial Sequence: Synthetic oligonucleotide
  Sense strand starting at position 3914 of SEQ ID NO: 915500
ccaggcauccacugaguaa

SEQ ID NO: 1084519 - RNA, 19 nt, Artificial Sequence
  Description of Artificial Sequence: Synthetic oligonucleotide
  Antisense strand to SEQ ID NO: 1084518
uuacucaguggaugccugg

SEQ ID NO: 1084520 - RNA, 19 nt, Artificial Sequence
  Description of Artificial Sequence: Synthetic oligonucleotide
  Sense strand starting at position 3917 of SEQ ID NO: 915500
ggcauccacugaguaacaa

SEQ ID NO: 1084521 - RNA, 19 nt, Artificial Sequence
  Description of Artificial Sequence: Synthetic oligonucleotide
  Antisense strand to SEQ ID NO: 1084520
uuguuacucaguggaugcc

SEQ ID NO: 1084522 - RNA, 19 nt, Artificial Sequence
  Description of Artificial Sequence: Synthetic oligonucleotide
  Sense strand starting at position 3976 of SEQ ID NO: 915500
cucaguucuggaggaggaa

SEQ ID NO: 1084523 - RNA, 19 nt, Artificial Sequence
  Description of Artificial Sequence: Synthetic oligonucleotide
  Antisense strand to SEQ ID NO: 1084522
uuccuccuccagaacugag

SEQ ID NO: 1084524 - RNA, 19 nt, Artificial Sequence
  Description of Artificial Sequence: Synthetic oligonucleotide
  Sense strand starting at position 70 of SEQ ID NO: 915501
acuugugcuccuugauuua

SEQ ID NO: 1084525 - RNA, 19 nt, Artificial Sequence
  Description of Artificial Sequence: Synthetic oligonucleotide
  Antisense strand to SEQ ID NO: 1084524
uaaaucaaggagcacaagu

SEQ ID NO: 1084526 - RNA, 19 nt, Artificial Sequence
  Description of Artificial Sequence: Synthetic oligonucleotide
  Sense strand starting at position 77 of SEQ ID NO: 915501
cuccuugauuuagaacagu

SEQ ID NO: 1084527 - RNA, 19 nt, Artificial Sequence
  Description of Artificial Sequence: Synthetic oligonucleotide
  Antisense strand to SEQ ID NO: 1084526
acuguucuaaaucaaggag

SEQ ID NO: 1084528 - RNA, 19 nt, Artificial Sequence
  Description of Artificial Sequence: Synthetic oligonucleotide
  Sense strand starting at position 120 of SEQ ID NO: 915501
cccauuaguggguguggaa

SEQ ID NO: 1084529 - RNA, 19 nt, Artificial Sequence
  Description of Artificial Sequence: Synthetic oligonucleotide
  Antisense strand to SEQ ID NO: 1084528
uuccacacccacuaauggg

SEQ ID NO: 1084530 - RNA, 19 nt, Artificial Sequence
  Description of Artificial Sequence: Synthetic oligonucleotide
  Sense strand starting at position 329 of SEQ ID NO: 915501
gugcguagaggcuagagau

SEQ ID NO: 1084531 - RNA, 19 nt, Artificial Sequence
  Description of Artificial Sequence: Synthetic oligonucleotide
  Antisense strand to SEQ ID NO: 1084530
aucucuagccucuacgcac

SEQ ID NO: 1084532 - RNA, 19 nt, Artificial Sequence
  Description of Artificial Sequence: Synthetic oligonucleotide
  Sense strand starting at position 575 of SEQ ID NO: 915501
aucugcugaguaugugaua

SEQ ID NO: 1084533 - RNA, 19 nt, Artificial Sequence
  Description of Artificial Sequence: Synthetic oligonucleotide
  Antisense strand to SEQ ID NO: 1084532
uaucacauacucagcagau

SEQ ID NO: 1084534 - RNA, 19 nt, Artificial Sequence
  Description of Artificial Sequence: Synthetic oligonucleotide
  Sense strand starting at position 708 of SEQ ID NO: 915501
gggaccucucacugcuauu

SEQ ID NO: 1084535 - RNA, 19 nt, Artificial Sequence
  Description of Artificial Sequence: Synthetic oligonucleotide
  Antisense strand to SEQ ID NO: 1084534
aauagcagugagagguccc

SEQ ID NO: 1084536 - RNA, 19 nt, Artificial Sequence
  Description of Artificial Sequence: Synthetic oligonucleotide
  Sense strand starting at position 928 of SEQ ID NO: 915501
cagggugggaucuguuuau

SEQ ID NO: 1084537 - RNA, 19 nt, Artificial Sequence
  Description of Artificial Sequence: Synthetic oligonucleotide
  Antisense strand to SEQ ID NO: 1084536
auaaacagaucccacccug

SEQ ID NO: 1084538 - RNA, 19 nt, Artificial Sequence
  Description of Artificial Sequence: Synthetic oligonucleotide
  Sense strand starting at position 1043 of SEQ ID NO: 915501
gcaucugucugaguccuga

SEQ ID NO: 1084539 - RNA, 19 nt, Artificial Sequence
  Description of Artificial Sequence: Synthetic oligonucleotide
  Antisense strand to SEQ ID NO: 1084538
ucaggacucagacagaugc

SEQ ID NO: 1084540 - RNA, 19 nt, Artificial Sequence
  Description of Artificial Sequence: Synthetic oligonucleotide
  Sense strand starting at position 1145 of SEQ ID NO: 915501
aaggguuaauccucagcca

SEQ ID NO: 1084541 - RNA, 19 nt, Artificial Sequence
  Description of Artificial Sequence: Synthetic oligonucleotide
  Antisense strand to SEQ ID NO: 1084540
uggcugaggauuaacccuu

SEQ ID NO: 1084542 - RNA, 19 nt, Artificial Sequence
  Description of Artificial Sequence: Synthetic oligonucleotide
  Sense strand starting at position 1688 of SEQ ID NO: 915501
gcagaagucccagguggaa

SEQ ID NO: 1084543 - RNA, 19 nt, Artificial Sequence
  Description of Artificial Sequence: Synthetic oligonucleotide
  Antisense strand to SEQ ID NO: 1084542
uuccaccugggacuucugc

SEQ ID NO: 1084544 - RNA, 19 nt, Artificial Sequence
  Description of Artificial Sequence: Synthetic oligonucleotide
  Sense strand starting at position 2136 of SEQ ID NO: 915501
ccgcgucuucaugaguaac

SEQ ID NO: 1084545 - RNA, 19 nt, Artificial Sequence
  Description of Artificial Sequence: Synthetic oligonucleotide
  Antisense strand to SEQ ID NO: 1084544
guuacucaugaagacgcgg

SEQ ID NO: 1084546 - RNA, 19 nt, Artificial Sequence
  Description of Artificial Sequence: Synthetic oligonucleotide
  Sense strand starting at position 2226 of SEQ ID NO: 915501
cuccguuauuccucaaagu

SEQ ID NO: 1084547 - RNA, 19 nt, Artificial Sequence
  Description of Artificial Sequence: Synthetic oligonucleotide
  Antisense strand to SEQ ID NO: 1084546
acuuugaggaauaacggag

SEQ ID NO: 1084548 - RNA, 19 nt, Artificial Sequence
  Description of Artificial Sequence: Synthetic oligonucleotide
  Sense strand starting at position 2227 of SEQ ID NO: 915501
uccguuauuccucaaagua

SEQ ID NO: 1084549 - RNA, 19 nt, Artificial Sequence
  Description of Artificial Sequence: Synthetic oligonucleotide
  Antisense strand to SEQ ID NO: 1084548
uacuuugaggaauaacgga

SEQ ID NO: 1084550 - RNA, 19 nt, Artificial Sequence
  Description of Artificial Sequence: Synthetic oligonucleotide
  Sense strand starting at position 2263 of SEQ ID NO: 915501
guacccauuugauaguuaa

SEQ ID NO: 1084551 - RNA, 19 nt, Artificial Sequence
  Description of Artificial Sequence: Synthetic oligonucleotide
  Antisense strand to SEQ ID NO: 1084550
uuaacuaucaaauggguac

SEQ ID NO: 1084552 - RNA, 19 nt, Artificial Sequence
  Description of Artificial Sequence: Synthetic oligonucleotide
  Sense strand starting at position 2282 of SEQ ID NO: 915501
gauacugagccuuagagca

SEQ ID NO: 1084553 - RNA, 19 nt, Artificial Sequence
  Description of Artificial Sequence: Synthetic oligonucleotide
  Antisense strand to SEQ ID NO: 1084552
ugcucuaaggcucaguauc

SEQ ID NO: 1084554 - RNA, 19 nt, Artificial Sequence
  Description of Artificial Sequence: Synthetic oligonucleotide
  Sense strand starting at position 2290 of SEQ ID NO: 915501
gccuuagagcagugaaaug

SEQ ID NO: 1084555 - RNA, 19 nt, Artificial Sequence
  Description of Artificial Sequence: Synthetic oligonucleotide
  Antisense strand to SEQ ID NO: 1084554
cauuucacugcucuaaggc

SEQ ID NO: 1084556 - RNA, 19 nt, Artificial Sequence
  Description of Artificial Sequence: Synthetic oligonucleotide
  Sense strand starting at position 2321 of SEQ ID NO: 915501
cacccucauuuggagaagu

SEQ ID NO: 1084557 - RNA, 19 nt, Artificial Sequence
  Description of Artificial Sequence: Synthetic oligonucleotide
  Antisense strand to SEQ ID NO: 1084556
acuucuccaaaugagggug

SEQ ID NO: 1084558 - RNA, 19 nt, Artificial Sequence
  Description of Artificial Sequence: Synthetic oligonucleotide
  Sense strand starting at position 2418 of SEQ ID NO: 915501
aucaguaguucuuuguaua

SEQ ID NO: 1084559 - RNA, 19 nt, Artificial Sequence
  Description of Artificial Sequence: Synthetic oligonucleotide
  Antisense strand to SEQ ID NO: 1084558
uauacaaagaacuacugau

SEQ ID NO: 1084560 - RNA, 19 nt, Artificial Sequence
  Description of Artificial Sequence: Synthetic oligonucleotide
  Sense strand starting at position 2419 of SEQ ID NO: 915501
ucaguaguucuuuguauaa

SEQ ID NO: 1084561 - RNA, 19 nt, Artificial Sequence
  Description of Artificial Sequence: Synthetic oligonucleotide
  Antisense strand to SEQ ID NO: 1084560
uuauacaaagaacuacuga

SEQ ID NO: 1084562 - RNA, 19 nt, Artificial Sequence
  Description of Artificial Sequence: Synthetic oligonucleotide
  Sense strand starting at position 2850 of SEQ ID NO: 915501
cgacuagggcuccacaaua

SEQ ID NO: 1084563 - RNA, 19 nt, Artificial Sequence
  Description of Artificial Sequence: Synthetic oligonucleotide
  Antisense strand to SEQ ID NO: 1084562
uauuguggagcccuagucg

SEQ ID NO: 1084564 - RNA, 19 nt, Artificial Sequence
  Description of Artificial Sequence: Synthetic oligonucleotide
  Sense strand starting at position 2915 of SEQ ID NO: 915501
ucuggcuguccucgaaauc

SEQ ID NO: 1084565 - RNA, 19 nt, Artificial Sequence
  Description of Artificial Sequence: Synthetic oligonucleotide
  Antisense strand to SEQ ID NO: 1084564
gauuucgaggacagccaga

SEQ ID NO: 1084566 - RNA, 19 nt, Artificial Sequence
  Description of Artificial Sequence: Synthetic oligonucleotide
  Sense strand starting at position 2916 of SEQ ID NO: 915501
cuggcuguccucgaaaucu

SEQ ID NO: 1084567 - RNA, 19 nt, Artificial Sequence
  Description of Artificial Sequence: Synthetic oligonucleotide
  Antisense strand to SEQ ID NO: 1084566
agauuucgaggacagccag

SEQ ID NO: 1084568 - RNA, 19 nt, Artificial Sequence
  Description of Artificial Sequence: Synthetic oligonucleotide
  Sense strand starting at position 2959 of SEQ ID NO: 915501
cucucagcauugccagaua

SEQ ID NO: 1084569 - RNA, 19 nt, Artificial Sequence
  Description of Artificial Sequence: Synthetic oligonucleotide
  Antisense strand to SEQ ID NO: 1084568
uaucuggcaaugcugagag

SEQ ID NO: 1084570 - RNA, 19 nt, Artificial Sequence
  Description of Artificial Sequence: Synthetic oligonucleotide
  Sense strand starting at position 3076 of SEQ ID NO: 915501
ugcaguuagcauugaucau

SEQ ID NO: 1084571 - RNA, 19 nt, Artificial Sequence
  Description of Artificial Sequence: Synthetic oligonucleotide
  Antisense strand to SEQ ID NO: 1084570
augaucaaugcuaacugca

SEQ ID NO: 1084572 - RNA, 19 nt, Artificial Sequence
  Description of Artificial Sequence: Synthetic oligonucleotide
  Sense strand starting at position 3077 of SEQ ID NO: 915501
gcaguuagcauugaucaug

SEQ ID NO: 1084573 - RNA, 19 nt, Artificial Sequence
  Description of Artificial Sequence: Synthetic oligonucleotide
  Antisense strand to SEQ ID NO: 1084572
caugaucaaugcuaacugc

SEQ ID NO: 1084574 - RNA, 19 nt, Artificial Sequence
  Description of Artificial Sequence: Synthetic oligonucleotide
  Sense strand starting at position 3230 of SEQ ID NO: 915501
gucauuguuguguaucuga

SEQ ID NO: 1084575 - RNA, 19 nt, Artificial Sequence
  Description of Artificial Sequence: Synthetic oligonucleotide
  Antisense strand to SEQ ID NO: 1084574
ucagauacacaacaaugac

SEQ ID NO: 1084576 - RNA, 19 nt, Artificial Sequence
  Description of Artificial Sequence: Synthetic oligonucleotide
  Sense strand starting at position 3233 of SEQ ID NO: 915501
auuguuguguaucugaaau

SEQ ID NO: 1084577 - RNA, 19 nt, Artificial Sequence
  Description of Artificial Sequence: Synthetic oligonucleotide
  Antisense strand to SEQ ID NO: 1084576
auuucagauacacaacaau

SEQ ID NO: 1084578 - RNA, 19 nt, Artificial Sequence
  Description of Artificial Sequence: Synthetic oligonucleotide
  Sense strand starting at position 3313 of SEQ ID NO: 915501
caaacagguugucucugau

SEQ ID NO: 1084579 - RNA, 19 nt, Artificial Sequence
  Description of Artificial Sequence: Synthetic oligonucleotide
  Antisense strand to SEQ ID NO: 1084578
aucagagacaaccuguuug

SEQ ID NO: 1084580 - RNA, 19 nt, Artificial Sequence
  Description of Artificial Sequence: Synthetic oligonucleotide
  Sense strand starting at position 3316 of SEQ ID NO: 915501
acagguugucucugaugac

SEQ ID NO: 1084581 - RNA, 19 nt, Artificial Sequence
  Description of Artificial Sequence: Synthetic oligonucleotide
  Antisense strand to SEQ ID NO: 1084580
gucaucagagacaaccugu

SEQ ID NO: 1084582 - RNA, 19 nt, Artificial Sequence
  Description of Artificial Sequence: Synthetic oligonucleotide
  Sense strand starting at position 3320 of SEQ ID NO: 915501
guugucucugaugaccuaa

SEQ ID NO: 1084583 - RNA, 19 nt, Artificial Sequence
  Description of Artificial Sequence: Synthetic oligonucleotide
  Antisense strand to SEQ ID NO: 1084582
uuaggucaucagagacaac

SEQ ID NO: 1084584 - RNA, 19 nt, Artificial Sequence
  Description of Artificial Sequence: Synthetic oligonucleotide
  Sense strand starting at position 3322 of SEQ ID NO: 915501
ugucucugaugaccuaaua

SEQ ID NO: 1084585 - RNA, 19 nt, Artificial Sequence
  Description of Artificial Sequence: Synthetic oligonucleotide
  Antisense strand to SEQ ID NO: 1084584
uauuaggucaucagagaca

SEQ ID NO: 1084586 - RNA, 19 nt, Artificial Sequence
  Description of Artificial Sequence: Synthetic oligonucleotide
  Sense strand starting at position 3349 of SEQ ID NO: 915501
auguucuaucgucaucuca

SEQ ID NO: 1084587 - RNA, 19 nt, Artificial Sequence
  Description of Artificial Sequence: Synthetic oligonucleotide
  Antisense strand to SEQ ID NO: 1084586
ugagaugacgauagaacau

SEQ ID NO: 1084588 - RNA, 19 nt, Artificial Sequence
  Description of Artificial Sequence: Synthetic oligonucleotide
  Sense strand starting at position 3402 of SEQ ID NO: 915501
ucaggaaaguuugcugcua

SEQ ID NO: 1084589 - RNA, 19 nt, Artificial Sequence
  Description of Artificial Sequence: Synthetic oligonucleotide
  Antisense strand to SEQ ID NO: 1084588
uagcagcaaacuuuccuga

SEQ ID NO: 1084590 - RNA, 19 nt, Artificial Sequence
  Description of Artificial Sequence: Synthetic oligonucleotide
  Sense strand starting at position 3468 of SEQ ID NO: 915501
gaauauuugugugucuccu

SEQ ID NO: 1084591 - RNA, 19 nt, Artificial Sequence
  Description of Artificial Sequence: Synthetic oligonucleotide
  Antisense strand to SEQ ID NO: 1084590
aggagacacacaaauauuc

SEQ ID NO: 1084592 - RNA, 19 nt, Artificial Sequence
  Description of Artificial Sequence: Synthetic oligonucleotide
  Sense strand starting at position 3571 of SEQ ID NO: 915501
augggaaaguuauauaaca

SEQ ID NO: 1084593 - RNA, 19 nt, Artificial Sequence
  Description of Artificial Sequence: Synthetic oligonucleotide
  Antisense strand to SEQ ID NO: 1084592
uguuauauaacuuucccau

SEQ ID NO: 1084594 - RNA, 19 nt, Artificial Sequence
  Description of Artificial Sequence: Synthetic oligonucleotide
  Sense strand starting at position 3666 of SEQ ID NO: 915501
ggacuaugagcuuguggau

SEQ ID NO: 1084595 - RNA, 19 nt, Artificial Sequence
  Description of Artificial Sequence: Synthetic oligonucleotide
  Antisense strand to SEQ ID NO: 1084594
auccacaagcucauagucc

SEQ ID NO: 1084596 - RNA, 19 nt, Artificial Sequence
  Description of Artificial Sequence: Synthetic oligonucleotide
  Sense strand starting at position 3740 of SEQ ID NO: 915501
cugagugcucaccaugcau

SEQ ID NO: 1084597 - RNA, 19 nt, Artificial Sequence
  Description of Artificial Sequence: Synthetic oligonucleotide
  Antisense strand to SEQ ID NO: 1084596
augcauggugagcacucag

SEQ ID NO: 1084598 - RNA, 19 nt, Artificial Sequence
  Description of Artificial Sequence: Synthetic oligonucleotide
  Sense strand starting at position 3742 of SEQ ID NO: 915501
gagugcucaccaugcauuu

SEQ ID NO: 1084599 - RNA, 19 nt, Artificial Sequence
  Description of Artificial Sequence: Synthetic oligonucleotide
  Antisense strand to SEQ ID NO: 1084598
aaaugcauggugagcacuc

SEQ ID NO: 1084600 - RNA, 19 nt, Artificial Sequence
  Description of Artificial Sequence: Synthetic oligonucleotide
  Sense strand starting at position 3907 of SEQ ID NO: 915501
aggucuguuugacccaaca

SEQ ID NO: 1084601 - RNA, 19 nt, Artificial Sequence
  Description of Artificial Sequence: Synthetic oligonucleotide
  Antisense strand to SEQ ID NO: 1084600
uguugggucaaacagaccu

SEQ ID NO: 1084602 - RNA, 19 nt, Artificial Sequence
  Description of Artificial Sequence: Synthetic oligonucleotide
  Sense strand starting at position 3909 of SEQ ID NO: 915501
gucuguuugacccaacagu

SEQ ID NO: 1084603 - RNA, 19 nt, Artificial Sequence
  Description of Artificial Sequence: Synthetic oligonucleotide
  Antisense strand to SEQ ID NO: 1084602
acuguugggucaaacagac

SEQ ID NO: 1084604 - RNA, 19 nt, Artificial Sequence
  Description of Artificial Sequence: Synthetic oligonucleotide
  Sense strand starting at position 451 of SEQ ID NO: 915502
uguccuguacaagagagua

SEQ ID NO: 1084605 - RNA, 19 nt, Artificial Sequence
  Description of Artificial Sequence: Synthetic oligonucleotide
  Antisense strand to SEQ ID NO: 1084604
uacucucuuguacaggaca

SEQ ID NO: 1084606 - RNA, 19 nt, Artificial Sequence
  Description of Artificial Sequence: Synthetic oligonucleotide
  Sense strand starting at position 463 of SEQ ID NO: 915502
gagaguaauuucugacagu

SEQ ID NO: 1084607 - RNA, 19 nt, Artificial Sequence
  Description of Artificial Sequence: Synthetic oligonucleotide
  Antisense strand to SEQ ID NO: 1084606
acugucagaaauuacucuc

SEQ ID NO: 1084608 - RNA, 19 nt, Artificial Sequence
  Description of Artificial Sequence: Synthetic oligonucleotide
  Sense strand starting at position 464 of SEQ ID NO: 915502
agaguaauuucugacagug

SEQ ID NO: 1084609 - RNA, 19 nt, Artificial Sequence
  Description of Artificial Sequence: Synthetic oligonucleotide
  Antisense strand to SEQ ID NO: 1084608
cacugucagaaauuacucu

SEQ ID NO: 1084610 - RNA, 19 nt, Artificial Sequence
  Description of Artificial Sequence: Synthetic oligonucleotide
  Sense strand starting at position 490 of SEQ ID NO: 915502
ugagcaaucugucuuagaa

SEQ ID NO: 1084611 - RNA, 19 nt, Artificial Sequence
  Description of Artificial Sequence: Synthetic oligonucleotide
  Antisense strand to SEQ ID NO: 1084610
uucuaagacagauugcuca

SEQ ID NO: 1084612 - RNA, 19 nt, Artificial Sequence
  Description of Artificial Sequence: Synthetic oligonucleotide
  Sense strand starting at position 517 of SEQ ID NO: 915502
acuaauuccucagagaagg

SEQ ID NO: 1084613 - RNA, 19 nt, Artificial Sequence
  Description of Artificial Sequence: Synthetic oligonucleotide
  Antisense strand to SEQ ID NO: 1084612
ccuucucugaggaauuagu

SEQ ID NO: 1084614 - RNA, 19 nt, Artificial Sequence
  Description of Artificial Sequence: Synthetic oligonucleotide
  Sense strand starting at position 565 of SEQ ID NO: 915502
aggaaugugcucugcagaa

SEQ ID NO: 1084615 - RNA, 19 nt, Artificial Sequence
  Description of Artificial Sequence: Synthetic oligonucleotide
  Antisense strand to SEQ ID NO: 1084614
uucugcagagcacauuccu

SEQ ID NO: 1084616 - RNA, 19 nt, Artificial Sequence
  Description of Artificial Sequence: Synthetic oligonucleotide
  Sense strand starting at position 567 of SEQ ID NO: 915502
gaaugugcucugcagaaga

SEQ ID NO: 1084617 - RNA, 19 nt, Artificial Sequence
  Description of Artificial Sequence: Synthetic oligonucleotide
  Antisense strand to SEQ ID NO: 1084616
ucuucugcagagcacauuc

SEQ ID NO: 1084618 - RNA, 19 nt, Artificial Sequence
  Description of Artificial Sequence: Synthetic oligonucleotide
  Sense strand starting at position 578 of SEQ ID NO: 915502
gcagaagaugagggauagu

SEQ ID NO: 1084619 - RNA, 19 nt, Artificial Sequence
  Description of Artificial Sequence: Synthetic oligonucleotide
  Antisense strand to SEQ ID NO: 1084618
acuaucccucaucuucugc

SEQ ID NO: 1084620 - RNA, 19 nt, Artificial Sequence
  Description of Artificial Sequence: Synthetic oligonucleotide
  Sense strand starting at position 599 of SEQ ID NO: 915502
gggacucuguaaucucuga

SEQ ID NO: 1084621 - RNA, 19 nt, Artificial Sequence
  Description of Artificial Sequence: Synthetic oligonucleotide
  Antisense strand to SEQ ID NO: 1084620
ucagagauuacagaguccc

SEQ ID NO: 1084622 - RNA, 19 nt, Artificial Sequence
  Description of Artificial Sequence: Synthetic oligonucleotide
  Sense strand starting at position 619 of SEQ ID NO: 915502
caauuacugcccuguagga

SEQ ID NO: 1084623 - RNA, 19 nt, Artificial Sequence
  Description of Artificial Sequence: Synthetic oligonucleotide
  Antisense strand to SEQ ID NO: 1084622
uccuacagggcaguaauug

SEQ ID NO: 1084624 - RNA, 19 nt, Artificial Sequence
  Description of Artificial Sequence: Synthetic oligonucleotide
  Sense strand starting at position 658 of SEQ ID NO: 915502
agcugaguguugucauuua

SEQ ID NO: 1084625 - RNA, 19 nt, Artificial Sequence
  Description of Artificial Sequence: Synthetic oligonucleotide
  Antisense strand to SEQ ID NO: 1084624
uaaaugacaacacucagcu

SEQ ID NO: 1084626 - RNA, 19 nt, Artificial Sequence
  Description of Artificial Sequence: Synthetic oligonucleotide
  Sense strand starting at position 665 of SEQ ID NO: 915502
uguugucauuuaucuaugu

SEQ ID NO: 1084627 - RNA, 19 nt, Artificial Sequence
  Description of Artificial Sequence: Synthetic oligonucleotide
  Antisense strand to SEQ ID NO: 1084626
acauagauaaaugacaaca

SEQ ID NO: 1084628 - RNA, 19 nt, Artificial Sequence
  Description of Artificial Sequence: Synthetic oligonucleotide
  Sense strand starting at position 666 of SEQ ID NO: 915502
guugucauuuaucuauguu

SEQ ID NO: 1084629 - RNA, 19 nt, Artificial Sequence
  Description of Artificial Sequence: Synthetic oligonucleotide
  Antisense strand to SEQ ID NO: 1084628
aacauagauaaaugacaac

SEQ ID NO: 1084630 - RNA, 19 nt, Artificial Sequence
  Description of Artificial Sequence: Synthetic oligonucleotide
  Sense strand starting at position 669 of SEQ ID NO: 915502
gucauuuaucuauguucuu

SEQ ID NO: 1084631 - RNA, 19 nt, Artificial Sequence
  Description of Artificial Sequence: Synthetic oligonucleotide
  Antisense strand to SEQ ID NO: 1084630
aagaacauagauaaaugac

SEQ ID NO: 1084632 - RNA, 19 nt, Artificial Sequence
  Description of Artificial Sequence: Synthetic oligonucleotide
  Sense strand starting at position 748 of SEQ ID NO: 915502
acuugugcuccuugauuua

SEQ ID NO: 1084633 - RNA, 19 nt, Artificial Sequence
  Description of Artificial Sequence: Synthetic oligonucleotide
  Antisense strand to SEQ ID NO: 1084632
uaaaucaaggagcacaagu

SEQ ID NO: 1084634 - RNA, 19 nt, Artificial Sequence
  Description of Artificial Sequence: Synthetic oligonucleotide
  Sense strand starting at position 755 of SEQ ID NO: 915502
cuccuugauuuagaacagu

SEQ ID NO: 1084635 - RNA, 19 nt, Artificial Sequence
  Description of Artificial Sequence: Synthetic oligonucleotide
  Antisense strand to SEQ ID NO: 1084634
acuguucuaaaucaaggag

SEQ ID NO: 1084636 - RNA, 19 nt, Artificial Sequence
  Description of Artificial Sequence: Synthetic oligonucleotide
  Sense strand starting at position 798 of SEQ ID NO: 915502
cccauuaguggguguggaa

SEQ ID NO: 1084637 - RNA, 19 nt, Artificial Sequence
  Description of Artificial Sequence: Synthetic oligonucleotide
  Antisense strand to SEQ ID NO: 1084636
uuccacacccacuaauggg

SEQ ID NO: 1084638 - RNA, 19 nt, Artificial Sequence
  Description of Artificial Sequence: Synthetic oligonucleotide
  Sense strand starting at position 1007 of SEQ ID NO: 915502
gugcguagaggcuagagau

SEQ ID NO: 1084639 - RNA, 19 nt, Artificial Sequence
  Description of Artificial Sequence: Synthetic oligonucleotide
  Antisense strand to SEQ ID NO: 1084638
aucucuagccucuacgcac

SEQ ID NO: 1084640 - RNA, 19 nt, Artificial Sequence
  Description of Artificial Sequence: Synthetic oligonucleotide
  Sense strand starting at position 1253 of SEQ ID NO: 915502
aucugcugaguaugugaua

SEQ ID NO: 1084641 - RNA, 19 nt, Artificial Sequence
  Description of Artificial Sequence: Synthetic oligonucleotide
  Antisense strand to SEQ ID NO: 1084640
uaucacauacucagcagau

SEQ ID NO: 1084642 - RNA, 19 nt, Artificial Sequence
  Description of Artificial Sequence: Synthetic oligonucleotide
  Sense strand starting at position 1386 of SEQ ID NO: 915502
gggaccucucacugcuauu

SEQ ID NO: 1084643 - RNA, 19 nt, Artificial Sequence
  Description of Artificial Sequence: Synthetic oligonucleotide
  Antisense strand to SEQ ID NO: 1084642
aauagcagugagagguccc

SEQ ID NO: 1084644 - RNA, 19 nt, Artificial Sequence
  Description of Artificial Sequence: Synthetic oligonucleotide
  Sense strand starting at position 1606 of SEQ ID NO: 915502
cagggugggaucuguuuau

SEQ ID NO: 1084645 - RNA, 19 nt, Artificial Sequence
  Description of Artificial Sequence: Synthetic oligonucleotide
  Antisense strand to SEQ ID NO: 1084644
auaaacagaucccacccug

SEQ ID NO: 1084646 - RNA, 19 nt, Artificial Sequence
  Description of Artificial Sequence: Synthetic oligonucleotide
  Sense strand starting at position 1721 of SEQ ID NO: 915502
gcaucugucugaguccuga

SEQ ID NO: 1084647 - RNA, 19 nt, Artificial Sequence
  Description of Artificial Sequence: Synthetic oligonucleotide
  Antisense strand to SEQ ID NO: 1084646
ucaggacucagacagaugc

SEQ ID NO: 1084648 - RNA, 19 nt, Artificial Sequence
  Description of Artificial Sequence: Synthetic oligonucleotide
  Sense strand starting at position 1823 of SEQ ID NO: 915502
aaggguuaauccucagcca

SEQ ID NO: 1084649 - RNA, 19 nt, Artificial Sequence
  Description of Artificial Sequence: Synthetic oligonucleotide
  Antisense strand to SEQ ID NO: 1084648
uggcugaggauuaacccuu

SEQ ID NO: 1084650 - RNA, 19 nt, Artificial Sequence
  Description of Artificial Sequence: Synthetic oligonucleotide
  Sense strand starting at position 2366 of SEQ ID NO: 915502
gcagaagucccagguggaa

SEQ ID NO: 1084651 - RNA, 19 nt, Artificial Sequence
  Description of Artificial Sequence: Synthetic oligonucleotide
  Antisense strand to SEQ ID NO: 1084650
uuccaccugggacuucugc

SEQ ID NO: 1084652 - RNA, 19 nt, Artificial Sequence
  Description of Artificial Sequence: Synthetic oligonucleotide
  Sense strand starting at position 2904 of SEQ ID NO: 915502
cuccguuauuccucaaagu

SEQ ID NO: 1084653 - RNA, 19 nt, Artificial Sequence
  Description of Artificial Sequence: Synthetic oligonucleotide
  Antisense strand to SEQ ID NO: 1084652
acuuugaggaauaacggag

SEQ ID NO: 1084654 - RNA, 19 nt, Artificial Sequence
  Description of Artificial Sequence: Synthetic oligonucleotide
  Sense strand starting at position 2905 of SEQ ID NO: 915502
uccguuauuccucaaagua

SEQ ID NO: 1084655 - RNA, 19 nt, Artificial Sequence
  Description of Artificial Sequence: Synthetic oligonucleotide
  Antisense strand to SEQ ID NO: 1084654
uacuuugaggaauaacgga

SEQ ID NO: 1084656 - RNA, 19 nt, Artificial Sequence
  Description of Artificial Sequence: Synthetic oligonucleotide
  Sense strand starting at position 2941 of SEQ ID NO: 915502
guacccauuugauaguuaa

SEQ ID NO: 1084657 - RNA, 19 nt, Artificial Sequence
  Description of Artificial Sequence: Synthetic oligonucleotide
  Antisense strand to SEQ ID NO: 1084656
uuaacuaucaaauggguac

SEQ ID NO: 1084658 - RNA, 19 nt, Artificial Sequence
  Description of Artificial Sequence: Synthetic oligonucleotide
  Sense strand starting at position 2960 of SEQ ID NO: 915502
gauacugagccuuagagca

SEQ ID NO: 1084659 - RNA, 19 nt, Artificial Sequence
  Description of Artificial Sequence: Synthetic oligonucleotide
  Antisense strand to SEQ ID NO: 1084658
ugcucuaaggcucaguauc

SEQ ID NO: 1084660 - RNA, 19 nt, Artificial Sequence
  Description of Artificial Sequence: Synthetic oligonucleotide
  Sense strand starting at position 2968 of SEQ ID NO: 915502
gccuuagagcagugaaaug

SEQ ID NO: 1084661 - RNA, 19 nt, Artificial Sequence
  Description of Artificial Sequence: Synthetic oligonucleotide
  Antisense strand to SEQ ID NO: 1084660
cauuucacugcucuaaggc

SEQ ID NO: 1084662 - RNA, 19 nt, Artificial Sequence
  Description of Artificial Sequence: Synthetic oligonucleotide
  Sense strand starting at position 2999 of SEQ ID NO: 915502
cacccucauuuggagaagu

SEQ ID NO: 1084663 - RNA, 19 nt, Artificial Sequence
  Description of Artificial Sequence: Synthetic oligonucleotide
  Antisense strand to SEQ ID NO: 1084662
acuucuccaaaugagggug

SEQ ID NO: 1084664 - RNA, 19 nt, Artificial Sequence
  Description of Artificial Sequence: Synthetic oligonucleotide
  Sense strand starting at position 3096 of SEQ ID NO: 915502
aucaguaguucuuuguaua

SEQ ID NO: 1084665 - RNA, 19 nt, Artificial Sequence
  Description of Artificial Sequence: Synthetic oligonucleotide
  Antisense strand to SEQ ID NO: 1084664
uauacaaagaacuacugau

SEQ ID NO: 1084666 - RNA, 19 nt, Artificial Sequence
  Description of Artificial Sequence: Synthetic oligonucleotide
  Sense strand starting at position 3097 of SEQ ID NO: 915502
ucaguaguucuuuguauaa

SEQ ID NO: 1084667 - RNA, 19 nt, Artificial Sequence
  Description of Artificial Sequence: Synthetic oligonucleotide
  Antisense strand to SEQ ID NO: 1084666
uuauacaaagaacuacuga

SEQ ID NO: 1084668 - RNA, 19 nt, Artificial Sequence
  Description of Artificial Sequence: Synthetic oligonucleotide
  Sense strand starting at position 3528 of SEQ ID NO: 915502
cgacuagggcuccacaaua

SEQ ID NO: 1084669 - RNA, 19 nt, Artificial Sequence
  Description of Artificial Sequence: Synthetic oligonucleotide
  Antisense strand to SEQ ID NO: 1084668
uauuguggagcccuagucg

SEQ ID NO: 1084670 - RNA, 19 nt, Artificial Sequence
  Description of Artificial Sequence: Synthetic oligonucleotide
  Sense strand starting at position 3593 of SEQ ID NO: 915502
ucuggcuguccucgaaauc

SEQ ID NO: 1084671 - RNA, 19 nt, Artificial Sequence
  Description of Artificial Sequence: Synthetic oligonucleotide
  Antisense strand to SEQ ID NO: 1084670
gauuucgaggacagccaga

SEQ ID NO: 1084672 - RNA, 19 nt, Artificial Sequence
  Description of Artificial Sequence: Synthetic oligonucleotide
  Sense strand starting at position 3594 of SEQ ID NO: 915502
cuggcuguccucgaaaucu

SEQ ID NO: 1084673 - RNA, 19 nt, Artificial Sequence
  Description of Artificial Sequence: Synthetic oligonucleotide
  Antisense strand to SEQ ID NO: 1084672
agauuucgaggacagccag

SEQ ID NO: 1084674 - RNA, 19 nt, Artificial Sequence
  Description of Artificial Sequence: Synthetic oligonucleotide
  Sense strand starting at position 3637 of SEQ ID NO: 915502
cucucagcauugccagaua

SEQ ID NO: 1084675 - RNA, 19 nt, Artificial Sequence
  Description of Artificial Sequence: Synthetic oligonucleotide
  Antisense strand to SEQ ID NO: 1084674
uaucuggcaaugcugagag

SEQ ID NO: 1084676 - RNA, 19 nt, Artificial Sequence
  Description of Artificial Sequence: Synthetic oligonucleotide
  Sense strand starting at position 3754 of SEQ ID NO: 915502
ugcaguuagcauugaucau

SEQ ID NO: 1084677 - RNA, 19 nt, Artificial Sequence
  Description of Artificial Sequence: Synthetic oligonucleotide
  Antisense strand to SEQ ID NO: 1084676
augaucaaugcuaacugca

SEQ ID NO: 1084678 - RNA, 19 nt, Artificial Sequence
  Description of Artificial Sequence: Synthetic oligonucleotide
  Sense strand starting at position 3755 of SEQ ID NO: 915502
gcaguuagcauugaucaug

SEQ ID NO: 1084679 - RNA, 19 nt, Artificial Sequence
  Description of Artificial Sequence: Synthetic oligonucleotide
  Antisense strand to SEQ ID NO: 1084678
caugaucaaugcuaacugc

SEQ ID NO: 1084680 - RNA, 19 nt, Artificial Sequence
  Description of Artificial Sequence: Synthetic oligonucleotide
  Sense strand starting at position 3908 of SEQ ID NO: 915502
gucauuguuguguaucuga

SEQ ID NO: 1084681 - RNA, 19 nt, Artificial Sequence
  Description of Artificial Sequence: Synthetic oligonucleotide
  Antisense strand to SEQ ID NO: 1084680
ucagauacacaacaaugac

SEQ ID NO: 1084682 - RNA, 19 nt, Artificial Sequence
  Description of Artificial Sequence: Synthetic oligonucleotide
  Sense strand starting at position 3911 of SEQ ID NO: 915502
auuguuguguaucugaaau

SEQ ID NO: 1084683 - RNA, 19 nt, Artificial Sequence
  Description of Artificial Sequence: Synthetic oligonucleotide
  Antisense strand to SEQ ID NO: 1084682
auuucagauacacaacaau

SEQ ID NO: 1084684 - RNA, 19 nt, Artificial Sequence
  Description of Artificial Sequence: Synthetic oligonucleotide
  Sense strand starting at position 95 of SEQ ID NO: 915503
cccaucuugccacagagaa

SEQ ID NO: 1084685 - RNA, 19 nt, Artificial Sequence
  Description of Artificial Sequence: Synthetic oligonucleotide
  Antisense strand to SEQ ID NO: 1084684
uucucuguggcaagauggg

SEQ ID NO: 1084686 - RNA, 19 nt, Artificial Sequence
  Description of Artificial Sequence: Synthetic oligonucleotide
  Sense strand starting at position 275 of SEQ ID NO: 915503
ggucuaaaguaccuggaaa

SEQ ID NO: 1084687 - RNA, 19 nt, Artificial Sequence
  Description of Artificial Sequence: Synthetic oligonucleotide
  Antisense strand to SEQ ID NO: 1084686
uuuccagguacuuuagacc

SEQ ID NO: 1084688 - RNA, 19 nt, Artificial Sequence
  Description of Artificial Sequence: Synthetic oligonucleotide
  Sense strand starting at position 494 of SEQ ID NO: 915503
ccaggucccucgggauaaa

SEQ ID NO: 1084689 - RNA, 19 nt, Artificial Sequence
  Description of Artificial Sequence: Synthetic oligonucleotide
  Antisense strand to SEQ ID NO: 1084688
uuuaucccgagggaccugg

SEQ ID NO: 1084690 - RNA, 19 nt, Artificial Sequence
  Description of Artificial Sequence: Synthetic oligonucleotide
  Sense strand starting at position 581 of SEQ ID NO: 915503
ugcgguguccuguuacaca

SEQ ID NO: 1084691 - RNA, 19 nt, Artificial Sequence
  Description of Artificial Sequence: Synthetic oligonucleotide
  Antisense strand to SEQ ID NO: 1084690
uguguaacaggacaccgca

SEQ ID NO: 1084692 - RNA, 19 nt, Artificial Sequence
  Description of Artificial Sequence: Synthetic oligonucleotide
  Sense strand starting at position 625 of SEQ ID NO: 915503
ugggagucccggugacaga

SEQ ID NO: 1084693 - RNA, 19 nt, Artificial Sequence
  Description of Artificial Sequence: Synthetic oligonucleotide
  Antisense strand to SEQ ID NO: 1084692
ucugucaccgggacuccca

SEQ ID NO: 1084694 - RNA, 19 nt, Artificial Sequence
  Description of Artificial Sequence: Synthetic oligonucleotide
  Sense strand starting at position 872 of SEQ ID NO: 915503
ucaggaaugucucuaagcu

SEQ ID NO: 1084695 - RNA, 19 nt, Artificial Sequence
  Description of Artificial Sequence: Synthetic oligonucleotide
  Antisense strand to SEQ ID NO: 1084694
agcuuagagacauuccuga

SEQ ID NO: 1084696 - RNA, 19 nt, Artificial Sequence
  Description of Artificial Sequence: Synthetic oligonucleotide
  Sense strand starting at position 873 of SEQ ID NO: 915503
caggaaugucucuaagcug

SEQ ID NO: 1084697 - RNA, 19 nt, Artificial Sequence
  Description of Artificial Sequence: Synthetic oligonucleotide
  Antisense strand to SEQ ID NO: 1084696
cagcuuagagacauuccug

SEQ ID NO: 1084698 - RNA, 19 nt, Artificial Sequence
  Description of Artificial Sequence: Synthetic oligonucleotide
  Sense strand starting at position 916 of SEQ ID NO: 915503
gaaguuagacccugcaguu

SEQ ID NO: 1084699 - RNA, 19 nt, Artificial Sequence
  Description of Artificial Sequence: Synthetic oligonucleotide
  Antisense strand to SEQ ID NO: 1084698
aacugcagggucuaacuuc

SEQ ID NO: 1084700 - RNA, 19 nt, Artificial Sequence
  Description of Artificial Sequence: Synthetic oligonucleotide
  Sense strand starting at position 1100 of SEQ ID NO: 915503
gccaucaucuaggcugcaa

SEQ ID NO: 1084701 - RNA, 19 nt, Artificial Sequence
  Description of Artificial Sequence: Synthetic oligonucleotide
  Antisense strand to SEQ ID NO: 1084700
uugcagccuagaugauggc

SEQ ID NO: 1084702 - RNA, 19 nt, Artificial Sequence
  Description of Artificial Sequence: Synthetic oligonucleotide
  Sense strand starting at position 1115 of SEQ ID NO: 915503
gcaagcugcugaucagaaa

SEQ ID NO: 1084703 - RNA, 19 nt, Artificial Sequence
  Description of Artificial Sequence: Synthetic oligonucleotide
  Antisense strand to SEQ ID NO: 1084702
uuucugaucagcagcuugc

SEQ ID NO: 1084704 - RNA, 19 nt, Artificial Sequence
  Description of Artificial Sequence: Synthetic oligonucleotide
  Sense strand starting at position 1370 of SEQ ID NO: 915503
cucuguuucuuuccgcaga

SEQ ID NO: 1084705 - RNA, 19 nt, Artificial Sequence
  Description of Artificial Sequence: Synthetic oligonucleotide
  Antisense strand to SEQ ID NO: 1084704
ucugcggaaagaaacagag

SEQ ID NO: 1084706 - RNA, 19 nt, Artificial Sequence
  Description of Artificial Sequence: Synthetic oligonucleotide
  Sense strand starting at position 2090 of SEQ ID NO: 915503
aggcucucugcauaagcua

SEQ ID NO: 1084707 - RNA, 19 nt, Artificial Sequence
  Description of Artificial Sequence: Synthetic oligonucleotide
  Antisense strand to SEQ ID NO: 1084706
uagcuuaugcagagagccu

SEQ ID NO: 1084708 - RNA, 19 nt, Artificial Sequence
  Description of Artificial Sequence: Synthetic oligonucleotide
  Sense strand starting at position 2376 of SEQ ID NO: 915503
aguucaagucguggaguaa

SEQ ID NO: 1084709 - RNA, 19 nt, Artificial Sequence
  Description of Artificial Sequence: Synthetic oligonucleotide
  Antisense strand to SEQ ID NO: 1084708
uuacuccacgacuugaacu

SEQ ID NO: 1084710 - RNA, 19 nt, Artificial Sequence
  Description of Artificial Sequence: Synthetic oligonucleotide
  Sense strand starting at position 2377 of SEQ ID NO: 915503
guucaagucguggaguaau

SEQ ID NO: 1084711 - RNA, 19 nt, Artificial Sequence
  Description of Artificial Sequence: Synthetic oligonucleotide
  Antisense strand to SEQ ID NO: 1084710
auuacuccacgacuugaac

SEQ ID NO: 1084712 - RNA, 19 nt, Artificial Sequence
  Description of Artificial Sequence: Synthetic oligonucleotide
  Sense strand starting at position 2380 of SEQ ID NO: 915503
caagucguggaguaauaga

SEQ ID NO: 1084713 - RNA, 19 nt, Artificial Sequence
  Description of Artificial Sequence: Synthetic oligonucleotide
  Antisense strand to SEQ ID NO: 1084712
ucuauuacuccacgacuug

SEQ ID NO: 1084714 - RNA, 19 nt, Artificial Sequence
  Description of Artificial Sequence: Synthetic oligonucleotide
  Sense strand starting at position 2529 of SEQ ID NO: 915503
uguucccuuggcugugaaa

SEQ ID NO: 1084715 - RNA, 19 nt, Artificial Sequence
  Description of Artificial Sequence: Synthetic oligonucleotide
  Antisense strand to SEQ ID NO: 1084714
uuucacagccaagggaaca

SEQ ID NO: 1084716 - RNA, 19 nt, Artificial Sequence
  Description of Artificial Sequence: Synthetic oligonucleotide
  Sense strand starting at position 2531 of SEQ ID NO: 915503
uucccuuggcugugaaaug

SEQ ID NO: 1084717 - RNA, 19 nt, Artificial Sequence
  Description of Artificial Sequence: Synthetic oligonucleotide
  Antisense strand to SEQ ID NO: 1084716
cauuucacagccaagggaa

SEQ ID NO: 1084718 - RNA, 19 nt, Artificial Sequence
  Description of Artificial Sequence: Synthetic oligonucleotide
  Sense strand starting at position 2532 of SEQ ID NO: 915503
ucccuuggcugugaaaugu

SEQ ID NO: 1084719 - RNA, 19 nt, Artificial Sequence
  Description of Artificial Sequence: Synthetic oligonucleotide
  Antisense strand to SEQ ID NO: 1084718
acauuucacagccaaggga

SEQ ID NO: 1084720 - RNA, 19 nt, Artificial Sequence
  Description of Artificial Sequence: Synthetic oligonucleotide
  Sense strand starting at position 2541 of SEQ ID NO: 915503
ugugaaaugugguucuaag

SEQ ID NO: 1084721 - RNA, 19 nt, Artificial Sequence
  Description of Artificial Sequence: Synthetic oligonucleotide
  Antisense strand to SEQ ID NO: 1084720
cuuagaaccacauuucaca

SEQ ID NO: 1084722 - RNA, 19 nt, Artificial Sequence
  Description of Artificial Sequence: Synthetic oligonucleotide
  Sense strand starting at position 2702 of SEQ ID NO: 915503
acugauagcuccuugaccu

SEQ ID NO: 1084723 - RNA, 19 nt, Artificial Sequence
  Description of Artificial Sequence: Synthetic oligonucleotide
  Antisense strand to SEQ ID NO: 1084722
aggucaaggagcuaucagu

SEQ ID NO: 1084724 - RNA, 19 nt, Artificial Sequence
  Description of Artificial Sequence: Synthetic oligonucleotide
  Sense strand starting at position 2722 of SEQ ID NO: 915503
caaguuaagcuaggguauu

SEQ ID NO: 1084725 - RNA, 19 nt, Artificial Sequence
  Description of Artificial Sequence: Synthetic oligonucleotide
  Antisense strand to SEQ ID NO: 1084724
aauacccuagcuuaacuug

SEQ ID NO: 1084726 - RNA, 19 nt, Artificial Sequence
  Description of Artificial Sequence: Synthetic oligonucleotide
  Sense strand starting at position 2843 of SEQ ID NO: 915503
gugauucagugaggcagau

SEQ ID NO: 1084727 - RNA, 19 nt, Artificial Sequence
  Description of Artificial Sequence: Synthetic oligonucleotide
  Antisense strand to SEQ ID NO: 1084726
aucugccucacugaaucac

SEQ ID NO: 1084728 - RNA, 19 nt, Artificial Sequence
  Description of Artificial Sequence: Synthetic oligonucleotide
  Sense strand starting at position 2875 of SEQ ID NO: 915503
cuaaauaaucugggcgaca

SEQ ID NO: 1084729 - RNA, 19 nt, Artificial Sequence
  Description of Artificial Sequence: Synthetic oligonucleotide
  Antisense strand to SEQ ID NO: 1084728
ugucgcccagauuauuuag

SEQ ID NO: 1084730 - RNA, 19 nt, Artificial Sequence
  Description of Artificial Sequence: Synthetic oligonucleotide
  Sense strand starting at position 2876 of SEQ ID NO: 915503
uaaauaaucugggcgacag

SEQ ID NO: 1084731 - RNA, 19 nt, Artificial Sequence
  Description of Artificial Sequence: Synthetic oligonucleotide
  Antisense strand to SEQ ID NO: 1084730
cugucgcccagauuauuua

SEQ ID NO: 1084732 - RNA, 19 nt, Artificial Sequence
  Description of Artificial Sequence: Synthetic oligonucleotide
  Sense strand starting at position 2877 of SEQ ID NO: 915503
aaauaaucugggcgacagu

SEQ ID NO: 1084733 - RNA, 19 nt, Artificial Sequence
  Description of Artificial Sequence: Synthetic oligonucleotide
  Antisense strand to SEQ ID NO: 1084732
acugucgcccagauuauuu

SEQ ID NO: 1084734 - RNA, 19 nt, Artificial Sequence
  Description of Artificial Sequence: Synthetic oligonucleotide
  Sense strand starting at position 2886 of SEQ ID NO: 915503
gggcgacaguggcucaauu

SEQ ID NO: 1084735 - RNA, 19 nt, Artificial Sequence
  Description of Artificial Sequence: Synthetic oligonucleotide
  Antisense strand to SEQ ID NO: 1084734
aauugagccacugucgccc

SEQ ID NO: 1084736 - RNA, 19 nt, Artificial Sequence
  Description of Artificial Sequence: Synthetic oligonucleotide
  Sense strand starting at position 2937 of SEQ ID NO: 915503
aguccucuuuaguaguuua

SEQ ID NO: 1084737 - RNA, 19 nt, Artificial Sequence
  Description of Artificial Sequence: Synthetic oligonucleotide
  Antisense strand to SEQ ID NO: 1084736
uaaacuacuaaagaggacu

SEQ ID NO: 1084738 - RNA, 19 nt, Artificial Sequence
  Description of Artificial Sequence: Synthetic oligonucleotide
  Sense strand starting at position 2948 of SEQ ID NO: 915503
guaguuuaaugauagcuau

SEQ ID NO: 1084739 - RNA, 19 nt, Artificial Sequence
  Description of Artificial Sequence: Synthetic oligonucleotide
  Antisense strand to SEQ ID NO: 1084738
auagcuaucauuaaacuac

SEQ ID NO: 1084740 - RNA, 19 nt, Artificial Sequence
  Description of Artificial Sequence: Synthetic oligonucleotide
  Sense strand starting at position 3027 of SEQ ID NO: 915503
gaaugaaugcauugaguau

SEQ ID NO: 1084741 - RNA, 19 nt, Artificial Sequence
  Description of Artificial Sequence: Synthetic oligonucleotide
  Antisense strand to SEQ ID NO: 1084740
auacucaaugcauucauuc

SEQ ID NO: 1084742 - RNA, 19 nt, Artificial Sequence
  Description of Artificial Sequence: Synthetic oligonucleotide
  Sense strand starting at position 3034 of SEQ ID NO: 915503
ugcauugaguaucuucuuu

SEQ ID NO: 1084743 - RNA, 19 nt, Artificial Sequence
  Description of Artificial Sequence: Synthetic oligonucleotide
  Antisense strand to SEQ ID NO: 1084742
aaagaagauacucaaugca

SEQ ID NO: 1084744 - RNA, 19 nt, Artificial Sequence
  Description of Artificial Sequence: Synthetic oligonucleotide
  Sense strand starting at position 3039 of SEQ ID NO: 915503
ugaguaucuucuuucuucu

SEQ ID NO: 1084745 - RNA, 19 nt, Artificial Sequence
  Description of Artificial Sequence: Synthetic oligonucleotide
  Antisense strand to SEQ ID NO: 1084744
agaagaaagaagauacuca

SEQ ID NO: 1084746 - RNA, 19 nt, Artificial Sequence
  Description of Artificial Sequence: Synthetic oligonucleotide
  Sense strand starting at position 3216 of SEQ ID NO: 915503
guacaaggacugugggaaa

SEQ ID NO: 1084747 - RNA, 19 nt, Artificial Sequence
  Description of Artificial Sequence: Synthetic oligonucleotide
  Antisense strand to SEQ ID NO: 1084746
uuucccacaguccuuguac

SEQ ID NO: 1084748 - RNA, 19 nt, Artificial Sequence
  Description of Artificial Sequence: Synthetic oligonucleotide
  Sense strand starting at position 3228 of SEQ ID NO: 915503
ugggaaaucucagauccca

SEQ ID NO: 1084749 - RNA, 19 nt, Artificial Sequence
  Description of Artificial Sequence: Synthetic oligonucleotide
  Antisense strand to SEQ ID NO: 1084748
ugggaucugagauuuccca

SEQ ID NO: 1084750 - RNA, 19 nt, Artificial Sequence
  Description of Artificial Sequence: Synthetic oligonucleotide
  Sense strand starting at position 3308 of SEQ ID NO: 915503
caaggagucuuugaaucca

SEQ ID NO: 1084751 - RNA, 19 nt, Artificial Sequence
  Description of Artificial Sequence: Synthetic oligonucleotide
  Antisense strand to SEQ ID NO: 1084750
uggauucaaagacuccuug

SEQ ID NO: 1084752 - RNA, 19 nt, Artificial Sequence
  Description of Artificial Sequence: Synthetic oligonucleotide
  Sense strand starting at position 3353 of SEQ ID NO: 915503
cucagagucgaaggauucu

SEQ ID NO: 1084753 - RNA, 19 nt, Artificial Sequence
  Description of Artificial Sequence: Synthetic oligonucleotide
  Antisense strand to SEQ ID NO: 1084752
agaauccuucgacucugag

SEQ ID NO: 1084754 - RNA, 19 nt, Artificial Sequence
  Description of Artificial Sequence: Synthetic oligonucleotide
  Sense strand starting at position 3359 of SEQ ID NO: 915503
gucgaaggauucuggaaua

SEQ ID NO: 1084755 - RNA, 19 nt, Artificial Sequence
  Description of Artificial Sequence: Synthetic oligonucleotide
  Antisense strand to SEQ ID NO: 1084754
uauuccagaauccuucgac

SEQ ID NO: 1084756 - RNA, 19 nt, Artificial Sequence
  Description of Artificial Sequence: Synthetic oligonucleotide
  Sense strand starting at position 3540 of SEQ ID NO: 915503
uuaggacaggucugauuau

SEQ ID NO: 1084757 - RNA, 19 nt, Artificial Sequence
  Description of Artificial Sequence: Synthetic oligonucleotide
  Antisense strand to SEQ ID NO: 1084756
auaaucagaccuguccuaa

SEQ ID NO: 1084758 - RNA, 19 nt, Artificial Sequence
  Description of Artificial Sequence: Synthetic oligonucleotide
  Sense strand starting at position 3541 of SEQ ID NO: 915503
uaggacaggucugauuauu

SEQ ID NO: 1084759 - RNA, 19 nt, Artificial Sequence
  Description of Artificial Sequence: Synthetic oligonucleotide
  Antisense strand to SEQ ID NO: 1084758
aauaaucagaccuguccua

SEQ ID NO: 1084760 - RNA, 19 nt, Artificial Sequence
  Description of Artificial Sequence: Synthetic oligonucleotide
  Sense strand starting at position 3547 of SEQ ID NO: 915503
aggucugauuauuaacaaa

SEQ ID NO: 1084761 - RNA, 19 nt, Artificial Sequence
  Description of Artificial Sequence: Synthetic oligonucleotide
  Antisense strand to SEQ ID NO: 1084760
uuuguuaauaaucagaccu

SEQ ID NO: 1084762 - RNA, 19 nt, Artificial Sequence
  Description of Artificial Sequence: Synthetic oligonucleotide
  Sense strand starting at position 3967 of SEQ ID NO: 915503
auucuuguuuauccaagga

SEQ ID NO: 1084763 - RNA, 19 nt, Artificial Sequence
  Description of Artificial Sequence: Synthetic oligonucleotide
  Antisense strand to SEQ ID NO: 1084762
uccuuggauaaacaagaau

SEQ ID NO: 1084764 - RNA, 19 nt, Artificial Sequence
  Description of Artificial Sequence: Synthetic oligonucleotide
  Sense strand starting at position 441 of SEQ ID NO: 915504
gcgggaugucgggaggaga

SEQ ID NO: 1084765 - RNA, 19 nt, Artificial Sequence
  Description of Artificial Sequence: Synthetic oligonucleotide
  Antisense strand to SEQ ID NO: 1084764
ucuccucccgacaucccgc

SEQ ID NO: 1084766 - RNA, 19 nt, Artificial Sequence
  Description of Artificial Sequence: Synthetic oligonucleotide
  Sense strand starting at position 1034 of SEQ ID NO: 915504
ugaggagaaugagauaaau

SEQ ID NO: 1084767 - RNA, 19 nt, Artificial Sequence
  Description of Artificial Sequence: Synthetic oligonucleotide
  Antisense strand to SEQ ID NO: 1084766
auuuaucucauucuccuca

SEQ ID NO: 1084768 - RNA, 19 nt, Artificial Sequence
  Description of Artificial Sequence: Synthetic oligonucleotide
  Sense strand starting at position 1058 of SEQ ID NO: 915504
ggagcuagagcucgcuaga

SEQ ID NO: 1084769 - RNA, 19 nt, Artificial Sequence
  Description of Artificial Sequence: Synthetic oligonucleotide
  Antisense strand to SEQ ID NO: 1084768
ucuagcgagcucuagcucc

SEQ ID NO: 1084770 - RNA, 19 nt, Artificial Sequence
  Description of Artificial Sequence: Synthetic oligonucleotide
  Sense strand starting at position 1073 of SEQ ID NO: 915504
uagagagucuaagauugag

SEQ ID NO: 1084771 - RNA, 19 nt, Artificial Sequence
  Description of Artificial Sequence: Synthetic oligonucleotide
  Antisense strand to SEQ ID NO: 1084770
cucaaucuuagacucucua

SEQ ID NO: 1084772 - RNA, 19 nt, Artificial Sequence
  Description of Artificial Sequence: Synthetic oligonucleotide
  Sense strand starting at position 1076 of SEQ ID NO: 915504
agagucuaagauugagcua

SEQ ID NO: 1084773 - RNA, 19 nt, Artificial Sequence
  Description of Artificial Sequence: Synthetic oligonucleotide
  Antisense strand to SEQ ID NO: 1084772
uagcucaaucuuagacucu

SEQ ID NO: 1084774 - RNA, 19 nt, Artificial Sequence
  Description of Artificial Sequence: Synthetic oligonucleotide
  Sense strand starting at position 1079 of SEQ ID NO: 915504
gucuaagauugagcuaaau

SEQ ID NO: 1084775 - RNA, 19 nt, Artificial Sequence
  Description of Artificial Sequence: Synthetic oligonucleotide
  Antisense strand to SEQ ID NO: 1084774
auuuagcucaaucuuagac

SEQ ID NO: 1084776 - RNA, 19 nt, Artificial Sequence
  Description of Artificial Sequence: Synthetic oligonucleotide
  Sense strand starting at position 1224 of SEQ ID NO: 915504
aguacuuuguauccaggga

SEQ ID NO: 1084777 - RNA, 19 nt, Artificial Sequence
  Description of Artificial Sequence: Synthetic oligonucleotide
  Antisense strand to SEQ ID NO: 1084776
ucccuggauacaaaguacu

SEQ ID NO: 1084778 - RNA, 19 nt, Artificial Sequence
  Description of Artificial Sequence: Synthetic oligonucleotide
  Sense strand starting at position 1225 of SEQ ID NO: 915504
guacuuuguauccagggau

SEQ ID NO: 1084779 - RNA, 19 nt, Artificial Sequence
  Description of Artificial Sequence: Synthetic oligonucleotide
  Antisense strand to SEQ ID NO: 1084778
aucccuggauacaaaguac

SEQ ID NO: 1084780 - RNA, 19 nt, Artificial Sequence
  Description of Artificial Sequence: Synthetic oligonucleotide
  Sense strand starting at position 1228 of SEQ ID NO: 915504
cuuuguauccagggaucuc

SEQ ID NO: 1084781 - RNA, 19 nt, Artificial Sequence
  Description of Artificial Sequence: Synthetic oligonucleotide
  Antisense strand to SEQ ID NO: 1084780
gagaucccuggauacaaag

SEQ ID NO: 1084782 - RNA, 19 nt, Artificial Sequence
  Description of Artificial Sequence: Synthetic oligonucleotide
  Sense strand starting at position 1244 of SEQ ID NO: 915504
cucaaagaacuuuacgcau

SEQ ID NO: 1084783 - RNA, 19 nt, Artificial Sequence
  Description of Artificial Sequence: Synthetic oligonucleotide
  Antisense strand to SEQ ID NO: 1084782
augcguaaaguucuuugag

SEQ ID NO: 1084784 - RNA, 19 nt, Artificial Sequence
  Description of Artificial Sequence: Synthetic oligonucleotide
  Sense strand starting at position 1324 of SEQ ID NO: 915504
gggauaaaugucugaguua

SEQ ID NO: 1084785 - RNA, 19 nt, Artificial Sequence
  Description of Artificial Sequence: Synthetic oligonucleotide
  Antisense strand to SEQ ID NO: 1084784
uaacucagacauuuauccc

SEQ ID NO: 1084786 - RNA, 19 nt, Artificial Sequence
  Description of Artificial Sequence: Synthetic oligonucleotide
  Sense strand starting at position 1656 of SEQ ID NO: 915504
ccacguucugcggagagaa

SEQ ID NO: 1084787 - RNA, 19 nt, Artificial Sequence
  Description of Artificial Sequence: Synthetic oligonucleotide
  Antisense strand to SEQ ID NO: 1084786
uucucuccgcagaacgugg

SEQ ID NO: 1084788 - RNA, 19 nt, Artificial Sequence
  Description of Artificial Sequence: Synthetic oligonucleotide
  Sense strand starting at position 1756 of SEQ ID NO: 915504
uagcaaugcgcguccgagu

SEQ ID NO: 1084789 - RNA, 19 nt, Artificial Sequence
  Description of Artificial Sequence: Synthetic oligonucleotide
  Antisense strand to SEQ ID NO: 1084788
acucggacgcgcauugcua

SEQ ID NO: 1084790 - RNA, 19 nt, Artificial Sequence
  Description of Artificial Sequence: Synthetic oligonucleotide
  Sense strand starting at position 1840 of SEQ ID NO: 915504
gagcgagaaccugauuggu

SEQ ID NO: 1084791 - RNA, 19 nt, Artificial Sequence
  Description of Artificial Sequence: Synthetic oligonucleotide
  Antisense strand to SEQ ID NO: 1084790
accaaucagguucucgcuc

SEQ ID NO: 1084792 - RNA, 19 nt, Artificial Sequence
  Description of Artificial Sequence: Synthetic oligonucleotide
  Sense strand starting at position 1972 of SEQ ID NO: 915504
aggacugugcauuaugaca

SEQ ID NO: 1084793 - RNA, 19 nt, Artificial Sequence
  Description of Artificial Sequence: Synthetic oligonucleotide
  Antisense strand to SEQ ID NO: 1084792
ugucauaaugcacaguccu

SEQ ID NO: 1084794 - RNA, 19 nt, Artificial Sequence
  Description of Artificial Sequence: Synthetic oligonucleotide
  Sense strand starting at position 1980 of SEQ ID NO: 915504
gcauuaugacaucaccugu

SEQ ID NO: 1084795 - RNA, 19 nt, Artificial Sequence
  Description of Artificial Sequence: Synthetic oligonucleotide
  Antisense strand to SEQ ID NO: 1084794
acaggugaugucauaaugc

SEQ ID NO: 1084796 - RNA, 19 nt, Artificial Sequence
  Description of Artificial Sequence: Synthetic oligonucleotide
  Sense strand starting at position 2016 of SEQ ID NO: 915504
uaaucaguauucucggcuu

SEQ ID NO: 1084797 - RNA, 19 nt, Artificial Sequence
  Description of Artificial Sequence: Synthetic oligonucleotide
  Antisense strand to SEQ ID NO: 1084796
aagccgagaauacugauua

SEQ ID NO: 1084798 - RNA, 19 nt, Artificial Sequence
  Description of Artificial Sequence: Synthetic oligonucleotide
  Sense strand starting at position 2042 of SEQ ID NO: 915504
uuuaaaggucuccagcgua

SEQ ID NO: 1084799 - RNA, 19 nt, Artificial Sequence
  Description of Artificial Sequence: Synthetic oligonucleotide
  Antisense strand to SEQ ID NO: 1084798
uacgcuggagaccuuuaaa

SEQ ID NO: 1084800 - RNA, 19 nt, Artificial Sequence
  Description of Artificial Sequence: Synthetic oligonucleotide
  Sense strand starting at position 2192 of SEQ ID NO: 915504
gggauucagggugguguua

SEQ ID NO: 1084801 - RNA, 19 nt, Artificial Sequence
  Description of Artificial Sequence: Synthetic oligonucleotide
  Antisense strand to SEQ ID NO: 1084800
uaacaccacccugaauccc

SEQ ID NO: 1084802 - RNA, 19 nt, Artificial Sequence
  Description of Artificial Sequence: Synthetic oligonucleotide
  Sense strand starting at position 2244 of SEQ ID NO: 915504
gcaaguuuagcauaucaaa

SEQ ID NO: 1084803 - RNA, 19 nt, Artificial Sequence
  Description of Artificial Sequence: Synthetic oligonucleotide
  Antisense strand to SEQ ID NO: 1084802
uuugauaugcuaaacuugc

SEQ ID NO: 1084804 - RNA, 19 nt, Artificial Sequence
  Description of Artificial Sequence: Synthetic oligonucleotide
  Sense strand starting at position 2269 of SEQ ID NO: 915504
agaccaauuugugcgguua

SEQ ID NO: 1084805 - RNA, 19 nt, Artificial Sequence
  Description of Artificial Sequence: Synthetic oligonucleotide
  Antisense strand to SEQ ID NO: 1084804
uaaccgcacaaauuggucu

SEQ ID NO: 1084806 - RNA, 19 nt, Artificial Sequence
  Description of Artificial Sequence: Synthetic oligonucleotide
  Sense strand starting at position 2270 of SEQ ID NO: 915504
gaccaauuugugcgguuaa

SEQ ID NO: 1084807 - RNA, 19 nt, Artificial Sequence
  Description of Artificial Sequence: Synthetic oligonucleotide
  Antisense strand to SEQ ID NO: 1084806
uuaaccgcacaaauugguc

SEQ ID NO: 1084808 - RNA, 19 nt, Artificial Sequence
  Description of Artificial Sequence: Synthetic oligonucleotide
  Sense strand starting at position 2445 of SEQ ID NO: 915504
uaaguuauguaguugggua

SEQ ID NO: 1084809 - RNA, 19 nt, Artificial Sequence
  Description of Artificial Sequence: Synthetic oligonucleotide
  Antisense strand to SEQ ID NO: 1084808
uacccaacuacauaacuua

SEQ ID NO: 1084810 - RNA, 19 nt, Artificial Sequence
  Description of Artificial Sequence: Synthetic oligonucleotide
  Sense strand starting at position 2446 of SEQ ID NO: 915504
aaguuauguaguuggguaa

SEQ ID NO: 1084811 - RNA, 19 nt, Artificial Sequence
  Description of Artificial Sequence: Synthetic oligonucleotide
  Antisense strand to SEQ ID NO: 1084810
uuacccaacuacauaacuu

SEQ ID NO: 1084812 - RNA, 19 nt, Artificial Sequence
  Description of Artificial Sequence: Synthetic oligonucleotide
  Sense strand starting at position 2447 of SEQ ID NO: 915504
aguuauguaguuggguaaa

SEQ ID NO: 1084813 - RNA, 19 nt, Artificial Sequence
  Description of Artificial Sequence: Synthetic oligonucleotide
  Antisense strand to SEQ ID NO: 1084812
uuuacccaacuacauaacu

SEQ ID NO: 1084814 - RNA, 19 nt, Artificial Sequence
  Description of Artificial Sequence: Synthetic oligonucleotide
  Sense strand starting at position 2450 of SEQ ID NO: 915504
uauguaguuggguaaaggu

SEQ ID NO: 1084815 - RNA, 19 nt, Artificial Sequence
  Description of Artificial Sequence: Synthetic oligonucleotide
  Antisense strand to SEQ ID NO: 1084814
accuuuacccaacuacaua

SEQ ID NO: 1084816 - RNA, 19 nt, Artificial Sequence
  Description of Artificial Sequence: Synthetic oligonucleotide
  Sense strand starting at position 2460 of SEQ ID NO: 915504
gguaaagguguugaucuau

SEQ ID NO: 1084817 - RNA, 19 nt, Artificial Sequence
  Description of Artificial Sequence: Synthetic oligonucleotide
  Antisense strand to SEQ ID NO: 1084816
auagaucaacaccuuuacc

SEQ ID NO: 1084818 - RNA, 19 nt, Artificial Sequence
  Description of Artificial Sequence: Synthetic oligonucleotide
  Sense strand starting at position 2471 of SEQ ID NO: 915504
ugaucuauuuagccagugu

SEQ ID NO: 1084819 - RNA, 19 nt, Artificial Sequence
  Description of Artificial Sequence: Synthetic oligonucleotide
  Antisense strand to SEQ ID NO: 1084818
acacuggcuaaauagauca

SEQ ID NO: 1084820 - RNA, 19 nt, Artificial Sequence
  Description of Artificial Sequence: Synthetic oligonucleotide
  Sense strand starting at position 2475 of SEQ ID NO: 915504
cuauuuagccaguguuagc

SEQ ID NO: 1084821 - RNA, 19 nt, Artificial Sequence
  Description of Artificial Sequence: Synthetic oligonucleotide
  Antisense strand to SEQ ID NO: 1084820
gcuaacacuggcuaaauag

SEQ ID NO: 1084822 - RNA, 19 nt, Artificial Sequence
  Description of Artificial Sequence: Synthetic oligonucleotide
  Sense strand starting at position 2482 of SEQ ID NO: 915504
gccaguguuagcuaaaggu

SEQ ID NO: 1084823 - RNA, 19 nt, Artificial Sequence
  Description of Artificial Sequence: Synthetic oligonucleotide
  Antisense strand to SEQ ID NO: 1084822
accuuuagcuaacacuggc

SEQ ID NO: 1084824 - RNA, 19 nt, Artificial Sequence
  Description of Artificial Sequence: Synthetic oligonucleotide
  Sense strand starting at position 2491 of SEQ ID NO: 915504
agcuaaaggucgcuugaug

SEQ ID NO: 1084825 - RNA, 19 nt, Artificial Sequence
  Description of Artificial Sequence: Synthetic oligonucleotide
  Antisense strand to SEQ ID NO: 1084824
caucaagcgaccuuuagcu

SEQ ID NO: 1084826 - RNA, 19 nt, Artificial Sequence
  Description of Artificial Sequence: Synthetic oligonucleotide
  Sense strand starting at position 2500 of SEQ ID NO: 915504
ucgcuugaugcuguguaga

SEQ ID NO: 1084827 - RNA, 19 nt, Artificial Sequence
  Description of Artificial Sequence: Synthetic oligonucleotide
  Antisense strand to SEQ ID NO: 1084826
ucuacacagcaucaagcga

SEQ ID NO: 1084828 - RNA, 19 nt, Artificial Sequence
  Description of Artificial Sequence: Synthetic oligonucleotide
  Sense strand starting at position 2503 of SEQ ID NO: 915504
cuugaugcuguguagacau

SEQ ID NO: 1084829 - RNA, 19 nt, Artificial Sequence
  Description of Artificial Sequence: Synthetic oligonucleotide
  Antisense strand to SEQ ID NO: 1084828
augucuacacagcaucaag

SEQ ID NO: 1084830 - RNA, 19 nt, Artificial Sequence
  Description of Artificial Sequence: Synthetic oligonucleotide
  Sense strand starting at position 2702 of SEQ ID NO: 915504
cccauuuagugguaaauuu

SEQ ID NO: 1084831 - RNA, 19 nt, Artificial Sequence
  Description of Artificial Sequence: Synthetic oligonucleotide
  Antisense strand to SEQ ID NO: 1084830
aaauuuaccacuaaauggg

SEQ ID NO: 1084832 - RNA, 19 nt, Artificial Sequence
  Description of Artificial Sequence: Synthetic oligonucleotide
  Sense strand starting at position 2710 of SEQ ID NO: 915504
gugguaaauuucuugggcu

SEQ ID NO: 1084833 - RNA, 19 nt, Artificial Sequence
  Description of Artificial Sequence: Synthetic oligonucleotide
  Antisense strand to SEQ ID NO: 1084832
agcccaagaaauuuaccac

SEQ ID NO: 1084834 - RNA, 19 nt, Artificial Sequence
  Description of Artificial Sequence: Synthetic oligonucleotide
  Sense strand starting at position 3869 of SEQ ID NO: 915504
gauuccuaggccuggaauu

SEQ ID NO: 1084835 - RNA, 19 nt, Artificial Sequence
  Description of Artificial Sequence: Synthetic oligonucleotide
  Antisense strand to SEQ ID NO: 1084834
aauuccaggccuaggaauc

SEQ ID NO: 1084836 - RNA, 19 nt, Artificial Sequence
  Description of Artificial Sequence: Synthetic oligonucleotide
  Sense strand starting at position 3879 of SEQ ID NO: 915504
ccuggaauuucugaguaaa

SEQ ID NO: 1084837 - RNA, 19 nt, Artificial Sequence
  Description of Artificial Sequence: Synthetic oligonucleotide
  Antisense strand to SEQ ID NO: 1084836
uuuacucagaaauuccagg

SEQ ID NO: 1084838 - RNA, 19 nt, Artificial Sequence
  Description of Artificial Sequence: Synthetic oligonucleotide
  Sense strand starting at position 3899 of SEQ ID NO: 915504
ggguauacauaugucuuaa

SEQ ID NO: 1084839 - RNA, 19 nt, Artificial Sequence
  Description of Artificial Sequence: Synthetic oligonucleotide
  Antisense strand to SEQ ID NO: 1084838
uuaagacauauguauaccc

SEQ ID NO: 1084840 - RNA, 19 nt, Artificial Sequence
  Description of Artificial Sequence: Synthetic oligonucleotide
  Sense strand starting at position 3924 of SEQ ID NO: 915504
uggugcaacuugcuauaau

SEQ ID NO: 1084841 - RNA, 19 nt, Artificial Sequence
  Description of Artificial Sequence: Synthetic oligonucleotide
  Antisense strand to SEQ ID NO: 1084840
auuauagcaaguugcacca

SEQ ID NO: 1084842 - RNA, 19 nt, Artificial Sequence
  Description of Artificial Sequence: Synthetic oligonucleotide
  Sense strand starting at position 3948 of SEQ ID NO: 915504
guggaaagauuugaauaag

SEQ ID NO: 1084843 - RNA, 19 nt, Artificial Sequence
  Description of Artificial Sequence: Synthetic oligonucleotide
  Antisense strand to SEQ ID NO: 1084842
cuuauucaaaucuuuccac

SEQ ID NO: 1084844 - RNA, 19 nt, Artificial Sequence
  Description of Artificial Sequence: Synthetic oligonucleotide
  Sense strand starting at position 159 of SEQ ID NO: 915505
ccugcagugaaagaguuaa

SEQ ID NO: 1084845 - RNA, 19 nt, Artificial Sequence
  Description of Artificial Sequence: Synthetic oligonucleotide
  Antisense strand to SEQ ID NO: 1084844
uuaacucuuucacugcagg

SEQ ID NO: 1084846 - RNA, 19 nt, Artificial Sequence
  Description of Artificial Sequence: Synthetic oligonucleotide
  Sense strand starting at position 235 of SEQ ID NO: 915505
caaugagcugagcaaguau

SEQ ID NO: 1084847 - RNA, 19 nt, Artificial Sequence
  Description of Artificial Sequence: Synthetic oligonucleotide
  Antisense strand to SEQ ID NO: 1084846
auacuugcucagcucauug

SEQ ID NO: 1084848 - RNA, 19 nt, Artificial Sequence
  Description of Artificial Sequence: Synthetic oligonucleotide
  Sense strand starting at position 536 of SEQ ID NO: 915505
ggacaaagagcgcaaauau

SEQ ID NO: 1084849 - RNA, 19 nt, Artificial Sequence
  Description of Artificial Sequence: Synthetic oligonucleotide
  Antisense strand to SEQ ID NO: 1084848
auauuugcgcucuuugucc

SEQ ID NO: 1084850 - RNA, 19 nt, Artificial Sequence
  Description of Artificial Sequence: Synthetic oligonucleotide
  Sense strand starting at position 544 of SEQ ID NO: 915505
agcgcaaauauuugagcuu

SEQ ID NO: 1084851 - RNA, 19 nt, Artificial Sequence
  Description of Artificial Sequence: Synthetic oligonucleotide
  Antisense strand to SEQ ID NO: 1084850
aagcucaaauauuugcgcu

SEQ ID NO: 1084852 - RNA, 19 nt, Artificial Sequence
  Description of Artificial Sequence: Synthetic oligonucleotide
  Sense strand starting at position 547 of SEQ ID NO: 915505
gcaaauauuugagcuugcu

SEQ ID NO: 1084853 - RNA, 19 nt, Artificial Sequence
  Description of Artificial Sequence: Synthetic oligonucleotide
  Antisense strand to SEQ ID NO: 1084852
agcaagcucaaauauuugc

SEQ ID NO: 1084854 - RNA, 19 nt, Artificial Sequence
  Description of Artificial Sequence: Synthetic oligonucleotide
  Sense strand starting at position 553 of SEQ ID NO: 915505
auuugagcuugcuuacuua

SEQ ID NO: 1084855 - RNA, 19 nt, Artificial Sequence
  Description of Artificial Sequence: Synthetic oligonucleotide
  Antisense strand to SEQ ID NO: 1084854
uaaguaagcaagcucaaau

SEQ ID NO: 1084856 - RNA, 19 nt, Artificial Sequence
  Description of Artificial Sequence: Synthetic oligonucleotide
  Sense strand starting at position 783 of SEQ ID NO: 915505
agaguuugaauacgaauaa

SEQ ID NO: 1084857 - RNA, 19 nt, Artificial Sequence
  Description of Artificial Sequence: Synthetic oligonucleotide
  Antisense strand to SEQ ID NO: 1084856
uuauucguauucaaacucu

SEQ ID NO: 1084858 - RNA, 19 nt, Artificial Sequence
  Description of Artificial Sequence: Synthetic oligonucleotide
  Sense strand starting at position 903 of SEQ ID NO: 915505
gggcgauuaagccaaguaa

SEQ ID NO: 1084859 - RNA, 19 nt, Artificial Sequence
  Description of Artificial Sequence: Synthetic oligonucleotide
  Antisense strand to SEQ ID NO: 1084858
uuacuuggcuuaaucgccc

SEQ ID NO: 1084860 - RNA, 19 nt, Artificial Sequence
  Description of Artificial Sequence: Synthetic oligonucleotide
  Sense strand starting at position 935 of SEQ ID NO: 915505
ggaguaaacuuucuaucag

SEQ ID NO: 1084861 - RNA, 19 nt, Artificial Sequence
  Description of Artificial Sequence: Synthetic oligonucleotide
  Antisense strand to SEQ ID NO: 1084860
cugauagaaaguuuacucc

SEQ ID NO: 1084862 - RNA, 19 nt, Artificial Sequence
  Description of Artificial Sequence: Synthetic oligonucleotide
  Sense strand starting at position 1020 of SEQ ID NO: 915505
gggugcuaaggaggaauaa

SEQ ID NO: 1084863 - RNA, 19 nt, Artificial Sequence
  Description of Artificial Sequence: Synthetic oligonucleotide
  Antisense strand to SEQ ID NO: 1084862
uuauuccuccuuagcaccc

SEQ ID NO: 1084864 - RNA, 19 nt, Artificial Sequence
  Description of Artificial Sequence: Synthetic oligonucleotide
  Sense strand starting at position 1100 of SEQ ID NO: 915505
uugcauuucccaugggcau

SEQ ID NO: 1084865 - RNA, 19 nt, Artificial Sequence
  Description of Artificial Sequence: Synthetic oligonucleotide
  Antisense strand to SEQ ID NO: 1084864
augcccaugggaaaugcaa

SEQ ID NO: 1084866 - RNA, 19 nt, Artificial Sequence
  Description of Artificial Sequence: Synthetic oligonucleotide
  Sense strand starting at position 1101 of SEQ ID NO: 915505
ugcauuucccaugggcaua

SEQ ID NO: 1084867 - RNA, 19 nt, Artificial Sequence
  Description of Artificial Sequence: Synthetic oligonucleotide
  Antisense strand to SEQ ID NO: 1084866
uaugcccaugggaaaugca

SEQ ID NO: 1084868 - RNA, 19 nt, Artificial Sequence
  Description of Artificial Sequence: Synthetic oligonucleotide
  Sense strand starting at position 1416 of SEQ ID NO: 915505
agggaaaugagccguaaag

SEQ ID NO: 1084869 - RNA, 19 nt, Artificial Sequence
  Description of Artificial Sequence: Synthetic oligonucleotide
  Antisense strand to SEQ ID NO: 1084868
cuuuacggcucauuucccu

SEQ ID NO: 1084870 - RNA, 19 nt, Artificial Sequence
  Description of Artificial Sequence: Synthetic oligonucleotide
  Sense strand starting at position 1900 of SEQ ID NO: 915505
gcgggaugucgggaggaga

SEQ ID NO: 1084871 - RNA, 19 nt, Artificial Sequence
  Description of Artificial Sequence: Synthetic oligonucleotide
  Antisense strand to SEQ ID NO: 1084870
ucuccucccgacaucccgc

SEQ ID NO: 1084872 - RNA, 19 nt, Artificial Sequence
  Description of Artificial Sequence: Synthetic oligonucleotide
  Sense strand starting at position 2493 of SEQ ID NO: 915505
ugaggagaaugagauaaau

SEQ ID NO: 1084873 - RNA, 19 nt, Artificial Sequence
  Description of Artificial Sequence: Synthetic oligonucleotide
  Antisense strand to SEQ ID NO: 1084872
auuuaucucauucuccuca

SEQ ID NO: 1084874 - RNA, 19 nt, Artificial Sequence
  Description of Artificial Sequence: Synthetic oligonucleotide
  Sense strand starting at position 2535 of SEQ ID NO: 915505
agagucuaagauugagcua

SEQ ID NO: 1084875 - RNA, 19 nt, Artificial Sequence
  Description of Artificial Sequence: Synthetic oligonucleotide
  Antisense strand to SEQ ID NO: 1084874
uagcucaaucuuagacucu

SEQ ID NO: 1084876 - RNA, 19 nt, Artificial Sequence
  Description of Artificial Sequence: Synthetic oligonucleotide
  Sense strand starting at position 2538 of SEQ ID NO: 915505
gucuaagauugagcuaaau

SEQ ID NO: 1084877 - RNA, 19 nt, Artificial Sequence
  Description of Artificial Sequence: Synthetic oligonucleotide
  Antisense strand to SEQ ID NO: 1084876
auuuagcucaaucuuagac

SEQ ID NO: 1084878 - RNA, 19 nt, Artificial Sequence
  Description of Artificial Sequence: Synthetic oligonucleotide
  Sense strand starting at position 2683 of SEQ ID NO: 915505
aguacuuuguauccaggga

SEQ ID NO: 1084879 - RNA, 19 nt, Artificial Sequence
  Description of Artificial Sequence: Synthetic oligonucleotide
  Antisense strand to SEQ ID NO: 1084878
ucccuggauacaaaguacu

SEQ ID NO: 1084880 - RNA, 19 nt, Artificial Sequence
  Description of Artificial Sequence: Synthetic oligonucleotide
  Sense strand starting at position 2684 of SEQ ID NO: 915505
guacuuuguauccagggau

SEQ ID NO: 1084881 - RNA, 19 nt, Artificial Sequence
  Description of Artificial Sequence: Synthetic oligonucleotide
  Antisense strand to SEQ ID NO: 1084880
aucccuggauacaaaguac

SEQ ID NO: 1084882 - RNA, 19 nt, Artificial Sequence
  Description of Artificial Sequence: Synthetic oligonucleotide
  Sense strand starting at position 2687 of SEQ ID NO: 915505
cuuuguauccagggaucuc

SEQ ID NO: 1084883 - RNA, 19 nt, Artificial Sequence
  Description of Artificial Sequence: Synthetic oligonucleotide
  Antisense strand to SEQ ID NO: 1084882
gagaucccuggauacaaag

SEQ ID NO: 1084884 - RNA, 19 nt, Artificial Sequence
  Description of Artificial Sequence: Synthetic oligonucleotide
  Sense strand starting at position 2703 of SEQ ID NO: 915505
cucaaagaacuuuacgcau

SEQ ID NO: 1084885 - RNA, 19 nt, Artificial Sequence
  Description of Artificial Sequence: Synthetic oligonucleotide
  Antisense strand to SEQ ID NO: 1084884
augcguaaaguucuuugag

SEQ ID NO: 1084886 - RNA, 19 nt, Artificial Sequence
  Description of Artificial Sequence: Synthetic oligonucleotide
  Sense strand starting at position 2783 of SEQ ID NO: 915505
gggauaaaugucugaguua

SEQ ID NO: 1084887 - RNA, 19 nt, Artificial Sequence
  Description of Artificial Sequence: Synthetic oligonucleotide
  Antisense strand to SEQ ID NO: 1084886
uaacucagacauuuauccc

SEQ ID NO: 1084888 - RNA, 19 nt, Artificial Sequence
  Description of Artificial Sequence: Synthetic oligonucleotide
  Sense strand starting at position 3115 of SEQ ID NO: 915505
ccacguucugcggagagaa

SEQ ID NO: 1084889 - RNA, 19 nt, Artificial Sequence
  Description of Artificial Sequence: Synthetic oligonucleotide
  Antisense strand to SEQ ID NO: 1084888
uucucuccgcagaacgugg

SEQ ID NO: 1084890 - RNA, 19 nt, Artificial Sequence
  Description of Artificial Sequence: Synthetic oligonucleotide
  Sense strand starting at position 3215 of SEQ ID NO: 915505
uagcaaugcgcguccgagu

SEQ ID NO: 1084891 - RNA, 19 nt, Artificial Sequence
  Description of Artificial Sequence: Synthetic oligonucleotide
  Antisense strand to SEQ ID NO: 1084890
acucggacgcgcauugcua

SEQ ID NO: 1084892 - RNA, 19 nt, Artificial Sequence
  Description of Artificial Sequence: Synthetic oligonucleotide
  Sense strand starting at position 3299 of SEQ ID NO: 915505
gagcgagaaccugauuggu

SEQ ID NO: 1084893 - RNA, 19 nt, Artificial Sequence
  Description of Artificial Sequence: Synthetic oligonucleotide
  Antisense strand to SEQ ID NO: 1084892
accaaucagguucucgcuc

SEQ ID NO: 1084894 - RNA, 19 nt, Artificial Sequence
  Description of Artificial Sequence: Synthetic oligonucleotide
  Sense strand starting at position 3431 of SEQ ID NO: 915505
aggacugugcauuaugaca

SEQ ID NO: 1084895 - RNA, 19 nt, Artificial Sequence
  Description of Artificial Sequence: Synthetic oligonucleotide
  Antisense strand to SEQ ID NO: 1084894
ugucauaaugcacaguccu

SEQ ID NO: 1084896 - RNA, 19 nt, Artificial Sequence
  Description of Artificial Sequence: Synthetic oligonucleotide
  Sense strand starting at position 3439 of SEQ ID NO: 915505
gcauuaugacaucaccugu

SEQ ID NO: 1084897 - RNA, 19 nt, Artificial Sequence
  Description of Artificial Sequence: Synthetic oligonucleotide
  Antisense strand to SEQ ID NO: 1084896
acaggugaugucauaaugc

SEQ ID NO: 1084898 - RNA, 19 nt, Artificial Sequence
  Description of Artificial Sequence: Synthetic oligonucleotide
  Sense strand starting at position 3501 of SEQ ID NO: 915505
uuuaaaggucuccagcgua

SEQ ID NO: 1084899 - RNA, 19 nt, Artificial Sequence
  Description of Artificial Sequence: Synthetic oligonucleotide
  Antisense strand to SEQ ID NO: 1084898
uacgcuggagaccuuuaaa

SEQ ID NO: 1084900 - RNA, 19 nt, Artificial Sequence
  Description of Artificial Sequence: Synthetic oligonucleotide
  Sense strand starting at position 3651 of SEQ ID NO: 915505
gggauucagggugguguua

SEQ ID NO: 1084901 - RNA, 19 nt, Artificial Sequence
  Description of Artificial Sequence: Synthetic oligonucleotide
  Antisense strand to SEQ ID NO: 1084900
uaacaccacccugaauccc

SEQ ID NO: 1084902 - RNA, 19 nt, Artificial Sequence
  Description of Artificial Sequence: Synthetic oligonucleotide
  Sense strand starting at position 3703 of SEQ ID NO: 915505
gcaaguuuagcauaucaaa

SEQ ID NO: 1084903 - RNA, 19 nt, Artificial Sequence
  Description of Artificial Sequence: Synthetic oligonucleotide
  Antisense strand to SEQ ID NO: 1084902
uuugauaugcuaaacuugc

SEQ ID NO: 1084904 - RNA, 19 nt, Artificial Sequence
  Description of Artificial Sequence: Synthetic oligonucleotide
  Sense strand starting at position 3728 of SEQ ID NO: 915505
agaccaauuugugcgguua

SEQ ID NO: 1084905 - RNA, 19 nt, Artificial Sequence
  Description of Artificial Sequence: Synthetic oligonucleotide
  Antisense strand to SEQ ID NO: 1084904
uaaccgcacaaauuggucu

SEQ ID NO: 1084906 - RNA, 19 nt, Artificial Sequence
  Description of Artificial Sequence: Synthetic oligonucleotide
  Sense strand starting at position 3729 of SEQ ID NO: 915505
gaccaauuugugcgguuaa

SEQ ID NO: 1084907 - RNA, 19 nt, Artificial Sequence
  Description of Artificial Sequence: Synthetic oligonucleotide
  Antisense strand to SEQ ID NO: 1084906
uuaaccgcacaaauugguc

SEQ ID NO: 1084908 - RNA, 19 nt, Artificial Sequence
  Description of Artificial Sequence: Synthetic oligonucleotide
  Sense strand starting at position 3905 of SEQ ID NO: 915505
aaguuauguaguuggguaa

SEQ ID NO: 1084909 - RNA, 19 nt, Artificial Sequence
  Description of Artificial Sequence: Synthetic oligonucleotide
  Antisense strand to SEQ ID NO: 1084908
uuacccaacuacauaacuu

SEQ ID NO: 1084910 - RNA, 19 nt, Artificial Sequence
  Description of Artificial Sequence: Synthetic oligonucleotide
  Sense strand starting at position 3906 of SEQ ID NO: 915505
aguuauguaguuggguaaa

SEQ ID NO: 1084911 - RNA, 19 nt, Artificial Sequence
  Description of Artificial Sequence: Synthetic oligonucleotide
  Antisense strand to SEQ ID NO: 1084910
uuuacccaacuacauaacu

SEQ ID NO: 1084912 - RNA, 19 nt, Artificial Sequence
  Description of Artificial Sequence: Synthetic oligonucleotide
  Sense strand starting at position 3909 of SEQ ID NO: 915505
uauguaguuggguaaaggu

SEQ ID NO: 1084913 - RNA, 19 nt, Artificial Sequence
  Description of Artificial Sequence: Synthetic oligonucleotide
  Antisense strand to SEQ ID NO: 1084912
accuuuacccaacuacaua

SEQ ID NO: 1084914 - RNA, 19 nt, Artificial Sequence
  Description of Artificial Sequence: Synthetic oligonucleotide
  Sense strand starting at position 3919 of SEQ ID NO: 915505
gguaaagguguugaucuau

SEQ ID NO: 1084915 - RNA, 19 nt, Artificial Sequence
  Description of Artificial Sequence: Synthetic oligonucleotide
  Antisense strand to SEQ ID NO: 1084914
auagaucaacaccuuuacc

SEQ ID NO: 1084916 - RNA, 19 nt, Artificial Sequence
  Description of Artificial Sequence: Synthetic oligonucleotide
  Sense strand starting at position 3930 of SEQ ID NO: 915505
ugaucuauuuagccagugu

SEQ ID NO: 1084917 - RNA, 19 nt, Artificial Sequence
  Description of Artificial Sequence: Synthetic oligonucleotide
  Antisense strand to SEQ ID NO: 1084916
acacuggcuaaauagauca

SEQ ID NO: 1084918 - RNA, 19 nt, Artificial Sequence
  Description of Artificial Sequence: Synthetic oligonucleotide
  Sense strand starting at position 3934 of SEQ ID NO: 915505
cuauuuagccaguguuagc

SEQ ID NO: 1084919 - RNA, 19 nt, Artificial Sequence
  Description of Artificial Sequence: Synthetic oligonucleotide
  Antisense strand to SEQ ID NO: 1084918
gcuaacacuggcuaaauag

SEQ ID NO: 1084920 - RNA, 19 nt, Artificial Sequence
  Description of Artificial Sequence: Synthetic oligonucleotide
  Sense strand starting at position 3959 of SEQ ID NO: 915505
ucgcuugaugcuguguaga

SEQ ID NO: 1084921 - RNA, 19 nt, Artificial Sequence
  Description of Artificial Sequence: Synthetic oligonucleotide
  Antisense strand to SEQ ID NO: 1084920
ucuacacagcaucaagcga

SEQ ID NO: 1084922 - RNA, 19 nt, Artificial Sequence
  Description of Artificial Sequence: Synthetic oligonucleotide
  Sense strand starting at position 3962 of SEQ ID NO: 915505
cuugaugcuguguagacau

SEQ ID NO: 1084923 - RNA, 19 nt, Artificial Sequence
  Description of Artificial Sequence: Synthetic oligonucleotide
  Antisense strand to SEQ ID NO: 1084922
augucuacacagcaucaag

SEQ ID NO: 1084924 - RNA, 19 nt, Artificial Sequence
  Description of Artificial Sequence: Synthetic oligonucleotide
  Sense strand starting at position 39 of SEQ ID NO: 915506
agcucuuucuuguucucga

SEQ ID NO: 1084925 - RNA, 19 nt, Artificial Sequence
  Description of Artificial Sequence: Synthetic oligonucleotide
  Antisense strand to SEQ ID NO: 1084924
ucgagaacaagaaagagcu

SEQ ID NO: 1084926 - RNA, 19 nt, Artificial Sequence
  Description of Artificial Sequence: Synthetic oligonucleotide
  Sense strand starting at position 42 of SEQ ID NO: 915506
ucuuucuuguucucgagua

SEQ ID NO: 1084927 - RNA, 19 nt, Artificial Sequence
  Description of Artificial Sequence: Synthetic oligonucleotide
  Antisense strand to SEQ ID NO: 1084926
uacucgagaacaagaaaga

SEQ ID NO: 1084928 - RNA, 19 nt, Artificial Sequence
  Description of Artificial Sequence: Synthetic oligonucleotide
  Sense strand starting at position 44 of SEQ ID NO: 915506
uuucuuguucucgaguaag

SEQ ID NO: 1084929 - RNA, 19 nt, Artificial Sequence
  Description of Artificial Sequence: Synthetic oligonucleotide
  Antisense strand to SEQ ID NO: 1084928
cuuacucgagaacaagaaa

SEQ ID NO: 1084930 - RNA, 19 nt, Artificial Sequence
  Description of Artificial Sequence: Synthetic oligonucleotide
  Sense strand starting at position 79 of SEQ ID NO: 915506
guaggcauuccuggaauca

SEQ ID NO: 1084931 - RNA, 19 nt, Artificial Sequence
  Description of Artificial Sequence: Synthetic oligonucleotide
  Antisense strand to SEQ ID NO: 1084930
ugauuccaggaaugccuac

SEQ ID NO: 1084932 - RNA, 19 nt, Artificial Sequence
  Description of Artificial Sequence: Synthetic oligonucleotide
  Sense strand starting at position 140 of SEQ ID NO: 915506
uccgcuucuuacuugggaa

SEQ ID NO: 1084933 - RNA, 19 nt, Artificial Sequence
  Description of Artificial Sequence: Synthetic oligonucleotide
  Antisense strand to SEQ ID NO: 1084932
uucccaaguaagaagcgga

SEQ ID NO: 1084934 - RNA, 19 nt, Artificial Sequence
  Description of Artificial Sequence: Synthetic oligonucleotide
  Sense strand starting at position 141 of SEQ ID NO: 915506
ccgcuucuuacuugggaag

SEQ ID NO: 1084935 - RNA, 19 nt, Artificial Sequence
  Description of Artificial Sequence: Synthetic oligonucleotide
  Antisense strand to SEQ ID NO: 1084934
cuucccaaguaagaagcgg

SEQ ID NO: 1084936 - RNA, 19 nt, Artificial Sequence
  Description of Artificial Sequence: Synthetic oligonucleotide
  Sense strand starting at position 142 of SEQ ID NO: 915506
cgcuucuuacuugggaagu

SEQ ID NO: 1084937 - RNA, 19 nt, Artificial Sequence
  Description of Artificial Sequence: Synthetic oligonucleotide
  Antisense strand to SEQ ID NO: 1084936
acuucccaaguaagaagcg

SEQ ID NO: 1084938 - RNA, 19 nt, Artificial Sequence
  Description of Artificial Sequence: Synthetic oligonucleotide
  Sense strand starting at position 196 of SEQ ID NO: 915506
acaaguaguuaucaacaga

SEQ ID NO: 1084939 - RNA, 19 nt, Artificial Sequence
  Description of Artificial Sequence: Synthetic oligonucleotide
  Antisense strand to SEQ ID NO: 1084938
ucuguugauaacuacuugu

SEQ ID NO: 1084940 - RNA, 19 nt, Artificial Sequence
  Description of Artificial Sequence: Synthetic oligonucleotide
  Sense strand starting at position 220 of SEQ ID NO: 915506
aaggguauuuaagguacua

SEQ ID NO: 1084941 - RNA, 19 nt, Artificial Sequence
  Description of Artificial Sequence: Synthetic oligonucleotide
  Antisense strand to SEQ ID NO: 1084940
uaguaccuuaaauacccuu

SEQ ID NO: 1084942 - RNA, 19 nt, Artificial Sequence
  Description of Artificial Sequence: Synthetic oligonucleotide
  Sense strand starting at position 414 of SEQ ID NO: 915506
auauauaaacgugguaauc

SEQ ID NO: 1084943 - RNA, 19 nt, Artificial Sequence
  Description of Artificial Sequence: Synthetic oligonucleotide
  Antisense strand to SEQ ID NO: 1084942
gauuaccacguuuauauau

SEQ ID NO: 1084944 - RNA, 19 nt, Artificial Sequence
  Description of Artificial Sequence: Synthetic oligonucleotide
  Sense strand starting at position 444 of SEQ ID NO: 915506
ggcugcagagaguguuaga

SEQ ID NO: 1084945 - RNA, 19 nt, Artificial Sequence
  Description of Artificial Sequence: Synthetic oligonucleotide
  Antisense strand to SEQ ID NO: 1084944
ucuaacacucucugcagcc

SEQ ID NO: 1084946 - RNA, 19 nt, Artificial Sequence
  Description of Artificial Sequence: Synthetic oligonucleotide
  Sense strand starting at position 449 of SEQ ID NO: 915506
cagagaguguuagauagau

SEQ ID NO: 1084947 - RNA, 19 nt, Artificial Sequence
  Description of Artificial Sequence: Synthetic oligonucleotide
  Antisense strand to SEQ ID NO: 1084946
aucuaucuaacacucucug

SEQ ID NO: 1084948 - RNA, 19 nt, Artificial Sequence
  Description of Artificial Sequence: Synthetic oligonucleotide
  Sense strand starting at position 476 of SEQ ID NO: 915506
aaccaugagugcucugaaa

SEQ ID NO: 1084949 - RNA, 19 nt, Artificial Sequence
  Description of Artificial Sequence: Synthetic oligonucleotide
  Antisense strand to SEQ ID NO: 1084948
uuucagagcacucaugguu

SEQ ID NO: 1084950 - RNA, 19 nt, Artificial Sequence
  Description of Artificial Sequence: Synthetic oligonucleotide
  Sense strand starting at position 478 of SEQ ID NO: 915506
ccaugagugcucugaaauc

SEQ ID NO: 1084951 - RNA, 19 nt, Artificial Sequence
  Description of Artificial Sequence: Synthetic oligonucleotide
  Antisense strand to SEQ ID NO: 1084950
gauuucagagcacucaugg

SEQ ID NO: 1084952 - RNA, 19 nt, Artificial Sequence
  Description of Artificial Sequence: Synthetic oligonucleotide
  Sense strand starting at position 517 of SEQ ID NO: 915506
acugaagaaucauagauuu

SEQ ID NO: 1084953 - RNA, 19 nt, Artificial Sequence
  Description of Artificial Sequence: Synthetic oligonucleotide
  Antisense strand to SEQ ID NO: 1084952
aaaucuaugauucuucagu

SEQ ID NO: 1084954 - RNA, 19 nt, Artificial Sequence
  Description of Artificial Sequence: Synthetic oligonucleotide
  Sense strand starting at position 525 of SEQ ID NO: 915506
aucauagauuuguaaagca

SEQ ID NO: 1084955 - RNA, 19 nt, Artificial Sequence
  Description of Artificial Sequence: Synthetic oligonucleotide
  Antisense strand to SEQ ID NO: 1084954
ugcuuuacaaaucuaugau

SEQ ID NO: 1084956 - RNA, 19 nt, Artificial Sequence
  Description of Artificial Sequence: Synthetic oligonucleotide
  Sense strand starting at position 684 of SEQ ID NO: 915506
ucauaaguuuagccaagau

SEQ ID NO: 1084957 - RNA, 19 nt, Artificial Sequence
  Description of Artificial Sequence: Synthetic oligonucleotide
  Antisense strand to SEQ ID NO: 1084956
aucuuggcuaaacuuauga

SEQ ID NO: 1084958 - RNA, 19 nt, Artificial Sequence
  Description of Artificial Sequence: Synthetic oligonucleotide
  Sense strand starting at position 817 of SEQ ID NO: 915506
ggcagaaacucccuacauu

SEQ ID NO: 1084959 - RNA, 19 nt, Artificial Sequence
  Description of Artificial Sequence: Synthetic oligonucleotide
  Antisense strand to SEQ ID NO: 1084958
aauguagggaguuucugcc

SEQ ID NO: 1084960 - RNA, 19 nt, Artificial Sequence
  Description of Artificial Sequence: Synthetic oligonucleotide
  Sense strand starting at position 913 of SEQ ID NO: 915506
agccgaucagacugagauc

SEQ ID NO: 1084961 - RNA, 19 nt, Artificial Sequence
  Description of Artificial Sequence: Synthetic oligonucleotide
  Antisense strand to SEQ ID NO: 1084960
gaucucagucugaucggcu

SEQ ID NO: 1084962 - RNA, 19 nt, Artificial Sequence
  Description of Artificial Sequence: Synthetic oligonucleotide
  Sense strand starting at position 916 of SEQ ID NO: 915506
cgaucagacugagaucuaa

SEQ ID NO: 1084963 - RNA, 19 nt, Artificial Sequence
  Description of Artificial Sequence: Synthetic oligonucleotide
  Antisense strand to SEQ ID NO: 1084962
uuagaucucagucugaucg

SEQ ID NO: 1084964 - RNA, 19 nt, Artificial Sequence
  Description of Artificial Sequence: Synthetic oligonucleotide
  Sense strand starting at position 1073 of SEQ ID NO: 915506
gagcuauccuugguacggu

SEQ ID NO: 1084965 - RNA, 19 nt, Artificial Sequence
  Description of Artificial Sequence: Synthetic oligonucleotide
  Antisense strand to SEQ ID NO: 1084964
accguaccaaggauagcuc

SEQ ID NO: 1084966 - RNA, 19 nt, Artificial Sequence
  Description of Artificial Sequence: Synthetic oligonucleotide
  Sense strand starting at position 1094 of SEQ ID NO: 915506
ccauucugguuccucaaga

SEQ ID NO: 1084967 - RNA, 19 nt, Artificial Sequence
  Description of Artificial Sequence: Synthetic oligonucleotide
  Antisense strand to SEQ ID NO: 1084966
ucuugaggaaccagaaugg

SEQ ID NO: 1084968 - RNA, 19 nt, Artificial Sequence
  Description of Artificial Sequence: Synthetic oligonucleotide
  Sense strand starting at position 2187 of SEQ ID NO: 915506
gagccucaguccuucuuga

SEQ ID NO: 1084969 - RNA, 19 nt, Artificial Sequence
  Description of Artificial Sequence: Synthetic oligonucleotide
  Antisense strand to SEQ ID NO: 1084968
ucaagaaggacugaggcuc

SEQ ID NO: 1084970 - RNA, 19 nt, Artificial Sequence
  Description of Artificial Sequence: Synthetic oligonucleotide
  Sense strand starting at position 2283 of SEQ ID NO: 915506
gcgcgcacuucauuuguua

SEQ ID NO: 1084971 - RNA, 19 nt, Artificial Sequence
  Description of Artificial Sequence: Synthetic oligonucleotide
  Antisense strand to SEQ ID NO: 1084970
uaacaaaugaagugcgcgc

SEQ ID NO: 1084972 - RNA, 19 nt, Artificial Sequence
  Description of Artificial Sequence: Synthetic oligonucleotide
  Sense strand starting at position 2294 of SEQ ID NO: 915506
auuuguuacugcgugaacu

SEQ ID NO: 1084973 - RNA, 19 nt, Artificial Sequence
  Description of Artificial Sequence: Synthetic oligonucleotide
  Antisense strand to SEQ ID NO: 1084972
aguucacgcaguaacaaau

SEQ ID NO: 1084974 - RNA, 19 nt, Artificial Sequence
  Description of Artificial Sequence: Synthetic oligonucleotide
  Sense strand starting at position 2295 of SEQ ID NO: 915506
uuuguuacugcgugaacug

SEQ ID NO: 1084975 - RNA, 19 nt, Artificial Sequence
  Description of Artificial Sequence: Synthetic oligonucleotide
  Antisense strand to SEQ ID NO: 1084974
caguucacgcaguaacaaa

SEQ ID NO: 1084976 - RNA, 19 nt, Artificial Sequence
  Description of Artificial Sequence: Synthetic oligonucleotide
  Sense strand starting at position 2296 of SEQ ID NO: 915506
uuguuacugcgugaacuga

SEQ ID NO: 1084977 - RNA, 19 nt, Artificial Sequence
  Description of Artificial Sequence: Synthetic oligonucleotide
  Antisense strand to SEQ ID NO: 1084976
ucaguucacgcaguaacaa

SEQ ID NO: 1084978 - RNA, 19 nt, Artificial Sequence
  Description of Artificial Sequence: Synthetic oligonucleotide
  Sense strand starting at position 2346 of SEQ ID NO: 915506
gggcgaacucuaugacgga

SEQ ID NO: 1084979 - RNA, 19 nt, Artificial Sequence
  Description of Artificial Sequence: Synthetic oligonucleotide
  Antisense strand to SEQ ID NO: 1084978
uccgucauagaguucgccc

SEQ ID NO: 1084980 - RNA, 19 nt, Artificial Sequence
  Description of Artificial Sequence: Synthetic oligonucleotide
  Sense strand starting at position 2484 of SEQ ID NO: 915506
gcaguuucuccgggauuaa

SEQ ID NO: 1084981 - RNA, 19 nt, Artificial Sequence
  Description of Artificial Sequence: Synthetic oligonucleotide
  Antisense strand to SEQ ID NO: 1084980
uuaaucccggagaaacugc

SEQ ID NO: 1084982 - RNA, 19 nt, Artificial Sequence
  Description of Artificial Sequence: Synthetic oligonucleotide
  Sense strand starting at position 2485 of SEQ ID NO: 915506
caguuucuccgggauuaag

SEQ ID NO: 1084983 - RNA, 19 nt, Artificial Sequence
  Description of Artificial Sequence: Synthetic oligonucleotide
  Antisense strand to SEQ ID NO: 1084982
cuuaaucccggagaaacug

SEQ ID NO: 1084984 - RNA, 19 nt, Artificial Sequence
  Description of Artificial Sequence: Synthetic oligonucleotide
  Sense strand starting at position 2863 of SEQ ID NO: 915506
gcaacaacauauuagauga

SEQ ID NO: 1084985 - RNA, 19 nt, Artificial Sequence
  Description of Artificial Sequence: Synthetic oligonucleotide
  Antisense strand to SEQ ID NO: 1084984
ucaucuaauauguuguugc

SEQ ID NO: 1084986 - RNA, 19 nt, Artificial Sequence
  Description of Artificial Sequence: Synthetic oligonucleotide
  Sense strand starting at position 2885 of SEQ ID NO: 915506
guaacagaagguugucagu

SEQ ID NO: 1084987 - RNA, 19 nt, Artificial Sequence
  Description of Artificial Sequence: Synthetic oligonucleotide
  Antisense strand to SEQ ID NO: 1084986
acugacaaccuucuguuac

SEQ ID NO: 1084988 - RNA, 19 nt, Artificial Sequence
  Description of Artificial Sequence: Synthetic oligonucleotide
  Sense strand starting at position 2930 of SEQ ID NO: 915506
uuggaaucuccacggaguu

SEQ ID NO: 1084989 - RNA, 19 nt, Artificial Sequence
  Description of Artificial Sequence: Synthetic oligonucleotide
  Antisense strand to SEQ ID NO: 1084988
aacuccguggagauuccaa

SEQ ID NO: 1084990 - RNA, 19 nt, Artificial Sequence
  Description of Artificial Sequence: Synthetic oligonucleotide
  Sense strand starting at position 3334 of SEQ ID NO: 915506
cuugccuuuccagaugaca

SEQ ID NO: 1084991 - RNA, 19 nt, Artificial Sequence
  Description of Artificial Sequence: Synthetic oligonucleotide
  Antisense strand to SEQ ID NO: 1084990
ugucaucuggaaaggcaag

SEQ ID NO: 1084992 - RNA, 19 nt, Artificial Sequence
  Description of Artificial Sequence: Synthetic oligonucleotide
  Sense strand starting at position 3665 of SEQ ID NO: 915506
uaugauauuguugguagga

SEQ ID NO: 1084993 - RNA, 19 nt, Artificial Sequence
  Description of Artificial Sequence: Synthetic oligonucleotide
  Antisense strand to SEQ ID NO: 1084992
uccuaccaacaauaucaua

SEQ ID NO: 1084994 - RNA, 19 nt, Artificial Sequence
  Description of Artificial Sequence: Synthetic oligonucleotide
  Sense strand starting at position 3666 of SEQ ID NO: 915506
augauauuguugguaggaa

SEQ ID NO: 1084995 - RNA, 19 nt, Artificial Sequence
  Description of Artificial Sequence: Synthetic oligonucleotide
  Antisense strand to SEQ ID NO: 1084994
uuccuaccaacaauaucau

SEQ ID NO: 1084996 - RNA, 19 nt, Artificial Sequence
  Description of Artificial Sequence: Synthetic oligonucleotide
  Sense strand starting at position 3689 of SEQ ID NO: 915506
acauuagugcaacagaauc

SEQ ID NO: 1084997 - RNA, 19 nt, Artificial Sequence
  Description of Artificial Sequence: Synthetic oligonucleotide
  Antisense strand to SEQ ID NO: 1084996
gauucuguugcacuaaugu

SEQ ID NO: 1084998 - RNA, 19 nt, Artificial Sequence
  Description of Artificial Sequence: Synthetic oligonucleotide
  Sense strand starting at position 3761 of SEQ ID NO: 915506
ugauaaauggcguagaauc

SEQ ID NO: 1084999 - RNA, 19 nt, Artificial Sequence
  Description of Artificial Sequence: Synthetic oligonucleotide
  Antisense strand to SEQ ID NO: 1084998
gauucuacgccauuuauca

SEQ ID NO: 1085000 - RNA, 19 nt, Artificial Sequence
  Description of Artificial Sequence: Synthetic oligonucleotide
  Sense strand starting at position 3769 of SEQ ID NO: 915506
ggcguagaaucuuaaauuu

SEQ ID NO: 1085001 - RNA, 19 nt, Artificial Sequence
  Description of Artificial Sequence: Synthetic oligonucleotide
  Antisense strand to SEQ ID NO: 1085000
aaauuuaagauucuacgcc

SEQ ID NO: 1085002 - RNA, 19 nt, Artificial Sequence
  Description of Artificial Sequence: Synthetic oligonucleotide
  Sense strand starting at position 3816 of SEQ ID NO: 915506
aggagacuauaaggguauu

SEQ ID NO: 1085003 - RNA, 19 nt, Artificial Sequence
  Description of Artificial Sequence: Synthetic oligonucleotide
  Antisense strand to SEQ ID NO: 1085002
aauacccuuauagucuccu

SEQ ID NO: 1085004 - RNA, 19 nt, Artificial Sequence
  Description of Artificial Sequence: Synthetic oligonucleotide
  Sense strand starting at position 23 of SEQ ID NO: 915507
cacuguggauagucauuaa

SEQ ID NO: 1085005 - RNA, 19 nt, Artificial Sequence
  Description of Artificial Sequence: Synthetic oligonucleotide
  Antisense strand to SEQ ID NO: 1085004
uuaaugacuauccacagug

SEQ ID NO: 1085006 - RNA, 19 nt, Artificial Sequence
  Description of Artificial Sequence: Synthetic oligonucleotide
  Sense strand starting at position 107 of SEQ ID NO: 915507
ucccuuucccagcagaguu

SEQ ID NO: 1085007 - RNA, 19 nt, Artificial Sequence
  Description of Artificial Sequence: Synthetic oligonucleotide
  Antisense strand to SEQ ID NO: 1085006
aacucugcugggaaaggga

SEQ ID NO: 1085008 - RNA, 19 nt, Artificial Sequence
  Description of Artificial Sequence: Synthetic oligonucleotide
  Sense strand starting at position 190 of SEQ ID NO: 915507
uguugaagggaagguuaaa

SEQ ID NO: 1085009 - RNA, 19 nt, Artificial Sequence
  Description of Artificial Sequence: Synthetic oligonucleotide
  Antisense strand to SEQ ID NO: 1085008
uuuaaccuucccuucaaca

SEQ ID NO: 1085010 - RNA, 19 nt, Artificial Sequence
  Description of Artificial Sequence: Synthetic oligonucleotide
  Sense strand starting at position 575 of SEQ ID NO: 915507
ugcagaacucacugggcaa

SEQ ID NO: 1085011 - RNA, 19 nt, Artificial Sequence
  Description of Artificial Sequence: Synthetic oligonucleotide
  Antisense strand to SEQ ID NO: 1085010
uugcccagugaguucugca

SEQ ID NO: 1085012 - RNA, 19 nt, Artificial Sequence
  Description of Artificial Sequence: Synthetic oligonucleotide
  Sense strand starting at position 605 of SEQ ID NO: 915507
ugauaccaaagucgugaaa

SEQ ID NO: 1085013 - RNA, 19 nt, Artificial Sequence
  Description of Artificial Sequence: Synthetic oligonucleotide
  Antisense strand to SEQ ID NO: 1085012
uuucacgacuuugguauca

SEQ ID NO: 1085014 - RNA, 19 nt, Artificial Sequence
  Description of Artificial Sequence: Synthetic oligonucleotide
  Sense strand starting at position 608 of SEQ ID NO: 915507
uaccaaagucgugaaagua

SEQ ID NO: 1085015 - RNA, 19 nt, Artificial Sequence
  Description of Artificial Sequence: Synthetic oligonucleotide
  Antisense strand to SEQ ID NO: 1085014
uacuuucacgacuuuggua

SEQ ID NO: 1085016 - RNA, 19 nt, Artificial Sequence
  Description of Artificial Sequence: Synthetic oligonucleotide
  Sense strand starting at position 616 of SEQ ID NO: 915507
ucgugaaaguaucucaucu

SEQ ID NO: 1085017 - RNA, 19 nt, Artificial Sequence
  Description of Artificial Sequence: Synthetic oligonucleotide
  Antisense strand to SEQ ID NO: 1085016
agaugagauacuuucacga

SEQ ID NO: 1085018 - RNA, 19 nt, Artificial Sequence
  Description of Artificial Sequence: Synthetic oligonucleotide
  Sense strand starting at position 671 of SEQ ID NO: 915507
ugcagaucuugcucagaau

SEQ ID NO: 1085019 - RNA, 19 nt, Artificial Sequence
  Description of Artificial Sequence: Synthetic oligonucleotide
  Antisense strand to SEQ ID NO: 1085018
auucugagcaagaucugca

SEQ ID NO: 1085020 - RNA, 19 nt, Artificial Sequence
  Description of Artificial Sequence: Synthetic oligonucleotide
  Sense strand starting at position 672 of SEQ ID NO: 915507
gcagaucuugcucagaaua

SEQ ID NO: 1085021 - RNA, 19 nt, Artificial Sequence
  Description of Artificial Sequence: Synthetic oligonucleotide
  Antisense strand to SEQ ID NO: 1085020
uauucugagcaagaucugc

SEQ ID NO: 1085022 - RNA, 19 nt, Artificial Sequence
  Description of Artificial Sequence: Synthetic oligonucleotide
  Sense strand starting at position 748 of SEQ ID NO: 915507
ucuuucuuguucucgagua

SEQ ID NO: 1085023 - RNA, 19 nt, Artificial Sequence
  Description of Artificial Sequence: Synthetic oligonucleotide
  Antisense strand to SEQ ID NO: 1085022
uacucgagaacaagaaaga

SEQ ID NO: 1085024 - RNA, 19 nt, Artificial Sequence
  Description of Artificial Sequence: Synthetic oligonucleotide
  Sense strand starting at position 750 of SEQ ID NO: 915507
uuucuuguucucgaguaag

SEQ ID NO: 1085025 - RNA, 19 nt, Artificial Sequence
  Description of Artificial Sequence: Synthetic oligonucleotide
  Antisense strand to SEQ ID NO: 1085024
cuuacucgagaacaagaaa

SEQ ID NO: 1085026 - RNA, 19 nt, Artificial Sequence
  Description of Artificial Sequence: Synthetic oligonucleotide
  Sense strand starting at position 785 of SEQ ID NO: 915507
guaggcauuccuggaauca

SEQ ID NO: 1085027 - RNA, 19 nt, Artificial Sequence
  Description of Artificial Sequence: Synthetic oligonucleotide
  Antisense strand to SEQ ID NO: 1085026
ugauuccaggaaugccuac

SEQ ID NO: 1085028 - RNA, 19 nt, Artificial Sequence
  Description of Artificial Sequence: Synthetic oligonucleotide
  Sense strand starting at position 846 of SEQ ID NO: 915507
uccgcuucuuacuugggaa

SEQ ID NO: 1085029 - RNA, 19 nt, Artificial Sequence
  Description of Artificial Sequence: Synthetic oligonucleotide
  Antisense strand to SEQ ID NO: 1085028
uucccaaguaagaagcgga

SEQ ID NO: 1085030 - RNA, 19 nt, Artificial Sequence
  Description of Artificial Sequence: Synthetic oligonucleotide
  Sense strand starting at position 847 of SEQ ID NO: 915507
ccgcuucuuacuugggaag

SEQ ID NO: 1085031 - RNA, 19 nt, Artificial Sequence
  Description of Artificial Sequence: Synthetic oligonucleotide
  Antisense strand to SEQ ID NO: 1085030
cuucccaaguaagaagcgg

SEQ ID NO: 1085032 - RNA, 19 nt, Artificial Sequence
  Description of Artificial Sequence: Synthetic oligonucleotide
  Sense strand starting at position 848 of SEQ ID NO: 915507
cgcuucuuacuugggaagu

SEQ ID NO: 1085033 - RNA, 19 nt, Artificial Sequence
  Description of Artificial Sequence: Synthetic oligonucleotide
  Antisense strand to SEQ ID NO: 1085032
acuucccaaguaagaagcg

SEQ ID NO: 1085034 - RNA, 19 nt, Artificial Sequence
  Description of Artificial Sequence: Synthetic oligonucleotide
  Sense strand starting at position 902 of SEQ ID NO: 915507
acaaguaguuaucaacaga

SEQ ID NO: 1085035 - RNA, 19 nt, Artificial Sequence
  Description of Artificial Sequence: Synthetic oligonucleotide
  Antisense strand to SEQ ID NO: 1085034
ucuguugauaacuacuugu

SEQ ID NO: 1085036 - RNA, 19 nt, Artificial Sequence
  Description of Artificial Sequence: Synthetic oligonucleotide
  Sense strand starting at position 926 of SEQ ID NO: 915507
aaggguauuuaagguacua

SEQ ID NO: 1085037 - RNA, 19 nt, Artificial Sequence
  Description of Artificial Sequence: Synthetic oligonucleotide
  Antisense strand to SEQ ID NO: 1085036
uaguaccuuaaauacccuu

SEQ ID NO: 1085038 - RNA, 19 nt, Artificial Sequence
  Description of Artificial Sequence: Synthetic oligonucleotide
  Sense strand starting at position 1120 of SEQ ID NO: 915507
auauauaaacgugguaauc

SEQ ID NO: 1085039 - RNA, 19 nt, Artificial Sequence
  Description of Artificial Sequence: Synthetic oligonucleotide
  Antisense strand to SEQ ID NO: 1085038
gauuaccacguuuauauau

SEQ ID NO: 1085040 - RNA, 19 nt, Artificial Sequence
  Description of Artificial Sequence: Synthetic oligonucleotide
  Sense strand starting at position 1150 of SEQ ID NO: 915507
ggcugcagagaguguuaga

SEQ ID NO: 1085041 - RNA, 19 nt, Artificial Sequence
  Description of Artificial Sequence: Synthetic oligonucleotide
  Antisense strand to SEQ ID NO: 1085040
ucuaacacucucugcagcc

SEQ ID NO: 1085042 - RNA, 19 nt, Artificial Sequence
  Description of Artificial Sequence: Synthetic oligonucleotide
  Sense strand starting at position 1155 of SEQ ID NO: 915507
cagagaguguuagauagau

SEQ ID NO: 1085043 - RNA, 19 nt, Artificial Sequence
  Description of Artificial Sequence: Synthetic oligonucleotide
  Antisense strand to SEQ ID NO: 1085042
aucuaucuaacacucucug

SEQ ID NO: 1085044 - RNA, 19 nt, Artificial Sequence
  Description of Artificial Sequence: Synthetic oligonucleotide
  Sense strand starting at position 1182 of SEQ ID NO: 915507
aaccaugagugcucugaaa

SEQ ID NO: 1085045 - RNA, 19 nt, Artificial Sequence
  Description of Artificial Sequence: Synthetic oligonucleotide
  Antisense strand to SEQ ID NO: 1085044
uuucagagcacucaugguu

SEQ ID NO: 1085046 - RNA, 19 nt, Artificial Sequence
  Description of Artificial Sequence: Synthetic oligonucleotide
  Sense strand starting at position 1184 of SEQ ID NO: 915507
ccaugagugcucugaaauc

SEQ ID NO: 1085047 - RNA, 19 nt, Artificial Sequence
  Description of Artificial Sequence: Synthetic oligonucleotide
  Antisense strand to SEQ ID NO: 1085046
gauuucagagcacucaugg

SEQ ID NO: 1085048 - RNA, 19 nt, Artificial Sequence
  Description of Artificial Sequence: Synthetic oligonucleotide
  Sense strand starting at position 1223 of SEQ ID NO: 915507
acugaagaaucauagauuu

SEQ ID NO: 1085049 - RNA, 19 nt, Artificial Sequence
  Description of Artificial Sequence: Synthetic oligonucleotide
  Antisense strand to SEQ ID NO: 1085048
aaaucuaugauucuucagu

SEQ ID NO: 1085050 - RNA, 19 nt, Artificial Sequence
  Description of Artificial Sequence: Synthetic oligonucleotide
  Sense strand starting at position 1231 of SEQ ID NO: 915507
aucauagauuuguaaagca

SEQ ID NO: 1085051 - RNA, 19 nt, Artificial Sequence
  Description of Artificial Sequence: Synthetic oligonucleotide
  Antisense strand to SEQ ID NO: 1085050
ugcuuuacaaaucuaugau

SEQ ID NO: 1085052 - RNA, 19 nt, Artificial Sequence
  Description of Artificial Sequence: Synthetic oligonucleotide
  Sense strand starting at position 1390 of SEQ ID NO: 915507
ucauaaguuuagccaagau

SEQ ID NO: 1085053 - RNA, 19 nt, Artificial Sequence
  Description of Artificial Sequence: Synthetic oligonucleotide
  Antisense strand to SEQ ID NO: 1085052
aucuuggcuaaacuuauga

SEQ ID NO: 1085054 - RNA, 19 nt, Artificial Sequence
  Description of Artificial Sequence: Synthetic oligonucleotide
  Sense strand starting at position 1523 of SEQ ID NO: 915507
ggcagaaacucccuacauu

SEQ ID NO: 1085055 - RNA, 19 nt, Artificial Sequence
  Description of Artificial Sequence: Synthetic oligonucleotide
  Antisense strand to SEQ ID NO: 1085054
aauguagggaguuucugcc

SEQ ID NO: 1085056 - RNA, 19 nt, Artificial Sequence
  Description of Artificial Sequence: Synthetic oligonucleotide
  Sense strand starting at position 1619 of SEQ ID NO: 915507
agccgaucagacugagauc

SEQ ID NO: 1085057 - RNA, 19 nt, Artificial Sequence
  Description of Artificial Sequence: Synthetic oligonucleotide
  Antisense strand to SEQ ID NO: 1085056
gaucucagucugaucggcu

SEQ ID NO: 1085058 - RNA, 19 nt, Artificial Sequence
  Description of Artificial Sequence: Synthetic oligonucleotide
  Sense strand starting at position 1622 of SEQ ID NO: 915507
cgaucagacugagaucuaa

SEQ ID NO: 1085059 - RNA, 19 nt, Artificial Sequence
  Description of Artificial Sequence: Synthetic oligonucleotide
  Antisense strand to SEQ ID NO: 1085058
uuagaucucagucugaucg

SEQ ID NO: 1085060 - RNA, 19 nt, Artificial Sequence
  Description of Artificial Sequence: Synthetic oligonucleotide
  Sense strand starting at position 1779 of SEQ ID NO: 915507
gagcuauccuugguacggu

SEQ ID NO: 1085061 - RNA, 19 nt, Artificial Sequence
  Description of Artificial Sequence: Synthetic oligonucleotide
  Antisense strand to SEQ ID NO: 1085060
accguaccaaggauagcuc

SEQ ID NO: 1085062 - RNA, 19 nt, Artificial Sequence
  Description of Artificial Sequence: Synthetic oligonucleotide
  Sense strand starting at position 1800 of SEQ ID NO: 915507
ccauucugguuccucaaga

SEQ ID NO: 1085063 - RNA, 19 nt, Artificial Sequence
  Description of Artificial Sequence: Synthetic oligonucleotide
  Antisense strand to SEQ ID NO: 1085062
ucuugaggaaccagaaugg

SEQ ID NO: 1085064 - RNA, 19 nt, Artificial Sequence
  Description of Artificial Sequence: Synthetic oligonucleotide
  Sense strand starting at position 2893 of SEQ ID NO: 915507
gagccucaguccuucuuga

SEQ ID NO: 1085065 - RNA, 19 nt, Artificial Sequence
  Description of Artificial Sequence: Synthetic oligonucleotide
  Antisense strand to SEQ ID NO: 1085064
ucaagaaggacugaggcuc

SEQ ID NO: 1085066 - RNA, 19 nt, Artificial Sequence
  Description of Artificial Sequence: Synthetic oligonucleotide
  Sense strand starting at position 2989 of SEQ ID NO: 915507
gcgcgcacuucauuuguua

SEQ ID NO: 1085067 - RNA, 19 nt, Artificial Sequence
  Description of Artificial Sequence: Synthetic oligonucleotide
  Antisense strand to SEQ ID NO: 1085066
uaacaaaugaagugcgcgc

SEQ ID NO: 1085068 - RNA, 19 nt, Artificial Sequence
  Description of Artificial Sequence: Synthetic oligonucleotide
  Sense strand starting at position 3000 of SEQ ID NO: 915507
auuuguuacugcgugaacu

SEQ ID NO: 1085069 - RNA, 19 nt, Artificial Sequence
  Description of Artificial Sequence: Synthetic oligonucleotide
  Antisense strand to SEQ ID NO: 1085068
aguucacgcaguaacaaau

SEQ ID NO: 1085070 - RNA, 19 nt, Artificial Sequence
  Description of Artificial Sequence: Synthetic oligonucleotide
  Sense strand starting at position 3002 of SEQ ID NO: 915507
uuguuacugcgugaacuga

SEQ ID NO: 1085071 - RNA, 19 nt, Artificial Sequence
  Description of Artificial Sequence: Synthetic oligonucleotide
  Antisense strand to SEQ ID NO: 1085070
ucaguucacgcaguaacaa

SEQ ID NO: 1085072 - RNA, 19 nt, Artificial Sequence
  Description of Artificial Sequence: Synthetic oligonucleotide
  Sense strand starting at position 3052 of SEQ ID NO: 915507
gggcgaacucuaugacgga

SEQ ID NO: 1085073 - RNA, 19 nt, Artificial Sequence
  Description of Artificial Sequence: Synthetic oligonucleotide
  Antisense strand to SEQ ID NO: 1085072
uccgucauagaguucgccc

SEQ ID NO: 1085074 - RNA, 19 nt, Artificial Sequence
  Description of Artificial Sequence: Synthetic oligonucleotide
  Sense strand starting at position 3190 of SEQ ID NO: 915507
gcaguuucuccgggauuaa

SEQ ID NO: 1085075 - RNA, 19 nt, Artificial Sequence
  Description of Artificial Sequence: Synthetic oligonucleotide
  Antisense strand to SEQ ID NO: 1085074
uuaaucccggagaaacugc

SEQ ID NO: 1085076 - RNA, 19 nt, Artificial Sequence
  Description of Artificial Sequence: Synthetic oligonucleotide
  Sense strand starting at position 3191 of SEQ ID NO: 915507
caguuucuccgggauuaag

SEQ ID NO: 1085077 - RNA, 19 nt, Artificial Sequence
  Description of Artificial Sequence: Synthetic oligonucleotide
  Antisense strand to SEQ ID NO: 1085076
cuuaaucccggagaaacug

SEQ ID NO: 1085078 - RNA, 19 nt, Artificial Sequence
  Description of Artificial Sequence: Synthetic oligonucleotide
  Sense strand starting at position 3569 of SEQ ID NO: 915507
gcaacaacauauuagauga

SEQ ID NO: 1085079 - RNA, 19 nt, Artificial Sequence
  Description of Artificial Sequence: Synthetic oligonucleotide
  Antisense strand to SEQ ID NO: 1085078
ucaucuaauauguuguugc

SEQ ID NO: 1085080 - RNA, 19 nt, Artificial Sequence
  Description of Artificial Sequence: Synthetic oligonucleotide
  Sense strand starting at position 3591 of SEQ ID NO: 915507
guaacagaagguugucagu

SEQ ID NO: 1085081 - RNA, 19 nt, Artificial Sequence
  Description of Artificial Sequence: Synthetic oligonucleotide
  Antisense strand to SEQ ID NO: 1085080
acugacaaccuucuguuac

SEQ ID NO: 1085082 - RNA, 19 nt, Artificial Sequence
  Description of Artificial Sequence: Synthetic oligonucleotide
  Sense strand starting at position 3636 of SEQ ID NO: 915507
uuggaaucuccacggaguu

SEQ ID NO: 1085083 - RNA, 19 nt, Artificial Sequence
  Description of Artificial Sequence: Synthetic oligonucleotide
  Antisense strand to SEQ ID NO: 1085082
aacuccguggagauuccaa

SEQ ID NO: 1085084 - RNA, 19 nt, Artificial Sequence
  Description of Artificial Sequence: Synthetic oligonucleotide
  Sense strand starting at position 36 of SEQ ID NO: 915508
auauauaaacgugguaauc

SEQ ID NO: 1085085 - RNA, 19 nt, Artificial Sequence
  Description of Artificial Sequence: Synthetic oligonucleotide
  Antisense strand to SEQ ID NO: 1085084
gauuaccacguuuauauau

SEQ ID NO: 1085086 - RNA, 19 nt, Artificial Sequence
  Description of Artificial Sequence: Synthetic oligonucleotide
  Sense strand starting at position 66 of SEQ ID NO: 915508
ggcugcagagaguguuaga

SEQ ID NO: 1085087 - RNA, 19 nt, Artificial Sequence
  Description of Artificial Sequence: Synthetic oligonucleotide
  Antisense strand to SEQ ID NO: 1085086
ucuaacacucucugcagcc

SEQ ID NO: 1085088 - RNA, 19 nt, Artificial Sequence
  Description of Artificial Sequence: Synthetic oligonucleotide
  Sense strand starting at position 71 of SEQ ID NO: 915508
cagagaguguuagauagau

SEQ ID NO: 1085089 - RNA, 19 nt, Artificial Sequence
  Description of Artificial Sequence: Synthetic oligonucleotide
  Antisense strand to SEQ ID NO: 1085088
aucuaucuaacacucucug

SEQ ID NO: 1085090 - RNA, 19 nt, Artificial Sequence
  Description of Artificial Sequence: Synthetic oligonucleotide
  Sense strand starting at position 98 of SEQ ID NO: 915508
aaccaugagugcucugaaa

SEQ ID NO: 1085091 - RNA, 19 nt, Artificial Sequence
  Description of Artificial Sequence: Synthetic oligonucleotide
  Antisense strand to SEQ ID NO: 1085090
uuucagagcacucaugguu
